United States Patent Application Publication US 2020/0109395 A1 - sequence listing, part 15

SEQ ID NO: 56661 - DNA, 3129 bp, Klebsiella pneumoniae
atgtttgagtatggagttcctgaaggagaccatatagagcttcctgatgatctcgatttgcagatgcagtttccattagctgttggtactgtcggcgactttgcgtccgaagtggtggctaagaccatcggcaattcgattgaagcacaatcccaaaccccactggatgaggttattttttcagctcaagtccttcaagcttttgacgattccctgcttaacaaagaactctccttcaatcttcgcatacttgcagctgctggtttttatcttggcgatgtacccggaaatgcttcagtccaattatctaaactgagccaactagattttcctaagcacgatactttagctatagcagttaaaactgcgatggatcggccttgggagcataccaacgagacattagagtcttcacgtgcaaaagatattttggatgttttgtgccaacacttcaggaatggccggaatggccggcagaaagcctatgatgcaattaaatcattgcgcgaatgggcctatagccatgcgtctgcacatgacctacttatggccgatttgctcggagcgattagtgccactcgcatcgctaattctgcttggacattacttccacgctatagcaacctcccgcaagaaaagtgggagacatatttatcgcgttctatgtcaattaaggaaatgtggccatctcagcgcttgctaggagaggctggattgtatagagggatatcaggagtagttcagatgccgacgagcgccgggaaatctagagctaccgagcttattattaggtcggcatttctttctgctcgtacgaaattggccttagttatcgctcccttccgggcactatgccaggagatagcaaacgatcttgaaaaggcattcaaggatgatggctatgacgtcaatcaacccagtgacgcgttgcaaccagatgtcgagttcgatttttctaacttatcagattttctcgatttggaatctggaatatttgactcagaggtcgaatcgaagccacaggtcattattcttaccccggaaaagcttctttacatacttcgacaagagccagacattgttcagaaagctggactggtagtttatgacgaagggcatcagtttgacacaggcagccggggtgtaacttatgaactgctgttaacatccattaagcgaatgctacacgaaaatgcccagagcgtgttgatttcagcagtaattcagaatgctgcttctgttgctgcatggctattaaatgacggttcaaaggttgtctccagtagagccttacaggctagtagactcattgcctttgccagccttccgaaaggtaaagatggtcaacttcagttcaatgtggcctctgatagcgatcagaaattctttgtcccgcgagttattgtttcagaaaaaatgcctcgattacctaaggaaagaaaggatcgttttttccctactcaggagagtggctccatagcgttatatcttagtttacgcctgctgaaaaatggtggggttgctatttttacaggaagaaagtcttctgctgcaaaaattgttcgtgaggccgccgaagatatttttcgtcgtggaatttcacttgagccaccttctgcccatagtgaccctgatgagattcgtcgctttgtttatctcttcgaacgtaattttggtgctaatgcatatttgacacaagcagctgctttaggcatttttgctcatcacggcaacactccccaaggtgttcgtctggctattgagtatgctatgaggcaaagccttattcgattgatcatctgcacctcgacacttgcacagggtgttaaccttccgattcgatacctacttgtaacaagcgcaatgcaggggcgtgaatcgatcaaagtacgcgacttccataatctcatgggacgcgctggacgtgccggaatgtacggtgagggtactgttattttcactgacccccgtctctatgacgagcgtttcgcaaagacgtaccgttggcaagaaacgatcaatctaatcaatcctgatagtgctgagccaactggaagtacattgctttctcttttcgatcctctgcgaaatgacctcggaacagttactctaagctcttcaagctctgctgaagtagccacttacattgtcaatgactgggaaactcttttaaagtgggtagagagcgttcctatcaatattcctaaacagaacttttcggtcgcttcactaatcgaacaacttaaatccaagaaaaagataattgaagcaattgaaagcttcttaatgacatatcgtagtgatgttcagcccgaaacttttgtggacaactctcgagaattggttactgaaacacttgcctactcgcttgccactgaggagcaacaaatactcctgacagatatcttcgagtctgtggcgcgaaggatcgaactttttgttccagatacagcgatccagaagcgtttcgggcggactttgttaggtattgatcaagcattggcaatcgaatcatgggtcactacaaatgcaaacgcactcgagggagcaacctctgccgatcacctgtttgatgtgctatggccgcttttagtactcttatctaatgaaaaacggttgagtgacacagttcctaatggggcactaaagacattagcattggggtggctggctggagattcgtttgcagctctcgttcaacggcttgacaaattgggtgcatcctatccctatggtgcgaaccaaagaaaatttgatcttgatgtggttgtagacctgtgtgaacaaacatttggctttgagtttgcgctgttgctcgcagcggtaaaggaatcctttctcgcgttctcttcagaacaggcgggtgaggtttttagagaatatgttgatcttcttcagaagcgattgaaatatggacttccgaatcagagttgcattgccttttttgaagcgggatttgctgaacgcgtaattgcccagtgtcttgcagaaggaacgactcaaggtgctattcaagttagttttgacgcccgacacatgattcgacaaaacccagagagatttgaagtaatgctacaaggcttcccatcttatttttttgatgtatttaaaacaatcactgcaccttga

SEQ ID NO: 56662 - DNA, 780 bp, Klebsiella pneumoniae; identical to SEQ ID NO: 56538

SEQ ID NO: 56663 - DNA, 3525 bp, Klebsiella pneumoniae; identical to SEQ ID NO: 56549

SEQ ID NO: 56664 - DNA, 783 bp, Klebsiella pneumoniae; identical to SEQ ID NO: 56580

SEQ ID NO: 56665 - DNA, 3507 bp, Klebsiella pneumoniae; identical to SEQ ID NO: 56581

SEQ ID NO: 56666 - DNA, 783 bp, Klebsiella pneumoniae; identical to SEQ ID NO: 56580

SEQ ID NO: 56667 - DNA, 3507 bp, Klebsiella pneumoniae; identical to SEQ ID NO: 56581

SEQ ID NO: 56668 - DNA, 783 bp, Klebsiella pneumoniae; identical to SEQ ID NO: 56580

SEQ ID NO: 56669 - DNA, 3507 bp, Klebsiella pneumoniae; identical to SEQ ID NO: 56581

SEQ ID NO: 56670 - DNA, 783 bp, Klebsiella pneumoniae; identical to SEQ ID NO: 56580

SEQ ID NO: 56671 - DNA, 3507 bp, Klebsiella pneumoniae; identical to SEQ ID NO: 56581

SEQ ID NO: 56672 - DNA, 783 bp, Klebsiella pneumoniae; identical to SEQ ID NO: 56580

SEQ ID NO: 56673 - DNA, 3507 bp, Klebsiella pneumoniae; identical to SEQ ID NO: 56581

SEQ ID NO: 56674 - DNA, 783 bp, Klebsiella pneumoniae; identical to SEQ ID NO: 56580

SEQ ID NO: 56675 - DNA, 3507 bp, Klebsiella pneumoniae; identical to SEQ ID NO: 56581

SEQ ID NO: 56676 - DNA, 783 bp, Klebsiella pneumoniae; identical to SEQ ID NO: 56580

SEQ ID NO: 56677 - DNA, 3507 bp, Klebsiella pneumoniae; identical to SEQ ID NO: 56581

SEQ ID NO: 56678 - DNA, 783 bp, Klebsiella pneumoniae; identical to SEQ ID NO: 56580

SEQ ID NO: 56679 - DNA, 3507 bp, Klebsiella pneumoniae; identical to SEQ ID NO: 56581

SEQ ID NO: 56680 - DNA, 783 bp, Klebsiella pneumoniae; identical to SEQ ID NO: 56580

SEQ ID NO: 56681 - DNA, 3507 bp, Klebsiella pneumoniae; identical to SEQ ID NO: 56581

SEQ ID NO: 56682 - DNA, 783 bp, Klebsiella pneumoniae; identical to SEQ ID NO: 56580

SEQ ID NO: 56683 - DNA, 3507 bp, Klebsiella pneumoniae; identical to SEQ ID NO: 56581

SEQ ID NO: 56684 - DNA, 783 bp, Klebsiella pneumoniae; identical to SEQ ID NO: 56580

SEQ ID NO: 56685 - DNA, 3507 bp, Klebsiella pneumoniae; identical to SEQ ID NO: 56581

SEQ ID NO: 56686 - DNA, 783 bp, Klebsiella pneumoniae; identical to SEQ ID NO: 56580

SEQ ID NO: 56687 - DNA, 3507 bp, Klebsiella pneumoniae; identical to SEQ ID NO: 56581

SEQ ID NO: 56688 - DNA, 783 bp, Klebsiella pneumoniae; identical to SEQ ID NO: 56580

SEQ ID NO: 56689 - DNA, 3507 bp, Klebsiella pneumoniae; identical to SEQ ID NO: 56581

SEQ ID NO: 56690 - DNA, 783 bp, Klebsiella pneumoniae; identical to SEQ ID NO: 56580

SEQ ID NO: 56691 - DNA, 3507 bp, Klebsiella pneumoniae; identical to SEQ ID NO: 56581

SEQ ID NO: 56692 - DNA, 816 bp, Proteus mirabilis
atgccttggactaaggaacatattaagtggcttcgcgatactggtgacgtaattcctatatcaacaggtgaaaatgttcctatttatgaactcatttatgatgtattaaacaacgaagttatgtctctctgggctaggcattttagaaatcactattgctccgatttggaaatagaagtactaaagcccaaagaaatgacaaactctgattatttgttacaactgaagttccctgataattctcctggactaggacctagcactcgttctggtgattttgcagagatattggttgctgattatttagaatttctacacgattattatgttccaagaactcgttacgaccggaagataattggtaatgagtcatctaagggatcggatgttttggggtttaagcaaaagaacgaaaaaccctcaaacaaagacgaattaataatttatgaagtaaaagcccgcctttctgaaaataaagcccaaaacacgttgcaaacggcaattgatgacagtttaaaggatgaatttcgacttgcggaatccttaaatggagtaaagcaaaggctgtatgatcggaaagacttcactaacatgggtatcatctcaagatttcaacaaaatgtagatcatccatataaaacaaaatttggcgcagcagcggttttgactgatagttcatgttgtgtgaaaactctagctaaagcttctactcatgagtatacctctcaaacgaggttagaaatgattgtgataaaaggttctgtattgatgtctttagtacacactctgtacgagagagctgcaaatgaagcttga

SEQ ID NO: 56693 - DNA, 3108 bp, Proteus mirabilis
atgaagcttgaaatgcactcaaaaaaaatgctggcaattacaaaatctaaagcaaaaatgtatgaatttgctattgatgaagcatcccatatagatctactagtagatcctcgtaaactattaattacgactattggtatattgggcgacctatcggctttcgaggctcgtggagaactggctgatgaacatgaagatttaaagtctgagctaatatccgttgggcagtattttgatgctttgattcagtctcgtctagctgatgagatgactatttatttaaagattataggctcatcggcctactacttagcgaatatgcctggtagttccgtcgttttagctaaaagcttaccatataaaatagaaccacttactgacactaatattgaaggaattttaatatggatattaaaatctgacttcgatcaaaattggtatcgtataaatggaacctatttaactcaaatcatagataatgtcggaaataatacccgagaattctttaagctaaaaattaatgatgaaagagttaaacactcaattcaagccttaaggcaggaagtttatgaaaaaggttctgatagagagcttttctttgtcgatattatttcttctatcttactaagaaaaatagaaaattcatcaataaactgcttgccgaaatatacccaaattccaataacacaatggatgaatgtaattactaagccaagatttattcaggagttttggccagctcagagattactgggtgagaaaggtgttttatctggtttatctgctgttattcaaatgcccacaagcgcgggaaagacaaaatcgacagaattaataattcgaagctcatttttatcagagcgttctgatgttgcaataattgttgcaccattcagatccttgtgcagggagattacctctacatttaaatatgcattcgaaggtgaagatgtaaatatcaatgaattacaagatgttttgaatatttctgatagtgacgaccaactgataagatttttaatcgggcaaacggctcaagatggaatgactaccaagtctatagttgtgactacaccagagaaacttgtttatcttctgaggcatgaacccactttagcagatactattggtttgcttgtgttcgacgaagggcatcaatttgatactggtcagcgtggagtaacctatgaattattaatggctaacctcaaatcccgtttgggtgactcagtccaaaaggttttgatttccgcagtaatgtcaaatgcaaattctatcgctgaatggcttaatggagaaactggtgttgagattcaaggagttggatgtttaccaacagtgagaagtacggccttcgcaagctggcaatctgcaatgggtcaacttcaatatatcgatcaagatcgtgaatcggatagaaattttttcgttcctagggtgatagagcaaataaatcttggaaagagaggtcaagagaagaaagatcgactttttcccgttaaaaacgacaattccagcgttgctgcatatttgggtgttaaattatgtcatcaaggacctgttgctattttttgtggtgtaaagagtacggtgacgtcaatatgtaaacttttagtggattactacgatagaggacttgttttaccgccaccctgtatttctagtgttcaaagcgaattggacaaaatcacatatctttccagtttacattttggagatgcgtttatatttactcgttcaatttctttagggatattaccgcatagttccaacattccgaatggtattcgtgtttcagttgaatgggcaatggaattcaacaagtcagtgttagtagtatgtacatccactctcgctcagggagtgaatcttcctatcaggtatctagttgtttcaagtacatttcaagctggacaagaaattactacacgtgacttccataatcttattggacgagctggtagatctggataccacacagaagggagtgtcatttttgctgatacggatgtttttgataaacgcactaattttagcgaaaaatggagatggcaaagagcaatgcatttgctcgattttactaatgcagaggattgtgttagtagtctactagacttgatctccccttttaatttcacaaaatttaatgttaatgttattcactttatcgcagatcctagtgtctataggcaaaactgtatagaagaaggaaaacaatacgatattgatataagctcgctactggaacagatggattataaagaagccttcatcgaagcaatagaaagttattttttgtcttacttaaaagataatcctgatgcacctaaaactttctttgttgagttggcgcaagaaacattggcttactttttatccgatggtgagcagaaaaaacaactacagagggcttttttacttattgcaagtagagttctttctgtaccgaaagaaaaagtaccatttttcgggaagtcattgctgggattgaaagatctattttcaatcgaaaattggcttgatgaaaactggggtcagataacacaagttcaaaatgcagatgaacttcttgttagttgttggcctttgttatttcagataaataaaaacaagatgtttctcaaaataaagcctgagggcgttattttagattttgcaaaattatggatatctggaagcagttatgcggagttgcatgctcacttgattcaatcaacagcatattatcaagctggatcgaagcaaagggctataaaaatggatcatgtattagatttggctgatggtgctctgtcatttgactcaatgttgtacgttggagcaatagctgatatagcagagggaaaaggcttagatgaagatgtcctagggcttattagaagtttgcaaacacgtctaaaactcggtcttttgaataaccttgaaatgtggctttattctcaaggctatgttgatagagaagtttgtaaaaaacttgcttctgttcttaatggtcaaggagtggattctgatgtattcgataccaatatactaaaaacttaccaagaagtcgtaagtgattacatgtctaaatacccttcatattttagtaaatcagttgttgtataa

SEQ ID NO: 56694 - DNA, 810 bp, Providencia rettgeri DSM 1131
atgccgtggactaatgagcatatacaatggctccatgatactgggggtgtgctgactttagaatgtggtcgggaagcaaaggtttttcgctttaatcatgatgttaatgaccaacgaaaaatgacagcatgggccaagcattttagaaatcactattgtaatgatactcaaatcgatctgctcaaggctccagggcagacccgcgcagattatctactctctatgaaatttccgagtgctactattgcacctgggcccagtattcgagctggagatttcgcagaaattctagtcgctgattacttaacttacctacataactacttcgttcctagaacacgttatgatcgaaaaggtgtacctaacgaatccacaaaaggatctgatgtgctagcttttaagcaagtagaaagagatccaaataatgatgagttattagtgtatgaagtgaaggctaaactgagtgctggtccgaaatcaatgcttcaagaagctatagatcattcagcgaaagatcacctgcgcttagctgagtcacttaatggaataaagcaacgaatgatcgaccgaaacgattttactggcataggtacaataaataggtttcaagattcagttaatcgtccttataagttgaaattcggagcagcagccatttgctctgatagtgcatatgatgccgcagtactttctggtgctagcacaacaaaacatccttatgcacaagatctagaacttctggcaattcaaggaaatgagctaatgactcttgctcatacgctgttcgagagggccgctaatgaggtttga

SEQ ID NO: 56695 - DNA, 3111 bp, Providencia rettgeri DSM 1131
atgaggtttgagaatcaatcatcgaaactactctcaatcactaaagcaaaagctaaaatgtacgaatttagcttagatgaagagcatcatatacacttgactgagtctcctagtaagttgttattaatgacaataggcatattaggtgatttatgtcgtgaagaactctcctcagaaagaaatgttactctttatgaacaaagaagaggtgaaattcgaaatgttgctaagtatttcgatgctcttattggttcaaaattacaaacagagtatgactattacctttgcttgttgggagctgcatcatattaccttgcagatatgctggggagttctgccgtcttgtccaataaactagatgaattgaaagttgatttgacggagtcggggatagaagtgttattagagtggttactgaaagacagatttcatgagcctttaacacttgtcaaagagacgcctttgactcagttaatgttagaattgtcagtatctattaaggcttactttgatatcaatctggatacctcaattagcgtgctagaggcttcgagaaatattcggaaatactgtcacgctatagggtctgatagagagcttttgttagcagatatccttacttcagtaatcgcccgtaagataaaaaactcatcattgaatctacttcctatctatacaggcttacctttagagagatggcttcctattttagctaaagcaacctttatcagagagttttggccggcacagagactacttggagatgcagacgtttttatcggtagatctgccgttgttcagctccctactagtgccggcaaaactaaatcagcagaattaattatccgttcgtctttcttgtcaggaagggcttctgttgcggtaattattgcgccttttcgttctctatgtagagaaattagctcatctttatcagctgcgtttactgatgaagatgttctggttaatcagctcaatgatattccgcaactagatgattttgaaaatgaattattatcacacttatttgaacaaaaggtggagagtagtactaccccaaccattattgttgctacacctgaaaagcttgtctacctattacgacataaacctgagttagcagaagtaatatctttggtcatttatgacgaaggacatcagttcgatacaggaagtagaggtgttacctatgagttacttctaacaagtttgaaacgagagttgcgtaaagatacacagcatgttttgatttctgctgttttaccaaacgctcaaactataggcgactggttgtatgcaggaaatggaacggtagttaacggatctgaatatttatctactgaacgaagtattgcatttgctagttggagaatgggacgtggtcagttccactacgtagacccctttaacattaatgtcgaagaattctttgtaccgcgagttatggaatcactcaaaatccccaagaagaagagcgaaaaagtacaaaaattatttccgccaaaggatgacaaatcactagtcgctgcatacttaggacttaaactttcagagaatgggccagttgcagttttctgtgggcaaaaaaactccgttataaaaatttgtagagaaattattaaaccattagatcgtatcgatcaacttgaagcgccaatagcgtatagcgatcaaactgaaatcaagaaaattgctagattgtctgagttacacttgggaatcgatgcagttgtcacaaaagcgatagagcgtggagttcttcctcacagtgcaagtatacctaatgggcttagaatatcagttgaacatgcaatggagaatggtctggggcgttgcgtgatatgcacatcaaccttagcacaaggtgttaacctaccgatcaaatatcttgttgtatctggcgtttttcaaggagaaaaactaatatccacccgagactttcacaatctattagggcgagcaggtagggcaggaaaacatacagaaggaagtatcatattttctgatacagaattatttgatctacgccgctcagctaaacggtggcaatggtctcaaatgaataatttgttagacccatcaaacactgaaagttgtttaagtagtcttctgagtattatacagccgctatttgatgagaattactccattgatcctatagagtttcttaagtcaccttataattatgaagaaagatatgttgagttagctagaaggggagaaaatgttacagagttacttaaacagatgcaacaaaggattaaatatttagaaagccttgaaagcttcttacttgctaatttaagtagtgatgaaatgcttgatggcaaagctttaactgaactttataatggtactcttgctttctgcctcgctaatgatgcggaaaaagaaaaactagcccaagcgttcagagtagttgcagagaaagttaaacaggttgaaccagaaaaacgtacttattatggaaaggcactactaggtatccaaaaattagactatctagagcaatggcttagagaaaatattataactttagatgaagaatctgatgtattaggtgtactagaatttctgtggcctgttatagaacatattggtatggataataatttaggtaagttgataggtgaaaatgcaggactatctattgccaaacaatggtgctctggtgttccttataatgaaatattattacaagcaaataaaaatggtttcaaatatagagctggtagtcagcatcgcaacttaaaaatcgaaaatatcattaatatttgtgacaatagtcttggctacgaggccatgcttatagttggtgcatgtgctgatttatttgaaaatttccttgaaaatacagctattgccgaatctattaggaaattacagatgtttttacgtatagggttaaatgatagtcttgctacagagctatatgcgctcggacttgctgacagagtggttgcatcaggcatctcagctagccttactagctccggagctgagttaacagaatatggcaagaaaatggtactaactcatcgccacattatcgagtcagaattacgtaaatatccatcagtgttctttgattcactatatggtagagattaa

SEQ ID NO: 56696 - DNA, 849 bp, Serratia marcescens VGH107
atgccatggagttctgaacatctaaaatggttttctgataatggagaaagactaacgacctctgatggcaaggagatcgaagtgtgggagtttaatcatgctcaggatgatgttgtgctcagcgcatgggcgagacattttagaaaccattattgtttagatgcagacatagactttctacgaggaaagctagctaggaaagattatctaaacaatattaaatttccctctgagacctcaaagcttggaccaggtatcagagccggagactttggtgaaatactagtttgtgactatttacaatggttacttgattgctgggtgcctagagttcgttggtcttcaaaagtagttcgagacgaatcaccaaagggtagtgatgttgttggttttcgttttcaccataaaaatggtgaatattctattgacgatgtaatgtttgtttttgaatcgaagacgaagttctctgcctctactgttaaccgactacaaaacgctatcaatgattcagctaaagaccatattagaattgatgaatcactcaattttataaaacaaaagttatatgaatatcgagaaataaaccaagcaaaaaaaatagaaagattccagaatccagttgatataccatttaaagaaaattatggtgccgcagcgataatttcttcagatttttttgatgttgaagagttaacttcttctgattgcaacaaaattcctacaacagccaagtcgaaagaatacaccccccatccacatcacggaaatcttaaacttttggtcattagaggggctaatatgatgcagctggtacatgaactctacaggagggctgctgatgaggcctga

SEQ ID NO: 56697 - DNA, 2691 bp, Serratia marcescens VGH107
gtgtattttggtggtgctgagggacagattggaaactatattgattccgtatttgatttgttggttttatttataaataatggtgataatgcaaaagaacttataaataaagctatcgagcttagagaggctgcttacaaattcggaactccccgtcagctgttacttggcgatatagctgtagccttagttagaaagaaaattgaaaactcctgttggaatgctctgcctatttactctggactttcaaaaaatagttggagtaagtccattaaaaaagaatcattcataaaagaattatggccagcacaacatcttttaggaaaggctgatgttttcaaaggcaaatcagccattgttcaaatgcctactagtgcaggaaaaactaaggctatagaaatcgtactaagaagcgcctttatttcagagcgcgtgttactggctataatcatcgctccatttagagccctatgccatgagattaaaaatagtcttgtggaagcattctacgatgaaccaattctggtggatgagctgtccgatgcgttacaaactgactttgaaatcgcgtctatccttgctcaacaacagatcttagttgttactcctgaaaagctactttatgttctacgccatgcaccagaacttgtttcgcatcttggattactaattttcgatgaaggtcatcaatttgatagcggcaaacgtggcatcacatacgaattacttttaacttcactccgttctatgatacgtgaagatacacaaaaagtacttatttcagcagttattagcaatgcagaagctgttggtgaatggcttaacggcgaatctaatgttgttgaaggtacaagccttatccccacattcagatctgttggattcgcaagttggatggaccaattaggaagaattgagtacgtagatagtcgtgatgctgaacaaaacgaattttttgtccctagggtgatagagagtattaatcttggcaaaaaaaatcgagaaagaacggaccgcgtctttcctgaaaagactgatgggcagggaattgcactttaccttggtttgaaattggttccgaatggcagcatcgctattttctgcggacgtaagtcgacagcggctaacatctgtgaaaaggctgttgatattatagaacgaggtgcccccttatcctttccggctgatttttcagactcgcaagaagttgagcgattgtcacatctgcacgtcgcaaatctaggcattgatgcccctgcttcccgaagtgcggcatacggtattttttcccatcatggcaacacacctcatggtattaggttggcggtggaacatgccatgcgcgatgatcttgtccgattcgttgtttgcacttccactttggcgcaaggtgtaaaccttccgattcgatacctcatcgtaaccagtgtttaccaagggatggagcgcatcaaggtccgcgatttccacaacctcattggacgagcgggtcgcgctgggatgcatactgaaggcagtatcttatttgctgacccggtgatctatgacaagcgaaaggtacgtaatgataaatggcgctggaagcaagtaaaggaacttctggagccgagcaattctgagccgtgcatcagcaatcttctatcgattttcgaccccattaagagcgatgacgagaaatacaccataaccatggaagctttagattttgccaaggcttatatcgatcatcctgatgaagttaccaagttggctgctgggatagcagcacaacatggagacaaaaatttctcacgagacggtgtcgagcgccaagttacctggagaatcaaccttatctgtgccatcgagagcttcctgctatcccactgggatgagtctgaagatggtctttcggaaattgatgtgaccgacttggccgaagggacgctggctttccatttagctgatgagcagaagaagaagaacatcagagagttgtttaagcttctcgctgagaatatctccgcaaatatcaccgatcctgttcgccgcaaaatctatggtaggacgctttacggaattcaggatgctcaggctattgagggttgggttcagtccaacactgaaagcctgctttcaatggttgatgaaacagaaacactcgccatcgtctggccattgcttacccgatatatcaacagtggtgtattcaccaagttcgataacccggaagtgcttgaggaaatatcgcatggatggatcagtggaaagccattctgtgatcttcttaaaatcatccgtaagcgaaaagctaagatgatttggggtaaccgcctgagagagttcaagatcgaccacgtcgtcgaagtttgcgaaggggctctcgcatatgatggtgctcttattgtaggcgctgtatctgaactcatcgaaatcgtcacacaagttgataccgtacagctgagaaattatctgcaactttttcaaaaacgcatgaaatatggtctacctacagcaactactatctccctttacgagattgggttttcggacagaattatttctcaagatcttgccgtatctttgaacttggcttcgactcaaaagagggatcttgtacaagagctgaaacgcaacagggaaggagctcgaatggtaatggaaaaatatccagattattttcaaaagagaatgaacgaactcttgcagtag

SEQ ID NO: 56698 - DNA, 828 bp, Serratia marcescens subsp. marcescens
atgacacagaccacaacacataccgcctggctgaagaaaacccgagccaaagtccaaacagcggatggcattgcaattgctgtgtatgagctcaacatcaaccactctgacgacctggcgctcacgctatgggcaaagcactttcgtgagcactattgcctcgacgctcagattgatcgtctgagaagaggaaccaagaaatcacgagcgcagtatttgacggacttggttttcccggacaagtcagaggactttggacctgctacgcgctctggagacttcgcagaaatcttgatcgctgaccttcttgaaagtcaactgggcttttggacaccacgtactcgctacgatgacaagctggtacgaaacgagtcgccaaagggcaccgatgtgctcgggttcaagtttggcggcgctggcccttccaagccgtccaagaaagacaccctgatttccttcgagtccaaagcacagctcagcggaaaaaaggcaaaggcacgattgcaagatgcggtcaacgactcagccaaagacgtgtatcggatatcagagtcgctcaatgcgatgaaacgtcgcctcattgcgcgggcagatgatgaaggcgcggaccgagtcgagcggttccaagatggacttgaggtgccctacctccgcatgtccggagcagcggccgtcttttgctccagcgtctacgactctaaccagatctcgaagaccgactgtacggggcatgaaaacgtggacaacctcatggtgatagttgtgcattccgcaacgctgatggcgtttgttcatgccctctatgaaagggctgccaatgaagcctga

SEQ ID NO: 56699 - DNA, 3081 bp, Serratia marcescens subsp. marcescens
atgtacgagtatggtgtgccggaagacgatcacattgcgcttcctgaagggctggatctggagatgcagtttcccatggccgtcggaaccgtgggcgactttgcgtctgaaaccgtagcgaaggttattggcgcggaaggcgacgcgcacacgacgcgcgacgaggtcatcttctcggcccaggttcttcaagcgtttgatgattcgctgctcaaccaggatctctccttcaacctgcgcttgttagccgcggcaggcttctacctcggtgacgtgccagggaatgctgcggtgcagatatccaagctctctcagctcgcgaaccctgaaggcgacccgctcgctcttgctgcaaagaccgctatggacaaaccatggggccagacaggcaacattgttaactcatcctatgcgacagaccttcttggtgcgctaggcgagcacttcaagaccggcggcgggggtgacagggctaccgcagcgatcaggaagttgcgcagttggtcttatgccagcgcttctgcccacgaactgctgatggcggacttgctcggcgcgataagcgcgacacgcatcgcaaactcggcttggaccttgctaccgcaatacagtgaactgagcggaaatagctggcagccctacctatctcggcccacgtcaatcaaagagatgtggccatcccaacgaatggtaggtgaggctggcctctacaaggggcaatcgggtgtcgttcaaatgcctacgagcgccgggaagtctagggcaaccgaacttgtcattcgctcggcattcttgtctgcgaggaccaaactggccttggtcatcgcaccgttccgtgctctgtgccaagagatagccagcgatcttgaaagagcattcagggacgatggatacaacgtcaaccaattgagcgacgcgctgcaaccggacatcgagttcgatatcttcgacgtgtcgatcgagtcggcgccccaagttgttgtgctgacaccggagaagctcctctacaccctgcggcaggaacccgacatcgttcagagagccggtctcgtggtctatgacgagggacaccagttcgacaccggcacgcgtggcgtgacttacgaactattactaacctcaatcaaaaggctgttgcccgactcggcccagagcgtactgatctctgcggtcatccaaaacgcggcggcagttgccacatggctcctcaaggatgagtcaagggtggtttccgacaagtccttacaagccaggcgactgatcgcgtttgcaagcctccctcagggcagagatggccagcttcaattcaatgtcgcgtccgacagcgagcaggattttttcgttccccgcgtcatcattccagagcagcagccgcgtctacccagagaaaagacggaccgatacttcccgacaaaagaaagcggctctatcgcgttgtaccttggcttgcgccttctgaaaaatggaggtgtcgcgatttatgcgggccgaaaggcctccgcagcaaaaatcgtgagagacgcggtcgaacaaacgttccggcgcggaatttcactagagccgccatcagcgcacagcgaccctgaggaaattcgacgcttcgtaaacctctactcaaagaactttggtgccgacgcttacctgacgaagggcgctgccctcggaatctttgcccaccatggaaatacgccacaagggattcgggttgcaatcgaatacgcgatgcggcagcggctcattcgattgatcgtgtgcacttcaacccttgcgcagggcgtcaacctccctatccgatatctccttgtgacgagcgccatgcagggccgggagcttattaaggcgcgagattttcataacctgatgggtcgcgctggacgcgcgggcatgtatggtgaaggcaccgtgatcttcacagaccaccgcctgtacgatgagcgagataccgaatcacgtcgctggagtaactccgtaaatctgatcaaccccgacaacgccgaaccaactggaagcacgctactttcgctcttcgagccgatgaaaaacgagacgggaacacgaacgttgggcaagccgagtccggccgagttcgcgaccatgatcgtcgataattgggaggagctgtatgaggcgatcggaaacatctctaccgagcttcaaagcaaaaagttttccgttgggtcgttgcgagagcaactcagggccaaaaagaagattgttgaggccattgagagtttcttgatgacctatcgcagcgatgtggataccgagaatttcgttgccaacgcgaaggatttggcaagcgaaacgttggcgttctctcttgcggaccaagaacaacaggcgctattggcggggatatttgaatccgtggcacggcgcatcgaagtacgtgttcccaatacggaagaccagcatcgcttcgggcgcacactcttgggaatcgaccaggccctggtagttgaagcgtgggtgattgagaacgagagtgcgattggggcatcgaaatcggccgatgacttattcgatctgctgtggccccttttgacccaactatcttctgaaaaacgactgattgataccgtgcctgagggcgcactcaaagcgttggccgacggatggctggcaggtcgatctttcgcaattcttctgcaagaactcaatgtactagacgcctcatatccatatggaaagtacaaaaagtcgttcgatttggatttggttgttgatctttgtgagcagacttttggttttgaattttcgttgctgcttgcgtcggtcaaagagtcgttcgttgcacgggcgacggaagagctaggcaagtcgctcacgggccaccttgaccttctacagaagaggctgaagtacgggcttccagatcaagacagcatctcgtattacgaggcaggattttcggaacgagtgattgcacaggccttatcagaggggatgatctgggagtctgctagatccagaaatggtgcccgcaagttgatcaggcagtatccgaacgacatcgaagtgatactacgtgattttccatcgcacttcacagatgtattccgctccaccgtggcatcttag

SEQ ID NO: 56700 - DNA, 828 bp, Serratia marcescens subsp. marcescens; identical to SEQ ID NO: 56698

SEQ ID NO: 56701 - DNA, 3081 bp, Serratia marcescens subsp. marcescens; identical to SEQ ID NO: 56699

SEQ ID NO: 56702 - DNA, 780 bp, Yersinia enterocolitica
atggcaaatttcgaggactggtgtgattcgacagaacgtaatatcagcggccattatttgcagtcaattacggccagggatgccgagcttatgttcggcattcatgctatggccgcgctaatacctgaacactatgcgtcgccacgaaatatcgctaacgcatttgaagctctaggtaagccagggctagcggcatacattgctggaaaattgcctgaaacgaaacagattcgttccggtgatttgggtgagatatttgcaactgaatggataaatgcacgtagcaacggctatacaacgcctataaaaagattgcgctggaaagatcatcgtaatatgtcgatgcgtggtgaagacgtcattggtgtttacatagatcagtcttctcaacaactttttttccttaaaaccgaagcgaaaagtcgcgccaaaatgacaggagaagtggtttctgaagcccgcgataacttgaataaagaacaagggctaccatcttcacatgccttaatgttcattgcagatcgcctgaatgaacagggtgaggagcttttggctaaagcgatcttaaatgcaacgcttcggcaaggaattgttcctggatgcgtccggcatcttattttcctcttatccggcaattcttcagaaactatgctgaccacttcaattgaaaagtatacagatcagaacaatcagtggggtgtttgtctaagaattgcccgccatggtgagtttattgccgcaactttcgaaaaggtgattagtgatgccagcaacagctga

SEQ ID NO: 56703 - DNA, 3525 bp, Yersinia enterocolitica
atgccagcaacagctgatgaaattattgaggctattaaggaggcttcagctgtaggttttcgcgggcgcctgattgctcgcggacaggcccggtcggtgatctggcgggacggtgacttgccaccggatgcgcctgaatttagcgcgctgctcagtcaggaccttcaggggtatgcttatgccctaatcgatctcggtcttcgtcttcgagaacttaatggagacgacgcctatgtaagaattgcctttgaacaggctggaaccgccctcgaatcggctattgccaaaggaaaacgcgacagccgggatacggattttcacttcgtaatggctgctgcaagctatcacctcgcgcacctttcagcacgagcctattccttactcgcaatggttggtcaggatgataatttttcaccaatagaaagggctcttacacaactgatccggcgtgatttgcgtactctgcgtgagaatgcgctgggctttcggctcagaggtgatggcagtgatgtgaaaattactgaaatcctccaggctcgcctaaattcgccgcaagatgaggacggtgctagtgagtcagaggaggacatcctttttgatgggcttgatttggcactgactgacgtctatatgtcggccatttctctctatcttctagccgtagaaaggggagaatcacgtttgctttccaaggctattgaaaaattaagaattagtctgagtatatgtgctcagtttaatatgctgccccagtggtggctaaactttattaccattcatctgttgtctgacctttggtcagatacgttccatgaaaggttgccgctggttccaattggcggtgacgcggccgaatggcccacgcttcgggaactgtttattgcactgctccaaagacgaccccgagccgaaattgatctctggccatcgcagagagaggccgctggacgctctgttaatgacaatgacgatttggtcgtttcgctgccaaccagcgcgggaaaaacacgtattgctgaattgtgtattctccgctgtctggcgggtggcaagcgtgttgttttcatcactccgcttcgtgcgctttctgcacaaacagaagccactctctccagaacatttgggccgcttgggaaaacaatatcaatgctgtatggcagcattggcgtaagtggtatggatgaggatgcaattcgccagcgtgacatcgtggtagccacgcctgaaaaacttgactttgccctccggaatgacccctcaattattaatgatgtaggactttttatttttgatgaggggcacatgataggggccgatgaacgagaggttcgctatgaagttcaaattcaacggctattgcgcagacaggatgccgatatgcgcagaattgtctgcctctcggcaattctacctgatggtgagcagctcgaggattttgccggttggctccgtcgtgacaagcccggaggacccatcaaaaataattggcgaccgacccgcctgcagttcggtgaggtcatatggtcccctccagcaggtcggcttaatctcagcgtcggttatgaggcggcttgggtatcgcgttttatcgtcagcagacaaccgccaaaggttaaattacctaataaaaagcagcgaacaaaaatgtttccctctgatagcaaggaactctgcttagcgacagcctggcgtctaattgaagatggacagaccgtactcatctactgtccacttcgccgcagcgtcgaaccgtttgccgagactattgtcgatctgcatcagcgcggactactgccatctttatttgatgccgccccggacattctgaatgcggctatctcgctgggagaagaatggttgggagcacacagcccgatacttgcctgtctacggttgggcgtggcgcttcatcatggcgcactgcctacggcgtatcgcaaagaaatcgaacgattgctgcgagatggggtacttaaagtgacaatctcatcgccgacgctagcacagggtcttaatctttcggcaactgctatcgtcatgcattctcttcatcggaatcgcgagctcatcaaagtgtccgagttcagaaacgtcataggcagagctggacgcgcctatgtagacgtcgaagggctggtggtttatccaatattcgataaagtaaacaaacgccaggctaactggcataccctcacatctgacacgggggctcgtgagatggagagcgggctaatacaacttgtctgtgcgttattgattcgaatgcatacacggcttggtggagatttaagtgcactcactgaatacgttaccaacaacgccgtagcgtgggaatttccagaaattatgaccgaagctccgcaagaaagagatattgcgcaggtcatctgggaaaaacaactctcaacgctcgatactgctattctgagccttcttggtgaaaatgatatcctggatgatcagattgaagctgcccttgacgacatccttcagtcttcactttggcaacgtagcttgcagcgttatggggatgagaatgaccgggttttactgaagtcggggctcctgtcccgcagccgttatatctggcagagctcaacggcagcagggcgccgggggtacttcctgtcgggtgtaggacttacaactgggctacgacttgatgctattgccgctaaggccaaccaactattgattgatgcgaatgcggcaataatgggcggtgatgccgaagaggcaattgacgccatcacttcgctcgctgaagatgtctttaccttctatccctttatgcccgatccattgcctggcaactggagaggtattttacgttcctggctcctaggtgaacccatgactaacgtcgcgaatacgcaggctcctgaaacgcttcaattcatcgagaacgggctcgtatatcgacttccttgggcaatggaagctattcgggtacgtgcaacagcaaatggagaccttataggtgatactgataccacgctggacgattatgagttaggttttgcggttgctgccgttgaaacaggtaccttgagccgctcgtcttcactgcttattcaggcggggtttagctccaggcttgcagccatcaaagttgttacagacactgctgctgattttcaatccggccaggagcttaggaggtggctgaactctgaagaggtgataagccacactgataatcctgactggccgacacctgaaaccagggatatgtggctggaattcctgggcagtctcagccccaaagacagccaggtttggagtcgtcatcgttatacgggaatggtggactggagagatactccggcagtaatcggcacaccattgcagctttacactgttgatggtattcatcatgtactggctgatgatggcacccctctgggaagtataaatggcagaattaacacaaacagaaaaggtcttcttagagctgaggttaacgataagaatggtcgtgccatgttcgactatttaggaccggacgactttatttccacctga

SEQ ID NO: 56704 - DNA, 780 bp, Yersinia enterocolitica; identical to SEQ ID NO: 56702

SEQ ID NO: 56705 - DNA, 3525 bp, Yersinia enterocolitica; identical to SEQ ID NO: 56703

SEQ ID NO: 56706 - DNA, 795 bp, Yersinia intermedia
atggaggtgaaaagcgtggtgcaattcaatgattggtgcgactcggctgataatcctgttggacaacactctctccgtgtgatgacaggccgtgtggcaaatctcactgttggtgttcaggcaacagctgcagctattccggtacactacgcatctgaagaacacgtagctcgagcacttcgacgcttaggaaaaccagctgctgcagcgttaatagagggtaagcttcctacaacaaagaatattcgttcaggagatcttggtgaaatctttgctacggaatggatcgatgcccaaagcggtggttatcacgcaccgatcaaacggttacgctggaaagatcatcgcaatatggcgatgcgtggtgaagacgtgattggtatttttcaagatccgcaaacacatcggttaaactttttaaaaactgaggccaaaagccgagcgactttgacggcacaggttgtaacagaagcccgagcgaatttagacaaagatggcggacttccctccgggcacgcgctctcatttatttcggcacgtctacttgagctaggcaatgtccctttggctgatgcaattgatgacgctttgcttaaatacggcatccctccagctagtgtccggcaccttcttttcacgttctctggtaattcaccagaggctatgctgacagcctcgcttcaagcttatcctggtttatttaatcaatacggtattggcctgcgggttgaaagtcatgctgattttatcggcgccatctatgagcaggtgattacaaatgccaacaacgcctga

SEQ ID NO: 56707 - DNA, 3519 bp, Yersinia intermedia
atgccaacaacgcctgaagacataattgcagatattaatgaggcgtcggcatcgggatttcgcggacgtcttatcgctcgtggacaggccagagcaattatttggcgtgatggcgtattgccgcctgatgcccctgaattctcaactcagctcagccacgagctgcattcctatgcttatgcgctgatcgggctcggccttcggcttcgtgaactgggcggtgatgcttcaaaggcgcgtatcgcctttgaacaggcagctacagctcttgaggctgtcattgctaagggcaatagagaggatgttgatcgtgacttccactttgtcatagcagctgcgagttatcatcttgcacacctctctgctcgtgcttattcactgctaactattgtcgaaaacgatgataatttctcgccgatagagtgggtcattgctcgattgatacggagagattttggcacgctccgtgccagcgtgcttaattatcgtgccaacgatgaaggtagtgatgagtacattaccgctgctattcaagccagtctcgacgagattgatagtggagataattttgctggatctggcaacgactttctttttggtggtcttgatacggcattgactgatgcctttatggcagcagcatctctttttctcctagcagtggaacgcggtgagaggccattactccatcaggcaattgcgcgactcagggagagtctcacaatttgtggtgagttgaatatgttgccgcaatggtgggtacatattatcgcaatccacctcatgtcggatctctggtcgaccactttccatgagaggctaccacttctgccggagggtgggggtgcacctgagtggcccaagcttcgagaattgttcattgcattgctccagagtcgccacaaagctgagattgacctttggccgtcgcagatagaagctgcggcccgtgctgttaaccaatctgatgatttggtcgtgtccctgcctacaagtgccggcaaaacacgcatcgctgaactgtgcatattgcgctgcctggctggtggtaagcgggtcgtattcatcacacctctgcgcgccctatcagcacaaaccgagacaacgttattgaggtcattcggcccgcttggtaagacgatttcggcactttacggcagtatcggcgttagcggcttcgacgaggacgcgatcagggagcgggatatcgtggtagcaacaccagagaagctcgatttcgcgttgcgcaacgatccaacactgcttaatgacgttggtctacttatctttgatgaagggcatatgatcggccttaatgagcgcgaggttcggtacgaggtgcagattcagcggcttctccgacgaccggatgctcatgagcgacggattgtgtgcctttcggccattttacctgatggtgatcagcttgacgatttcgcagcatggttacgtcgtgaccaacctggtggcgtggttagaaaggactggcgtcctacacgcttgcggtttggtgatgtagtttggatttctcctactgcacggctaaacctccgtgtcggagatgaacgcccttgggtacagcggtttctcacgggtacagcaccgccaaactgggttcctccaaagaggcgtcggacgcgcacttttcccgataatcaacgtgaactctgcttggcgactgcatggaggttgattgaggatgggcaaactgtcctgattttttgtccgcagcgtcgaagtgtcgaaccctacgcagaggtaatcgttgatctacatgagcgtggggctctacgttctttgttgaaagttgatcccatcgtcctgaacacggccatcacgcttggagaagaatggctgggagcgaatagcatgatcctcaaatgccttcgtttgggtgtagccttacaccatggtgccctacctacagcctaccgcaaagaggttgagcgactcttacgtgataatgtacttaaagtgacgatttcatcgcccactttggctcagggacttaacttatcagctaccgctattgtcatgcattctcttcatcgcaatggtgaagttatcgaagtctccgagtttaagaatgttattgggcgagctggccgggcttatgtcgatgttgaaggtatcgttctctttcctatattcgacaagatcgcgtggcggcaaagtcagtgggaagctctcatcaccgatctcggcgcgcggcaaatggagagtggattgatacagttggtttcgacacttttgttgcgtatgcacgcccgtataggtggtgatatcaatgaactcaccgaatacgtaatcaacaatgcggaagcttggaaattcccagaggtcgaaaatgaaaaacctgaagaacaagagcgtgctcgtactgattgggagcaacatgttgcaacgcttgatacggcgatccttagtcttcttggggaaaatgatgtccccgatgaagctattgaggaggctctagacggtattctccaatcctcactttggcagcgccgtctacttcgtcataacgaacaggagcaacaagtcctcaaagcggggttagtctctcgtagtcgatttatatggagtaactcaacagcggtacttcgacgtggttacttcctagctggggtggggcttgcaaccggtcatgcgttagacgctattgcggtgaacgttaacctgcttttactcgaagctaataatgcgattctccatgatgatgttgaggaggcgattgccactataacggccctagccgaacaggtttttgctttccatccctttaagccagacatccttcccgatagttggcgagacatcctgcgagcttggctcctcggacaacctttggctggtatagccgccggacatgaatcggagacgttgcagtttatcgaggggggactggtttatcgtttaccttgggctatggaggccatccgagttcgcgctgtggcgaacggtgatgcggtcggagaattaggtttgcagctagatgactatgaacttggccaagcggtgctctccgtcgaaactggtacgcttaatcgttcggcctcgatactcattcaagctggtttcaattcaaggcttgccgcgatcaaggctataaccgatatcggtgccacttttcataacggtcgtgagcttcgacaatggctcaattctgaaattgttgcaggatggagtgtacagcaggattggccaacggctgagaccaaaacgatatggactgattttgtgcaaagttttagcccaacagaaaaccgtacttgggaagagcgtagatactgggcaaacgtagcttggttcggtgttccgccgccgccggggacgccggtgcaaatttaccatggggtggggcagccacgtgttttggctgccgatggcaaacctcttggttctataccggcagcactcaaccccgcaagaagtgggcttttgcgtgcccaagtggctcaagacgtcacacggatcgaccttacttacttaggacctgcagatttattgcagatataa

SEQ ID NO: 56708 - DNA, 795 bp, Yersinia intermedia; identical to SEQ ID NO: 56706

SEQ ID NO: 56709 - DNA, 3519 bp, Yersinia intermedia
atgccaacaacgcctgaagacataattgcagatattaatgaggcgtcggcatcgggatttcgcggacgtcttatcgctcgtggacaggccagagcaattatttggcgtgatggcgtattgccgcctgatgcccctgaattctcaactcagctcagccacgagctgcattcctatgcttatgcgctgatcgggctcggccttcggcttcgtgaactgggcggtgatgcttcaaaggcgcgtatcgcctttgaacaggcagctacagctcttgaggctgtcattgctaagggcaatagagaggatgttgatcgtgacttccactttgtcatagcagctgcgagttatcatcttgcacacctctctgctcgtgcttattcactgctaactattgtcgaaaacgatgataatttctcgccgatagagtgggtcattgctcgattgatacggagagattttggcacgctccgtgccagcgtgcttaattatcgtgccaacgatgaaggtagtgatgagtacattaccgctgctattcaagccagtctcgacgagattgatagtggagataattttgctggatctggcaacgactttctttttggtggtcttgatacggcattgactgatgcctttatggcagcagcatctctttttctcctagcagtggaacgcggtgagaggccattactccatcaggcaattgcgcgactcagggagagtctcacaatttgtggtgagttgaatatgttgccgcaatggtgggtacatattatcgcaatccacctcatgtcggatctctggtcgaccactttccatgagaggctaccacttctgccggagggtgggggtgcacctgagtggcccaagcttcgagaattgttcattgcattgctccagagtcgccacaaagctgagattgacctttggccgtcgcagatagaagctgcggcccgtgctgttaaccaatctgatgatttggtcgtgtccctgcctacaagtgccggcaaaacacgcatcgctgaactgtgcatattgcgctgcctggctggtggtaagcgggtcgtattcatcacacctctgcgcgccctatcagcacaaaccgagacaacgttattgaggtcattcggcccgcttggtaagacgatttcggcactttacggcagtatcggcgttagcggcttcgacgaggacgcgatcagggagcgggatatcgtggtagcaacaccagagaagctcgatttcgcgttgcgcaacgatccaacactgcttaatgacgttggtctacttatctttgatgaagggcatatgatcggccttaatgagcgcgaggttcggtacgaggtgcagattcagcggcttctccgacgaccggatgctcatgagcgacggattgtgtgcctttcggccattttacctgatggtgatcagcttgacgatttcgcagcatggttacgtcgtgaccaacctggtggcgtggttagaaaggactggcgtcctacacgcttgcggtttggtgatgtagtttggatttctcctactgcacggctaaacctccgtgtcggagatgaacgcccttgggtacagcggtttctcacgggtacagcaccgccaaactgggttcctccaaagaggcgtcggacgcgcacttttcccgataatcaacgtgaactctgcttggcgactgcatggaggttgattgaggatgggcaaactgtcctgattttttgtccgcagcgtcgaagtgtcgaaccctacgcagaggtaatcgttgatctacatgagcgtggggctctacgttctttgttgaaagttgatcccatcgtcctgaacacggccatcacgcttggagaagaatggctgggagcgaatagcatgatcctcaaatgccttcgtttgggtgtagccttacaccatggtgccctacctacagcctaccgcaaagaggttgagcgactcttacgtgataatgtacttaaagtgacgatttcatcgcccactttggctcagggacttaacttatcagctaccgctattgtcatgcattctcttcatcgcaatggtgaagttatcgaagtctccgagtttaagaatgttattgggcgagctggccgggcttatgtcgatgttgaaggtatcgttctctttcctatattcgacaagatcgcgtggcggcaaagtcagtgggaagctctcatcaccgatctcggcgcgcggcaaatggagagtggattgatacagttggtttcgacacttttgttgcgtatgcacgcccgtataggtggtgatatcaatgaactcaccgaatacgtaatcaacaatgcggaagcttggaaattcccagaggtcgaaaatgaaaaacctgaagaacaagagcgtgctcgtactgattgggagcaacatgttgcaacgcttgatacggcgatccttagtcttcttggggaaaatgatgtccccgatgaagctattgaggaggctctagacggtattctccaatcctcactttggcagcgccgtctacttcgtcataacgaacaggagcaacaagtcctcaaagcggggttagtctctcgtagtcgatttatatggagtaactcaacagcggtacttcgacgtggttacttcctagctggggtggggcttgcaaccggtcatgcgttagacgctattgcggtgaacgttaacctgcttttactcgaagctaataatgcgattctccatgatgatgttgaggaggcgattgccactataacggccctagccgaacaggtttttgctttccatccctttaagccagacatccttcccggtagttggcgagacatcctgcgagcttggctcctcggacaacctttggctggtatagccgccggacatgaatcggagacgttgcagtttatcgaggggggactggtttatcgtttaccttgggctatggaggccatccgagttcgcgctgtggcgaacggtgatgcggtcggagaattaggtttgcagctagatgactatgaacttggccaagcggtgctctccgtcgaaactggtacgcttaatcgttcggcctcgatactcattcaagctggtttcaattcaaggcttgccgcgatcaaggctataaccgatatcggtgccacttttcataacggtcgtgagcttcgacaatggctcaattctgaaattgttgcaggatggagtgtacagcaggattggccaacggctgagaccaaaacgatatggactgattttgtgcaaagttttagcccaacagaaaaccgtacttgggaagagcgtagatactgggcaaacgtagcttggttcggtgttccgccgccgccggggacgccggtgcaaatttaccatggggtggggcagccacgtgttttggctgccgatggcaaacctcttggttctataccggcagcactcaaccccgcaagaagtgggcttttgcgtgcccaagtggctcaagacgtcacacggatcgacctaacttacttaggacctgcagatttattgcagatataa

SEQ ID NO: 56710 - DNA, 795 bp, Yersinia intermedia; identical to SEQ ID NO: 56706

SEQ ID NO: 56711 - DNA, 3519 bp, Yersinia intermedia; identical to SEQ ID NO: 56709

SEQ ID NO: 56712 - DNA, 795 bp, Yersinia intermedia; identical to SEQ ID NO: 56706

SEQ ID NO: 56713 - DNA, 3519 bp, Yersinia intermedia; identical to SEQ ID NO: 56707

SEQ ID NO: 56714 - DNA, 774 bp, Aeromonas hydrophila
gtgctgtaccaaacttggtgtgacagacatgtcgaggaagaagacaacaagcaattgtggcgatttgaagaacgcaatggaggaagagccaccattgaagcaattctcacaacttgcctccgatctcactatgacaaactggatcaaatagcggaagacgttcgcgaactggggtatccaggtgcagcggccatcttgtccgaacgaatgcctcgctcagcgcgtgcacgttcgggagaactcggcgaaatcctcgcaacagagttggttgaggaacaccttgatttcatggttccggtacgtcgattgcgctacaaggatggtcgagaaatggccctacgcggcgatgatttcgtcggtttaaagctcgatgcccaatccaatctacatttcctgaaaggcgagtcgaaaagtcgcgcgaacctcaccaaagctacaatttcagaggcccgcgaagcgctatcgagggataatggtagacccacagctacgtccctgcttttcgtcgcggatcgactcatggaaggcgaaggcgaacgcagagagatgggcaggatgattcgcaatgaagtcgccagcagagccgcgccccccgcgcgaaccagtcacatgctgttcaccatgtcgggcaatgccactcctcaggcgctacttgacgatctagcagcggcggacgggattcgccctcatctctctgcgcacctccgcatagaagatcaccaggccttcatccaggcctactacgaaagggccctggcacttggaaacgattga

SEQ ID NO: 56715 - DNA, 3393 bp, Aeromonas hydrophila
ttggaaacgattgaagaactgacaggcttcctgcgcgaaactacgcaagacggatatcgaggtcgcctgcaggcccgtggtcaagcacgggcgctgatccgccatgacggacacttaccaccggatgcccccgctttcagcgaagggatcgactcggacctcgctgactatggcttttcggtacttcgcgcctcactggcactgcgcgagcttggaggcgatcaggatacttggcgacggggctttgtacacgcaggtggagctttcgaggcgctggtccagaacggcccgcaggacgacgcattcagaggtttctaccgaacagttggggcagcctcctatcacttggccaactactccgcactggcattttctcttctgacacaagcgcaaaccgaccagaaccgctcacctaccgaggatgcacttgcactcctcatcgtgcgcgacctgcaaggacttggacaacatgcaagggtgtggctacgcgatccgaagaaccgcgatgagggcataagccgggctgcggccgaagaggagcttgaccccgacgaagtagtctcccgcgtggcgacatcaacgatgttcagggcgttggtgttcttcgagtttggcctgcagaccggccatgattctctcgtcgtggaagcgagcaacctgctaaggcgagcgatttcgttgaccaaggctgccagcgcagtttcgctttggtggattcttcgaatcactgcaaatctcatcgacgacctttggtcaagcagcttgcacaaggtcttgcccctcgaaggcccaccaggttcaggagactatgcccagctcaggaagctgtttgtttccgagctgtacagccggcgctcctctgaggtggagctgtggccttctcagttgctggcggcacaacgggccgtcgacgtatccgacgacttggtggtagccctccccaccagtgcaggcaagacgcgaatagcagagatcgcggcattgatggcactggcctgtggacaccgggttttgatcgtaacgccactgcgagcactttcggctcaaaccgagcgctcctttcgcaggacattcacgcctcttggattctccgtctcgtcgctttatggaagcagcggcatagccggaacagacgaggatgcgctgcgggaacagaacattgtcatcgccacgccagagaagctggactttgctctgcgaaatgaccccgacatcatcaatgacgttggattgatcgtcctcgacgaagggcatctgattggccccagcgagcgcgagatccgctatgagaacctggtacagcgattactacggcgctctgaccatgctgaccgacgaatcgtttgtctttcggcaatcctgccagcaggggatcagctcaacgatctgactgcatggattcgcagtgatgctcctggcgatccgatccagtccagttggcgacccacgcgccagcgctttggcacgttatcttggctcggaacttctgcacgcctgagcttcgaccttgagccagatggcccgtttattcgacactttgtgccggaggttccgcctattcgcccccgtcgaacaccgttccccaaggacaacaaggaattgacgctcgcagcggcgtggaaattctccgagcaaggaaaacgagcactcgtcttttgcacccagcgcgatcatgttgagggatttgcagaggccgccctggatttgcaacgacggggctttctgccgtctctgcttgccaatgcccaggaagtcgaacgtgccatggccgtgggtcgggaatggctaggggccgagcatccagcggtccgctgtctgtccctcggcgttgccattcatcatgggcgtctccctggccccttccttcgagaagtggaggcactacttgccgcaggcgttctgcgcgttactgtggcctcaccgaccttggcccaaggcttgaacctcaatgctgcggtactcctgatccccaacctgtacagggcaggaacactgatcacgggagaagaattcgccaacgtcgcgggccgtgctggccgagcgtttgtggaccttgaagggctggtgctccacgtgatgcatgaaccgcaagactggcgtcaccagcggtggcgagagctggtcacgtcggccaaggcccgttcactttcgagcggcatcatcgtcgtagtcaatgaggtcatacggcgcctctcggcttcgggagtatttgcgcgcggggatgccatggagtacctgtctagcacacagggcgcgtggttcccagacgccgtagaggaagatcaagattcagattcaatggaaagtctcatcgagcggttggacgcaaccgtgcttggcctgatcgaagcgcttgatgcggaaagcgcggagcttccacggctgttggatgaggcccttgtgggctcgctttgggcaaggcaaatcgcccgccttgatgccctcgaaaagcaaaaacagctctggattctcgtcagtagagcgcagctcatctggaacaagacaacggtcgagcaacgcaagggccagtttgcaatgggcgtgggtctggaatcggggcttgccatcgacgcattggcagcggagctgaccgagcttcttgatcttggtgatacggctgccctcgttggagatgccgatgccttgaccgccgcactcattggaatgggagagaggcttcttgcgattcgtccctttattccagatgatccgctacctgcgaactggaaagaactgcttggagcctggattcggggtgaagacgtggcggccatcggccaagagggcatgcgcgtggtagacgacgcgttcgtctatcgtctggtatgggcgattgaagccgtccgaatgaatcggcggatcaatggcggcgaatcagaaatgcttgttgagggagccgccgcggcatgcctggaagccggactgccatccaacgccatggccatgcttgttcgagcaggccttccctcgcgcgttgccgccaagacagtcattgagcagatgacgcccgggttcacaaatcgcgcagagatgaaggcttggctacgatcggcagaggtggcggccttcgaccacgctcctggttggcccactctcgaaacgcattcaatctggcagcagttccgacgcgacgttctttcgagcgtggacgggaaatgggcgtcacaggaatggacgatgcaatggccctctcgctccgcttttcctatgcgggttgaggttgatccgcaaagtggccaagtatctattgcgacgcctgactttgcccagcttacgacgatcaaacaaaagcttcaggcagaatcgccgagcctgtttgaagtcgagccgctgcaggacggaaaaagtgtaaggatccaccggataggtcgaggtgaggcacgctgggtgtaa

SEQ ID NO: 56716 - DNA, 849 bp, Vibrio fluvialis PG41
atgccttggacttcggagcatattaactggctcactgatacaggtgaacgactgaaaactgccgatgggaaggaggtagaaatttgggcgttccatcataagaaagacgaggctgtactctccgcttgggcaaaacactttcgcaaccactattgcttggataccgatatagatttcctcagaggtcagcaatctcgtaaagactatctcaatactcttaaattcccttgtagctcaacaaagcttggccccggaatacgagcgggtgattttggtgaaattctcgttgctgactatcttcaatggcgtctgggcttctgggttcccagaatacggtggtcgtcgaaggttgtccgagatgagtcacccaagggcagtgatgttattggttttcgcttccgcaaccaggattactcgacatctccagaagaccttctaattgtattcgaagctaagactcagttctcaggatctgggaaaaacagattacaagatgctattaatgattcagcaaaagatcacctcagaataggtgaatcgctctactacattaagcaaaagctattcgagaaaggaagcagaggcgaagctcagctaattgatcgatttcagaatccagttgacataccatataaagagtcatttggtgctgcggcaatcatctcagatgaacattttgatacaaatgtcatagggtcttcgaattgcgagacaatcccgaagtctccaaaatcaaaggaacatatctctcatccgaacagtgaaaatctggttctcttagttataaagggggccgacatgatggctttggtccacgaactatacaggagagctgcggatgaagcctga

SEQ ID NO: 56717 - DNA, 1335 bp, Vibrio fluvialis PG41
atgaagcctgaacagaaatcccaactactgcttggcgtcacgcggtcaaaggctaagatgattgagtatagtgttccggatgaacatcacattaaaatcacacaagatccagccaagctttttcctatttcaatcggcctactgggtgaccttgccgctactatgaaccgagacaatccggatcccgaattactctccgatctgaggagaagcctactcttttctgcccatttttttgattcatatgtccagtcaaagttgaatgagagtctggatccatatctcctactagttggagcttcttcgtactatctttgtgatttacctggaagcgcttcggtactagcccggaaagtagatactgattttccagatctggatgcttacggcctggagaatcttattttttggatgttgcgaggagatatctctacatattttggtggtgcagagggagaactcggaaattatattgatgtcgttttcgaggcgttagtacagtttgtcaagaatggcactggtgaaaaagaactcctagacaagcttagacagctaaggagtgctgtttatgaattaggttcccctaggcagcttcttctcggtgatattgctacagccctaatcagaaaaaaaattcagaactcctgttggaatgctcttcctttctattcagggctttcaagggataaatggcaatcctcaattcagaagaagtctttcatcaaagagctgtggccagcacagcacctgttgggaagagcagatgttctcaaaggtaaatctgctatcgttcaaatgcctaccagtgcgggaaaaacaaaagcagccgagcttattcttcgtagcgcgtttctggcagatcgcgtagcactggccattatcattgctccgtttcgggcactatgtcatgagataaaaaacagtctcattgaggcgttccacgacgaacccactaaggtggatgaattatccgatgccctacagaccgacttcgagattgccgaacttttggggcaccaacagatccttgttgttactcccgagaagttgctttacgtccttaggcatgctccagagctggcagatcacattgggctattagtttttgacgaaggccaccagtttgacagcggcaccagaggcataacatacgaactactcctgacatcattgcgctcaatgatccctgaaagaactcagaaggtgttaatctcggctgttatcagcaacgccaagtctgtcggagagtggctgaacggggaacctaatgttgttgaaggctcgactctaattccgaccttcaggtcagtcgggttcgcgagctggcttgattaa

SEQ ID NO: 56718 - DNA, 810 bp, Vibrio fluvialis
atgccgtggactaatgagcatattcagtggctacaagatacaggaagtgttttaacactagcgtgcggtaagcaagcgcctgtttatcggtttcatcacgatgtaaatgatcaaattaaaatgtccgcgtgggctaagcactttaggaatcactattgtgacgataatcaaatagatttatttaaggctccagggcaatcccgtgctgattatttactatcgatgagatttcctagtagcacgaccgcaccaggtccaagtattcgagcaggagatttttctgaaatactggtcgcagattatttgacgtatttacatgactacacggttcctagaacgcgttatgaccgaaaaggtgtgccgaatgaatctaccaagggctctgatgtgttggcttttaagtataaccaagccagccctgttgatgatgagctgttagtctatgaagttaaagctaagttaagtgcgggacctaaaccaatgcttcaagaagcgatagaacactcagcgaaagaccacttacgcttggcagaatctctgcatgggataaagcaaaggatgattgatcgaaatgagctgactagtgttggcatgatcaataggtttcaggattctgtaaatcagccttatcagttgaggttcggtgctgctgcggtctgttctgatagcgcgtatgatgcaactttgctcgctgaagctgataccacagcgcatccgcatgcacaagatttggagttattagctattcaaggaagtgagttaatggcacttgctaacgcactttacgagagggctgctcatgagatttga

SEQ ID NO: 56719 - DNA, 3117 bp, Vibrio fluvialis
atgagatttgagaatcaatctgcaaagctactctctattactaaatctaaggcaaagatgcacgagtttggtttagatgaagagcaccatattcgtttaactgaatcgccaaccaaattactattaatgacaattggtattttaggcgatttatgtcaagaagaactttctgctgaaaaagacgccgctacttacgaattgagaaagggcgaaatccgaaatgtagcaaggtatttcgatgctctgattagttcaaaactacaaactgaatatgaatattacctttgtctgttaggtgctgcatcatactatcttgcggatatgcctggcagcgccgttgttttgtccaacaagtttgatgaattgagagttgatttaactgcctcaagaattgagaagttgttggagtggttgttaaaaggaagctttgtagagcctctacgcttggatgaagaaaccacattagcccctttgatgttagaactatctgagtcgattagtgcctatattggttcagacataagtgctcggtctaacactctcaacacgtctaagagtattcgtagattctgtcacgaaaatggcagtgatcgagaactactgatagcagatatagttgcttcggttgtcgaacgtaagatgaataatgcttcaatcaacctacttcctgcttatacaggtttaccagttgaggcttggcttccatccttggctaagaagacgtttgttagtgagttttggcctgctcaaaggttactaggagaggcaggggtcttgagcggacagtctgcggtagttcagctccccaccagcgcgggaaaaacaaaatcagcagagctaataattcgttcatcttttttgtctggtagggcgactgttgcggtaattattgctccttttcgttcgttatgtagggagattagttcctcactttctttggcgttcgctggtgaagacgtgttagttaatcaacttagcgatgttccccagattgatgattttgatgtggaattattcttacagctctttggtaaggcagaaaaaacgctgagtgagacacaaactattgtggttgctacacccgaaaagctagtttacctgctacgacataaaccagaattagctggggctatttcgttagttatatacgacgaaggacaccaatttgatactggtgctcgaggggtgacttacgagctacttctaacgagtttaaaaagaaagttgagagagcagacccagcacatattgatttccgccgtgttatcaaatgcggagtctataggcgactggctttatgctggagaaggtagtgtcgttaatggtgcagagtgcttatctacagagcgaagtatagcttttgctagctggcgaagaggtagagggcagttccactatgttgaaccttttaatatagatgaagaacaatttttcgttcctagagtaatggaatcgctaaagcttcctaagcgaggcaatgaaacagttcaacggcatttccctcccaaggatgataagtcactagttgcagcgtatttgggtatcaaactgtctgagcacggtcctgtagctgtattttgtggccaaaaaagctcagttataaagatttgtcgagaagtccttaaaccgttggagagaattgagcaactcgatgatccaatacgttacagtgatcaagatgaaatccagaaaattgggaagttgtcggaactgcacttagggagtagctcggttgttacgaaagcgataaaacgaggagttctgcctcatagcgcaaacattcccaatggcctgagggtatctgttgagtatgcaatggaaaatgggctcggccgttgcgttgtctgcacatcaaccttagctcaaggtgtgaacctaccgattaaatacctagttgtttcaggtgtatttcaaggtgagaagttgatatccactcgagatttccacaatttgttgggtagagcaggcagagcagggaagcatacagaaggtagtattatcttcgcagataccgagttatttgataatcgccgtacttcaaagtggagacagtgggtacaaatgaatcatttgctagacccatctcaatcagagagttgtttaagtagcctcttaactttggttcagccttttgttgatgacccattcaacattgatcctatcaagcagatacagtcacccgaaaaatatgaaagacttagtattcaggccgctgatcgccaggggattgatatcacaagcctactgagacaaatgcagcaacgggtaggttacatagaaagtcttgaaagctatctgcttgctaacctcgctagcaatgagatgcttgatggtgaggctttgactgaactttgctatggaacatttgcttataaccttgcttctgatactgaaaaagaaaagctagtacaagttttcaaggtggtagcggagcgagtaaagcaaattgaagtcgaaaagcgtccatgttttggtaaagctcttctgggtatcaatgagctacagtttcttgaaggttggttagtggataacataggggctttagatgaaggcgcggatgttttaggtacgttagagtctctctggcctgctatagaaaacttaggcatgaataatagcctgggtaagcttatcggtgaaaatgcaccactgcttgttgctaagcaatggtgctctggtgtttcgtacaatgaaattttattgaaagcgaagagagagaatttcaaattaagggccggtagtcagcaatggaatttgaaaatagaaaacattactgacatttgtgacggtgctttgggctacgaagtgatgttgatagttggtgcgtgtgctgacttaatagaaagcctatttggtaaccaaccacttgctgattccttgcgtgatttacagctgtctctccgtataggattgtcggatcacattgcgaaggagttgtatgctattggtttggctgacagagctgtagcttcgatcatatcagatagtattgttaagtctggtgctgaggtgaccgagtatggcaagaggctcgctgtagctcatcgggcaattatcgagcctgagttgcacaaactcccaacagtattttccaactctctttatggatacgcatag

SEQ ID NO: 56720 - DNA, 816 bp, Chlamydia trachomatis
atggcagttactccagcttaccttaattggctgcaagatactggtgtcgcactcaaaacaaaagacggtgctcctgtcaaagtatttgagctagtacacgagacggatcaggctatattgtcagagtgggctaaacacttcaggagccagtactgtagtgatttgcatattgactttctaagagagttcacaggaaaaaccagagccgagtatttgaatgatttaaagtttccaacaaaaacaggagggtttggacccggtactagatcaggtgacttcgctgaaatactggtttcggattatcttgagttcatttcagggtattgggttcctagaacgaggtacgatagaaaaactatcagaaatgaatctactaagggctctgatgtcctcggattcaaaatgctgtcaccaaccgattctcctgatgattgcttggccatgtatgaagttaaagctcaactttccggaaaaaaagccaatgagaggttgcaggtggcgatagatgactccggtaaagataacgttaggaaggcagagtcactaaatgccataaggcagcggttttatgaggctggtagcattcaagatgcacaaaaaataggtcgctttcaaaatccagttgataggccttataaagatgtttatggggcagttgctctttatgaaaatggaatatatgaaccattagaagcttctagctcagatgcaactggccatcccagtaagaattcgctggctcttattatcataaagggcaaagattttatggagcttgtgcatagcctatataagagagcagccgatgaagcctga

SEQ ID NO: 56721 - DNA, 1020 bp, Chlamydia trachomatis
atgaagcctgaaagagcgtcgcgtgttttgctgggtgtgactcgttcaaaagctaaaatgtacgagtataatgttccgtccgaacatcatattgagactaatagcgatccttcaaagttgctgatactctccatcgcaactcttggtgaggtatgcttagccgttaacgctacagatacaccagccgagcggttagctgagttgaaagctgatctgcaattttccgctcagttctttgattcataccttcaatcaaaacttgatgttgaaatagatccttatttgattttgctggcgtcggcgtcgtattacttgtgtgatttacccggaagctcaagtgttttaataagaaagttgccatcagagtgtccttacctagaggcgtcgcacttagaggatctattgcactggctgttagtaggtgatttttccacttactttaatgatgctagagagaagtacaaatctaatattattggagtttcgcagaaactttcggaatattacggtagcggcgaaggcgtctctggtattgaggtggagttagttaatcttagaacaaaagcttatgatataggctcagacagagagctattatttgcagatgtgatttgtgccatagttaagttcaggctaaagaattcatcttggatgctgttgcctcgtttctccggcctgccaaaagaaacttggagtagctacctttcaaaagacgattcgattaaagagctttggccctctcagcgtctgctgggggaggaaggggtgcttaaggattcgtcagcaataattcagatgcctactagtgcaggaaaaacaaagtcaatcgaactaattattcgcagtgcgtttttatcggcgagagcaagtctggtaattgtagttgctccattcaaagcactttgtcaagaaattaggagtgagctttccagaagcttcgacggtgaaattgtcagtattgatggtgtatccgacgtaccgcagatggatttttctgaatttgatcttgatggatgctaa

SEQ ID NO: 56722 - DNA, 828 bp, Bacteroides fragilis str. 3725 D9 ii
atgacgaaacaagaactgttaattgggaagcatccagataattcacatccttatgggaaatggcttgctgcaaatgatttgccagattcctatatgaaatgccacagggaacttactgaaattacagctgtagatgatgagttaatagaatggatggcaaaaaaaataattaatcaccattatactcagtttagaatatctaggttaaaagaaaaatataaaagtttaggctttgctaaatatgcagagcagcatagaaaattacctattacggataaggtgaaaaaaggtaatgctacggaaatattacttactgattatattcaagcatcacaaaaaaaagaatttatcaaggtatataaattgaaatataatccaaatgttgatcaagccattaaaggagatgacactttgatggttgatttatttgaagaaaatggtaatgagaaaatcaaaatttatttgggagaatcgaaatttcgcactactcctcaaaagaatgtagttgaagatattaccaaatctttaaacaaagatactttgcctttatcgtacactttcttagtagaagaaatagcaaaatcagatgaattacttgctcgaaagctggatgattatatagtgcaagatataaaagatagaggcgaccttatttatgttggtttgttactaagtaataccaagacttcagaaacagttgaaaaacatttgaatagtgataattcaaatttggttttcatttctattggaattggtcagccagaagagtttattaaatccatatttgaaaaagcagaagaactaatatctaaccctgatttattatga

SEQ ID NO: 56723 - DNA, 3351 bp, Bacteroides fragilis str. 3725 D9 ii
atgaatatagagcatgttgaaaaaagctaccaagaattagaatcagattctactttgcaaaacttaatagctcaagctaacgctagatatatcctatataatacggaagaatctaaagaaaattttcctcgatatacaattaaagatgagcagctaaatatcttagctttcaaatatctaaatattggatgtaattattttagtgaacataattatctaaaagcatctcattctctagaaaaaggagctttaatacttgagtatatacacggttctattcatattcagacaaaaaataagaaactattttgtctaatctccgctctttcttattacgtttgttttcaatactctaaggcatttatacttataggcaaacttgagagtgatacaatgatttcaagtttagtatctctatttcttaatagaaaatttgatcagttattaagtgaaatcgataaacttattacaaactccagttatggggatgaatatctggctgaacattttgaagaagataatgctacaaaaatttatgagataattatagcaaaatcattaaattattatgtgcaattttatcagacaggaaacaaagattttttagaaattgcaaaaaaggatcttgtaaatcttcaagaagtagccgcaatgagaggtgaacctgatgtttggtgggttattcgattattacttctcattatagatggatttaaagaatcctcattatggtatgtattaggaaattattttaatacggaagataaacttccgttaaagtatatacaatcattagtttataaaaatggcagtataacagaattgtttcttactcaaagaaactctttaccaaaggttttgaataataagcaggggagtattgttagcattcctacaagtagtggaaaaacaagaattggtgaaattgcgattttaaactgtctattaaatgaacctaaagcgaaaattctttttatagccccttatagatcactagcttacgaaatagaaaattcgtttgatgagatttttagcaatcttgatgtttcagtctcacatctatatggtggaagtttatttagtaagcttgatgaaagaattatagacgaatcatccgtaattgtagcaacaccagaaaaggccaaagcactctttagaagcaatgaggatattttatcatgtatcaaacttgtaattatagatgaaggacatttattgggaactgataaaagactcatagttaatgaaatgttttatgaggaattaaagtatcatgtaaaagctaatggtggaagattcttgttattatctgccgttttacccaatgcagaagatctatctgaatggctaacggattctactgataatgtttacaaagagaattggcgaccttctgatgaaagaatcggaataatggaatggaatggagtttctgtgaatttaaattggaaaagcactgatgcagaaagaaattcatttaatcctaattttattatgcgacaaaagttgcctaagaagcctaaagaaaggataatgcattactttcctgaaaataagaaccaagccatagcttctactgcatataaactaaggaagtttggtcctgttttaatattcgttggaatcaagaaatctgtttttgccattgcaagagagtatgaaaaatgtattcagcctgaagaacagaagtttagatttagaaacaaggccaattggagagcctttaaactggcttgcatagaatcttatggtgaagatacggaatgggttaagtttgctaaacaaggaattttctgtcataatgcagatttgatctcagatgtgcgaattcccttagaaagattaatgagaagtgagaagccaagagttattatagcgacttcaacattaggacaaggagttaatcttggagtttctactgtaattttctcaactttgtatcaatcaggtaatcctattacgaaaagagatttttggaatattgctggtagagcggggcatgcttttgtagatcatgaaggcaaaattttagttgctcatgatataaccaaaaaagacgagaataaaataaattgggaaagaaaaatgatttctgcatatcttaataagagtaatatagatagagcagagagtggttgtttggaactaataaggacacttaaaacagtggctcaacttaacggaatagcatttgataacttaattaatttacttgctgaaaatcgtattaatgaaattgatgagtctttagatgaagttaatgatcttcttgatttgattgatgacggattattatcattgcataattcgaataattttgaaggaaacacattggaatggattgatagttattttactaaatccttagcctatatacaagctcaatattatgaagatattactggcgatgaagttctcgattttataaaggctagaattaaaggtataacaaaaaaggtagggatagaaaaaagtatttgggaaagtattgtatcttctggtattccaatcaattcagatttgcaaatagatgagaagcttagcgagattattagtattgttcaaagctatatagtaagtgataaaacattagaagaacgcatttcacttcttgaaaatatagaagacgtcattagagatgtgaatatatataaagaaaaatttgaagatagtgttgatataaaagagatacgaaaaaagtggttaagtggaatatccatgtcagatatcgttcaacatgaaaatgcagttaatatagtaactcaacattattctttcaatatgccttgggttctcaatggtatttcaaagaaaatgaagaaacagaatttaattgaagaagcggatactatcgaagaattggctattcttgtagaattaggattacctaacataaaatcagttaaaatctatcaagcaggaattcgctcaaggatttctgcctatgaaattgccaacttatatgatgatgatctttgggaaaaaagcattagaacatataaacaagatttaatagaccatgctgattactataaaaaccaagtatcagaaaatgcagcattatggatcgatttattagtaagattttcgaagagaaaatttataaaaattaaaaaagttcctaacttcagatatggaaaagtacataaaagaacaaaaaggttaatggcaagaataattaatgataagcaatatttagttagtccgaattttagtgttataaatgaaataggtgaatcagatattgacttttctaaagtcagtaatattaatggaatttactttgattatgacgaagatgataaactttggaaaataacttgcatgaatccttatgtggtatttacgtaa

SEQ ID NO: 56724 - DNA, 828 bp, Oxalobacter formigenes HOxBLS
atgtctgattctccatggacttcagaacacattaaatggctcgtggacaccggcgaaagaatttcgacggttgatggcaaaaaggtcaaggtcttggagttatgtcataaaaaagacgaggtagtgctctccgcatgggcaaggcactttcgaaatcactactgtcttgactccgaaattgattattggcgaagaggatataaatactctccacaagaatatctcaacaccataaagttccccagcccaaaagatgcaccaggacccagtatccgttctggcgactttggagaagtgctcgttgccgattatcttgaatacctgcttggctactgggttccacgcactcgctatggtgacaaaaccattcggaacgagtcgacaaaaggtagcgatatcatcggctttcatatcgtcaaggatggtaaagcttctttaaaggataggctggcaatctttgaagcaaaggcgcaattctcagggaataaggctaaagcgagacttcaagatgctgtagatggctcggctaaagacattgcacggaaggcagagtctttaaatgcgatcaagcaaaagctatatggtcgcaatgagcttgataatgctgaaaaaattgaacgtttccaaaacgaagttgatcacccatataaagaagtttatggggctgtcgcgctttttgagaatccactttttgacggccacctgatatccttgaccaatgcatcatctcatccacgttcaagtgaccttgcgttagtagttatcaaaggggatcaaatgatggaccttgtccatgagctctacaggagggctgcggatgaggcctga

SEQ ID NO: 56725 - DNA, 3153 bp, Oxalobacter formigenes HOxBLS
atgaggcctgaaagaaaatcccatcgtcttttgggcgttactcgatcaaaagctaagatgatcgagtacaatgtacctgaagaatatcaggatattgatttatcagtacatccaaataaacttttcacccttacgattggcctgctgggtgaccttgccgtcgctatcaaccgcgaggagccggattcagactccctgtctaagctgagaaccaatctgcttttctctgcccgttttttcgactcctacctccaatcaaagctgaatgagacacttgatccatacctagtgcttcttgggtcggcctcctattatctgtgcgatcttcccgggagtgcttcagtattggcgaaacgcatcgatggcaagtgtccgaatctggatagcgatggtttggaagatttgttgctctggttactgcaggccgatctgaaaacctatttcaatggaactaagggccccttcagcaaattcatcgatgggatttcaaaagggattctccagtttttcaggaatggtaatggcgaagataaccttcttaacttagccacaaaactgagaaacaccgtttatgaattctgcacaccgaggcaacttctgtttggtgatgtgatcgcggcagttctacggaaaaaattgcagaattcaacctggaaagctctgccgtcatattcaggtttaccccgagaaaaatggctccacgcactgcaaaaagattcttttatcaaggaactatggcctgcacaacacctgttgggccaagcggaggttctcaaaggcaagtctgccattgttcaaatgcctaccagtgctggaaaaacgaaggcaacggaactgatcattcgaagtgcatttctagccgaacgtgtgtcgctggccattatcgtcgcaccgttccgggcgctctgtcatgagatcaagaacagtctcgtcgaagcattccacaatgaacacaccaaggtagatgaattatccgatgcgttacagaccgacttcgagattgacgatcttttgggagagcaccaacagattctggtcataacgccagagaaacttgtatatatccttcggcatgaaccgagtctggccaaccaggtgggattactgatctttgatgaagggcaccaatttgacaacggtattcgaggcatcacatacgagctactcctgacatcgttacgtttcatgattccagaaaaaacccagaaagtgctaatttcagcagttatcaccaacgctgagtttgtcggagaatggctgaacagcaatcccaatgtcgttaaaggcacaacccttattccgactttcaggtcggtcgggttcgcgagctggctcgatcagttgggaaggatcgaatatgtcgacaaccgtgacgttgaacaaagcgagtttttcgttccccgagtaattgaaagattcaatctcgggagaagaggcagagagcagaaagatcgccacttcccagaaagaaatgatggccaggccattgcactttatctcggtataaaactggttcctaacggaagcatcgccatcttctgtggcaaaaaatcaacagcgacaagcatttgtgaaaaagcggtggaattcattaatcatggtattccgcttccactcccacaagtattctcagaccgaagggaggttgaacggctctattacctccatgttgcgaatcttggaactgatgcatcggcctcaatgattgccgagcatggcatattttctcatcatggcaatacaccgcatggaatccgcctttcagtggaacacgctatgcgtgagaacctcgttcggttcgttgtttgcacctccacactagcgcaaggcgtaaatcttccaatccggtatctcattgttaccagtgtctaccaaggcatggagcgcatcaaagttcgggattttcataacctcatcggccgagcgggtcgcgccgggatgcatactgaaggcagcattttgtttgcagaccctattgtatatgacaagagacgcaaccgaaaagacggctggcggtgggatatagtcaaggagctgcttgatccagccaagtcagaggaatgcgcaagcagcctctttcaattgatccctctggttatccggaatgaccgtaccaagtcaaaagacaaaaagaatcatacgctgacatgggacatcctgtcttttgccgcagctcatatagctggatgggattctctgaatgaaattatcagcaagattgctaaacaaaacggtggaaacggtttcacggtcgatgtggtgaaaccacaattcgaatttttcagcctgactctcgcctccatcgaaggctttcttctctccaattgggatgctgttgataatgggctgacggaggcagacattgctgatctcgcggaacagacattggcgtacttcttggctgatgatgagaaacgggagcagattcaagaattattcaagcttctggcggaaaacatatcaaagaacattactgacgttaatcggcggaaagcatttggcaaaacactctatggggtcaacgatgctaaggtgattgagggatgggttcaagataacgctgatgaacttatcgccgctcaagtgggaaatgaagttcttgacctcgtgtggccgttaataatggggcatgtacacaacaaagctttcaataagttcgacaagaaggacgtcctgaaagaaattacgaagaagtggatttcaggaactccatttaatcagcttttccaaattgccgacaataacaaatgcaagctcggtagaggaaagaggcctaggaaagtcaagatcgaaaatattattgatatctgcgagggcgggcttgcctatgatggggctcttcttgtgagtgcattgtgtgaatttctagaaatgctggatcgcgaaggaacaggtgatccgatcagtcgtctccagattttccaaaagcggatgaaatatggtttgcccaccgaaaccaccattgccctttacgagcttggcttttcggatcgcgtcatcgctcaggatcttgccgcatccctaaacctggcagcgccccaaaagaaggatctcgtaaaggcgctgaaaaaagatcaggctggagccaaggcggtgatggagaaatatccaaggtatttccaaacgcgattgtctgaactacttagacagtaa

SEQ ID NO: 56726 - DNA, 849 bp, Dichelobacter nodosus VCS1703A
atgccttggacttcggaacacactaaatggctcatcgacaccggcgaacgactgaagactgccgacggcaaggaggtcgaagtctgggagttccgtcatgagaaagacgaggcagtgctctccgcatgggcgaaacacttccgaaatcattattgcctggatgctgaaatcgatttcctgcggggcaaacgcccgcgaccggattatctggacaatatcaagttcccgtgcaaaacatccaaactcggtccaggaatccgagcgggagattttggggaaatcctggtttccgattacctgcaatggcttctcggttactgggtgcctagagtacggtggtcatcgaaggttgttcgagatgaatcgcccaagggcagcgatgtcattggatttcgatttcataaaaaagacggcgacgcctccaccaaggacgtgttgtttgtctttgaatccaagacaaagttctccgcctcgaagatcaaccgcctgcaggatgccatcaacgattctgccaaagatcatattcgaatcgatgaatcgctgaacttcatcaaacaaaagctctttgaaaaaaaggaaattgaacaggctcaaaggatcgagagattccaaagccccgtagatatgccttataaggaaacctacggcgctgcggctatcatttctgatgagtgtttcgacgccgatgaattggcttcggcagactgccaaaaaattcccaagtcagcgaaatccaaggaggtctttcctcatcctaatggcgatagccttgtcctcttggttattaagggacccggcatgatggaccttgtccacgagctctataggagggctgcggatgaggcctga

SEQ ID NO: 56727 - DNA, 3393 bp, Dichelobacter nodosus VCS1703A
atgaggcctgaaaagaagtcccaactcctgctgggcgtcactcggtcaaaggccaagatgctcgagtacggtgttccggaagagcaccacatcaaaatcacccaagatccggcaaagctcttcaccctctcgataggcctgcttggtgacctcgccgccgccatcaaccgggaggagccagatcccgattctctcgcagagctgaaaaccaatctgctattttccgcccgctttttcgactcatacctccagtcaaagctgaacgagacacttgatccctacctcgtgcttctgggctccgcctcctattacctgtgcgatctgcctgggagcgcttcggtattggcgaagcgcatcgatggtgactgtccggatctggatggcgatgctttggaagagctgttgctctggttgttgcaggctgatctgcgaacctattttgatgaaacggagggaccattcggtggattcatcgacgggatttcaaaatggattctccagtttttcgaggatggaaatggcgaagaaaatcttctcgatctcgccacgaaactgagggacgccgtctatgaattcggcacaccaaggcagcttctgtttggcgatgtgatcgcggcggttctgaggaaaaagctcgaaaattctgcctggaaggctttgccgtcatactcctggctgccccgcgacaaatggctccacgcgctgcaaaaggattcgttcatcaaggaactgtggcctgcccaacaccttttgggcaaggcggatgttcttaaaggcgagtctgccatcgttcaaatgcccaccagcgctggcaaaacgaaggcaactgaactgattcttcgaagcgcgtttctggccgagcgcgtgtcactggccatcatcatcgccccgctcaggacgctgtgccatgagatcaagaacagccttgtcgaggcattccacaacgaacccaccaaggtggatgaattgtccgatgccctacagaccgacttcgagattgccgaactcctggggcaccaacaaattctggtcgtaacccccgagaagctgctctacgtccttcggcacgctccggaactagctgcccacattggcctgctggtttttgatgaaggccaccagttcgacagcggcacccgaggcatcacatacgagctgctcctgacgtcgctgcgctccatgattcccgcaggaactcagaaggtgctgatctcagcggtcatcagcaacgccgaggctgttggagaatggctcaacggggagcccaatgtcgtcgaaggcacaaccctgattccgactttcaggtcggtcggattcgcgagctggctcgatcagttgggaagaatcgagtacgtcgacagccgtgatgctgaacaaggtgagtttttcgttccgagggtgattgaaagattcaatcttgggaggaagaagcgggaaagaacggaccgtttttttcctgaaaagaccgatgggcaggctatcgcactttaccttggtctgaaattggtcccgaatggcagtatcgctcttttctgcggaaggaagtcaacagcggccagcgtctgcgaaaaggccgttgatattatcgagcgaggcgcacccgtggtcttaccatcagatttttctgacgcccaggaagttgagcggctgacccatctgcacgtcgagaatctcggtgctgacgctccggcgtcccagagcgaggcacatggcattttctcccatcatggcaatactccgcatggtatccggctggtggtggagcatgccatgcgtgacgaccttgtgcgattcgttgtttgcacctctaccttggcgcagggcgtaaatcttccgattcgatacctcatcgtgaccagtgtctaccagggcatggagcgcatcaaggttcgcgatttccacaacctcattggccgagcgggtcgagccgggatgcataccgaaggcagcatcctgtttgccgatccggtgatctatgacaagcgaaaggcgcgtaacgataaatggcgctgggatcaggtgaaagaacttctggagccgcgcaattctgagccatgcatcagcaatcttctatcgatcttcgaccccatcaagagcgatgacgagaaatacaccatcaccatggaggctctggattttgccaaggcctatatcgacgatcctgctgaagttgccaaattggctgccgggatagccgcacaacatggagacaaaaatttctcacgagacggtgtcgagcggcaagtcgcctggagaatcagcctcatctgtgccgtcgagagcttcctgttatcccattgggatgaatcggaggatggtctttcggaagctgatgtgacccgcctggccgaagggacgctggctttcttcctggctgatgatcagaaaaaggagcatattcgcgagttgtttcagcttctcgctgggaacatctccgcaaacatcaacagtcggcaactggccagaacttggccttacacacgatacaagagtttcgaggcatctctgcgtaaggctgcggaacaatggttcagcgagcgaggatgcgaaacccatcataggatggggtactgtctcgcccgtcatgatctgtggcccatgaatctcatctgtgaagatgtcgcggattacatccgccaagaacaggagagacatctcggcgaggattcgtttcctctgcacaaatacctgcatcacgggctaagcagccaggcgatggccttcaatcttattggccccctgattgtgcgcaacgatctcggcccattgaagattgcgattgaaaggctcggtatcgattggccaggtggggacgtcgcggcggtttttgagcacgacgaccgttcagtctttaacgaggacaacggccaaccgacgtctatcgacattattctgtcaggcacatgtaacagcctctttatcgaagcaaagctggtggaacgagaatttggtggctgctctgtttttgccggtggtgattgcgaggggcggaatccgtatccagacaggcttggcgaatgttacttgcaccatctcggcaggaaatattggcagcgcttggatgggcttggctttttggaggcgactcttgttaatggggccatatgtccgtttgcaaactactaccaatttttccgtgaggcgatgtttgcctttgccaagcaagggaccttcatattgctgcacgatgcaagaaacccggcttttttgaggtcaacggatgatgggatggcgcacggcgggtcgtggtcgtttctatatgaggcgatcccgcagaacctacggcatcgagttggccgattgaccattcaaatggttgttgaggcgatacaagaatcgggcggacacgaagactggattgaagatttcaagaaaaaatatgggctgcagtaa

SEQ ID NO: 56728 - DNA, 819 bp, Desulfococcus multivorans DSM 2059
atgccttggacttcggaacacactaaatggctcatcgacaccggcgaacgactgaagactgccgacggcaaggaagtcgaagtctgggagttccgtcatgagaacgacgaggcagtgctctccgcctgggcgaaacacttccggaatcactattgctttgatagcgaaatcgattattggcgcagggggtacaagtgctctcgcggagagtatctcaacaccataaagttcccggccccaaaagatgcaccgggaccaagtatccgcgctggcgactttggagaagtgctggttgccgattttcttgaatacctgcttggctattgggttccacgtactcgctatggtgacaaaaccattcggaacgagtcgacaaaaggcagtgacatcatcggctttcatatcgtcaaggatggcaaagcctcttcgaaggataagctggcgatctttgaagcgaaggcgcaattctcaggaaagaaagccaaggcgagacttcaagatgctgtagatggctcagcaaaagacatagcacgaaaggcggagtctttaaatgcgatcaagcaaaggctgcatggtcggaatgagctcgatgatgccgaaaaaattgagcgtttccagaacgaagtagatcacccatacaaggaagtttatggagcagtcgcgctctttgagaatccgctttttgacggccacctgacatcctcgaccgatgcatcctctcatccgcattcaggtgaccttgcgttagtggttatcaaaggggatcagatgatggcactcgtccacgagctctacaggagggctgcggatgaggcctga

SEQ ID NO: 56729 - DNA, 3123 bp, Desulfococcus multivorans DSM 2059
atgaggcctgaacagaaatcccaactcctgcttggcgtcactcggtcaaaggccaagatgctcgagtacggtgttccggaagagcaccacatcaaaatcactcaagatccggccaagctcttcaccctctcgattggcctgcttggtgacctcgccgccgccatcaaccgggaggagccagatcccgattcgctcgcagagctgaaaaccaatctgctattttccgcccgctttttcgactcctacctccagtcaaagctgaacgagacacttgatccctacctcgtgcttctgggctccgcctcctattacctgtgcgatctgcctgggagcgcttcggtattggcgaagcgcatcgatggtgactgcccggatctggatggcgatgctttggaagacctgttgctctggttgttgcaggctgatctgcgaacctattttgatgaaacggagggaccattcggtggattcatcgacgggatttcaaaatggattctccagtttttcgaggatggaaatggcgaagaaaatcttctcgatctcgccacgaagctgagggacgccgtctatgaattcggtacacccaggcagcttctgtttggcgatgtgatcgcggcggttctgaggaaaaagctcgaaaattctgcctggaaggctttgccgtcatattccgggctgccccgcgacaaatggctccacgcgctgcaaaaggattcgttcatcaaggaactgtggcctgcccaacaccttttgggcaaggcggatgttcttaaaggcgagtcttccatcgttcaaatgcccaccagcgctggcaaaacgaaggcaactgaactgattcttcgaagcgcgtttctggccgagcgcgtgtcactggccatcatcatcgccccgttcagggcgctgtgccatgagatcaagaacagccttgtcgaggcattccacaacgaacccaacaaggtggatgaattgtccgatgccctacagaccgacttcgagattgccgaactcctggggcaccaacaaattctggtcgtaacccccgagaagctgctctacgtccttcggcacgctccggaactggctgcccacattggcctgctggtttttgatgaaggccaccagttcgacagcggcacccgaggcataacatacgagctgctcctgacgtcgctgcgctccatgattcccgaaggaactcagaaggtgctgatctcagcggtcattagcaacgccgaggctgttggagaatggctcaacggggagcccaatgtcgtcgaaggcacaaccctgattccgactttcaggtcggtcggattcgcgagctggctcgatcagttgggaagaatcgagtacgtcgacagccgtgatgctgaacaaggtgagtttttcgttccgagggtgattgaaagattcaatctcgggaggaaaaagcgggaaaggacggaccgtttttttcctgaaaagaccgatgggcaggctatcgcactttaccttggtctgaaattggtcccgaatggcagcatcgctcttttctgcggaaggaagtcaacagcggccagcgtctgcgaaaaggccgttgatattatcgagcgaggcgcacccgtggccttaccatcagatttttctgacgcccaggaagttgagcggctgacccatctgcacgtcgagaatctcggtgctgacgctccggcgtcccagagcgcggcacatggcattttctcccatcatggcaatactccgcatggtatccggctggcggtggagcatgccatgcgtgacgaccttgtgcgattcgttgtttgcacctctaccttggcgcagggcgtaaaccttccgattcgatacctcatcgtgaccagtgtctaccagggcatggagcgcatcaaggttcgcgatttccacaacctcattggccgagcgggtcgagccgggatgcataccgaaggcagcatcctgtttgccgatccggtgatctatgacaagcgaaaggcgcgtaacgataaatggcgctgggatcaggtgaaagaacttctggagccgcgcaattctgagccatgcatcagcaatcttctatcgatcttcgaccccataaagagcgatgacgagaaatacaccatcaccatggaggctctggattttgccaaggcctatatcgacgatcctgctgaagttgccaaattggctgccgggatagtcgcacaacatggagacaaaaatttctcacgagacggtgtggagcggcaagtcgcctggagaatcagcctcatctgtgccgtcgagagcttcctgttatcccattgggatgaatcggaggatggtctttcggaagctgatgtgacccgcctggccgaagggacgctggctttcttcctggctgatgatcagaaaaagaagcatatccgcgagttgtttcagcttctcgctgggaacatctccgcaaacatcacagatccggctcgccgcaaaatctacggcaggacgctttacggaattcaggatgcccaagccatcgagggatgggttcagtccaacgctgacagcctgctttcgattgttgatgaaacagaagctctcgatcttgcctggccattgcttacccggcatatcaacggtggcgtattcaccaagttcgataagccagaggtgctaaaagaaatcgcgcatgggtggatcagtggaaagcccttcagcgatctcctgaaaatcatccttaagcgaaaagccaagatgatatggggcacccgccggagggagttcaagatcgatcatgtcgtcgacgtctgcgaagggacgctcgcttatgacggtgcgctggttgtaggtgctgtgactgaattcatcgaaaccctcgaccaagacggcaccggagacctgatcaatcatctgcagctttttcaaaagcgcctgaaatatggtctgcccaccgaaaccaccattgccctttatgaacttggcttttcggaccgcgtcatcgctcaggaccttgccgcatccttgaacctggcagcgactcagaaaaaggatctcgtgaaggcgctgaaaaaagatcgggatggagccagggcggtgatggagaaatacccagcctattttcaggagaggatgaatgaactcctgcagtag

SEQ ID NO: 56730 - DNA, 840 bp, Solitalea canadensis DSM 3403
atgtcacttcacaaacaattaataggaagccatccaataacaccatacatctttgaacgttggttaaactgtactgatattgagcctactgatgaaaggtgttatcggtcacttaaccctaaaataccatcaaccgatcctgatttaattcaatggcttggtcagaagcttgttcatcatcattatgatgagaatcgaatccaaaaattgaagcaaaagtttacagaacttggttttccggaatatgcagaacaacatagaaaactacctagggcggataaaacaaaaaaaggaaacgcaactgagatattgctaattgaatatatagaaagctgtcagaataaagctttaataaaagcatacaaattaagatataatcctaatgttgaccaagcaataaaaggtgatgatatgcttttagtcgatattttaacaaaccaacaaggctcagaggaagtcaaactataccttggtgaagcaaaattcaggaaaaccccaactaaaactatagtagatacgatcagcgaggctttagggaaagagaaattaccgctatcctattcttttttagttgatgaattaaatagaaaagacgaaagtaaagcaatagctgatttactggataaatttttggtcaaagaaataaaagataaagggaatatatgctatactggttttttgctaagcaatacggatacattcaaagtcgtcgatactcattttaaaagtgacaatccaacacttatattaatttctattggcatagaaaatccagaagatttaattaatgaagctttcaaaaaggctgaggaaatgattgcgaatccaacttctttatga

SEQ ID NO: 56731 - DNA, 3372 bp, Solitalea canadensis DSM 3403
atgagaaacgaaattataaggaaaaagttagttctgatagaaagagacagagttatacagaatctaattgctcaggcaaatgctcgttatatactactcaatacttctgaaaatagagaaaactttcctccttacacaattaatgatgataaattaaatattctatcattctattatttaaactttggttgcagctttgcggaaaatcaagcttttgatgaagctattgaacctttagaaaaaggagcttcattattagagtttatacatgcagctgaaacaaataaaaagaatgccagtaattactatggactcatagcatcattagcctattatgtaggttttcaatattcaaaatcattcatattgataaagaagtttgaaacaacttcagtcatcgcgaaattgatacatctttttttattgagagattttattcagctttcagaagaaatcaataaaatactgatagacccttcttatcgagatagctttatttcgaacaatattgatgaaattgatggtacaacaaaaatatatgaaatcacaatagctaaagcgttagatggatttttaaaatattttttcacgggaaatgtcgatttactaaataacgcaaaggcacttttaaagagcataaaggaaatatcggaaattgaaactgaccctggaatttggtgggttatacgattattacttctaatatctgatggattcaatgaatcttcactctggaatgcattaaaaagttatttcgaccttgaccatcccaaagtaagtcaatatattaaatcattagtatttctagctcctaggggtatttttgaattgtttattacccaaaggaaatccctaaataaggttttaaatgctgaaaatggctgcatcattagcattccgacgagcagcggtaaaacaagaattgcagaaattgccatacttaattgtatgataaatgaccctgcaaacaaggtattatatatagccccatttagatcattagcttttgaagttgaaagcaccttggaaccaatattagataatgcagacatttctgtttcacatctatatggtgggagtttatatagtaagctggacgaaaaaatcattgaagattctgatgtcattattgcaactcctgaaaaagcgaaagcaatattgcgaggtaacacagaattagtaagacagataaaactaatcattattgatgagggccatttacttggtcctgataaaagattaatagtaaatgaaatcttttacgaagagcttcgattttatgtacagaaaaatggaggaaaattcttattattatccgcagtattacctaattcagaagaattggcagagtggctaactcgatcatcagaaactatttataaaaattcatggagaccatctgatgaacgtttaggaattttggattgggatggaaatttcgtaaatatcaattggataagtcaggatgaagacagacaatcgtttaacaacaagtttattatatctgaagagcttcccttaaagccaagacagcgcaaaattagatattttccaagcaataaaaatgaagcaattgcagctactgcttataaatttagaacatttggctctgtacttatttttgtgggtctaaaaagctctgtatttacaatggcggaagcttactttaaacgtcttggcaacgctccagataaccatcaatggaagaatctctttgattggcgagcatttgaacttgcttgtattgaaacgtatggtgaagagggaaacagctggttatcttatgcgagaaaaggaatactttgccataacgcagatttgcacgctgatgtacggttgcctttggaaagactaatgcgaagtgataaaccattagttataatctctacatcgacactcggacagggtgttaatttaggagtatcaacggttatcttctccacattatatcaagcaggtgaattaattaatgctagagatttttggaatattgcaggacgggcaggaagagcttatgtagaccatgaaggcaaaatactcgtagctttagattctgagaatctatccaaaaaacaaatcgaatatcgagtaaattctataaaaaaatattttgacaaaagtaagatagatttggcacatagtggcatcctttcacttatggttgttttgaaaaatattgctcaagaaaatggagttagttttgatcttttagtccaactaattgcagaaaataaaactcaagaaataggtgaaaaagtcggtgatattgatgaagcacttgactggatagacgatacgctattatcgcttttacatgtaaataatcccgaaggagaaattgatttatcatgggctgaatctttttttacacaatctctggcttatattcaatccaaaaatgaacaagctatttcaggtgaagaagttatcaattttttaagttcacgaatcacgggtattgttgaaaaagtgggtaataatagaattaaatggcaatcattaataaagtcgggcatcccacttaattcagatttaatgcttgaagaacttcttcccgaatttatacgattggttcaagaatattttaacgccaatgaaataactattgaaaggaaaattatcttattatcttccattgaggccttattaacagatatacccatctttattgaagatggtgattcaattaagagtaaagacgtaaattcaatacgtcaaatgtggatcaatgcttctcccatttcaacaattattccttttgaaaatggaattgaaataataactaagctatatacgtttaagctaccttggatactaaatggtattgctaaaaaaatgcgtaatatcgaaaacgaggatgaagctgttataattgaagaactttcaatacttgtcgaatccggcctgccatcattaacgaaagtcaagatttatcaagcaggaattaggtccagatcttctgcagatgaactgggagaattatttgacgatgagctgtgggaaagaagtatttccgattataagagagacttagtattgcataaagattcttataaagagcaagtttctgcaactgcaggagaatggcttgacctgcttagtcgtacagctaatagacgagttacaaaggttaaaaatataccaccctttacatttggaaatattcatgaaaaaacaaatactttaattgctaaaaacataaatggaaagcagtatttacttagtcctgacttgagtattctagaagacatttcagaatctgatattgacttttcaacaataaatagcattcctggtattgattttaagtacagtccagaaaatgggacatgggtaatgaaaattaataatccttatatacaattaagttaa

SEQ ID NO: 56732 - DNA, 771 bp, Rhodopseudomonas palustris BisB5
gtgaatttcaacgattggtgccattccgcggacgggccggtaggaatccacttctgcagggtgatgaccgcgcacgcctcagcggccggcgttcaatcgactgcggcggtgatccccgggcactatgctgcggaggagcaattggcgcgtgcgctcaggcgcctcggcaagcccgctgccgcggcgctgatcgagggcaaactcccgaccacgaaggcgatccgctccggcgatctcggcgagatctacgctacggaatggatcgacgcacacagcggaggttatagggcgccgatcaagcgcttgcgatggaaggaccaccgcaacatggccatgcggggcgacgacgtgattggaatccatctggatcccgccactcaacgcctgagcttcttgaagacggaagccaaaagccgggttgctctcactgcgcaagtcctcaccgaagcccggacgggcctggataaggacggcggaaagccgtcagcccacgcgctgggcttcatctcggctcggctaatggaattgggtgacctgcccctgacggatgctatcgacgacgcgctgctcaagcacagcatcccggtgcagagcgtcaaacacctgctctttacattctccggcaatccgcctggagagctgatgacatcttcactccaggcgtatccgggccccattacgcaatggggcatcggcctgcgggtcgagggacatgtcgagttcgtggccgcggtctacgacaaggtgatcgccgatgccaacaactcctga

SEQ ID NO: 56733 - DNA, 3522 bp, Rhodopseudomonas palustris BisB5
atgccaacaactcctgaaacgatcgctgcagacatcgaggaagctgcgaccgccggattccgaggaaacctacttgctcgcgggcaggcccgcgcgatcatctggcgcgacggtgccctgccggccgaagcgccagccttcgccccacaactgagctacgatctccattcctatgcctatgctcttctagggcttgctctccgtctccgtgagatcggcggcgatgcggcccgggcccggatcgcgttcgagcaggcggccaccgcccttgaagccgtaatctcgaaaggggaccgtcaggaggtcgaccgagacttccacttcgtgatggcggcagcgagctatcatcttgcgcatctttcggcgcgcgcatattcgcttcttgcgaccgtcgatgccgacgagaatttttcgcgcatcgaaagggcgcttgcacagttgatgcggcgcaatttcgaagccctgcgtgccggtgtgctcgattaccgagcttcggcgacgggctccgatgcccggattgccgccgaattccaggcacgactggatcagcctgaaggcgccggcgatccagaggcccgcggcgagttcatctttgagggtctggacgtggccctgaccgacgcattcctttcggcgatatcaatgttcgttcttgcactggaccggggtgaccggtcgcttgtagatcaggcgttggcccggctccgagaaaacctctcgatatgcagcgaactgaacctcctgccgcagtggtgggcgcaccgcctggccatccatctcctgtccgacctctggtccaatactttccacgaaagagttccgcgccaaccgaccgggggcgaagccgctgactggccacgcctccggcaactcttcatcgctctgctgcagcggcgacccaaagccgaaatcgacctgtggccgtctcagctcgaagcggcggagcgcgccgtcgatcagggcgacgacttagtggtttcccttccgacgagcgcagggaagacacggatcgccgagctctgcattttgcggtgcctggctggcggaaaacgtgtggttttcgtgacgccgcttcgggcactttccgctcaaacagaaacgacactgcagagaactttcggtccgttgggaaagacgatttcagccctgtacggtagtattggtgtcagcggcttcgacgaagacgctattcgggaaagagacatcgttgtctcgaccccggaaaaactagatttcgcgctccgcaacgatccttcattgctcgacgatgtcggacttctggtctttgacgagggccacatgatcggccccaacgagcgggagatacggtatgaggttcaaatccagcgcctccttcggcgccgagacgcgcatgcacgccgcatcgtttgcctttcagcgatacttccagatggcgaccagctcgacgacttcgctgcttggctgcggcgcgaccatccgggcggcttgatcaagaatgactggcggccgacccgactgcgcttcggggaagtcatctggaccccagcttcggcatcggcaaggttgaacctgcgcgtcggcgacgagcggccttgggtgcagcgcttcttgaccggggccgcgccgccgcttttcatcccgcccaagcgcttgcgtactaaagtctttccgggaaatcaacgtgaactctgtctcgcaacagcatggcggctcgtcgaagacgggcagaccgtcctgatcttctgccccgagcggaggggcgtggagccgttcgcggacgtcgtcgtcgacctgcatgagcgcggcgctctccgctcgttgctggaggtcgatccaggagtgctcagcacggcgatcacgctcggcgaggagtggctaggccacgatagcgcaatcttgaagtgcctgcgcctcggcgtggcgctacatcatggagcgttgccgaccgcatatcgcaaagaggtcgagcagttgctgcgcgcgaacgtgctcaaggtcaccgtctcgtcgcctacgctggcgcaaggccttaacctttcggccacggctgtggtgatgttctccctccatcgcgccggagagctaattgagatctccgaattcaagaacgtcatcggccgagctggccgtgcttatgtcgatgtggaagggatcgtgctctttccgatgttcgacgagatagtgaagaagcgacgaagctgggaagccctcatcactgatcttggcgcgcgtgaaatggagagcggacttgtacgcctcgtcagcgccctcttgttgcgaatgcgcgctcgggttggcggggacctgaatcaactcatcgaatatgtggtcaacagcgctgcagcatgggtctttccggaggtacagaatgagacgcccaaggaccgtgagcgtgcgctcgcggactggaatcggcacgtcgcgacgctcgacacagccatcttgagccttatcggcgagaacgaaatcgctgaccatgaagttgaggctgcgctggaccacatactgcagtcctccctctggcaccgccgccttcttcgccagaacgatcaggtgcggcacctattgaaggctggccttctctcgcgtagtcgactcatctggagtcaatcgacatccacgcgtcgccgggggtatttcttggccggcgtcggactgactaccggccaagcgctcgatgcgatcgcggcggatgccaacttactgctgttgcaggctaacgccggcatcggcgccggcgacgccggcgcggcgatcgatgcggtcactcgcctcgccgaactggtcttcacgttctatccgttcactcccgatccctggcccggcaactggcgcgacatactccgttcctggttgctaggccaaccccttggtgcgctcgccgcaggccaagcttcggacaccctccagttcatcgagggaagcctcgtttaccgtcttccatgggccatggaagcggtgcgggtccgcgcggcggcgaacggggatacggtcggtttgttcggtcttaccctcgaagaccatgagctgagcctagctgtcctctccgtggaaactggcacgatgaatcgttcggcatcgattctcatccaagcaggattcacgtcgaggctggccgcgatcaaagcggtgaccgatagcggcgccacatttcagaacgggggacagctccgagcttggctcagctcagaggccttggcggcatggaacgcgctgcccgactggccgacggctgagaccaaagcgatgtggaccgagttcactcagggattcactccacgcgcgagcaacatttggagcgaccgccgatactgggcaagtgccacttggtacggcgttccgccacttccgggcgtgcccgtgcagcttcacgattggaatggtcagcggctggtgctttcagcagattgtacgcccttggggacattgcggaatgcactgaacgcgaacaggaaagggctcattcaggcaacggtgtcaccgaccgccggaaggatcgatctggtgtacatcgggccagatgacctctctgcgacctag

SEQ ID NO: 56734 - DNA, 780 bp, Rhodopseudomonas palustris BisB18
atggttcaattcaatgattggtgcgactccgccgacacgcccgtaggcaaccaccacgtccgcgtcatgacgggccgaccggcggactctgcgaccgggattcaggtaacagctacggccgtcccagcccactatgccgccgaagagcgcattgccggagcgcttgcgaggctgggcaaagccgctgcagcgaagatgatcaccgatcttctccctcaaacgccgcagattcgatcaggtgacctcggcgaaatctacgcgacggagtggatcgacgcgcacagcggttatcgtgctcccatcaagcggctgcgttggaaagatcatcgcaacatggcgatgcgcggcgatgatgtcatcggcatgatcctcgaccctgcaacacagcgtctccgcttcttgaagacggaagcgaagagtcgcatcgacctgcgcgcccagacgctgcaggaggcgcggaccggcctggacaaggatggtggccttccatcgtcgcatgcgctgtccttcatctcggccaggctgatggagctgggtgctgacgcgccgcttgtcgatgcgatcgacgaggcactctatcggcacggcatcccgcccgagagcgtcaaacatctccttttcaccttctccggaaactccccgcaggcactgctgactcaagcgctgcaagcctatcccggtccgatcggacaatggggtgtaggcctgcacgtcgatggccatgccgccttcgtcggggcggtctacgctcaggtcatcaccgatgccaaccagccctga

SEQ ID NO: 56735 - DNA, 3522 bp, Rhodopseudomonas palustris BisB18
atgccaaccagccctgaagcgatcatagccgccatcacggacgccgcggcgacgggctttcgcggcagacttatcgcgcggggccaagcgcgtgccatgatctggcgtgacggtgtactgcctcctggcgcccccgccttctcgtcgcagcttagcttcgacctccacagttacgcctatggcttgcttgggctggggctgcgcctcctcgaactggatggtgacccaaaccaagcacggatcgctttcgaacaagcggcgaccgccctcgaggcagttatggctaaaggcaatcgcgctgaggtcgaccgcgacttccatttcgtcatggcggcggcgagctatcatctcgcgcatctatccgctcgagcttattcgctcctcgcgatcgtcgcggccgaggagaatttctcccccatcgaacaggcgctcgcgctgttgatgcgccgagacatcaccgagttgcgggcgcgcgtgtatgccttccgcctggatggccgagggtcggacgcgactattgcagcgctcttccaacagcgcctcgccgagcccgccgccgccgatgcgccggagcgcgatggacaggacttccttttcgagggcctagatctcgccctgacggattccttcttcggcgccttcgcgatgtttctgctcgcgctggatcgtggcgagcgggctcttgtcgaccaggcgatcgcgcagcttcgagagagtctcgaaatctgcgcggaattgaaccttctgccacaatggtgggtgcatcgggtcgccatccatctcctttccgatctctggtccaacactttccacgagaaagtcccgctgctccccgccggtggtgccgcgccttcatggcctggtcttcgcgaactcttcatcgccctgctcgctcggcgtccgagggccgaggtcgacctctggccgtcgcagaccgaggccgcgtcgcgcgctgtcgatcagacggacaatctcgtcgtctcgctgccgaccagtgccggcaagacccgaatcgccgaattgtccatcctgcggtgcctggccggcggcagacgagtgatgttcgtgacgccgctgcgcgccctgtcggcgcagacagaaaccacgctccaacgcaccttcggtccactcggcaagaccatctccgcgctctacggcagcatcggcgtgtccggcttcgatgaggacgccatccgcgagcgcgacatcgtcgtcgcaacccctgagaaacttgacttcgcattgagaaacgatccgtcgcttctcgacgacgttggcctgctcgtgttcgacgaaggccacatgatcggacctggggagcgcgaggttcggtacgaagtccagattcagcgcctcctgcgccgccaagacgccgatcaacgccggatcgtttgcctgtcggcgatccttcctgacggagatcaactcgaggatttctcggcatggctgcgtcgcgaccagcccggaggcccgatcaagcatgactggcgaccgacacgcctgcggtttggcgaggtaacatggaattcgccaacagcgcgtctcaatcttcgtgtcggggaggaaaagcccttcgtgcctcgcttcctcaccggcgcggctccaccattgttcgtgccgccgaagaagctgcgcacccggctcttcccggataaccaacaggagctgagccttgccacggcgtggcggctcgtgagcgatggtcaaaccgttctgatctactgcccagagcgtcggagtgtcgagcccttcgccaaggtcatcgtggagttgcactcgcgcggtgcgctcgcatctctgctcaccgtcaacccggccacactccaaactgctatcgcgcttggcgaggaatggctcggcccagacagcgacatcctcaaatgcctgcggcttggcgtggcgctccaccatggtgcgttgccgaccgcctatcgcaaggaagtcgagcggttgctgcgcgacggtgtgctcaaagtcacgatctcatcgccaaccctcgctcaggggctcaacctgtcagcgacggccgtcgtcatgcactcgctctatcggcatggggagaagatcaaggtctccgagttcaaaaacgtcatcggccgcgctggtcgcgcctacgtcgatgtcgaaggcctcgtcctctatcccatctttgaggacgcaaagaataggaagctcaacgagtggatcgagctgatcgaagatctcggcgcccgcgagatggagagcgggctcatccagctcatcttctcgctgctcaaacgcatgcacgcccggcttgggggcaaccttgaccaattgatcgactatgtcgttaacaacgcggcagcatggacctttcccgaggtcgcaggggaaaagcccgataagcgcgagcgggcacttaacgagtgggagcgccatatggcgacgctcgatacggccattctcagcctcatcggcgaagccgacgtgccggatgaccagatcgagaccgcgctcgacaacatccttcaatcctcgctctggcagcgtcgattgctccgcgtggacgacgcatcgcgcgccgcctatcgcgccgcgctgctcacccgaagtcgctacatctgggcgaattccacggctgcaacgcgacgcggctacttcctcgcgggccttggcctcgaagccggtcacgctctcgacgccgttgcagccgaggcaaacgatctcctcgtccaagcaaacgctgccctcatggtgtcggatcatgaggcggcgatcgccgcgatcaccgggatcgccgagcgcgtgttcgccttctacccattcgagcccgacccattcccagtcaactggcgggacatcctgcgatgctggctgcttgggcagccgctcgccgcgacggtcgccggtcaagaaggtgaagcgttgcaattcatcgagggtgggctggtctatcgcctgccttgggccatggaggcgttgcgcgttcgggctgccgccaatggcgatgtcgtcggtgtgttcggcctagcgctgggggattacgagttgggcctggcggtaccggccgtggaaaccggaacgatcaatcgctccgcgtcaatcctgatccaggcaggcttcaactcgcggctcgctgccatcaaaatcattaccgacaccggcgccacgtttacgagcggtgcggaactgcgagcttggcttcgcacacccggcgtcgcaatctggtcggccgaaccagattggccgaccgcagaaacgagggccatgtggctcgaatttatccgggagttcgcgccggccgacaaccggacttgggcgcggcgagactatcttggaaacgtccagtggttcgccgcacccgcccctcccgggacgcccgttaacctctgtcaccggaatggacagccgctggtgctggcacccgacgggcgcgcgatcggcctgctgcaacacccgctcaactcaaatcggcgtggtctcgtgcgagcgaacgtctctcagaacgttgcccatctcgatctgagctatctcggccccgatgacttgtggggagcctag

SEQ ID NO: 56736 - DNA, 783 bp, Rhodopseudomonas palustris DX-1
gtggggctctatgaaaaatggtgcgaagccaccaaggaaaaggacaagcgtaagcgttactggacctatgtcgagaaggatggcggccgcaatgagattcgcgatgatctcgccgagaccatccgctcgcactacgaccgactcgaacggattgccgaggacgtggagcggctcggatacaaggtcgccgccaagatcttcagcgaggcgatgccgcagacgccgaagggccgctcaggcgatctcggtgagattctggccactgagctggtcgaggaagagatcggcttgcgcgtccccgtacgccgcctccgctacaaagacggccgcaacatggccatgcgcggggatgacttcatcggcgccggttatgatgcggccggcgagaagctctggctcttgaaaggcgaagccaagagcaacaaggtactcggcaaagccacggtcacgaacgcccgcaaagtgctcaaccgcgacaacggccgttgcacacccgattctctgctgtttgtcgccaaccgcctgctggagagcaacgatccagatgacaacgcgctgggccgcagcctccgagacgaggtgggcctgaagtcccttcgcgccgatcgcatcgaccacatgcttttcaccgtgtcaggcaacggcccgcacgcttcgctgaaagaggacctcgacgctacgagcaccaatcgagatcattacgttgtgaacatccacgtcgaagatcaccaggacttcatcgcggccatgtacgaggaggcggaagaccttggagacgattga

SEQ ID NO: 56737 - DNA, 3510 bp, Rhodopseudomonas palustris DX-1
ttggagacgattgacgaactgaccaccttcctgacgaccgcgactgtcgacggtatccttgggcgcctcctctatcgcggcgcggcttggtcgctgatgcgcgaggacggcgtgttgccaccgaatgcgccgccgctgggcgcgacaatcgaaaccgatcttgccgaacacggcttcgccctgcttaggggtgcgatggccctgcgtgctcaggctggcgcatcggatttgaccagcaaggcgttcgagcgcgctgccaacgccttcgaagccctcgttcgcaacggcgatccggagtcgccagatcgtggcttccgtcgcaccatagccgccgcagcctatcacctcgccggcttctcagccgtcgcctattcgctattcaacgagattgcggacgatctcaatgcctcgccgggcgagacggcgatccaacacctgatcctgcgcgatctcggccaattgcgcggcttcgttcgcgaatggctggatgacgaagctcacgacgatgagcagatcgccgagtcgctgcggggtgaagagcctgacgtcgatgacgcgctgtcaaccatcctcaacacgacgatctgccgggcgctggcgcattttgatctcgcgctcgagacgggcgaacccgagccaatcgagaccgcgcggacgttgctcgccaccgcagtcaggttggcggacaatgcggaaaatgttccgctgtggtggatctcgaacatttgccgtcacctcatcgacgatctctggcagcattccctgcaccagaatttgccgaccgagccgccagagggaacggaggaaaaatacccggacctgcgccggctgttcatctcgtcgctttacgcacgcaagacttccgaggtggagctatggccatcgcagcgcgaagcggcccagcgttccaccgacgtcactgacgaccttgtcgtcgccttgccgaccagcgccggaaagacgcgggtggccgagatcgccgcgctgatgaccctgtcgtcggctcgccgagtgctgatcgtcacgccgctgcgcgctctgtcagcgcagaccgagcgatccttcagaaagaccttcgcccccctcggcttcagcgtctcgtcgctttacggcgccagcggcctttcggccggcgatgaagacgcgctgcgaacccgtgagatcatcatcgcaacgccggagaagctcgatttcgccctgcgaagcgacccatcgctgatcgatgatgtcggccttatcgtcctcgacgaaggccacatgattggtccgagcgagcgtgagatccgctacgagacgctggtgcaacgcttgctccggcgcgcggacgcgggcgaacgtcggattgtctgtctctccgcgatcctgcccagcggcgacgaactggacgatctgaccgcatggatacgctccgacgaacccggcgagcccgtgctttccgactggcgccccacgcgccagcggttcggcgcactcacctggcggggcaaggatgcgcttcttcggctcgatctcgacgacgatggtccgttcctcgacaaattcgtcgtgcagaaaccggcacggggtaaggagaagaagccctatccgcgcaagaactcccatctcgccttgttcgccgcatgggagttcgcgggccagggcaagcggaccctgatcttctcgacccaggcgaattgggtcgagggctatggcaaacagatcgtggacctctgcaagcgcggctatttggactcgctgctggaggatgaggcgtcgatcgcccgcgctctggaggtcggcaaggagtggttgggtgaagaccatcccgccgtcgcctgcctgaaggcgggcgttgccattcaccacggccggctgccgagcccgtttttgcgtgagctggaagtcctgctgtcagaaggtgtcctgaaggtcatcgtcgcgtcgccgacgctctcgcagggtctcaatctcaacgccgccgtgctcttggtgcctgcgttgtatcgtgccggcgagaagatcaaaggcgaagagtttgcgaacgttgccggtcgagccggacgcgccttcgtcgacgtcgagggactcattgtccacgtcatgttcgacaatattaactggcgaaaaaaagaatggggcaagctggttgcctccgccaaagctcgcacgctgaaaagtggcctcatccagatcgtcgccgagattcttgagcggctgtcccgcgaaggtgttctggatcgtgacgatgcctgggaatatctcgccaatgcacgcgaagcttggaggtcgccggaggaggaagcatctgtggccgagcgcttggctgctgcaagacagaatgatggcgatgtcgctcatgacgacgacggagaagatgatgatgacgatgcggaagagaccatcgaagaggagcctctgtcgcagatagtcgaacgtctagacgcgactgtgtttggactcattgaagcgctcgattctgatcgggccgatttgccgaagcttttggacgaggccctcagaggatcactttgggctcgtcagatcgcccgcgaagacgaagacgtagcccctctgcacaagcgagtaatcgaggcgcgtgctgatctcatctggaagacgaccaccgcatcggcccggcgcggtcatttcgccatgggtgttggactggaagcaggccttgcaattgatgccatggctgacgtgttggccgaactcctcgaccgcgcagacgtagcggcgctgagcggcgatattgatgaactagtcgagacccttggcggccttggagagcggcttttgttcatgcggccgttcatccccagcaagaacaacgcgttgcctgcgaattggaaggcaatcctgcatagttgggtgtcgggcgaggatgtggccaagatcgggcctcagaacatgcgggccgtcgaagaggccttcacctaccgtttggtttgggcgctggaggctgtccgcacacgccgcatgtctctcgggtggtcgccagacacggtggcgggcggtgccgcggcggcggtagaaaccggcgtcccgcaattcatgatgtcgatgctgattcgcgcgggcctgccatcacgacgtgcggctatggcggcgatcgaggacgccaagcctattttcgtcacgcccgccgagatgcgggcctggctcgaatccgacgagatcacagcctacacggacgctggcgactggccgacaccggacaccgccgccctatgggcgcggttccgaaccgaagccctcagcggcggcatccagaaatggtcggtcgaacactacaagcgtcttctcgacaccgcggctgctccgcctgccggcctctatcggatcgtcaccgacgagggcgatgggcggacctggctggtcacgcccgactatcagcgggttgccgcgttcaagaagccggctgtcgatcccaagcccagcctcttctcgggccgatcgccgggtaacacgaggctagtggaagccttgcgcgtcggccgcgggaaactgcgctggccaagcgcagactag

SEQ ID NO: 56738 - DNA, 786 bp, Rhodopseudomonas palustris
gtgctgctatataagacgtggtgtgatgccaccaaggaaaagaacgagcgcaaggagtattggacgcttgtcgagaaagacggtggccgcgacaaaatccgcgatgcactcgctgaaaccgtgcgttcgcattacgagcggctcgagcgcatcgcagacgacgtagctcgactcggcttcaagactgccgcggagattctgcgagccgaacttccccagacgccaacatctcgatcgggcgacctcggcgagatactcgcaaccgagctggtcgaggaggagattggccttcgcgtcccggtgcggcgattgcggtacaaggacgggcgcaacatggcccttcgtggtgatgactttatcggcgcggggtatgggcctggtaacgatggagagttgtggcttctgaagggtgaggccaagagtaataaggttcttgggaagaccacggtcaccaacgcccggaaggtcctcaatcgcgataacggccgctgcacgccggattccctacttttcgtcgccaatcggttgctggaaagtgcggatgaggacgacgtgaagcttggccgaactatccgcgacgaggtcgggctcaaggccctccgtgcggatcgcattgatcacatgcttttcacgatgtcgggaaacgcgccgccggcggcgttgaaggaggatctggacggggcgagcacgaacagagatcagttcgttgtgaatcttcgtatccaggatcaccaggaattcatcaaggagacgttcgaagaggtggaaaaccttggagacgattga

SEQ ID NO: 56739 - DNA, 3531 bp, Rhodopseudomonas palustris
ttggagacgattgaggaactccagaccttcctgaccagcgcgacccaagaaggcgtcctacgtcggcttctgtaccgggggacggcgtggtcgctgatgcgaaccgatggtgttttgccggacaacgcacccgccctcggggccacaatcgacacggatcttgcggagcatggatttgcgttgcttcgggctgccatggcgctacggggccgcgagggcgcgagtccgctcaccagcaaggctttcgaacgggccgcaaatgcgtttgaagcccttgtgcgtaatgccgatccaggggcgacggatcgggggttccggagaacaatagctgccgccgcctatcatttggcaggttactcggcggttgcttactcgcttttcaatgaagcgcccgaggatctcaactccgcgccaggtgagaccgcagtgatgttgttgatccttcgggatcttgatcggctccgcgggttcgtccgcgattggctgacggacgatgcccatggcgatgcgcaggtgtctgcggccctatcgggcgacgacgctgactcggacgatgtactggcgacgatcctcaatacgacgatttgccgtgcattggcgttcttcgagttcgctttggagactggcgaagaagagcctttggaggtcgcgcgttcgctcctagccgcaggaatcagcttggccgacaacgccgagaacgtacccctctggtggatttccaacctctgccgtcatctcatcgacgacctgtgggcccattcactgcatcaaaacctgccggtgcagccgcccgacggggcagaggagcgatactccgaacttcggcacctgttcgtcagctcgttgtttgctcgtaaaagcgccgaggtcgagctttggccctcgcagcgtgaggcggctcggcggtcgacagacatgacggacgatctggttgttgctcttccgacgagcgccggaaaaacacgcgtagcggaaatcgcggcgctgatgacgctttccgcggctcggcgcgtgctcatcgttacgcccctccgagcgctttcggctcagacggagcgctcgttcaggaaaaccttcgcccctttggggttcagcgtctcgtcgctctacggggcgagcggattatcatcgggtgacgaggatgcgcttcgctctcgggaaatcgtgatttccacgccggagaagctggatttcgcactccgtagcgatcccagcttgatcgatgacgtgggtctgatcgtgctcgatgagggacacatgattggcccgagtgagcgagagataagatatgagactcttgtccagcgcctgcttaggcgaactgatgctgccgaccgacggatcatctgtctctcggcgatccttccaagcggcgacgaactgaacgacttgaccgcatggatacggagtgaccagcccggtgagccggttcggtcggattggcgtccgacccgccagcggttcggtatgctgacgtggcgagcgagagatgcgcggctcacgctcgatctaaccgcgaacggcccgttcatcgacaagttcgttctccggaaggccgcgttggggcgcgagaagaagccctatccacgcgaagcaggccagctcgcattgtttgctgcgtgggaatttgccgggcagggaaagcgcacccttattttctccacacaggcaaactgggttgagggctacggcaagcgggtggtcgacctctgtaagcgtggctatctggcgtcgctccttgaggatgagcctgccatcgcgcgtgcgcttgaggtcggtaaggaatggctgggcgaggagcacccggcggtggcttgcttgaggttgggcgtcgccatccatcacgggcgtcttccaagcccgtttttgcgggaactggaagtcctgctgtcggatggcgtactgaaggtcattgtcgcgtcgccgacgctatcgcaaggcctcaacctcaacgcagccgtactgcttgttccggcgctttatcgttcgggcgcgcttatcaccggcgaggagttcgccaatgtcgctggccgcgccggtcgggcgttcgtcgacgtcgagggcctgattgtccatgtcatgttcgacaaggttgattggcggagcaaagaatggcgcacactcgttgcgtcgtccaaggcgcggaccctgaaaagcggcctaatccagatcgtcgcggaaattctggagcgactgagccgcgaaggcgttttggatcgggctgatgcttgggaatatctcgctaatgcgcgggatgcctggaagtcggacgccgaagaagctgctttggcctcggtgctcgcagacggggccgatgacgtatccggcgatgatgatgcgattgacgacgaggaaaccggcgatgatggaggcgatggcgaggaggccatcgacgaggagccactgtcgcagcttgtggagcgtcttgatgccaccgtcttcgggttgatcgaagccttggatgctgatcgcgccgaccttccgaagctactcgatgaggcgctgaggggatcgttgtgggcacggcagatctcgcgtgagggagaggccaccaaagcgctgcatcagaaagtttttgaggcccgcgccaacctcatctggacatcgacaacgccgcaggcccgaaagggacacttcgctatgggcgtcgggcttgaggccggactgacgatcgatgcgatggcagatgaactcggagcactggtcgatcgagcggatatggcgtcacttcctggtgatgtggaggaactttcagaagcgctggccggccttggcgagcggcttctggtcatgcgtccgtttattccggacaagaagaacgcgctgccaagcaattggaaatccattctccggcagtggatctcgggaattgatgtttcggagatcggccctgagaacatgcgtgtggtcgaagaggcattcacgtatcggctggtttgggccctcgaagccatcaggacgcgacgtgtgtcgctcggctggtcccccgatatcattcctggcggaggggcagcatcgttggaaacgggtgtgccccgcttcatgatgtctatgttggtgcgcgccgggttgccgtcgcgacgagcagccatggtggccatcgaaagcaccgacccggtcttcgtgacgccagcggaaatgcgagcctggcttgaatccgacgagattgccgcgttcaccgacgctggcgactggccgacgcctgaaacagcggctctctgggccaggttcaggacagaagcgctcagtggcggcatccagaaatggactgtggagcgtaacaagcggctgctcgatgtgcctgcggggactgctgtaccgccaccaggactttatcgaatcgtgaccgacgcgggcgacgggcgcacctggcttgcgacgccagattatcggcgtcttgcatcattcaggaaggctgccctcgatccaaagccgagtctattctcgggaaggatatcgggcaaaactacgctcgtggatgtcttgcgtgtcggaaggggcaaaatgcggtggccaacagccaacgcgtag

SEQ ID NO: 56740 - DNA, 801 bp, Streptococcus agalactiae LDS 628
atgcatagttacataaagtatctaactcaagaagatccaatcatcactgatgaaggtaagcagattgagatccttcacttagacattcaagatgactcagaaatttttgaagattgggcaaaacaattcagaagaaattattgttctgatgatgaacttgctgaaatgacaggttgtatgaatatctccactaaagagtatcttgaaaattttaaattaccctcggatagcggtattggcctttcaacgatgtcaggagattttggagaaatattagtatctgactatcttcagtatgttgaagaatacgtggttcctaggactcgttataatcgtaaagttaataaagatacttcaactcaaggaagtgatgttttgggatataagaaagattctttgaatgcagtgaatgatgaggtcgtagttattgaagtgaaatcatcggcatcaaattctagtaccgttaaagcgaaaaataagctccaagaagctattaatcattctaacaaagattttaaacgcttttcaacctcaattgtagccagctatttaaggttaaaggaatctaatattgaccaggcaaatgtagtggaaagatttttaaatataacagataatccatttaatgttatttatggagcagctgcagtccactccggtcaatcatatgatattgatattatcaaacaagcggtttcaaaaaatcacaaggactatcagaaattgcggctattagttattcattctgatgaattaatggaatttattaaagaactctattcgaaagcgagtgaagtatga

SEQ ID NO: 56741 - DNA, 3084 bp, Streptococcus agalactiae LDS 628
atgatagaatttggaaaacaatcattatattattcaaaacttgtgcggtctaaagcaaaaatgtttgagtttgatattcctatggagagtcatattccaatttcagaagaagctcaaaaatcatttcttgtggcactagcaattgttgcagatactgctagggagtattttgaagactatatcaatcataagaagtttaatttacaattaaaaaatcaattacacaatgctgctgaatattttgatgcatttcttgcttcaggattaggaaattcggctgaatatcaagactatattgcaatactgggagccacagcttattatctaggcgattataatggaagttcgagagttatgattaactatatatcggatgatatccatctattagaagacagtatgactcttattaaagtatttattgacgttataacggatgaaatctttttgaatcatacgccgatagaaggtaaattctctagtgaattaaatactctagttgaatcatacaggaattatattttattaaaaactgagttttctaaagaaatttttagaaatttgcaatataaagtatatggagatgggagcgatttttcaataatcattgtaaattgtcttttggcagtagtatgtaaaaaaataaatagttcatcagcgaaattattgcctgaattttcaagattagatttttcattgtggcgggattatatacaatcggaagacagtataaaggagctttggccatctcaaattgaattaggaagacaggggattttttcgggtgaatctggaattgttcagatgccaacaagttcgggtaagactgcgtcggtaaatctaatattacgctcagcattttattcaaacagaattgataatgcgttgattattgccccttttagagcattgtgcagggaaatatatagagatattaatgcacacttcgttgatgagaataatgtgattgttagtgaagtttttgatttaccagagattccaccggatttctcaatttttaatgatggaaaaaaaagagtctttatacttactccagagaaattgttgtttttattgagaaaccatcaaagttttattgatgaaataggactttgtatatttgatgaagcacatctttttgatgatccaagtcgtggaaccaattttgagttactgttgtcaacggttaaacaaatttttccaaaagcaattcagaagattttaatttctgctgtaataccaaatagtgaagctataaatcggtggtttaacgaagatggagtaatcgtttctaacaattcgataaaaacaacagagaaaagagttgcgtttagtgatttaaacgggagtaatgagcaattatatttcatagatcctattacatttgaagaagaattttttgttccacgtactgttagtgtaagtgaattagagtatcttggaaaagaacgcaaacaaaaagtatttccagaactgacaaacgcaaatgatataagtatttattatggaactaagctaattaataatggtggagtaggaattttttgtggaagaaaagatacggtcaatgttgttttgaagagatttatagacttaaataataggaattatgatctaactaattttttaaaaaactcagataggtctgaagttgaaaaaataggaaacttaattagtcaaaatttaggaaatgatagtgttgaatatatatgtagtcagataggagttttttcacatcattcaggtatacctatggggatacgcattgctatagagtatgctttttcaaaaagtaaaataaataatgtagtatgtacttcaaccctagcacaaggtgtaaacttacctattaaatatttgattatttcaagtgtgtatcaagcaggagatgcaataaaagttcgtgattttcagaacttgataggtagagcaggaagagctggaaaatatacagaaggaacgataattttaacagagccaaatatttataaatcaccaaaaaataagtggaaaaaacaaaactatgaaaaattattaaatcctattaatacggagggttgtcaaagcaatattctaaatatcatacagtttaagtcagttgtttcgactaactacagaattggtgaaaaagaatttgatttttggagcatgattatagagaggtttatcaataatatagagtatagagcaaaaataggcgatatgttatcgaatttaaggaaacaaaacaatccttattttaaggattttaattctaagataaatctaattgaaaaaactctagttgctattgaaaattatatagcttctatgtatgctactgaattggagactgatagattagctgaaaatacttttggatatttcttaggtaatgaagaggagcaaggaaaaataaaagaattatttgctttaataaaaaccaaggtaactgatagttcagtaaaaactgaaataattgcaaaaaactcaattggattatatcaatctgaattgttaaaaaaatgggttcaggaaaatatagcttttatccttgcttgcgagagagaagaagatttattaagtgttttaactgatattataatagttttttcaaacaacaaggagattaaaagattaagtataggaaatctaaactatatttctcaactatggattaagggcatttcttattttcaaatattggaaagttgtaccgaaaaatcaattagtatcaagaaaagcggtaaactaaaactaattgatatgtcggatatcatttctatttgcgataatggattagggtatgaaacatcgatgattttaaatgcaatcaacaatattctcgaagaattaaatggagaaaaaacagatgtactaaataagctggtaaagagattgaaatatggtttatctcttgaaaaagaaattaatatctatgaattaggtttttcagatagaattgtagttcaagttattggtcaagagattaattctataagtaagaatcagattagaaatgaaatcaaacagaaatcaattgacttgaaaggtatattgacagattttccaagttactatactaagttaattagtgaaatgtaa

SEQ ID NO: 56742 - DNA, 825 bp, Streptococcus agalactiae GB00975
ttgttttttgataatggtaaatattttgtatttgacaaatctattccttattcaagtggaaaagaaatacaggtatataaacttaataatgaattattagctgatagtattttgaatagttgggcatccggattaagaaataattatgttgaagagattctgttagagccgctaattaaaggaacaggattaacaaaacaagaatttttggagaagaatatatttcctagccatcaaaatagcataggggcttcaactatgtctggtgaatttggagaaatactggtatatgactatataaatttcactttaaaacattatgtcaccaggactagatatttggaaaaagtcaatccagatatgccggtatctggaagcgatgttataggttatcaagtgaaaaatattgataagccaagcaagacggatcacttaatagttgctgaagtaaaaactcgttcaagtaaatctggaaataaaaaaagtttgtgtgaaaagactgttaaagatgctataaaacactctgttaaagacagagttagactaggagagtctctaaatgctgaaaaaagaagattgtttaatcgcttgagaattgaagaggctaaaatagtagaaaggtttcaaaataaaacagataatccgttcataattgacttttttgcagttgctgtattggatagtgatttgtattcagaccaggtagttttggatgtggttaatagtcagcatgaaaatgtaaaatccacaagtatattgataattcattccaaagaattgctgctcttcttaagagatttatataggagggcttgctcatgttga

SEQ ID NO: 56743 - DNA, 3099 bp, Streptococcus agalactiae GB00975
atgttgatagaaagtgcttcaaaatactatttgaaaaaagttcgagcaaaagcaaaaatgtatgagtatggcgtaccagaaaatcttcatatagaagttgaagaacaagcaaatgaccttatattgcttagcattggggttgttggtgacatttctaatgaaatatggaaaatgaaacaagctcctataattctttcgaaggaaaaggaagaagaattgtattttgtatcaaggttttttgatgcttattttcagtctgaaatgagtattgacttgaatccatattatatattgatgggagcggttacttattatttctgcaatatgaatggcagttcaaaagtaatgatgagtattatgcataatttgaataattttaaattttctgcttctggattagaaaatgtaataatatggttgttagatggcaactataagtttgatgtttccgatatagatgaaaaatacagaagctatattatgcaactaattaattatcacaacaggttttttgatagtgagaatttagaaaaagttcaatttgaagaatttagaaactatgtttatcattttgggaatgatagagaaatattatttacagatattattttagcaatattaaaaaagaaaatttataattcatgtattaatctaatgccattgtattctgaaattgataagaatgagtggattgcaacatttaaaagtaatgtgctgatgaaagaaatgtgggcatcccagatcttattgggggaaaaagggattttcaaaggaaaatcaggcgttattcaaatgccgacaagttcaggaaaaaccacatcagtttcccttgctatacaatctgcctttttatctaaaagaacatctattgtaattgtagtagctccatttagggcattatgtaaagaaatattgtttgatatggagaagttttttgcatttgatgaaaatataactataactgaattttctgatattcctgaacctagtgaaatagaattagtcacatctgagtcaattgtcaaaaaagtatttgttatgactccagaaaagttggcttatattttaaaacacaatacggaaataattgaaagtattaacatgattgtttttgatgaggctcatttgtttgatgatgaagcaagagggacggattatgaacttttattaacaactattaatagttatcttaaaccagatgcacagaaaatattagtttcagcagtaatttcgaatgctgaacagctaaacacatggattaacaaagatggtattgtaataaggaataatactattaagacatcagaaaaaacggtagcatttaatacatttacttccactaatatcaataatgcttatagtaatctttattttgtagaacctaataaaaatttagaggaagaattttatgtacctagagtagttcaaacaaaaaaactaaagaagatagatggagagagaaagttaagatattttcctgattttaagaataataagcaagatgtaggtatttactatgcaattaaattgattgcaaatgggaatatagctattttttgttcaaaaaaaggtactgtaaataatattctaaagagatttattgatttgaaagaaaggggcatctcgttagaggatttttctaccttatcagatgaaactgaatgtttaaaaattgcatatctaataaaagaacaccttggtgaaaacaatttatatatagcagcattaaatggtattgtagggcatcattcgggcgtgcctaacggggtaagaattgctgaagaatatgcattgaaaaaatccttaatccgttgtgtagtatgtacttctacgctggcacagggtgtaaatctacctattaaatatttaattgtatctagtatttatcaatcaaagcagataattaaggttagggattttcataatttgattggaagaactgcaagagcaggaaaagaaacagaagggacaatcattttaacagaagatatttataaaaatagtaaagaggcttataaattaaataattataaacgattacttaatgctgataattctgaggagtgttatagcaaccttttgaaattggttagagaagttgatttgggaaataatagagtaattccttttgactttttgaaaaaatatattgagtccagatattctaataaagcggaatatgctgaaacaaaaaaagacattcttgtatataaagaacaagagaaagaatatggtgaacacattttctataaaatgaatgaaatagaacatattctagtgtcattggagaattttatacttggatttgcagatatagaagatgagagttttgaaattataaaatccacatatggttactatttggcaaatgaagatgaaaaggaagaactaaaaaacatttataatctcattagaagcaatattgaaagtcttgaagttgctgacaggttgctttatagaaaaagtatgttaggtatattgacaatgaaagaattatatagattcgtagatgagaatttatatgaaatagcaaatgcggattttgatacattaattaatttggttgctaataaattaaaagaatctaaaaattgtaagcttatacctaagttgattgatgatagccatatttatgagctattgaaaatgtggattaatggtaaaagctatattcaaatctgggactattcaaagtcagtgaatttgctaattaaatgggggaaaaagagtaggaaaatctctttggaggatataataacattgtgtgattcagactttggatttgcctcattaacgataatacaggctattgtagagattctaaatactaaagattgcagtgaaaacatacaggaagctttaaatgatataatttatagaataagatatggcttaccgaataaagagtcagtatgtgtatatgaacttggctttgcagatagaattatttcacaaaaaattgttaatgaaataagaggttatgattgtagcacaaaaaagaaaacaaaatctgcaataaaaaataatagagaaaaactacgagaattattggcaaattatccatcatatttcatggatagactagaaaagctacgataa

SEQ ID NO: 56744 - DNA, 825 bp, Streptococcus agalactiae BSU442; identical to SEQ ID NO: 56742

SEQ ID NO: 56745 - DNA, 3099 bp, Streptococcus agalactiae BSU442; identical to SEQ ID NO: 56743

SEQ ID NO: 56746 - DNA, 789 bp, Streptococcus agalactiae str. Gottschalk 1005B
atgtctagttatatgaagtatttaaaaccagaagaacctattattactgatgaagggaggacaatagaggtttttcatttagatatacaagaagaacctgaaatttttgaagagtgggcaattcaattcagaaggaattattgttcggatgaaaaattgcaacatatgacatatgtaatggggatagaatcttccaaatacttaaatgaaaataaattaccaagtgttccttcaacaaaatcaggtgattttggtgaaattttagtatctgattatctacaatattttgaaaactatcttgttccaagaactcgttttaatagcagagaaaataaagataaaccaactttaggaagtgatgcgttgggatatagatatgatcctaaatctccaagtaatgccgaagtcatagtcatagaagtgaaatcatcagcatcaaataagactgattttaaagctaaaaatagacttcaagaagctattaacgattctaacaaggattttgaaagattttctacatcaattgtcgctagttatgaaaaattgtttaattctaatcaagatgaagctaatattttatctagatttctaaatatcacagataatccgtatcaagttacatatggagctgttgctgttcactcgaatgtttcttttaatttggacactattaaacaagttattactgaagatcatgtggcgtgtgataaattaaaactgcttgtgatacattctgaaaaattgatggattttataaatgcactttatttgaaagcgggtgaggtatga

SEQ ID NO: 56747 - DNA, 3084 bp, Streptococcus agalactiae str. Gottschalk 1005B
atgatagagtttggaaaacgctcattatattattcaaaacttgtgcggtctaaagcaaaaatgtttgagtttgatgttcctaaggagagtcatattccaatttcagaagaagctcaaaaatcatttcttgtggcactggctattgttgcagatactgctaggaagtattttgaagattatatcaatcataagaagtttagtttacaattaaaaaatcaattacactacgctgctgaatattttgatgcattgctagcatcaggattaggaaattcggctgaatatcaagactatattgcaatactgggtaccacagcttattatctaggcgattataatggtagttcgagagttatgattaactatatatcggatgatatccagttattagaagacagtatgactcttatcaaagtgtttattgacgttctaatggatgaactctttttgaagcatactccaatagaaggtaaatactctcgtgagttaaatactctagttgaatcatatagaaattatattttatcaaaaactgagttttctcctgatgtttttagtgatttacaagataaagtatatagaactgggagtgatttttctgtaattattgtaaattgtctcttagcagttgtatgtaaaaaaatagatagttcatcaacgaaattattacctgaattttcaggattagatttttctttttggcaggattatatacaatcaacaggaagcataaaggagctttggccatctcaaattgaattaggcaggaaaggaatgttttcaggtaaatctggaatcgttcagatgccaacaagttcgggtaaaacagcctcaatcaatctaactttaagatcagcattttattcaaatagaattgataatgcattgattgttgcaccttttagagcattatgtagagaaatatatcgagatattaatgcacatttcgttgatgagaataatgtgattgttagtgaagtttttgatttaccggagattccacaggatttctcaatttttaatgatggtaaaaaaagagtttttatacttactccagagaaattattgtttttattgagaaatcatcaaagttttattgatgaaataggactttgtatatttgatgaagcacatctttttgatgatccaagtcgtggaaccaattttgaattactgttgtcaacggttaaacaaattttcccaaaagaaatacagaagattttaatttctgctgtaataccaaatagtgaagctataaatcggtggtttaacgaagatggagtaatcatttctaataattcgataaaaacaacagagaaaagagttgcgtttagtgatttaaacgggagtaatgagcaattattttttatagatcctattacatttgaagaagaattttttgttccacgtactgttagtgtaagtgaattagagcagcttggaaaagaacgtaaacaaaaagtatttccagaactgacaaacgcaaatgatataagtatttattatgggactaagctaattaataatggtggagtaggaattttttgtggaagaaaagacacggtcaatgttgttttgaagagatttatagacttaaataataggaattatgatctaactaatttcataaaaaactcagatagctctgaagttgaaaaaataggaaacttaattagtcaaaatttaggatatgatagtgttgaatatatatgtagtcagctaggagttttttcgcatcattcaggtatacctatggggatacgcattgctatagagtatgctttttcaaaaagtaaaataaataatgtagtatgtacttcaaccttagcccaaggtgtaaacttacctattaaatatttgattatttcaagtgtgtatcaagcaggagatgcaataaaagttcgtgattttcagaatttgataggtagagcaggcagagctggaaaatatacagaaggaacaataattttaacagagcccaacatttataaatcacccaaaaataggaggaaggaacaaaactataaagcattgttaaatcctattaatacagaggggtgtcaaagcaatattctcaatattatacagtttaactcagtagttccaactgattatcgattagactccaaaatatttgatttttggagtttgattaaagagagatttgacagtactgtagactacagaacaaaaataaatattattttatcaaaattaaaaaaacagaaaaatccttattttaaggattttaattcaaagatagaccagactgagaaaactctaattgcaattgaaaattatattgcttctatgaatgatactgaactggagactgatagattagctgaaaatacttttggatatttcttaggtaatgaagaagaacaagaaaaaataaaagaattatttatcttaataaaatctaaaatgaatatcagcaaagtaaaaactgaaataattgcaaaaaactcgattggattataccaatctgagttattaaaagaatgggttcaggaaaataaaacttctattctttcttgtgagaaggaagaagatttattaggtgttttaactaagataataatagatttttcaaataacaaggagatgagaaaattaagtatagaaaatctaaattatatttctcaactctggattaagggtatttcttattatcaaatattggaaagttgtactgaaaaatcaattagtattgagaaaagaggtaagccaaaaccaattgatatgtctgacataatctctatttgtgataatggattagggtatgaaacatcaatggttttaaatgcgattagtaatattcttgaagaactagttggagaggaattggacgtattgactatgttaataaagaggctgaaatatgggctacctctggaaaaagaaatcaatatctatgaattaggtttttcagatagaattgtggtccaagttattggtcaagagattaattctgtaagtaagaatcaaattagaaatgaaatcaaacggaaatcagctagactagaagataaattgagtgattttccaagttattatacacagataattaatgaaatgtaa

SEQ ID NO: 56748 - DNA, 801 bp, Streptococcus agalactiae FSL S3-277; identical to SEQ ID NO: 56740

SEQ ID NO: 56749 - DNA, 3084 bp, Streptococcus agalactiae FSL S3-277; identical to SEQ ID NO: 56741

SEQ ID NO: 56750 - DNA, 825 bp, Streptococcus agalactiae GB00174; identical to SEQ ID NO: 56742

SEQ ID NO: 56751 - DNA, 3099 bp, Streptococcus agalactiae GB00174
atgttgatagaaagtgcttcaaaatactatttgaaaaaagttcgagcaaaagcaaaaatgtatgagtatggcgtaccagaaaatcttcatatagaagttgaagaacaagcaaatgaccttatattgcttagcattggggttgttggtgacatttctaatgaaatatggaaaatgaaacaagctcctataattctttcgaaggaaaaggaagaagaattgtattttgtatcaaggttttttgatgcttattttcagtctgaaatgagtattgacttgaatccatattatatattgatgggagcggttacttattatttctgcaatatgaatggcagttcaaaagtaatgatgagtattatgcataatttgaataattttaaattttctgcttctggattagaaaatgtaataatatggttgttagatggcaactataagtttgatgtttccgatatagatgaaaaatacagaagctatattatgcaactaattaattatcacaacagtttttttgatagtgagaatttagaaaaagttcaatttgaagaatttagaaactatgtttatcattttgggaatgatagagaaatattatttacagatattattttagcaatattaaaaaagaaaatttataattcatgtattaatctaatgccattgtattctgaaattgataagaatgagtggattgcaacatttaaaagtaatgtgctgatgaaagaaatgtgggcatcccagatcttattgggggaaaaagggattttcaaaggaaaatcaggcgttattcaaatgccgacaagttcaggaaaaaccacatcagtttcccttgctatacaatctgcctttttatctaaaagaacatctattgtaattgtagtagctccatttagggcattatgtaaagaaatattgtttgatatggagaagttttttgcatttgatgaaaatataactataactgaattttctgatattcctgaacctagtgaaatagaattagtcacatctgagtcaattgtcaaaaaagtatttgttatgactccagaaaagttggcttatattttaaaacacaatacggaaataattgaaagtattaacatgattgtttttgatgaggctcatttgtttgatgatgaagcaagagggacggattatgaacttttattaacaactattaatagttatcttaaaccagatgcacagaaaatattagtttcagcagtaatttcgaatgctgaacagctaaacacatggattaacaaagatggtattgtaataaggaataatactattaagacatcagaaaaaacggtagcatttaatacatttacttccactaatatcaataatgcttatagtaatctttattttgtagaacctaataaaaatttagaggaagaattttatgtacctagagtagttcaaacaaaaaaactaaagaagatagatggagagagaaagttaagatattttcctgattttaagaataataagcaagatgtaggtatttactatgcaattaaattgattgcaaatgggaatatagctattttttgttcaaaaaaaggtactgtaaataatattctaaagagatttattgatttgaaagaaaggggcatctcgttagaggatttttctaccttatcagatgaaactgaatgtttaaaaattgcatatctaataaaagaacaccttggtgaaaacaatttatatatagcagcattaaatggtattgtagggcatcattcgggcgtgcctaacggggtaagaattgctgaagaatatgcattgaaaaaatccttaatccgttgtgtagtatgtacttctacgctggcacagggtgtaaatctacctattaaatatttaattgtatctagtatttatcaatcaaagcagataattaaggttagggattttcataatttgattggaagaactgcaagagcaggaaaagaaacagaagggacaatcattttaacagaagatatttataaaaatagtaaagaggcttataaattaaataattataaacgattacttaatgctgataattctgaggagtgttatagcaaccttttgaaattggttagagaagttgatttgggaaataatagagtaattccttttgactttttgaaaaaatatattgagtccagatattctaataaagcggaatatgctgaaacaaaaaaagacattcttgtatataaagaacaagagaaagaatatggtgaacacattttctataaaatgaatgaaatagaacatattctagtgtcattggagaattttatacttggatttgcagatatagaagatgagagttttgaaattataaaatccacatatggttactatttggcaaatgaagatgaaaaggaagaactaaaaaacatttataatctcattagaagcaatattgaaagtcttgaagttgctgacaggttgctttatagaaaaagtatgttaggtatattgacaatgaaagaattatatagattcgtagatgagaatttatatgaaatagcaaatgcggattttgatacattaattaatttggttgctaataaattaaaagaatctaaaaattgtaagcttatacctaagttgattgatgatagccatatttatgagctattgaaaatgtggattaatggtaaaagctatattcaaatctgggactattcaaagtcagtgaatttgctaattaaatgggggaaaaagagtaggaaaatctctttggaggatataataacattgtgtgattcagactttggatttgcctcattaacgataatacaggctattgtagagattctaaatactaaagattgcagtgaaaacatacaggaagctttaaatgatataatttatagaataagatatggcttaccgaataaagagtcagtatgtgtatatgaacttggctttgcagatagaattatttcacaaaaaattgttaatgaaataagaggttatgattgtagcacaaaaaagaaaacaaaatctgcaataaaaaataatagagaaaaactacgagaattattggcaaattatccatcatatttcatggatagactagaaaagctacgataa

SEQ ID NO: 56752 - DNA, 801 bp, Streptococcus agalactiae LDS 623; identical to SEQ ID NO: 56740

SEQ ID NO: 56753 - DNA, 3084 bp, Streptococcus agalactiae LDS 623; identical to SEQ ID NO: 56741

SEQ ID NO: 56754 - DNA, 801 bp, Streptococcus agalactiae MRI Z1-219
atgcatagttacataaagtatctaactcaagaagatccaatcatcactgatgaaggtaagcagattgagatccttcacttagacattcaagatgactcagaaatttttgaagattgggcaaaacaattcagaagaaattattgttctgatgatgaacttgctgaaatgacaggttgtatgaatatctccactaaagagtatcttgaaaattttaaattaccctcggatagcggtattggcctttcaacgatgtcaggagattttggagaaatattagtatctgactatcttcagtatgttaaagaatacgtggttcctaggactcgttataatcgtaaagttaataaagatacttcaactcaaggaagtgatgttttgggatataagaaagattctttgaatgcagtgaatgatgaggtcgtagttattgaagtgaaatcatcggcatcaaattctagtaccgttaaagcgaaaaataagctccaagaagctattaatcattctaacaaagattttaaacgcttttcaacctcaattgtagccagctatttaaggttaaaggaatctaatattgaccaggcaaatgtagtggaaagatttttaaatataacagataatccatttaatgttatttatggagcagctgcagtccactccggtcaatcatatgatattgatattatcaaacaagcggtttcaaaaaatcacaaggactatcagaaattgcggctattagttattcattctgatgaattaatggaatttattaaagaactctattcgaaagcgagtgaagtatga

SEQ ID NO: 56755 - DNA, 3084 bp, Streptococcus agalactiae MRI Z1-219
atgatagaatttggaaaacaatcattatattattcaaaacttgtgcggtctaaagcaaaaatgtttgagtttgatattcctatggagagtcatattccaatttcagaagaagctcaaaaatcatttcttgtggcactagcaattgttgcagatactgctagggagtattttgaagactatatcaatcataagaagtttaatttacaattaaaaaatcaattacacaatgctgctgaatattttgatgcatttcttgcttcaggattaggaaattcggctgaatatcaagactatattgcaatactgggagccacagcttattatctaggcgattataatggaagttcgagagttatgattaactatatatcggatgatatccatctattagaagacagtatgactcttattaaagtatttattgacgttataacggatgaaatctttttgaatcatacgccgatagaaggtaaattctctagtgaattaaatactctagttgaatcatacaggaattatattttattaaaaactgagttttctaaagaaatttttagaaatttgcaatataaagtatatggagatgggagcgatttttcaataatcattgtaaattgtcttttggcagtagtatgtaaaaaaataaatagttcatcagcgaaattattgcctgaattttcaagattagatttttcattgtggcgggattatatacaatcggaagacagtataaaggagctttggccatctcaaattgaattaggaagacaggagattttttcgggtgaatctggaattgttcagatgccaacaagttcgggtaagactgcgtcggtaaatctaatattacgctcagcattttattcaaacagaattgataatgcgttgattattgccccttttagagcattgtgcagggaaatatatagagatattaatgcacacttcgttgatgagaataatgtgattgttagtgaagtttttgatttaccagagattccaccggatttctcaatttttaatgatggaaaaaaaagagtctttatacttactccagagaaattgttgtttttattgagaaaccatcaaagttttattgatgaaataggactttgtatatttgatgaagcacatctttttgatgatccaagtcgtggaaccaattttgagttactgttgtcaacggttaaacaaatttttccaaaagcaattcagaagattttaatttctgctgtaataccaaatagtgaagctataaatcggtggtttaacgaagatggagtaatcgtttctaacaattcgataaaaacaacagagaaaagagttgcgtttagtgatttaaacgggagtaatgagcaattatatttcatagatcctattacatttgaagaagaattttttgttccacgtactgttagtgtaagtgaattagagtatcttggaaaagaacgcaaacaaaaagtatttccagaactgacaaacgcaaatgatataagtatttattatggaactaagctaattaataatggtggagtaggaattttttgtggaagaaaagatacggtcaatgatgttttgaagagatttatagacttaaataataggaattatgatctaactaattttttaaaaaactcagataggtctgaagttgaaaaaataggaaacttaattagtcaaaatttaggaaatgatagtgttgaatatatatgtagtcagataggagttttttcacatcattcaggtatacctatggggatacgcattgctatagagtatgctttttcaaaaagtaaagtaaataatgtagtatgtacttcaaccctagcacaaggtgtaaacttacctattaaatatttgattatttcaagtgtgtatcaagcaggagatgcaataaaagttcgtgattttcagaacttgataggtagagcaggaagagctggaaaatatacagaaggaacgataattttaacagagccaaatatttataaatcaccaaaaaataagtggaaaaaacaaaactatgaaaaattattaaatcctattaatacggagggttgtcaaagcaatattctaaatatcatacagtttaagtcagttgtttcgactaactacagaattggtgaaaaagaatttgatttttggagcatgattatagagaggtttatcaataatatagagtatagagcaaaaataggcgatatgttatcgaatttaaggaaacaaaacaatccttattttaaggattttaattctaagataaatctaattgaaaaaactctagttgctattgaaaattatatagcttctatgtatgctactgaattggagactgatagattagctgaaaatacttttggatatttcttaggtaatgaagaggagcaaggaaaaataaaagaattatttgctttaataaaaaccaaggtaactgatagttcagtaaaaactgaaataattgcaaaaaactcaattggattatatcaatctgaattgttaaaaaaatgggttcaggaaaatatagcttttatccttgcttgcgagagagaagaagatttattaagtgttttaactgatattataatagttttttcaaacaacaaggagattaaaagattaagtatagaaaatctaaactatatttctcaactatggattaagggcatttcttattttcaaatattggaaagttgtaccgaaaaatcaatttgtatcaagaaaagaggtaaactaaaactaattgatatgtcggatatcatttctatttgcgataatggattagggtatgaaacatcgatgattttaaatgcaatcaacaatattctcgaagaattaaatggagaaaaaacagatgtactaaataagctggtaaagagattgaaatatggtttatctcttgaaaaagaaattaatatctatgaattaggtttttcagatagaattgtagttcaagttattggtcaagagattaattctataagtaagaatcagattagaaatgaaatcaaacagaaatcaattgacttgaaaggtatattgacagattttccaagttactatactaagttaattagtgaaatgtaa

SEQ ID NO: 56756 - DNA, 825 bp, Streptococcus agalactiae FSL S3-005; identical to SEQ ID NO: 56742

SEQ ID NO: 56757 - DNA, 3099 bp, Streptococcus agalactiae FSL S3-005; identical to SEQ ID NO: 56743

SEQ ID NO: 56758 - DNA, 825 bp, Streptococcus agalactiae FSL S3-268; identical to SEQ ID NO: 56742

SEQ ID NO: 56759 - DNA, 3099 bp, Streptococcus agalactiae FSL S3-268; identical to SEQ ID NO: 56743

SEQ ID NO: 56760 - DNA, 825 bp, Streptococcus agalactiae; identical to SEQ ID NO: 56742

SEQ ID NO: 56761 - DNA, 3099 bp, Streptococcus agalactiae; identical to SEQ ID NO: 56743

SEQ ID NO: 56762 - DNA, 825 bp, Streptococcus agalactiae; identical to SEQ ID NO: 56742

SEQ ID NO: 56763 - DNA, 3099 bp, Streptococcus agalactiae; identical to SEQ ID NO: 56743

SEQ ID NO: 56764 - DNA, 825 bp, Streptococcus agalactiae; identical to SEQ ID NO: 56742

SEQ ID NO: 56765 - DNA, 3099 bp, Streptococcus agalactiae; identical to SEQ ID NO: 56743

SEQ ID NO: 56766 - DNA, 825 bp, Streptococcus agalactiae; identical to SEQ ID NO: 56742

SEQ ID NO: 56767 - DNA, 3099 bp, Streptococcus agalactiae; identical to SEQ ID NO: 56743

SEQ ID NO: 56768 - DNA, 789 bp, Streptococcus agalactiae; identical to SEQ ID NO: 56746

SEQ ID NO: 56769 - DNA, 3084 bp, Streptococcus agalactiae; identical to SEQ ID NO: 56747

SEQ ID NO: 56770 - DNA, 825 bp, Streptococcus agalactiae; identical to SEQ ID NO: 56742

SEQ ID NO: 56771 - DNA, 3099 bp, Streptococcus agalactiae; identical to SEQ ID NO: 56743

SEQ ID NO: 56772 - DNA, 801 bp, Streptococcus agalactiae; identical to SEQ ID NO: 56754

SEQ ID NO: 56773 - DNA, 3084 bp, Streptococcus agalactiae
atgatagaatttggaaaacaatcattatattattcaaaacttgtgcggtctaaagcaaaaatgtttgagtttgatattcctatggagagtcatattccaatttcagaagaagctcaaaaatcatttcttgtggcactagcaattgttgcagatactgctagggagtattttgaagactatatcaatcataagaagtttaatttacaattaaaaaatcaattacacaatgctgctgaatattttgatgcatttcttgcttcaggattaggaaattcggctgaatatcaagactatattgcaatactgggagccacagcttattatctaggcgattataatggaagttcgagagttatgattaactatatatcggatgatatccatctattagaagacagtatgactcttattaaagtatttattgacgttataacggatgaaatctttttgaatcatacgccgatagaaggtaaattctctagtgaattaaatactctagttgaatcatacaggaattatattttattaaaaactgagttttctaaagaaatttttagaaatttgcaatataaagtatatggagatgggagcgatttttcaataatcattgtaaattgtcttttggcagtagtatgtaaaaaaataaatagttcatcagcgaaattattgcctgaattttcaagattagatttttcattgtggcgggattatatacaatcggaagacagtataaaggagctttggccatctcaaattgaattaggaagacaggggattttttcgggtgaatctggaattgttcagatgccaacaagttcgggtaagactgcgtcggtaaatctaatattacgctcagcattttattcaaacagaattgataatgcgttgattattgccccttttagagcattgtgcagggaaatatatagagatattaatgcacacttcgttgatgagaataatgtgattgttagtgaagtttttgatttaccagagattccaccggatttctcaatttttaatgatggaaaaaaaagagtctttatacttactccagagaaattgttgtttttattgagaaaccatcaaagttttattgatgaaataggactttgtatatttgatgaagcacatctttttgatgatccaagtcgtggaaccaattttgagttactgttgtcaacggttaaacaaatttttccaaaagcaattcagaagattttaatttctgctgtaataccaaatagtgaagctataaatcggtggtttaacgaagatggagtaatcgtttctaacaattcgataaaaacaacagagaaaagagttgcgtttagtgatttaaacgggagtaatgagcaattatatttcatagatcctattacatttgaagaagaattttttgttccacgtactgttagtgtaagtgaattagagtatcttggaaaagaacgcaaacaaaaagtatttccagaactgacaaacgcaaatgatataagtatttattatggaactaagctaattaataatggtggagtaggaattttttgtggaaggaaagatacggtcaatgttgttttgaagagatttatagacttaaataataggaattatgatctaactaattttttaaaaaactcagataggtctgaagttgaaaaaataggaaacttaattagtcaaaatttaggaaatgatagtgttgaatatatatgtagtcagataggagttttttcacatcattcaggtatacctatggggatacgcattgctatagagtatgctttttcaaaaagtaaagtaaataatgtagtatgtacttcaaccctagcacaaggtgtaaacttacctattaaatatttgattatttcaagtgtgtatcaagcaggagatgcaataaaagttcgtgattttcagaacttgataggtagagcaggaagagctggaaaatatacagaaggaacgataattttaacagagccaaatatttataaatcaccaaaaaataagtggaaaaaacaaaactatgaaaaattattaaatcctattaatacggagggttgtcaaagcaatattctaaatatcatacagtttaagtcagttgtttcgactaactacagaattggtgaaaaagaatttgatttttggagcatgattatagagaggtttatcaataatatagagtatagagcaaaaataggcgatatgttatcgaatttaaggaaacaaaacaatccttattttaaggattttaattctaagataaatctaattgaaaaaactctagttgctattgaaaattatatagcttctatgtatgctactgaattggagactgatagattagctgaaaatacttttggatatttcttaggtaatgaagaggagcaaggaaaaataaaagaattatttgctttaataaaaaccaaggtaactgatagttcagtaaaaactgaaataattgcaaaaaactcaattggattatatcaatctgaattgttaaaaaaatgggttcaggaaaatatagcttttatccttgcttgcgagagagaagaagatttattaagtgttttaactgatattataatagttttttcaaacaacaaggagattaaaagattaagtatagaaaatctaaactatatttctcaactatggattaagggcatttcttattttcaaatattggaaagttgtaccgaaaaatcaatttgtatcaagaaaagaggtaaactaaaactaattgatatgtcggatatcatttctatttgcgataatggattagggtatgaaacatcgatgattttaaatgcaatcaacaatattctcgaagaattaaatggagaaaaaacagatgtactaaataagctggtaaagagattgaaatatggtttatctcttgaaaaagaaattaatatctatgaattaggtttttcagatagaattgtagttcaagttattggtcaagagattaattctataagtaagagtcagattagaaatgaaatcaaacagaaatcaattgacttgaaaggtatattgacagattttccaagttactatactaagttaattagtgaaatgtaa

SEQ ID NO: 56774 - DNA, 825 bp, Streptococcus agalactiae; identical to SEQ ID NO: 56742

SEQ ID NO: 56775 - DNA, 3099 bp, Streptococcus agalactiae; identical to SEQ ID NO: 56743

SEQ ID NO: 56776 - DNA, 825 bp, Streptococcus agalactiae; identical to SEQ ID NO: 56742

SEQ ID NO: 56777 - DNA, 3099 bp, Streptococcus agalactiae; identical to SEQ ID NO: 56743

SEQ ID NO: 56778 - DNA, 810 bp, Streptococcus pneumoniae GA47461
atggaaaagatgcatagttatataaagtatctaactcaagaagatcctattattactgatgaaggtaagcagattgagattcttcacttagatattcaagatgacccagaaatttttgaagattgggcaaaacaattcagaagaaattattgttctgatgatgaacttgctgaaatgataggttttatgaatatctcccctaaagagtatcttgaaaattttaaattaccctcggatagtggtattggcctttcaacgatgtcaggagattttggagaaatattagtatctgattatcttcagtatattgaagaatatgtggttcctaggactcgttatgatagtaaagtcaataaaaatacttcaactcaaggaagtgatgttctaggatataagcaagattcttcgaatgtgtcgaatgatgaggttgtagttattgaagtaaaatcatctgcatcagattctagtagctctaaagcgaaaaataagcttcaagaagctattaatcattctgataaagattttgaacgattttcaacctcaattgtagccagctatttgaggttaaagaaatctaatagtgatcaagcaaatgtagtagaaagatttttaaacataacggataaaccgtttaatgtaatctatggagctgttgcagtctactccaatcaatcatatgatattgatgttatcaagacagtagtttcaaaaaatcacagagattttcagaaattacgactattggtcattcattctaatgaattaatgaaatttattagagaactctattcgaaagcgagtgaggtatga

SEQ ID NO: 56779 - DNA, 3084 bp, Streptococcus pneumoniae GA47461
atgatagaatttgggagaaggtcattatatttttcaaaattagtgcgttcaaaggcaaagatgattgaatttgatattcctttagaaagtcatttaccaatttcagaggatgctcaaaaatcgtttcttggggcactagcaattgttgcagatactgctaggaagtattttgaagtttatatcaatcgtaagagttttaatttacaattaaaaaatcaattacacaatgctgctgaatattttgatgcattgctggtgtcaggattaggaaattcagctgaatatcaagactatattgcaatattgggtaccacagcttattatctatgcgattataatggtagttcgagagttatgattaactatatatcggatgatatccagttattagaagactgtatgactcttataaaagtatttattgacgttgtaacggatgaactctttttgaatcatacgccaatagaaggtaaatactctagtgagttaaatactctagttgaatcatatagaaattatattttatcaaaaactgagttttctatagatatttatagagatttacaagataaagtatataggaatggaagcgatttttctgtaattattgtaaattgtctcttagcagttgtatgtaaaaaaataaatagttcatcaacgaaattattacctgaattttcaggattagatttttctttatggcaggattatatacaatcaacaggaagcataaaggagctttggccatctcaaatcgaattagggaagcaaggaattttttcaggtaaatctggaatcgttcagatgccaacaagttcgggtaaaacagcctcaatcaatctaactttaagatcagcattttattcaaatagaattgataatgcattgattgttgcaccttttagagcattatgtagagaaatatatcgagatattaatgcacatttcgttgatgagaataatgtgattgttagtgaagtttttgatttaccggagattccacaggatttctcaatttttaatgatggtaaaaaaagagtttttatacttactccagagaaattgttgtttttattgagaaatcatcaaagttttattgatgaaataggactttgtatatttgatgaagcacatctttttgatgatccaagtcgtggaaccaattttgaattactgttgtcaacggttaaacaaattttcccaaaaggaatacagaagattttaatatctgctgtaataccaaatagtgaagctataaatcggtggtttaacgaagatggagtaattgtttctaataattcgattaaaacaacagagaaaagagttgcgtttagtgatttaaacgggagtaatgagcaattatatttcatagatcctattacatttgaagaagaattttttgttccacgtactgttagtgttagtgaattagagcagcttggaaaagaacgcaaacaaaaagtttttccagaactgacaaacgcaaatgatataagtatttattatgggactaagctaattaataatggtggagtaggaattttttgtggaagaaaagacacggtcaatgttattttacgaagatttatagacttaaataatagaaattatgatctaactgatttcttaaaaaactcagataggtctgaagttgaaaaaataggaaatttaattggtcaaaatttaggatatgatagtgttgaatatacatgtagtcagctaggagttttttcacatcattcaggtatacctatggggatacgcattgctatagagtatgctttttcaaaaagtaaaataaataatgtagtatgtacttcaaccttagcacaaggtataaacttacctattaaatacttgattatctcaagtgtgtatcaagcaggagatgcaataaaagttcgtgattttcagaatttgataggtagagcaggaagggctggaaaatatacagaaggaacaataattttaacagagcccaatatttataaatcaccaaaaaataagtggaaaaaacaaaactataaagcattgttaaatcctattaatacagagggttgtcaaagtaatattctcagtattatacagtttaaatcagtagttccaactgattatcgattcgctcctataaaatttgatttttggaatttgattaaagagagatttgacagttctgtagactacagaacaaaaataaataatattttatcaaaattaaaaagaaagaacagtctttattttaaggattttaattctaagatagaccagattgataataccctaattgcaattgaaaattatattgcttctatgtatgctactgaattggagactgatagtttagctgaaaatacatttggatatttcttaggtaatgaagaggaaaaagaaaaaataaaagaattatttatcttgataaaatctaaaataattaccagttcagtagaaactgaaataattgcaaaaaactcaattggattatatcaatctgagttattaaaagaatgggttcaggaaaataaaacatctatcctttcttgtgagaaggaagaagagttattaggtgttttaaccaagaaaataatagatttttcaaataacaaagagatgagaaaactaagtatagaaaatctaaattatatttctcaactctggattaaggggatttcttattttcaaatattggaaagttgtactgaaaaatcaattagtattgagaaaagaggtaagtcaaaaccaattgatatgtctgacataatctctatttgtgataatggattagggtatgaaacatcaatggttttaaatgcgattaataatattcttgaaaaactagttggagaggaattggacgtattgactatgttaataaagaggctgaaatatgggctacctctggaaaaagaaatcaatatctatgaattaggtttttcagatagaattgtggtccaagttattggtcaagagattaattctgtaagtaagaatcaaattagaaatgaaatcaaacagaaatcagctagactagaagataaattgagtgattttccaagttattatacacagataattaatgaaatgtaa

SEQ ID NO: 56780 - DNA, 810 bp, Streptococcus pneumoniae 2090008; identical to SEQ ID NO: 56778

SEQ ID NO: 56781 - DNA, 2037 bp, Streptococcus pneumoniae 2090008
atgatagaatttgggagaaggtcattatatttttcaaaattagtgcgttcaaaggcaaagatgattgaatttgatattcctttagaaagtcatttaccaatttcagaggatgctcaaaaatcgtttcttggggcactagcaattgttgcagatactgctaggaagtattttgaagtttatatcaatcgtaagagttttaatttacaattaaaaaatcaattacacaatgctgctgaatattttgatgcattgctggtgtcaggattaggaaattcagctgaatatcaagactatattgcaatattgggtaccacagcttattatctatgcgattataatggtagttcgagagttatgattaactatatatcggatgatatccagttattagaagactgtatgactcttataaaagtatttattgacgttgtaacggatgaactctttttgaatcatacgccaatagaaggtaaatactctagtgagttaaatactctagttgaatcatatagaaattatattttatcaaaaactgagttttctatagatatttatagagatttacaagataaagtatataggaatggaagcgatttttctgtaattattgtaaattgtctcttagcagttgtatgtaaaaaaataaatagttcatcaacgaaattattacctgaattttcaggattagatttttctttatggcaggattatatacaatcaacaggaagcataaaggagctttggccatctcaaatcgaattagggaagcaaggaattttttcaggtaaatctggaatcgttcagatgccaacaagttcgggtaaaacagcctcaatcaatctaactttaagatcagcattttattcaaatagaattgataatgcattgattgttgcaccttttagagcattatgtagagaaatatatcgagatattaatgcacatttcgttgatgagaataatgtgattgttagtgaagtttttgatttaccggagattccacaggatttctcaatttttaatgatggtaaaaaaagagtttttatacttactccagagaaattgttgtttttattgagaaatcatcaaagttttattgatgaaataggactttgtatatttgatgaagcacatctttttgatgatccaagtcgtggaaccaattttgaattactgttgtcaacggttaaacaaattttcccaaaaggaatacagaagattttaatatctgctgtaataccaaatagtgaagctataaatcggtggtttaacgaagatggagtaattgtttctaataattcgattaaaacaacagagaaaagagttgcgtttagtgatttaaatgggagtaatgagcaattatatttcatagatcctattacatttgaagaagaattttttgttccacgtactgttagtgttagtgaattagagcagcttggaaaagaacgcaaacaaaaagtttttccagaactgacaaacgcaaatgatataagtatttattatgggactaagctaattaataatggtggagtaggaattttttgtggaagaaaagacacggtcaatgttattttacgaagatttatagacttaaataatagaaattatgatctaactgatttcttaaaaaactcagataggtctgaagttgaaaaaataggaaatttaattggtcaaaatttaggatatgatagtgttgaatatacatgtagtcagctaggagttttttcacatcattcaggtatacctatggggatacgcattgctatagagtatgctttttcaaaaagtaaaataaataatgtagtatgtacttcaaccttagcacaaggtataaacttacctattaaatacttgattatctcaagtgtgtatcaagcaggagatgcaataaaagttcgtgattttcagaatttgataggtagagcaggaagggctggaaaatatacagaaggaacaataattttaacagagcccaatatttataaatcaccaaaaaataagtggaaaaacaaaactataaagcattgttaa

SEQ ID NO: 56782 - DNA, 810 bp, Streptococcus pneumoniae 2061376; identical to SEQ ID NO: 56778

SEQ ID NO: 56783 - DNA, 2493 bp, Streptococcus pneumoniae 2061376
atgatagaatttgggagaaggtcattatatttttcaaaattagtgcgttcaaaggcaaagatgattgaatttgatattcctttagaaagtcatttaccaatttcagaggatgctcaaaaatcgtttcttggggcactagcaattgttgcagatactgctaggaagtattttgaagtttatatcaatcgtaagagttttaatttacaattaaaaaatcaattacacaatgctgctgaatattttgatgcattgctggtgtcaggattaggaaattcagctgaatatcaagactatattgcaatattgggtaccacagcttattatctatgcgattataatggtagttcgagagttatgattaactatatatcggatgatatccagttattagaagactgtatgactcttataaaagtatttattgacgttgtaacggatgaactctttttgaatcatacgccaatagaaggtaaatactctagtgagttaaatactctagttgaatcatatagaaattatattttatcaaaaactgagttttctatagatatttatagagatttacaagataaagtatataggaatggaagcgatttttctgtaattattgtaaattgtctcttagcagttgtatgtaaaaaaataaatagttcatcaacgaaattattacctgaattttcaggattagatttttctttatggcaggattatatacaatcaacaggaagcataaaggagctttggccatctcaaatcgaattagggaagcaaggaattttttcaggtaaatctggaatcgttcagatgccaacaagttcgggtaaaacagcctcaatcaatctaactttaagatcagcattttattcaaatagaattgataatgcattgattgttgcaccttttagagcattatgtagagaaatatatcgagatattaatgcacatttcgttgatgagaataatgtgattgttagtgaagtttttgatttaccggagattccacaggatttctcaatttttaatgatggtaaaaaaagagtttttatacttactccagagaaattgttgtttttattgagaaatcatcaaagttttattgatgaaataggactttgtatatttgatgaagcacatctttttgatgatccaagtcgtggaaccaattttgaattactgttgtcaacggttaaacaaattttcccaaaaggaatacagaagattttaatatctgctgtaataccaaatagtgaagctataaatcggtggtttaacgaagatggagtaattgtttctaataattcgattaaaacaacagagaaaagagttgcgtttagtgatttaaacgggagtaatgagcaattatatttcatagatcctattacatttgaagaagaattttttgttccacgtactgttagtgttagtgaattagagcagcttggaaaagaacgcaaacaaaaagtttttccagaactgacaaacgcaaatgatataagtatttattatgggactaagctaattaataatggtggagtaggaattttttgtggaagaaaagacacggtcaatgttattttacgaagatttatagacttaaataatagaaattatgatctaactgatttcttaaaaaactcagataggtctgaagttgaaaaaataggaaatttaattggtcaaaatttaggatatgatagtgttgaatatacatgtagtcagctaggagttttttcacatcattcaggtatacctatggggatacgcattgctatagagtatgctttttcaaaaagtaaaataaataatgtagtatgtacttcaaccttagcacaaggtataaacttacctattaaatacttgattatctcaagtgtgtatcaagcaggagatgcaataaaagttcgtgattttcagaatttgataggtagagcaggaagggctggaaaatatacagaaggaacaataattttaacagagcccaatatttataaatcaccaaaaaataagtggaaaaaacaaaactataaagcattgttaaatcctattaatacagagggttgtcaaagtaatattctcagtattatacagtttaaatcagtagttccaactgattatcgattcgctcctataaaatttgatttttggaatttgattaaagagagatttgacagttctgtagactacagaacaaaaataaataatattttatcaaaattaaaaagaaagaacagtctttattttaaggattttaattctaagatagaccagattgataataccctaattgcaattgaaaattatattgcttctatgtatgctactgaattggagactgatagtttagctgaaaatacatttggatatttcttaggtaatgaagaggaaaaagaaaaaataaaagaattatttatcttgataaaatctaaaataattaccagttcagtagaaactgaaataattgcaaaaaaactcaattggattatatcaatctga

SEQ ID NO: 56784 - DNA, 801 bp, Streptococcus pneumoniae GA56348
atgcatagttatataaagtatctaactcaagaagatcctattattactgatgaaggtaagcagattgagattcttcacttagatattcaagatgacccagaaatttttgaagattgggcaaaacaattcagaagaaattattgttctgatgatgaacttgctgaaatgataggttttatgaatatctcccctaaagagtatcttgaaaattttaaattaccctcggatagtggtattggcctttcaacgatgtcaggagattttggagaaatattagtatctgattatcttcagtatattgaagaatatgtggttcctaggactcgttatgatagtaaagtcaataaaaatacttcaactcaaggaagtgatgttctaggatataagcaagattcttcgaatgtgtcgaatgatgaggttgtagttattgaagtaaaatcatctgcatcagattctagtagctctaaagcgaaaaataagcttcaagaagctattaatcattctgataaagattttgaacgattttcaacctcaattgtagccagctatttgaggttaaagaaatctaatagtgatcaagcaaatgtagtagaaagatttttaaacataacggataaaccgtttaatgtaatctatggagctgttgcagtctactccaatcaatcatatgatattgatgttatcaagacagtagtttcaaaaaatcacagagattttcagaaattacgactattggtcattcattctaatgaattaatgaaatttattagagaactctattcgaaagcgagtgaggtatga

SEQ ID NO: 56785 - DNA, 3024 bp, Streptococcus pneumoniae GA56348
atgattgaatttgatattcctttagaaagtcatttaccaatttcagaggatgctcaaaaatcgtttcttggggcactagcaattgttgcagatactgctaggaagtattttgaagtttatatcaatcgtaagagttttaatttacaattaaaaaatcaattacacaatgctgctgaatattttgatgcattgctggtgtcaggattaggaaattcagctgaatatcaagactatattgcaatattgggtaccacagcttattatctatgcgattataatggtagttcgagagttatgattaactatatatcggatgatatccagttattagaagactgtatgactcttataaaagtatttattgacgttgtaacggatgaactctttttgaatcatacgccaatagaaggtaaatactctagtgagttaaatactctagttgaatcatatagaaattatattttatcaaaaactgagttttctatagatatttatagagatttacaagataaagtatataggaatggaagcgatttttctgtaattattgtaaattgtctcttagcagttgtatgtaaaaaaataaatagttcatcaacgaaattattacctgaattttcaggattagatttttctttatggcaggattatatacaatcaacaggaagcataaaggagctttggccatctcaaatcgaattagggaagcaaggaattttttcaggtaaatctggaatcgttcagatgccaacaagttcgggtaaaacagcctcaatcaatctaactttaagatcagcattttattcaaatagaattgataatgcattgattgttgcaccttttagagcattatgtagagaaatatatcgagatattaatgcacatttcgttgatgagaataatgtgattgttagtgaagtttttgatttaccggagattccacaggatttctcaatttttaatgatggtaaaaaaagagtttttatacttactccagagaaattgttgtttttattgagaaatcatcaaagttttattgatgaaataggactttgtatatttgatgaagcacatctttttgatgatccaagtcgtggaaccaattttgaattactgttgtcaacggttaaacaaattttcccaaaaggaatacagaagattttaatatctgctgtaataccaaatagtgaagctataaatcggtggtttaacgaagatggagtaattgtttctaataattcgattaaaacaacagagaaaagagttgcgtttagtgatttaaacgggagtaatgagcaattatatttcatagatcctattacatttgaagaagaattttttgttccacgtactgttagtgttagtgaattagagcagcttggaaaagaacgcaaacaaaaagtttttccagaactgacaaacgcaaatgatataagtatttattatgggactaagctaattaataatggtggagtaggaattttttgtggaagaaaagacacggtcaatgttattttacgaagatttatagacttaaataatagaaattatgatctaactgatttcttaaaaaactcagataggtctgaagttgaaaaaataggaaatttaattggtcaaaatttaggatatgatagtgttgaatatacatgtagtcagctaggagttttttcacatcattcaggtatacctatggggatacgcattgctatagagtatgctttttcaaaaagtaaaataaataatgtagtatgtacttcaaccttagcacaaggtataaacttacctattaaatacttgattatctcaagtgtgtatcaagcaggagatgcaataaaagttcgtgattttcagaatttgataggtagagcaggaagggctggaaaatatacagaaggaacaataattttaacagagcccaatatttataaatcaccaaaaaataagtggaaaaaacaaaactataaagcattgttaaatcctattaatacagagggttgtcaaagtaatattctcagtattatacagtttaaatcagtagttccaactgattatcgattcgctcctataaaatttgatttttggaatttgattaaagagagatttgacagttctgtagactacagaacaaaaataaataatattttatcaaaattaaaaagaaagaacagtctttattttaaggattttaattctaagatagaccagattgataataccctaattgcaattgaaaattatattgcttctatgtatgctactgaattggagactgatagtttagctgaaaatacatttggatatttcttaggtaatgaagaggaaaaagaaaaaataaaagaattatttatcttgataaaatctaaaataattaccagttcagtagaaactgaaataattgcaaaaaactcaattggattatatcaatctgagttattaaaagaatgggttcaggaaaataaaacatctatcctttcttgtgagaaggaagaagagttattaggtgttttaaccaagaaaataatagatttttcaaataacaaagagatgagaaaactaagtatagaaaatctaaattatatttctcaactctggattaaggggatttcttattttcaaatattggaaagttgtactgaaaaatcaattagtattgagaaaagaggtaagtcaaaaccaattgatatgtctgacataatctctatttgtgataatggattagggtatgaaacatcaatggttttaaatgcgattaataatattcttgaaaaactagttggagaggaattggacgtattgactatgttaataaagaggctgaaatatgggctacctctggaaaaagaaatcaatatctatgaattaggtttttcagatagaattgtggtccaagttattggtcaagagattaattctgtaagtaagaatcaaattagaaatgaaatcaaacagaaatcagctagactagaagataaattgagtgattttccaagttattatacacagataattaatgaaatgtaa

SEQ ID NO: 56786 - DNA, 801 bp, Streptococcus pneumoniae GA17484; identical to SEQ ID NO: 56784

SEQ ID NO: 56787 - DNA, 2397 bp, Streptococcus pneumoniae GA17484
atgatagaatttgggagaaggtcattatatttttcaaaattagtgcgttcaaaggcaaagatgattgaatttgatattcctttagaaagtcatttaccaatttcagaggatgctcaaaaatcgtttcttggggcactagcaattgttgcagatactgctaggaagtattttgaagtttatatcaatcgtaagagttttaatttacaattaaaaaatcaattacacaatgctgctgaatattttgatgcattgctggtgtcaggattaggaaattcagctgaatatcaagactatattgcaatattgggtaccacagcttattatctatgcgattataatggtagttcgagagttatgattaactatatatcggatgatatccagttattagaagactgtatgactcttataaaagtatttattgacgttgtaacggatgaactctttttgaatcatacgccaatagaaggtaaatactctagtgagttaaatactctagttgaatcatatagaaattatattttatcaaaaactgagttttctatagatatttatagagatttacaagataaagtatataggaatggaagcgatttttctgtaattattgtaaattgtctcttagcagttgtatgtaaaaaaataaatagttcatcaacgaaattattacctgaattttcaggattagatttttctttatggcaggattatatacaatcaacaggaagcataaaggagctttggccatctcaaatcgaattagggaagcaaggaattttttcaggtaaatctggaatcgttcagatgccaacaagttcgggtaaaacagcctcaatcaatctaactttaagatcagcattttattcaaatagaattgataatgcattgattgttgcaccttttagagcattatgtagagaaatatatcgagatattaatgcacatttcgttgatgagaataatgtgattgttagtgaagtttttgatttaccggagattccacaggatttctcaatttttaatgatggtaaaaaaagagtttttatacttactccagagaaattgttgtttttattgagaaatcatcaaagttttattgatgaaataggactttgtatatttgatgaagcacatctttttgatgatccaagtcgtggaaccaattttgaattactgttgtcaacggttaaacaaattttcccaaaaggaatacagaagattttaatatctgctgtaataccaaatagtgaagctataaatcggtggtttaacgaagatggagtaattgtttctaataattcgattaaaacaacagagaaaagagttgcgtttagtgatttaaacgggagtaatgagcaattatatttcatagatcctattacatttgaagaagaattttttgttccacgtactgttagtgttagtgaattagagcagcttggaaaagaacgcaaacaaaaagtttttccagaactgacaaacgcaaatgatataagtatttattatgggactaagctaattaataatggtggagtaggaattttttgtggaagaaaagacacggtcaatgttattttacgaagatttatagacttaaataatagaaattatgatctaactgatttcttaaaaaactcagataggtctgaagttgaaaaaataggaaatttaattggtcaaaatttaggatatgatagtgttgaatatacatgtagtcagctaggagttttttcacatcattcaggtatacctatggggatacgcattgctatagagtatgctttttcaaaaagtaaaataaataatgtagtatgtacttcaaccttagcacaaggtataaacttacctattaaatacttgattatctcaagtgtgtatcaagcaggagatgcaataaaagttcgtgattttcagaatttgataggtagagcaggaagggctggaaaatatacagaaggaacaataattttaacagagcccaatatttataaatcaccaaaaaataagtggaaaaaacaaaactataaagcattgttaaatcctattaatacagagggttgtcaaagtaatattctcagtattatacagtttaaatcagtagttccaactgattatcgattcgctcctataaaatttgatttttggaatttgattaaagagagatttgacagttctgtagactacagaacaaaaataaataatattttatcaaaattaaaaagaaagaacagtctttattttaaggattttaattctaagatagaccagattgataataccctaattgcaattgaaaattatattgcttctatgtatgctactgaattggagactgatagtttagctgaaaatacatttggatatttcttaggtaatgaagaggaaaaagaaaaataa

SEQ ID NO: 56788 - DNA, 801 bp, Streptococcus pneumoniae GA58981; identical to SEQ ID NO: 56784

SEQ ID NO: 56789 - DNA, 3024 bp, Streptococcus pneumoniae GA58981; identical to SEQ ID NO: 56785

SEQ ID NO: 56790 - DNA, 810 bp, Streptococcus pneumoniae MNZ41
atggaaaagatgcatagttatataaagtatttaattcatgaagatcctattattactgatgaaggtaagcaggttgagattcttcacttagacattcaagatgacccagaaatttttgaagattgggcaaaccaattcagaagaaattattgttctgatgatgaacttgctgaaatgataggttttatgaatatctcccctaaagagtatcttaaaaattttaaattaccctcggatagtggtattggcctttcaacgatgtcaggtgattttggagaaatattagtatctgattatcttcaaaatattgaagaatatgtggttcctaggactcgttatgatagtagagtcaataaagatacttcaactcaaggaagtgatgttctaggatataagcaagattcttcgaatgtatcgaatgatgaggttgtagttattgaagtaaaatcatcggcatctgattctagtagctctcaagcgaaaaataagcttcaagaagctattaatcattctgataaagattttgaacgattttcaacctcaattgtagctagctatttaaggttaaagaaatctaatagtgatcaagaaaatgtagtagaaagatttttaaacataacggataaaccatttaatgtaatctatggagctgttgcagtctactccaatcaatcatatgatattgatgttatcaagacagtagtttcaaaaaaacacagagattttcagaaattacgactattggtcattcattctgatgaattaatgaaatttattagagaactttattcgaaagcgagtgaggtatga

SEQ ID NO: 56791 - DNA, 2973 bp, Streptococcus pneumoniae MNZ41
atgatagaatttgggaaaaagtcattatatttttcaaaattagtgcgttcaaaggcaaagatgattgaatttgaaattcctttagaaagtcatattccaatttctgaggatgctcaaaaatcgtttcttggggcattagcaattgctgcagatactgctaggaagtattttgaagattatatcaatcataagagttttgattcacaattaaaaaatcaattacacaatgttgctgaatattttgatgcattgctggtgtcaggattaggaaattcagctgaatatcaagactatattgcaatactaggtaccacagcttattatctaggcgattataatggtagttcgagagttatggttaactacatatcggatgatatgcagttattagaagagagtataactcttgtaaaagtatttattaatgttattacagataaactctttttgaatcatacgccaatagaaggtaaatactctagtgagttaaatactctggtggaatcatatagaaattatattttatcaaaaactgagttttctatagatatttatagagatttacaagataaagtatataggaatggaagcgatttttctgtaatcattgtaaattgtctcttagcagttgtatgtaaaaaaatagatagttcatcaacgaaattattacctgaattttcaggattagatttttctttatggcaggattatatacaatcaacaggaagtataaaggagctttggccatctcaaatcgaattagggaagcaagcaattttttcaggtaaatctggaatcgttcagatgccaacaagttcgggtaaaacagcctcaatcaatctaaccttaagatcagcattttattcaaatagaattgataatgcattgattgttgcaccttttagagcattatgtagagaaatatatcgtgatattaatgcacatttcgttgatgagaataatgtgattgttagtgaagtttttgatttaccggagattccacaggatttctcaatttttaatgatggtaaaaaaagagtttttatacttactccaggaaaattgttgtttttattgagaaatcatcaaagttttattgatgaaataggactttgtatatttgatgaagcacatctttttgatgatccaagtcgtggaacaaattttgaattactgttgtcaacggttaaacaaattttcccaaaaggaatacagaagattttaatatctgctgtaataccaaatagtgaagctataaatcggtggtttaacgaagatggagtaattgtttctaataattcgattaaaacaacagagaaaagagttgcgtttagtgatttaaacgggagtaatgagcaattatatttcatagatcctattacatttgaagaagaattttttgttccacgtactgttagtgttagtgaattagagcagcttggaaaagaacgcaaacaaaaagtttttccagaactgacaaacgaaaatgatataagtatttattatgggattaatctaattaataatggtggagtaggaattttttgtggaagaaaagacacggtcaatgttattttacgaagatttatagacttaaataatagaaattatgatctaactgatttcttaaaaaactcagataggtctgaagttgaaaaaataggaaatttaattggtcaaaatttaggatatgatagtgttgaatatacatgtagtcagctaggagttttttcacatcattcaggtatacctatggggatacgcattgctatagagtatgctttttcaaaaagtaaaataaataatgtagtatgtacttcaaccttagcacaaggtataaacttacctattaaatacttgattatctcaagtgtgtatcaagcaggagatgcaataaaagttcgtgattttcagaatttgataggtagagcaggaagggctggaaaatatacagaaggaacaataattttaacagagcccaatatttataaatcaccaaaaaataagtggaaaaaacaaaactataaagcattgttaaatcctattaatacagagggttgtcaaagtaatattctcagtattatacagtttaaatcagtagttccaactgattatcgattcgctcctataaaatttgatttttggaatttgattaaagagagatttgacagttctgtagactacagaacaaaaataaataatattttatcaaaattaaaaagaaagaacagtctttattttaaggattttaattctaagatagaccagattgataataccctaattgcaattgaaaattatattgcttctatgtatgctactgaattggagactgatagtttagctgaaaatacatttggatatttcttaggtaataatgaagaggaaaaagaaaaaataaaagaattatttatcttgataaaatctaaaataattaccagttcagtagaaactgaaataattgcaaaaaactcaattggattatatcaatctgagttattaaaagaatgggttcaggaaaataaaacatctatcatttcttgtgagaaggaagaagagttattaggtgttttaaccaagaaaataatagatttttcaaataacaaagagatgagaaaactaagtatagaaaatctaaattatatttctcaactctggattaaggggatttcttattttcaaatattggaaagttgtactgaaaaatcaattagtattgagaaaagaggtaagtcaaaaccaattgatatgtctgacataatctctatttgtgataatggattagggtatgaaacatcaatggttttaaatgcgattaataatattcttgaaaaactagttggagaggaattggacgtattgactatgttaataaagaggctgaaatatgggctacctctggaaaaagaaatcaatatctatgaattaggtttttcagatagaattgtggtccaagttattatacacagataa

SEQ ID NO: 56792 - DNA, 810 bp, Streptococcus pneumoniae 1719; identical to SEQ ID NO: 56790

SEQ ID NO: 56793 - DNA, 2973 bp, Streptococcus pneumoniae 1719; identical to SEQ ID NO: 56791

SEQ ID NO: 56794 - DNA, 801 bp, Streptococcus pneumoniae
atgcatagttatataaagtatttaattcatgaagatcctattattactgatgaaggtaagcaggttgagattcttcacttagacattcaagatgacccagaaatttttgaagattgggcaaaccaattcagaagaaattattgttctgatgatgaacttgctgaaatgataggttttatgaatatctcccctaaagagtatcttaaaaattttaaattaccctcggatagtggtattggcctttcaacgatgtcaggtgattttggagaaatattagtatctgattatcttcaaaatattgaagaatatgtggttcctaggactcgttatgatagtagagtcaataaagatacttcaactcaaggaagtgatgttctaggatataagcaagattcttcgaatgtatcgaatgatgaggttgtagttattgaagtaaaatcatcggcatctgattctagtagctctcaagcgaaaaataagcttcaagaagctattaatcattctgataaagattttgaacgattttcaacctcaattgtagccagctatttaaggttaaagaaatctaatagtgatcaagaaaatgtagtagaaagatttttaaacataacggataaaccatttaatgtaatctatggagctgttgcagtctactccaatcaatcatatgatattgatgttatcaagacagtagtttcaaaaaaacacagagattttcagaaattacgactattggtcattcattctgatgaattaatgaaatttattagagaactttattcgaaagcgagtgaggtatga

SEQ ID NO: 56795 - DNA, 2973 bp, Streptococcus pneumoniae
atgatagaatttgggaaaaagtcattatatttttcaaaattagtgcgttcaaaggcaaagatgattgaatttgaaattcctttagaaagtcatattccaatttctgaggatgctcaaaaatcgtttcttggggcattagcaattgctgcagatactgctaggaagtattttgaagattatatcaatcataagagttttgattcacaattaaaaaatcaattacacaatgttgctgaatattttgatgcattgctggtgtcaggattaggaaattcagctgaatatcaagactatattgcaatactaggtaccacagcttattatctaggcgattataatggtagttcgagagttatggttaactacatatcggatgatatgcagttattagaagagagtataactcttgtaaaagtatttattaatgttattacagataaactctttttgaatcatacgccaatagaaggtaaatactctagtgagttaaatactctggtggaatcatatagaaattatattttatcaaaaactgagttttctatagatatttatagagatttacaagataaagtatataggaatggaagcgatttttctgtaatcattgtaaattgtctcttagcagttgtatgtaaaaaaatagatagttcatcaacgaaattattacctgaattttcaggattagatttttctttatggcaggattatatacaatcaacaggaagtataaaggagctttggccatctcaaatcgaattagggaagcaagcaattttttcaggtaaatctggaatcgttcagatgccaacaagttcgggtaaaacagcctcaatcaatctaaccttaagatcagcattttattcaaatagaattgataatgcattgattgttgcaccttttagagcattatgtagagaaatatatcgtgatattaatgcacatttcgttgatgagaataatgtgattgttagtgaagtttttgatttaccggagattccacaggatttctcaatttttaatgatggtaaaaaaagagtttttatacttactccaggaaaattgttgtttttattgagaaatcatcaaagttttattgatgaaataggactttgtatatttgatgaagcacatctttttgatgatccaagtcgtggaacaaattttgaattactgttgtcaacggttaaacaaattttcccaaaaggaatacagaagattttaatatctgctgtaataccaaatagtgaagctataaatcggtggtttaacgaagatggagtaattgtttctaataattcgattaaaacaacagagaaaagagttgcgtttagtgatttaaacgggagtaatgagcaattatatttcatagatcctattacatttgaagaagaattttttgttccacgtactgttagtgttagtgaattagagcagcttggaaaagaacgcaaacaaaaagtttttccagaactgacaaacgaaaatgatataagtatttattatgggattaatctaattaataatggtggagtaggaattttttgtggaagaaaagacacagtcaatgttattttacgaagatttatagacttaaataatagaaattatgatctaactgatttcttaaaaaactcagataggtctgaagttgaaaaaataggaaatttaattggtcaaaatttaggatatgatagtgttgaatatacatgtagtcagctaggagttttttcacatcattcaggtatacctatggggatacgcattgctatagagtatgctttttcaaaaagtaaaataaataatgtagtatgtacttcaaccttagcacaaggtataaacttacctattaaatacttgattatctcaagtgtgtatcaagcaggagatgcaataaaagttcgtgattttcagaatttgataggtagagcaggaagggctggaaaatatacagaaggaacaataattttaacagagcccaatatttataaatcaccaaaaaataagtggaaaaaacaaaactataaagcattgttaaatcctattaatacagagggttgtcaaagtaatattctcagtattatacagtttaaatcagtagttccaactgattatcgattcgctcctataaaatttgatttttggaatttgattaaagagagatttgacagttctgtagactacagaacaaaaataaataatattttatcaaaattaaaaagaaagaacagtctttattttaaggattttaattctaagatagaccagattgataataccctaattgcaattgaaaattatattgcttctatgtatgctactgaattggagactgatagtttagctgaaaatacatttggatatttcttaggtaataatgaagaggaaaaagaaaaaataaaagaattatttatcttgataaaatctaaaataattaccagttcagtagaaactgaaataattgcaaaaaactcaattggattatatcaatctgagttattaaaagaatgggttcaggaaaataaaacatctatcatttcttgtgagaaggaagaagagttattaggtgttttaaccaagaaaataatagatttttcaaataacaaagagatgagaaaactaagtatagaaaatctaaattatatttctcaactctggattaaggggatttcttattttcaaatattggaaagttgtactgaaaaatcaattagtattgagaaaagaggtaagtcaaaaccaattgatatgtctgacataatctctatttgtgataatggattagggtatgaaacatcaatggttttaaatgcgattaataatattcttgaaaaactagttggagaggaattggacgtattgactatgttaataaagaggctgaaatatgggctacctctggaaaaagaaatcaatatctatgaattaggtttttcagatagaattgtggtccaagttattatacacagataa

SEQ ID NO: 56796 - DNA, 810 bp, Streptococcus pneumoniae ECC_3510
atggaaaagatgcatagttatataaagtatttaattcatgaagatcctattattactgatgaaggtaagcaggttgagattcttcacttagacattcaagatgacccagaaatttttgaagattgggcaaaccaattcagaagaaattattgttctgatgatgaacttgctgaaatgataggttttatgaatatctcccctaaagagtatcttaaaaattttaaattaccctcggatagtggtattggcctttcaacgatgtcaggtgattttggagaaatattagtatctgattatcttcaaaatattgaagaatatgtggttcctaggactcgttatgatagtagagtcaataaagatacttcaactcaaggaagtgatgttctaggatataagcaagattcttcgaatgtatcgaatgatgaggttgtagttattgaagtaaaatcatcggcatctgattctagtagctctcaagcgaaaaataagcttcaagaagctattaatcattctgataaagattttgaacgattttcaacctcaattgtagccagctatttaaggttaaagaaatctaatagtgatcaagaaaatgtagtagaaagatttttaaacataacggataaaccatttaatgtaatctatggagctgttgcagtctactccaatcaatcatatgatattgatgttatcaagacagtagtttcaaaaaaacacagagattttcagaaattacgactattggtcattcattctgatgaattaatgaaatttattagagaactttattcgaaagcgagtgaggtatga

SEQ ID NO: 56797 - DNA, 1602 bp, Streptococcus pneumoniae ECC_3510
atgatagaatttgggaaaaagtcattatatttttcaaaattagtgcgttcaaaggcaaagatgattgaatttgaaattcctttagaaagtcatattccaatttctgaggatgctcaaaaatcgtttcttggggcattagcaattgctgcagatactgctaggaagtattttgaagattatatcaatcataagagttttgattcacaattaaaaaatcaattacacaatgttgctgaatattttgatgcattgctggtgtcaggattaggaaattcagctgaatatcaagactatattgcaatactaggtaccacagcttattatctaggcgattataatggtagttcgagagttatggttaactacatatcggatgatatgcagttattagaagagagtataactcttgtaaaagtatttattaatgttattacagataaactctttttgaatcatacgccaatagaaggtaaatactctagtgagttaaatactctggtggaatcatatagaaattatattttatcaaaaactgagttttctatagatatttatagagatttacaagataaagtatataggaatggaagcgatttttctgtaatcattgtaaattgtctcttagcagttgtatgtaaaaaaatagatagttcatcaacgaaattattacctgaattttcaggattagatttttctttatggcaggattatatacaatcaacaggaagtataaaggagctttggccatctcaaatcgaattagggaagcaagcaattttttcaggtaaatctggaatcgttcagatgccaacaagttcgggtaaaacagcctcaatcaatctaaccttaagatcagcattttattcaaatagaattgataatgcattgattgttgcaccttttagagcattatgtagagaaatatatcgtgatattaatgcacatttcgttgatgagaataatgtgattgttagtgaagtttttgatttaccggagattccacaggatttctcaatttttaatgatggtaaaaaaagagtttttatacttactccaggaaaattgttgtttttattgagaaatcatcaaagttttattgatgaaataggactttgtatatttgatgaagcacatctttttgatgatccaagtcgtggaacaaattttgaattactgttgtcaacggttaaacaaattttcccaaaaggaatacagaagattttaatatctgctgtaataccaaatagtgaagctataaatcggtggtttaacgaagatggagtaattgtttctaataattcgattaaaacaacagagaaaagagttgcgtttagtgatttaaacgggagtaatgagcaattatatttcatagatcctattacatttgaagaagaattttttgttccacgtactgttagtgttagtgaattagagcagcttggaaaagaacgcaaacaaaaagtttttccagaactgacaaacgaaaatgatataagtatttattatgggattaagctaattaataatggtggagtaggaattttttgtggaagaaaagacacggtcaatgttattttacgaagatttatagacttaacttaa

SEQ ID NO: 56798 - DNA, 810 bp, Streptococcus pneumoniae; identical to SEQ ID NO: 56796

SEQ ID NO: 56799 - DNA, 1602 bp, Streptococcus pneumoniae; identical to SEQ ID NO: 56797

SEQ ID NO: 56800 - DNA, 810 bp, Streptococcus pneumoniae; identical to SEQ ID NO: 56790

SEQ ID NO: 56801 - DNA, 2475 bp, Streptococcus pneumoniae
gtggaatcatatagaaattatattttatcaaaaactgagttttctatagatatttatagagatttacaagataaagtatataggaatggaagcgatttttctgtaatcattgtaaattgtctcttagcagttgtatgtaaaaaaatagatagttcatcaacgaaattattacctgaattttcaggattagatttttctttatggcaggattatatacaatcaacaggaagtataaaggagctttggccatctcaaatcgaattagggaagcaagcaattttttcaggtaaatctggaatcgttcagatgccaacaagttcgggtaaaacagcctcaatcaatctaaccttaagatcagcattttattcaaatagaattgataatgcattgattgttgcaccttttagagcattatgtagagaaatatatcgtgatattaatgcacatttcgttgatgagaataatgtgattgttagtgaagtttttgatttaccggagattccacaggatttctcaatttttaatgatggtaaaaaaagagtttttatacttactccaggaaaattgttgtttttattgagaaatcatcaaagttttattgatgaaataggactttgtatatttgatgaagcacatctttttgatgatccaagtcgtggaacaaattttgaattactgttgtcaacggttaaacaaattttcccaaaaggaatacagaagattttaatatctgctgtaataccaaatagtgaagctataaatcggtggtttaacgaagatggagtaattgtttctaataattcgattaaaacaacagagaaaagagttgcgtttagtgatttaaacgggagtaatgagcaattatatttcatagatcctattacatttgaagaagaattttttgttccacgtactgttagtgttagtgaattagagcagcttggaaaagaacgcaaacaaaaagtttttccagaactgacaaacgaaaatgatataagtatttattatgggattaatctaattaataatggtggagtaggaattttttgtggaagaaaagacacggtcaatgttattttacgaagatttatagacttaaataatagaaattatgatctaactgatttcttaaaaaactcagataggtctgaagttgaaaaaataggaaatttaattggtcaaaatttaggatatgatagtgttgaatatacatgtagtcagctaggagttttttcacatcattcaggtatacctatggggatacgcattgctatagagtatgctttttcaaaaagtaaaataaataatgtagtatgtacttcaaccttagcacaaggtataaacttacctattaaatacttgattatctcaagtgtgtatcaagcaggagatgcaataaaagttcgtgattttcagaatttgataggtagagcaggaagggctggaaaatatacagaaggaacaataattttaacagagcccaatatttataaatcaccaaaaaataagtggaaaaaacaaaactataaagcattgttaaatcctattaatacagagggttgtcaaagtaatattctcagtattatacagtttaaatcagtagttccaactgattatcgattcgctcctataaaatttgatttttggaatttgattaaagagagatttgacagttctgtagactacagaacaaaaataaataatattttatcaaaattaaaaagaaagaacagtctttattttaaggattttaattctaagatagaccagattgataataccctaattgcaattgaaaattatattgcttctatgtatgctactgaattggagactgatagtttagctgaaaatacatttggatatttcttaggtaataatgaagaggaaaaagaaaaaataaaagaattatttatcttgataaaatctaaaataattaccagttcagtagaaactgaaataattgcaaaaaactcaattggattatatcaatctgagttattaaaagaatgggttcaggaaaataaaacatctatcatttcttgtgagaaggaagaagagttattaggtgttttaaccaagaaaataatagatttttcaaataacaaagagatgagaaaactaagtatagaaaatctaaattatatttctcaactctggattaaggggatttcttattttcaaatattggaaagttgtactgaaaaatcaattagtattgagaaaagaggtaagtcaaaaccaattgatatgtctgacataatctctatttgtgataatggattagggtatgaaacatcaatggttttaaatgcgattaataatattcttgaaaaactagttggagaggaattggacgtattgactatgttaataaagaggctgaaatatgggctacctctggaaaaagaaatcaatatctatgaattaggtttttcagatagaattgtggtccaagttattatacacagataa

SEQ ID NO: 56802 - DNA, 810 bp, Streptococcus pneumoniae; identical to SEQ ID NO: 56790

SEQ ID NO: 56803 - DNA, 2973 bp, Streptococcus pneumoniae; identical to SEQ ID NO: 56791

SEQ ID NO: 56804 - DNA, 810 bp, Streptococcus pneumoniae; identical to SEQ ID NO: 56790

SEQ ID NO: 56805 - DNA, 2973 bp, Streptococcus pneumoniae; identical to SEQ ID NO: 56791

SEQ ID NO: 56806 - DNA, 801 bp, Streptococcus pneumoniae
atgcatagttatataaagtatctaactcaagaagatcctattattactgatgaaggtaagcagattgagattcttcacttagatattcaagatgacccagaaatttttgaagattgggcaaaacaattcagaagaaattattgttctgatgatgaacttgctgaaatgataggttttatgaatatctcccctaaagagtatcttgaaaattttaaattaccctcggatagtggtattggcctttcaacgatgtcaggagattttggagaaatattagtatctgattatcttcagtatattgaagaatatgtggttcctaggactcgttatgatagtaaagttaataaaaatacttcaactcaaggaagtgatgttctaggatataagcaagattcttcgaatgtgtcgaatgatgaggttgtagttattgaagtaaaatcatctgcatcagattctagtagctctaaagcgaaaaataagcttcaagaagctattaatcattctgataaagattttgaacgattttcaacctcaattgtagccagctatttgaggttaaagaaatctaatagtgatcaagcaaatgtagtagaaagatttttaaacataacggataaaccgtttaatgtaatctatggagctgttgcagtctactccaatcaatcatatgatattgatgttatcaagacagtagtttcaaaaaatcacagagattttcagaaattacgactattggtcattcattctaatgaattaatgaaatttattagagaactctattcgaaagcgagtgaggtatga

SEQ ID NO: 56807 - DNA, 2508 bp, Streptococcus pneumoniae
atgatagaatttgggagaaggtcattatatttttcaaaattagtgcgttcaaaggcaaagatgattgaatttgatattcctttagaaagtcatttaccaatttcagaggatgctcaaaaatcgtttcttggggcactagcaattgttgcagatactgctaggaagtattttgaagtttatatcaatcgtaagagttttaatttacaattaaaaaatcaattacacaatgctgctgaatattttgatgcattgctggtgtcaggattaggaaattcagctgaatatcaagactatattgcaatattgggtaccacagcttattatctatgcgattataatggtagttcgagagttatgattaactatatatcggatgatatccagttattagaagactgtatgactcttataaaagtatttattgacgttgtaacggatgaactctttttgaatcatacgccaatagaaggtaaatactctagtgagttaaatactctagttgaatcatatagaaattatattttatcaaaaactgagttttctatagatatttatagagatttacaagataaagtatataggaatggaagcgatttttctgtaattattgtaaattgtctcttagcagttgtatgtaaaaaaataaatagttcatcaacgaaattattacctgaattttcaggattagatttttctttatggcaggattatatacaatcaacaggaagcataaaggagctttggccatctcaaatcgaattagggaagcaaggaattttttcaggtaaatctggaatcgttcagatgccaacaagttcgggtaaaacagcctcaatcaatctaactttaagatcagcattttattcaaatagaattgataatgcattgattgttgcaccttttagagcattatgtagagaaatatatcgagatattaatgcacatttcgttgatgagaataatgtgattgttagtgaagtttttgatttaccggagattccacaggatttctcaatttttaatgatggtaaaaaaagagtttttatacttactccagagaaattgttgtttttattgagaaatcatcaaagttttattgatgaaataggactttgtatatttgatgaagcacatctttttgatgatccaagtcgtggaaccaattttgaattactgttgtcaacggttaaacaaattttcccaaaagaaatacagaagattttaatttctgctgtaataccaaatagtgaagctataaatcggtggtttaacgaagatggagtaatcgtttctaataattcgattaaaacaacagagaaaagagttgcgtttagtgatttaaacgggagtaatgaacaattatatttcatagatcctattacatttgaagaagaattttttgttccacgtactgttagtgttagtgaattagagctgcttggaaaagaacgaaaacaaaaagtatttccagaactgtcaaatgcaaatgatataagtatttattatgggactaagctaattaataatggtggagtaggaattttttgtggaagaaaagacacagtcaatgttgttttgcgaagatttatagacttaaataataggaattatgatctgaccgatttcttaaaaaactcagataagtatgaagttgaaaaaataggaaacttacttggtcaaaatttaggatatgatagtgttgaatatgcatgtagtcagctgggagttttttcacatcattcaggtatacctatggggatacgcattgctatagagtatgctttttcaaaaagtaaaataaataatgtagtatgtacttcaaccttagcacaaggtgtgaacttacctattaaatacttgattatctcaagtgtgtatcaagcaggagatgcaataaaagttcgtgattttcagaatttgataggtagagcaggaagggctggaaaatatacagaaggaacaataattttaacagagcccaatatttataaatcaccaaaaaataagagaaaaaaacaaaactatgaagcattgttaaatcctattaatacagagggttgtcaaagcaatattctcagtattatacagtttaaatcagtagttccaactgattatcgattcaatcccataaaatttgattattggagtttgattaaagagagatttgacagtactgtagactacagaacaaaaataaacaatattttatcagaattaaaagaacagaacagtccttattttaaggattttcattctaagatagaccagattgacaaaaccctaattgcaattgaaaattatattgcttctatgtatgctactgaattggagacagatagtttagctgaaaaaacttttggatatttcttaggtaatgaagaggaacaagaaaaaataaaagaattatttgtcttggtaaaatctaaaatagttactagtttagtagaaactgaaataattgcaaaaagctcaattgggttatatcaatctgagctattaaaagaatga

SEQ ID NO: 56808 - DNA, 810 bp, Streptococcus pneumoniae
atggaaaagatgcatagttatataaagtatttaattcatgaagatcctattattactgatgaaggtaagcaggttgagattcttcacttagacattcaagatgacccagaaatttttgaagattgggcaaaccaattcagaagaaattattgttctgatgatgaacttgctgaaatgataggttttatgaatatctcccctaaagagtatcttaaaaattttaaattaccctcggatagtggtattggcctttcaacgatgtcaggtgattttggagaaatattagtatctgattatcttcaaaatattgaagaatatgtggttcctaggactcgttatgatagtagagtcaataaagatacttcaactcaaggaagtgatgttctaggatataagcaagattcttcgaatgtatcgaatgatgaggttgtagttattgaagtaaaatcatcggcatctgattctagtagctctcaagcgaaaaataagcttcaagaagctattaatcattctgataaagattttgaacgattttcaacctcaattgtagccagctatttaaggttaaagaaatctaatagtgatcaagcaaatgtagtagaaagatttttaaacataacggataaaccatttaatgtaatctatggagctgttgcagtctactccaatcaatcatatgatattgatgttatcaagacagtagtttcaaaaaaacacagagattttcagaaattacgactattggtcattcattctgatgaattaatgaaatttattagagaactttattcgaaagcgagtgaggtatga

SEQ ID NO: 56809 - DNA, 3084 bp, Streptococcus pneumoniae
atgatagaatttgggaaaaagtcattatatttttcaaaattagtgcgttcaaaggcaaagatgattgaatttgaaattcctttagaaagtcatattccaatttctgaggatgctcaaaaatcgtttcttgtggcattagcaattgctgcagatactgctaggaagtattttgaagattatatcaatcataagagttttgattcacaattaaaaaatcaattacacaatgttgctgaatattttgatgcattgctggtgtcaggattaggaaattcagctgaatatcaagactatattgcaatactaggtaccacagcttattatctaggcgattataatggtagttcgagagttatggttaactacatatcggatgatatgcagttattagaagagagtataactcttgtaaaagtatttattgatgttattacagataaactctttttgaatcatacgccaatagaaggtaaatactctagtgagttaaatactctggtggaatcatatagaaattatattttatcaaaaactgagttttctatagatatttatagaggtttacaagataaagtatataggaatggaagcgatttttctgtaatcattgtaaattgtctcttagcagttgtatgtaaaaaaatagatagttcatcaacgaaattattacctgaattttcaggattagatttttctttatggcaggattatatacaatcaacaggaagtataaaggagctttggccatctcaaatcgaattagggaagcaagcaattttttcaggtaaatctggaagcgttcagatgccaacaagttcgggtaaaacagcctcaatcaatctaaccttaagatcagcattttattcaaatagaattgataatgcattgattgttgcaccttttagagcattatgtagagaaatatatcgtgatattaatgcacatttcgttgatgagaataatgtgattgttagtgaagtttttgatttaccggagattccacaggatttctcaatttttaatgatggtaaaaaaagagtttttatacttactccagaaaaattgttgtttttattgagaaatcatcaaagttttattgatgaaataggactttgtatatttgatgaagcacatctttttgatgatccaagtcgtggaacaaattttgaattactgttgtcaacggttaaacaaattttcccaaaaggaatacagaagattttaatatctgctgtaataccaaatagtgaagctataaatcggtggtttaacgaagatggagtaattgtttctaataattcgattaaaacaacagagaaaagagttgcgtttagtgatttaaacgggagtaatgagcaattatatttcatagatcctattacatttgaagaagaattttttgttccacgtactgttagtgttagtgaattagagcagcttggaaaagaacgcaaacaaaaagtttttccagaactgacaaacgcaaatgatataagtatttattatgggactaagctaattaataatggtggagtaggaattttttgtggaagaaaagacacggtcaatgttattttacgaagatttatagacttaaataatagaaattatgatctaactgatttcttaaaaaactcagataggtctgaagttgaaaaaataggaaatttaattggtcaaaatttaggatatgatagtgttgaatatacatgtagtcagctaggagttttttcacatcattcaggtatacctatggggatacgcattgctatagagtatgctttttcaaaaagtaaaataaataatgtagtatgtacttcaaccttagcacaaggtataaacttacctattaaatacttgattatctcaagtgtgtatcaagcaggagaggcaataaaagttcgtgattttcagaatttgataggtagagcaggaagggctggaaaatatacagaaggaacaataattttaacagagcccaatatttataaatcaccaaaaaataagtggaaaaaacaaaactataaagcattgttaaatcctattaatacagagggttgtcaaagtaatattctcagtattatacagtttaaatcagtagttccaactgattatcgattcgctcctataaaatttgatttttggaatttgattaaagagagatttgacagttctgtagactacagaacaaaaataaataatattttatcaaaattaaaaagaaagaacagtctttattttaaggattttaattctaagatagaccagattgataataccctaattgcaattgaaaattatattgcttctatgtatgctactgaattggagactgatagtttagctgaaaatacatttggatatttcttaggtaatgaagaggaaaaagaaaaaataaaagaattatttatcttgataaaatctaaaataattaccagttcagtagaaactgaaataattgcaaaaaactcaattggattatatcaatctgagttattaaaagaatgggttcaggaaaataaaacatctatcctttcttgtgagaaggaagaagagttattaggtgttttaaccaagaaaataatagatttttcaaataacaaagagatgagaaaactaagtatagaaaatctaaattatatttctcaactctggattaaggggatttcttattttcaaatattggaaagttgtactgaaaaatcaattagtattgagaaaagaggtaagtcaaaaccaattgatatgtctgacataatctctatttgtgataatggattagggtatgaaacatcaatggttttaaatgcgattaataatattcttgaaaaactagttggagaggaattggacgtattgactatgttaataaagaggctgaaatatgggctacctctggaaaaagaaatcaatatctatgaattaggtttttcagatagaattgtggtccaagttattggtcaagagattaattctgtaagtaagaatcaaattagaaatgaaatcaaacagaaatcagctagactagaagataaattgagtgattttccaagttattatacacagataattaatgaaatgtaa

SEQ ID NO: 56810 - DNA, 810 bp, Streptococcus pneumoniae; identical to SEQ ID NO: 56796

SEQ ID NO: 56811 - DNA, 1602 bp, Streptococcus pneumoniae; identical to SEQ ID NO: 56797

SEQ ID NO: 56812 - DNA, 801 bp, Streptococcus pneumoniae; identical to SEQ ID NO: 56806

SEQ ID NO: 56813 - DNA, 2448 bp, Streptococcus pneumoniae
atgattgaatttgatattcctttagaaagtcatttaccaatttcagaggatgctcaaaaatcgtttcttggggcactagcaattgttgcagatactgctaggaagtattttgaagtttatatcaatcgtaagagttttaatttacaattaaaaaatcaattacacaatgctgctgaatattttgatgcattgctggtgtcaggattaggaaattcagctgaatatcaagactatattgcaatattgggtaccacagcttattatctatgcgattataatggtagttcgagagttatgattaactatatatcggatgatatccagttattagaagactgtatgactcttataaaagtatttattgacgttgtaacggatgaactctttttgaatcatacgccaatagaaggtaaatactctagtgagttaaatactctagttgaatcatatagaaattatattttatcaaaaactgagttttctatagatatttatagagatttacaagataaagtatataggaatggaagcgatttttctgtaattattgtaaattgtctcttagcagttgtatgtaaaaaaataaatagttcatcaacgaaattattacctgaattttcaggattagatttttctttatggcaggattatatacaatcaacaggaagcataaaggagctttggccatctcaaatcgaattagggaagcaaggaattttttcaggtaaatctggaatcgttcagatgccaacaagttcgggtaaaacagcctcaatcaatctaactttaagatcagcattttattcaaatagaattgataatgcattgattgttgcaccttttagagcattatgtagagaaatatatcgagatattaatgcacatttcgttgatgagaataatgtgattgttagtgaagtttttgatttaccggagattccacaggatttctcaatttttaatgatggtaaaaaaagagtttttatacttactccagagaaattgttgtttttattgagaaatcatcaaagttttattgatgaaataggactttgtatatttgatgaagcacatctttttgatgatccaagtcgtggaaccaattttgaattactgttgtcaacggttaaacaaattttcccaaaagaaatacagaagattttaatttctgctgtaataccaaatagtgaagctataaatcggtggtttaacgaagatggagtaatcgtttctaataattcgattaaaacaacagagaaaagagttgcgtttagtgatttaaacgggagtaatgaacaattatatttcatagatcctattacatttgaagaagaattttttgttccacgtactgttagtgttagtgaattagagctgcttggaaaagaacgaaaacaaaaagtatttccagaactgtcaaatgcaaatgatataagtatttattatgggactaagctaattaataatggtggagtaggaattttttgtggaagaaaagacacagtcaatgttgttttgcgaagatttatagacttaaataataggaattatgatctgaccgatttcttaaaaaactcagataagtatgaagttgaaaaaataggaaacttacttggtcaaaatttaggatatgatagtgttgaatatgcatgtagtcagctgggagttttttcacatcattcaggtatacctatggggatacgcattgctatagagtatgctttttcaaaaagtaaaataaataatgtagtatgtacttcaaccttagcacaaggtgtgaacttacctattaaatacttgattatctcaagtgtgtatcaagcaggagatgcaataaaagttcgtgattttcagaatttgataggtagagcaggaagggctggaaaatatacagaaggaacaataattttaacagagcccaatatttataaatcaccaaaaaataagagaaaaaaacaaaactatgaagcattgttaaatcctattaatacagagggttgtcaaagcaatattctcagtattatacagtttaaatcagtagttccaactgattatcgattcaatcccataaaatttgattattggagtttgattaaagagagatttgacagtactgtagactacagaacaaaaataaacaatattttatcagaattaaaagaacagaacagtccttattttaaggattttcattctaagatagaccagattgacaaaaccctaattgcaattgaaaattatattgcttctatgtatgctactgaattggagacagatagtttagctgaaaaaacttttggatatttcttaggtaatgaagaggaacaagaaaaaataaaagaattatttgtcttggtaaaatctaaaatagttactagtttagtagaaactgaaataattgcaaaaagctcaattgggttatatcaatctgagctattaaaagaatga

SEQ ID NO: 56814 - DNA, 810 bp, Streptococcus pneumoniae; identical to SEQ ID NO: 56796

SEQ ID NO: 56815 - DNA, 1602 bp, Streptococcus pneumoniae; identical to SEQ ID NO: 56797

SEQ ID NO: 56816 - DNA, 810 bp, Streptococcus pneumoniae; identical to SEQ ID NO: 56796

SEQ ID NO: 56817 - DNA, 1602 bp, Streptococcus pneumoniae; identical to SEQ ID NO: 56797

SEQ ID NO: 56818 - DNA, 801 bp, Streptococcus pneumoniae; identical to SEQ ID NO: 56806

SEQ ID NO: 56819 - DNA, 2448 bp, Streptococcus pneumoniae; identical to SEQ ID NO: 56813

SEQ ID NO: 56820 - DNA, 810 bp, Streptococcus pneumoniae; identical to SEQ ID NO: 56808

SEQ ID NO: 56821 - DNA, 3084 bp, Streptococcus pneumoniae; identical to SEQ ID NO: 56809

SEQ ID NO: 56822 - DNA, 810 bp, Streptococcus pneumoniae; identical to SEQ ID NO: 56808

SEQ ID NO: 56823 - DNA, 3084 bp, Streptococcus pneumoniae
atgatagaatttgggaaaaagtcattatatttttcaaaattagtgcgttcaaaggcaaagatgattgaatttgaaattcctttagaaagtcatattccaatttctgaggatgctcaaaaatcgtttcttgtggcattagcaattgctgcagatactgctaggaagtattttgaagattatatcaatcataagagttttgattcacaattaaaaaatcaattacacaatgttgctgaatattttgatgcattgctggtgtcaggattaggaaattcagctgaatatcaagactatattgcaatactaggtaccacagcttattatctaggcgattataatggtagttcgagagttatggttaactacatatcggatgatatgcagttattagaagagagtataactcttgtaaaagtatttattgatgttattacagataaactctttttgaatcatacgccaatagaaggtaaatactctagtgagttaaatactctggtggaatcatatagaaattatattttatcaaaaactgagttttctatagatatttatagaggtttacaagataaagtatataggaatggaagcgatttttctgtaatcattgtaaattgtctcttagcagttgtatgtaaaaaaatagatagttcatcaacgaaattattacctgaattttcaggattagatttttctttatggcaggattatatacaatcaacaggaagtataaaggagctttggccatctcaaatcgaattagggaagcaagcaattttttcaggtaaatctggaagcgttcagatgccaacaagttcgggtaaaacagcctcaatcaatctaaccttaagatcagcattttattcaaatagaattgataatgcattgattgttgcaccttttagagcattatgtagagaaatatatcgtgatattaatgcacatttcgttgatgagaataatgtgattgttagtgaagtttttgatttaccggagattccacaggatttctcaatttttaatgatggtaaaaaaagagtttttatacttactccagaaaaattgttgtttttattgagaaatcatcaaagttttattgatgaaataggactttgtatatttgatgaagcacatctttttgatgatccaagtcgtggaacaaattttgaattactgttgtcaacggttaaacaaattttcccaaaaggaatacagaagattttaatatctgctgtaataccaaatagtgaagctataaatcggtggtttaacgaagatggagtaattgtttctaataattcgattaaaacaacagagaaaagagttgcgtttagtgatttaaacgggagtaatgagcaattatatttcatagatcctattacatttgaagaagaattttttgttccacgtactgttagtgttagtgaattagagcagcttggaaaagaacgcaaacaaaaagtttttccagaactgacaaacgcaaatgatataagtatttattatgggactaagctaattaataatggtggagtaggaattttttgtggaagaaaagacacggtcaatgttattttacgaagatttatagacttaaataatagaaattatgatctaactgatttcttaaaaaactcagataggtctgaagttgaaaaaataggaaatttaattggtcaaaatttaggatatgatagtgttgaatatacatgtagtcagctaggagttttttcacatcattcaggtatacctatggggatacgcattgctatagagtatgctttttcaaaaagtaaaataaataatgtagtatgtacttcaaccttagcacaaggtataaacttacctattaaatacttgattatctcaagtgtgtatcaagcaggagaggcaataaaagttcgtgattttcagaatttgataggtagagcaggaagggctggaaaatatacagaaggaacaataattttaacagagcccaatatttataaatcaccaaaaaataagtggaaaaaacaaaactataaagcattgttaaatcctattaatacagagggttgtcaaagtaatattctcagtattatacagtttaaatcagtagttccaactgattatcgattcgctcctataaaatttgatttttggaatttgattaaagagagatttgacagttctgtagactacagaacaaaaataaataatattttatcaaaattaaaaagaaagaacagtctttattttaaggattttaattctaagatagaccagattgataataccctaattgcaattgaaaattatattgcttctatgtatgctactgaattggagactgatagtttagctgaaaatacatttggatatttcttaggtaatgaagaggaaaaagaaaaaataaaagaattatttatcttgataaaatctaaaataattaccggttcagtagaaactgaaataattgcaaaaaactcaattggattatatcaatctgagttattaaaagaatgggttcaggaaaataaaacatctatcctttcttgtgagaaggaagaagagttattaggtgttttaaccaagaaaataatagatttttcaaataacaaagagatgagaaaactaagtatagaaaatctaaattatatttctcaactctggattaaggggatttcttattttcaaatattggaaagttgtactgaaaaatcaattagtattgagaaaagaggtaagtcaaaaccaattgatatgtctgacataatctctatttgtgataatggattagggtatgaaacatcaatggttttaaatgcgattaataatattcttgaaaaactagttggagaggaattggacgtattgactatgttaataaagaggctgaaatatgggctacctctggaaaaagaaatcaatatctatgaattaggtttttcagatagaattgtggtccaagttattggtcaagagattaattctgtaagtaagaatcaaattagaaatgaaatcaaacagaaatcagctagactagaagataaattgagtgattttccaagttattatacacagataattaatgaaatgtaa

SEQ ID NO: 56824 - DNA, 810 bp, Streptococcus pneumoniae; identical to SEQ ID NO: 56796

SEQ ID NO: 56825 - DNA, 2973 bp, Streptococcus pneumoniae; identical to SEQ ID NO: 56791

SEQ ID NO: 56826 - DNA, 810 bp, Streptococcus pneumoniae; identical to SEQ ID NO: 56796

SEQ ID NO: 56827 - DNA, 2973 bp, Streptococcus pneumoniae; identical to SEQ ID NO: 56791

SEQ ID NO: 56828 - DNA, 810 bp, Streptococcus pneumoniae; identical to SEQ ID NO: 56796

SEQ ID NO: 56829 - DNA, 1602 bp, Streptococcus pneumoniae; identical to SEQ ID NO: 56797

SEQ ID NO: 56830 - DNA, 810 bp, Streptococcus pneumoniae; identical to SEQ ID NO: 56808

SEQ ID NO: 56831 - DNA, 3084 bp, Streptococcus pneumoniae; identical to SEQ ID NO: 56823

SEQ ID NO: 56832 - DNA, 810 bp, Streptococcus pneumoniae; identical to SEQ ID NO: 56808

SEQ ID NO: 56833 - DNA, 3084 bp, Streptococcus pneumoniae; identical to SEQ ID NO: 56809

SEQ ID NO: 56834 - DNA, 810 bp, Streptococcus pneumoniae; identical to SEQ ID NO: 56796

SEQ ID NO: 56835 - DNA, 1602 bp, Streptococcus pneumoniae; identical to SEQ ID NO: 56797

SEQ ID NO: 56836 - DNA, 810 bp, Streptococcus pneumoniae; identical to SEQ ID NO: 56808

SEQ ID NO: 56837 - DNA, 3084 bp, Streptococcus pneumoniae; identical to SEQ ID NO: 56809

SEQ ID NO: 56838 - DNA, 810 bp, Streptococcus pneumoniae; identical to SEQ ID NO: 56790

SEQ ID NO: 56839 - DNA, 2973 bp, Streptococcus pneumoniae; identical to SEQ ID NO: 56791

SEQ ID NO: 56840 - DNA, 810 bp, Streptococcus pneumoniae; identical to SEQ ID NO: 56778

SEQ ID NO: 56841 - DNA, 3084 bp, Streptococcus pneumoniae; identical to SEQ ID NO: 56779

SEQ ID NO: 56842 - DNA, 810 bp, Streptococcus pneumoniae; identical to SEQ ID NO: 56778

SEQ ID NO: 56843 - DNA, 3084 bp, Streptococcus pneumoniae; identical to SEQ ID NO: 56779

SEQ ID NO: 56844 - DNA, 810 bp, Streptococcus pneumoniae; identical to SEQ ID NO: 56808

SEQ ID NO: 56845 - DNA, 3084 bp, Streptococcus pneumoniae
atgatagaatttgggaaaaagtcattatatttttcaaaattagtgcgttcaaaggcaaagatgattgaatttgaaattcctttagaaagtcatattccaatttctgaggatgctcaaaaatcgtttcttgtggcattagcaattgctgcagatactgctaggaagtattttgaagattatatcaatcataagagttttgattcacaattaaaaaatcaattacacaatgttgctgaatattttgatgcattgctggtgtcaggattaggaaattcagctgaatatcaagactatattgcaatactaggtaccacagcttattatctaggcgattataatggtagttcgagagttatggttaactacatatcggatgatatgcagttattagaagagagtataactcttgtaaaagtatttattgatgttattacagataaactctttttgaatcatacgccaatagaaggtaaatactctagtgagttaaatactctggtggaatcatatagaaattatattttatcaaaaactgagttttctatagatatttatagaggtttacaagataaagtatataggaatggaagcgatttttctgtaatcattgtaaattgtctcttagcagttgtatgtaaaaaaatagatagttcatcaacgaaattattacctgaattttcaggattagatttttctttatggcaggattatatacaatcaacaggaagtataaaggagctttggccatctcaaatcgaattagggaagcaagcaattttttcaggtaaatctggaagcgttcagatgccaacaagttcgggtaaaacagcctcaatcaatctaaccttaagatcagcattttattcaaatagaattgataatgcattgattgttgcaccttttagagtattatgtagagaaatatatcgtgatattaatgcacatttcgttgatgagaataatgtgattgttagtgaagtttttgatttaccggagattccacaggatttctcaatttttaatgatggtaaaaaaagagtttttatacttactccagaaaaattgttgtttttattgagaaatcatcaaagttttattgatgaaataggactttgtatatttgatgaagcacatctttttgatgatccaagtcgtggaacaaattttgaattactgttgtcaacggttaaacaaattttcccaaaaggaatacagaagattttaatatctgctgtaataccaaatagtgaagctataaatcggtggtttaacgaagatggagtaattgtttctaataattcgattaaaacaacagagaaaagagttgcgtttagtgatttaaacgggagtaatgagcaattatatttcatagatcctattacatttgaagaagaattttttgttccacgtactgttagtgttagtgaattagagcagcttggaaaagaacgcaaacaaaaagtttttccagaactgacaaacgcaaatgatataagtatttattatgggactaagctaattaataatggtggagtaggaattttttgtggaagaaaagacacggtcaatgttattttacgaagatttatagacttaaataatagaaattatgatctaactgatttcttaaaaaactcagataggtctgaagttgaaaaaataggaaatttaattggtcaaaatttaggatatgatagtgttgaatatacatgtagtcagctaggagttttttcacatcattcaggtatacctatggggatacgcattgctatagagtatgctttttcaaaaagtaaaataaataatgtagtatgtacttcaaccttagcacaaggtataaacttacctattaaatacttgattatctcaagtgtgtatcaagcaggagaggcaataaaagttcgtgattttcagaatttgataggtagagcaggaagggctggaaaatatacagaaggaacaataattttaacagagcccaatatttataaatcaccaaaaaataagtggaaaaaacaaaactataaagcattgttaaatcctattaatacagagggttgtcaaagtaatattctcagtattatacagtttaaatcagtagttccaactgattatcgattcgctcctataaaatttgatttttggaatttgattaaagagagatttgacagttctgtagactacagaacaaaaataaataatattttatcaaaattaaaaagaaagaacagtctttattttaaggattttaattctaagatagaccagattgataataccctaattgcaattgaaaattatattgcttctatgtatgctactgaattggagactgatagtttagctgaaaatacatttggatatttcttaggtaatgaagaggaaaaagaaaaaataaaagaattatttatcttgataaaatctaaaataattaccagttcagtagaaactgaaataattgcaaaaaactcaattggattatatcaatctgagttattaaaagaatgggttcaggaaaataaaacatctatcctttcttgtgagaaggaagaagagttattaggtgttttaaccaagaaaataatagatttttcaaataacaaagagatgagaaaactaagtatagaaaatctaaattatatttctcaactctggattaaggggatttcttattttcaaatattggaaagttgtactgaaaaatcaattagtattgagaaaagaggtaagtcaaaaccaattgatatgtctgacataatctctatttgtgataatggattagggtatgaaacatcaatggttttaaatgcgattaataatattcttgaaaaactagttggagaggaattggacgtattgactatgttaataaagaggctgaaatatgggctacctctggaaaaagaaatcaatatctatgaattaggtttttcagatagaattgtggtccaagttattggtcaagagattaattctgtaagtaagaatcaaattagaaatgaaatcaaacagaaatcagctagactagaagataaattgagtgattttccaagttattatacacagataattaatgaaatgtaa

SEQ ID NO: 56846 - DNA, 810 bp, Streptococcus pneumoniae; identical to SEQ ID NO: 56796

SEQ ID NO: 56847 - DNA, 1602 bp, Streptococcus pneumoniae; identical to SEQ ID NO: 56797

SEQ ID NO: 56848 - DNA, 810 bp, Streptococcus pneumoniae; identical to SEQ ID NO: 56796

SEQ ID NO: 56849 - DNA, 1602 bp, Streptococcus pneumoniae; identical to SEQ ID NO: 56797

SEQ ID NO: 56850 - DNA, 810 bp, Streptococcus pneumoniae; identical to SEQ ID NO: 56808

SEQ ID NO: 56851 - DNA, 3084 bp, Streptococcus pneumoniae; identical to SEQ ID NO: 56823

SEQ ID NO: 56852 - DNA, 810 bp, Streptococcus pneumoniae; identical to SEQ ID NO: 56796

SEQ ID NO: 56853 - DNA, 2973 bp, Streptococcus pneumoniae; identical to SEQ ID NO: 56791

SEQ ID NO: 56854 - DNA, 810 bp, Streptococcus pneumoniae; identical to SEQ ID NO: 56808

SEQ ID NO: 56855 - DNA, 3084 bp, Streptococcus pneumoniae; identical to SEQ ID NO: 56809

SEQ ID NO: 56856 - DNA, 810 bp, Streptococcus pneumoniae; identical to SEQ ID NO: 56808

SEQ ID NO: 56857 - DNA, 3084 bp, Streptococcus pneumoniae; identical to SEQ ID NO: 56809

SEQ ID NO: 56858 - DNA, 810 bp, Streptococcus pneumoniae; identical to SEQ ID NO: 56808

SEQ ID NO: 56859 - DNA, 3084 bp, Streptococcus pneumoniae; identical to SEQ ID NO: 56809

SEQ ID NO: 56860 - DNA, 810 bp, Streptococcus pneumoniae; identical to SEQ ID NO: 56790

SEQ ID NO: 56861 - DNA, 2355 bp, Streptococcus pneumoniae
atgatagaatttgggaaaaagtcattatatttttcaaaattagtgcgttcaaaggcaaagatgattgaatttgaaattcctttagaaagtcatattccaatttctgaggatgctcaaaaatcgtttcttggggcattagcaattgccgcagatactgctaggaagtattttgaagattatatcaatcataagagttttgattcacaattaaaaaatcaattacacaatgttgctgaatattttgatgcattgctggtgtcaggattaggaaattcagctgaatatcaagactatattgcaatactaggtaccacagcttattatctaggcgattataatggtagttcgagagttatggttaactacatatcggatgatatgcagttattagaagagagtataactcttgtaaaagtatttattaatgttattacagataaactctttttgaatcatacgccaatagaaggtaaatactctagtgagttaaatactctggtggaatcatatagaaattatattttatcaaaaactgagttttctatagatatttatagagatttacaagataaagtatataggaatggaagcgatttttctgtaatcattgtaaattgtctcttagcagttgtatgtaaaaaaatagatagttcatcaacgaaattattacctgaattttcaggattagatttttctttatggcaggattatatacaatcaacaggaagtataaaggagctttggccatctcaaatcgaattagggaagcaagcaattttttcaggtaaatctggaatcgttcagatgccaacaagttcgggtaaaacagcctcaatcaatctaaccttaagatcagcattttattcaaatagaattgataatgcattgattgttgcaccttttagagcattatgtagagaaatatatcgtgatattaatgcacatttcgttgatgagaataatgtgattgttagtgaagtttttgatttaccggagattccacaggatttctcaatttttaatgatggtaaaaaaagagtttttatacttactccaggaaaattgttgtttttattgagaaatcatcaaagttttattgatgaaataggactttgtatatttgatgaagcacatctttttgatgatccaagtcgtggaacaaattttgaattactgttgtcaacggttaaacaaattttcccaaaaggaatacagaagattttaatatctgctgtaataccaaatagtgaagctataaatcggtggtttaacgaagatggagtaattgtttctaataattcgattaaaacaacagagaaaagagttgcgtttagtgatttaaacgggagtaatgagcaattatatttcatagatcctattacatttgaagaagaattttttgttccacgtactgttagtgttagtgaattagagcagcttggaaaagaacgcaaacaaaaagtttttccagaactgacaaacgaaaatgatataagtatttattatgggattaatctaattaataatggtggagtaggaattttttgtggaagaaaagacacggtcaatgttattttacgaagatttatagacttaaataatagaaattatgatctaactgatttcttaaaaaactcagataggtctgaagttgaaaaaataggaaatttaattggtcaaaatttaggatatgatagtgttgaatatacatgtagtcagctaggagttttttcacatcattcaggtatacctatggggatacgcattgctatagagtatgctttttcaaaaagtaaaataaataatgtagtatgtacttcaaccttagcacaaggtataaacttacctattaaatacttgattatctcaagtgtgtatcaagcaggagatgcaataaaagttcgtgattttcagaatttgataggtagagcaggaagggctggaaaatatacagaaggaacaataattttaacagagcccaatatttataaatcaccaaaaaataagtggaaaaaacaaaactataaagcattgttaaatcctattaatacagagggttgtcaaagtaatattctcagtattatacagtttaaatcagtagttccaactgattatcgattcgctcctataaaatttgatttttggaatttgattaaagagagatttgacagttctgtagactacagaacaaaaataaataatattttatcaaaattaaaaagaaagaacagtctttattttaaggattttaattctaagatagaccagattgataataccctaattgcaattgaaaattatattagacttgttcggaatctagttcacttcataattgatgatggcacaaattaa

SEQ ID NO: 56862 - DNA, 810 bp, Streptococcus pneumoniae; identical to SEQ ID NO: 56796

SEQ ID NO: 56863 - DNA, 2973 bp, Streptococcus pneumoniae; identical to SEQ ID NO: 56791

SEQ ID NO: 56864 - DNA, 810 bp, Streptococcus pneumoniae; identical to SEQ ID NO: 56790

SEQ ID NO: 56865 - DNA, 2973 bp, Streptococcus pneumoniae; identical to SEQ ID NO: 56791

SEQ ID NO: 56866 - DNA, 810 bp, Streptococcus pneumoniae; identical to SEQ ID NO: 56778

SEQ ID NO: 56867 - DNA, 3084 bp, Streptococcus pneumoniae; identical to SEQ ID NO: 56779

SEQ ID NO: 56868 - DNA, 810 bp, Streptococcus pneumoniae; identical to SEQ ID NO: 56808

SEQ ID NO: 56869 - DNA, 3084 bp, Streptococcus pneumoniae; identical to SEQ ID NO: 56823

SEQ ID NO: 56870 - DNA, 810 bp, Streptococcus pneumoniae; identical to SEQ ID NO: 56778

SEQ ID NO: 56871 - DNA, 3084 bp, Streptococcus pneumoniae; identical to SEQ ID NO: 56779

SEQ ID NO: 56872 - DNA, 810 bp, Streptococcus pneumoniae; identical to SEQ ID NO: 56790

SEQ ID NO: 56873 - DNA, 2973 bp, Streptococcus pneumoniae; identical to SEQ ID NO: 56791

SEQ ID NO: 56874 - DNA, 810 bp, Streptococcus pneumoniae; identical to SEQ ID NO: 56808

SEQ ID NO: 56875 - DNA, 3084 bp, Streptococcus pneumoniae; identical to SEQ ID NO: 56823

SEQ ID NO: 56876 - DNA, 810 bp, Streptococcus pneumoniae; identical to SEQ ID NO: 56778

SEQ ID NO: 56877 - DNA, 3084 bp, Streptococcus pneumoniae; identical to SEQ ID NO: 56779

SEQ ID NO: 56878 - DNA, 810 bp, Streptococcus pneumoniae; identical to SEQ ID NO: 56778

SEQ ID NO: 56879 - DNA, 3084 bp, Streptococcus pneumoniae; identical to SEQ ID NO: 56779

SEQ ID NO: 56880 - DNA, 810 bp, Streptococcus pneumoniae; identical to SEQ ID NO: 56778

SEQ ID NO: 56881 - DNA, 3084 bp, Streptococcus pneumoniae; identical to SEQ ID NO: 56779

SEQ ID NO: 56882 - DNA, 810 bp, Streptococcus pneumoniae; identical to SEQ ID NO: 56808

SEQ ID NO: 56883 - DNA, 3084 bp, Streptococcus pneumoniae; identical to SEQ ID NO: 56809

SEQ ID NO: 56884 - DNA, 801 bp, Streptococcus pneumoniae; identical to SEQ ID NO: 56806

SEQ ID NO: 56885 - DNA, 2508 bp, Streptococcus pneumoniae; identical to SEQ ID NO: 56807

SEQ ID NO: 56886 - DNA, 810 bp, Streptococcus pneumoniae; identical to SEQ ID NO: 56796

SEQ ID NO: 56887 - DNA, 1602 bp, Streptococcus pneumoniae; identical to SEQ ID NO: 56797

SEQ ID NO: 56888 - DNA, 810 bp, Streptococcus pneumoniae; identical to SEQ ID NO: 56808

SEQ ID NO: 56889 - DNA, 3084 bp, Streptococcus pneumoniae; identical to SEQ ID NO: 56809

SEQ ID NO: 56890 - DNA, 810 bp, Streptococcus pneumoniae; identical to SEQ ID NO: 56808

SEQ ID NO: 56891 - DNA, 3084 bp, Streptococcus pneumoniae; identical to SEQ ID NO: 56809

SEQ ID NO: 56892 - DNA, 810 bp, Streptococcus pneumoniae; identical to SEQ ID NO: 56778

SEQ ID NO: 56893 - DNA, 3084 bp, Streptococcus pneumoniae; identical to SEQ ID NO: 56779

SEQ ID NO: 56894 - DNA, 810 bp, Streptococcus pneumoniae; identical to SEQ ID NO: 56808

SEQ ID NO: 56895 - DNA, 3084 bp, Streptococcus pneumoniae; identical to SEQ ID NO: 56823

SEQ ID NO: 56896 - DNA, 810 bp, Streptococcus pneumoniae; identical to SEQ ID NO: 56796

SEQ ID NO: 56897 - DNA, 1602 bp, Streptococcus pneumoniae; identical to SEQ ID NO: 56797

SEQ ID NO: 56898 - DNA, 810 bp, Streptococcus pneumoniae; identical to SEQ ID NO: 56790

SEQ ID NO: 56899 - DNA, 2973 bp, Streptococcus pneumoniae; identical to SEQ ID NO: 56791

SEQ ID NO: 56900 - DNA, 810 bp, Streptococcus pneumoniae; identical to SEQ ID NO: 56796

SEQ ID NO: 56901 - DNA, 1602 bp, Streptococcus pneumoniae; identical to SEQ ID NO: 56797

SEQ ID NO: 56902 - DNA, 810 bp, Streptococcus pneumoniae; identical to SEQ ID NO: 56796

SEQ ID NO: 56903 - DNA, 1602 bp, Streptococcus pneumoniae; identical to SEQ ID NO: 56797

SEQ ID NO: 56904 - DNA, 810 bp, Streptococcus pneumoniae; identical to SEQ ID NO: 56796

SEQ ID NO: 56905 - DNA, 1602 bp, Streptococcus pneumoniae; identical to SEQ ID NO: 56797

SEQ ID NO: 56906 - DNA, 810 bp, Streptococcus pneumoniae; identical to SEQ ID NO: 56778

SEQ ID NO: 56907 - DNA, 3084 bp, Streptococcus pneumoniae; identical to SEQ ID NO: 56779

SEQ ID NO: 56908 - DNA, 810 bp, Streptococcus pneumoniae; identical to SEQ ID NO: 56808

SEQ ID NO: 56909 - DNA, 3084 bp, Streptococcus pneumoniae
atgatagaatttgggaaaaagtcattatatttttcaaaattagtgcgttcaaaggcaaagatgattgaatttgaaattcctttagaaagtcatattccaatttctgaggatgctcaaaaatcgtttcttgtggcattagcaattgctgcagatactgctaggaagtattttgaagattatatcaatcataagagttttgattcacaattaaaaaatcaattacacaatgttgctgaatattttgatgcattgctggtgtcaggattaggaaattcagctgaatatcaagactatattgcaatactaggtaccacagcttattatctaggcgattataatggtagttcgagagttatggttaactacatatcggatgatatgcagttattagaagagagtataactcttgtaaaagtatttattgatgttattacagataaactctttttgaatcatacgccaatagaaggtaaatactctagtgagttaaatactctggtggaatcatatagaaattatattttatcaaaaactgagttttctatagatatttatagaggtttacaagataaagtatataggaatggaagcgatttttctgtaatcattgtaaattgtctcttagcagttgtatgtaaaaaaatagatagttcatcaacgaaattattacctgaattttcaggattagatttttctttatggcaggattatatacaatcaacaggaagtataaaggagctttggccatctcaaatcgaattagggaagcaagcaattttttcaggtaaatctggaagcgttcagatgccaacaagttcgggtaaaacagcctcaatcaatctaaccttaagatcagcattttattcaaatagaattgataatgcattgattgttgcaccttttagagcattatgtagagaaatatatcgtgatattaatgcacatttcgttgatgagaataatgtgattgttagtgaagtttttgatttaccagagattccacaggatttctcaatttttaatgatggtaaaaaaagagtttttatacttactccagaaaaattgttgtttttattgagaaatcatcaaagttttattgatgaaataggactttgtatatttgatgaagcacatctttttgatgatccaagtcgtggaacaaattttgaattactgttgtcaacggttaaacaaattttcccaaaaggaatacagaagattttaatatctgctgtaataccaaatagtgaagctataaatcggtggtttaacgaagatggagtaattgtttctaataattcgattaaaacaacagagaaaagagttgcgtttagtgatttaaacgggagtaatgagcaattatatttcatagatcctattacatttgaagaagaattttttgttccacgtactgttagtgttagtgaattagagcagcttggaaaagaacgcaaacaaaaagtttttccagaactgacaaacgcaaatgatataagtatttattatgggactaagctaattaataatggtggagtaggaattttttgtggaagaaaagacacggtcaatgttattttacgaagatttatagacttaaataatagaaattatgatctaactgatttcttaaaaaactcagataggtctgaagttgaaaaaataggaaatttaattggtcaaaatttaggatatgatagtgttgaatatacatgtagtcagctaggagttttttcacatcattcaggtatacctatggggatacgcattgctatagagtatgctttttcaaaaagtaaaataaataatgtagtatgtacttcaaccttagcacaaggtataaacttacctattaaatacttgattatctcaagtgtgtatcaagcaggagaggcaataaaagttcgtgattttcagaatttgataggtagagcaggaagggctggaaaatatacagaaggaacaataattttaacagagcccaatatttataaatcaccaaaaaataagtggaaaaaacaaaactataaagcattgttaaatcctattaatacagagggttgtcaaagtaatattctcagtattatacagtttaaatcagtagttccaactgattatcgattcgctcctataaaatttgatttttggaatttgattaaagagagatttgacagttctgtagactacagaacaaaaataaataatattttatcaaaattaaaaagaaagaacagtctttattttaaggattttaattctaagatagaccagattgataataccctaattgcaattgaaaattatattgcttctatgtatgctactgaattggagactgatagtttagctgaaaatacatttggatatttcttaggtaatgaagaggaaaaagaaaaaataaaagaattatttatcttgataaaatctaaaataattaccagttcagtagaaactgaaataattgcaaaaaactcaattggattatatcaatctgagttattaaaagaatgggttcaggaaaataaaacatctatcctttcttgtgagaaggaagaagagttattaggtgttttaaccaagaaaataatagatttttcaaataacaaagagatgagaaaactaagtatagaaaatctaaattatatttctcaactctggattaaggggatttcttattttcaaatattggaaagttgtactgaaaaatcaattagtattgagaaaagaggtaagtcaaaaccaattgatatgtctgacataatctctatttgtgataatggattagggtatgaaacatcaatggttttaaatgcgattaataatattcttgaaaaactagttggagaggaattggacgtattgactatgttaataaagaggctgaaatatgggctacctctggaaaaagaaatcaatatctatgaattaggtttttcagatagaattgtggtccaagttattggtcaagagattaattctgtaagtaagaatcaaattagaaatgaaatcaaacagaaatcagctagactagaagataaattgagtgattttccaagttattatacacagataattaatgaaatgtaa

SEQ ID NO: 56910 - DNA, 810 bp, Streptococcus pneumoniae; identical to SEQ ID NO: 56796

SEQ ID NO: 56911 - DNA, 1602 bp, Streptococcus pneumoniae; identical to SEQ ID NO: 56797

SEQ ID NO: 56912 - DNA, 810 bp, Streptococcus pneumoniae; identical to SEQ ID NO: 56790

SEQ ID NO: 56913 - DNA, 2973 bp, Streptococcus pneumoniae; identical to SEQ ID NO: 56791

SEQ ID NO: 56914 - DNA, 810 bp, Streptococcus pneumoniae; identical to SEQ ID NO: 56778

SEQ ID NO: 56915 - DNA, 3084 bp, Streptococcus pneumoniae; identical to SEQ ID NO: 56779

SEQ ID NO: 56916 - DNA, 810 bp, Streptococcus pneumoniae; identical to SEQ ID NO: 56808

SEQ ID NO: 56917 - DNA, 3084 bp, Streptococcus pneumoniae; identical to SEQ ID NO: 56809

SEQ ID NO: 56918 - DNA, 810 bp, Streptococcus pneumoniae; identical to SEQ ID NO: 56778

SEQ ID NO: 56919 - DNA, 3084 bp, Streptococcus pneumoniae
atgatagaatttgggagaaggtcattatatttttcaaaattagtgcgttcaaaggcaaagatgattgaatttgatattcctttagaaagtcatttaccaatttcagaggatgctcaaaaatcgtttcttggggcactagcaattgttgcagatactgctaggaagtattttgaagtttatatcaatcgtaagagttttaatttacaattaaaaaatcaattacacaatgctgctgaatattttgatgcattgctggtgtcaggattaggaaattcagctgaatatcaagactatattgcaatattgggtaccacagcttattatctatgcgattataatggtagttcgagagttatgattaactatatatcggatgatatccagttattagaagactgtatgactcttataaaagtatttattgacgttgtaacggatgaactctttttgaatcatacgccaatagaaggtaaatactctagtgagttaaatactctagttgaatcatatagaaattatattttatcaaaaactgagttttctatagatatttatagagatttacaagataaagtatataggaatggaagcgatttttctgtaattattgtaaattgtctcttagcagttgtatgtaaaaaaataaatagttcatcaacgaaattattacctgaattttcaggattagatttttctttatggcaggattatatacaatcaacaggaagcacaaaggagctttggccatctcaaatcgaattagggaagcaaggaattttttcaggtaaatctggaatcgttcagatgccaacaagttcgggtaaaacagcctcaatcaatctaactttaagatcagcattttattcaaatagaattgataatgcattgattgttgcaccttttagagcattatgtagagaaatatatcgagatattaatgcacatttcgttgatgagaataatgtgattgttagtgaagtttttgatttaccggagattccacaggatttctcaatttttaatgatggtaaaaaaagagtttttatacttactccagagaaattgttgtttttattgagaaatcatcaaagttttattgatgaaataggactttgtatatttgatgaagcacatctttttgatgatccaagtcgtggaaccaattttgaattactgttgtcaacggttaaacaaattttcccaaaaggaatacagaagattttaatatctgctgtaataccaaatagtgaagctataaatcggtggtttaacgaagatggagtaattgtttctaataattcgattaaaacaacagagaaaagagttgcgtttagtgatttaaacgggagtaatgagcaattatatttcatagatcctattacatttgaagaagaattttttgttccacgtactgttagtgttagtgaattagagcagcttggaaaagaacgcaaacaaaaagtttttccagaactgacaaacgcaaatgatataagtatttattatgggactaagctaattaataatggtggagtaggaattttttgtggaagaaaagacacggtcaatgttattttacgaagatttatagacttaaataatagaaattatgatctaactgatttcttaaaaaactcagataggtctgaagttgaaaaaataggaaatttaattggtcaaaatttaggatatgatagtgttgaatatacatgtagtcagctaggagttttttcacatcattcaggtatacctatggggatacgcattgctatagagtatgctttttcaaaaagtaaaataaataatgtagtatgtacttcaaccttagcacaaggtataaacttacctattaaatacttgattatctcaagtgtgtatcaagcaggagatgcaataaaagttcgtgattttcagaatttgataggtagagcaggaagggctggaaaatatacagaaggaacaataattttaacagagcccaatatttataaatcaccaaaaaataagtggaaaaaacaaaactataaagcattgttaaatcctattaatacagagggttgtcaaagtaatattctcagtattatacagtttaaatcagtagttccaactgattatcgattcgctcctataaaatttgatttttggaatttgattaaagagagatttgacagttctgtagactacagaacaaaaataaataatattttatcaaaattaaaaagaaagaacagtctttattttaaggattttaattctaagatagaccagattgataataccctaattgcaattgaaaattatattgcttctatgtatgctactgaattggagactgatagtttagctgaaaatacatttggatatttcttaggtaatgaagaggaaaaagaaaaaataaaagaattatttatcttgataaaatctaaaataattaccagttcagtagaaactgaaataattgcaaaaaactcaattggattatatcaatctgagttattaaaagaatgggttcaggaaaataaaacatctatcctttcttgtgagaaggaagaagagttattaggtgttttaaccaagaaaataatagatttttcaaataacaaagagatgagaaaactaagtatagaaaatctaaattatatttctcaactctggattaaggggatttcttattttcaaatattggaaagttgtactgaaaaatcaattagtattgagaaaagaggtaagtcaaaaccaattgatatgtctgacataatctctatttgtgataatggattagggtatgaaacatcaatggttttaaatgcgattaataatattcttgaaaaactagttggagaggaattggacgtattgactatgttaataaagaggctgaaatatgggctacctctggaaaaagaaatcaatatctatgaattaggtttttcagatagaattgtggtccaagttattggtcaagagattaattctgtaagtaagaatcaaattagaaatgaaatcaaacagaaatcagctagactagaagataaattgagtgattttccaagttattatacacagataattaatgaaatgtaa

SEQ ID NO: 56920 - DNA, 810 bp, Streptococcus pneumoniae; identical to SEQ ID NO: 56796

SEQ ID NO: 56921 - DNA, 1602 bp, Streptococcus pneumoniae; identical to SEQ ID NO: 56797

SEQ ID NO: 56922 - DNA, 810 bp, Streptococcus pneumoniae; identical to SEQ ID NO: 56790

SEQ ID NO: 56923 - DNA, 2973 bp, Streptococcus pneumoniae; identical to SEQ ID NO: 56791

SEQ ID NO: 56924 - DNA, 810 bp, Streptococcus pneumoniae; identical to SEQ ID NO: 56796

SEQ ID NO: 56925 - DNA, 1602 bp, Streptococcus pneumoniae; identical to SEQ ID NO: 56797

SEQ ID NO: 56926 - DNA, 810 bp, Streptococcus pneumoniae; identical to SEQ ID NO: 56790

SEQ ID NO: 56927 - DNA, 2973 bp, Streptococcus pneumoniae; identical to SEQ ID NO: 56791

SEQ ID NO: 56928 - DNA, 810 bp, Streptococcus pneumoniae; identical to SEQ ID NO: 56796

SEQ ID NO: 56929 - DNA, 1602 bp, Streptococcus pneumoniae; identical to SEQ ID NO: 56797

SEQ ID NO: 56930 - DNA, 810 bp, Streptococcus pneumoniae; identical to SEQ ID NO: 56808

SEQ ID NO: 56931 - DNA, 3084 bp, Streptococcus pneumoniae; identical to SEQ ID NO: 56809

SEQ ID NO: 56932 - DNA, 810 bp, Streptococcus pneumoniae; identical to SEQ ID NO: 56796

SEQ ID NO: 56933 - DNA, 1602 bp, Streptococcus pneumoniae; identical to SEQ ID NO: 56797

SEQ ID NO: 56934 - DNA, 810 bp, Streptococcus pneumoniae; identical to SEQ ID NO: 56808

SEQ ID NO: 56935 - DNA, 3084 bp, Streptococcus pneumoniae; identical to SEQ ID NO: 56809

SEQ ID NO: 56936 - DNA, 810 bp, Streptococcus pneumoniae; identical to SEQ ID NO: 56790

SEQ ID NO: 56937 - DNA, 2973 bp, Streptococcus pneumoniae; identical to SEQ ID NO: 56791

SEQ ID NO: 56938 - DNA, 810 bp, Streptococcus pneumoniae; identical to SEQ ID NO: 56790

SEQ ID NO: 56939 - DNA, 2973 bp, Streptococcus pneumoniae
atgatagaatttgggaaaaagtcattatatttttcaaaattagtgcgttcaaaggcaaagatgattgaatttgaaattcctttagaaagtcatattccaatttctgaggatgctcaaaaatcgtttcttggggcattagcaattgccgcagatactgctaggaagtattttgaagattatatcaatcataagagttttgattcacaattaaaaaatcaattacacaatgttgctgaatattttgatgcattgctggtgtcaggattaggaaattcagctgaatatcaagactatattgcaatactaggtaccacagcttattatctaggcgattataatggtagttcgagagttatggttaactacatatcggatgatatgcagttattagaagagagtataactcttgtaaaagtatttattaatgttattacagataaactctttttgaatcatacgccaatagaaggtaaatactctagtgagttaaatactctggtggaatcatatagaaattatattttatcaaaaactgagttttctatagatatttatagagatttacaagataaagtatataggaatggaagcgatttttctgtaatcattgtaaattgtctcttagcagttgtatgtaaaaaaatagatagttcatcaacgaaattattacctgaattttcaggattagatttttctttatggcaggattatatacaatcaacaggaagtataaaggagctttggccatctcaaatcgaattagggaagcaagcaattttttcaggtaaatctggaatcgttcagatgccaacaagttcgggtaaaacagcctcaatcaatctaaccttaagatcagcattttattcaaatagaattgataatgcattgattgttgcaccttttagagcattatgtagagaaatatatcgtgatattaatgcacatttcgttgatgagaataatgtgattgttagtgaagtttttgatttaccggagattccacaggatttctcaatttttaatgatggtaaaaaaagagtttttatacttactccaggaaaattgttgtttttattgagaaatcatcaaagttttattgatgaaataggactttgtatatttgatgaagcacatctttttgatgatccaagtcgtggaacaaattttgaattactgttgtcaacggttaaacaaattttcccaaaaggaatacagaagattttaatatctgctgtaataccaaatagtgaagctataaatcggtggtttaacgaagatggagtaattgtttctaataattcgattaaaacaacagagaaaagagttgcgtttagtgatttaaacgggagtaatgagcaattatatttcatagatcctattacatttgaagaagaattttttgttccacgtactgttagtgttagtgaattagagcagcttggaaaagaacgcaaacaaaaagtttttccagaactgacaaacgaaaatgatataagtatttattatgggattaatctaattaataatggtggagtaggaattttttgtggaagaaaagacacggtcaatgttattttacgaagatttatagacttaaataatagaaattatgatctaactgatttcttaaaaaactcagataggtctgaagttgaaaaaataggaaatttaattggtcaaaatttaggatatgatagtgttgaatatacatgtagtcagctaggagttttttcacatcattcaggtatacctatggggatacgcattgctatagagtatgctttttcaaaaagtaaaataaataatgtagtatgtacttcaaccttagcacaaggtataaacttacctattaaatacttgattatctcaagtgtgtatcaagcaggagatgcaataaaagttcgtgattttcagaatttgataggtagagcaggaagggctggaaaatatacagaaggaacaataattttaacagagcccaatatttataaatcaccaaaaaataagtggaaaaaacaaaactataaagcattgttaaatcctattaatacagagggttgtcaaagtaatattctcagtattatacagtttaaatcagtagttccaactgattatcgattcgctcctataaaatttgatttttggaatttgattaaagagagatttgacagttctgtagactacagaacaaaaataaataatattttatcaaaattaaaaagaaagaacagtctttattttaaggattttaattctaagatagaccagattgataataccctaattgcaattgaaaattatattgcttctatgtatgctactgaattggagactgatagtttagctgaaaatacatttggatatttcttaggtaataatgaagaggaaaaagaaaaaataaaagaattatttatcttgataaaatctaaaataattaccagttcagtagaaactgaaataattgcaaaaaactcaattggattatatcaatctgagttattaaaagaatgggttcaggaaaataaaacatctatcatttcttgtgagaaggaagaagagttattaggtgttttaaccaagaaaataatagatttttcaaataacaaagagatgagaaaactaagtatagaaaatctaaattatatttctcaactctggattaaggggatttcttattttcaaatattggaaagttgtactgaaaaatcaattagtattgagaaaagaggtaagtcaaaaccaattgatatgtctgacataatctctatttgtgataatggattagggtatgaaacatcaatggttttaaatgcgattaataatattcttgaaaaactagttggagaggaattggacgtattgactatgttaataaagaggctgaaatatgggctacctctggaaaaagaaatcaatatctatgaattaggtttttcagatagaattgtggtccaagttattatacacagataa

SEQ ID NO: 56940 - DNA, 810 bp, Streptococcus pneumoniae; identical to SEQ ID NO: 56808

SEQ ID NO: 56941 - DNA, 3084 bp, Streptococcus pneumoniae; identical to SEQ ID NO: 56823

SEQ ID NO: 56942 - DNA, 810 bp, Streptococcus pneumoniae; identical to SEQ ID NO: 56808

SEQ ID NO: 56943 - DNA, 3084 bp, Streptococcus pneumoniae; identical to SEQ ID NO: 56809

SEQ ID NO: 56944 - DNA, 810 bp, Streptococcus pneumoniae; identical to SEQ ID NO: 56796

SEQ ID NO: 56945 - DNA, 1602 bp, Streptococcus pneumoniae
atgatagaatttgggaaaaagtcattatatttttcaaaattagtgcgttcaaaggcaaagatgattgaatttgaaattcctttagaaagtcatattccaatttctgaggatgctcaaaaatcgtttcttggggcattagcaattgctgcagatactgctaggaagtattttgaagattatatcaatcataagagttttgattcacaattaaaaaatcaattacacaatgttgctgaatattttgatgcattgctggtgtcaggattaggaaattcagctgaatatcaagactatattgcaatactaggtaccacagcttattatctaggcgattataatggtagttcgagagttatggttaactacatatcggatgatatgcagttattagaagagagtataactcttgtaaaagtatttattaatgttattacagataaactctttttgaatcatacgccaatagaaggtaaatactctagtgagttaaatactctggtggaatcatatagaaattatattttatcaaaaactgagttttctatagatatttatagagatttacaagataaagtatataggaatggaagcgatttttctgtaatcattgtaaattgtctcttagcagttgtatgtaaaaaaatagatagttcatcaacgaaattattacctgaattttcaggattagatttttctttatggcaggattatatacaatcaacaggaaggataaaggagctttggccatctcaaatcgaattagggaagcaagcaattttttcaggtaaatctggaatcgttcagatgccaacaagttcgggtaaaacagcctcaatcaatctaaccttaagatcagcattttattcaaatagaattgataatgcattgattgttgcaccttttagagcattatgtagagaaatatatcgtgatattaatgcacatttcgttgatgagaataatgtgattgttagtgaagtttttgatttaccggagattccacaggatttctcaatttttaatgatggtaaaaaaagagtttttatacttactccaggaaaattgttgtttttattgagaaatcatcaaagttttattgatgaaataggactttgtatatttgatgaagcacatctttttgatgatccaagtcgtggaacaaattttgaattactgttgtcaacggttaaacaaattttcccaaaaggaatacagaagattttaatatctgctgtaataccaaatagtgaagctataaatcggtggtttaacgaagatggagtaattgtttctaataattcgattaaaacaacagagaaaagagttgcgtttagtgatttaaacgggagtaatgagcaattatatttcatagatcctattacatttgaagaagaattttttgttccacgtactgttagtgttagtgaattagagcagcttggaaaagaacgcaaacaaaaagtttttccagaactgacaaacgaaaatgatataagtatttattatgggattaagctaattaataatggtggagtaggaattttttgtggaagaaaagacacggtcaatgttattttacgaagatttatagacttaacttaa

SEQ ID NO: 56946 - DNA, 810 bp, Streptococcus pneumoniae; identical to SEQ ID NO: 56778

SEQ ID NO: 56947 - DNA, 3084 bp, Streptococcus pneumoniae; identical to SEQ ID NO: 56779

SEQ ID NO: 56948 - DNA, 810 bp, Streptococcus pneumoniae; identical to SEQ ID NO: 56808

SEQ ID NO: 56949 - DNA, 3084 bp, Streptococcus pneumoniae; identical to SEQ ID NO: 56809

SEQ ID NO: 56950 - DNA, 810 bp, Streptococcus pneumoniae; identical to SEQ ID NO: 56790

SEQ ID NO: 56951 - DNA, 2973 bp, Streptococcus pneumoniae; identical to SEQ ID NO: 56791

SEQ ID NO: 56952 - DNA, 810 bp, Streptococcus pneumoniae; identical to SEQ ID NO: 56778

SEQ ID NO: 56953 - DNA, 3084 bp, Streptococcus pneumoniae; identical to SEQ ID NO: 56779

SEQ ID NO: 56954 - DNA, 810 bp, Streptococcus pneumoniae; identical to SEQ ID NO: 56778

SEQ ID NO: 56955 - DNA, 3084 bp, Streptococcus pneumoniae; identical to SEQ ID NO: 56779

SEQ ID NO: 56956 - DNA, 810 bp, Streptococcus pneumoniae; identical to SEQ ID NO: 56778

SEQ ID NO: 56957 - DNA, 3084 bp, Streptococcus pneumoniae; identical to SEQ ID NO: 56779

SEQ ID NO: 56958 - DNA, 810 bp, Streptococcus pneumoniae; identical to SEQ ID NO: 56796

SEQ ID NO: 56959 - DNA, 1602 bp, Streptococcus pneumoniae; identical to SEQ ID NO: 56797

SEQ ID NO: 56960 - DNA, 810 bp, Streptococcus pneumoniae
atggaaaagatgcatagttatataaagtatttaattcatgaagatcctattattactgatgaaggtaagcaggttgagattcttcacttagacattcaagatgacccagaaatttttgaagattgggcaaaccaattcagaagaaattattgttctgatgatgaacttgctgaaatgataggttttatgaatatctcccctaaagagtatcttaaaaattttaaattaccctcggatagtggtattggcctttcaacgatgtcaggtgattttggagaaatattagtatttgattatcttcaaaatattgaagaatatgtggttcctaggactcgttatgatagtagagtcaataaagatacttcaactcaaggaagtgatgttctaggatataagcaagattcttcgaatgtatcgaatgatgaggttgtagttattgaagtaaaatcatcggcatctgattctagtagctctcaagcgaaaaataagcttcaagaagctattaatcattctgataaagattttgaacgattttcaacctcaattgtagccagctatttaaggttaaagaaatctaatagtgatcaagaaaatgtagtagaaagatttttaaacataacggataaaccatttaatgtaatctatggagctgttgcagtctactccaatcaatcatatgatatttatgttatcaagacagtagtttcaaaaaaacacagagattttcagaaattacgactattggtcattcattctgatgaattaatgaaatttattagagaactttattcgaaagcgagtgaggtatga

SEQ ID NO: 56961 - DNA, 2973 bp, Streptococcus pneumoniae
atgatagaatttgggaaaaagtcattatatttttcaaaattagtgcgttcaaaggcaaagatgattgaatttgaaattcctttagaaagtcatattccaatttctgaggatgctcaaaaatcgtttcttggggcattagcaattgctgcagatactgctaggaagtattttgaagattatatcaatcataagagttttgattcacaattaaaaaatcaattacacaatgttgctgaatattttgatgcattgctggtgtcaggattaggaaattcagctgaatatcaagactatattgcaatactaggtaccacagcttattatctaggcgattataatggtagttcgagagttatggttaactacatatcggatgatatgcagttattagaagagagtataactcttgtaaaagtatttattaatgttattacagataaactctttttgaatcatacgccaatagaaggtaaatactctagtgagttaaatactctggtggaatcatatagaaattatattttatcaaaaactgagttttctatagatatttatagagatttacaagataaagtatataggaatggaagcgatttttctgtaatcattgtaaattgtctcttagcagttgtatgtaaaaaaatagatagttcatcaacgaaattattacctgaattttcaggattagatttttctttatggcaggattatatacaatcaacaggaagtataaaggagctttggccatctcaaatcgaattagggaagcaagcaattttttcaggtaaatctggaatcgttcagatgccaacaagttcgggtaaaacagcctcaatcaatctaaccttaagatcagcattttattcaaatagaattgataatgcattgattgttgcaccttttagagcattatgtagagaaatatatcgtgatattaatgcacatttcgttgatgagaataatgtgattgttagtgaagtttttgatttaccggagattccacaggatttctcaatttttaatgatggtaaaaaaagagtttttatacttactccaggaaaattgttgtttttattgagaaatcatcaaagttttattgatgaaataggactttgtatatttgatgaagcacatctttttgatgatccaagtcgtggaacaaattttgaattactgttgtcaacggttaaacaaattttcccaaaaggaatacagaagattttaatatctgctgtaataccaaatagtgaagctataaatcggtggtttaacgaagatggagtaattgtttctaataattcgattaaaacaacagagaaaagagttgcgtttagtgatttaaacgggagtaatgagcaattatatttcatagatcctattacatttgaagaagaattttttgttccacgtactgttagtgttagtgaattagagcagcttggaaaagaacgcaaacaaaaagtttttccagaactgacaaacgaaaatgatataagtatttattatgggattaagctaattaataatggtggagtaggaattttttgtggaagaaaagacacggtcaatgttattttacgaagatttatagacttaaataatagaaattatgatctaactgatttcttaaaaaactcagataggtctgaagttgaaaaaataggaaatttaattggtcaaaatttaggatatgatagtgttgaatatacatgtagtcagctaggagttttttcacatcattcaggtatacctatggggatacgcattgctatagagtatgctttttcaaaaagtaaaataaataatgtagtatgtacttcaaccttagcacaaggtataaacttacctattaaatacttgattatctcaagtgtgtatcaagcaggagatgcaataaaagttcgtgattttcagaatttgataggtagagcaggaagggctggaaaatatacagaaggaacaataattttaacagagcccaatatttataaatcaccaaaaaataagtggaaaaaacaaaactataaagcattgttaaatcctattaatacagagggttgtcaaagtaatattctcagtattatacagtttaaatcagtagttccaactgattatcgattcgctcctataaaatttgatttttggaatttgattaaagagagatttgacagttctgtagactacagaacaaaaataaataatattttatcaaaattaaaaagaaagaacagtctttattttaaggattttaattctaagatagaccagattgataataccctaattgcaattgaaaattatattgcttctatgtatgctactgaattggagactgatagtttagctgaaaatacatttggatatttcttaggtaataatgaagaggaaaaagaaaaaataaaagaattatttatcttgataaaatctaaaataattaccagttcagtagaaactgaaataattgcaaaaaactcaattggattatatcaatctgagttattaaaagaatgggttcaggaaaataaaacatctatcatttcttgtgagaaggaagaagagttattaggtgttttaaccaagaaaataatagatttttcaaataacaaagagatgagaaaactaagtatagaaaatctaaattatatttctcaactctggattaaggggatttcttattttcaaatattggaaagttgtactgaaaaatcaattagtattgagaaaagaggtaagtcaaaaccaattgatatgtctgacataatctctatttgtgataatggattagggtatgaaacatcaatggttttaaatgcgattaataatattcttgaaaaactagttggagaggaattggacgtattgactatgttaataaagaggctgaaatatgggctacctctggaaaaagaaatcaatatctatgaattaggtttttcagatagaattgtggtccaagttattatacacagataa

SEQ ID NO: 56962 - DNA, 810 bp, Streptococcus pneumoniae; identical to SEQ ID NO: 56796

SEQ ID NO: 56963 - DNA, 1602 bp, Streptococcus pneumoniae; identical to SEQ ID NO: 56797

SEQ ID NO: 56964 - DNA, 810 bp, Streptococcus pneumoniae; identical to SEQ ID NO: 56790

SEQ ID NO: 56965 - DNA, 2973 bp, Streptococcus pneumoniae; identical to SEQ ID NO: 56791

SEQ ID NO: 56966 - DNA, 810 bp, Streptococcus pneumoniae; identical to SEQ ID NO: 56778

SEQ ID NO: 56967 - DNA, 3084 bp, Streptococcus pneumoniae; identical to SEQ ID NO: 56779

SEQ ID NO: 56968 - DNA, 810 bp, Streptococcus pneumoniae; identical to SEQ ID NO: 56778

SEQ ID NO: 56969 - DNA, 3084 bp, Streptococcus pneumoniae; identical to SEQ ID NO: 56779

SEQ ID NO: 56970 - DNA, 810 bp, Streptococcus pneumoniae; identical to SEQ ID NO: 56778

SEQ ID NO: 56971 - DNA, 3084 bp, Streptococcus pneumoniae; identical to SEQ ID NO: 56779

SEQ ID NO: 56972 - DNA, 810 bp, Streptococcus pneumoniae; identical to SEQ ID NO: 56790

SEQ ID NO: 56973 - DNA, 2973 bp, Streptococcus pneumoniae; identical to SEQ ID NO: 56791

SEQ ID NO: 56974 - DNA, 810 bp, Streptococcus pneumoniae; identical to SEQ ID NO: 56808

SEQ ID NO: 56975 - DNA, 3084 bp, Streptococcus pneumoniae; identical to SEQ ID NO: 56823

SEQ ID NO: 56976 - DNA, 801 bp, Streptococcus pneumoniae; identical to SEQ ID NO: 56806

SEQ ID NO: 56977 - DNA, 2448 bp, Streptococcus pneumoniae; identical to SEQ ID NO: 56813

SEQ ID NO: 56978 - DNA, 810 bp, Streptococcus pneumoniae; identical to SEQ ID NO: 56808

SEQ ID NO: 56979 - DNA, 3084 bp, Streptococcus pneumoniae; identical to SEQ ID NO: 56809

SEQ ID NO: 56980 - DNA, 624 bp, Streptococcus pneumoniae
atgaatatctcccctaaagagtatcttgaaaattttaaattaccctcggatagtggtattggcctttcaacgatgtcaggagattttggagaaatattagtatctgattatcttcagtatattgaagaatatgtggttcctaggactcgttatgatagtaaagttaataaaaatacttcaactcaaggaagtgatgttctaggatataagcaagattcttcgaatgtgtcgaatgatgaggttgtagttattgaagtaaaatcatctgcatcagattctagtagctctaaagcgaaaaataagcttcaagaagctattaatcattctgataaagattttgaacgattttcaacctcaattgtagccagctatttgaggttaaagaaatctaatagtgatcaagcaaatgtagtagaaagatttttaaacataacggataaaccgtttaatgtaatctatggagctgttgcagtctactccaatcaatcatatgatattgatgttatcaagacagtagtttcaaaaaatcacagagattttcagaaattacgactattggtcattcattctaatgaattaatgaaatttattagagaactctattcgaaagcgagtgaggtatga

SEQ ID NO: 56981 - DNA, 2508 bp, Streptococcus pneumoniae; identical to SEQ ID NO: 56807

SEQ ID NO: 56982 - DNA, 810 bp, Streptococcus pneumoniae; identical to SEQ ID NO: 56796

SEQ ID NO: 56983 - DNA, 1602 bp, Streptococcus pneumoniae; identical to SEQ ID NO: 56797

SEQ ID NO: 56984 - DNA, 810 bp, Streptococcus pneumoniae; identical to SEQ ID NO: 56778

SEQ ID NO: 56985 - DNA, 3084 bp, Streptococcus pneumoniae; identical to SEQ ID NO: 56779

SEQ ID NO: 56986 - DNA, 810 bp, Streptococcus pneumoniae; identical to SEQ ID NO: 56808

SEQ ID NO: 56987 - DNA, 3084 bp, Streptococcus pneumoniae; identical to SEQ ID NO: 56809

SEQ ID NO: 56988 - DNA, 810 bp, Streptococcus pneumoniae; identical to SEQ ID NO: 56790

SEQ ID NO: 56989 - DNA, 2973 bp, Streptococcus pneumoniae; identical to SEQ ID NO: 56791

SEQ ID NO: 56990 - DNA, 810 bp, Streptococcus pneumoniae; identical to SEQ ID NO: 56778

SEQ ID NO: 56991 - DNA, 3084 bp, Streptococcus pneumoniae; identical to SEQ ID NO: 56779

SEQ ID NO: 56992 - DNA, 810 bp, Streptococcus pneumoniae; identical to SEQ ID NO: 56796

SEQ ID NO: 56993 - DNA, 1602 bp, Streptococcus pneumoniae; identical to SEQ ID NO: 56797

SEQ ID NO: 56994 - DNA, 810 bp, Streptococcus pneumoniae; identical to SEQ ID NO: 56790

SEQ ID NO: 56995 - DNA, 2973 bp, Streptococcus pneumoniae; identical to SEQ ID NO: 56791

SEQ ID NO: 56996 - DNA, 810 bp, Streptococcus pneumoniae; identical to SEQ ID NO: 56796

SEQ ID NO: 56997 - DNA, 1602 bp, Streptococcus pneumoniae; identical to SEQ ID NO: 56797

SEQ ID NO: 56998 - DNA, 810 bp, Streptococcus pneumoniae; identical to SEQ ID NO: 56796

SEQ ID NO: 56999 - DNA, 1602 bp, Streptococcus pneumoniae; identical to SEQ ID NO: 56797

SEQ ID NO: 57000 - DNA, 810 bp, Streptococcus pneumoniae; identical to SEQ ID NO: 56790

SEQ ID NO: 57001 - DNA, 2973 bp, Streptococcus pneumoniae; identical to SEQ ID NO: 56791

SEQ ID NO: 57002 - DNA, 810 bp, Streptococcus pneumoniae; identical to SEQ ID NO: 56796

SEQ ID NO: 57003 - DNA, 1602 bp, Streptococcus pneumoniae; identical to SEQ ID NO: 56797

SEQ ID NO: 57004 - DNA, 810 bp, Streptococcus pneumoniae; identical to SEQ ID NO: 56796

SEQ ID NO: 57005 - DNA, 1602 bp, Streptococcus pneumoniae; identical to SEQ ID NO: 56797

SEQ ID NO: 57006 - DNA, 810 bp, Streptococcus pneumoniae; identical to SEQ ID NO: 56808

SEQ ID NO: 57007 - DNA, 3084 bp, Streptococcus pneumoniae; identical to SEQ ID NO: 56823

SEQ ID NO: 57008 - DNA, 810 bp, Streptococcus pneumoniae; identical to SEQ ID NO: 56796

SEQ ID NO: 57009 - DNA, 1602 bp, Streptococcus pneumoniae; identical to SEQ ID NO: 56797

SEQ ID NO: 57010 - DNA, 810 bp, Streptococcus pneumoniae; identical to SEQ ID NO: 56796

SEQ ID NO: 57011 - DNA, 1602 bp, Streptococcus pneumoniae; identical to SEQ ID NO: 56797

SEQ ID NO: 57012 - DNA, 810 bp, Streptococcus pneumoniae; identical to SEQ ID NO: 56790

SEQ ID NO: 57013 - DNA, 2973 bp, Streptococcus pneumoniae; identical to SEQ ID NO: 56791

SEQ ID NO: 57014 - DNA, 810 bp, Streptococcus pneumoniae; identical to SEQ ID NO: 56790

SEQ ID NO: 57015 - DNA, 2973 bp, Streptococcus pneumoniae; identical to SEQ ID NO: 56791

SEQ ID NO: 57016 - DNA, 810 bp, Streptococcus pneumoniae; identical to SEQ ID NO: 56808

SEQ ID NO: 57017 - DNA, 3084 bp, Streptococcus pneumoniae; identical to SEQ ID NO: 56809

SEQ ID NO: 57018 - DNA, 810 bp, Streptococcus pneumoniae; identical to SEQ ID NO: 56778

SEQ ID NO: 57019 - DNA, 3084 bp, Streptococcus pneumoniae
atgatagaatttgggagaaggtcattatatttttcaaaattagtgcgttcaaaggcaaagatgattgaatttgatattcctttagaaagtcatttaccaatttcagaggatgctcaaaaatcgtttcttggggcactagcaattgttgcagatactgctaggaagtattttgaagtttatatcaatcgtaagagttttaatttacaattaaaaaatcaattacacaatgctgctgaatattttgatgcattgctggtgtcaggattaggaaattcagctgaatatcaagactatattgcaatattgggtaccacagcttattatctatgcgattataatggtagttcgagagttatgattaactatatatcggatgatatccagttattagaagactgtatgactcttataaaagtatttattgacgttgtaacggatgaactctttttgaatcatacgccaatagaaggtaaatactctagtgagttaaatactctagttgaatcatatagaaattatattttatcaaaaactgagttttctatagatatttatagagatttacaagataaagtatataggaatggaagcgatttttctgtaattattgtaaattgtctcttagcagttgtatgtaaaaaaataaatagttcatcaacgaaattattacctgaattttcaggattagatttttctttatggcaggattatatacaatcaacaggaagcataaaggagctttggccatctcaaatcgaattagggaagcaaggaattttttcaggtaaatctggaatcgttcagatgccaacaagttcgggtaaaacagcctcaatcaatctaactttaagatcagcattttattcaaatagaattgataatgcattgattgttgcaccttttagagcattatgtagagaaatatatcgagatattaatgcacatttcgttgatgagaataatgtgattgttagtgaagtttttgatttaccggagattccacaggatttctcaatttttaatgatggtaaaaaaagagtttttatacttactccagagaaattgttgtttttattgagaaatcatcaaagttttattgatgaaataggactttgtatatttgatgaagcacatctttttgatgatccaagtcgtggaaccaattttgaattactgttgtcaacggttaaacaaattttcccaaaaggaatacagaagattttaatatctgctgtaataccaaatagtgaagctataaatcggtggtttaacgaagatggagtaattgtttctaataattcgattaaaacaacagagaaaagagttgcgtttagtgatttaaacgggagtaatgagcaattatatttcatagatcctattacatttgaagaagaattttttgttccacgtactgttagtgttagtgaattagagcagcttggaaaagaacgcaaacaaaaagtttttccagaactgacaaacgcaaatgatataagtatttattatgggactaagctaattaataatggtggagtaggaattttttgtggaagaaaagacacggtcaatgttattttacgaagatttatagacttaaataatagaaattatgatctaactgatttcttaaaaaactcagataggtctgaagttgaaaaaataggaaatttaattggtcaaaatttaggatatgatagtgttgaatatacatgtagtcagctaggagttttttcacatcattcaggtatacctatggggatacgcattgctatagagtatgctttttcaaaaagtaaaataaataatgtagtatgtacttcaaccttagcacaaggtataaacttacctattaaatacttgattatctcaagtgtgtatcaagcaggagatgcaataaaagttcgtgattttcagaatttgataggtagagcaggaagggctggaaaatatacagaaggaacaataattttaacagagcccaatatttataaatcaccaaaaaataagtggaaaaaacaaaactataaagcattgttaaatcctattaatacagagggttgtcaaagtaatattctcagtattatacagtttaaatcagtagttccaactgattatcgattcgctcctataaaatttgatttttggaatttgattaaagagagatttgacagttctgtagactacagaacaaaaataaataatattttatcaaaattaaaaagaaagaacagtctttattttaaggattttaattctaagatagaccagattgataataccctaattgcaattgaaaattatattgcttctatgtatgctactgaattggagactgatagtttagctgaaaatacatttggatatttcttaggtaatgaagaggaaaaagaaaaaataaaagaattatttatcttgataaaatctaaaataattaccagttcagtagaaactgaaataattgcaaaaaactcaattggattatatcaatctgagttattaaaagaatgggttcaggaaaataaaacatctatcctttcttgtgagaaggaagaagagttattaggtgttttaaccaagaaaataatagatttttcaaataacaaagagatgagaaaactaagtatagaaaatctaaattatatttctcaactctggattaaggggatttcttattttcaaatattggaaagttgtactgaaaaatcaattagtattgagaaaagaggtaagtcaaaaccaattgatatgtctgacataatctctatttgtgataatggattagggtatgaaacatcaatggttttaaatgcgattaataatattcttgaaaaactagttggagaggaattggacgtattgactatgttaataaagaggctgaaatatgggctacctctggaaaaagaaatcaatatctatgaattaggtttttcagatagaattgtggtccaagttattggtcaagagattaattctgtaagtaagaatcaaattagaaatgaaatcaaacagaaatcagctagactagaagataaattgagtgattttccaagttattatatacagataattaatgaaatgtaa

SEQ ID NO: 57020 - DNA, 801 bp, Streptococcus pneumoniae; identical to SEQ ID NO: 56806

SEQ ID NO: 57021 - DNA, 2448 bp, Streptococcus pneumoniae; identical to SEQ ID NO: 56813

SEQ ID NO: 57022 - DNA, 810 bp, Streptococcus pneumoniae; identical to SEQ ID NO: 56808

SEQ ID NO: 57023 - DNA, 3084 bp, Streptococcus pneumoniae; identical to SEQ ID NO: 56845

SEQ ID NO: 57024 - DNA, 801 bp, Streptococcus pneumoniae; identical to SEQ ID NO: 56806

SEQ ID NO: 57025 - DNA, 2448 bp, Streptococcus pneumoniae; identical to SEQ ID NO: 56813

SEQ ID NO: 57026 - DNA, 810 bp, Streptococcus pneumoniae; identical to SEQ ID NO: 56778

SEQ ID NO: 57027 - DNA, 3084 bp, Streptococcus pneumoniae; identical to SEQ ID NO: 56779

SEQ ID NO: 57028 - DNA, 810 bp, Streptococcus pneumoniae; identical to SEQ ID NO: 56778

SEQ ID NO: 57029 - DNA, 3084 bp, Streptococcus pneumoniae; identical to SEQ ID NO: 56779

SEQ ID NO: 57030 - DNA, 810 bp, Streptococcus pneumoniae; identical to SEQ ID NO: 56808

SEQ ID NO: 57031 - DNA, 3084 bp, Streptococcus pneumoniae; identical to SEQ ID NO: 56809

SEQ ID NO: 57032 - DNA, 810 bp, Streptococcus pneumoniae; identical to SEQ ID NO: 56796

SEQ ID NO: 57033 - DNA, 1602 bp, Streptococcus pneumoniae; identical to SEQ ID NO: 56797

SEQ ID NO: 57034 - DNA, 801 bp, Streptococcus pneumoniae; identical to SEQ ID NO: 56806

SEQ ID NO: 57035 - DNA, 2508 bp, Streptococcus pneumoniae; identical to SEQ ID NO: 56807

SEQ ID NO: 57036 - DNA, 810 bp, Streptococcus pneumoniae; identical to SEQ ID NO: 56808

SEQ ID NO: 57037 - DNA, 3084 bp, Streptococcus pneumoniae; identical to SEQ ID NO: 56809

SEQ ID NO: 57038 - DNA, 801 bp, Streptococcus pneumoniae; identical to SEQ ID NO: 56806

SEQ ID NO: 57039 - DNA, 2448 bp, Streptococcus pneumoniae; identical to SEQ ID NO: 56813

SEQ ID NO: 57040 - DNA, 810 bp, Streptococcus pneumoniae; identical to SEQ ID NO: 56808

SEQ ID NO: 57041 - DNA, 3084 bp, Streptococcus pneumoniae; identical to SEQ ID NO: 56809

SEQ ID NO: 57042 - DNA, 810 bp, Streptococcus pneumoniae; identical to SEQ ID NO: 56796

SEQ ID NO: 57043 - DNA, 1602 bp, Streptococcus pneumoniae; identical to SEQ ID NO: 56797

SEQ ID NO: 57044 - DNA, 810 bp, Streptococcus pneumoniae; identical to SEQ ID NO: 56808

SEQ ID NO: 57045 - DNA, 3084 bp, Streptococcus pneumoniae; identical to SEQ ID NO: 56809

SEQ ID NO: 57046 - DNA, 801 bp, Streptococcus pneumoniae; identical to SEQ ID NO: 56806

SEQ ID NO: 57047 - DNA, 2448 bp, Streptococcus pneumoniae; identical to SEQ ID NO: 56813

SEQ ID NO: 57048 - DNA, 810 bp, Streptococcus pneumoniae; identical to SEQ ID NO: 56808

SEQ ID NO: 57049 - DNA, 3084 bp, Streptococcus pneumoniae; identical to SEQ ID NO: 56809

SEQ ID NO: 57050 - DNA, 810 bp, Streptococcus pneumoniae; identical to SEQ ID NO: 56808

SEQ ID NO: 57051 - DNA, 3084 bp, Streptococcus pneumoniae; identical to SEQ ID NO: 56809

SEQ ID NO: 57052 - DNA, 810 bp, Streptococcus pneumoniae; identical to SEQ ID NO: 56790

SEQ ID NO: 57053 - DNA, 2973 bp, Streptococcus pneumoniae; identical to SEQ ID NO: 56791

SEQ ID NO: 57054 - DNA, 810 bp, Streptococcus pneumoniae; identical to SEQ ID NO: 56778

SEQ ID NO: 57055 - DNA, 3084 bp, Streptococcus pneumoniae; identical to SEQ ID NO: 56779

SEQ ID NO: 57056 - DNA, 810 bp, Streptococcus pneumoniae; identical to SEQ ID NO: 56778

SEQ ID NO: 57057 - DNA, 3084 bp, Streptococcus pneumoniae; identical to SEQ ID NO: 56779

SEQ ID NO: 57058 - DNA, 810 bp, Streptococcus pneumoniae; identical to SEQ ID NO: 56808

SEQ ID NO: 57059 - DNA, 3084 bp, Streptococcus pneumoniae; identical to SEQ ID NO: 56809

SEQ ID NO: 57060 - DNA, 810 bp, Streptococcus pneumoniae; identical to SEQ ID NO: 56790

SEQ ID NO: 57061 - DNA, 2973 bp, Streptococcus pneumoniae; identical to SEQ ID NO: 56791

SEQ ID NO: 57062 - DNA, 810 bp, Streptococcus pneumoniae; identical to SEQ ID NO: 56778

SEQ ID NO: 57063 - DNA, 3084 bp, Streptococcus pneumoniae; identical to SEQ ID NO: 56779

SEQ ID NO: 57064 - DNA, 810 bp, Streptococcus pneumoniae; identical to SEQ ID NO: 56796

SEQ ID NO: 57065 - DNA, 2973 bp, Streptococcus pneumoniae; identical to SEQ ID NO: 56791

SEQ ID NO: 57066 - DNA, 810 bp, Streptococcus pneumoniae; identical to SEQ ID NO: 56790

SEQ ID NO: 57067 - DNA, 2973 bp, Streptococcus pneumoniae; identical to SEQ ID NO: 56791

SEQ ID NO: 57068 - DNA, 810 bp, Streptococcus pneumoniae; identical to SEQ ID NO: 56796

SEQ ID NO: 57069 - DNA, 1602 bp, Streptococcus pneumoniae; identical to SEQ ID NO: 56797

SEQ ID NO: 57070 - DNA, 810 bp, Streptococcus pneumoniae; identical to SEQ ID NO: 56778

SEQ ID NO: 57071 - DNA, 3084 bp, Streptococcus pneumoniae; identical to SEQ ID NO: 56779

SEQ ID NO: 57072 - DNA, 810 bp, Streptococcus pneumoniae; identical to SEQ ID NO: 56808

SEQ ID NO: 57073 - DNA, 3084 bp, Streptococcus pneumoniae; identical to SEQ ID NO: 56823

SEQ ID NO: 57074 - DNA, 810 bp, Streptococcus pneumoniae; identical to SEQ ID NO: 56796

SEQ ID NO: 57075 - DNA, 1602 bp, Streptococcus pneumoniae; identical to SEQ ID NO: 56797

SEQ ID NO: 57076 - DNA, 810 bp, Streptococcus pneumoniae; identical to SEQ ID NO: 56808

SEQ ID NO: 57077 - DNA, 3084 bp, Streptococcus pneumoniae; identical to SEQ ID NO: 56809

SEQ ID NO: 57078 - DNA, 810 bp, Streptococcus pneumoniae; identical to SEQ ID NO: 56796

SEQ ID NO: 57079 - DNA, 1602 bp, Streptococcus pneumoniae; identical to SEQ ID NO: 56797

SEQ ID NO: 57080 - DNA, 801 bp, Streptococcus pneumoniae; identical to SEQ ID NO: 56806

SEQ ID NO: 57081 - DNA, 2508 bp, Streptococcus pneumoniae; identical to SEQ ID NO: 56807

SEQ ID NO: 57082 - DNA, 810 bp, Streptococcus pneumoniae; identical to SEQ ID NO: 56796

SEQ ID NO: 57083 - DNA, 1602 bp, Streptococcus pneumoniae; identical to SEQ ID NO: 56797

SEQ ID NO: 57084 - DNA, 810 bp, Streptococcus pneumoniae; identical to SEQ ID NO: 56790

SEQ ID NO: 57085 - DNA, 2973 bp, Streptococcus pneumoniae; identical to SEQ ID NO: 56791

SEQ ID NO: 57086 - DNA, 810 bp, Streptococcus pneumoniae; identical to SEQ ID NO: 56790

SEQ ID NO: 57087 - DNA, 2973 bp, Streptococcus pneumoniae; identical to SEQ ID NO: 56791

SEQ ID NO: 57088 - DNA, 810 bp, Streptococcus pneumoniae; identical to SEQ ID NO: 56796

SEQ ID NO: 57089 - DNA, 1602 bp, Streptococcus pneumoniae; identical to SEQ ID NO: 56797

SEQ ID NO: 57090 - DNA, 810 bp, Streptococcus pneumoniae; identical to SEQ ID NO: 56778

SEQ ID NO: 57091 - DNA, 3084 bp, Streptococcus pneumoniae; identical to SEQ ID NO: 56779

SEQ ID NO: 57092 - DNA, 801 bp, Streptococcus pneumoniae; identical to SEQ ID NO: 56806

SEQ ID NO: 57093 - DNA, 807 bp, Streptococcus pneumoniae
atgattgaatttgatattcctttagaaagtcatttaccaatttcagaggatgctcaaaaatcgtttcttggggcactagcaattgttgcagatactgctaggaagtattttgaagtttatatcaatcgtaagagttttaatttacaattaaaaaatcaattacacaatgctgctgaatattttgatgcattgctggtgtcaggattaggaaattcagctgaatatcaagactatattgcaatattgggtaccacagcttattatctatgcgattataatggtagttcgagagttatgattaactatatatcggatgatatccagttattagaagactgtatgactcttataaaagtatttattgacgttgtaacggatgaactctttttgaatcatacgccaatagaaggtaaatactctagtgagttaaatactctagttgaatcatatagaaattatattttatcaaaaactgagttttctatagatatttatagagatttacaagataaagtatataggaatggaagcgatttttctgtaattattgtaaattgtctcttagcagttgtatgtaaaaaaataaatagttcatcaacgaaattattacctgaattttcaggattagatttttctttatggcaggattatatacaatcaacaggaagcataaaggagctttggccatctcaaatcgaattagggaagcaaggaattttttcaggtaaatctggaatcgttcagatgccaacaagttcgggtaaaacagcctcaatcaatctaactttaagatcagcattttattaa

SEQ ID NO: 57094 - DNA, 810 bp, Streptococcus pneumoniae
atggaaaagatgcatagttatataaagtatctaactcaagaagatcctattattactgatgaaggtaagcagattgagattcttcacttagatattcaagatgacccagaaatttttgaagattgggcaaaacaattcagaagaaattattgttctgatgatgaacttgctgaaatgataggttttatgaatatctcccctaaagagtatcttgaaaattttaaattaccctcggatagtggtattggcctttcaacgatgtcaggagattttggagaaatattagtatctgattatcttcagtatattgaagaatatgtggttcctaggactagttatgatagtaaagtcaataaaaatacttcaactcaaggaagtgatgttctaggatataagcaagattcttcgaatgtgtcgaatgatgaggttgtagttattgaagtaaaatcatctgcatcagattctagtagctctaaagcgaaaaataagcttcaagaagctattaatcattctgataaagattttgaacgattttcaacctcaattgtagccagctatttgaggttaaagaaatctaatagtgatcaagcaaatgtagtagaaagatttttaaacataacggataaaccgtttaatgtaatctatggagctgttgcagtctactccaatcaatcatatgatattgatgttatcaagacagtagtttcaaaaaatcacagagattttcagaaattacgactattggtcattcattctaatgaattaatgaaatttattagagaactctattcgaaagcgagtgaggtatga

SEQ ID NO: 57095 - DNA, 3084 bp, Streptococcus pneumoniae; identical to SEQ ID NO: 56779

SEQ ID NO: 57096 - DNA, 810 bp, Streptococcus pneumoniae; identical to SEQ ID NO: 56790

SEQ ID NO: 57097 - DNA, 2973 bp, Streptococcus pneumoniae; identical to SEQ ID NO: 56791

SEQ ID NO: 57098 - DNA, 810 bp, Streptococcus pneumoniae; identical to SEQ ID NO: 56790

SEQ ID NO: 57099 - DNA, 2973 bp, Streptococcus pneumoniae; identical to SEQ ID NO: 56791

SEQ ID NO: 57100 - DNA, 810 bp, Streptococcus pneumoniae; identical to SEQ ID NO: 56778

SEQ ID NO: 57101 - DNA, 3084 bp, Streptococcus pneumoniae; identical to SEQ ID NO: 56779

SEQ ID NO: 57102 - DNA, 810 bp, Streptococcus pneumoniae; identical to SEQ ID NO: 56796

SEQ ID NO: 57103 - DNA, 1602 bp, Streptococcus pneumoniae; identical to SEQ ID NO: 56797

SEQ ID NO: 57104 - DNA, 810 bp, Streptococcus pneumoniae; identical to SEQ ID NO: 56796

SEQ ID NO: 57105 - DNA, 1602 bp, Streptococcus pneumoniae; identical to SEQ ID NO: 56797

SEQ ID NO: 57106 - DNA, 810 bp, Streptococcus pneumoniae; identical to SEQ ID NO: 56778

SEQ ID NO: 57107 - DNA, 3084 bp, Streptococcus pneumoniae; identical to SEQ ID NO: 56779

SEQ ID NO: 57108 - DNA, 810 bp, Streptococcus pneumoniae; identical to SEQ ID NO: 56808

SEQ ID NO: 57109 - DNA, 3084 bp, Streptococcus pneumoniae; identical to SEQ ID NO: 56809

SEQ ID NO: 57110 - DNA, 810 bp, Streptococcus pneumoniae; identical to SEQ ID NO: 56808

SEQ ID NO: 57111 - DNA, 3084 bp, Streptococcus pneumoniae; identical to SEQ ID NO: 56809

SEQ ID NO: 57112 - DNA, 810 bp, Streptococcus pneumoniae; identical to SEQ ID NO: 56796

SEQ ID NO: 57113 - DNA, 1602 bp, Streptococcus pneumoniae; identical to SEQ ID NO: 56797

SEQ ID NO: 57114 - DNA, 810 bp, Streptococcus pneumoniae; identical to SEQ ID NO: 56808

SEQ ID NO: 57115 - DNA, 3084 bp, Streptococcus pneumoniae; identical to SEQ ID NO: 56809

SEQ ID NO: 57116 - DNA, 810 bp, Streptococcus pneumoniae; identical to SEQ ID NO: 56796

SEQ ID NO: 57117 - DNA, 1602 bp, Streptococcus pneumoniae; identical to SEQ ID NO: 56797

SEQ ID NO: 57118 - DNA, 810 bp, Streptococcus pneumoniae; identical to SEQ ID NO: 56808

SEQ ID NO: 57119 - DNA, 3084 bp, Streptococcus pneumoniae; identical to SEQ ID NO: 56809

SEQ ID NO: 57120 - DNA, 810 bp, Streptococcus pneumoniae; identical to SEQ ID NO: 56778

SEQ ID NO: 57121 - DNA, 3084 bp, Streptococcus pneumoniae; identical to SEQ ID NO: 56779

SEQ ID NO: 57122 - DNA, 810 bp, Streptococcus pneumoniae; identical to SEQ ID NO: 56796

SEQ ID NO: 57123 - DNA, 1602 bp, Streptococcus pneumoniae; identical to SEQ ID NO: 56797

SEQ ID NO: 57124 - DNA, 810 bp, Streptococcus pneumoniae; identical to SEQ ID NO: 56790

SEQ ID NO: 57125 - DNA, 2973 bp, Streptococcus pneumoniae; identical to SEQ ID NO: 56791

SEQ ID NO: 57126 - DNA, 810 bp, Streptococcus pneumoniae; identical to SEQ ID NO: 56778

SEQ ID NO: 57127 - DNA, 3084 bp, Streptococcus pneumoniae; identical to SEQ ID NO: 56779

SEQ ID NO: 57128 - DNA, 810 bp, Streptococcus pneumoniae; identical to SEQ ID NO: 56808

SEQ ID NO: 57129 - DNA, 3084 bp, Streptococcus pneumoniae; identical to SEQ ID NO: 56823

SEQ ID NO: 57130 - DNA, 810 bp, Streptococcus pneumoniae; identical to SEQ ID NO: 56808

SEQ ID NO: 57131 - DNA, 3084 bp, Streptococcus pneumoniae; identical to SEQ ID NO: 56809

SEQ ID NO: 57132 - DNA, 810 bp, Streptococcus pneumoniae; identical to SEQ ID NO: 56808

SEQ ID NO: 57133 - DNA, 3084 bp, Streptococcus pneumoniae; identical to SEQ ID NO: 56809

SEQ ID NO: 57134 - DNA, 810 bp, Streptococcus pneumoniae; identical to SEQ ID NO: 56808

SEQ ID NO: 57135 - DNA, 3084 bp, Streptococcus pneumoniae; identical to SEQ ID NO: 56809

SEQ ID NO: 57136 - DNA, 810 bp, Streptococcus pneumoniae; identical to SEQ ID NO: 56796

SEQ ID NO: 57137 - DNA, 1602 bp, Streptococcus pneumoniae; identical to SEQ ID NO: 56797

SEQ ID NO: 57138 - DNA, 810 bp, Streptococcus pneumoniae; identical to SEQ ID NO: 56778

SEQ ID NO: 57139 - DNA, 3084 bp, Streptococcus pneumoniae; identical to SEQ ID NO: 56779

SEQ ID NO: 57140 - DNA, 810 bp, Streptococcus pneumoniae; identical to SEQ ID NO: 56796

SEQ ID NO: 57141 - DNA, 1602 bp, Streptococcus pneumoniae; identical to SEQ ID NO: 56797

SEQ ID NO: 57142 - DNA, 810 bp, Streptococcus pneumoniae; identical to SEQ ID NO: 56796

SEQ ID NO: 57143 - DNA, 1602 bp, Streptococcus pneumoniae; identical to SEQ ID NO: 56797

SEQ ID NO: 57144 - DNA, 810 bp, Streptococcus pneumoniae; identical to SEQ ID NO: 56778

SEQ ID NO: 57145 - DNA, 3084 bp, Streptococcus pneumoniae; identical to SEQ ID NO: 56779

SEQ ID NO: 57146 - DNA, 810 bp, Streptococcus pneumoniae; identical to SEQ ID NO: 56796

SEQ ID NO: 57147 - DNA, 1602 bp, Streptococcus pneumoniae; identical to SEQ ID NO: 56797

SEQ ID NO: 57148 - DNA, 810 bp, Streptococcus pneumoniae; identical to SEQ ID NO: 56796

SEQ ID NO: 57149 - DNA, 1602 bp, Streptococcus pneumoniae; identical to SEQ ID NO: 56797

SEQ ID NO: 57150 - DNA, 810 bp, Streptococcus pneumoniae; identical to SEQ ID NO: 56778

SEQ ID NO: 57151 - DNA, 3084 bp, Streptococcus pneumoniae; identical to SEQ ID NO: 56779

SEQ ID NO: 57152 - DNA, 810 bp, Streptococcus pneumoniae; identical to SEQ ID NO: 56796

SEQ ID NO: 57153 - DNA, 1101 bp, Streptococcus pneumoniae
atgatagaatttgggaaaaagtcattatatttttcaaaattagtgcgttcaaaggcaaagatgattgaatttgaaattcctttagaaagtcatattccaatttctgaggatgctcaaaaatcgtttcttggggcattagcaattgctgcagatactgctaggaagtattttgaagattatatcaatcataagagttttgattcacaattaaaaaatcaattacacaatgttgctgaatattttgatgcattgctggtgtcaggattaggaaattcagctgaatatcaagactatattgcaatactaggtaccacagcttattatctaggcgattataatggtagttcgagagttatggttaactacatatcggatgatatgcagttattagaagagagtataactcttgtaaaagtatttattaatgttattacagataaactctttttgaatcatacgccaatagaaggtaaatactctagtgagttaaatactctggtggaatcatatagaaattatattttatcaaaaactgagttttctatagatatttatagagatttacaagataaagtatataggaatggaagcgatttttctgtaatcattgtaaattgtctcttagcagttgtatgtaaaaaaatagatagttcatcaacgaaattattacctgaattttcaggattagatttttctttatggcaggattatatacaatcaacaggaagtataaaggagctttggccatctcaaatcgaattagggaagcaagcaattttttcaggtaaatctggaatcgttcagatgccaacaagttcgggtaaaacagcctcaatcaatctaaccttaagatcagcattttattcaaatagaattgataatgcattgattgttgcaccttttagagcattatgtagagaaatatatcgtgatattaatgcacatttcgttgatgagaataatgtgattgttagtgaagtttttgatttaccggagattccacaggatttctcaatttttaatgatggtaaaaaaaagagtttttatacttactccaggaaaattgttgtttttattgagaaatcatcaaagttttattga

SEQ ID NO: 57154 - DNA, 810 bp, Streptococcus pneumoniae; identical to SEQ ID NO: 56808

SEQ ID NO: 57155 - DNA, 3084 bp, Streptococcus pneumoniae; identical to SEQ ID NO: 56809

SEQ ID NO: 57156 - DNA, 810 bp, Streptococcus pneumoniae; identical to SEQ ID NO: 56778

SEQ ID NO: 57157 - DNA, 3084 bp, Streptococcus pneumoniae; identical to SEQ ID NO: 56779

SEQ ID NO: 57158 - DNA, 810 bp, Streptococcus pneumoniae; identical to SEQ ID NO: 56796

SEQ ID NO: 57159 - DNA, 1602 bp, Streptococcus pneumoniae; identical to SEQ ID NO: 56797

SEQ ID NO: 57160 - DNA, 810 bp, Streptococcus pneumoniae; identical to SEQ ID NO: 56778

SEQ ID NO: 57161 - DNA, 3084 bp, Streptococcus pneumoniae; identical to SEQ ID NO: 56779

SEQ ID NO: 57162 - DNA, 810 bp, Streptococcus pneumoniae; identical to SEQ ID NO: 56778

SEQ ID NO: 57163 - DNA, 3084 bp, Streptococcus pneumoniae; identical to SEQ ID NO: 56779

SEQ ID NO: 57164 - DNA, 810 bp, Streptococcus pneumoniae; identical to SEQ ID NO: 56808

SEQ ID NO: 57165 - DNA, 3084 bp, Streptococcus pneumoniae; identical to SEQ ID NO: 56809

SEQ ID NO: 57166 - DNA, 810 bp, Streptococcus pneumoniae; identical to SEQ ID NO: 56808

SEQ ID NO: 57167 - DNA, 3084 bp, Streptococcus pneumoniae; identical to SEQ ID NO: 56809

SEQ ID NO: 57168 - DNA, 810 bp, Streptococcus pneumoniae; identical to SEQ ID NO: 56778

SEQ ID NO: 57169 - DNA, 3084 bp, Streptococcus pneumoniae; identical to SEQ ID NO: 56779

SEQ ID NO: 57170 - DNA, 810 bp, Streptococcus pneumoniae; identical to SEQ ID NO: 56808

SEQ ID NO: 57171 - DNA, 3084 bp, Streptococcus pneumoniae; identical to SEQ ID NO: 56809

SEQ ID NO: 57172 - DNA, 810 bp, Streptococcus pneumoniae; identical to SEQ ID NO: 56796

SEQ ID NO: 57173 - DNA, 1602 bp, Streptococcus pneumoniae; identical to SEQ ID NO: 56797

SEQ ID NO: 57174 - DNA, 810 bp, Streptococcus pneumoniae; identical to SEQ ID NO: 56808

SEQ ID NO: 57175 - DNA, 3084 bp, Streptococcus pneumoniae; identical to SEQ ID NO: 56809

SEQ ID NO: 57176 - DNA, 810 bp, Streptococcus pneumoniae; identical to SEQ ID NO: 56796

SEQ ID NO: 57177 - DNA, 1602 bp, Streptococcus pneumoniae; identical to SEQ ID NO: 56797

SEQ ID NO: 57178 - DNA, 810 bp, Streptococcus pneumoniae; identical to SEQ ID NO: 56796

SEQ ID NO: 57179 - DNA, 1602 bp, Streptococcus pneumoniae; identical to SEQ ID NO: 56797

SEQ ID NO: 57180 - DNA, 810 bp, Streptococcus pneumoniae; identical to SEQ ID NO: 56778

SEQ ID NO: 57181 - DNA, 3084 bp, Streptococcus pneumoniae; identical to SEQ ID NO: 56779

SEQ ID NO: 57182 - DNA, 810 bp, Streptococcus pneumoniae; identical to SEQ ID NO: 56790

SEQ ID NO: 57183 - DNA, 2973 bp, Streptococcus pneumoniae; identical to SEQ ID NO: 56791

SEQ ID NO: 57184 - DNA, 810 bp, Streptococcus pneumoniae; identical to SEQ ID NO: 56796

SEQ ID NO: 57185 - DNA, 1602 bp, Streptococcus pneumoniae; identical to SEQ ID NO: 56797

SEQ ID NO: 57186 - DNA, 810 bp, Streptococcus pneumoniae; identical to SEQ ID NO: 56796

SEQ ID NO: 57187 - DNA, 1602 bp, Streptococcus pneumoniae; identical to SEQ ID NO: 56797

SEQ ID NO: 57188 - DNA, 810 bp, Streptococcus pneumoniae; identical to SEQ ID NO: 56808

SEQ ID NO: 57189 - DNA, 3084 bp, Streptococcus pneumoniae; identical to SEQ ID NO: 56823

SEQ ID NO: 57190 - DNA, 810 bp, Streptococcus pneumoniae; identical to SEQ ID NO: 56778

SEQ ID NO: 57191 - DNA, 3084 bp, Streptococcus pneumoniae; identical to SEQ ID NO: 56779

SEQ ID NO: 57192 - DNA, 810 bp, Streptococcus pneumoniae; identical to SEQ ID NO: 56808

SEQ ID NO: 57193 - DNA, 3084 bp, Streptococcus pneumoniae; identical to SEQ ID NO: 56809

SEQ ID NO: 57194 - DNA, 810 bp, Streptococcus pneumoniae; identical to SEQ ID NO: 56808

SEQ ID NO: 57195 - DNA, 3084 bp, Streptococcus pneumoniae; identical to SEQ ID NO: 56809

SEQ ID NO: 57196 - DNA, 810 bp, Streptococcus pneumoniae; identical to SEQ ID NO: 56796

SEQ ID NO: 57197 - DNA, 1602 bp, Streptococcus pneumoniae; identical to SEQ ID NO: 56797

SEQ ID NO: 57198 - DNA, 810 bp, Streptococcus pneumoniae; identical to SEQ ID NO: 56778

SEQ ID NO: 57199 - DNA, 3084 bp, Streptococcus pneumoniae; identical to SEQ ID NO: 56779

SEQ ID NO: 57200 - DNA, 810 bp, Streptococcus pneumoniae; identical to SEQ ID NO: 56778

SEQ ID NO: 57201 - DNA, 3084 bp, Streptococcus pneumoniae; identical to SEQ ID NO: 56779

SEQ ID NO: 57202 - DNA, 810 bp, Streptococcus pneumoniae; identical to SEQ ID NO: 56796

SEQ ID NO: 57203 - DNA, 1602 bp, Streptococcus pneumoniae; identical to SEQ ID NO: 56797

SEQ ID NO: 57204 - DNA, 810 bp, Streptococcus pneumoniae; identical to SEQ ID NO: 56796

SEQ ID NO: 57205 - DNA, 1602 bp, Streptococcus pneumoniae; identical to SEQ ID NO: 56797

SEQ ID NO: 57206 - DNA, 810 bp, Streptococcus pneumoniae; identical to SEQ ID NO: 56778

SEQ ID NO: 57207 - DNA, 3084 bp, Streptococcus pneumoniae; identical to SEQ ID NO: 56779

SEQ ID NO: 57208 - DNA, 810 bp, Streptococcus pneumoniae; identical to SEQ ID NO: 56808

SEQ ID NO: 57209 - DNA, 3084 bp, Streptococcus pneumoniae; identical to SEQ ID NO: 56809

SEQ ID NO: 57210 - DNA, 810 bp, Streptococcus pneumoniae; identical to SEQ ID NO: 56778

SEQ ID NO: 57211 - DNA, 3084 bp, Streptococcus pneumoniae; identical to SEQ ID NO: 56779

SEQ ID NO: 57212 - DNA, 810 bp, Streptococcus pneumoniae; identical to SEQ ID NO: 56808

SEQ ID NO: 57213 - DNA, 3084 bp, Streptococcus pneumoniae; identical to SEQ ID NO: 56809

SEQ ID NO: 57214 - DNA, 810 bp, Streptococcus pneumoniae; identical to SEQ ID NO: 56778

SEQ ID NO: 57215 - DNA, 3084 bp, Streptococcus pneumoniae; identical to SEQ ID NO: 56779

SEQ ID NO: 57216 - DNA, 810 bp, Streptococcus pneumoniae; identical to SEQ ID NO: 56796

SEQ ID NO: 57217 - DNA, 1602 bp, Streptococcus pneumoniae; identical to SEQ ID NO: 56797

SEQ ID NO: 57218 - DNA, 810 bp, Streptococcus pneumoniae; identical to SEQ ID NO: 56790

SEQ ID NO: 57219 - DNA, 2973 bp, Streptococcus pneumoniae; identical to SEQ ID NO: 56791

SEQ ID NO: 57220 - DNA, 810 bp, Streptococcus pneumoniae; identical to SEQ ID NO: 56790

SEQ ID NO: 57221 - DNA, 2973 bp, Streptococcus pneumoniae; identical to SEQ ID NO: 56791

SEQ ID NO: 57222 - DNA, 810 bp, Streptococcus pneumoniae; identical to SEQ ID NO: 56808

SEQ ID NO: 57223 - DNA, 3084 bp, Streptococcus pneumoniae; identical to SEQ ID NO: 56845

SEQ ID NO: 57224 - DNA, 810 bp, Streptococcus pneumoniae; identical to SEQ ID NO: 56796

SEQ ID NO: 57225 - DNA, 1602 bp, Streptococcus pneumoniae; identical to SEQ ID NO: 56797

SEQ ID NO: 57226 - DNA, 801 bp, Streptococcus pneumoniae; identical to SEQ ID NO: 56806

SEQ ID NO: 57227 - DNA, 2448 bp, Streptococcus pneumoniae; identical to SEQ ID NO: 56813

SEQ ID NO: 57228 - DNA, 801 bp, Streptococcus pneumoniae; identical to SEQ ID NO: 56806

SEQ ID NO: 57229 - DNA, 2448 bp, Streptococcus pneumoniae; identical to SEQ ID NO: 56813

SEQ ID NO: 57230 - DNA, 810 bp, Streptococcus pneumoniae; identical to SEQ ID NO: 56778

SEQ ID NO: 57231 - DNA, 3084 bp, Streptococcus pneumoniae; identical to SEQ ID NO: 56779

SEQ ID NO: 57232 - DNA, 801 bp, Streptococcus pneumoniae; identical to SEQ ID NO: 56806

SEQ ID NO: 57233 - DNA, 2448 bp, Streptococcus pneumoniae; identical to SEQ ID NO: 56813

SEQ ID NO: 57234 - DNA, 810 bp, Streptococcus pneumoniae; identical to SEQ ID NO: 56796

SEQ ID NO: 57235 - DNA, 1602 bp, Streptococcus pneumoniae; identical to SEQ ID NO: 56797

SEQ ID NO: 57236 - DNA, 810 bp, Streptococcus pneumoniae; identical to SEQ ID NO: 56808

SEQ ID NO: 57237 - DNA, 3084 bp, Streptococcus pneumoniae; identical to SEQ ID NO: 56823

SEQ ID NO: 57238 - DNA, 801 bp, Streptococcus pneumoniae; identical to SEQ ID NO: 56806

SEQ ID NO: 57239 - DNA, 2508 bp, Streptococcus pneumoniae; identical to SEQ ID NO: 56807

SEQ ID NO: 57240 - DNA, 810 bp, Streptococcus pneumoniae; identical to SEQ ID NO: 56796

SEQ ID NO: 57241 - DNA, 1602 bp, Streptococcus pneumoniae; identical to SEQ ID NO: 56797

SEQ ID NO: 57242 - DNA, 810 bp, Streptococcus pneumoniae; identical to SEQ ID NO: 56808

SEQ ID NO: 57243 - DNA, 3084 bp, Streptococcus pneumoniae; identical to SEQ ID NO: 56809

SEQ ID NO: 57244 - DNA, 810 bp, Streptococcus pneumoniae; identical to SEQ ID NO: 56796

SEQ ID NO: 57245 - DNA, 1602 bp, Streptococcus pneumoniae; identical to SEQ ID NO: 56797

SEQ ID NO: 57246 - DNA, 810 bp, Streptococcus pneumoniae; identical to SEQ ID NO: 56796

SEQ ID NO: 57247 - DNA, 1602 bp, Streptococcus pneumoniae; identical to SEQ ID NO: 56797

SEQ ID NO: 57248 - DNA, 810 bp, Streptococcus pneumoniae; identical to SEQ ID NO: 56808

SEQ ID NO: 57249 - DNA, 3084 bp, Streptococcus pneumoniae; identical to SEQ ID NO: 56823

SEQ ID NO: 57250 - DNA, 810 bp, Streptococcus pneumoniae; identical to SEQ ID NO: 56778

SEQ ID NO: 57251 - DNA, 3084 bp, Streptococcus pneumoniae; identical to SEQ ID NO: 56779

SEQ ID NO: 57252 - DNA, 810 bp, Streptococcus pneumoniae; identical to SEQ ID NO: 56778

SEQ ID NO: 57253 - DNA, 3084 bp, Streptococcus pneumoniae; identical to SEQ ID NO: 56779

SEQ ID NO: 57254 - DNA, 810 bp, Streptococcus pneumoniae; identical to SEQ ID NO: 56808

SEQ ID NO: 57255 - DNA, 3084 bp, Streptococcus pneumoniae; identical to SEQ ID NO: 56809

SEQ ID NO: 57256 - DNA, 810 bp, Streptococcus pneumoniae; identical to SEQ ID NO: 56796

SEQ ID NO: 57257 - DNA, 1602 bp, Streptococcus pneumoniae; identical to SEQ ID NO: 56797

SEQ ID NO: 57258 - DNA, 810 bp, Streptococcus pneumoniae; identical to SEQ ID NO: 56808

SEQ ID NO: 57259 - DNA, 3084 bp, Streptococcus pneumoniae; identical to SEQ ID NO: 56823

SEQ ID NO: 57260 - DNA, 810 bp, Streptococcus pneumoniae; identical to SEQ ID NO: 56796

SEQ ID NO: 57261 - DNA, 1602 bp, Streptococcus pneumoniae; identical to SEQ ID NO: 56797

SEQ ID NO: 57262 - DNA, 810 bp, Streptococcus pneumoniae; identical to SEQ ID NO: 56790

SEQ ID NO: 57263 - DNA, 2973 bp, Streptococcus pneumoniae; identical to SEQ ID NO: 56791

SEQ ID NO: 57264 - DNA, 810 bp, Streptococcus pneumoniae; identical to SEQ ID NO: 56778

SEQ ID NO: 57265 - DNA, 3084 bp, Streptococcus pneumoniae; identical to SEQ ID NO: 56779

SEQ ID NO: 57266 - DNA, 801 bp, Streptococcus pneumoniae; identical to SEQ ID NO: 56806

SEQ ID NO: 57267 - DNA, 2448 bp, Streptococcus pneumoniae; identical to SEQ ID NO: 56813

SEQ ID NO: 57268 - DNA, 810 bp, Streptococcus pneumoniae; identical to SEQ ID NO: 56790

SEQ ID NO: 57269 - DNA, 2973 bp, Streptococcus pneumoniae; identical to SEQ ID NO: 56791

SEQ ID NO: 57270 - DNA, 810 bp, Streptococcus pneumoniae; identical to SEQ ID NO: 56778

SEQ ID NO: 57271 - DNA, 3084 bp, Streptococcus pneumoniae; identical to SEQ ID NO: 56779

SEQ ID NO: 57272 - DNA, 810 bp, Streptococcus pneumoniae; identical to SEQ ID NO: 56778

SEQ ID NO: 57273 - DNA, 3084 bp, Streptococcus pneumoniae; identical to SEQ ID NO: 56779

SEQ ID NO: 57274 - DNA, 810 bp, Streptococcus pneumoniae; identical to SEQ ID NO: 56808

SEQ ID NO: 57275 - DNA, 3084 bp, Streptococcus pneumoniae; identical to SEQ ID NO: 56823

SEQ ID NO: 57276 - DNA, 810 bp, Streptococcus pneumoniae; identical to SEQ ID NO: 56808

SEQ ID NO: 57277 - DNA, 3084 bp, Streptococcus pneumoniae; identical to SEQ ID NO: 56823

SEQ ID NO: 57278 - DNA, 810 bp, Streptococcus pneumoniae; identical to SEQ ID NO: 56790

SEQ ID NO: 57279 - DNA, 2973 bp, Streptococcus pneumoniae; identical to SEQ ID NO: 56791

SEQ ID NO: 57280 - DNA, 801 bp, Streptococcus pneumoniae; identical to SEQ ID NO: 56806

SEQ ID NO: 57281 - DNA, 2508 bp, Streptococcus pneumoniae; identical to SEQ ID NO: 56807

SEQ ID NO: 57282 - DNA, 810 bp, Streptococcus pneumoniae; identical to SEQ ID NO: 56796

SEQ ID NO: 57283 - DNA, 1602 bp, Streptococcus pneumoniae; identical to SEQ ID NO: 56797

SEQ ID NO: 57284 - DNA, 810 bp, Streptococcus pneumoniae; identical to SEQ ID NO: 56796

SEQ ID NO: 57285 - DNA, 1602 bp, Streptococcus pneumoniae
atgatagaatttgggaaaaagtcattatatttttcaaaattagtgcgttcaaaggcaaagatgattgaatttgaaattcctttagaaagtcatattccaatttctgaggatgctcaaaaatcgtttcttggggcattagcaattgctgcagatactgctaggaagtattttgaagattatatcaatcataagagttttgattcacaattaaaaaatcaattacacaatgttgctgaatattttgatgcattgctggtgtcaggattaggaaattcagctgaatatcaagactatattgcaatactaggtaccacagcttattatctaggcgattataatggtagttcgagagttatggttaactacatatcggatgatatgcagttattagaagagagtataactcttgtaaaagtatttattaatgttattacagataaactctttttgaatcatacgccaatagaaggtaaatactctagtgagttaaatactctggtggaatcatatagaaattatattttatcaaaaactgagttttctatagatatttatagagatttacaagataaagtatataggaatggaagcgatttttctgtaatcattgtaaattgtctcttagcagttgtatgtaaaaaaatagatagttcatcaacgaaattattacctgaattttcaggattagatttttctttatggcaggattatatacaatcaacaggaagtataaaggagctttggccatctcaaatcgaattagggaagcaagcaattttttcaggtaaatctggaatcgttcagatgccaacaagttcgggtaaaacagcctcaatcaatctaaccttaagatcagcattttattcaaatagaattgataatgcattgattgttgcaccttttagagcattatgtagagaaatatatcgtgatattaatgcacatttcgttgatgagaataatgtgattgttagtgaagtttttgatttaccggagattccacaggatttctcaatttttaatgatggtaaaaaaagagtttttatacttactccaggaaaattgttgtttttattgagaaatcatcaaagttttattgatgaaataggactttgtatatttgatgaagcacatctttttgatgatccaagtcgtggaacaaattttgaatcactgttgtcaacggttaaacaaattttcccaaaaggaatacagaagattttaatatctgctgtaataccaaatagtgaagctataaatcggtggtttaacgaagatggagtaattgtttctaataattcgattaaaacaacagagaaaagagttgcgtttagtgatttaaacgggagtaatgagcaattatatttcatagatcctattacatttgaagaagaattttttgttccacgtactgttagtgttagtgaattagagcagcttggaaaagaacgcaaacaaaaagtttttccagaactgacaaacgaaaatgatataagtatttattatgggattaagctaattaataatggtggagtaggaattttttgtggaagaaaagacacggtcaatgttattttacgaagatttatagacttaacttaa

SEQ ID NO: 57286 - DNA, 810 bp, Streptococcus pneumoniae; identical to SEQ ID NO: 56778

SEQ ID NO: 57287 - DNA, 3084 bp, Streptococcus pneumoniae; identical to SEQ ID NO: 56779

SEQ ID NO: 57288 - DNA, 810 bp, Streptococcus pneumoniae; identical to SEQ ID NO: 56796

SEQ ID NO: 57289 - DNA, 1602 bp, Streptococcus pneumoniae; identical to SEQ ID NO: 56797

SEQ ID NO: 57290 - DNA, 810 bp, Streptococcus pneumoniae; identical to SEQ ID NO: 56778

SEQ ID NO: 57291 - DNA, 3084 bp, Streptococcus pneumoniae; identical to SEQ ID NO: 56779

SEQ ID NO: 57292 - DNA, 810 bp, Streptococcus pneumoniae; identical to SEQ ID NO: 56790

SEQ ID NO: 57293 - DNA, 2973 bp, Streptococcus pneumoniae; identical to SEQ ID NO: 56939

SEQ ID NO: 57294 - DNA, 801 bp, Streptococcus pneumoniae; identical to SEQ ID NO: 56806

SEQ ID NO: 57295 - DNA, 2508 bp, Streptococcus pneumoniae; identical to SEQ ID NO: 56807

SEQ ID NO: 57296 - DNA, 810 bp, Streptococcus pneumoniae; identical to SEQ ID NO: 56778

SEQ ID NO: 57297 - DNA, 3084 bp, Streptococcus pneumoniae; identical to SEQ ID NO: 56779

SEQ ID NO: 57298 - DNA, 810 bp, Streptococcus pneumoniae; identical to SEQ ID NO: 56808

SEQ ID NO: 57299 - DNA, 3084 bp, Streptococcus pneumoniae; identical to SEQ ID NO: 56809

SEQ ID NO: 57300 - DNA, 810 bp, Streptococcus pneumoniae; identical to SEQ ID NO: 56778

SEQ ID NO: 57301 - DNA, 3084 bp, Streptococcus pneumoniae; identical to SEQ ID NO: 56779

SEQ ID NO: 57302 - DNA, 810 bp, Streptococcus pneumoniae; identical to SEQ ID NO: 56808

SEQ ID NO: 57303 - DNA, 3084 bp, Streptococcus pneumoniae; identical to SEQ ID NO: 56823

SEQ ID NO: 57304 - DNA, 810 bp, Streptococcus pneumoniae; identical to SEQ ID NO: 56790

SEQ ID NO: 57305 - DNA, 2973 bp, Streptococcus pneumoniae; identical to SEQ ID NO: 56791

SEQ ID NO: 57306 - DNA, 810 bp, Streptococcus pneumoniae; identical to SEQ ID NO: 56808

SEQ ID NO: 57307 - DNA, 3084 bp, Streptococcus pneumoniae; identical to SEQ ID NO: 56809

SEQ ID NO: 57308 - DNA, 810 bp, Streptococcus pneumoniae; identical to SEQ ID NO: 57094

SEQ ID NO: 57309 - DNA, 3084 bp, Streptococcus pneumoniae; identical to SEQ ID NO: 56779

SEQ ID NO: 57310 - DNA, 810 bp, Streptococcus pneumoniae; identical to SEQ ID NO: 56778

SEQ ID NO: 57311 - DNA, 3084 bp, Streptococcus pneumoniae; identical to SEQ ID NO: 56779

SEQ ID NO: 57312 - DNA, 810 bp, Streptococcus pneumoniae; identical to SEQ ID NO: 56808

SEQ ID NO: 57313 - DNA, 3084 bp, Streptococcus pneumoniae; identical to SEQ ID NO: 56809

SEQ ID NO: 57314 - DNA, 810 bp, Streptococcus pneumoniae; identical to SEQ ID NO: 56796

SEQ ID NO: 57315 - DNA, 1602 bp, Streptococcus pneumoniae; identical to SEQ ID NO: 56797

SEQ ID NO: 57316 - DNA, 810 bp, Streptococcus pneumoniae; identical to SEQ ID NO: 56808

SEQ ID NO: 57317 - DNA, 3084 bp, Streptococcus pneumoniae; identical to SEQ ID NO: 56809

SEQ ID NO: 57318 - DNA, 810 bp, Streptococcus pneumoniae; identical to SEQ ID NO: 56790

SEQ ID NO: 57319 - DNA, 2904 bp, Streptococcus pneumoniae
atgatagaatttgggaaaaagtcattatatttttcaaaattagtgcgttcaaaggcaaagatgattgaatttgaaattcctttagaaagtcatattccaatttctgaggatgctcaaaaatcgtttcttggggcattagcaattgctgcagatactgctaggaagtattttgaagattatatcaatcataagagttttgattcacaattaaaaaatcaattacacaatgttgctgaatattttgatgcattgctggtgtcaggattaggaaattcagctgaatatcaagactatattgcaatactaggtaccacagcttattatctaggcgattataatggtagttcgagagttatggttaactacatatcggatgatatgcagttattagaagagagtataactcttgtaaaagtatttattaatgttattacagataaactctttttgaatcatacgccaatagaaggtaaatactctagtgagttaaatactctggtggaatcatatagaaattatattttatcaaaaactgagttttctatagatatttatagagatttacaagataaagtatataggaatggaagcgatttttctgtaatcattgtaaattgtctcttagcagttgtatgtaaaaaaatagatagttcatcaacgaaattattacctgaattttcaggattagatttttctttatggcaggattatatacaatcaacaggaagtataaaggagctttggccatctcaaatcgaattagggaagcaagcaattttttcaggtaaatctggaatcgttcagatgccaacaagttcgggtaaaacagcctcaatcaatctaaccttaagatcagcattttattcaaatagaattgataatgcattgattgttgcaccttttagagcattatgtagagaaatatatcgtgatattaatgcacatttcgttgatgagaataatgtgattgttagtgaagtttttgatttaccggagattccacaggatttctcaatttttaatgatggtaaaaaaagagtttttatacttactccaggaaaattgttgtttttattgagaaatcatcaaagttttattgatgaaataggactttgtatatttgatgaagcacatctttttgatgatccaagtcgtggaacaaattttgaattactgttgtcaacggttaaacaaattttcccaaaaggaatacagaagattttaatatctgctgtaataccaaatagtgaagctataaatcggtggtttaacgaagatggagtaattgtttctaataattcgattaaaacaacagagaaaagagttgcgtttagtgatttaaacgggagtaatgagcaattatatttcatagatcctattacatttgaagaagaattttttgttccacgtactgttagtgttagtgaattagagcagcttggaaaagaacgcaaacaaaaagtttttccagaactgacaaacgaaaatgatataagtatttattatgggattaatctaattaataatggtggagtaggaattttttgtggaagaaaagacacggtcaatgttattttacgaagatttatagacttaaataatagaaattatgatctaactgatttcttaaaaaactcagataggtctgaagttgaaaaaataggaaatttaattggtcaaaatttaggatatgatagtgttgaatatacatgtagtcagctaggagttttttcacatcattcaggtatacctatggggatacgcattgctatagagtatgctttttcaaaaagtaaaataaataatgtagtatgtacttcaaccttagcacaaggtataaacttacctattaaatacttgattatctcaagtgtgtatcaagcaggagatgcaataaaagttcgtgattttcagaatttgataggtagagcaggaagggctggaaaatatacagaaggaacaataattttaacagagcccaatatttataaatcaccaaaaaataagtggaaaaaacaaaactataaagcattgttaaatcctattaatacagagggttgtcaaagtaatattctcagtattatacagtttaaatcagtagttccaactgattatcgattcgctcctataaaatttgatttttggaatttgattaaagagagatttgacagttctgtagactacagaacaaaaataaataatattttatcaaaattaaaaagaaagaacagtctttattttaaggattttaattctaagatagaccagattgataataccctaattgcaattgaaaattatattgcttctatgtatgctactgaattggagactgatagtttagctgaaaatacatttggatatttcttaggtaataatgaagaggaaaaagaaaaaataaaagaattatttatcttgataaaatctaaaataattaccagttcagtagaaactgaaataattgcaaaaaactcaattggattatatcaatctgagttattaaaagaatgggttcaggaaaataaaacatctatcatttcttgtgagaaggaagaagagttattaggtgttttaaccaagaaaataatagatttttcaaataacaaagagatgagaaaactaagtatagaaaatctaaattatatttctcaactctggattaaggggatttcttattttcaaatattggaaagttgtactgaaaaatcaattagtattgagaaaagaggtaagtcaaaaccaattgatatgtctgacataatctctatttgtgataatggattagggtatgaaacatcaatggttttaaatgcgattaataatattcttgaaaaactagttggagaggaattggacgtattgactatgttaataaagaggctgaaatatgggctacctctgtaa

SEQ ID NO: 57320 - DNA, 810 bp, Streptococcus pneumoniae; identical to SEQ ID NO: 56808

SEQ ID NO: 57321 - DNA, 3084 bp, Streptococcus pneumoniae; identical to SEQ ID NO: 56823

SEQ ID NO: 57322 - DNA, 810 bp, Streptococcus pneumoniae; identical to SEQ ID NO: 56808

SEQ ID NO: 57323 - DNA, 3084 bp, Streptococcus pneumoniae; identical to SEQ ID NO: 56823

SEQ ID NO: 57324 - DNA, 810 bp, Streptococcus pneumoniae; identical to SEQ ID NO: 56796

SEQ ID NO: 57325 - DNA, 1602 bp, Streptococcus pneumoniae; identical to SEQ ID NO: 56797

SEQ ID NO: 57326 - DNA, 810 bp, Streptococcus pneumoniae; identical to SEQ ID NO: 56796

SEQ ID NO: 57327 - DNA, 1101 bp, Streptococcus pneumoniae; identical to SEQ ID NO: 57153

SEQ ID NO: 57328 - DNA, 810 bp, Streptococcus pneumoniae; identical to SEQ ID NO: 56796

SEQ ID NO: 57329 - DNA, 1602 bp, Streptococcus pneumoniae; identical to SEQ ID NO: 56797

SEQ ID NO: 57330 - DNA, 801 bp, Streptococcus pneumoniae; identical to SEQ ID NO: 56806

SEQ ID NO: 57331 - DNA, 2448 bp, Streptococcus pneumoniae; identical to SEQ ID NO: 56813

SEQ ID NO: 57332 - DNA, 810 bp, Streptococcus pneumoniae; identical to SEQ ID NO: 56808

SEQ ID NO: 57333 - DNA, 3084 bp, Streptococcus pneumoniae; identical to SEQ ID NO: 56845

SEQ ID NO: 57334 - DNA, 810 bp, Streptococcus pneumoniae; identical to SEQ ID NO: 56796

SEQ ID NO: 57335 - DNA, 1602 bp, Streptococcus pneumoniae; identical to SEQ ID NO: 56797

SEQ ID NO: 57336 - DNA, 810 bp, Streptococcus pneumoniae; identical to SEQ ID NO: 56808

SEQ ID NO: 57337 - DNA, 3084 bp, Streptococcus pneumoniae; identical to SEQ ID NO: 56823

SEQ ID NO: 57338 - DNA, 810 bp, Streptococcus pneumoniae; identical to SEQ ID NO: 56808

SEQ ID NO: 57339 - DNA, 3084 bp, Streptococcus pneumoniae; identical to SEQ ID NO: 56909

SEQ ID NO: 57340 - DNA, 810 bp, Streptococcus pneumoniae; identical to SEQ ID NO: 56808

SEQ ID NO: 57341 - DNA, 3084 bp, Streptococcus pneumoniae; identical to SEQ ID NO: 56823

SEQ ID NO: 57342 - DNA, 810 bp, Streptococcus pneumoniae; identical to SEQ ID NO: 56808

SEQ ID NO: 57343 - DNA, 3084 bp, Streptococcus pneumoniae; identical to SEQ ID NO: 56809

SEQ ID NO: 57344 - DNA, 810 bp, Streptococcus pneumoniae; identical to SEQ ID NO: 56808

SEQ ID NO: 57345 - DNA, 3084 bp, Streptococcus pneumoniae; identical to SEQ ID NO: 56809

SEQ ID NO: 57346 - DNA, 810 bp, Streptococcus pneumoniae; identical to SEQ ID NO: 56808

SEQ ID NO: 57347 - DNA, 3084 bp, Streptococcus pneumoniae; identical to SEQ ID NO: 56809

SEQ ID NO: 57348 - DNA, 810 bp, Streptococcus pneumoniae; identical to SEQ ID NO: 56796

SEQ ID NO: 57349 - DNA, 1602 bp, Streptococcus pneumoniae; identical to SEQ ID NO: 56797

SEQ ID NO: 57350 - DNA, 810 bp, Streptococcus pneumoniae; identical to SEQ ID NO: 56808

SEQ ID NO: 57351 - DNA, 3084 bp, Streptococcus pneumoniae; identical to SEQ ID NO: 56823

SEQ ID NO: 57352 - DNA, 810 bp, Streptococcus pneumoniae; identical to SEQ ID NO: 56808

SEQ ID NO: 57353 - DNA, 1542 bp, Streptococcus pneumoniae
atgatagaatttgggaaaaagtcattatatttttcaaaattagtgcgttcaaaggcaaagatgattgaatttgaaattcctttagaaagtcatattccaatttctgaggatgctcaaaaatcgtttcttgtggcattagcaattgctgcagatactgctaggaagtattttgaagattatatcaatcataagagttttgattcacaattaaaaaatcaattacacaatgttgctgaatattttgatgcattgctggtgtcaggattaggaaattcagctgaatatcaagactatattgcaatactaggtaccacagcttattatctaggcgattataatggtagttcgagagttatggttaactacatatcggatgatatgcagttattagaagagagtataactcttgtaaaagtatttattgatgttattacagataaactctttttgaatcatacgccaatagaaggtaaatactctagtgagttaaatactctggtggaatcatatagaaattatattttatcaaaaactgagttttctatagatatttatagaggtttacaagataaagtatataggaatggaagcgatttttctgtaatcattgtaaattgtctcttagcagttgtatgtaaaaaaatagatagttcatcaacgaaattattacctgaattttcaggattagatttttctttatggcaggattatatacaatcaacaggaagtataaaggagctttggccatctcaaatcgaattagggaagcaagcaattttttcaggtaaatctggaagcgttcagatgccaacaagttcgggtaaaacagcctcaatcaatctaaccttaagatcagcattttattcaaatagaattgataatgcattgattgttgcaccttttagagcattatgtagagaaatatatcgtgatattaatgcacatttcgttgatgagaataatgtgattgttagtgaagtttttgatttaccggagattccacaggatttctcaatttttaatgatggtaaaaaaagagtttttatacttactccagaaaaattgttgtttttattgagaaatcatcaaagttttattgatgaaataggactttgtatatttgatgaagcacatctttttgatgatccaagtcgtggaacaaattttgaattactgttgtcaacggttaaacaaattttcccaaaaggaatacagaagattttaatatctgctgtaataccaaatagtgaagctataaatcggtggtttaacgaagatggagtaattgtttctaataattcgattaaaacaacagagaaaagagttgcgtttagtgatttaaacgggagtaatgagcaattatatttcatagatcctattacatttgaagaagaattttttgttccacgtactgttagtgttagtgaattagagcagcttggaaaagaacgcaaacaaaaagttttgatcatcgtcacaaactgcaggcagcaagcttacaagggatttataagaatcattctcttccaagagagaggttga

SEQ ID NO: 57354 - DNA, 810 bp, Streptococcus pneumoniae
atggaaaagatgcatagttatataaagtatttaattcatgaagatcctattattactgatgaaggtaagcaggttgagattcttcacttagacattcaagatgacccagaaatttttgaagattgggcaaaccaattcagaaaaaattattgttctgatgatgaacttgctgaaatgataggttttatgaatatctcccctaaagagtatcttaaaaattttaaattaccctcggatagtggtattggcctttcaacgatgtcaggtgattttggagaaatattagtatctgattatcttcaaaatattgaagaatatgtggttcctaggactcgttatgatagtagagtcaataaagatacttcaactcaaggaagtgatgttctaggatataagcaagattcttcgaatgtatcgaatgatgaggttgtagttattgaagtaaaatcatcggcatctgattctagtagctctcaagcgaaaaataagcttcaagaagctattaatcattctgataaagattttgaacgattttcaacctcaattgtagctagctatttaaggttaaagaaatctaatagtgatcaagaaaatgtagtagaaagatttttaaacataacggataaaccatttaatgtaatctatggagctgttgcagtctactccaatcaatcatatgatattgatgttatcaagacagtagtttcaaaaaaacacagagattttcagaaattacgactattggtcattcattctgatgaattaatgaaatttattagagaactttattcgaaagcgagtgaggtatga

SEQ ID NO: 57355 - DNA, 2973 bp, Streptococcus pneumoniae; identical to SEQ ID NO: 56791

SEQ ID NO: 57356 - DNA, 810 bp, Streptococcus pneumoniae; identical to SEQ ID NO: 56808

SEQ ID NO: 57357 - DNA, 3084 bp, Streptococcus pneumoniae; identical to SEQ ID NO: 56809

SEQ ID NO: 57358 - DNA, 801 bp, Streptococcus pneumoniae; identical to SEQ ID NO: 56806

SEQ ID NO: 57359 - DNA, 2448 bp, Streptococcus pneumoniae; identical to SEQ ID NO: 56813

SEQ ID NO: 57360 - DNA, 810 bp, Streptococcus pneumoniae; identical to SEQ ID NO: 56796

SEQ ID NO: 57361 - DNA, 1602 bp, Streptococcus pneumoniae; identical to SEQ ID NO: 56797

SEQ ID NO: 57362 - DNA, 810 bp, Streptococcus pneumoniae; identical to SEQ ID NO: 56796

SEQ ID NO: 57363 - DNA, 1602 bp, Streptococcus pneumoniae; identical to SEQ ID NO: 56797

SEQ ID NO: 57364 - DNA, 810 bp, Streptococcus pneumoniae; identical to SEQ ID NO: 56790

SEQ ID NO: 57365 - DNA, 2973 bp, Streptococcus pneumoniae
atgatagaatttgggaaaaagtcattatatttttcaaaattagtgcgttcaaaggcaaagatgattgaatttgaaattcctttagaaagtcatattccaatttctgaggatgctcaaaaatcgtttcttggggcattagcaattgctgcagatactgctaggaagtattttgaagattatatcaatcataagagttttgattcacaattaaaaaatcaattacacaatgttgctgaatattttgatgcattgctggtgtcaggattaggaaattcagctgaatatcaagactatattgcaatactaggtaccacagcttattatctaggcgattataatggtagttcgagagttatggttaactacatatcggatgatatgcagttattagaagagagtataactcttgtaaaagtatttattaatgttattacagataaactctttttgaatcatacgccaatagaaggtaaatactctagtgagttaaatactctggtggaatcatatagaaattatattttatcaaaaactgagttttctatagatatttatagagatttacaagataaagtatataggaatggaagcgatttttctgtaatcattgtaaattgtctcttagcagttgtatgtaaaaaaatagatagttcatcaacgaaattattacctgaattttcaggattagatttttctttatggcaggattatatacaatcaacaggaagtataaaggagctttggccatctcaaatcgaattagggaagcaagcaattttttcaggtaaatctggaatcgttcagatgccaacaagttcgggtaaaacagcctcaatcaatctaaccttaagatcagcattttattcaaatagaattgataatgcattgattgttgcaccttttagagcattatgtagagaaatatatcgtgatattaatgcacatttcgttgatgagaataatgtgattgttagtgaagtttttgatttaccggagattccacaggatttctcaatttttaatgatggtaaaaaaagagtttttatacttactccaggaaaattgttgtttttattgagaaatcatcaaagttttattgatgaaataggactttgtatatttgatgaagcacatctttttgatgatccaagtcgtggaacaaattttgaattactgttgtcaacggttaaacaaattttcccaaaaggaatacagaagattttaatatctgctgtaataccaaatagtgaagctataaatcggtggtttaacgaagatggagtaattgtttctaataattcgattaaaacaacagagaaaagagttgcgtttagtgatttaaacgggagtaatgagcaattatatttcatagatcctattacatttgaagaagaattttttgttccacgtactgttagtgttagtgaattagagcagcttggaaaagaacgcaaacaaaaagtttttccagaactgacaaacgaaaatgatataagtatttattatgggattaatctaattaataatggtggagtaggaattttttgtggaagaaaagacacggtcaatgttattttacgaagatttatagacttaaataatagaaattatgatctaactgatttcttaaaaaactcagataggtctgaagttgaaaaaataggaaatttaattggtcaaaatttaggatatgatagtgttgaatatacatgtagtcagctaggagttttttcacatcattcaggtatacctatgggaatacgcattgctatagagtatgctttttcaaaaagtaaaataaataatgtagtatgtacttcaaccttagcacaaggtataaacttacctattaaatacttgattatctcaagtgtgtatcaagcaggagatgcaataaaagttcgtgattttcagaatttgataggtagagcaggaagggctggaaaatatacagaaggaacaataattttaacagagcccaatatttataaatcaccaaaaaataagtggaaaaaacaaaactataaagcattgttaaatcctattaatacagagggttgtcaaagtaatattctcagtattatacagtttaaatcagtagttccaactgattatcgattcgctcctataaaatttgatttttggaatttgattaaagagagatttgacagttctgtagactacagaacaaaaataaataatattttatcaaaattaaaaagaaagaacagtctttattttaaggattttaattctaagatagaccagattgataataccctaattgcaattgaaaattatattgcttctatgtatgctactgaattggagactgatagtttagctgaaaatacatttggatatttcttaggtaataatgaagaggaaaaagaaaaaataaaagaattatttatcttgataaaatctaaaataattaccagttcagtagaaactgaaataattgcaaaaaactcaattggattatatcaatctgagttattaaaagaatgggttcaggaaaataaaacatctatcatttcttgtgagaaggaagaagagttattaggtgttttaaccaagaaaataatagatttttcaaataacaaagagatgagaaaactaagtatagaaaatctaaattatatttctcaactctggattaaggggatttcttattttcaaatattggaaagttgtactgaaaaatcaattagtattgagaaaagaggtaagtcaaaaccaattgatatgtctgacataatctctatttgtgataatggattagggtatgaaacatcaatggttttaaatgcgattaataatattcttgaaaaactagttggagaggaattggacgtattgactatgttaataaagaggctgaaatatgggctacctctggaaaaagaaatcaatatctatgaattaggtttttcagatagaattgtggtccaagttattatacacagataa

SEQ ID NO: 57366 - DNA, 810 bp, Streptococcus pneumoniae; identical to SEQ ID NO: 56778

SEQ ID NO: 57367 - DNA, 3084 bp, Streptococcus pneumoniae; identical to SEQ ID NO: 56779

SEQ ID NO: 57368 - DNA, 810 bp, Streptococcus pneumoniae; identical to SEQ ID NO: 56778

SEQ ID NO: 57369 - DNA, 3084 bp, Streptococcus pneumoniae; identical to SEQ ID NO: 56779

SEQ ID NO: 57370 - DNA, 810 bp, Streptococcus pneumoniae; identical to SEQ ID NO: 56778

SEQ ID NO: 57371 - DNA, 3084 bp, Streptococcus pneumoniae; identical to SEQ ID NO: 56779

SEQ ID NO: 57372 - DNA, 810 bp, Streptococcus pneumoniae; identical to SEQ ID NO: 56778

SEQ ID NO: 57373 - DNA, 3084 bp, Streptococcus pneumoniae; identical to SEQ ID NO: 56779

SEQ ID NO: 57374 - DNA, 810 bp, Streptococcus pneumoniae; identical to SEQ ID NO: 56778

SEQ ID NO: 57375 - DNA, 3084 bp, Streptococcus pneumoniae; identical to SEQ ID NO: 56779

SEQ ID NO: 57376 - DNA, 801 bp, Streptococcus pneumoniae; identical to SEQ ID NO: 56806

SEQ ID NO: 57377 - DNA, 2508 bp, Streptococcus pneumoniae; identical to SEQ ID NO: 56807

SEQ ID NO: 57378 - DNA, 810 bp, Streptococcus pneumoniae; identical to SEQ ID NO: 56796

SEQ ID NO: 57379 - DNA, 1602 bp, Streptococcus pneumoniae; identical to SEQ ID NO: 56797

SEQ ID NO: 57380 - DNA, 810 bp, Streptococcus pneumoniae; identical to SEQ ID NO: 56778

SEQ ID NO: 57381 - DNA, 3084 bp, Streptococcus pneumoniae; identical to SEQ ID NO: 56779

SEQ ID NO: 57382 - DNA, 810 bp, Streptococcus pneumoniae; identical to SEQ ID NO: 56778

SEQ ID NO: 57383 - DNA, 3084 bp, Streptococcus pneumoniae; identical to SEQ ID NO: 56779

SEQ ID NO: 57384 - DNA, 810 bp, Streptococcus pneumoniae; identical to SEQ ID NO: 56790

SEQ ID NO: 57385 - DNA, 2973 bp, Streptococcus pneumoniae; identical to SEQ ID NO: 56791

SEQ ID NO: 57386 - DNA, 810 bp, Streptococcus pneumoniae; identical to SEQ ID NO: 56796

SEQ ID NO: 57387 - DNA, 1602 bp, Streptococcus pneumoniae; identical to SEQ ID NO: 56797

SEQ ID NO: 57388 - DNA, 810 bp, Streptococcus pneumoniae; identical to SEQ ID NO: 56796

SEQ ID NO: 57389 - DNA, 1602 bp, Streptococcus pneumoniae; identical to SEQ ID NO: 56797

SEQ ID NO: 57390 - DNA, 810 bp, Streptococcus pneumoniae; identical to SEQ ID NO: 56790

SEQ ID NO: 57391 - DNA, 2973 bp, Streptococcus pneumoniae; identical to SEQ ID NO: 56791

SEQ ID NO: 57392 - DNA, 810 bp, Streptococcus pneumoniae; identical to SEQ ID NO: 56960

SEQ ID NO: 57393 - DNA, 2973 bp, Streptococcus pneumoniae; identical to SEQ ID NO: 56961

SEQ ID NO: 57394 - DNA, 810 bp, Streptococcus pneumoniae; identical to SEQ ID NO: 56796

SEQ ID NO: 57395 - DNA, 1602 bp, Streptococcus pneumoniae; identical to SEQ ID NO: 56797

SEQ ID NO: 57396 - DNA, 810 bp, Streptococcus pneumoniae; identical to SEQ ID NO: 56796

SEQ ID NO: 57397 - DNA, 1602 bp, Streptococcus pneumoniae; identical to SEQ ID NO: 56797

SEQ ID NO: 57398 - DNA, 810 bp, Streptococcus pneumoniae; identical to SEQ ID NO: 56796

SEQ ID NO: 57399 - DNA, 1602 bp, Streptococcus pneumoniae; identical to SEQ ID NO: 56797

SEQ ID NO: 57400 - DNA, 810 bp, Streptococcus pneumoniae; identical to SEQ ID NO: 56796

SEQ ID NO: 57401 - DNA, 1602 bp, Streptococcus pneumoniae; identical to SEQ ID NO: 56797

SEQ ID NO: 57402 - DNA, 810 bp, Streptococcus pneumoniae; identical to SEQ ID NO: 56790

SEQ ID NO: 57403 - DNA, 2973 bp, Streptococcus pneumoniae; identical to SEQ ID NO: 56791

SEQ ID NO: 57404 - DNA, 810 bp, Streptococcus pneumoniae; identical to SEQ ID NO: 56796

SEQ ID NO: 57405 - DNA, 1602 bp, Streptococcus pneumoniae; identical to SEQ ID NO: 56797

SEQ ID NO: 57406 - DNA, 810 bp, Streptococcus pneumoniae; identical to SEQ ID NO: 56808

SEQ ID NO: 57407 - DNA, 3084 bp, Streptococcus pneumoniae; identical to SEQ ID NO: 56809

SEQ ID NO: 57408 - DNA, 810 bp, Streptococcus pneumoniae; identical to SEQ ID NO: 56796

SEQ ID NO: 57409 - DNA, 825 bp, Streptococcus pneumoniae
  modified_base (810)..(810): a, c, t, g, unknown or other
atgatagaatttgggaaaaagtcattatatttttcaaaattagtgcgttcaaaggcaaagatgattgaatttgaaattcctttagaaagtcatattccaatttctgaggatgctcaaaaatcgtttcttggggcattagcaattgctgcagatactgctaggaagtattttgaagattatatcaatcataagagttttgattcacaattaaaaaatcaattacacaatgttgctgaatattttgatgcattgctggtgtcaggattaggaaattcagctgaatatcaagactatattgcaatactaggtaccacagcttattatctaggcgattataatggtagttcgagagttatggttaactacatatcggatgatatgcagttattagaagagagtataactcttgtaaaagtatttattaatgttattacagataaactctttttgaatcatacgccaatagaaggtaaatactctagtgagttaaatactctggtggaatcatatagaaattatattttatcaaaaactgagttttctatagatatttatagagatttacaagataaagtatataggaatggaagcgatttttctgtaatcattgtaaattgtctcttagcagttgtatgtaaaaaaatagatagttcatcaacgaaattattacctgaattttcaggattagatttttctttatggcaggattatatacaatcaacaggaagtataaaggagctttggccatctcaaatcgaattagggaagcaagcaattttttcaggtaaatctggaatcgttcagatgccnattctatttgaataa

SEQ ID NO: 57410 - DNA, 810 bp, Streptococcus pneumoniae; identical to SEQ ID NO: 56808

SEQ ID NO: 57411 - DNA, 3084 bp, Streptococcus pneumoniae; identical to SEQ ID NO: 56823

SEQ ID NO: 57412 - DNA, 810 bp, Streptococcus pneumoniae; identical to SEQ ID NO: 56960

SEQ ID NO: 57413 - DNA, 2973 bp, Streptococcus pneumoniae
atgatagaatttgggaaaaagtcattatatttttcaaaattagtgcgttcaaaggcaaagatgattgaatttgaaattcctttagaaagtcatattccaatttctgaggatgctcaaaaatcgtttcttggggcattagcaattgctgcagatactgctaggaagtattttgaagattatatcaatcataagagttttgattcacaattaaaaaatcaattacacaatgttgctgaatattttgatgcattgctggtgtcaggattaggaaattcagctgaatatcaagactatattgcaatactaggtaccacagcttattatctaggcgattataatggtagttcgagagttatggttaactacatatcggatgatatgcagttattagaagagagtataactcttgtaaaagtatttattaatgttattacagataaactctttttgaatcatacgccaatagaaggtaaatactctagtgagttaaatactctggtggaatcatatagaaattatattttatcaaaaactgagttttctatagatatttatagagatttacaagataaagtatataggaatggaagcgatttttctgtaatcattgtaaattgtctcttagcagttgtatgtaaaaaaatagatagttcatcaacgaaattattacctgaattttcaggattagatttttctttatggcaggattatatacaatcaacaggaagtataaaggagctttggccatctcaaatcgaattagggaagcaagcaattttttcaggtaaatctggaatcgttcagatgccaacaagttcgggtaaaacagcctcaatcaatctaaccttaagatcagcattttattcaaatagaattgataatgcattgattgttgcaccttttagagcattatgtagagaaatatatcgtgatattaatgcacatttcgttgatgagaataatgtgattgttagtgaagtttttgatttaccggagattccacaggatttctcaatttttaatgatggtaaaaaaagagtttttatacttactccaggaaaattgttgtttttattgagaaatcatcaaagttttattgatgaaataggactttgtatatttgatgaagcacatctttttgatgatccaagtcgtggaacaaattttgaattactgttgtcaacggttaaacaaattttcccaaaaggaatacagaagattttaatatctgctgtaataccaaatagtgaagctataaatcggtggtttaacgaagatggagtaattgtttctaataattcgattaaaacaacagagaaaagagttgcgtttagtgatttaaacgggagtaatgagcaattatatttcatagatcctattacatttgaagaagaattttttgttccacgtactgttagtgttagtgaattagagcagcttggaaaagaacgcaaacaaaaagtttttccagaactgacaaacgaaaatgatataagtatttattatgggattaagctaattaataatggtggagtaggaattttttgtggaagaaaagacacggtcaatgttattttacgaagatttatagacttaaataatagaaattatgatctaactgatttcttaaaaaactcagataggtctgaagttgaaaaaataggaaatttaattggtcaaaatttaggatatgatagtgttgaatatacatgtagtcagctaggagttttttcacatcattcaggtatacctatggggatacgcattgctatagagtatgctttttcaaaaagtaaaataaataatgtagtatgtacttcaaccttagcacaaggtataaacttacctcttaaatacttgattatctcaagtgtgtatcaagcaggagatgcaataaaagttcgtgattttcagaatttgataggtagagcaggaagggctggaaaatatacagaaggaacaataattttaacagagcccaatatttataaatcaccaaaaaataagtggaaaaaacaaaactataaagcattgttaaatcctattaatacagagggttgtcaaagtaatattctcagtattatacagtttaaatcagtagttccaactgattatcgattcgctcctataaaatttgatttttggaatttgattaaagagagatttgacagttctgtagactacagaacaaaaataaataatattttatcaaaattaaaaagaaagaacagtctttattttaaggattttaattctaagatagaccagattgataataccctaattgcaattgaaaattatattgcttctatgtatgctactgaattggagactgatagtttagctgaaaatacatttggatatttcttaggtaataatgaagaggaaaaagaaaaaataaaagaattatttatcttgataaaatctaaaataattaccagttcagtagaaactgaaataattgcaaaaaactcaattggattatatcaatctgagttattaaaagaatgggttcaggaaaataaaacatctatcatttcttgtgagaaggaagaagagttattaggtgttttaaccaagaaaataatagatttttcaaataacaaagagatgagaaaactaagtatagaaaatctaaattatatttctcaactctggattaaggggatttcttattttcaaatattggaaagttgtactgaaaaatcaattagtattgagaaaagaggtaagtcaaaaccaattgatatgtctgacataatctctatttgtgataatggattagggtatgaaacatcaatggttttaaatgcgattaataatattcttgaaaaactagttggagaggaattggacgtattgactatgttaataaagaggctgaaatatgggctacctctggaaaaagaaatcaatatctatgaattaggtttttcagatagaattgtggtccaagttattatacacagataa

SEQ ID NO: 57414 - DNA, 810 bp, Streptococcus pneumoniae; identical to SEQ ID NO: 56808

SEQ ID NO: 57415 - DNA, 3084 bp, Streptococcus pneumoniae; identical to SEQ ID NO: 56809

SEQ ID NO: 57416 - DNA, 810 bp, Streptococcus pneumoniae; identical to SEQ ID NO: 56796

SEQ ID NO: 57417 - DNA, 1602 bp, Streptococcus pneumoniae; identical to SEQ ID NO: 56797

SEQ ID NO: 57418 - DNA, 810 bp, Streptococcus pneumoniae; identical to SEQ ID NO: 56796

SEQ ID NO: 57419 - DNA, 1602 bp, Streptococcus pneumoniae; identical to SEQ ID NO: 56797

SEQ ID NO: 57420 - DNA, 810 bp, Streptococcus pneumoniae; identical to SEQ ID NO: 56796

SEQ ID NO: 57421 - DNA, 1602 bp, Streptococcus pneumoniae; identical to SEQ ID NO: 56797

SEQ ID NO: 57422 - DNA, 810 bp, Streptococcus pneumoniae; identical to SEQ ID NO: 56808

SEQ ID NO: 57423 - DNA, 3084 bp, Streptococcus pneumoniae; identical to SEQ ID NO: 56809

SEQ ID NO: 57424 - DNA, 810 bp, Streptococcus pneumoniae; identical to SEQ ID NO: 56808

SEQ ID NO: 57425 - DNA, 3084 bp, Streptococcus pneumoniae; identical to SEQ ID NO: 56845

SEQ ID NO: 57426 - DNA, 810 bp, Streptococcus pneumoniae; identical to SEQ ID NO: 56808

SEQ ID NO: 57427 - DNA, 3084 bp, Streptococcus pneumoniae; identical to SEQ ID NO: 56809

SEQ ID NO: 57428 - DNA, 810 bp, Streptococcus pneumoniae; identical to SEQ ID NO: 56808

SEQ ID NO: 57429 - DNA, 3084 bp, Streptococcus pneumoniae; identical to SEQ ID NO: 56823

SEQ ID NO: 57430 - DNA, 810 bp, Streptococcus pneumoniae; identical to SEQ ID NO: 56960

SEQ ID NO: 57431 - DNA, 2973 bp, Streptococcus pneumoniae; identical to SEQ ID NO: 57413

SEQ ID NO: 57432 - DNA, 810 bp, Streptococcus pneumoniae; identical to SEQ ID NO: 56808

SEQ ID NO: 57433 - DNA, 3084 bp, Streptococcus pneumoniae; identical to SEQ ID NO: 56809

SEQ ID NO: 57434 - DNA, 810 bp, Streptococcus pneumoniae; identical to SEQ ID NO: 56808

SEQ ID NO: 57435 - DNA, 3084 bp, Streptococcus pneumoniae; identical to SEQ ID NO: 56809

SEQ ID NO: 57436 - DNA, 429 bp, Streptococcus pneumoniae
  modified_base (7)..(7): a, c, t, g, unknown or other
gtgaaangatataagcaagattcttcgaatgtatcgaatgatgaggttgtagttattgaagtaaaatcatcggcatctgattctagtagctctcaagcgaaaaataagcttcaagaagctattaatcattctgataaagattttgaacgattttcaacctcaattgtagccagctatttaaggttaaagaaatctaatagtgatcaagaaaatgtagtagaaagatttttaaacataacggataaaccatttaatgtaatctatggagctgttgcagtctactccaatcaatcatatgatattgatgttatcaagacagtagtttcaaaaaaacacagagattttcagaaattacgactattggtcattcattctgatgaattaatgaaatttattagagaactttattcgaaagcgagtgaggtatga

SEQ ID NO: 57437 - DNA, 1101 bp, Streptococcus pneumoniae; identical to SEQ ID NO: 57153

SEQ ID NO: 57438 - DNA, 810 bp, Streptococcus pneumoniae; identical to SEQ ID NO: 56808

SEQ ID NO: 57439 - DNA, 3084 bp, Streptococcus pneumoniae; identical to SEQ ID NO: 56823

SEQ ID NO: 57440 - DNA, 810 bp, Streptococcus pneumoniae; identical to SEQ ID NO: 56808

SEQ ID NO: 57441 - DNA, 3084 bp, Streptococcus pneumoniae; identical to SEQ ID NO: 56809

SEQ ID NO: 57442 - DNA, 810 bp, Streptococcus pneumoniae; identical to SEQ ID NO: 56808

SEQ ID NO: 57443 - DNA, 3084 bp, Streptococcus pneumoniae; identical to SEQ ID NO: 56809

SEQ ID NO: 57444 - DNA, 810 bp, Streptococcus pneumoniae; identical to SEQ ID NO: 56808

SEQ ID NO: 57445 - DNA, 3084 bp, Streptococcus pneumoniae; identical to SEQ ID NO: 56823

SEQ ID NO: 57446 - DNA, 801 bp, Streptococcus pneumoniae; identical to SEQ ID NO: 56806

SEQ ID NO: 57447 - DNA, 2448 bp, Streptococcus pneumoniae; identical to SEQ ID NO: 56813

SEQ ID NO: 57448 - DNA, 810 bp, Streptococcus pneumoniae; identical to SEQ ID NO: 56808

SEQ ID NO: 57449 - DNA, 3084 bp, Streptococcus pneumoniae; identical to SEQ ID NO: 56809

SEQ ID NO: 57450 - DNA, 801 bp, Streptococcus pneumoniae; identical to SEQ ID NO: 56806

SEQ ID NO: 57451 - DNA, 807 bp, Streptococcus pneumoniae; identical to SEQ ID NO: 57093

SEQ ID NO: 57452 - DNA, 810 bp, Streptococcus pneumoniae; identical to SEQ ID NO: 56808

SEQ ID NO: 57453 - DNA, 3084 bp, Streptococcus pneumoniae; identical to SEQ ID NO: 56809

SEQ ID NO: 57454 - DNA, 810 bp, Streptococcus pneumoniae; identical to SEQ ID NO: 56808

SEQ ID NO: 57455 - DNA, 3084 bp, Streptococcus pneumoniae; identical to SEQ ID NO: 56809

SEQ ID NO: 57456 - DNA, 810 bp, Streptococcus pneumoniae; identical to SEQ ID NO: 56796

SEQ ID NO: 57457 - DNA, 1602 bp, Streptococcus pneumoniae; identical to SEQ ID NO: 56797

SEQ ID NO: 57458 - DNA, 810 bp, Streptococcus pneumoniae; identical to SEQ ID NO: 56796

SEQ ID NO: 57459 - DNA, 1602 bp, Streptococcus pneumoniae; identical to SEQ ID NO: 56797

SEQ ID NO: 57460 - DNA, 810 bp, Streptococcus pneumoniae; identical to SEQ ID NO: 56808

SEQ ID NO: 57461 - DNA, 3084 bp, Streptococcus pneumoniae; identical to SEQ ID NO: 56823

SEQ ID NO: 57462 - DNA, 810 bp, Streptococcus pneumoniae; identical to SEQ ID NO: 56808

SEQ ID NO: 57463 - DNA, 3084 bp, Streptococcus pneumoniae; identical to SEQ ID NO: 56809

SEQ ID NO: 57464 - DNA, 810 bp, Streptococcus pneumoniae; identical to SEQ ID NO: 56796

SEQ ID NO: 57465 - DNA, 1602 bp, Streptococcus pneumoniae; identical to SEQ ID NO: 56797

SEQ ID NO: 57466 - DNA, 810 bp, Streptococcus pneumoniae; identical to SEQ ID NO: 56778

SEQ ID NO: 57467 - DNA, 3084 bp, Streptococcus pneumoniae; identical to SEQ ID NO: 56779

SEQ ID NO: 57468 - DNA, 810 bp, Streptococcus pneumoniae; identical to SEQ ID NO: 56778

SEQ ID NO: 57469 - DNA, 3084 bp, Streptococcus pneumoniae; identical to SEQ ID NO: 56779

SEQ ID NO: 57470 - DNA, 810 bp, Streptococcus pneumoniae; identical to SEQ ID NO: 56778

SEQ ID NO: 57471 - DNA, 3024 bp, Streptococcus pneumoniae; identical to SEQ ID NO: 56785

SEQ ID NO: 57472 - DNA, 810 bp, Streptococcus pneumoniae; identical to SEQ ID NO: 56778

SEQ ID NO: 57473 - DNA, 3024 bp, Streptococcus pneumoniae; identical to SEQ ID NO: 56785

SEQ ID NO: 57474 - DNA, 810 bp, Streptococcus pneumoniae; identical to SEQ ID NO: 56778

SEQ ID NO: 57475 - DNA, 3084 bp, Streptococcus pneumoniae; identical to SEQ ID NO: 56779

SEQ ID NO: 57476 - DNA, 810 bp, Streptococcus pneumoniae; identical to SEQ ID NO: 56778

SEQ ID NO: 57477 - DNA, 3024 bp, Streptococcus pneumoniae; identical to SEQ ID NO: 56785

SEQ ID NO: 57478 - DNA, 810 bp, Streptococcus pneumoniae; identical to SEQ ID NO: 56778

SEQ ID NO: 57479 - DNA, 3024 bp, Streptococcus pneumoniae; identical to SEQ ID NO: 56785

SEQ ID NO: 57480 - DNA, 810 bp, Streptococcus pneumoniae; identical to SEQ ID NO: 56778

SEQ ID NO: 57481 - DNA, 3024 bp, Streptococcus pneumoniae; identical to SEQ ID NO: 56785

SEQ ID NO: 57482 - DNA, 810 bp, Streptococcus pneumoniae; identical to SEQ ID NO: 56778

SEQ ID NO: 57483 - DNA, 3024 bp, Streptococcus pneumoniae; identical to SEQ ID NO: 56785

SEQ ID NO: 57484 - DNA, 810 bp, Streptococcus pneumoniae; identical to SEQ ID NO: 56778

SEQ ID NO: 57485 - DNA, 3084 bp, Streptococcus pneumoniae; identical to SEQ ID NO: 56779

SEQ ID NO: 57486 - DNA, 810 bp, Streptococcus pneumoniae; identical to SEQ ID NO: 56778

SEQ ID NO: 57487 - DNA, 3024 bp, Streptococcus pneumoniae; identical to SEQ ID NO: 56785

SEQ ID NO: 57488 - DNA, 810 bp, Streptococcus pneumoniae; identical to SEQ ID NO: 56778

SEQ ID NO: 57489 - DNA, 3024 bp, Streptococcus pneumoniae; identical to SEQ ID NO: 56785

SEQ ID NO: 57490 - DNA, 810 bp, Streptococcus pneumoniae; identical to SEQ ID NO: 56778

SEQ ID NO: 57491 - DNA, 3024 bp, Streptococcus pneumoniae; identical to SEQ ID NO: 56785

SEQ ID NO: 57492 - DNA, 801 bp, Streptococcus pneumoniae; identical to SEQ ID NO: 56806

SEQ ID NO: 57493 - DNA, 2448 bp, Streptococcus pneumoniae; identical to SEQ ID NO: 56813

SEQ ID NO: 57494 - DNA, 810 bp, Streptococcus pneumoniae; identical to SEQ ID NO: 56778

SEQ ID NO: 57495 - DNA, 3024 bp, Streptococcus pneumoniae; identical to SEQ ID NO: 56785

SEQ ID NO: 57496 - DNA, 801 bp, Streptococcus pneumoniae; identical to SEQ ID NO: 56806

SEQ ID NO: 57497 - DNA, 2448 bp, Streptococcus pneumoniae; identical to SEQ ID NO: 56813

SEQ ID NO: 57498 - DNA, 810 bp, Streptococcus pneumoniae; identical to SEQ ID NO: 56778

SEQ ID NO: 57499 - DNA, 3024 bp, Streptococcus pneumoniae
atgattgaatttgatattcctttagaaagtcatttaccaatttcagaggatgctcaaaaatcgtttcttggggcactagcaattgttgcagatactgctaggaagtattttgaagtttatatcaatcgtaagagttttaatttacaattaaaaaatcaattacacaatgctgctgaatattttgatgcattgctggtgtcaggattaggaaattcagctgaatatcaagactatattgcaatattgggtaccacagcttattatctatgcgattataatggtagttcgagagttatgattaactatatatcggatgatatccagttattagaagactgtatgactcttataaaagtatttattgacgttgtaacggatgaactctttttgaatcatacgccaatagaaggtaaatactctagtgagttaaatactctagttgaatcatatagaaattatattttatcaaaaactgagttttctatagatatttatagagatttacaagataaagtatataggaatggaagcgatttttctgtaattattgtaaattgtctcttagcagttgtatgtaaaaaaataaatagttcatcaacgaaattattacctgaattttcaggattagatttttctttatggcaggattatatacaatcaacaggaagcataaaggagctttggccatctcaaatcgaattagggaagcaaggaattttttcaggtaaatctggaatcgttcagatgccaacaagttcgggtaaaacagcctcaatcaatctaactttaagatcagcattttattcaaatagaattgataatgcattgattgttgcaccttttagagcattatgtagagaaatatatcgagatattaatgcacatttcgttgatgagaataatgtgattgttagtgaagtttttgatttaccggagattccacaggatttctcaatttttaatgatggtaaaaaaagagtttttatacttactccagagaaattgttgtttttattgagaaatcatcaaagttttattgatgaaataggactttgtatatttgatgaagcacatctttttgatgatccaagtcgtggaaccaattttgaattactgttgtcaacggttaaacaaattttcccaaaaggaatacagaagattttaatatctgctgtaataccaaatagtgaagctataaatcggtggtttaacgaagatggagtaattgtttctaataattcgattaaaacaacagagaaaagagttgcgtttagtgatttaaatgggagtaatgagcaattatatttcatagatcctattacatttgaagaagaattttttgttccacgtactgttagtgttagtgaattagagcagcttggaaaagaacgcaaacaaaaagtttttccagaactgacaaacgcaaatgatataagtatttattatgggactaagctaattaataatggtggagtaggaattttttgtggaagaaaagacacggtcaatgttattttacgaagatttatagacttaaataatagaaattatgatctaactgatttcttaaaaaactcagataggtctgaagttgaaaaaataggaaatttaattggtcaaaatttaggatatgatagtgttgaatatacatgtagtcagctaggagttttttcacatcattcaggtatacctatggggatacgcattgctatagagtatgctttttcaaaaagtaaaataaataatgtagtatgtacttcaaccttagcacaaggtataaacttacctattaaatacttgattatctcaagtgtgtatcaagcaggagatgcaataaaagttcgtgattttcagaatttgataggtagagcaggaagggctggaaaatatacagaaggaacaataattttaacagagcccaatatttataaatcaccaaaaaataagtggaaaaaacaaaactataaagcattgttaaatcctattaatacagagggttgtcaaagtaatattctcagtattatacagtttaaatcagtagttccaactgattatcgattcgctcctataaaatttgatttttggaatttgattaaagagagatttgacagttctgtagactacagaacaaaaataaataatattttatcaaaattaaaaagaaagaacagtctttattttaaggattttaattctaagatagaccagattgataataccctaattgcaattgaaaattatattgcttctatgtatgctactgaattggagactgatagtttagctgaaaatacatttggatatttcttaggtaatgaagaggaaaaagaaaaaataaaagaattatttatcttgataaaatctaaaataattaccagttcagtagaaactgaaataattgcaaaaaactcaattggattatatcaatctgagttattaaaagaatgggttcaggaaaataaaacatctatcctttcttgtgagaaggaagaagagttattaggtgttttaaccaagaaaataatagatttttcaaataacaaagagatgagaaaactaagtatagaaaatctaaattatatttctcaactctggattaaggggatttcttattttcaaatattggaaagttgtactgaaaaatcaattagtattgagaaaagaggtaagtcaaaaccaattgatatgtctgacataatctctatttgtgataatggattagggtatgaaacatcaatggttttaaatgcgattaataatattcttgaaaaactagttggagaggaattggacgtattgactatgttaataaagaggctgaaatatgggctacctctggaaaaagaaatcaatatctatgaattaggtttttcagatagaattgtggtccaagttattggtcaagagattaattctgtaagtaagaatcaaattagaaatgaaatcaaacagaaatcagctagactagaagataaattgagtgattttccaagttattatacacagataattaatgaaatgtaa

SEQ ID NO: 57500 - DNA, 810 bp, Streptococcus pneumoniae; identical to SEQ ID NO: 56778

SEQ ID NO: 57501 - DNA, 3024 bp, Streptococcus pneumoniae; identical to SEQ ID NO: 56785

SEQ ID NO: 57502 - DNA, 810 bp, Streptococcus pneumoniae; identical to SEQ ID NO: 56778

SEQ ID NO: 57503 - DNA, 3024 bp, Streptococcus pneumoniae; identical to SEQ ID NO: 57499

SEQ ID NO: 57504 - DNA, 810 bp, Streptococcus pneumoniae; identical to SEQ ID NO: 56778

SEQ ID NO: 57505 - DNA, 3084 bp, Streptococcus pneumoniae; identical to SEQ ID NO: 56779

SEQ ID NO: 57506 - DNA, 810 bp, Streptococcus pneumoniae; identical to SEQ ID NO: 56778

SEQ ID NO: 57507 - DNA, 3084 bp, Streptococcus pneumoniae; identical to SEQ ID NO: 56779

SEQ ID NO: 57508 - DNA, 801 bp, Streptococcus pneumoniae; identical to SEQ ID NO: 56806

SEQ ID NO: 57509 - DNA, 2448 bp, Streptococcus pneumoniae; identical to SEQ ID NO: 56813

SEQ ID NO: 57510 - DNA, 810 bp, Streptococcus pneumoniae; identical to SEQ ID NO: 56778

SEQ ID NO: 57511 - DNA, 3024 bp, Streptococcus pneumoniae; identical to SEQ ID NO: 56785

SEQ ID NO: 57512 - DNA, 810 bp, Streptococcus pneumoniae; identical to SEQ ID NO: 56778

SEQ ID NO: 57513 - DNA, 3024 bp, Streptococcus pneumoniae; identical to SEQ ID NO: 56785

SEQ ID NO: 57514 - DNA, 810 bp, Streptococcus pneumoniae; identical to SEQ ID NO: 56778

SEQ ID NO: 57515 - DNA, 3084 bp, Streptococcus pneumoniae; identical to SEQ ID NO: 56779

SEQ ID NO: 57516 - DNA, 810 bp, Streptococcus pneumoniae; identical to SEQ ID NO: 56778

SEQ ID NO: 57517 - DNA, 3084 bp, Streptococcus pneumoniae; identical to SEQ ID NO: 56779

SEQ ID NO: 57518 - DNA, 810 bp, Streptococcus pneumoniae; identical to SEQ ID NO: 56778

SEQ ID NO: 57519 - DNA, 3084 bp, Streptococcus pneumoniae; identical to SEQ ID NO: 56779

SEQ ID NO: 57520 - DNA, 810 bp, Streptococcus pneumoniae; identical to SEQ ID NO: 56778

SEQ ID NO: 57521 - DNA, 3024 bp, Streptococcus pneumoniae; identical to SEQ ID NO: 56785

SEQ ID NO: 57522 - DNA, 810 bp, Streptococcus pneumoniae; identical to SEQ ID NO: 56778

SEQ ID NO: 57523 - DNA, 3084 bp, Streptococcus pneumoniae; identical to SEQ ID NO: 56779

SEQ ID NO: 57524 - DNA, 810 bp, Streptococcus pneumoniae; identical to SEQ ID NO: 56778

SEQ ID NO: 57525 - DNA, 3024 bp, Streptococcus pneumoniae; identical to SEQ ID NO: 56785

SEQ ID NO: 57526 - DNA, 810 bp, Streptococcus pneumoniae; identical to SEQ ID NO: 56778

SEQ ID NO: 57527 - DNA, 3024 bp, Streptococcus pneumoniae; identical to SEQ ID NO: 56785

SEQ ID NO: 57528 - DNA, 810 bp, Streptococcus pneumoniae; identical to SEQ ID NO: 56778

SEQ ID NO: 57529 - DNA, 3084 bp, Streptococcus pneumoniae; identical to SEQ ID NO: 56779

SEQ ID NO: 57530 - DNA, 801 bp, Streptococcus pneumoniae; identical to SEQ ID NO: 56806

SEQ ID NO: 57531 - DNA, 2448 bp, Streptococcus pneumoniae; identical to SEQ ID NO: 56813

SEQ ID NO: 57532 - DNA, 810 bp, Streptococcus pneumoniae; identical to SEQ ID NO: 56778

SEQ ID NO: 57533 - DNA, 3084 bp, Streptococcus pneumoniae
atgatagaatttgggagaaggtcattatatttttcaaaattagtgcgttcaaaggcaaagatgattgaatttgatattcctttagaaagtcatttaccaatttcagaggatgctcaaaaatcgtttcttggggcactagcaattgttgcagatactgctaggaagtattttgaagtttatatcaatcgtaagagttttaatttacaattaaaaaatcaattacacaatgctgctgaatattttgatgcattgctggtgtcaggattaggaaattcagctgaatatcaagactatattgcaatattgggtaccacagcttattatctatgcgattataatggtagttcgagagttatgattaactatatatcggatgatatccagttattagaagactgtatgactcttataaaagtatttattgacgttgtaacggatgaactctttttgaatcatacgccaatagaaggtaaatactctagtgagttaaatactctagttgaatcatatagaaattatattttatcaaaaactgagttttctatagatatttatagagatttacaagataaagtatataggaatggaagcgatttttctgtaattattgtaaattgtctcttagcagttgtatgtaaaaaaataaatagttcatcaacgaaattattacctgaattttcaggattagatttttctttatggcaggattatatacaatcaacaggaagcataaaggagctttggccatctcaaatcgaattagggaagcaaggaattttttcaggtaaatctggaatcgttcagatgccaacaagttcgggtaaaacagcctcaatcaatctaactttaagatcagcattttattcaaatagaattgataatgcattgattgttgcaccttttagagcattatgtagagaaatatatcgagatattaatgcacatttcgttgatgagaataatgtgattgttagtgaagtttttgatttaccggagattccacaggatttctcaatttttaatgatggtaaaaaaagagtttttatacttactccagagaaattgttgtttttattgagaaatcatcaaagttttattgatgaaataggactttgtatatttgatgaagcacatctttttgatgatccaagtcgtggaaccaattttgaattactgttgtcaacggttaaacaaattttcccaaaaggaatacagaagattttaatatctgctgtaataccaaatagtgaagctataaatcggtggtttaacgaagatggagtaattgtttctaataattcgattaaaacaacagagaaaagagttgcgtttagtgatttaaatgggagtaatgagcaattatatttcatagatcctattacatttgaagaagaattttttgttccacgtactgttagtgttagtgaattagagcagcttggaaaagaacgcaaacaaaaagtttttccagaactgacaaacgcaaatgatataagtatttattatgggactaagctaattaataatggtggagtaggaattttttgtggaagaaaagacacggtcaatgttattttacgaagatttatagacttaaataatagaaattatgatctaactgatttcttaaaaaactcagataggtctgaagttgaaaaaataggaaatttaattggtcaaaatttaggatatgatagtgttgaatatacatgtagtcagctaggagttttttcacatcattcaggtatacctatggggatacgcattgctatagagtatgctttttcaaaaagtaaaataaataatgtagtatgtacttcaaccttagcacaaggtataaacttacctattaaatacttgattatctcaagtgtgtatcaagcaggagatgcaataaaagttcgtgattttcagaatttgataggtagagcaggaagggctggaaaatatacagaaggaacaataattttaacagagcccaatatttataaatcaccaaaaaataagtggaaaaaacaaaactataaagcattgttaaatcctattaatacagagggttgtcaaagtaatattctcagtattatacagtttaaatcagtagttccaactgattatcgattcgctcctataaaatttgatttttggaatttgattaaagagagatttgacagttctgtagactacagaacaaaaataaataatattttatcaaaattaaaaagaaagaacagtctttattttaaggattttaattctaagatagaccagattgataataccctaattgcaattgaaaattatattgcttctatgtatgctactgaattggagactgatagtttagctgaaaatacatttggatatttcttaggtaatgaagaggaaaaagaaaaaataaaagaattatttatcttgataaaatctaaaataattaccagttcagtagaaactgaaataattgcaaaaaactcaattggattatatcaatctgagttattaaaagaatgggttcaggaaaataaaacatctatcctttcttgtgagaaggaagaagagttattaggtgttttaaccaagaaaataatagatttttcaaataacaaagagatgagaaaactaagtatagaaaatctaaattatatttctcaactctggattaaggggatttcttattttcaaatattggaaagttgtactgaaaaatcaattagtattgagaaaagaggtaagtcaaaaccaattgatatgtctgacataatctctatttgtgataatggattagggtatgaaacatcaatggttttaaatgcgattaataatattcttgaaaaactagttggagaggaattggacgtattgactatgttaataaagaggctgaaatatgggctacctctggaaaaagaaatcaatatctatgaattaggtttttcagatagaattgtggtccaagttattggtcaagagattaattctgtaagtaagaatcaaattagaaatgaaatcaaacagaaatcagctagactagaagataaattgagtgattttccaagttattatacacagataattaatgaaatgtaa

SEQ ID NO: 57534 - DNA, 810 bp, Streptococcus pneumoniae; identical to SEQ ID NO: 56778

SEQ ID NO: 57535 - DNA, 3024 bp, Streptococcus pneumoniae; identical to SEQ ID NO: 56785

SEQ ID NO: 57536 - DNA, 810 bp, Streptococcus pneumoniae; identical to SEQ ID NO: 56778

SEQ ID NO: 57537 - DNA, 3084 bp, Streptococcus pneumoniae; identical to SEQ ID NO: 56779

SEQ ID NO: 57538 - DNA, 810 bp, Streptococcus pneumoniae; identical to SEQ ID NO: 56778

SEQ ID NO: 57539 - DNA, 3024 bp, Streptococcus pneumoniae; identical to SEQ ID NO: 57499

SEQ ID NO: 57540 - DNA, 810 bp, Streptococcus pneumoniae; identical to SEQ ID NO: 56778

SEQ ID NO: 57541 - DNA, 3024 bp, Streptococcus pneumoniae
atgattgaatttgatattcctttagaaagtcatttaccaatttcagaggatgctcaaaaatcgtttcttggggcactagcaattgttgcagatactgctaggaagtattttgaagtttatatcaatcgtaagagttttaatttacaattaaaaaatcaattacacaatgctgctgaatattttgatgcattgctggtgtcaggattaggaaattcagctgaatatcaagactatattgcaatattgggtaccacagcttattatctatgcgattataatggtagttcgagagttatgattaactatatatcggatgatatccagttattagaagactgtatgactcttataaaagtatttattgacgttgtaacggatgaactctttttgaatcatacgccaatagaaggtaaatactctagtgagttaaatactctagttgaatcatatagaaattatattttatcaaaaactgagttttctatagatatttatagagatttacaagataaagtatataggaatggaagcgatttttctgtaattattgtaaattgtctcttagcagttgtatgtaaaaaaataaatagttcatcaacgaaattattacctgaattttcaggattagatttttctttatggcaggattatatacaatcaacaggaagcataaaggagctttggccatctcaaatcgaattagggaagcaaggaattttttcaggtaaatctggaatcgttcagatgccaacaagttcgggtaaaacagcctcaatcaatctaactttaagatcagcattttattcaaatagaattgataatgcattgattgttgcaccttttagagcattatgtagagaaatatatcgagatattaatgcacatttcgttgatgagaataatgtgattgttagtgaagtttttgatttaccggagattccacaggatttctcaatttttaatgatggtaaaaaaagagtttttatacttactccagagaaattgttgtttttattgagaaatcatcaaagttttattgatgaaataggactttgtatatttgatgaagcacatctttttgatgatccaagtcgtggaaccaattttgaattactgttgtcaacggttaaacaaattttcccaaaaggaatacagaagattttaatatctgctgtaataccaaatagtgaagctataaatcggtggtttaacgaagatggagtaattgtttctaataattcgattaaaacaacagagaaaagagttgcgtttagtgatttaaacgggagtaatgagcaattatatttcatagatcctattacatttgaagaagaattttttgttccacgtactgttagtgttagtgaattagagcagcttggaaaagaacgcaaacaaaaagtttttccagaactgacaaacgcaaatgatataagtatttattatgggattaagctaattaataatggtggagtaggaattttttgtggaagaaaagacacggtcaatgttattttacgaagatttatagacttaaataatagaaattatgatctaactgatttcttaaaaaactcagataggtctgaagttgaaaaaataggaaatttaattggtcaaaatttaggatatgatagtgttgaatatacatgtagtcagctaggagttttttcacatcattcaggtatacctatggggatacgcattgctatagagtatgctttttcaaaaagtaaaataaataatgtagtatgtacttcaaccttagcacaaggtataaacttacctattaaatacttgattatctcaagtgtgtatcaagcaggagatgcaataaaagttcgtgattttcagaatttgataggtagagcaggaagggctggaaaatatacagaaggaacaataattttaacagagcccaatatttataaatcaccaaaaaataagtggaaaaaacaaaactataaagcattgttaaatcctattaatacagagggttgtcaaagtaatattctcagtattatacagtttaaatcagtagttccaactgattatcgattcgctcctataaaatttgatttttggaatttgattaaagagagatttgacagttctgtagactacagaacaaaaataaataatattttatcaaaattaaaaagaaagaacagtctttattttaaggattttaattctaagatagaccagattgataataccctaattgcaattgaaaattatattgcttctatgtatgctactgaattggagactgatagtttagctgaaaatacatttggatatttcttaggtaatgaagaggaaaaagaaaaaataaaagaattatttatcttgataaaatctaaaataattaccagttcagtagaaactgaaataattgcaaaaaactcaattggattatatcaatctgagttattaaaagaatgggttcaggaaaataaaacatctatcctttcttgtgagaaggaagaagagttattaggtgttttaaccaagaaaataatagatttttcaaataacaaagagatgagaaaactaagtatagaaaatctaaattatatttctcaactctggattaaggggatttcttattttcaaatattggaaagttgtactgaaaaatcaattagtattgagaaaagaggtaagtcaaaaccaattgatatgtctgacataatctctatttgtgataatggattagggtatgaaacatcaatggttttaaatgcgattaataatattcttgaaaaactagttggagaggaattggacgtattgactatgttaataaagaggctgaaatatgggctacctctggaaaaagaaatcaatatctatgaattaggtttttcagatagaattgtggtccaagttattggtcaagagattaattctgtaagtaagaatcaaattagaaatgaaatcaaacagaaatcagctagactagaagataaattgagtgattttccaagttattatacacagataattaatgaaatgtaa

SEQ ID NO: 57542 - DNA, 810 bp, Streptococcus pneumoniae; identical to SEQ ID NO: 56778

SEQ ID NO: 57543 - DNA, 3024 bp, Streptococcus pneumoniae; identical to SEQ ID NO: 56785

SEQ ID NO: 57544 - DNA, 810 bp, Streptococcus pneumoniae; identical to SEQ ID NO: 56778

SEQ ID NO: 57545 - DNA, 3024 bp, Streptococcus pneumoniae; identical to SEQ ID NO: 56785

SEQ ID NO: 57546 - DNA, 810 bp, Streptococcus pneumoniae; identical to SEQ ID NO: 56778

SEQ ID NO: 57547 - DNA, 3024 bp, Streptococcus pneumoniae; identical to SEQ ID NO: 56785

SEQ ID NO: 57548 - DNA, 810 bp, Streptococcus pneumoniae; identical to SEQ ID NO: 56778

SEQ ID NO: 57549 - DNA, 3084 bp, Streptococcus pneumoniae; identical to SEQ ID NO: 56779

SEQ ID NO: 57550 - DNA, 810 bp, Streptococcus pneumoniae; identical to SEQ ID NO: 56778

SEQ ID NO: 57551 - DNA, 3084 bp, Streptococcus pneumoniae; identical to SEQ ID NO: 57533

SEQ ID NO: 57552 - DNA, 810 bp, Streptococcus pneumoniae; identical to SEQ ID NO: 56778

SEQ ID NO: 57553 - DNA, 3084 bp, Streptococcus pneumoniae; identical to SEQ ID NO: 56779

SEQ ID NO: 57554 - DNA, 810 bp, Streptococcus pneumoniae; identical to SEQ ID NO: 56778

SEQ ID NO: 57555 - DNA, 3024 bp, Streptococcus pneumoniae; identical to SEQ ID NO: 56785

SEQ ID NO: 57556 - DNA, 810 bp, Streptococcus pneumoniae; identical to SEQ ID NO: 56778

SEQ ID NO: 57557 - DNA, 3024 bp, Streptococcus pneumoniae; identical to SEQ ID NO: 56785

SEQ ID NO: 57558 - DNA, 810 bp, Streptococcus pneumoniae; identical to SEQ ID NO: 56778

SEQ ID NO: 57559 - DNA, 3024 bp, Streptococcus pneumoniae; identical to SEQ ID NO: 56785

SEQ ID NO: 57560 - DNA, 810 bp, Streptococcus pneumoniae; identical to SEQ ID NO: 56778

SEQ ID NO: 57561 - DNA, 3024 bp, Streptococcus pneumoniae; identical to SEQ ID NO: 56785

SEQ ID NO: 57562 - DNA, 810 bp, Streptococcus pneumoniae; identical to SEQ ID NO: 56778

SEQ ID NO: 57563 - DNA, 3024 bp, Streptococcus pneumoniae; identical to SEQ ID NO: 57499

SEQ ID NO: 57564 - DNA, 810 bp, Streptococcus pneumoniae; identical to SEQ ID NO: 56778

SEQ ID NO: 57565 - DNA, 3024 bp, Streptococcus pneumoniae; identical to SEQ ID NO: 56785

SEQ ID NO: 57566 - DNA, 801 bp, Streptococcus pneumoniae; identical to SEQ ID NO: 56806

SEQ ID NO: 57567 - DNA, 2448 bp, Streptococcus pneumoniae; identical to SEQ ID NO: 56813

SEQ ID NO: 57568 - DNA, 810 bp, Streptococcus pneumoniae; identical to SEQ ID NO: 56778

SEQ ID NO: 57569 - DNA, 3024 bp, Streptococcus pneumoniae; identical to SEQ ID NO: 56785

SEQ ID NO: 57570 - DNA, 810 bp, Streptococcus pneumoniae; identical to SEQ ID NO: 56778

SEQ ID NO: 57571 - DNA, 3024 bp, Streptococcus pneumoniae; identical to SEQ ID NO: 56785

SEQ ID NO: 57572 - DNA, 810 bp, Streptococcus pneumoniae; identical to SEQ ID NO: 56778

SEQ ID NO: 57573 - DNA, 3084 bp, Streptococcus pneumoniae; identical to SEQ ID NO: 56779

SEQ ID NO: 57574 - DNA, 810 bp, Streptococcus pneumoniae; identical to SEQ ID NO: 56778

SEQ ID NO: 57575 - DNA, 3024 bp, Streptococcus pneumoniae; identical to SEQ ID NO: 56785

SEQ ID NO: 57576 - DNA, 801 bp, Streptococcus pneumoniae; identical to SEQ ID NO: 56806

SEQ ID NO: 57577 - DNA, 2448 bp, Streptococcus pneumoniae; identical to SEQ ID NO: 56813

SEQ ID NO: 57578 - DNA, 810 bp, Streptococcus pneumoniae; identical to SEQ ID NO: 56778

SEQ ID NO: 57579 - DNA, 3024 bp, Streptococcus pneumoniae; identical to SEQ ID NO: 57541

SEQ ID NO: 57580 - DNA, 810 bp, Streptococcus pneumoniae; identical to SEQ ID NO: 56778

SEQ ID NO: 57581 - DNA, 3024 bp, Streptococcus pneumoniae; identical to SEQ ID NO: 56785

SEQ ID NO: 57582 - DNA, 810 bp, Streptococcus pneumoniae; identical to SEQ ID NO: 56778

SEQ ID NO: 57583 - DNA, 3024 bp, Streptococcus pneumoniae; identical to SEQ ID NO: 56785

SEQ ID NO: 57584 - DNA, 810 bp, Streptococcus pneumoniae; identical to SEQ ID NO: 56778

SEQ ID NO: 57585 - DNA, 3084 bp, Streptococcus pneumoniae; identical to SEQ ID NO: 57533

SEQ ID NO: 57586 - DNA, 810 bp, Streptococcus pneumoniae; identical to SEQ ID NO: 56778

SEQ ID NO: 57587 - DNA, 3024 bp, Streptococcus pneumoniae; identical to SEQ ID NO: 56785

SEQ ID NO: 57588 - DNA, 810 bp, Streptococcus pneumoniae; identical to SEQ ID NO: 56778

SEQ ID NO: 57589 - DNA, 3024 bp, Streptococcus pneumoniae; identical to SEQ ID NO: 56785

SEQ ID NO: 57590 - DNA, 810 bp, Streptococcus pneumoniae; identical to SEQ ID NO: 56778

SEQ ID NO: 57591 - DNA, 3084 bp, Streptococcus pneumoniae; identical to SEQ ID NO: 56779

SEQ ID NO: 57592 - DNA, 810 bp, Streptococcus pneumoniae; identical to SEQ ID NO: 56778

SEQ ID NO: 57593 - DNA, 3024 bp, Streptococcus pneumoniae; identical to SEQ ID NO: 56785

SEQ ID NO: 57594 - DNA, 810 bp, Streptococcus pneumoniae; identical to SEQ ID NO: 56778

SEQ ID NO: 57595 - DNA, 3084 bp, Streptococcus pneumoniae; identical to SEQ ID NO: 56779

SEQ ID NO: 57596 - DNA, 810 bp, Streptococcus pneumoniae; identical to SEQ ID NO: 56778

SEQ ID NO: 57597 - DNA, 3084 bp, Streptococcus pneumoniae; identical to SEQ ID NO: 56779

SEQ ID NO: 57598 - DNA, 810 bp, Streptococcus pneumoniae; identical to SEQ ID NO: 56778

SEQ ID NO: 57599 - DNA, 3024 bp, Streptococcus pneumoniae; identical to SEQ ID NO: 56785

SEQ ID NO: 57600 - DNA, 801 bp, Streptococcus pneumoniae; identical to SEQ ID NO: 56806

SEQ ID NO: 57601 - DNA, 2448 bp, Streptococcus pneumoniae; identical to SEQ ID NO: 56813

SEQ ID NO: 57602 - DNA, 810 bp, Streptococcus pneumoniae; identical to SEQ ID NO: 56778

SEQ ID NO: 57603 - DNA, 3024 bp, Streptococcus pneumoniae; identical to SEQ ID NO: 56785

SEQ ID NO: 57604 - DNA, 801 bp, Streptococcus pneumoniae; identical to SEQ ID NO: 56806

SEQ ID NO: 57605 - DNA, 2448 bp, Streptococcus pneumoniae; identical to SEQ ID NO: 56813

SEQ ID NO: 57606 - DNA, 810 bp, Streptococcus pneumoniae; identical to SEQ ID NO: 56778

SEQ ID NO: 57607 - DNA, 3084 bp, Streptococcus pneumoniae; identical to SEQ ID NO: 56779

SEQ ID NO: 57608 - DNA, 810 bp, Streptococcus pneumoniae; identical to SEQ ID NO: 56778

SEQ ID NO: 57609 - DNA, 3084 bp, Streptococcus pneumoniae; identical to SEQ ID NO: 56779

SEQ ID NO: 57610 - DNA, 810 bp, Streptococcus pneumoniae; identical to SEQ ID NO: 56778

SEQ ID NO: 57611 - DNA, 3084 bp, Streptococcus pneumoniae; identical to SEQ ID NO: 56779

SEQ ID NO: 57612 - DNA, 810 bp, Streptococcus pneumoniae; identical to SEQ ID NO: 56778

SEQ ID NO: 57613 - DNA, 3024 bp, Streptococcus pneumoniae; identical to SEQ ID NO: 56785

SEQ ID NO: 57614 - DNA, 810 bp, Streptococcus pneumoniae; identical to SEQ ID NO: 56778

SEQ ID NO: 57615 - DNA, 3084 bp, Streptococcus pneumoniae; identical to SEQ ID NO: 56779

SEQ ID NO: 57616 - DNA, 801 bp, Streptococcus pneumoniae; identical to SEQ ID NO: 56806

SEQ ID NO: 57617 - DNA, 2448 bp, Streptococcus pneumoniae; identical to SEQ ID NO: 56813

SEQ ID NO: 57618 - DNA, 810 bp, Streptococcus pneumoniae; identical to SEQ ID NO: 56778

SEQ ID NO: 57619 - DNA, 3084 bp, Streptococcus pneumoniae; identical to SEQ ID NO: 56779

SEQ ID NO: 57620 - DNA, 801 bp, Streptococcus pneumoniae; identical to SEQ ID NO: 56806

SEQ ID NO: 57621 - DNA, 2508 bp, Streptococcus pneumoniae; identical to SEQ ID NO: 56807

SEQ ID NO: 57622 - DNA, 810 bp, Streptococcus pneumoniae; identical to SEQ ID NO: 56778

SEQ ID NO: 57623 - DNA, 3024 bp, Streptococcus pneumoniae; identical to SEQ ID NO: 56785

SEQ ID NO: 57624 - DNA, 810 bp, Streptococcus pneumoniae; identical to SEQ ID NO: 56778

SEQ ID NO: 57625 - DNA, 3084 bp, Streptococcus pneumoniae; identical to SEQ ID NO: 56779

SEQ ID NO: 57626 - DNA, 810 bp, Streptococcus pneumoniae; identical to SEQ ID NO: 56778

SEQ ID NO: 57627 - DNA, 3024 bp, Streptococcus pneumoniae; identical to SEQ ID NO: 56785

SEQ ID NO: 57628 - DNA, 810 bp, Streptococcus pneumoniae; identical to SEQ ID NO: 56778

SEQ ID NO: 57629 - DNA, 3024 bp, Streptococcus pneumoniae; identical to SEQ ID NO: 56785

SEQ ID NO: 57630 - DNA, 810 bp, Streptococcus pneumoniae; identical to SEQ ID NO: 56778

SEQ ID NO: 57631 - DNA, 3024 bp, Streptococcus pneumoniae; identical to SEQ ID NO: 56785

SEQ ID NO: 57632 - DNA, 810 bp, Streptococcus pneumoniae; identical to SEQ ID NO: 56778

SEQ ID NO: 57633 - DNA, 3024 bp, Streptococcus pneumoniae; identical to SEQ ID NO: 56785

SEQ ID NO: 57634 - DNA, 810 bp, Streptococcus pneumoniae; identical to SEQ ID NO: 56778

SEQ ID NO: 57635 - DNA, 3084 bp, Streptococcus pneumoniae; identical to SEQ ID NO: 56779

SEQ ID NO: 57636 - DNA, 810 bp, Streptococcus pneumoniae; identical to SEQ ID NO: 56778

SEQ ID NO: 57637 - DNA, 3024 bp, Streptococcus pneumoniae; identical to SEQ ID NO: 56785

SEQ ID NO: 57638 - DNA, 810 bp, Streptococcus pneumoniae; identical to SEQ ID NO: 56778

SEQ ID NO: 57639 - DNA, 3024 bp, Streptococcus pneumoniae; identical to SEQ ID NO: 56785

SEQ ID NO: 57640 - DNA, 810 bp, Streptococcus pneumoniae; identical to SEQ ID NO: 56778

SEQ ID NO: 57641 - DNA, 3024 bp, Streptococcus pneumoniae
atgattgaatttgatattcctttagaaagtcatttaccaatttcagaggatgctcaaaaatcgtttcttggggcactagcaattgttgcagatactgctaggaagtattttgaagtttatatcaatcgtaagagttttaatttacaattaaaaaatcaattacacaatgctgctgaatattttgatgcattgctggtgtcaggattaggaaattcagctgaatatcaagactatattgcaatattgggtaccacagcttattatctatgcgattataatggtagttcgagagttatgattaactatatatcggatgatatccagttattagaagactgtatgactcttataaaagtatttattgacgttgtaacggatgaactctttttgaatcatacgccaatagaaggtaaatactatagtgagttaaatactctagttgaatcatatagaaattatattttatcaaaaactgagttttctatagatatttatagagatttacaagataaagtatataggaatggaagcgatttttctgtaattattgtaaattgtctcttagcagttgtatgtaaaaaaataaatagttcatcaacgaaattattacctgaattttcaggattagatttttctttatggcaggattatatacaatcaacaggaagcataaaggagctttggccatctcaaatcgaattagggaagcaaggaattttttcaggtaaatctggaatcgttcagatgccaacaagttcgggtaaaacagcctcaatcaatctaactttaagatcagcattttattcaaatagaattgataatgcattgattgttgcaccttttagagcattatgtagagaaatatatcgagatattaatgcacatttcgttgatgagaataatgtgattgttagtgaagtttttgatttaccggagattccacaggatttctcaatttttaatgatggtaaaaaaagagtttttatacttactccagagaaattgttgtttttattgagaaatcatcaaagttttattgatgaaataggactttgtatatttgatgaagcacatctttttgatgatccaagtcgtggaaccaattttgaattactgttgtcaacggttaaacaaattttcccaaaaggaatacagaagattttaatatctgctgtaataccaaatagtgaagctataaatcggtggtttaacgaagatggagtaattgtttctaataattcgattaaaacaacagagaaaagagttgcgtttagtgatttaaacgggagtaatgagcaattatatttcatagatcctattacatttgaagaagaattttttgttccacgtactgttagtgttagtgaattagagcagcttggaaaagaacgcaaacaaaaagtttttccagaactgacaaacgcaaatgatataagtatttattatgggactaagctaattaataatggtggagtaggaattttttgtggaagaaaagacacggtcaatgttattttacgaagatttatagacttaaataatagaaattatgatctaactgatttcttaaaaaactcagataggtctgaagttgaaaaaataggaaatttaattggtcaaaatttaggatatgatagtgttgaatatacatgtagtcagctaggagttttttcacatcattcaggtatacctatggggatacgcattgctatagagtatgctttttcaaaaagtaaaataaataatgtagtatgtacttcaaccttagcacaaggtataaacttacctattaaatacttgattatctcaagtgtgtatcaagcaggagatgcaataaaagttcgtgattttcagaatttgataggtagagcaggaagggctggaaaatatacagaaggaacaataattttaacagagcccaatatttataaatcaccaaaaaataagtggaaaaaacaaaactataaagcattgttaaatcctattaatacagagggttgtcaaagtaatattctcagtattatacagtttaaatcagtagttccaactgattatcgattcgctcctataaaatttgatttttggaatttgattaaagagagatttgacagttctgtagactacagaacaaaaataaataatattttatcaaaattaaaaagaaagaacagtctttattttaaggattttaattctaagatagaccagattgataataccctaattgcaattgaaaattatattgcttctatgtatgctactgaattggagactgatagtttagctgaaaatacatttggatatttcttaggtaatgaagaggaaaaagaaaaaataaaagaattatttatcttgataaaatctaaaataattaccagttcagtagaaactgaaataattgcaaaaaactcaattggattatatcaatctgagttattaaaagaatgggttcaggaaaataaaacatctatcctttcttgtgagaaggaagaagagttattaggtgttttaaccaagaaaataatagatttttcaaataacaaagagatgagaaaactaagtatagaaaatctaaattatatttctcaactctggattaaggggatttcttattttcaaatattggaaagttgtactgaaaaatcaattagtattgagaaaagaggtaagtcaaaaccaattgatatgtctgacataatctctatttgtgataatggattagggtatgaaacatcaatggttttaaatgcgattaataatattcttgaaaaactagttggagaggaattggacgtattgactatgttaataaagaggctgaaatatgggctacctctggaaaaagaaatcaatatctatgaattaggtttttcagatagaattgtggtccaagttattggtcaagagattaattctgtaagtaagaatcaaattagaaatgaaatcaaacagaaatcagctagactagaagataaattgagtgattttccaagttattatacacagataattaatgaaatgtaa

SEQ ID NO: 57642 - DNA, 810 bp, Streptococcus pneumoniae; identical to SEQ ID NO: 56778

SEQ ID NO: 57643 - DNA, 3084 bp, Streptococcus pneumoniae; identical to SEQ ID NO: 56779

SEQ ID NO: 57644 - DNA, 810 bp, Streptococcus pneumoniae; identical to SEQ ID NO: 56778

SEQ ID NO: 57645 - DNA, 3084 bp, Streptococcus pneumoniae; identical to SEQ ID NO: 56779

SEQ ID NO: 57646 - DNA, 801 bp, Streptococcus pneumoniae; identical to SEQ ID NO: 56806

SEQ ID NO: 57647 - DNA, 2448 bp, Streptococcus pneumoniae; identical to SEQ ID NO: 56813

SEQ ID NO: 57648 - DNA, 801 bp, Streptococcus pneumoniae; identical to SEQ ID NO: 56806

SEQ ID NO: 57649 - DNA, 2448 bp, Streptococcus pneumoniae; identical to SEQ ID NO: 56813

SEQ ID NO: 57650 - DNA, 810 bp, Streptococcus pneumoniae; identical to SEQ ID NO: 56778

SEQ ID NO: 57651 - DNA, 3024 bp, Streptococcus pneumoniae; identical to SEQ ID NO: 57641

SEQ ID NO: 57652 - DNA, 810 bp, Streptococcus pneumoniae; identical to SEQ ID NO: 56778

SEQ ID NO: 57653 - DNA, 3084 bp, Streptococcus pneumoniae; identical to SEQ ID NO: 56779

SEQ ID NO: 57654 - DNA, 810 bp, Streptococcus pneumoniae; identical to SEQ ID NO: 56778

SEQ ID NO: 57655 - DNA, 3024 bp, Streptococcus pneumoniae; identical to SEQ ID NO: 56785

SEQ ID NO: 57656 - DNA, 810 bp, Streptococcus pneumoniae; identical to SEQ ID NO: 56778

SEQ ID NO: 57657 - DNA, 3024 bp, Streptococcus pneumoniae; identical to SEQ ID NO: 56785

SEQ ID NO: 57658 - DNA, 810 bp, Streptococcus pneumoniae; identical to SEQ ID NO: 56778

SEQ ID NO: 57659 - DNA, 3084 bp, Streptococcus pneumoniae; identical to SEQ ID NO: 56779

SEQ ID NO: 57660 - DNA, 810 bp, Streptococcus pneumoniae; identical to SEQ ID NO: 56778

SEQ ID NO: 57661 - DNA, 3084 bp, Streptococcus pneumoniae; identical to SEQ ID NO: 56779

SEQ ID NO: 57662 - DNA, 801 bp, Streptococcus pneumoniae; identical to SEQ ID NO: 56806

SEQ ID NO: 57663 - DNA, 2448 bp, Streptococcus pneumoniae; identical to SEQ ID NO: 56813

SEQ ID NO: 57664 - DNA, 810 bp, Streptococcus pneumoniae; identical to SEQ ID NO: 56778

SEQ ID NO: 57665 - DNA, 3024 bp, Streptococcus pneumoniae; identical to SEQ ID NO: 56785

SEQ ID NO: 57666 - DNA, 810 bp, Streptococcus pneumoniae; identical to SEQ ID NO: 56778

SEQ ID NO: 57667 - DNA, 3084 bp, Streptococcus pneumoniae; identical to SEQ ID NO: 56779

SEQ ID NO: 57668 - DNA, 801 bp, Streptococcus pneumoniae; identical to SEQ ID NO: 56806

SEQ ID NO: 57669 - DNA, 2448 bp, Streptococcus pneumoniae; identical to SEQ ID NO: 56813

SEQ ID NO: 57670 - DNA, 810 bp, Streptococcus pneumoniae; identical to SEQ ID NO: 56808

SEQ ID NO: 57671 - DNA, 3084 bp, Streptococcus pneumoniae
atgatagaatttgggaaaaagtcattatatttttcaaaattagtgcgttcaaaggcaaagatgattgaatttgaaattcctttagaaagtcatattccaatttctgaggatgctcaaaaatcatttcttggggcattagcaattgctgcagatactgctaggaagtattttgaagattatatcaatcataagagttttgattcacaattaaaaaatcaattacacaatgttgctgaatattttgatgcattgctggtgtcaggattaggaaattcagctgaatatcaagactatattgcaatactaggtaccacagcttattatctaggcgattataatggtagttcgagagttatggttaactacatatcggatgatatgcagttattagaagagagtataactcttgtcaaagtatttattgatgttattacagataaactctttttgaatcatacgccaatagaaggtaaatactctagtgagttaaatactctggtggaatcatatagaaattatattttatcaaaaactgagttttctatagatatttatagaggtttacaagataaagtatataggaatggaagcgatttttctgtaatcattgtaaattgtctcttagcagttgtatgtaaaaaaatagatagttcatcaacgaaattattacctgaattttcaggattagatttttctttatggcaggattatatacaatcaacaggaagtataaaggagctttggccatctcaaatcgaattagggaagcaagcaattttttcaggtaaatctggaagcgttcagatgccaacaagttcgggtaaaacagcctcaatcaatctaaccttaagatcagcattttattcaaatagaattgataatgcattgattgttgcaccttttagagcattatgtagagaaatatatcgtgatattaatgcacatttcgttgatgagaataatgtgattgttagtgaagtttttgatttaccggagattccacaggatttctcaatttttaatgatggtaaaaaaagagtttttatacttactccagaaaaattgttgtttttattgagaaatcatcaaagttttattgatgaaataggactttgtatatttgatgaagcacatctttttgatgatccaagtcgtggaacaaattttgaattactgttgtcaacggttaaacaaattttcccaaaaggaatacagaagattttaatatctgctgtaataccaaatagtgaagctataaatcggtggtttaacgaagatggagtaattgtttctaataattcgattaaaacaacagagaaaagagttgcgtttagtgatttaaacgggagtaatgagcaattatatttcatagatcctattacatttgaagaagaattttttgttccacgtactgttagtgttagtgaattagagcagcttggaaaagaacgcaaacaaaaagtttttccagaactgacaaacgcaaatgatataagtatttattatgggactaagctaattaataatggtggagtaggaattttttgtggaagaaaagacacggtcaatgttattttacgaagatttatagacttaaataatagaaattatgatctaactgatttcttaaaaaactcagataggtctgaagttgaaaaaataggaaatttaattggtcaaaatttaggatatgatagtgttgaatatacatgtagtcagctaggagttttttcacatcattcaggtatacctatggggatacgcattgctatagagtatgctttttcaaaaagtaaaataaataatgtagtatgtacttcaaccttagcacaaggtataaacttacctattaaatacttgattatctcaagtgtgtatcaagcaggagatgcaataaaagttcgtgattttcagaatttgataggtagagcaggaagggctggaaaatatacagaaggaacaataattttaacagagcccaatatttataaattaccaaaaaataagtggaaaaaacaaaactataaagcattgttaaatcctattaatacagagggttgtcaaagtaatattctcagtattatacagtttaaatcagtagttccaactgattatcgattcgctcctataaaatttgatttttggaatttgattaaagagagatttgacagttctgtagactacagaacaaaaataaataatattttatcaaaattaaaaagaaagaacagtctttattttaaggattttaattctaagatagaccagattgataataccctaattgcaattgaaaattatattgcttctatgtatgctactgaattggagactgatagtttagctgaaaatacatttggatatttcttaggtaatgaagaggaaaaagaaaaaataaaagaattatttatcttgataaaatctaaaataattaccagttcagtagaaactgaaataattgcaaaaaactcaattggattatatcaatctgagttattaaaagaatgggttcaggaaaataaaacatctatcatttcttgtgagaaggaagaagagttattaggtgttttaaccaagaaaataatagatttttcaaataacaaagagatgagaaaactaagtatagaaaatctaaattatatttctcaactctggattaaggggatttcttattttcaaatattggaaagttgtactgaaaaatcaattagtattgagaaaagaggtaagtcaaaaccaattgatatgtctgacataatctctatttgtgataatggattagggtatgaaacatcaatggttttaaatgcgattaataatattcttgaaaaactagttggagaggaattgtacgtattgactatgttaataaagaggctgaaatatgggctacctctggaaaaagaaatcaatatctatgaattaggtttttcagatagaattgtggtccaagttattggtcaagagattaattctgtaagtaagaatcaaattagaaatgaaatcaaacagaaatcagctagactagaagataaattgagtgattttccaagttattatacacagataattaatgaaatgtaa

SEQ ID NO: 57672 - DNA, 810 bp, Streptococcus pneumoniae; identical to SEQ ID NO: 56778

SEQ ID NO: 57673 - DNA, 3084 bp, Streptococcus pneumoniae; identical to SEQ ID NO: 56779

SEQ ID NO: 57674 - DNA, 810 bp, Streptococcus pneumoniae; identical to SEQ ID NO: 56778

SEQ ID NO: 57675 - DNA, 3024 bp, Streptococcus pneumoniae; identical to SEQ ID NO: 56785

SEQ ID NO: 57676 - DNA, 810 bp, Streptococcus pneumoniae; identical to SEQ ID NO: 56778

SEQ ID NO: 57677 - DNA, 3024 bp, Streptococcus pneumoniae; identical to SEQ ID NO: 56785

SEQ ID NO: 57678 - DNA, 810 bp, Streptococcus pneumoniae; identical to SEQ ID NO: 56778

SEQ ID NO: 57679 - DNA, 3024 bp, Streptococcus pneumoniae; identical to SEQ ID NO: 56785

SEQ ID NO: 57680 - DNA, 810 bp, Streptococcus pneumoniae; identical to SEQ ID NO: 56778

SEQ ID NO: 57681 - DNA, 3024 bp, Streptococcus pneumoniae; identical to SEQ ID NO: 57641

SEQ ID NO: 57682 - DNA, 810 bp, Streptococcus pneumoniae; identical to SEQ ID NO: 56808

SEQ ID NO: 57683 - DNA, 3084 bp, Streptococcus pneumoniae; identical to SEQ ID NO: 57671

SEQ ID NO: 57684 - DNA, 624 bp, Streptococcus pneumoniae; identical to SEQ ID NO: 56980

SEQ ID NO: 57685 - DNA, 2448 bp, Streptococcus pneumoniae; identical to SEQ ID NO: 56813

SEQ ID NO: 57686 - DNA, 810 bp, Streptococcus pneumoniae; identical to SEQ ID NO: 56778

SEQ ID NO: 57687 - DNA, 3024 bp, Streptococcus pneumoniae; identical to SEQ ID NO: 56785

SEQ ID NO: 57688 - DNA, 810 bp, Streptococcus pneumoniae; identical to SEQ ID NO: 56778

SEQ ID NO: 57689 - DNA, 3024 bp, Streptococcus pneumoniae; identical to SEQ ID NO: 56785

SEQ ID NO: 57690 - DNA, 624 bp, Streptococcus pneumoniae; identical to SEQ ID NO: 56980

SEQ ID NO: 57691 - DNA, 2448 bp, Streptococcus pneumoniae; identical to SEQ ID NO: 56813

SEQ ID NO: 57692 - DNA, 810 bp, Streptococcus pneumoniae; identical to SEQ ID NO: 56778

SEQ ID NO: 57693 - DNA, 3024 bp, Streptococcus pneumoniae; identical to SEQ ID NO: 56785

SEQ ID NO: 57694 - DNA, 810 bp, Streptococcus pneumoniae; identical to SEQ ID NO: 56778

SEQ ID NO: 57695 - DNA, 3024 bp, Streptococcus pneumoniae; identical to SEQ ID NO: 56785

SEQ ID NO: 57696 - DNA, 810 bp, Streptococcus pneumoniae
atggaaaagatgcatagttatataaagtatttaattcatgaagatcctattattactgatgaaggtaagcaggttgagattcttcacttagacattcaagatgacccagaaatttttgaagattgggcaaaccaattcagaagaaattattgttctgatgatgaacttgctgaaatgataggttttatgaatatctcccctaaagagtatcttaaaaattttaaattaccctcggatagtggtattggtctttcaacgatgtcaggtgattttggagaaatattagtatctgattatcttcaaaatattgaagaatatgtggttcctaggactcgttatgatagtagagtcaataaagatacttcaactcaaggaagtgatgttctaggatataagcaagattcttcgaatgtatcgaatgatgaggttgtagttattgaagtaaaatcatcggcatctgattctagtagctctcaagcgaaaaataagcttcaagaagctattaatcattctgataaagattttgaacgattttcaacctcaattgtagccagctatttaaggttaaagaaatctaatagtgatcaagcaaatgtagtagaaagatttttaaacataacggataaaccatttaatgtaatctatggagctgttgcagtctactccaatcaatcatatgatattgatgttatcaagacagtagtttcaaaaaaacacagagattttcagaaattacgactattggtcattcattctgatgaattaatgaaatttattagagaactttattcgaaagcgagtgaggtatga

SEQ ID NO: 57697 - DNA, 3084 bp, Streptococcus pneumoniae
atgatagaatttgggaaaaagtcattatatttttcaaaattagtgcgttcaaaggcaaagatgattgaatttgaaattcctttagaaagtcatattccaatttctgaggatgctcaaaaatcgtttcttggggcattagcaattgctgcagatactgctaggaagtattttgaagattatatcaatcataagagttttgattcacaattaaaaaatcaattacacaatgttgctgaatattttgatgcattgctggtgtcaggattaggaaattcagctgaatatcaagactatattgcaatactaggtaccacagcttattatctaggcgattataatggtagttcgagagttatggttaactacatatcggatgatatgcagttattagaagagagtataactcttgtcaaagtatttattgatgttattacagataaactctttttgaatcatacgccaatagaaggtaaatactctagtgagttaaatactctggtggaatcatatagaaattatattttatcaaaaactgagttttctatagatatttatagaggtttacaagataaagtatataggaatggaagcgatttttctgtaatcattgtaaattgtctcttagcagttgtatgtaaaaaaatagatagttcatcaacgaaattattacctgaattttcaggattagatttttctttatggcaggattatatacaatcaacaggaagtataaaggagctttggccatctcaaatcgaattagggaagcaagcaattttttcaggtaaatctggaagcgttcagatgccaacaagttcgggtaaaacagcctcaatcaatctaaccttaagatcagcattttattcaaatagaattgataatgcattgattgttgcaccttttagagcattatgtagagaaatatatcgtgatattaatgcacatttcgttgatgagaataatgtgattgttagtgaagtttttgatttaccggagattccacaggatttctcaatttttaatgatggtaaaaaaagagtttttatacttactccagaaaaattgttgtttttattgagaaatcatcaaagttttattgatgaaataggactttgtatatttgatgaagcacatctttttgatgatccaagtcgtggaacaaattttgaattactgttgtcaacggttaaacaaattttcccaaaaggaatacagaagattttaatatctgctgtaataccaaatagtgaagctataaatcggtggtttaacgaagatggagtaattgtttctaataattcgattaaaacaacagagaaaagagttgcgtttagtgatttaaacgggagtaatgagcaattatatttcatagatcctattacatttgaagaagaattttttgttccacgtactgttagtgttagtgaattagagcagcttggaaaaaaacgcaaacaaaaagtttttccagaactgacaaacgcaaatgatataagtatttattatgggactaagctaattaataatggtggagtaggaattttttgtggaagaaaagacacggtcaatgttattttacgaagatttatagacttaaataatagaaattatgatctaactgatttcttaaaaaactcagataggtctgaagttgaaaaaataggaaatttaattggtcaaaatttaggatatgatagtgttgaatatacatgtagtcagctaggagttttttcacatcattcaggtatacctatggggatacgcattgctatagagtatgctttttcaaaaagtaaaataaataatgtagtatgtacttcaaccttagcacaaggtataaacttacctattaaatacttgattatctcaagtgtgtatcaagcaggagatgcaataaaagttcgtgattttcagaatttgataggtagagcaggaagggctggaaaatatacagaaggaacaataattttaacagagcccaatatttataaatcaccaaaaaataagtggaaaaaacaaaactataaagcattgttaaatcctattaatacagagggttgtcaaagtaatattctcagtattatacagtttaaatcagtagttccaactgattatcgattcgctcctataaaatttgatttttggaatttgattaaagagagatttgacagttctgtagactacagaacaaaaataaataatattttatcaaaattaaaaagaaagaacagtctttattttaaggattttaattctaagatagaccagattgataataccctaattgcaattgaaaattatattgcttctatgtatgctactgaattggagactgatagtttagctgaaaatacatttggatatttcttaggtaatgaagaggaaaaagaaaaaataaaagaattatttatcttgataaaatctaaaataattaccagttcagtagaaactgaaataattgcaaaaaactcaattggattatatcaatctgagttattaaaagaatgggttcaggaaaataaaacatctatcatttcttgtgagaaggaagaagagttattaggtgttttaaccaagaaaataatagatttttcaaataacaaagagatgagaaaactaagtatagaaaatctaaattatatttctcaactctggattaaggggatttcttattttcaaatattggaaagttgtactgaaaaatcaattagtattgagaaaagaggtaagtcaaaaccaattgatatgtctgacataatctctatttgtgataatggattagggtatgaaacatcaatggttttaaatgcgattaataatattcttgaaaaactagttggagaggaattgtacgtattgactatgttaataaagaggctgaaatatgggctacctctggaaaaagaaatcaatatctatgaattaggtttttcagatagaattgtggtccaagttattggtcaagagattaattctgtaagtaagaatcaaattagaaatgaaatcaaacagaaatcagctagactagaagataaattgagtgattttccaagttattatacacagataattaatgaaatgtaa

SEQ ID NO: 57698 - DNA, 810 bp, Streptococcus pneumoniae; identical to SEQ ID NO: 56778

SEQ ID NO: 57699 - DNA, 3024 bp, Streptococcus pneumoniae; identical to SEQ ID NO: 56785

SEQ ID NO: 57700 - DNA, 810 bp, Streptococcus pneumoniae; identical to SEQ ID NO: 56778

SEQ ID NO: 57701 - DNA, 3084 bp, Streptococcus pneumoniae; identical to SEQ ID NO: 56779

SEQ ID NO: 57702 - DNA, 801 bp, Streptococcus pneumoniae; identical to SEQ ID NO: 56806

SEQ ID NO: 57703 - DNA, 2448 bp, Streptococcus pneumoniae; identical to SEQ ID NO: 56813

SEQ ID NO: 57704 - DNA, 810 bp, Streptococcus pneumoniae; identical to SEQ ID NO: 56778

SEQ ID NO: 57705 - DNA, 3084 bp, Streptococcus pneumoniae; identical to SEQ ID NO: 56779

SEQ ID NO: 57706 - DNA, 810 bp, Streptococcus pneumoniae; identical to SEQ ID NO: 57696

SEQ ID NO: 57707 - DNA, 3084 bp, Streptococcus pneumoniae; identical to SEQ ID NO: 57697

SEQ ID NO: 57708 - DNA, 810 bp, Streptococcus pneumoniae; identical to SEQ ID NO: 56778

SEQ ID NO: 57709 - DNA, 3084 bp, Streptococcus pneumoniae; identical to SEQ ID NO: 56779

SEQ ID NO: 57710 - DNA, 810 bp, Streptococcus pneumoniae; identical to SEQ ID NO: 56778

SEQ ID NO: 57711 - DNA, 3084 bp, Streptococcus pneumoniae; identical to SEQ ID NO: 56779

SEQ ID NO: 57712 - DNA, 810 bp, Streptococcus pneumoniae; identical to SEQ ID NO: 57696

SEQ ID NO: 57713 - DNA, 3084 bp, Streptococcus pneumoniae; identical to SEQ ID NO: 57697

SEQ ID NO: 57714 - DNA, 810 bp, Streptococcus pneumoniae; identical to SEQ ID NO: 56778

SEQ ID NO: 57715 - DNA, 3024 bp, Streptococcus pneumoniae; identical to SEQ ID NO: 56785

SEQ ID NO: 57716 - DNA, 810 bp, Streptococcus pneumoniae; identical to SEQ ID NO: 56778

SEQ ID NO: 57717 - DNA, 3024 bp, Streptococcus pneumoniae; identical to SEQ ID NO: 56785

SEQ ID NO: 57718 - DNA, 801 bp, Streptococcus pneumoniae; identical to SEQ ID NO: 56806

SEQ ID NO: 57719 - DNA, 2448 bp, Streptococcus pneumoniae; identical to SEQ ID NO: 56813

SEQ ID NO: 57720 - DNA, 810 bp, Streptococcus pneumoniae; identical to SEQ ID NO: 56778

SEQ ID NO: 57721 - DNA, 3084 bp, Streptococcus pneumoniae; identical to SEQ ID NO: 56779

SEQ ID NO: 57722 - DNA, 810 bp, Streptococcus pneumoniae; identical to SEQ ID NO: 56778

SEQ ID NO: 57723 - DNA, 3024 bp, Streptococcus pneumoniae; identical to SEQ ID NO: 56785

SEQ ID NO: 57724 - DNA, 810 bp, Streptococcus pneumoniae; identical to SEQ ID NO: 56778

SEQ ID NO: 57725 - DNA, 3024 bp, Streptococcus pneumoniae; identical to SEQ ID NO: 56785

SEQ ID NO: 57726 - DNA, 624 bp, Streptococcus pneumoniae; identical to SEQ ID NO: 56980

SEQ ID NO: 57727 - DNA, 2448 bp, Streptococcus pneumoniae; identical to SEQ ID NO: 56813

SEQ ID NO: 57728 - DNA, 801 bp, Streptococcus pneumoniae; identical to SEQ ID NO: 56806

SEQ ID NO: 57729 - DNA, 2448 bp, Streptococcus pneumoniae; identical to SEQ ID NO: 56813

SEQ ID NO: 57730 - DNA, 810 bp, Streptococcus pneumoniae; identical to SEQ ID NO: 56778

SEQ ID NO: 57731 - DNA, 3084 bp, Streptococcus pneumoniae; identical to SEQ ID NO: 56779

SEQ ID NO: 57732 - DNA, 810 bp, Streptococcus pneumoniae; identical to SEQ ID NO: 56778

SEQ ID NO: 57733 - DNA, 3024 bp, Streptococcus pneumoniae; identical to SEQ ID NO: 56785

SEQ ID NO: 57734 - DNA, 810 bp, Streptococcus pneumoniae; identical to SEQ ID NO: 56778

SEQ ID NO: 57735 - DNA, 3024 bp, Streptococcus pneumoniae; identical to SEQ ID NO: 56785

SEQ ID NO: 57736 - DNA, 810 bp, Streptococcus pneumoniae; identical to SEQ ID NO: 56778

SEQ ID NO: 57737 - DNA, 3084 bp, Streptococcus pneumoniae; identical to SEQ ID NO: 56779

SEQ ID NO: 57738 - DNA, 810 bp, Streptococcus pneumoniae; identical to SEQ ID NO: 56778

SEQ ID NO: 57739 - DNA, 3084 bp, Streptococcus pneumoniae; identical to SEQ ID NO: 56779

SEQ ID NO: 57740 - DNA, 810 bp, Streptococcus pneumoniae; identical to SEQ ID NO: 56778

SEQ ID NO: 57741 - DNA, 3084 bp, Streptococcus pneumoniae; identical to SEQ ID NO: 56779

SEQ ID NO: 57742 - DNA, 801 bp, Streptococcus pneumoniae; identical to SEQ ID NO: 56806

SEQ ID NO: 57743 - DNA, 2448 bp, Streptococcus pneumoniae; identical to SEQ ID NO: 56813

SEQ ID NO: 57744 - DNA, 810 bp, Streptococcus pneumoniae; identical to SEQ ID NO: 56778

SEQ ID NO: 57745 - DNA, 3024 bp, Streptococcus pneumoniae; identical to SEQ ID NO: 56785

SEQ ID NO: 57746 - DNA, 810 bp, Streptococcus pneumoniae; identical to SEQ ID NO: 56778

SEQ ID NO: 57747 - DNA, 3084 bp, Streptococcus pneumoniae; identical to SEQ ID NO: 56779

SEQ ID NO: 57748 - DNA, 801 bp, Streptococcus pneumoniae; identical to SEQ ID NO: 56806

SEQ ID NO: 57749 - DNA, 2448 bp, Streptococcus pneumoniae; identical to SEQ ID NO: 56813

SEQ ID NO: 57750 - DNA, 810 bp, Streptococcus pneumoniae; identical to SEQ ID NO: 56778

SEQ ID NO: 57751 - DNA, 3024 bp, Streptococcus pneumoniae; identical to SEQ ID NO: 56785

SEQ ID NO: 57752 - DNA, 810 bp, Streptococcus pneumoniae; identical to SEQ ID NO: 56778

SEQ ID NO: 57753 - DNA, 3024 bp, Streptococcus pneumoniae; identical to SEQ ID NO: 56785

SEQ ID NO: 57754 - DNA, 810 bp, Streptococcus pneumoniae; identical to SEQ ID NO: 56778

SEQ ID NO: 57755 - DNA, 3084 bp, Streptococcus pneumoniae; identical to SEQ ID NO: 56779

SEQ ID NO: 57756 - DNA, 810 bp, Streptococcus pneumoniae; identical to SEQ ID NO: 56778

SEQ ID NO: 57757 - DNA, 3084 bp, Streptococcus pneumoniae; identical to SEQ ID NO: 56779

SEQ ID NO: 57758 - DNA, 810 bp, Streptococcus pneumoniae; identical to SEQ ID NO: 56778

SEQ ID NO: 57759 - DNA, 3024 bp, Streptococcus pneumoniae; identical to SEQ ID NO: 56785

SEQ ID NO: 57760 - DNA, 810 bp, Streptococcus pneumoniae; identical to SEQ ID NO: 56778

SEQ ID NO: 57761 - DNA, 3024 bp, Streptococcus pneumoniae; identical to SEQ ID NO: 56785

SEQ ID NO: 57762 - DNA, 810 bp, Streptococcus pneumoniae; identical to SEQ ID NO: 56778

SEQ ID NO: 57763 - DNA, 3024 bp, Streptococcus pneumoniae; identical to SEQ ID NO: 56785

SEQ ID NO: 57764 - DNA, 801 bp, Streptococcus pneumoniae; identical to SEQ ID NO: 56806

SEQ ID NO: 57765 - DNA, 2508 bp, Streptococcus pneumoniae; identical to SEQ ID NO: 56807

SEQ ID NO: 57766 - DNA, 810 bp, Streptococcus pneumoniae; identical to SEQ ID NO: 56778

SEQ ID NO: 57767 - DNA, 3024 bp, Streptococcus pneumoniae
atgattgaatttgatattcctttagaaagtcatttaccaatttcagaggatgctcaaaaatcgtttcttggggcactagcaattgttgcagatactgctaggaagtattttgaagtttatatcaatcgtaagagttttaatttacaattaaaaaatcaattacacaatgctgctgaatattttgatgcattgctggtgtcaggattaggaaattcagctgaatatcaagactatattgcaatattgggtaccacagcttattatctatgcgattataatggtagttcgagagttatgattaactatatatcggatgatatccagttattagaagactgtatgactcttataaaagtatttattgacgttgtaacggatgaactctttttgaatcatacgccaatagaaggtaaatactctagtgagttaaatactctagttgaatcatatagaaattatattttatcaaaaactgagttttctatagatatttatagagatttacaagataaagtatataggaatggaagcgatttttctgtaattattgtaaattgtctcttagcagttgtatgtaaaaaaataaatagttcatcaacgaaattattacctgaattttcaggattagatttttctttatggcaggattatatacaatcaacaggaagcataaaggagctttggccatctcaaatcgaattagggaagcaaggaattttttcaggtaaatctggaatcgttcagatgccaacaagttcgggtaaaacagcctcaatcaatctaactttaagatcagcattttattcaaatagaattgataatgcattgattgttgcaccttttagagcattatgtagagaaatatatcgagatattaatgcacatttcgttgatgagaataatgtgattgttagtgaagtttttgatttaccggagattccacaggatttctcaatttttaatgatggtaaaaaaagagtttttatacttactccagagaaattgttgtttttattgagaaatcatcaaagttttattgatgaaataggactttgtatatttgatgaagcacatctttttgatgatccaagtcgtggaaccaattttgaattactgttgtcaacggttaaacaaattttcccaaaagaaatacagaagattttaatttctgctgtaataccaaatagtgaagctataaatcggtggtttaacgaagatggagtaatcgtttctaataattcgattaaaacaacagagaaaagagttgcgtttagtgatttaaacgggagtaatgaacaattatatttcatagatcctattacatttgaagaagaattttttgttccacgtactgttagtgttagtgaattagagctgcttggaaaagaacgaaaacaaaaagtatttccagaactgtcaaatgcaaatgatataagtatttattatgggactaagctaattaataatggtggagtaggaattttttgtggaagaaaagacacagtcaatgttgttttgcgaagatttatagacttaaataataggaattatgatctgaccgatttcttaaaaaactcagataagtatgaagttgaaaaaataggaaacttacttggtcaaaatttaggatatgatagtgttgaatatgcatgtagtcagctgggagttttttcacatcattcaggtatacctatggggatacgcattgctatagagtatgctttttcaaaaagtaaaataaataatgtagtatgtacttcaaccttagcacaaggtgtgaacttacctattaaatacttgattatctcaagtgtgtatcaagcaggagatgcaataaaagttcgtgattttcagaatttgataggtagagcaggaagggctggaaaatatacagaaggaacaataattttaacagagcccaatatttataaatcaccaaaaaataagtggaaaaaacaaaactataaagcattgttaaatcctattaatacagagggttgtcaaagtaatattctcagtattatacagtttaaatcagtagttccaactgattatcgattcgctcctataaaatttgatttttggaatttgattaaagagagatttgacagttctgtagactacagaacaaaaataaataatattttatcaaaattaaaaagaaagaacagtctttattttaaggattttaattctaagatagaccagattgataataccctaattgcaattgaaaattatattgcttctatgtatgctactgaattggagactgatagtttagctgaaaatacatttggatatttcttaggtaatgaagaggaaaaagaaaaaataaaagaattatttatcttgataaaatctaaaataattaccagttcagtagaaactgaaataattgcaaaaaactcaattggattatatcaatctgagttattaaaagaatgggttcaggaaaataaaacatctatcctttcttgtgagaaggaagaagagttattaggtgttttaaccaagaaaataatagatttttcaaataacaaagagatgagaaaactaagtatagaaaatctaaattatatttctcaactctggattaaggggatttcttattttcaaatattggaaagttgtactgaaaaatcaattagtattgagaaaagaggtaagtcaaaaccaattgatatgtctgacataatctctatttgtgataatggattagggtatgaaacatcaatggttttaaatgcgattaataatattcttgaaaaactagttggagaggaattggacgtattgactatgttaataaagaggctgaaatatgggctacctctggaaaaagaaatcaatatctatgaattaggtttttcagatagaattgtggtccaagttattggtcaagagattaattctgtaagtaagaatcaaattagaaatgaaatcaaacagaaatcagctagactagaagataaattgagtgattttccaagttattatacacagataattaatgaaatgtaa

SEQ ID NO: 57768 - DNA, 801 bp, Streptococcus pneumoniae; identical to SEQ ID NO: 56806

SEQ ID NO: 57769 - DNA, 2448 bp, Streptococcus pneumoniae; identical to SEQ ID NO: 56813

SEQ ID NO: 57770 - DNA, 810 bp, Streptococcus pneumoniae; identical to SEQ ID NO: 56778

SEQ ID NO: 57771 - DNA, 3024 bp, Streptococcus pneumoniae; identical to SEQ ID NO: 56785

SEQ ID NO: 57772 - DNA, 810 bp, Streptococcus pneumoniae; identical to SEQ ID NO: 56778

SEQ ID NO: 57773 - DNA, 3024 bp, Streptococcus pneumoniae; identical to SEQ ID NO: 56785

SEQ ID NO: 57774 - DNA, 801 bp, Streptococcus pneumoniae; identical to SEQ ID NO: 56806

SEQ ID NO: 57775 - DNA, 2448 bp, Streptococcus pneumoniae; identical to SEQ ID NO: 56813

SEQ ID NO: 57776 - DNA, 801 bp, Streptococcus pneumoniae; identical to SEQ ID NO: 56806

SEQ ID NO: 57777 - DNA, 2448 bp, Streptococcus pneumoniae; identical to SEQ ID NO: 56813

SEQ ID NO: 57778 - DNA, 810 bp, Streptococcus pneumoniae; identical to SEQ ID NO: 56778

SEQ ID NO: 57779 - DNA, 3024 bp, Streptococcus pneumoniae
atgattgaatttgatattcctttagaaagtcatttaccaatttcagaggatgctcaaaaatcgtttcttggggcactagcaattgttgcagatactgctaggaagtattttgaagtttatatcaatcgtaagagttttaatttacaattaaaaaatcaattacacaatgctgctgaatattttgatgcattgctggtgtcaggattaggaaattcagctgaatatcaagactatattgcaatattgggtaccacagcttattatctatgcgattataatggtagttcgagagttatgattaactatatatcggatgatatccagttattagaagactgtatgactcttataaaagtatttattgacgttgtaacggatgaactctttttgaatcatacgccaatagaaggtaaatactctagtgagttaaatactctagttgaatcatatagaaattatattttatcaaaaactgagttttctatagatatttatagagatttacaagataaagtatataggaatggaagcgatttttctgtaattattgtaaattgtctcttagcagttgtatgtaaaaaaataaatagttcatcaacgaaattattacctgaattttcaggattagatttttctttatggcaggattatatacaatcaacaggaagcataaaggagctttggccatctcaaatcgaattagggaagcaaggaattttttcaggtaaatctggaatcgttcagatgccaacaagttcgggtaaaacagcctcaatcaatctaactttaagatcagcattttattcaaatagaattgataatgcattgattgttgcaccttttagagcattatgtagagaaatatatcgagatattaatgcacatttcgttgatgagaataatgtgattgttagtgaagtttttgatttaccggagattccacaggatttctcaatttttaatgatggtaaaaaaagagtttttatacttactccagagaaattgttgtttttattgagaaatcatcaaagttttattgatgaaataggactttgtatatttgatgaagcacatctttttgatgatccaagtcgtggaaccaattttgaattactgttgtcaacggttaaacaaattttcccaaaaggaatacagaagattttaatatctgctgtaataccaaatagtgaagctataaatcggtggtttaacgaagatggagtaattgtttctaataattcgattaaaacaacagagaaaagagttgcgtttagtgatttaaacgggagtaatgagcaattatatttcatagatcctattacatttgaagaagaattttttgttccacgtactgttagtgttagtgaattagagcagcttggaaaagaacgcaaacaaaaagtttttccagaactgacaaacgcaaatgatataagtatttattatgggactaagctaattaataatggtggagtaggaattttttgtggaagaaaagacacggtcaatgttattttacgaagatttatagacttaaataatagaaattatgatctaactgatttcttaaaaaactcagataggtctgaagttgaaaaaataggaaatttaattggtcaaaatttaggatatgatagtgttgaatatacatgtagtcagctaggagttttttcacatcattcaggtatacctatggggatacgcattgctatagagtatgctttttcaaaaagtaaaataaataatgtagtatgtacttcaaccttagcacaaggtataaacttacctattaaatacttgattatctcaagtgtgtatcaagcaggagatgcaataaaagttcgtgattttcagaatttgataggtagagcaggaagggctggaaaatatacagaaggaacaataattttaacagagcccaatatttataaatcaccaaaaaataagtggaaaaaacaaaactataaagcattgttaaatcctattaatacagagggttgtcaaagtaatattctcagtattatacagtttaaatcagtagttccaactgattatcgattcgctcctataaaatttgatttttggaatttgattaaagagagatttgacagttctgtagactacagaacaaaaataaataatattttatcaaaattaaaaagaaagaacagtctttattttaaggattttaattctaagatagaccagattgataataccctaattgcaattgaaaattatattgcttctatgtatgctactgaattggagactgatagtttagctgaaaatacatttggatatttcttaggtaatgaagaggaaaaagaaaaaataaaagaattatttatcttgataaaatctaaaataattaccagttcagtagaaactgaaataattgcaaaaaactcaattggattatatcaatctgagttattaaaagaatgggttcaggaaaataaaacatctatcctttcttgtgagaaggaagaagagttattaggtgttttaaccaagaaaataatagatttttcaaataacaaagagatgagaaaactaagtatagaaaatctaaattatatttctcaactctggattaaggggatttcttattttcaaatattggaaagttgtactgaaaaatcaattagtattgagaaaagaggtaagtcaaaaccaattgatatgtctgacataatctctatttgtgataatggattagggtatgaaacatcaatggttttaaatgcgattaataatattcttgaaaaactagttggagaggaattggacgtattgactatgttaataaagaggctgaaatatgggctacctctggaaaaagaaatcaatatctatgaattaggtttttcagatagaattgtggtccaagttattggtcaagagattaattctgtaagtaagaatcaaattagaaatgaaatcaaacaaaaatcagctagactagaagataaattgagtgattttccaagttattatacacagataattaatgaaatgtaa

SEQ ID NO: 57780 - DNA, 801 bp, Streptococcus pneumoniae; identical to SEQ ID NO: 56806

SEQ ID NO: 57781 - DNA, 2448 bp, Streptococcus pneumoniae; identical to SEQ ID NO: 56813

SEQ ID NO: 57782 - DNA, 810 bp, Streptococcus pneumoniae; identical to SEQ ID NO: 56778

SEQ ID NO: 57783 - DNA, 3024 bp, Streptococcus pneumoniae; identical to SEQ ID NO: 56785

SEQ ID NO: 57784 - DNA, 810 bp, Streptococcus pneumoniae; identical to SEQ ID NO: 56778

SEQ ID NO: 57785 - DNA, 3024 bp, Streptococcus pneumoniae; identical to SEQ ID NO: 56785

SEQ ID NO: 57786 - DNA, 810 bp, Streptococcus pneumoniae; identical to SEQ ID NO: 56778

SEQ ID NO: 57787 - DNA, 3084 bp, Streptococcus pneumoniae; identical to SEQ ID NO: 56779

SEQ ID NO: 57788 - DNA, 810 bp, Streptococcus pneumoniae; identical to SEQ ID NO: 56778

SEQ ID NO: 57789 - DNA, 3024 bp, Streptococcus pneumoniae; identical to SEQ ID NO: 56785

SEQ ID NO: 57790 - DNA, 801 bp, Streptococcus pneumoniae; identical to SEQ ID NO: 56806

SEQ ID NO: 57791 - DNA, 2448 bp, Streptococcus pneumoniae; identical to SEQ ID NO: 56813

SEQ ID NO: 57792 - DNA, 801 bp, Streptococcus pneumoniae; identical to SEQ ID NO: 56806

SEQ ID NO: 57793 - DNA, 2448 bp, Streptococcus pneumoniae; identical to SEQ ID NO: 56813

SEQ ID NO: 57794 - DNA, 810 bp, Streptococcus pneumoniae; identical to SEQ ID NO: 56778

SEQ ID NO: 57795 - DNA, 3084 bp, Streptococcus pneumoniae; identical to SEQ ID NO: 56779

SEQ ID NO: 57796 - DNA, 810 bp, Streptococcus pneumoniae; identical to SEQ ID NO: 56778

SEQ ID NO: 57797 - DNA, 3024 bp, Streptococcus pneumoniae; identical to SEQ ID NO: 56785

SEQ ID NO: 57798 - DNA, 801 bp, Streptococcus pneumoniae; identical to SEQ ID NO: 56806

SEQ ID NO: 57799 - DNA, 1704 bp, Streptococcus pneumoniae
atgccaacaagttcgggtaaaacagcctcaatcaatctaactttaagatcagcattttattcaaatagaattgataatgcattgattgttgcaccttttagagcattatgtagagaaatatatcgagatattaatgcacatttcgttgatgagaataatgtgattgttagtgaagtttttgatttaccggagattccacaggatttctcaatttttaatgatggtaaaaaaagagtttttatacttactccagagaaattgttgtttttattgagaaatcatcaaagttttattgatgaaataggactttgtatatttgatgaagcacatctttttgatgatccaagtcgtggaaccaattttgaattactgttgtcaacggttaaacaaattttcccaaaagaaatacagaagattttaatttctgctgtaataccaaatagtgaagctataaatcggtggtttaacgaagatggagtaatcgtttctaataattcgattaaaacaacagagaaaagagttgcgtttagtgatttaaacgggagtaatgaacaattatatttcatagatcctattacatttgaagaagaattttttgttccacgtactgttagtgttagtgaattagagctgcttggaaaagaacgaaaacaaaaagtatttccagaactgtcaaatgcaaatgatataagtatttattatgggactaagctaattaataatggtggagtaggaattttttgtggaagaaaagacacagtcaatgttgttttgcgaagatttatagacttaaataataggaattatgatctgaccgatttcttaaaaaactcagataagtatgaagttgaaaaaataggaaacttacttggtcaaaatttaggatatgatagtgttgaatatgcatgtagtcagctgggagttttttcacatcattcaggtatacctatggggatacgcattgctatagagtatgctttttcaaaaagtaaaataaataatgtagtatgtacttcaaccttagcacaaggtgtgaacttacctattaaatacttgattatctcaagtgtgtatcaagcaggagatgcaataaaagttcgtgattttcagaatttgataggtagagcaggaagggctggaaaatatacagaaggaacaataattttaacagagcccaatatttataaatcaccaaaaaataagagaaaaaaacaaaactatgaagcattgttaaatcctattaatacagagggttgtcaaagcaatattctcagtattatacagtttaaatcagtagttccaactgattatcgattcaatcccataaaatttgattattggagtttgattaaagagagatttgacagtactgtagactacagaacaaaaataaacaatattttatcagaattaaaagaacagaacagtccttattttaaggattttcattctaagatagaccagattgacaaaaccctaattgcaattgaaaattatattgcttctatgtatgctactgaattggagacagatagtttagctgaaaaaacttttggatatttcttaggtaatgaagaggaacaagaaaaaataaaagaattatttgtcttggtaaaatctaaaatagttactagtttagtagaaactgaaataattgcaaaaagctcaattgggttatatcaatctgagctattaaaagaatga

SEQ ID NO: 57800 - DNA, 825 bp, Streptococcus dysgalactiae subsp. equisimilis RE378; identical to SEQ ID NO: 56742

SEQ ID NO: 57801 - DNA, 3105 bp, Streptococcus dysgalactiae subsp. equisimilis RE378
ttgctcatgttgatagaaagtgcttcaaaatactatttgaaaaaagttcgagcaaaagcaaaaatgtatgagtatggcgtaccagaaaatcttcatatagaagttgaagaacaagcaaatgaccttatattgcttagcattggggttgttggtgacatttctaatgaaatatggaaaatgaaacaagctcctataattctttcgaaggaaaaggaagaagaattgtattttgtatcaaggttttttgatgcttattttcagtctgaaatgagtattgacttgaatccatattatatattgatgggagcggttacttattatttctgcaatatgaatggcagttcaaaagtaatgatgagtattatgcataatttgaataattttaaattttctgcttctggattagaaaatgtaataatatggttgttagatggcaactataagtttgatgtttccgatatagatgaaaaatacagaagctatattatgcaactaattaattatcacaacaggttttttgatagtgagaatttagaaaaagttcaatttgaagaatttagaaactatgtttatcattttgggaatgatagagaaatattatttacagatattattttagcaatattaaaaaagaaaatttataattcatgtattaatctaatgccattgtattctgaaattgataagaatgagtggattgcaacatttaaaagtaatgtgctgatgaaagaaatgtgggcatcccagatcttattgggggaaaaagggattttcaaaggaaaatcaggcgttattcaaatgccgacaagttcaggaaaaaccacatcagtttcccttgctatacaatctgcctttttatctaaaagaacatctattgtaattgtagtagctccatttagggcattatgtaaagaaatattgtttgatatggagaagttttttgcatttgatgaaaatataactataactgaattttctgatattcctgaacctagtgaaatagaattagtcacatctgagtcaattgtcaaaaaagtatttgttatgactccagaaaagttggcttatattttaaaacacaatacggaaataattgaaagtattaacatgattgtttttgatgaggctcatttgtttgatgatgaagcaagagggacggattatgaacttttattaacaactattaatagttatcttaaaccagatgcacagaaaatattagtttcagcagtaatttcgaatgctgaacagctaaacacatggattaacaaagatggtattgtaataaggaataatactattaagacatcagaaaaaacggtagcatttaatacatttacttccactaatatcaataatgcttatagtaatctttattttgtagaacctaataaaaatttagaggaagaattttatgtacctagagtagttcaaacaaaaaaactaaagaagatagatggagagagaaagttaagatattttcctgattttaagaataataagcaagatgtaggtatttactatgcaattaaattgattgcaaatgggaatatagctattttttgttcaaaaaaaggtactgtaaataatattctaaagagatttattgatttgaaagaaaggggcatctcgttagaggatttttctaccttatcagatgaaactgaatgtttaaaaattgcatatctaataaaagaacaccttggtgaaaacaatttatatatagcagcattaaatggtattgtagggcatcattcgggcgtgcctaacggggtaagaattgctgaagaatatgcattgaaaaaatccttaatccgttgtgtagtatgtacttctacgctggcacagggtgtaaatctacctattaaatatttaattgtatctagtatttatcaatcaaagcagataattaaggttagggattttcataatttgattggaagaactgcaagagcaggaaaagaaacagaagggacaatcattttaacagaagatatttataaaaatagtaaagaggcttataaattaaataattataaacgattacttaatgctgataattctgaggagtgttatagcaaccttttgaaattggttagagaagttgatttgggaaataatagagtaattccttttgactttttgaaaaaatatattgagtccagatattctaataaagcggaatatgctgaaacaaaaaaagacattcttgtatataaagaacaagagaaagaatatggtgaacacattttctataaaatgaatgaaatagaacatattctagtgtcattggagaattttatacttggatttgcagatatagaagatgagagttttgaaattataaaatccacatatggttactatttggcaaatgaagatgaaaaggaagaactaaaaaacatttataatctcattagaagcaatattgaaagtcttgaagttgctgacaggttgctttatagaaaaagtatgttaggtatattgacaatgaaagaattatatagattcgtagatgagaatttatatgaaatagcaaatgcggattttgatacattaattaatttggttgctaataaattaaaagaatctaaaaattgtaagcttatacctaagttgattgatgatagccatatttatgagctattgaaaatgtggattaatggtaaaagctatattcaaatctgggactattcaaagtcagtgaatttgctaattaaatgggggaaaaagagtaggaaaatctctttggaggatataataacattgtgtgattcagactttggatttgcctcattaacgataatacaggctattgtagagattctaaatactaaagattgcagtgaaaacatacaggaagctttaaatgatataatttatagaataagatatggcttaccgaataaagagtcagtatgtgtatatgaacttggctttgcagatagaattatttcacaaaaaattgttaatgaaataagaggttatgattgtagcacaaaaaagaaaacaaaatctgcaataaaaaataatagagaaaaactacgagaattattggcaaattatccatcatatttcatggatagactagaaaagctacgataa

SEQ ID NO: 57802 - DNA, 567 bp, Streptococcus dysgalactiae subsp. equisimilis AC-2713
atgtctggtgaatttggagaaatactggtatatgactatataaatttcactttaaaacattatgtcaccaggactagatatttggaaaaagtcaatccagatatgccggtatctggaagcgatgttataggttatcaagtgaaaaatattgataagccaagcaagacggatcacttaatagttgctgaagtaaaaactcgttcaagtaaatctggaaataaaaaaagtttgtgtgaaaagactgttaaagatgctataaaacactctgttaaagacagagttagactaggagagtctctaaatgctgaaaaaagaagattgtttaatcgcttgagaattgaagaggctaaaatagtagaaaggtttcaaaataaaacagataatccgttcataattgacttttttgcagttgctgtattggatagtgatttgtattcagaccaggtagttttggatgtggttaatagtcagcatgaaaatgtaaaatccacaagtatattgataattcattccaaagaattgctgctcttcttaagagatttatataggagggcttgctcatgttga

SEQ ID NO: 57803 - DNA, 3099 bp, Streptococcus dysgalactiae subsp. equisimilis AC-2713
atgttgatagaaagtgcttcaaaatactatttgaaaaaagttcgagcaaaagcaaaaatgtatgagtatggcgtaccagaaaatcttcatatagaagttgaagaacaagcaaatgaccttatattgcttagcattggggttgttggtgacatttctaatgaaatatggaaaatgaaacaagctcctataattctttcgaaggaaaaggaagaagaattgtattttgtatcaaggttttttgatgcttattttcagtctgaaatgagtattgacttgaatccatattatatattgatgggagcggttacttattatttctgcaatatgaatggcagttcaaaagtaatgatgagtattatgcataatttgaataattttaaattttctgcttctggattagaaaatgtaataatatggttgttagatggcaactataagtttgatgtttccgatatagatgaaaaatacagaagctatattatgcaactaattaattatcacaacaggttttttgatagtgagaatttagaaaaagttcaatttgaagaatttagaaactatgtttatcattttgggaatgatagagaaatattatttacagatattattttagcaatattaaaaaagaaaatttataattcatgtattaatctaatgccattgtattctgaaattgataagaatgagtggattgcaacatttaaaagtaatgtgctgatgaaagaaatgtgggcatcccagatcttattgggggaaaaagggattttcaaaggaaaatcaggcgttattcaaatgccgacaagttcaggaaaaaccacatcagtttcccttgctatacaatctgcctttttatctaaaagaacatctattgtaattgtagtagctccatttagggcattatgtaaagaaatattgtttgatatggagaagttttttgcatttgatgaaaatataactataactgaattttctgatattcctgaacctagtgaaatagaattagtcacatctgagtcaattgtcaaaaaagtatttgttatgactccagaaaagttggcttatattttaaaacacaatacggaaataattgaaagtattaacatgattgtttttgatgaggctcatttgtttgatgatgaagcaagagggacggattatgaacttttattaacaactattaatagttatcttaaaccagatgcacagaaaatattagtttcagcagtaatttcgaatgctgaacagctaaacacatggattaacaaagatggtattgtaataaggaataatactattaagacatcagaaaaaacggtagcatttaatacatttacttccactaatatcaataatgcttatagtaatctttattttgtagaacctaataaaaatttagaggaagaattttatgtacctagagtagttcaaacaaaaaaactaaagaagatagatggagagagaaagttaagatattttcctgattttaagaataataagcaagatgtaggtatttactatgcaattaaattgattgcaaatgggaatatagctattttttgttcaaaaaaaggtactgtaaataatattctaaagagatttattgatttgaaagaaaggggcatctcgttagaggatttttctaccttatcagatgaaactgaatgtttaaaaattgcatatctaataacagaacaccttggtgaaaacaatttatatatagcagcattaaatggtattgtagggcatcattcgggcgtgcctaacggggtaagaattgctgaagaatatgcattgaaaaaatccttaatccgttgtgtagtatgtacttctacgctggcacagggtgtaaatctacctattaaatatttaattgtatctagtatttatcaatcaaagcagataattaaggttagggattttcataatttgattggaagaactgcaagagcaggaaaagaaacagaagggacaatcattttaacagaagatatttataaaaatagtaaagaggcttataaattaaataattataaacgattacttaatgctgataattctgaggagtgttatagcaaccttttgaaattggttagagaagttgatttgggaaataatagagtaattccttttgactttttgaaaaaatatattgagtccagatattctaataaagcggaatatgctgaaacaaaaaaagacattcttgtatataaagaacaagagaaagaatatggtgaacacattttctataaaatgaatgaaatagaacatattctagtgtcattggagaattttatacttggatttgcagatatagaagatgagagttttgaaattataaaatccacatatggttactatttggcaaatgaagatgaaaaggaagaactaaaaaacatttataatctcattagaagcaatattgaaagtcttgaagttgctgacaggttgctttatagaaaaagtatgttaggtatattgacaatgaaagaattatatagattcgtagatgagaatttatatgaaatagcaaatgcggattttgatacattaattaatttggttgctaataaattaaaagaatctaaaaattgtaagcttatacctaagttgattgatgatagccatatttatgagctattgaaaatgtggattaatggtaaaagctatattcaaatctgggactattcaaagtcagtgaatttgctaattaaatgggggaaaaagagtaggaaaatctctttggaggatataataacattgtgtgattcagactttggatttgcctcattaacgataatacaggctattgtagagattctaaatactaaagattgcagtgaaaacatacaggaagctttaaatgatataatttatagaataagatatggcttaccgaataaagagtcagtatgtgtatatgaacttggatttgcagatagaattatttcacaaaaaattgttaatgaaataagaggttatgattgtagcacaaaaaagaaaacaaaatctgcaataaaaaataatagagaaaaactacgagaattattggcaaattatccatcatatttcatggatagactagaaaagctacgataa

SEQ ID NO: 57804 - DNA, 810 bp, Streptococcus equinus ATCC 700338
atggaaaagatgcatagttatataaagtatctaactcaagaagatcctattattactgatgaaggtaagcagattgagattcttcacttagacattcaagatgacccagaaatttttgaagattgggcaaaacaattcagaagaaattattgttctgatgatgaacttgctgaaatgataggttttatgaatatctcccctaaagagtatcttgaaaattttaaattaccctcggatagtggtattggcctttcaacgatgtcaggtgattttggagaaatattagtatctgattatcttcagtatattgaagaatatgtggttcctaggactcgttatgatagtaaagtcaataaagatacttcaactcaaggaagtgatgttctaggatataagcaagattcttcgaatgtatcgaatgatgaggtcgtagttgttgaagtaaaatcatcggcatcagattctagtagctctaaagcgaaaaataagcttcaagaagctattaatcattctgataaagattttgaacgattttcaacctcaattgtagccagctatttaaggttaaagaaatctaatagtgatcaagcaaatgtagtagaaagatttttaaacataacggataaaccatttaatgtaatctatggagctgttgcagtctactccaatcaatcatatgatattgatgttatcaagacagtagtttcaaaaaaacacagagattttcagaaattacgactattggtcattcattctgatgaattaatgaaatttattagagaactttattcgaaagcgagtgaggtatga

SEQ ID NO: 57805 - DNA, 3084 bp, Streptococcus equinus ATCC 700338
atgatagaatttgggagaaagtcattatatttttcaaaattagtgcgttcaaaggcaaagatgattgaatttgatattcctttagaaagtcatattccaatttcagaggatgctcaaaaatcgtttcttggggcactagcaattgttgcagatactgctaggaaatattttgaagattatatcaatcataagagttttgattcacaattaaaaaatcaattacacaatgttgctgaatattttgatgcattgctggtgtcaggattaggaaattcagctgaatatcaagactatattgcaatactaggtaccacagcttattatctaggtgattataatggtagttcgagagttatggttaactacatatcggatgatatgcagttattagaagagagtataactcttgtaagagtatttattgacgttataacagataaactctttttgaatcatacgccaatagaaggtaaatactctagtgagttaaatactctagtggaatcatatagaaattatattttatcaaaaactgagttttctatagatatttatagagatttacaagataaagtatataggaatggaagcgatttttctgtaatcattgtaaattgtctcttagcagttgtatgtaaaaaaatagatagttcatcaacgaaattattacctgaattttcaggattagatttttctttatggcaggattatatacaatcaacaggaagcataaaggagctttggccatctcaaatcgaattagggaagcaagcaattttttcaggtaaatctggaatcgttcagatgccaacaagttcgggtaaaacagcctcaatcaatctaactttaagatcagcattttattcaaatagaattgataatgcattgattgttgcaccttttagagcattatgtagagaaatatatcgagatattaatgcacatttcgttgatgagaataatgtgattgttagtgaagtttttgatttaccggagattccacaggatttctcaatttttaatgatggtaaaaaaagagtttttatacttactccagagaaattgttgtttttattgagaaatcatcaaagttttattgatgaaataggactttgtatatttgatgaagcacatctttttgatgatccaagtcgtggaaccaattttgaattactgttgtcaacggttaaacaaattttcccaaaagaaatacagaagattttaatttctgctgtaataccaaatagtgaagctataaatcggtggtttaacgaagatggagtaatcgtttctaataattcgattaaaacaacagagaaaagagttgcgtttagtgatttaaacgggagtaatgagcaattatatttcatagatcctattacatttgaagaagaattttttgttccacgtactgttagtgttagtgaattagagcagcttggaaaagaacgcaaacaaaaagtatttccagaactgacaaacgcaaatgatataagtatttattatgggactaagctaattaataatggtggagtaggaattttttgtggaagaaaagacacggtcaatgttgttttacgaagatttatagacttaaataataggaattatgatctaactgatttcttaaaaaactcagataggtctgaagttgaaaaaataggaaatttaattggtcaaaatttaggatatgatagtgttgaatatacatgtagtcagctaggagttttttcacatcattcaggtatacctatggggatacgcattgctatagagtatgctttttcaaaaagtaaaataaataatgtagtatgtacttcaaccttagcacaaggtgtaaacttacctattaaatacttgattatctcaagtgtgtatcaagcaggagatgcaataaaagttcgtgattttcagaatttgataggtagagcaggaagggctggaaaatatacagaaggaacaataattttaacagagcccaatatttataaatcaccaaaaaataagtggaaaaaacaaaactatgaagcattgttaaatcctattaatacagagggttgccaaagcaatattctcagtattatacagtttaaatcagtagttccaactgattatcgattcgatcctataaaatttgattattggagtttgattaaagagagatttgacagttctgtagactacagaacaaaaataaataatattttatcagaattaaaaggacagaacagtccttattttaaggattttaattcaaagatagaccagattgataataccctaattgcaattgaaaattatattgcttctatgtatgctactgaattggagactgatagtttagctgaaaatacttttggatatttcttaggtaatgaagaggagcaagaaaaaataaaagaattatttatcttgataaaatctaaaataattaccagtttagtagaaactgaaataattgcaaaaaactcaattggattatatcaatctgagttattaaaagaatgggttcaggaaaataaaacttctatcctttcttgtgagaaggaagaagatttattaggtgttttaactaagataataatagatttttcaaataacaaggagatgagaaaattaagtatagaaaatctaaattatatttctcaactctggattaagggtatttcttattttcaaatattggaaagttgtactgaaaaatcaattagtattgagaaaagaggtaagttaaaaccaattgatatgtctgacataatctctatttgtgataatggattagggtatgaaacatcaatggttttaaatgcgattaataatattcttgaagaactagttggagaggaattggacgtattgactatgttaataaagaggctaaaatatgggctacctctggaaaaagaaatcaatatctatgaattaggtttttcagatagaattgtggttcaagttattggtcaagagattaatgctgtaagtaagaatcaaattagaaatgaaatcaaacggaaatcagctagactagaagataaattgagtgattttccaagttattatacacagataattaatgaaatgtaa

SEQ ID NO: 57806 - DNA, 798 bp, Streptococcus vestibularis ATCC 49124
atggaaacgatgtatagttatatgaagtatctaattcaagaagaacctattattactgatgaaggtaagcagattgaggtttttcatttagacattcaagatgaaccagagatttttgaagattgggcaaaacaattcagaagaaattattgttcggatgaaaaattacaacatatgacatatgtaatggggatagaatcttcgaaatatttaaatgaaaataaactaccgtgtgtaccttcaacaaaatcaggtgattttggtgaaattttagtatctgattatctacaatattttgaaaactatcttgttcccagaactcgttttaatagcagagaaaataaagatagaccaactttaggaagtgatgcgttgggatatagatatgatcctaaagctccaggtaatgccgaagtcatagtcatagaagtgaaatcatcagcatcaaataagactgattttaaagctaaaaatagacttcaagaagctattaacgattctaacaaggactttgaaagattttctacatcaattgttgctagttatgaaaaattgtttaattcaaatcaagatgaagctaatattttatctagatttctaaatattacagataatccgtatcaagttacatatggagctgttgctattcactcgaatgtttcttttaatttggacactattaaacaagttattacgaaaaatcatgtggcgtgtgataaattaaaactgcttgtgatacattctgaaaaattgatggattttataaatgcactttatttgaaagcgagtgacgtatga

SEQ ID NO: 57807 - DNA, 1584 bp, Streptococcus vestibularis ATCC 49124
atgatagagtttggacaacgatcattgtattattcaaaacttgtgcggtctaaagcaaaaatgtttgagtttgctgttcctaaggagagtcatattcaaatttcagaagaagctcaaaaatcatttcttgtggcactagcaattgttgcagatactgctaggaagtattttgaagattatatcaatcataagcagtttagtttacaattaaaaaatcaattacagcacgctgctgaatattttgatgcattgctggcgtcaggattaggaaattcggctgaatatcaagactatattgcaatactgggtaccacagcttattatctaggcgattataatggtagttcgagagttatgattaactatatatcggatgatatccagttattagaagacagtatgactcttatcaaagtgtttattgacgttataatggatgaaccctttttgaatcatactccaatagaaggtaaatactctcgtgagttaaatactctagttgaatcatatagaaattatattttatcaaaaactgagttttctccagatgtttttagtgatttacaagatatagtatatagaactgggagtgatttttctgtaattattgtaaactgtcttttggcagtagtatgtaaaaaaataaatagttcatcaacaaaattactgcctgaattttcagatttagatttttcatcatggcaggattatatacaaacagaaggtagtataaaagagctttggccttctcaaattgaattaggaagaaaagggatattttcaggtaaatcgggaatagttcaaatgccaacaagttcaggtaaaacagcctcaatcaatctaatattaagatcagcattttattcaaatcgagtttataatgcattgattgttgcaccttttagagcattatgtagagaaatatatcgagatattaatacacatttcgtcgatgagaataatgtggttgttagtgaagtttttgatttaccagagattccacaggatttctcaatttttaatgatggtaaaaaaagagtttttatacttactccagagaagttgttatttttattgagaaatcatcaaagttttattgatgaaataggactttgtatttttgatgaagcacatctttttgatgatccaagtcgtggaaccaattttgaattactgttgtcaacagttaaacaaattttcccaaaagaaatacagaagattttaatatctgctgtaataccaaatagtgaagatataaatcggtggtttaacgaagatggagtaattgtttctaataattcgataaaaacaacagagaaaagagttgcgtttagtgatttaaacgggagtaatgagcaattatattttgtaaatcctattacatttgaagaagaattttttgttccacgtactattagtgtaagtagactagagcagcttggaaaagaacgtaaacaaaaagtatttccagaactaacaaacaaaaatgatataagtatctattatggcattaagctaattaataatggtggagtaggaatttttttgcggaagaaaagacacagtcagtgctgttttacgtaa

SEQ ID NO: 57808 - DNA, 810 bp, Enterococcus faecalis EnGen0311
atggatattccgaaattcattgattactttattcatgaagaaatcgttatcactgacaaaggaaaagatatctctgttataaaaattgaaataaatgatgatctgaccgttttcgaacaatgggcaagacatcttagagagcattattgttcacttgaagaattggatgaactaagagaaggtactggtctttctagagctgaattccttagagatatgaagtttcccaatccaaattttggattgggttcagcaacaatgtccggtgatttttcagaaatattaattgcagattacattgaatacatcttgaattatatagttccaagagtacgctacagacaaaaattcaatcgaaatacttccacacaaggaagtgacttaattgggtacaaagtagagtctattgaaactaatagtatcaatgatgaaatgttaattgttgaagtaaaagctagaaatagtgaatcaaatccagaagcaactctacaaaatgctgtagatcattctgcaaaagaccttgttagaatagctgaatctttaaatgcctcttacagaatgttaaagaactataatgaagatgaaggtatgcgtttagtaagaagatttcaaaatcctacagacagacctcataagagaacttttgctgcagcagctgttagttcggataaagctttttctagagagttattaaaagaaatcgatacttcagaacatcctagtccagatgttcagttaatagctgtacactctcctaaatttttagaatttattaaacaaatgtatgtgagggctgccaatgttaattga

SEQ ID NO: 57809 - DNA, 3138 bp, Enterococcus faecalis EnGen0311
atgttaattgaaaataattcaaaatattacttaaaaaaagttcaagcaaaatcaaaaatgtttgaatacaatgttcctcttgaagagcatatccaagtagaatatatggcacaagaattaatagtccttgcaatagcgacaattggtgatgcatctaattttatttgggataatagatatactgaattttcttcaaaattaaataatgaactatttgaaaatttaaatttcacatcaatttactttgattcactacttacttcagagattggtgaagcaagttataatgattattttggattattaggggcaatttctttctatctttcggatgcacttggaagtacaaaagtaatgataaacaagatagattgggcaatggatttagaaattaatgaaattgatacttttcttttatatctattagcagacagattggacgaattaaaggggtacgagttttccagtcaatatggtaatctcttctattatctaatatatgacttatctcaattttacttagatggtacacccattgattttgaaaaattaaatgacttaaaacaagaaatatatctatctcaaaatccacgagagattctttttggagattcattattggcagtttttattaaaaagtataaaaattctgctttgaatcttttgcccaattattctgatacgacaatacaagattgggaagatttattgttaaacaatcatacaataaaagaattgtggcctagtcaaattttgctaggagaaaagaatatttttaaaggtaaatctggagtcattcaaatgcctacgagttctggcaaaacaacttcaattggtttaataattagatcagcttttattacccatcgaacaaaacttgccgttgttgtggctccatttaaagctctctgcaaagaaataactctaaatttaatagaattcttttcaaatgatgaggtaatcataaacgaactgtcggatattgcagaaaaagatgatattgcgttctttgataatgatatcgctacaaacacattgattatactcactcctgaaaaattactgttcttaattagaaataatagtgaaattttggaagaacttaacttgattatttttgatgaagctcacttattcgatgatagctcgcgaggtactaattatgaattgcttgtttcaacaatcagatattacttaaatgaatcttcacaaaaaatactgatctcagcggttattgcgaatagtgaagtaatcaatgaatggttaaatggtactgatggagaagttatttctaacaacaatattatttcttcccaacgatcaatagcaataggtgattggatgggacaaactggacagttatattttctaaatcaagataatcatgacatagatgatttttatgtcccaagaattgttgatatacgtgaaataaatagacttgatagagaaagagcaaaaaggtattttcctgacgtggattttcgtaaaagaaaactcaataaaccttacgatatgcaaatttattatgcattaaaaatggttcacactggagcaacagctatattctctggaacaaaaaaaactgctgataagaccatcgaaagactacttgaacttgaagaaagaggactagatatatcagccttttcaaatgaagttagtcaaaatgagaatacaaaaatagcaagtcttattaatatgaacttaggaagtgatactgaatattatatttcagccttgaagggcatatttattcatcatggtaatattcctctaggaattcgattatcagttgaatatgcaatgtcgcagaatttaatcaattttgtagtttgtacttccaccttagctcaaggagtgaatttaccaattaaataccttattatttcaagtctctatcaaggaaaaagtcaaatgaaggttcgtgattttcacaatttattaggtagagtgggtagagcaggtaagcatattgaaggaacggttatattatcagaaccttttattcattctaacaaatcaaattggaaatggaacagatacaaaaatatgctagatattgataattcagaagacagtgagagtaatttattaaagcttgttaggcctattataattgataaattcccccctattaatctttggaatgtactgccacaaaagtatactaatcaagaacagtttaatgatgtaatcaataagataaaaaccgtaattagcaactcaaattttccgaataaaatatcagacttcaacttcgaattaaagataattttagatattttaaaagatgtcgaaaactatgtaatgtactttgtgaaatactttaaagattcaaatccaaattttactaatatggtaactcagcaaactttaggttatcatttggctagcgatagcgaaaaagaaaaattagttgaactgtttgaggtaattaagacttattctctttctttcactgaagctgaactatctctttattcaatatcctctttaggatttgataactctaaagtcttgtctcaatggatttcagagaaaattgaaaacattactcaagcaaggtcagaatttgaattgattgacataatctttcctcagttaatattattctcagaaaataatattataaataggattgatgatacttctatttttactcagatatgtgaattatggactcaaggacaaagctattctgatattttaaactattgtcaaagcaatcaattccaaattagtaagcgtaatcagctagttccgctcatattacaagatatcattgaaatatgtgataacatactagcttacagcactatattacctctaaatggagttgcaacatttatggaaaattccgaaaatgattcaacacttcatttgattaaaagtctacaaaagaaaatacgttatggacttcctagcaatctatcaataaatattttcgagcttggtttttctgatcgagtaattgctcaaattttggctcgaattattgaaaattcttcttcttttacaattacttcaattagtaaaaggataactaaagaattacttagacaaaataaacgagagattgaagaagcactaaaagtttttcctcaatattttctggatatattgagaaaaatataa

SEQ ID NO: 57810 - DNA, 810 bp, Enterococcus faecalis EnGen0370
atggatattccgaaattcattgattactttattcatgaagaaatcgttatcactgacaaaggaaaagatatctctgttataaaaattgaaataaatgatgatctgaccgttttcgaacaatgggcaagacatcttagagagcattattgttcacttgaagaattggatgaactaagagaaggtactggtctttctagagctgaattccttagagatatgaagtttcccaatccaaattttggattgggttcagcaacaatgtccggtgatttttcagaaatattaattgcagattacattgaatacatcttgaattatatagttccaagagtacgctacagacaaaaattcaatcgaaatacttccacacaaggaagtgacttaattgggtacaaagtagagtctattgaaactaatagtatcaatgatgaaatgttaattgttgaagtaaaagctagaaatagtgaatcaaatccagaagcaactctacaaaatgctgtagatcattctgcaaaagaccttgttagaatagctgaatctttaaatgcctcttacagaatgttaaagaactataatgaagaggaaggtatgcgtttagtaagaagatttcaaaatcctacagacagacctcataagagaacttttgctgcagcagctgttagttcggataaagctttttctagagagttattaaaagaaatcgatacttcagaacatcctagtccagatgttcagttaatagctgtacactctcctaaatttttagaatttattaaacaaatgtatgtgagggctgccaatgttaattga

SEQ ID NO: 57811 - DNA, 3138 bp, Enterococcus faecalis EnGen0370
atgttaattgaaaataattcaaaatattacttaaaaaaagttcaagcaaaatcaaaaatgtttgaatacaatgttcctcttgaagagcatatccaagtagaatatatggcacaagaattaatagtccttgcaatagcgacaattggtgatgcatctaattttatttgggataatagatatactgaattttcttcaaaattaaataatgaactatttgaaaatttaaatttcacatcaatttactttgattcactacttacttcagagattggtgaagcaagttataatgattattttggattattaggggcaatttctttctatctttcggatgcacttggaagtacaaaagtaatgataaacaagatagattgggcaatggatttagaaattaatgaaattgatacttttcttttatatctattagcagacagattggacgaattaaaggggtacgagttttccagtcaatatggtaatctcttctattatctaatatatgacttatctcaattttacttagatggtacacccattgattttgaaaaattaaatgacttaaaacaagaaatatatctatctcaaaatccacgagagattctttttggagattcattattggcagtttttattaaaaagtataaaaattctgctttgaatcttttgcccaattattctgatacgacaatacaagattgggaagatttattgttaaacaatcatacaataaaagaattgtggcctagtcaaattttgctaggagaaaagaatatttttaaaggtaaatctggagtcattcaaatgcctacgagttctggcaaaacaacttcaattggtttaataattagatcagcttttattacccatcgaacaaaacttgccgttgttgtggctccatttaaagctctctgcaaagaaataactctaaatttaatagaattcttttcaaatgatgaggtaatcataaacgaactgtcggatattgcagaaaaagatgatattgcgttctttgataatgatatcgctacaaacacattgattatactcactcctgaaaaattactgttcttaattagaaataatagtgaaattttggaagaacttaacttgattatttttgatgaagctcacttattcgatgatagctcgcgaggtactaattatgaattgcttgtttcaacaatcagatattacttaaatgaatcttcacaaaaaatactgatctcagcggttattgcgaatagtgaagtaatcaatgaatggttaaatggtactgatggagaagttatttctaacaacaatattatttcttcccaacgatcaatagcaataggtgattggatgggacaaactggacagttatattttctaaatcaagataatcatgacatagatgatttttatgtcccaagaattgttgatatacgtgaaataaatagacttgatagagaaagagcaaaaaggtattttcctgacgtggattttcgtaaaagaaaactcaataaaccttacgatatgcaaatttattatgcattaaaaatggttcacaatggagcaacagctatattctctggaacaaaaaaaactgctgataagaccatcgaaagactacttgaacttgaagaaagaggactagatatatcagccttttcaaatgaagttagtcaaaatgagaatacaaaaatagcaagtcttattaatatgaacttaggaagtgatactgaatattatatttcagccttgaagggcatatttattcatcatggtaatattcctctaggaattcgattatcagttgaatatgcaatgtcgcagaatttaatcaattttgtagtttgtacttccaccttagctcaaggagtgaatttaccaattaaataccttattatttcaagtctctatcaaggaaaaagtcaaatgaaggttcgtgattttcacaatttattaggtagagtgggtagagcaggtaagcatattgaaggaacggttatattatcagaaccttttattcattctaacaaatcaaattggaaatggaacagatacaaaaatatgctagatattgataattcagaagacagtgagagtaatttattaaagcttgttaggcctattataattgataaattcccccctattaatctttggaatgtactgccacaaaagtatactaatcaagaacagtttaatgatgtaatcaataagataaaaaccgtaattagcaactcaaattttccgaataaaatatcagacttcaacttcgaattaaagataattttagatattttaaaagatgtcgaaaactatgtaatgtactttgtgaaatactttaaagattcaaatccaaattttactaatatggtaactcagcaaactttaggttatcatttggctagcgatagcgaaaaagaaaaattagttgaactgtttgaggtaattaagacttattctctttctttcactgaagctgaactatctctttattcaatatcctctttaggatttgataactctaaagtcttgtctcaatggatttcagagaaaattgaaaacattactcaagcaaggtcagaatttgaattgattgacataatctttcctcagttaatattattctcagaaaataatattataaataggattgatgatacttctatttttactcagatatgtgaattatggactcaaggacaaagctattctgatattttaaactattgtcaaagcaatcaattccaaattagtaagcgtaatcagctagttccgctcatattacaagatatcattgaaatatgtgataacatactagcttacagcactatattacctctaaatggagttgcaacatttatggaaaattccgaaaatgattcaacacttcatttgattaaaagtctacaaaagaaaatacgttatggacttcctagcaatctatcaataaatattttcgagcttggtttttctgatcgagtaattgctcaaattttggctcgaattattgaaaattcttcttcttttacaattacttcaattagtaaaaggataactaaagaattacttagacaaaataaacgagagattgaagaagcactaaaagtttttcctcaatattttctggatatattgagaaaaatataa

SEQ ID NO: 57812 - DNA, 810 bp, Enterococcus faecalis EnGen0359; identical to SEQ ID NO: 57810

SEQ ID NO: 57813 - DNA, 3138 bp, Enterococcus faecalis EnGen0359; identical to SEQ ID NO: 57811

SEQ ID NO: 57814 - DNA, 810 bp, Enterococcus faecalis EnGen0244; identical to SEQ ID NO: 57810

SEQ ID NO: 57815 - DNA, 3138 bp, Enterococcus faecalis EnGen0244; identical to SEQ ID NO: 57811

SEQ ID NO: 57816 - DNA, 810 bp, Enterococcus faecalis EnGen0245; identical to SEQ ID NO: 57810

SEQ ID NO: 57817 - DNA, 3138 bp, Enterococcus faecalis EnGen0245; identical to SEQ ID NO: 57811

SEQ ID NO: 57818 - DNA, 810 bp, Enterococcus faecalis EnGen0247; identical to SEQ ID NO: 57808

SEQ ID NO: 57819 - DNA, 3138 bp, Enterococcus faecalis EnGen0247; identical to SEQ ID NO: 57809

SEQ ID NO: 57820 - DNA, 810 bp, Enterococcus faecalis EnGen0251; identical to SEQ ID NO: 57808

SEQ ID NO: 57821 - DNA, 3138 bp, Enterococcus faecalis EnGen0251; identical to SEQ ID NO: 57809

SEQ ID NO: 57822 - DNA, 810 bp, Enterococcus faecalis EnGen0303; identical to SEQ ID NO: 57810

SEQ ID NO: 57823 - DNA, 3138 bp, Enterococcus faecalis EnGen0303
atgttaattgaaaataattcaaaatattacttaaaaaaagttcaagcaaaatcaaaaatgtttgaatacaatgttcctcttgaagagcatatccaagtagaatatatggcacaagaattaatagtccttgcaatagcgacaattggtgatgcatctaattttatttgggataatagatatactgaattttcttcaaaattaaataatgaactatttgaaaatttaaatttcacatcaatttactttgattcactacttacttcagagattggtgaagcaagttataatgattattttggattattaggggcaatttctttctatctttcggatgcacttggaagtacaaaagtaatgataaacaagatagattgggcaatggatttagaaattaatgaaattgatacttttcttttatatctattagcagacagattggacgaattaaaggggtacgagttttccagtcaatatggtaatctcttctattatctaatatatgacttatctcaattttacttagatggtacacccattgattttgaaaaattaaatgacttaaaacaagaaatatatctatctcaaaatccacgagagattctttttggagattcattattggcagtttttattaaaaagtataaaaattctgctttgaatcttttgcccaattattctgatacgacaatacaagattgggaagatttattgttaaacaatcatacaataaaagaattgtggcctagtcaaattttgctaggagaaaagaatatttttaaaggtaaatctggagtcattcaaatgcctacgagttctggcaaaacaacttcaattggtttaataattagatcagcttttattacccatcgaacaaaacttgccgttgttgtggctccatttaaagctctctgcaaagaaataactctaaatttaatagaattcttttcaaatgatgaggtaatcataaacgaactgtcggatattgcagaaaaagatgatattgcgttctttgataatgatatcgctacaaacacattgattatactcactcctgaaaaattactgttcttaattagaaataatagtgaaattttggaagaacttaacttgattatttttgatgaagctcacttattcgatgatagctcgcgaggtactaattatgaattgcttgtttcaacaatcagatattacttaaatgaatcttcacaaaaaatactgatctcagcggttattgcgaatagtgaagtaatcaatgaatggttaaatggtactgatggagaagttatttctaacaacaatattatttcttcccaacgatcaatagcaataggtgattggatgggacaaactggacagttatattttctaaatcaagataatcctgacatagatgatttttatgtcccaagaattgttgatatacgtgaaataaatagacttgatagagaaagagcaaaaaggtattttcctgacgtggattttcgtaaaagaaaactcaataaaccttacgatatgcaaatttattatgcattaaaaatggttcacaatggagcaacagctatattctctggaacaaaaaaaactgctgataagaccatcgaaagactacttgaacttgaagaaagaggactagatatatcagccttttcaaatgaagttagtcaaaatgagaatacaaaaatagcaagtcttattaatatgaacttaggaagtgatactgaatattatatttcagccttgaagggcatatttattcatcatggtaatattcctctaggaattcgattatcagttgaatatgcaatgtcgcagaatttaatcaattttgtagtttgtacttccaccttagctcaaggagtgaatttaccaattaaataccttattatttcaagtctctatcaaggaaaaagtcaaatgaaggttcgtgattttcacaatttattaggtagagtgggtagagcaggtaagcatattgaaggaacggttatattatcagaaccttttattcattctaacaaatcaaattggaaatggaacagatacaaaaatatgctagatattgataattcagaagacagtgagagtaatttattaaagcttgttaggcctattataattgataaattcccccctattaatctttggaatgtactgccacaaaagtatactaatcaagaacagtttaatgatgtaatcaataagataaaaaccgtaattagcaactcaaattttccgaataaaatatcagacttcaacttcgaattaaagataattttagatattttaaaagatgtcgaaaactatgtaatgtactttgtgaaatactttaaagattcaaatccaaattttactaatatggtaactcagcaaactttaggttatcatttggctagcgatagcgaaaaagaaaaattagttgaactgtttgaggtaattaagacttattctctttctttcactgaagctgaactatctctttattcaatatcctctttaggatttgataactctaaagtcttgtctcaatggatttcagagaaaattgaaaacattactcaagcaaggtcagaatttgaattgattgacataatctttcctcagttaatattattctcagaaaataatattataaataggattgatgatacttctatttttactcagatatgtgaattatggactcaaggacaaaactattctgatattttaaactattgtcaaagcaatcaattccaaattagtaagcgtaatcagctagttccgctcatattacaagatatcattgaaatatgtgataacatactagcttacagcactatattacctctaaatggagttgcaacatttatggaaaattccgaaaatgattcaacacttcatttgattaaaagtctacaaaagaaaatacgttatggacttcctagcaatctatcaataaatattttcgagcttggtttttctgatcgagtaattgctcaaattttggctcgaattattgaaaattcttcttcttttacaattacttcaattagtaaaaggataactaaagaattacttagacaaaataaacgagagattgaagaagcactaaaagtttttcctcaatattttctggatatattgagaaaaatataa

SEQ ID NO: 57824 - DNA, 810 bp, Enterococcus faecalis EnGen0298; identical to SEQ ID NO: 57810

SEQ ID NO: 57825 - DNA, 3138 bp, Enterococcus faecalis EnGen0298; identical to SEQ ID NO: 57811

SEQ ID NO: 57826 - DNA, 810 bp, Enterococcus faecalis EnGen0311; identical to SEQ ID NO: 57808

SEQ ID NO: 57827 - DNA, 3138 bp, Enterococcus faecalis EnGen0311; identical to SEQ ID NO: 57809

SEQ ID NO: 57828 - DNA, 810 bp, Enterococcus faecalis EnGen0293; identical to SEQ ID NO: 57808

SEQ ID NO: 57829 - DNA, 3138 bp, Enterococcus faecalis EnGen0293; identical to SEQ ID NO: 57809

SEQ ID NO: 57830 - DNA, 819 bp, Enterococcus columbae DSM 7374 = ATCC 51263
atgttttttgacaacagtaaatatttcgtttttgaaaaagaactttattcttctcaaggcgataaaataaatatctataaattagctaatgaattgttggatgatgatagtttaaatacatgggcatctagtttgagaaataattattgtgaagaacatttgctagattcattgattaatggaacaggtctatcaaaagaagaatacttaaaaaaaatggtatttcccaatccttcagtttctcaaggtgcagcaactatgtcaggagaattcggagaaatattaatatttgattacataaattttgttttaaattattatgttacaagaactagatatttagataaaataaatcccaatatgcctgttcctggtagtgatgttatgggctacaagatacaggatataagtaaaccaagtaaatcagatcaattgattgttgcagaagtgaaaactcgttctagtataaatggaaaaaatttatgtgaaaaaaccgttagtactgctattgatcattcggttaaagatagaattagaataggagagtctttaaacgcagaaaagaggaggctgcttaatcgttcaaaattcatagaagctaaagttgtagaacgatttcaaaataagacagacaatccatttgtgataaatttttttgctgtagctgtattagatagcgatgtatattcaaatcaagatgttttgagtgctatagatagtcatcatgaaataatcggcactacaaatatattggtaattcattcaaaagaattaaagcactttttaagagatttatataggagggcttgcatatgttga

SEQ ID NO: 57831 - DNA, 3096 bp, Enterococcus columbae DSM 7374 = ATCC 51263
atgttgatagaaaatacttccaagtattttttaaaaaaaatcagagcaaaagcaaaaatgtatgaatatggtgtgccaaaggatattcatattaaagttgaagaacaggctaatgatcttatactactttgtattggaatagttggagatattgctgatgaaatatgtaagatgaaagaattaccaataaatctgtcatccgaaaataaagataaattatattttgcttcgaaatttttcgattcctattttcaatcgaaaatggatttaaatatgaatccatatcatatattaatggcatcggttacttattatttttgtaatatgaatggtagttcaaaagtcatgatgactactatgcctaagcaatcagattttaacttttatgcatcaggattggaaaaactaataatgtggttattgaatgatgatataagatttgatattaatgacattgatgcgaaatatattgattacgctagaataatagtggattatcataattcattttttgaatgtaaaaatcctgaagaacctaattttgaggaacttagaaattttgtatatcagattggaaactatcgagaaattttatttgtagatataattcttgccatagtaaaaaagaaagtgtacaattcttgcattaatttaatgcctttgtattcggatattaataaagaacattggtttgaaactttcaagaataataagatgataaaagaaatgtggccttctcaaattttgttaggggaagaaaatatttatagtggaaaatctggtgttattcaaatgccaacaagttcagggaaaacaacctctgttgcccttactatacagtctgcctttttgtcaggtagaacatctattgcaattattgttgcaccgtttagagcattatgtaaagaaataatgtttgatatggaaaagttctttgagtttgatgattctataactataacagaattttcggatatccctgaacttaatgaaatggaattggctacattagaatctattaacaaaaaagtatttgttatgactccagagaagttagcttacattttaaaacataatcaaaagataactgaaagtattggaatgataatttttgatgaagcacatttgtttgatgatgagaaaagaggcacagattacgaacttcttttggcatctatcaataactatattaaaccgaatgcacagaaattattaatatcagcagttatttcaaatgccaatcaattaaatgattggattaataatgaaggtgttgtgataagaaataatgcgattaaagcatcagagaaaacagttgcgtttaataagtttacttcctttaattctgacacagtatatagtaatctttattttgtagatttagataaatatttagaagaagaattctatgtgcctcgtgtcgttcaaatattaaaattaaataaaaaaggtgcagagagaaaaaatagatattttcccgattttaaaaataaacaggatgttggaatttattattctattaaattagttacaaacggtagtgttgcaattttctgttccaagaaagatactgtaaataaaatactattgagatttattgatttaaaagaaagagggatttcttttgataattttaatagagtatcaaatgaattagaatgtctcaaaattgcaaatttaataagggaacatttgggtggaaatgagctatacacagctgcattaaatggtattattggacatcatgcaggtataccgaatggaataagaattgctgaagaatatgccttaaagaaagcattagttcgttgcgttgtatgtacttcaacattagcacaaggggtaaatttaccaattaaatatttaatagtatccagcatatatcaatcaaaccatataattaaagttagagattttcataatttaattggaagaacagctagagcaggaaaggaaactgaaggaactatcatcttgacagaagatgtgtataaaaacgagaaaaaaggttatcaatttaataattataagcatcttcttaatgcagacaactctgaagaatgttctagtaaccttttaaaattggtcaggaatattgatttagataataaacgttatatatcatcggactatattaagaaatatattaccttaagatattcttcatatgcagattttaataatctaagaaataaaatctttgaatttaaagagaaagaaaaaaagtacggtgttgcagtttttgaaaaaatgaatgatattgaacatattctcgtatctctagaaaattttatacttgattttttagatgctgaagatgatagtttggaaataattcagtctacttatggttattttttagctaatgaagatgaaaaaaaggaattaaaaaatatctatgatttaataaaaagtaatattaatcagctagaagttagtgataaattgatttataagaaaagtatgatagggataatgaggatgcagaaactatcaaaatttatagatgacaatttatatgagattgtcaatgctgattttgatatactaataaagttgataagtggtagattaaaagaaattgaagattgtaagattatacctaagctttttgaaaaagagtatgtttatgaattgttaaaaatgtggcttgatggtacaagttatttaaaaatatgggaatatgcaacaaaagtaaaactaaaagttagacgcggaaaaaatagcagaggtatatcattggaagatatagtattactgtgcgattcagattttggatattcctctttaactataatccaagcaattattgaaatattaaatactaaagattgtggagaaaatatacaaagggaattgaacgaaataattcaaagaataaggtatggtgttcctaataaagcaacagcatacatatatgaacttgggtttgcggatagaattatttcacaaaaactttttgaagtaataaaagattttaattgcgacaataaaaaacaagtaaaaaatgcattaaaaaagaacaaagaagagataaaaaaaatattgaataactatccttcatattatatgaacagattggaattaattagataa

SEQ ID NO: 57832 - DNA, 819 bp, Enterococcus columbae DSM 7374 = ATCC 51263; identical to SEQ ID NO: 57830

SEQ ID NO: 57833 - DNA, 3096 bp, Enterococcus columbae DSM 7374 = ATCC 51263; identical to SEQ ID NO: 57831

SEQ ID NO: 57834 - DNA, 795 bp, Lactococcus lactis subsp. cremoris
atgtatgaaaaagaaaatgatttaaaagaaaatcaaaatccattattagtttctcttgacgtttttgaggaaaaaactgatagtaatgttccacatacagtattacttgagaatggtaataatgatgttttgatcgatcatattgttcccctgattaaaaatcatcacattgatcctaagacattgttacgccaccaagagttaatcaaaacatttagaatatcaaacctaccattaacctcgattcgttccccctatcctaaaagtctcactactcaaaaaggtaattttgcagaaatatttttagcagaatatttaacatctacaagcagtgttgaacttcccttatatagactaaggtataatccaaatccagatcagtcaatgaaaggtgacgatgttcttttatttgatttagatgcagaacctgtaaggattattgttggagaatcaaaatttagaggaagtccagataagtctgctgttatagaaatggtagaggggctaattcgttccaatagggaaggattacccatttcattaatgtttgtttcagaaatgttgattaaagaagataagccagagatggctaaaaaggttcaaaattgtgcattgttatttgctactaataagttgattattgaatatgttggtttgttaatgggaaaccaaaatgctaaaaatccaataaataaacacacgcctaatgtacttcgaaatttattaatgatttctttaggtattaaaaatcctgaaactataattaaaacatcgtttgaaagattggaggactaa

SEQ ID NO: 57835 - DNA, 3321 bp, Lactococcus lactis subsp. cremoris
gtgagtctgcctactgagtatattagagaacttctagcaactatttctaatgataaaatagacaatattataactcaaacagatgctagaagaattttacaagaagttaaagaggaggatagaaactatcctaactttgatatatcgttaaccgataaagcaactcatatagcatatttgttaatatcttgtggatgttcactgctagaacaagaagacattagatcagtcgaaggattacttatattagaaaaagcaggaaagatattatatgataatttcaaatttaatttagaagaaacagatacaaagaataataatttgcttatttcaggtatgactttgtatgctgcaaaacaattttcacgctcattcatagtcttagataatgtaaatttagaatttccaatcgggaaaatgattattctatttttgaaaaaagattttgtgtctttatctcaaatgtcaagtaatattttttttagctatgaaactgaagagttggatatacaaggatttaatacttggctaatttcccatgaaattgcacgatgcttcttaataatttgtgacttcatgtatacaggaaataacgataattttatgcttatcaatgatattttggaaaaattagaaaaaatttctttggaaagtaacttaaccttaaattggctaattatccgtcttctaaaaattattttttcaacttatcaagatgtaactttttggtcaacattacctccatttttaccacttagttctttgacttcaaattatatccgactactatgtagcttaaaagctccaattacagaactttggccatctcaaacagcatcacttccactagctttaggaaataatactggaggagttattaatctacgaacaagtggtggtaaaactcgtgttgcagagctagctatcttaaaaatggtgaatgaaaacccaacgtcaaaggttttatatcttgcaccatttagatcattagcttttgaaatcgaacagagccttagtaaaatcttggaaccattagatattactgtatcacaattatatggtggatctactgccaatgtatctgattttgagattatcggtttttcacaagttattattgctacacctgaaaaagcaaaggcacttattcgttctggaacagaattagaaaatgaaattaaactaatcataattgatgaaggtcatttatttggtgcagaaaaaaggtatataaaaaatgaaatattctttaatcatttacagaaaatttcagatttaaaaggtataagaattttacttttatcggcagttctacctaatgcgccagaattagcacaatggcttactaaagattctaatcttgtagcaaagtctgattggaaaccttcattagaaagattaggattacttatctgggatggcaatcaagttagtcttgagtggaaaagtgagggcttaccttttaatccgagctttataaaaaaggcacctttaggatatggaagaagaagaaatccttttcctaataataaaggagaagcagtagccgctacagctattcgattgtctaaaattgggactgtaatgatatattcagcaagagcaaatgcaataaaaggtttagccgaaaatgtattacgagggttagggcaaaatcctaaagactttccttgggattttgatcagtggaaaatctttgaaaatatatgcaaggaagagttatctgatgacgatatcgtattagaggctgctacaaaaggaattatatgccatagtaatcgattaccaacacaagttagaattgcaatagaaaaacttatgcgttcaaaagaacccctgattattatagcctcttcaacccttgggcaaggagtcaatataggaatttcgacagttatagtatccagcccatattacagtgataaacctataaataacagagatttttggaatatttgtggacgggcaggacgggctttttctgatgtagaagggaaaatactttatgcaatagatacttctaatgtgaggaaagaatggcaaagaaaaaaggactatcacttagcagaaaattactttaacaatcagcaaatggaaaaagttcaaagtggactcttgtttttacttaattatttcaatagtctttccaatcatctaggtattgatttttcttctctattagaaatgttagctaatgatttcataaaatctgacattccaaatgatactttaaacatgataaatcattattttgatcttatagatgacgaattgcttgcaatgcatgaaaatttaggaaatgactttaatttagattggattgatgatacattcaggaactctttagcaattattcaggcagatagggaaaacgaagatctttatatatcactactaaagtctagaacaagtgcattattaacaagaataccggatagaacaattagaaaaaaagccattgcttctggtgtgccattatctgtagcgagatctttaattaatgatagagaatattttcgagatctagcttcaaatcttattgattcaattcaggatgatgagataaatattgagttaattaatataattgtacaaaatatagaactttggagtatacaaaatgcaagttctgtctttgaaaatattccaaatcaatctgtacttaatgttatacgtaggccatggttgagcggtatgtcattaaataaaataagaaaaatagacgctgatatagatagtatagcaaaagattattatggatttaatctaccttggataataaatggtattgctcaaatatttgataatgaaactgaacaagaaattaacaaactatatagtaatcttgcaatacttattgaacttggattacctgacatgacagcagttaatatatacctagctgggattcgctctagaaatgtggcattggaactatctaacaaagaaatattcaatagtaaaaatgtgtcccaaataaaaaaaattcttactaattttcataatgaaaatattgaaataacagatgaagctaatttatgggttaatactttttcaaaaaacagtgatttattaggtaagcgagcaatatcttttccaacattcaaaattaagaatggcagttataatgggcgattatatatcagagaagcgaatcataaaatttttttaacatcagttgatgggtattatagcaatgaggtacattctacatcagacttaccatttattaaattagtaaaccgaccttatttatattttgagtcgattaataatatttggcatctaaaatctttaaatccacaggtacaaataaaataa

SEQ ID NO: 57836 - DNA, 795 bp, Lactococcus lactis subsp. lactis
atgtatgaaaaagaaaatgatttaaaagaaaatcaaaatccattattagtttctcttgacgtttttgaggaaaaaactgatagtaatgttccacatacagtattacttgagaatggtaataatgatgttttgatcgatcatattgttcccctgattaaaaatcatcacattgatcctaagacattgttacggcaccaagagttaatcaaaacatttagaatatcaaacctaccattaacctcgattcgttccccctatcctaaaagtctcactactcaaaaaggtaattttgcagaaatatttttagcagaatatttaacatctacaagcagtgttgaacttcccttatatagactaaggtataatccaaatccagatcagtcaatgaaaggtgacgatgttcttttatttgatttagatgcagaacctgtaaggattattgttggagaatcaaaatttagaggaagtccagataagtctgctgttatagaaatggtagaggggctaattcgttccaatagggaaggattacccatttcattaatgtttgtttcagaaatgttgattaaagaagataagccagagatggctaaaaaggttcaaaattgtgcattgttatttgctactaataagttgattattgaatatgttggtttgttaatgggaaaccaaaatgctaaaaatccaataaataaacacacgcctaatgtacttcgaaatttattaatgatttctttaggtattaaaaatcctgaaactataattaaaacatcgtttgaaagattggaggactaa

SEQ ID NO: 57837 - DNA, 3321 bp, Lactococcus lactis subsp. lactis
gtgagtctgcctactgagtatattagagaacttctagcaactatttctaatgataaaatagacaatattataactcaaacagatgctagaagaattttacaagaagttaaagaggaggatagaaactatcctaactttgatatatcgttaaccgataaagcaactcatatagcatatttgttaatatcttgtggatgttcactgctagaacaagaagacattagatcagtcgaaggattacttatattagaaaaagcaggaaagatattatatgataatttcaaatttaatttagaagaaacagatacaaagaataataatttgcttatttcaggtatgactttgtatgctgcaaaacaattttcacgctcattcatagtcttagataatgtaaatttagaatttccaatcgggaaaatgattattctatttttgaaaaaagattttgtgtctttatctcaaatgtcaagtaatattttttttagctatgaaactgaagagttggatatacaaggatttaatacttggctaatttcccatgaaattgcacgatgcttcttaataatttgtgacttcatgtatacaggaaataacgataattttatgcttatcaatgatattttggaaaaattagaaaaaatttctttggaaagtaacttaaccttaaattggctaattatccgtcttctaaaaattattttttcaacttatcaagatgtaactttttggtcaacattacctccatttttaccacttagttctttgacttcaaattatatccgactactatgtagcttaaaagctccaattacagaactttggccatctcaaacagcatcacttccaatagctttaggaaataatactggaggagttattaatctacgaacaagtggtggtaaaactcgtgttgcagagctagctatcttaaaaatggtgaatgaaaacccaacgtcaaaggttttatatcttgcaccatttagatcattagcttttgaaatcgaacagagccttagtaaaatcttggaaccattagatattactgtatcacaattatatggtggatctactgccaatgtatctgattttgagattatcggtttttcacaagttattattgctacacctgaaaaagcaaaggcacttattcgttctggaacagaattagaaaatgaaattagactaatcataattgatgaaggtcatttatttggtgcagaaaaaaggtatataaaaaatgaaatattctttaatcatttacagaaaatttcagatttaaaaggtataagaattttacttttatcggcagttctacctaatgcgccagaattagcacaatggcttactaaagattctaatcttgtagcaaagtctgattggaaaccttcattagaaagattaggattacttatctgggatggcaatcaagttagtcttgagtggaaaagtgagggcttaccttttaatccgagctttataaaaaaggcacctttaggatatggaagaagaagaaatccttttcctaataataaaggagaagcagtagccgctacagctattcgattgtctaaaattgggactgtaatgatatattcagcaagagcaaatgcaataaaaggtttagccgaaaatgtattacgagggttagggcaaaatcctaaagactttccttgggattttgatcagtggaaaatctttgaaaatatatgcaaggaagagttatctgatgacgatatcgtattagaggctgctacaaaaggaattatatgccatagtaatcgattaccaacacaagttagaattgcaatagaaaaacttatgcgttcaaaagaacccctgattattatagcctcttcaacccttgggcaaggagtcaatataggaatttcgacagttatagtatccagcccatattacagtgataaacctataaataacagagatttttggaatatttgtggacgggcaggacgggctttttctgatgtagaagggaaaatactttatgcaatagatacttctaatgtgaggaaagaatggcaaagaaaaaaggactatcacttagcagaaaattactttaacaatcagcaaatggaaaaagttcaaagtggactcttgtttttacttaattatttcaatagtctttccaatcatctaggtattgatttttcttctctattagaaatggtagctaatgatttcataaaatctgacattccaaatgatactttaaacatgataaatcattattttgatcttatagatgacgaattgcttgcaatgcatgaaaatttaggaaatgactttaatttagattggattgatgatacattcaggaactctttagcaattattcaggcagatagggaaaacgaagatctttatatatcactactaaagtctagaacaagtgcattattaacaagaataccggatagaacaattagaaaaaaagccattgcttctggtgtgccattatctgtagcgagatctttaattaatgatagagaatattttcgagatctagcttcaaatcttattgattcaattcaggatgatgagataaatattgagttaattaatataattgtacaaaatatagaactttggagtatacaaaatgcaagttctgtctttgaaaatattccaaatcaatctgtacttaatgttatacgtaggccatggttgagcggtatgtcattaaataaaataagaaaaatagacgctgatatagatagtatagcaaaagattattatggatttaatctaccttggataataaatggtattgctcaaatatttgataatgaaactgaacaagaaattaacaaactatatagtaatcttgcaatacttattgaacttggattacctgacatgacagcagttaatatatacctagctgggattcgctctagaaatgtggcattggaactatctaacaaagaaatattcaatagtaaaaatgtgtcccaaataaaaaaaattcttactaattttcataatgaaaatattgaaataacagatgaagctaatttatgggttaatactttttcaaaaaacagtgatttattaggtaagcgagcaatatcttttccaacattcaaaattaagaatggcagttataatgggcgattatatatcagagaagcgaatcataaaatttttttaacatcagttgatgggtattatagcaatgaggtacattctacatcagacttaccatttattaaattagtaaaccgaccttatttatattttgagtcgattaataatatttggcatctaaaatctttaaatccacaggtacaaataaaataa

SEQ ID NO: 57838 - DNA, 420 bp, Bacillus cereus 95/8201
atgaaaggggatgacgttttacttgttaacccagataaagttttattaggagaaagtaaatttcgttctactccaaataaacgtgctgttgaagaggcttctgaacttatgaaagataagttaactttgcctatgtctcttggttttattgcagatagattatttgaacaaggaaaagatgaattaggtgaagtgattttcgatcttcaatttaagatgagtagtatagaaatagatattaaaaatatagggtttttattatctactaaaaaggttcgtagtatcgtagaaaataacctttcttctccaaattctgattttatttttatttcattaggaatggatgacccagcagcttttttgaaaagtgtatttgactatgcagaaagtaatcttctggagggatcttatgaaacttga

SEQ ID NO: 57839 - DNA, 3249 bp, Bacillus cereus 95/8201
ttggaaaattttccacattacactgtaaatctagatgaaaaatgtacacatatagcatttagttatctcaattgtggatggcgcttttttttagagaaaatcagtgatgaagctacaaaatgtatggaaaaggcttctgaaatattggagtatttgtatgcctatagtgattgcgaaaagttatataaagagtattaccgtttagtatgctcattagcgtattatatatctgcacagtattctaaatcttttattatcttggggaaatataattctgattcatatatagggaaaataacaaaattatttttaactagaaactttatagaattagaaaggcaactggaaattaagtacttgaagaacgatgaagaaacttcaagtgagaataaggataacataatatatgaaaaaattttatctaatgcatttttacatataattaattttattcgcacagggaagatggaatctttggaaagttctaaagatatggttcgagatttaattactttggctgatataaataatgaaccacatatgtggtggtactttagactactatatttggtttttgaagaatatgaagatgggtctttgtggaaagtggttccaccgcttttagataatgatgatatatcagctaaatatatttatgctaatttatacaaaaagaagccaataactgaattttttaagtcgcaaagggaatgtttggacggagagttattaaagaacgatggtttcgtaattggaatgcctactagttcaggaaaaacaaaggttgctgaagtaacaatattaaaaactttaactaaatctccaggtgcactttgtatttatattgcaccttatcgatctttggctaatgaagtggaatttagcctatctagtatgtttgagattatgggttatcaggtttcgcagttatatgggggatctcaaacgtctccgctggatcggcaattgactaagcaagctaatgtcataattgttactccggaaaaagctaaatcgatgttgagatctaataaagacttaaaggatagaattcaacttgtaatcattgatgaaggtcatttagtcgggtttcagccaagatatattacaggagaattgcttattgaagaactaaagattgttttgaaaaaaaataatggtcaacttgtactactatctgctgttcttcctaatatttctgatttttctttgtggattggtgaggatgataaagctaaaagaatgtctgtctggagaccatcaagtcaaagatttggagaattatctttagcaagaaatactgtgaatataaattgggagggagaaacaccatcatataataagaactttataacaccaaaattagtaaaaccagaacggattacaaaaacaggaaggaaatatgcagctaaatattttccagcagataaaaaagaaggtgttgctgcaaccgcaacaaaaatgctagatgtgggatccgttttgatttatgtaggaagatcgaatatggtattgtctcaagctaggattgtttcgaaactctttgaggaaaagggaatagaacatgagtggaggaataaaaacgattggttgtttgtggaattagcttgtatagaagaatatagggaagattcagaaatattatctttattaaaacaaggtatagtaccccatagttctaaattaccaacagaagtacgtcagagcatagagaaattaatggctaatgataatcctaagataataattgcgacatccacacttggacaaggggttaatattggtgtttcgacagttattgtatctaatgttcgtttagatgagagtaatactgtaaaagtaaatgatttttggaatattgctggtagagcggggagggcatttacagatacagagggtaaaattctatacgcaattgatagaaataaaagccagtggtctatttataatcaaattcaaatgaaagaaatgtatttcaaatatagaaatattgaaaaagctacaagtggtctctatcttcttcttcgttatctatttatattatcggaagaattcgagatagaatacagcttatttttagaacttctagcagaaaatagagaatccattgatgaacagaaagctgtggagtttttttctgaggcagatcagttccttgagttattagatgatactctaatttccatggatattatgaatgaggcaaacgttttggaaaattcctcttcttggatagacgatgtctttcgttcttcgctagcttttattcaagcaaaacaagatcaatcattttctgaagaaaaaatgattgaaatcttaaaagcaagaaattcaggtgtaataaagttggctggagaagaaacaaaatggcattcaatagcatcatcaagtgtaccattgagagcaagtcttgtaattgaacataggatagatgagctactaaagtatgtacgaaaatacattgactcagataagagttttgaagagttattatctcttgtgatggaacttgatatatttattgatagtctaccgatatctaaaatagaaggaatagaaataggtgctaatttttctgaaattcgtgagggatggtttagtggtactagcatacacatattggaaaaaaggcacgaaaatgtaagaagtatctgtaatgaatattattcttttcattttccttggattgtaaatgcgatagctcaaaagatcaaattaattgattgccaagaggaatcaaaggtgttggagcaaatttctttatttgctgaaatagggttaaacaataataaaagtgtaaaaatctatttggcaggtataaagtcaagaaattgtgccactgaattatctgagaaaataggcatggataatgatttggtgacgcctgttaaggagctacttctagagtttttcaatttatgtgtagtgaaaaaagaggattgttcagaaatttgtttcaattggttaaagcttttaaatgatgaaaaagaagctaaagagtatgtaaaggtaaaaagacggtctttccaatttaatattccttttgatttacatgacaatcttttatatataaagaaagtacagagtgaaatatggctgtgctcatttgattataaaattaaaattcctgtattaaaagagaaggcgttatttaatgagtgctcggatatacctgatattttcttgagaaaggaaaaaggagatgtctggattttagattctcataatccttatattattttttattaa

SEQ ID NO: 57840 - DNA, 816 bp, Bacillus cereus AH676
atgactatacaagatgatatggttggaaaacatcctatcgagaatgatttttggaaatggttgcagcatgaagatacagaaccttcggatttaaaacggcatcgttacttagaagtggattctagtaatcgtgatgaagctattaaatctgttgcagcttggctaattaagtatcatttgtcggaaggtaaaaagagagtgataagaaaaaaacaagaaatacttgaaaaacatgattttgctgaatatgcacaatcgcttcatgtttttcctaaaagtgataaaacacagaaaggaaatttaggagaaatatttttatcggaatatttgagtcagacatcaggagttcaaatcctagtgtataaattacactacaaccccaacatagatcaatcgatgaaaggggatgacgttttacttgttaacccagataaagttttattaggagaaagtaaatttcgttctactccaaataaacgtgctgttgaagaggcttctgaacttatgaaagataagttaactttgcctatgtctcttggttttattgcagatagattatttgaacaaggaaaagatgaattaggtgaagtgattttcgatcttcaatttaagatgagtagtatagaaatagatattaaaaatatagggtttttattatctactaaaaaggttcgtagtatcgtagaaaataacctttcttctccaaattctgattttatttttatttcattaggaatggatgacccagcagcttttttgaaaagtgtatttgactatgcagaaagtaatcttttggagggatcttatgaaacttga

SEQ ID NO: 57841 - DNA, 3249 bp, Bacillus cereus AH676
ttggaaaattttccacattacactgtaaatctagatgaaaaatgtacacatatagcatttagttatctcaattgtggatggcgcttttttttagagaaaatcagtgatgaagctacaaaatgtatggaaaaggcttctgaaatattggagtatttgtatgcctataatgattgcgaaaagttatacaaagagtattaccgtttagtatgctcattagcgtattatatatctgcacagtattctaaatcttttattatcttggggaaatataattctgattcatatatagggaaaataacaaaattatttttaactagaaactttatagaattagaaaggcaactggaaattaagtacttgaagaacgatgaagaaacttcaagtgagaataaggataacataatatatgaaaaaattttatctaatgcatttttacatataattaattttattcgcacagggaagatggaatctttggaaagttctaaagatatggttcgagatttaattactttggctgatataaataatgaaccacatatgtggtggtactttagactactatatttggtttttgaagaatatgaagatgggtctttgtggaaagtggttccgccgcttttagataatgatgatatatcagctaaatatatttatgctaatttatacaaaaagaagccaataactgaattttttaagtcgcaaagggaatgtttggacggagagttattaaagaacgatggtttcgtaattggaatgcctactagttcaggaaaaacaaaggttgctgaagtaacaatattaaaaactttaactaaatctccagatgcactttgtatttatattgcaccttatcgatctttggctaatgaagtggaatttagcctatctagtatgtttgagattatgggttatcaggtttcgcagttatatgggggatctcaaacgtctccgctggatcggcaattgactaagcaagctaatgtcataattgttactccggaaaaagctaaatcgatgttgagatctaataaagacttaaaggatagaattcaacttgtaatcattgatgaaggccatttagtcgggtttcagccaagatatattacaggagaattgcttattgaagaactaaagattgttttgaaaaaaaataatggtcaacttgtactactatctgctgttcttcctaatatttctgatttttctttgtggattggtgaggatgataaagctaaaagaatgtctgtctggagaccatcaagtcaaagatttggagaattatctttagtaagaaatactgtgaatataaattgggagggagaaacaccatcatataataagaactttataacaccaaaattagtaaaaccagaacggattacaaaaacaggaaggaaatatgcagctaaatattttccagcagataaaaaagaaggtgtggctgcaaccgcaacaaaaatgctagatgtgggatcggttttgatttatgtaggaagatcgaatatggtattgtctcaagctaggattgtttcgaaactctttgaggaaaagggaatagaacatgagtggaggaataaaaatgattggttgtttgtggaattagcttgtatagaagaatacggggaagattcagagattttatctttattaaaacaaggtatagtacctcatagttctaaattaccaacagaagtacgtcagagtatagagaaattaatggctaatgataatcctaagataataattgcgacatccacacttggacaaggggttaatattggtgtttcgacagttattgtatctaatgtttatttagatgagagtaatactgtaaaagtaaatgatttttggaatattgctggtagagcggggagggcatttacagataccgagggtaaaattctatacgcaattgatagaaataaaagccagtggtctatttataatcaaattcaaatgaaagaaatgtattttcaatatggaaatattgaaaaagctacaagtggtctctatcttcttcttcgttatctatttatattatcggaaagattcgagatagaatacagcttatttttagaacttctagcagaaaatagagaatccattgatgaacagaaagtgatggagtttttttccgaggcagatcagttccttgagttattagatgatactctaatttccatggatattatgaatgaggcgaacgtgttggaaaattcctcttcttggatagacgatgtctttcgttcttcgctagcttttattcaagctaaacaagatcaatcattttctgaagaaaaaatcattgaaatcttaaaagcaagaaattcaggtgtaataaagttggctggagaaggaacaaaatggcattcaatagcatcatcaagtgtaccattgagagcaagtcttgtaattgaacataggatagatgagctactaaagtatatacgaaaatacattgactcggatagaggttttgaagacttattatctcttgtgatggaacttgatatatttatagatagtctaccgatatctaaaatagaaggaatagaaataggagctaatttttctaaaattcgtgagggatggtttagtggtactagcatacatatattagaaaaagagcacgaaaatgcaagaagtatctgtaatgaatattactcttttcattttccttggattgtaaatgcgatagctcaaaaaatcaaattaattaattgccaagaggaatcaaaagtgttggagcaaatttctttatttgctgaaatagggttaaacaataataaaagtgtaaaaatctatttggcaggtataaagtcaagaaattgtgcaactgaattatctgagaaaataggcatggataatgatttggtgacgcctgttaaggagttacttctagagtttttccatttatgtgtagtggataaagaggattgttcagaaatttgtttcaattggttaaagcttttaaatgatgaaaaagaagctaaagagtatgtaaaggtaaaaagacggtctttccaatttaatattccttttgatttacatgacaatcttttatatataaagaaagtacagaatgaaatatggctgtgctcatttgattataaaattaaaattcctgtattaaaagagaaggaattatttgatgagtgctcggatatacctgatattttcttgagaaaggaaaaaggagatgtctggattttagattctcataatccttatattattttttgttga

SEQ ID NO: 57842 - DNA, 822 bp, Bacillus cereus VD022
atgatattaactacacaatcacatattagatggtttgaaaatacgggtcaaaccattcagacatctgaaggtgagaatattgaggttttagaatttaagcatgagcatgatgaagaaattttatcttcatgggcaaaacattttcgtgaacattattgtttagatagtgaaattgatttttttaaggagggttacaattatacaagagcagaattcttaaacataataaaatttcctgacatttctcgtactccaggacctagtatacgggcaggggatttcggagaaatattagttgctgattaccttgagtttattctaaattactgggtacctcgtactcgatatggcacaaaagtaattggtaatgaatcatcaaaaggatgtgacactctggcttttaaaattattagtgatggagagtatacgcctgaggatacactagcaatttttgaaaccaaaacacaattttctggtacaagggcaaaaccacgtttgcaaaatgctgttgatgattcaaaaaaagatgtagctagaaaaggtgagtcactaaatgcaattaaacaacaactttatctcaaaaatgaacttgaagaatctaaaagaataaataggttccaaaaccctactgatcatccatataaagagatttcaggggcagttgctatgttttcttcaagtctactggatttttcaacgattacaaatacatctattaatgagcatccaaataaagataatctaacattattagtaattcatggtgaaaatatgatgactcttgtccatgaattgtataggagggcggcagatgaagcctga

SEQ ID NO: 57843 - DNA, 3153 bp, Bacillus cereus VD022
atgaagcctgagagacaatcaaaaaaattattaagtgctactagatcaaaagcaaaaatgaatgaatataacgtcgaagaagtagatcatataaaactcacaaaagacccagcaaccctttttacattggcaatagggttgctgggtgatttgtcagcgtatataaattccgagaatccagacgagcattatttaaaggaattgcgtgataaccttaaattttcagcacatttttttgatgcgtatttacatactaatcttatggcagatttagatgagtacgttttactactaggctcagcctcttattatttatgcgacttaccaggaagttcacttgttttagtaaaacgtattgaaatgaataaacttaacttagaatgttcggatttagataccttattagctcgactgctaattggaaatttcaccccctgttatgtagaagaaagcggaacatatgcaatgaatataatagatatttcaattaatctatctatattttatgagacaggtggaaatgaacaacatatatataaactcatttccgatctaaggggtgaggcttataaatttggttctccaagagagttgctttttgctgatgtaattggtgcggtaataagaaaaagaattgaaaactctagtagaaaatgtttgcctaaatattctggtataagtgttgggaattgggaatccattttacaaaataaaaattttattcaagaattttggccagcacaacaccttttgggagaaactggtgttttcaaaggagaatccgctgtaattcaattaccaactagtgctggtaaaaccaaggcgacggaagtaataatacgtagtgcttttttatcaaatagaacctctttagcagtaatcgtggctccatttagggcattatgtcatgaaataagtatgagtctgagtaagtcgttccaaagtgattctattaatatagatgaagtatcagatgtgcttcaaatggattttgaactgaaatcaatacttagagatgatttcatcttagttgttactccagaaaaacttatttacatgctgcgccaatgtccagaattggcaacggaaattgggttattaatatacgatgaaggacatcaatttgatagtaatacgcgaggaatcaattatgaattactccttacggctttaaaagggatggttcctgaaggggtacaaaaagtattaatatccgctgtaatcaataatgcagaagtagtgggttcttggcttaatggccctgaaaataaagttgtttcaggagttaatctttctcctacatatcgaactgtagcacttacaagttggatggatcgtcttggaaaacttcaatttctgaatgaagaaaatcctgatgaattagatttttatgtacccagaataatagagcaacaaaaactgcaattgaaaggaagagaaacaaccgaacgtttctttccgattaaaaacgatagcagcactgtctctttatttttaggtttaaagctaacttcaaatggaagtgtggcaatattttgtggaaagaaagataatgtatctagtctttgcgacaaggtagtggaggcatatgaacgagggttaactttaataactccgtttgaattatcggaaaaaaatgaattgaggaaactgtatagcctttattgcttacatcttggttcacaagcttctgtcactaaaggtgcggaactagggattttaacacatcatggaaatataccttctggtatccgtcatgctgtggaacactcaattaaagaaggcttggcaaagttcgtcatttgtacatctacactagcacaaggtgttaatttacctattaggtatcttattgtaacgagtatttatcaaggatctgaaaaaattaaagttcgtgattttcaaaatttaattggtcgcgtcggtcgttctggtatgcatacagaaggtagtgttatattcgcagaccctaatatctatgataaacgtaacagttataataataaatggcgttggcgacaagtaaaaaacttattagatccaaataactcagaaccagttgagagttcattgttaaagatatttgatcccttatgtagcgataataagaagaatacacataatattaattacataaaactatttgaaatttatttcgaagactctgataaagcttacgtgggattggaaaaaatagcgaaagcatttgccaacgagggattttcaattgatggactgaatcaacaagtcgaatcaaaaattaatgtactctcatctattgaaagttatttgatggccaattgggaatatgcaactaatgaagcaggagaaaactgggtaagctcacttgctaaagagactttggcttattcactagctgatgatcatataaaagaacaaattgttatcttatttcaaatgctagctaacaatatctcaaataatattccagaagactcaaaaaagaaatcgtatgggaaactgctatacggtgtggaaactgctataaagattgaagaatggactaaaatacatttagatgaacttgtgaagtgtgaaagctatgaggagcttttgaatgttttatggccgcttttagcatcgaatattaaaaataaaacatttaataaatgcgaggagcctgaaattttaagagaagtcgctatcgcatggattcatggaagggcttattttatactattagatattcttaaagataaggatattaggatgaaaacaaaaaaacagcgtagagaatataaaatagatcatattgtagaaatttgtgacaatgcactttcatatgaaggtatgcttctaattggagcggtcgcggaattaattgagtctttaattactgatcaaaatatatatttagttgaaaatcttaagaaattacaaaaacgtatgaaatatggtgtacctaactctttaaatatactattttacgaattaggttttgccgatcggatcatttcaagagatttgagcggagttttaagagatcaatctccacctacaaataagagaaagttaaaatcgttaattcaaagttacgaaaaagattttcgtaagcaattaataaaatatccttcatattatacctctgtcttagagaatatcttattgagtagcgacaatagaatcgtctaa

SEQ ID NO: 57844 - DNA, 822 bp, Bacillus cereus TIAC219; identical to SEQ ID NO: 57842

SEQ ID NO: 57845 - DNA, 3153 bp, Bacillus cereus TIAC219; identical to SEQ ID NO: 57843

SEQ ID NO: 57846 - DNA, 843 bp, Bacillus cereus MC118
gtgagtgaatcaatttcaattcagtgtcgtcttattggggaacaccctaataaatctcttttttctgaatggctatcatacgaagatttaccttcttcagaaaacaagatacatagaaaattaggtgaaattgagggtatgcggcaatatgctatagaacaagttgcagattggattattaaacatcacatacctgatactacaattaataggttaaaaagaaaaagggaaatgataattaaaaagtatggtttagatgagtatttaaatcaacagcaaatgcttccagttgcagataaaacaatgaggggaaatggggcggaaataatttttgctgagtatcttcaggcatcaacacctcttcaaattttattatataaattaaggtataacccaaatgtgagtcaatcgataaagggtgatgacgtgcttctgtttaacaaggagaaccttcatgaaagggttcttttaggagaatcaaaatttagaaaaatacctaacaaggctgtaatagaggaaataacggatgaattcggaaaaaaattaaagcttccgttatctatactttttgttgcaaataggcttagtgaattaggggaagaagaaatggctgatgagttagaagaattaaatattgacgttaaacggggaaaggttcctgtgaccaatattggttttctgttaagtaatcataatacagcctcaaacgtagaaaggcatttgttttctgaaaaccctgattttatatttttgtcgttgggtttagaacagccagatgaattcatatcccaatgttttgccctggctaatgaaaaattaaaaaggggaattcaagatgaataa

SEQ ID NO: 57847 - DNA, 3333 bp, Bacillus cereus MC118
atgaataatgaaaaagccactagtttattagagcgattagaaaatgacagcttaattcaaaatttaattgctcaaagtgattcacgttatatactttttaatgtgcaagaaccagttggaaactttccgaattacacaagtggtttagatgaaaaattaactagttcagcaatgtcttatttgtctatagggtgtacattggctgaaaatggtagtaaaggacaatcaatttttccattggaaaaaggtgcagctattttagaaaatatctatagtccgatagcgaatagaaacgagtacagttcttattttattcttacaagttcactagcattttatgcagcaaatcaatattcaaagtcttttataataatgaaaaatacccaatttgatacagtgattgctgaattaatatctaatttcttaagaaggcaatacggtgaactcgataaattactttctgaaatattcttaagtaatgattatggtggtacatcgatagctgaatcagacgaagaagttgcaaataataaaatctacgttctaatactatcaaaatcattatcaagtcttcttgaatttatatattctggaagtgatgaatggttgagtaaagcaaaggattatttatcagatttattagaacttctggctatagatgctgaaccctctttatggtgggttgtaagattatttatactgattgttgatggctttcaagaaaactctctatggaaggctatacctcctaatataagtgatgcagatggagtagttagtaattacatagaaacattggcattccaaaaaagtccggtagttgaattattttattctcagaaaattgctttaccaaaagtattagatagaaaaggtgctgtagtaagtattcctactagtgccgggaaaacgagaatcgcagagttgtccatgttagattgtttggtaaaagattgtgatagtaaaattttgtatctcgcaccatttaggtctttagcctttgaagtagaggaatctatttcaaaaatctttgaccccttaggttttgaagtatctcatctttatggaggcacacaatttagtaagctagatgaaatggttattaatgaatctagtattataattgcaactgctgaaaaggcaaaagcaattttaagaagcaattcagaaattaaaactaagataaagcttataattattgatgaaggacaccttataggtccagaagaaagatatgttttaagtgaaatgcttattgaagaattacgtctttatacagaaaaaaatgatggaaaaatgattctgctatctgctgtattaccaaattctgctgaaattgcaaattggatatctggaaatgaagagatggaagttaaatcaaattggcgaccatctactcaaagattcggtttacttgaatactccggtaacaacgtcaatattacatggaaaggtgaactggagtcatttaatagaaactttattagtccttttacagttaggcgaccgaggtctgagtatatatttccacgaaataaaaaacaggctattgcagccacggcattaaagcttagttattctggttcggtactaatttttgtttgtaagaaaaacatggttctttctcaagctaaagaagtatttgaagcaatgggtgagaacaaggaagagcatatatggtctaatcagaatgactggagtgtttttaaattagcttgtgatgaagcatatggtgaagaatcagtggtttatcaatatgcaaagtatggagtattatgtcaccactctggtctaccaacagaggtaagattgtctatcgaaaaactaatgagaaagggaaatcccaaaataattgttgccacatccacactaggacaaggtgttaatatcggtgtctctaccgttattatggctaatgtttggtatgataaagaaaataaaattagcgttaatgatttttggaatattgtaggaagagcggggcggagttttgtagacagagaaggtaaaatcttatttgtagttgattctagtcagtctgtatggaaggctagtagggacagaaggttagctctagaatattttgagaatagcaatcaagatgaagcaataagtggattattatatattgttgattatgtttataggattgcaaaagcttcaaatgttaattttgatactttattacaaatgattgctgagaatgactactcctctatagaacagaaatatactgaaggattaatcaccctgtttgatttgatagatgataccttgttgtcattaaatcttgaattagaaagctataaagatgagaatgcttctgcatggatagatgattactttaggtattcgctggcatacatacaagctaggcactttgaacaatttgatggagaagacgttatttcatttctgaaggcaagaaacaaaggtgtattaaaattagcaggcgaatcttcgacatggaagggattggtatcatcaagtattccactccgttcaggattatttattaaaaatgaattatctttaatattagagattgtaaatagatatcaaagttcaaataaaagtagtgaagactttttctcttttctaaaagagaccgaaatcattgtatcaaggttcccatcgcaacaattcgtttttactgaaatatcagatgatattagagaactatggataaaaggtcaatcaatcagctctcttgatgaaggaacattgaaaacttgtaatcattatttcggcttcatactgccgtgggggataagtgcaatagctagaatgttatctactttagacttggaaaatgaagctaaagagtatgaaaacttaactgttttagttcaaatgggattgcctaatatttttgctgctaaaatttatttagcgggtatccaatcaagattagcagctacagaattgagtaatgtactagacccatcaattcaagaactaagcattaaacggttaaggggtgaaattactaagtcatttgatgagttagttgatattactgagaatactttaaagtgggtatcactgctaaaatctcttgaaacaaacaattctggttattttgtagaattatccaatttcacctttgaaggtgatgttacaattaaaagtaatattttgaatgctaagcaatatcaagaaggaaccttcctatgtagtccagattatgatgaaaaagtgaaagttgaagtaaacgacaaattcccttttgataagtatgcaaatgattttggtgtatatttttcatttaataatagtgaatggtctttaaaagctagaaatccatatataaaatttaatccgtttacttaa

SEQ ID NO: 57848 - DNA, 816 bp, Bacillus cereus VD140; identical to SEQ ID NO: 57840

SEQ ID NO: 57849 - DNA, 3363 bp, Bacillus cereus VD140
atgaaacttgaaacagcatataattatttcgagaagcttgaaaaagatgaacgtcttcaaaactatatttcacaggctaattcaagatatattctttacatagcaaatgaaccattggaaaattttccacattacactgtaaatctagatgaaaaatgtacacatatagcatttagttatctcaattgtggatggcgcttttttttagagaaaatcagtgatgaagctacaaaatgtatggaaaaggcttctgaaatattggagtatttgtatgcctataatgattgcgaaaagttatacaaagagtattaccgtttagtatgctcattagcgtattatatatctgcacagtattctaaatcttttattatcttggggaaatataattctgattcatatatagggaaaataacaaaattatttttaactagaaactttatagaattagaaaggcaactggaaattaagtacttgaagaacgatgaagaaacttcaagtgagaataaggataacataatatatgaaaaaattttatctaatgcatttttacatataattaattttattcgcacagggaagatggaatctttggaaagttctaaagatatggttcgagatttaattactttggctgatataaataatgaaccacatatgtggtggtactttagactactatatttggtttttgaagaatatgaagatgggtctttgtggaaagtggttccgccgcttttagataatgatgatatatcagctaaatatatttatgctaatttatacaaaaagaagccaataactgaattttttaagtcgcaaagggaatgtttggacggagagttattaaagaacgatggtttcgtaattggaatgcctactagttcaggaaaaacaaaggttgctgaagtaacaatattaaaaactttaactaaatctccagatgcactttgtatttatattgcaccttatcgatctttggctaatgaagtggaatttagcctatctagtatgtttgagattatgggttatcaggtttcgcagttatatgggggatctcaaacgtctccgctggatcggcaattgactaagcaagctaatgtcataattgttactccggaaaaagctaaatcgatgttgagatctaataaagacttaaaggatagaattcaacttgtaatcattgatgaaggccatttagtcgggtttcagccaagatatattacaggagaattgcttattgaagaactaaagattgttttgaaaaaaaataatggtcaacttgtactactatctgctgttcttcctaatatttctgatttttctttgtggattggtgaggatgataaagctaaaagaatgtctgtctggagaccatcaagtcaaagatttggagaattatctttagtaagaaatactgtgaatataaattgggagggagaaacaccatcatataataagaactttataacaccaaaattagtaaaaccagaacggattacaaaaacaggaaggaaatatgcagctaaatattttccagcagataaaaaagaaggtgtggctgcaaccgcaacaaaaatgctagatgtgggatcggttttgatttatgtaggaagatcgaatatggtattgtctcaagctaggattgtttcgaaactctttgaggaaaagggaatagaacatgagtggaggaataaaaatgattggttgtttgtggaattagcttgtatagaagaatacggggaagattcagagattttatctttattaaaacaaggtatagtacctcatagttctaaattaccaacagaagtacgtcagagtatagagaaattaatggctaatgataatcctaagataataattgcgacatccacacttggacaaggggttaatattggtgtttcgacagttattgtatctaatgtttatttagatgagagtaatactgtaaaagtaaatgatttttggaatattgctggtagagcggggagggcatttacagataccgagggtaaaattctatacgcaattgatagaaataaaagccagtggtctatttataatcaaattcaaatgaaagaaatgtattttcaatatggaaatattgaaaaagctacaagtggtctctatcttcttcttcgttatctatttatattatcggaaagattcgagatagaatacagcttatttttagaacttctagcagaaaatagagaatccattgatgaacagaaagtgatggagtttttttccgaggcagatcagttccttgagttattagatgatactctaatttccatggatattatgaatgaggcgaacgtgttggaaaattcctcttcttggatagacgatgtctttcgttcttcgctagcttttattcaagctaaacaagatcaatcattttctgaagaaaaaatcattgaaatcttaaaagcaagaaattcaggtgtaataaagttggctggagaaggaacaaaatggcattcaatagcatcatcaagtgtaccattgagagcaagtcttgtaattgaacataggatagatgagctactaaagtatatacgaaaatacattgactcggatagaggttttgaagacttattatctcttgtgatggaacttgatatatttatagatagtctaccgatatctaaaatagaaggaatagaaataggagctaatttttctaaaattcgtgagggatggtttagtggtactagcatacatatattagaaaaagagcacgaaaatgcaagaagtatctgtaatgaatattactcttttcattttccttggattgtaaatgcgatagctcaaaaaatcaaattaattaattgccaagaggaatcaaaagtgttggagcaaatttctttatttgctgaaatagggttaaacaataataaaagtgtaaaaatctatttggcaggtataaagtcaagaaattgtgcaactgaattatctgagaaaataggcatggataatgatttggtgacgcctgttaaggagttacttctagagtttttccatttatgtgtagtggataaagaggattgttcagaaatttgtttcaattggttaaagcttttaaatgatgaaaaagaagctaaagagtatgtaaaggtaaaaagacggtctttccaatttaatattccttttgatttacatgacaatcttttatatataaagaaagtacagaatgaaatatggctgtgctcatttgattataaaattaaaattcctgtattaaaagagaaggaattatttgatgagtgctcggatatacctgatattttcttgagaaaggaaaaaggagatgtctggattttagattctcataatccttatattattttttgttga

SEQ ID NO: 57850 - DNA, 816 bp, Bacillus cereus
atgactatacaagatgatatggttggaaaacatcctatcgagaatgatttttggaaatggttgcagcatgaagatacagaatcctcggatttaaaacggcatcgttacttagaagtggattctagtaatcgtgatgaagctattaaatctgttgcagcttggctaattaagtatcatttgtcggaaggtaaaaagagagtgataagaaaaaaacaagaaatacttgaaaaacatgattttgctgaatatgcacaatcgcttcatgtttttcctaaaagtgataaaacacagaaaggaaatttaggagaaatatttttatcggaatatttgagtcagacatcaggagttcaaatcctagtgtataaattacactacaaccccaacatagatcaatcgatgaaaggggatgacgttttacttgttaacccagataaagttttattaggagaaagtaaatttcgttctactccaaataaacgtgctgttgaagaggcttctgaacttatgaaagataagttaactttgcctatgtctcttggttttattgcagatagattatttgaacaaggaaaagatgaattaggtgaagtgattttcgatcttcaatttaagatgagtagtatagaaatagatattaaaaatatagggtttttattatctactaaaaaggttcgtagtatcgtagaaaataacctttcttctccaaattctgattttatttttatttcattaggaatggatgacccagcagcttttttgaaaagtgtatttgactatgcagaaagtaatcttctggagggatcttatgaaacttga

SEQ ID NO: 57851 - DNA, 3249 bp, Bacillus cereus
ttggaaaattttccacattacactgtaaatctagatgaaaaatgtacacatatagcatttagttatctcaattgtggatggcgcttttttttggagaaaatcagtgatgaagctacaaaatgtatggaaaaggcttctgaaatattggagtatttgtatgcctatagtgattgcgaaaagttatataaagagtattaccgtttagtatgctcattagcgtattatatatctgcacagtattctaaatcttttattatcttggggaaatataattctgattcatatatagggaaaataacaaaattatttttaactagaaactttatagaattagaaaggcaactggaaattaagtacttgaagaacgatgaagaaacttcaagtgagaataaggataacataatatatgaaaaaattttatctaatgcatttttacatataattaattttattcgcacagggaagatggaatctttggaaagttctaaagatatggttcgagatttaattactttggctgatataaataatgaaccacatatgtggtggtactttagactactatatttggtttttgaagaatatgaagatgggtctttgtggaaagtgcttccaccgcttttagataatgatgatatatcagctaaatatatttatgctaatttatacaaaaagaagccaataactgaattttttaagtcgcaaagggaatgtttggacggagagttattaaagaacgatggtttcgtaattggaatgcctactagttcaggaaaaacaaaggttgctgaagtaacaatattaaaaactttaactaaatctccaggtgcactttgtatttatattgcaccttatcgatctttggctaatgaagtggaatttagcctatctagtatgtttgagattatgggttatcaggtttcgcagttatatgggggatctcaaacgtctccgctggatcggcaattgactaagcaagctaatgtcataattgttactccggaaaaagctaaatcgatgttgagatctaataaagacttaaaggatagaattcaacttgtaatcattgatgaaggtcatttagtcgggtttcagccaagatatattacaggagaattgcttattgaagaactaaagattgttttgaaaaaaaataatggtcaacttgtactactatctgctgttcttcctaatatttctgatttttctttgtggattggtgaggatgataaagctaaaagaatgtctgtctggagaccatcaagtcaaagatttggagaattatctttagcaagaaatactgtgaatataaattgggagggagaaacaccatcatataataagaactttataacaccaaaattagtaaaaccagaacggattacaaaaacaggaaggaaatatgcagctaaatattttccagcagataaaaaagaaggtgttgctgcaaccgcaacaaaaatgctagatgtgggatccgttttgatttatgtaggaagatcgaatatggtattgtctcaagctaggattgtttcgaaactctttgaggaaaagggaatagaacatgagtggaggaataaaaacgattggttgtttgtggaattagcttgtatagaagaatatggggaagattcagaaatattatctttattaaaacaaggtatagtaccccatagttctaaattaccaacagaagtacgtcagagcatagagaaattaatggctaatgataatcctaagataataattgcgacatccacacttggacaaggggttaatattggtgtttcgacagttattgtatctaatgttcgtttagatgagagtaatactgtaaaagtaaatgatttttggaatattgctggtagagcggggagggcatttacagatacagagggtaaaattctatacgcaattgatagaaataaaagccagtggtctatttataatcaaattcaaatgaaagaaatgtatttcaaatatagaaatattgaaaaagctacaagtggtctctatcttcttcttcgttatctatttatattatcggaagaattcgagatagaatacagcttatttttagaacttctagcagaaaatagagaatccattgatgaacagaaagctgtggagtttttttctgaggcagatcagttccttgagttattagatgatactctaatttccatggatattatgaatgaggcaaacgttttggaaaattcctcttcttggatagacgatgtctttcgttcttcgctagcttttattcaagcaaaacaagatcaatcattttctgaagaaaaaatgattgaaatcttaaaagcaagaaattcaggtgtaataaagttggctggagaagaaacaaaatggcattcaatagcatcatcaagtgtaccattgagagcaagtcttgtaattgaacataggatagatgagctactaaagtatgtacgaaaatacattgactcagataagagttttgaagagttattatctcttgtgatggaacttgatatatttattgatagtctaccgatatctaaaatagaaggaatagaaataggtgctaatttttctgaaattcgtgagggatggtttagtggtactagcatacacatattggaaaaaaggcacgaaaatgtaagaagtatctgtaatgaatattattcttttcattttccttggattgtaaatgcgatagctcaaaagatcaaattaattgattgccaagaggaatcaaaggtgttggagcaaatttctttatttgctgaaatagggttaaacaataataaaagtgtaaaaatctatttggcaggtataaagtcaagaaattgtgccactgaattatctgagaaaataggcatggataatgatttggtgacgcctgttaaggagctacttctagagtttttcaatttatgtgtagtgaaaaaagaggattgtttagaaatttgtttcaattggttaaagcttttaaatgatgaaaaagaagctaaagagtatgtaaaggtaaaaagacggtctttccaatttaatattccttttgatttacatgacaatcttttatatataaagaaagtacagagtgaaatatggctgtgctcatttgattataaaattaaaattcctgtattaaaagagaaggcgttatttaatgagtgctcggatatacctgatattttcttgagaaaggaaaaaggagatgtctggattttagattctcataatccttatattattttttattaa

SEQ ID NO: 57852 - DNA, 816 bp, Bacillus cereus; identical to SEQ ID NO: 57850

SEQ ID NO: 57853 - DNA, 3249 bp, Bacillus cereus; identical to SEQ ID NO: 57839

SEQ ID NO: 57854 - DNA, 816 bp, Bacillus cereus; identical to SEQ ID NO: 57850

SEQ ID NO: 57855 - DNA, 3249 bp, Bacillus cereus; identical to SEQ ID NO: 57839

SEQ ID NO: 57856 - DNA, 816 bp, Bacillus cereus; identical to SEQ ID NO: 57850

SEQ ID NO: 57857 - DNA, 3363 bp, Bacillus cereus
atgaaacttgaaacagcatataattattttgaaaagcttgaaaaagatgaacgtcttcaaaactatatttcacaggctaattcaagatatatcctttacatagcaaatgaaccattggaaaatttcccacattacactgtaaatctagatgaaaaatgtacacatatagcatttagttatctcaattgtggatggcgcttttttttagagaaaatcagtgatgaagctacaaaatgtatggaaaaggcttctgaaatattggagtatttgtatgcctatagtgattgcgaaaagttatataaagagtattaccgtttagtatgctcattagcgtattatatatctgcacagtattctaaatcttttattatcttggggaaatataattctgattcatatatagggaaaataacaaaattatttttaactagaaactttatagaattagaaaggcaactggaaattaagtacttgaagaacgatgaagaaacttcaagtgagaataaggataacataatatatgaaaaaattttatctaatgcatttttacatataattaattttattcgcacagggaagatggaatctttggaaagttctaaagatatggttcgagatttaattactttggctgatataaataatgaaccacatatgtggtggtactttagactactatatttggtttttgaagaatatgaagatgggtctttgtggaaagtggttccaccgcttttagataatgatgatatatcagctaaatatatttatgctaatttatacaaaaagaagccaataactgaattttttaagtcgcaaagggaatgtttggacggagagttattaaagaacgatggtttcgtaattggaatgcctactagttcaggaaaaacaaaggttgctgaagtaacaatattaaaaactttaactaaatctccaggtgcactttgtatttatattgcaccttatcgatctttggctaatgaagtggaatttagcctatctagtatgtttgagattatgggttatcaggtttcgcagttatatgggggatctcaaacgtctccgctggatcggcaattgactaagcaagctaatgtcataattgttactccggaaaaagctaaatcgatgttgagatctaataaagacttaaaggatagaattcaacttgtaatcattgatgaaggtcatttagtcgggtttcagccaagatatattacaggagaattgcttattgaagaactaaagattgttttgaaaaaaaataatggtcaacttgtactactatctgctgttcttcctaatatttctgatttttctttgtggattggtgaggatgataaagctaaaagaatgtctgtctggagaccatcaagtcaaagatttggagaattatctttagcaagaaatactgtgaatataaattgggagggagaaacaccatcatataataagaactttataacaccaaaattagtaaaaccagaacggattacaaaaacaggaaggaaatatgcagctaaatattttccagcagataaaaaagaaggtgttgctgcaaccgcaacaaaaatgctagatgtgggatccgttttgatttatgtaggaagatcgaatatggtattgtctcaagctaggattgtttcgaaactctttgaggaaaagggaatagaacatgagtggaggaataaaaacgattggttgtttgtggaattagcttgtatagaagaatatggggaagattcagaaatattatctttattaaaacaaggtatagtaccccatagttctaaattaccaacagaagtacgtcagagcatagagaaattaatggctaatgataatcctaagataataattgcgacatccacacttggacaaggggttaatattggtgtttcgacagttattgtatctaatgttcgtttagatgagagtaatactgtaaaagtaaatgatttttggaatattgctggtagagcggggagggcatttacagatacagagggtaaaattctatacgcaattgatagaaataaaagccagtggtctatttataatcaaattcaaatgaaagaaatgtatttcaaatatagaaatattgaaaaagctacaagtggtctctatcttcttcttcgttatctatttatattatcggaagaattcgagatagaatacagcttatttttagaacttctagcagaaaatagagaatccattgatgaacagaaagctgtggagtttttttctgaggcagatcagttccttgagttattagatgatactctaatttccatggatattatgaatgaggcaaacgttttggaaaattcctcttcttggatagacgatgtctttcgttcttcgctagcttttattcaagcaaaacaagatcaatcattttctgaagaaaaaatgattgaaatcttaaaagcaagaaattcaggtgtaataaagttggctggagaagaaacaaaatggcattcaatagcatcatcaagtgtaccattgagagcaagtcttgtaattgaacataggatagatgagctactaaagtatgtacgaaaatacattgactcagataagagttttgaagagttattatctcttgtgatggaacttgatatatttattgatagtctaccgatatctaaaatagaaggaatagaaataggtgctaatttttctgaaattcgtgagggatggtttagtggtactagcatacacatattggaaaaaaggcacgaaaatgtaagaagtatctgtaatgaatattattcttttcattttccttggattgtaaatgcgatagctcaaaagatcaaattaattgattgccaagaggaatcaaaggtgttggagcaaatttctttatttgctgaaatagggttaaacaataataaaagtgtaaaaatctatttggcaggtataaagtcaagaaattgtgccactgaattatctgagaaaataggcatggataatgatttggtgacgcctgttaaggagctacttctagagtttttcaatttatgtgtagtgaaaaaagaggattgttcagaaatttgtttcaattggttaaagcttttaaatgatgaaaaagaagctaaagagtatgtaaaggtaaaaagacggtctttccaatttaatattccttttgatttacatgacaatcttttatatataaagaaagtacagagtgaaatatggctgtgctcatttgattataaaattaaaattcctgtattaaaagagaaggcgttatttaatgagtgctcggatatacctgatattttcttgagaaaggaaaaaggagatgtctggattttagattctcataatccttatattattttttattaa

SEQ ID NO: 57858 - DNA, 822 bp, Bacillus cereus
atgatattaactacacaatcacatattagatggtttgaaaatacgggtcaaaccattcaaacgtctgaaggtaagaatattgaggttttagaatttaagcatgagcatgatgaagaaattttatcttcatgggcaaaacattttcgtgaacattattgtttagatagtgaaattgatttttttagggagggttacaattatacaagagcagaatacttaaacataataaaattccctgacatttctcgtactccaggacctagtatacgggcaggggatttcggagaaatattagttgctgattaccttgagtttattctaaattactgggtacctcgtactcgatatggcacaaaagtaattggtaatgaatcttcaaaaggatgtgacactctggcttttaaaattattagtgatggagagtatacgcctgaggatacactagcaatttttgaaaccaaaacacaattttctggtacaagggcaaacccacggttgcaaaatgcggttgatgattcaaaaaaagatgtagctagaaaaggtgagtcactaaatgcaattaaacaacaactttatctcaaaaatgaacttgaagaatctaaaagaataaataggttccaaaaccctactgatcatccatataaagagatttcaggggcagttgctatgttttcttcaagtctactggattcttcaactattacaaatacatctattaatgagcatccaaataaagataatctaacattattagtaattcatggtgaaaatatgatgactcttgtccatgaattgtataggagggcggcagatgaagcctga

SEQ ID NO: 57859 - DNA, 3153 bp, Bacillus cereus
atgaagcctgagagacaatcaaaaaaattattaagtgctactagatcaaaagcaaaaatgaatgaatataacgtcgaagaagtagaccatataaaactcacaaaagacccagcaaccctttttacattggcaatagggttgctgggtgatttgtcagcgtatataaattccgagaatccagacgagcattatttaaaggaattgcgtgataaccttaaattttcagcacatttctttgatgcgtatttacatactaatcttatggcagatttagatgagtacgttttactactaggctcagcctcttattatttatgcgacttaccaggaagttcacttgttttagtaaaacgtattgaaatgaataaacttaacttagaatgttcggatttagataccttattagctcgactgctaattggaaatttcaccccctgttatgtagaagaaagcggaacatatgcaatgaatataatagatatttcaattaatctatctatattttatgagacaggtggaaatgaacaacatatatataaactcatttccgatctaaggggtgaggcttataaatttggttctccaagagagttgctttttgctgatgtaattggtgcggtaataagaaaaagaattgaaaactctagtagaaaatgtttgcctaaatattctggtataagtgttgagaattgggaagccattttacaaaataaaaattttattcaagaattttggccagcacaacaccttttgggggaaactggtgtttttaaaggggaatccgctgtaattcaattaccaactagtgctggtaaaaccaaggcgacagaagtaataatacgtagtgcttttctatcaaatagaacctctttagctgtaatcgtggctccatttagggcattatgtcatgaaataagtatgagtctgagtaagtcgttccaaagtgattctattaatatagatgaagtatcagatgtgcttcaaatggattttgaactgaaatcaatacttagagatgatttcatcttagttgttactccagaaaaacttatttacatgctacgccaatgtccagaattggcaacggaaattgggctgttaatatacgatgaaggacatcaatttgatagtaatacacgaggaatcaattatgaattactccttacagctttaaaaggcatggttcctgaaggggtacaaaaagtattaatatccgctgtaatcaataatgcagaagtggttggttcttggcttaatggtcctgaaaataaagttgtttcaggagttaatctttctcctacatatcgaactgtagcacttacaagttggatggatcgtcttggaaaacttcaatttctgaatgaagaaaatcctgatgaattagatttttatgtacccaggataatagagcaacaaaaactgcaattgaaaggaagagaaacaaccgaacgtttctttccgattaaaaacgatagcagcactgtctctttatttttaggtttaaagctaacttcaaatggaagtgtggcaatattttgtggaaagaaagataatgtatctagtctttgcgacaaggtagtggaggcatatgaacgaggtttaactttaataactccgtttgaattatcagaaaaaaacgaattaaggaaactgtataacctttattgcttacatcttggttcacaagcttcagtcactaaaggtgcggaaatagggattttaacacatcatggaaatataccttctggtatccgtcatgctgtggaacactcaattaaagaaggcttagcaaagttcgtcatttgtacatctacactagcacaaggcgttaatttacctattaggtatcttattgtaacgagtatttatcaaggatctgaaaaaattaaagttcgtgattttcagaatttaattggtcgcgtcggtcgttctggtatgcatacagaaggtagtgttatattcgcagaccctaatatctatgataaacgtaacagttataataataaatggcgttggcgacaagtaaaaaacctattagatccaaataactcagaaccagttgagagttccttgttaaaaatatttgatcccttatgtagcgatgataagaagaatacacataatattaattacataaaactatttgaaatttatttcgaagactctgataaagtttacatgggattggaaaaaatagcgaaagcatttgccaacgaaggattttcaattgatggactgaatcaacaagtcgaatcaaaaattaatgtactctcatctattgaaagttatttgatggccaattgggaatatgcaactaatgaagcaggagaaaactgggtaagctcacttgctaaagagactttggcttattcactagctgatgatcatataaaagaacaaattgttatcttatttcaaatgctagctaacaatatctcaaataatattccagaagactcaaaaaagaaatcgtatgggaaactgctatacggtgtggaaactgctaaaaagattgaagaatggactaaaatgcatttagatgaacttgtgaattgtgaaagctatgaggagcttttgaatgttttatggccgcttttagcatcgaatattaaaaataaaacatttaataaatgcgagaagcctgaaattttaagagaagtcgctatcgcatggattgatggaagggcttattttatactattagatatccttaaagataaggatattaggatgaaaacaaaaaaacagcgtagagaatatagaatagatcatattgtagaaatttgtgacaatgcactttcatatgaaggtatgcttctaattggagcggtcgcggaattagttgagtctttaattactgatcaaaatatatatttagttgaaaatcttaagaaattacaaaaacgtatgaaatatggtgtacctaactctttaaatatactattttatgaattaggttttgccgatcggatcatttcaagagatttgagcgaagttttaagagatcaatctccacctacaaataaaagaaagttaaaatcgttaattcaaagttacgaaaaagattttcgtaagcaattaataaaatatccttcatattatacctctgtcttagagaatatcttattgagtagcgacaatagaatcgtctaa

SEQ ID NO: 57860 - DNA, 816 bp, Bacillus cereus; identical to SEQ ID NO: 57840

SEQ ID NO: 57861 - DNA, 3363 bp, Bacillus cereus; identical to SEQ ID NO: 57849

SEQ ID NO: 57862 - DNA, 816 bp, Bacillus cereus; identical to SEQ ID NO: 57850

SEQ ID NO: 57863 - DNA, 3363 bp, Bacillus cereus
atgaaacttgaaacagcatataattattttgaaaagcttgaaaaagatgaacgtcttcaaaactatatttcacaggctaattcaagatatatcctttacatagcaaatgaaccattggaaaattttccacattacactgtaaatctagatgaaaaatgtacacatatagcatttagttatctcaattgtggatggcgcttttttttagagaaaatcagtgatgaagctacaaaatgtatggaaaaggcttctgaaatattggagtatttgtatgcctatagtgattgcgaaaagttatataaagagtattaccgtttagtatgctcattagcgtattatatatctgcacagtattctaaatcttttattatcttggggaaatataattctgattcatatatagggaaaataacaaaattatttttaactagaaactttatagaattagaaaggcaactggaaattaagtacttgaagaacgatgaagaaacttcaagtgagaataaggataacataatatatgaaaaaattttatctaatgcatttttacatataattaattttattcgcacagggaagatggaatctttggaaagttctaaagatatggttcgagatttaattactttggctgatataaataatgaaccacatatgtggtggtactttagactactatatttggtttttgaagaatatgaagatgggtctttgtggaaagtggttccaccgcttttagataatgatgatatatcagctaaatatatttatgctaatttatacaaaaagaagccaataactgaattttttaagtcgcaaagggaatgtttggacggagagttattaaagaacgatggtttcgtaattggaatgcctactagttcaggaaaaacaaaggttgctgaagtaacaatattaaaaactttaactaaatctccaggtgcactttgtatttatattgcaccttatcgatctttggctaatgaagtggaatttagcctatctagtatgtttgagattatgggttatcaggtttcgcagttatatgggggatctcaaacgtctccgctggatcggcaattgactaagcaagctaatgtcataattgttactccggaaaaagctaaatcgatgttgagatctaataaagacttaaaggatagaattcaacttgtaatcattgatgaaggtcatttagtcgggtttcagccaagatatattacaggagaattgcttattgaagaactaaagattgttttgaaaaaaaataatggtcaacttgtactactatctgctgttcttcctaatatttctgatttttctttgtggattggtgaggatgataaagctaaaagaatgtctgtctggagaccatcaagtcaaagatttggagaattatctttagcaagaaatactgtgaatataaattgggagggagaaacaccatcatataataagaactttataacaccaaaattagtaaaaccagaacggattacaaaaacaggaaggaaatatgcagctaaatattttccagcagataaaaaagaaggtgttgctgcaaccgcaacaaaaatgctagatgtgggatccgttttgatttatgtaggaagatcgaatatggtattgtctcaagctaggattgtttcgaaactctttgaggaaaagggaatagaacatgagtggaggaataaaaacgattggttgtttgtggaattagcttgtatagaagaatatggggaagattcagaaatattatctttattaaaacaaggtatagtaccccatagttctaaattaccaacagaagtacgtcagagcatagagaaattaatggctaatgataatcctaagataataattgcgacatccacacttggacaaggggttaatattggtgtttcgacagttattgtatctaatgttcgtttagatgagagtaatactgtaaaagtaaatgatttttggaatattgctggtagagcggggagggcatttacagatacagagggtaaaattctatacgcaattgatagaaataaaagccagtggtctatttataatcaaattcaaatgaaagaaatgtatttcaaatatagaaatattgaaaaagctacaagtggtctctatcttcttcttcgttatctatttatattatcggaagaattcgagatagaatacagcttatttttagaacttctagcagaaaatagagaatccattgatgaacagaaagctgtggagtttttttctgaggcagatcagttccttgagttattagatgatactctaatttccatggatattatgaatgaggcaaacgttttggaaaattcctcttcttggatagacgatgtctttcgttcttcgctagcttttattcaagcaaaacaagatcaatcattttctgaagaaaaaatgattgaaatcttaaaagcaagaaattcaggtgtaataaagttggctggagaagaaacaaaatggcattcaatagcatcatcaagtgtaccattgagagcaagtcttgtaattgaacataggatagatgagctactaaagtatgtacgaaaatacattgactcagataagagttttgaagagttattatctcttgtgatggaacttgatatatttattgatagtctaccgatatctaaaatagaaggaatagaaataggtgctaatttttctgaaattcgtgagggatggtttagtggtactagcatacacatattggaaaaaaggcacgaaaatgtaagaagtatctgtaatgaatattattcttttcattttccttggattgtaaatgcgatagctcaaaagatcaaattaattgattgccaagaggaatcaaaggtgttggagcaaatttctttatttgctgaaatagggttaaacaataataaaagtgtaaaaatctatttggcaggtataaagtcaagaaattgtgccactgaattatctgagaaaataggcatggataatgatttggtgacgcctgttaaggagctacttctagagtttttcaatttatgtgtagtgaaaaaagaggattgttcagaaatttgtttcaattggttaaagcttttaaatgatgaaaaagaagctaaagagtatgtaaaggtaaaaagacggtctttccaatttaatattccttttgatttacatgacaatcttttatatataaagaaagtacagagtgaaatatggctgtgctcatttgattataaaattaaaattcctgtattaaaagagaaggcgttatttaatgagtgctcggatatacctgatattttcttgagaaaggaaaaaggagatgtctggattttagattctcataatccttatattattttttattaa

SEQ ID NO: 57864 - DNA, 816 bp, Bacillus cereus; identical to SEQ ID NO: 57850

SEQ ID NO: 57865 - DNA, 3249 bp, Bacillus cereus; identical to SEQ ID NO: 57839

SEQ ID NO: 57866 - DNA, 816 bp, Bacillus cereus; identical to SEQ ID NO: 57850

SEQ ID NO: 57867 - DNA, 3249 bp, Bacillus cereus
ttggaaaatttcccacattacactgtaaatctagatgaaaaatgtacacatatagcatttagttatctcaattgtggatggcgcttttttttagagaaaatcagtgatgaagctacaaaatgtatggaaaaggcttctgaaatattggagtatttgtatgcctatagtgattgcgaaaagttatataaagagtattaccgtttagtatgctcattagcgtattatatatctgcacagtattctaaatcttttattatcttggggaaatataattctgattcatatatagggaaaataacaaaattatttttaactagaaactttatagaattagaaaggcaactggaaattaagtacttgaagaacgatgaagaaacttcaagtgagaataaggataacataatatatgaaaaaattttatctaatgcatttttacatataattaattttattcgcacagggaagatggaatctttggaaagttctaaagatatggttcgagatttaattactttggctgatataaataatgaaccacatatgtggtggtactttagactactatatttggtttttgaagaatatgaagatgggtctttgtggaaagtggttccaccgcttttagataatgatgatatatcagctaaatatatttatgctaatttatacaaaaagaagccaataactgaattttttaagtcgcaaagggaatgtttggacggagagttattaaagaacgatggtttcgtaattggaatgcctactagttcaggaaaaacaaaggttgctgaagtaacaatattaaaaactttaactaaatctccaggtgcactttgtatttatattgcaccttatcgatctttggctaatgaagtggaatttagcctatctagtatgtttgagattatgggttatcaggtttcgcagttatatgggggatctcaaacgtctccgctggatcggcaattgactaagcaagctaatgtcataattgttactccggaaaaagctaaatcgatgttgagatctaataaagacttaaaggatagaattcaacttgtaatcattgatgaaggtcatttagtcgggtttcagccaagatatattacaggagaattgcttattgaagaactaaagattgttttgaaaaaaaataatggtcaacttgtactactatctgctgttcttcctaatatttctgatttttctttgtggattggtgaggatgataaagctaaaagaatgtctgtctggagaccatcaagtcaaagatttggagaattatctttagcaagaaatactgtgaatataaattgggagggagaaacaccatcatataataagaactttataacaccaaaattagtaaaaccagaacggattacaaaaacaggaaggaaatatgcagctaaatattttccagcagataaaaaagaaggtgttgctgcaaccgcaacaaaaatgctagatgtgggatccgttttgatttatgtaggaagatcgaatatggtattgtctcaagctaggattgtttcgaaactctttgaggaaaagggaatagaacatgagtggaggaataaaaacgattggttgtttgtggaattagcttgtatagaagaatatggggaagattcagaaatattatctttattaaaacaaggtatagtaccccatagttctaaattaccaacagaagtacgtcagagcatagagaaattaatggctaatgataatcctaagataataattgcgacatccacacttggacaaggggttaatattggtgtttcgacagttattgtatctaatgttcgtttagatgagagtaatactgtaaaagtaaatgatttttggaatattgctggtagagcggggagggcatttacagatacagagggtaaaattctatacgcaattgatagaaataaaagccagtggtctatttataatcaaattcaaatgaaagaaatgtatttcaaatatagaaatattgaaaaagctacaagtggtctctatcttcttcttcgttatctatttatattatcggaagaattcgagatagaatacagcttatttttagaacttctagcagaaaatagagaatccattgatgaacagaaagctgtggagtttttttctgaggcagatcagttccttgagttattagatgatactctaatttccatggatattatgaatgaggcaaacgttttggaaaattcctcttcttggatagacgatgtctttcgttcttcgctagcttttattcaagcaaaacaagatcaatcattttctgaagaaaaaatgattgaaatcttaaaagcaagaaattcaggtgtaataaagttggctggagaagaaacaaaatggcattcaatagcatcatcaagtgtaccattgagagcaagtcttgtaattgaacataggatagatgagctactaaagtatgtacgaaaatacattgactcagataagagttttgaagagttattatctcttgtgatggaacttgatatatttattgatagtctaccgatatctaaaatagaaggaatagaaataggtgctaatttttctgaaattcgtgagggatggtttagtggtactagcatacacatattggaaaaaaggcacgaaaatgtaagaagtatctgtaatgaatattattcttttcattttccttggattgtaaatgcgatagctcaaaagatcaaattaattgattgccaagaggaatcaaaggtgttggagcaaatttctttatttgctgaaatagggttaaacaataataaaagtgtaaaaatctatttggcaggtataaagtcaagaaattgtgccactgaattatctgagaaaataggcatggataatgatttggtgacgcctgttaaggagctacttctagagtttttcaatttatgtgtagtgaaaaaagaggattgttcagaaatttgtttcaattggttaaagcttttaaatgatgaaaaagaagctaaagagtatgtaaaggtaaaaagacggtctttccaatttaatattccttttgatttacatgacaatcttttatatataaagaaagtacagagtgaaatatggctgtgctcatttgattataaaattaaaattcctgtattaaaagagaaggcgttatttaatgagtgctcggatatacctgatattttcttgagaaaggaaaaaggagatgtctggattttagattctcataatccttatattattttttattaa

SEQ ID NO: 57868 - DNA, 816 bp, Bacillus cereus; identical to SEQ ID NO: 57850

SEQ ID NO: 57869 - DNA, 3249 bp, Bacillus cereus; identical to SEQ ID NO: 57867

SEQ ID NO: 57870 - DNA, 822 bp, Bacillus thuringiensis serovar morrisoni
atgatattaactacacaatcacatattagatggtttgaaaatacgggtcaaaccattcagacatctgaaggtgagaatattgaggttttagaatttaagcatgagcatgatgaagaaattttatcttcatgggcaaaacattttcgtgaacattattgtttagatagtgaaattgatttttttaaggagggttacaattatacaagagcagaattcttaaacataataaaatttcctgacatttctcgtactccaggacctagtatacgggcaggggatttcggagaaatattagttgctgattaccttgagtttattctaaattactgggtacctcgtactcgatatggcacaaaagtaattggtaatgaatcatcaaaaggatgtgacactctggcttttaaaattattagtgatggagagtatacgcctgaggatacactagcaatttttgaaaccaaaacacaattttctggtacaagggcaaaaccacgtttgcaaaatgctgttgatgattcaaaaaaagatgtagctagaaaaggtgagtcactaaatgcaattaaacaacaactttatctcaaaaatgaacttgaagaatctaaaagaataaataggttccaaaaccctactgatcatccatataaagagatttcaggggcagttgctatgttttcttcaagtctaatggatttttcaacgattacaaatacatctattaatgagcatccaaataaagataatctaacattattagtaattcacggtgaaaatatgatgactcttgtccatgaattgtataggagggcggcagatgaagcctga

SEQ ID NO: 57871 - DNA, 3153 bp, Bacillus thuringiensis serovar morrisoni
atgaagcctgagagacaatcaaaaaaattattaagtgctactagatcaaaagcaaaaatgaatgaatataacgtcgaagaagtagatcatataaaactcacaaaagacccagcaaccctttttacattggcaatagggttgctgggtgatttgtcagcgtatataaattccgagaatccagacgagcattatttaaaggaattgcgtgataaccttaaattttcagcacatttttttgatgcgtatttacatactaatcttatggcagatttagatgagtacgttttactactaggctcagcctcttattatttatgcgacttaccaggaagttcacttgttttagtaaaacgtattgaaatgaataaacttaacttagaatgttcggatttagataccttattagctcgactgctaattggaaatttcaccccctgttatgtagaagaaagcggaacatatgcaatgaatataatagatatttcaattaatctatctatattttatgagacaggtggaaatgaacaacatatatataaactcatttccgatctaaggggtgaggcttataaatttggttctccaagagagttgctttttgctgatgtaattggtgcggtaataagaaaaagaattgaaaactctagtagaaaatgtttgcctaaatattctggtataagtgttgggaattgggaatccattttacaaaataaaaattttattcaagaattttggccagcacaacaccttttgggagaaactggtgtttttaaaggggaatccgctgtaattcaattaccaactagtgctggtaaaaccaaggcgacggaagtaataatacgtagtgcttttctatcaaatagaacctctttagctgtaatcgtggctccatttagggcattatgtcatgaaataagtatgagtctgagtaagtcgttccaaagtgattctattaatatagatgaagtatcagatgtgcttcaaatggattttgaactgaaatcaatacttagagatgatttcatcttagttgttactccagaaaaacttatttacatgctgcgccaatgtccagaattggcaacggaaattgggttattaatatacgatgaaggacatcaatttgatagtaatacgcgaggaatcaattatgaattactccttacggctttaaaagggatggttcctgaagggggacaaaaagtattaatatccgctgtaatcaataatgcagaagtggttggttcttggcttaatggccctgaaaataaagttgtttcaggagttaatctttctcctacatatcgaactgtagcacttacaagttggatggatcgtcttggaaaacttcaatttctgaatgaagaaaatcctgatgaattagatttttatgtacccagaataatagagcaacaaaaactgcaattgaaaggaagagaaacaaccgaacgtttctttccgattaaaaacgatagcagcactgtctctttatttttaggtttaaagctaacttcaaatggaagtgtggcaatattttgtggaaagaaagataatgtatctagtctttgcgacaaggtagtggaggcatatgaacgagggttaactttaataactccgtttgaattatcggaaaaaaatgaattaaggaaactgtatagcctttattgcttacatcttggttcacaagcttctgtcactaaaggtgcggaactagggattttaacacatcatggaaatataccttctggtatccgtcatgctgtggaacactcaattaaagaaggcttagcaaagttcgtcatttgtacatctacactagcacaaggtgttaatttacctattaggtatcttattgtaacgagtatttatcaaggatctgaaaaaattaaagttcgtgattttcagaatttaattggtcgcgtcggtcgttctggtatgcatacagaaggtagtgttatattcgcagaccctaatatctatgataaacgtaacagttataataataaatggcgttggcgacaagtaaaagacttattagatccaaataactcagaaccagttgagagttcattgttaaagatatttgatcccttatgtagcgatgataagaagaatacacataatattaattacataaaactatttgaaatttatttcgaagactctgataaagcttacgtgggattggaaaaaatagcgaaagcatttgccaacgagggattttcaattgatggactgaatcaacaagtcgaatcaaaaattaatgtactctcatctattgaaagttatttgatggccaattgggaatatgcaactaatgaagcaggagaaaactgggtaagctcacttgctaaagagactttggcttattcactagctgatgatcatataaaagaacaaattgttatcttatttcaaatgctagctaacaatatctcaaataatattccagaagactcaaaaaagaaatcgtatgggaaactgctatacggtgtggaaactgctataaagattgaagaatggactaaaatgcatttagatgaacttgtgaagtgtgaaagctatgaggagcttttgaatgttttatggccgcttttagcatcgaatattaaaaataaaacatttaataaatgcgaggagcctgaaattttaagagaagtcgctatcgcatggattcatggaagggcttattttatactattagatattcttaaagataaggatattaggatgaaaacaaaaaaacagcgtagagaatataaaatagatcatattgtagaaatttgtgacaatgcactttcatatgaaggtatgcttctaattggagcggtcgcggaattagttgagtctttaattactgatcaaaatatatatttagttgaaaatcttaagaaattacaaaaacgtatgaaatatggtgtacctaactctttaaatatactattttacgaattaggttttgccgatcgaatcatttcaagagatttgagcggagttttaagagatcaatctccacctacaaataagagaaagttaaaatcgttaattcaaagttacgaaaaagattttcgtaagcaattaataaaatatccttcatattatacctctgtcttagagaatatcttattgagtagcgacaatagaatcgtctaa

SEQ ID NO: 57872 - DNA, 975 bp, Bacillus smithii 7_3_47FAA
gtgattaacatttcacaattcctatgtcatttctcatcggaaactaaagatcaatttataatactagaattaaatgaggaaaaagaactgtttgaaaaactaccagattactatagaaaatgttacataactgattctgatttagaagagagaatcaaaaattttggaccagcagaaaagatattagagaaacttatacctgatcccggaaagactatgtcaggtgagtttgcagaaatattatcttatcagttattaattgacatgtatagggattttaatctatttggtcctaaaaagtggctttggaaagtagaccgtaatgagccaatgaaaaaaacagatgtagtattatttggggttaaaaatgctgaagaatcatcaccagacgatcttgttgtgtctgcggaaataaagtcaaaagcaacggaaggtgattttcatcctttacaagatgctattgatggcgctaaggatgactatgttaaacgaatggcaattactctttcatggctggaagaacaatatatcagattaaatgattcttcggctttaaactcaattaagcggtttgttaatgcgattgaacctagctatggaccttataaaaaacactataaagctataactgttattgatagtgatatggttttaagagagttaggacgtgaaattgatttttcagtaaaagtattaaaaaaagattggaaaagaataaaaaaagactgtgaagagcttggggcttcctatgacaatgacacaaagaggctttcatttaaaaatgttaaaagaaaagacattcttcgaagtaattctaggaataaagattatattctctacctttatgatttatacaattttaaactaggtgattattctgacgtgactatagtatcaattgaaaatttaaaaaatttttacgaaaaagtttacaaaaatatagtaacatcatataaggtgattgcgaatgagtaa

SEQ ID NO: 57873 - DNA, 2973 bp, Bacillus smithii 7_3_47FAA
atgagtaatattttggtagattggattcgggattctaattcatggagaaatgccatggaattagatgtccttgaaaggcaagaaaaagagtatttattcttaaaacaatcagatgatttttatatctcgctatttaataaagtttataaagcattatctagcggttcttatttaacggaagaaaatcagcaagaattactttttattgcaaaagggttagaaatgtactctgtccaaagtacacgtgaaaacttttttggagtcaattatgctgaaaatattctctatgcatcatcaatatattacttaacagattactttacaacctcttcaatattagcaagaatgtttcaaacagaggattatgaatctgagatagatcaatttattcacgcctttttaattaataacagggacattagaaatccatatatggatatacttaatgattttttggaatcaggagataaacaaatattaatttatattatcaaactaattgatgagagattaaaaacttcagatccttataagtatgttcaattattattggcaaaaaagttaattgaaaaatttagtgaaaataatatttggaatagcctaaccagagcaaatccagcaattaattggaaagatttcattttacacaagctagaaagcagttgggcattatttccttcacaagaagcagctttgaaaaaggggatactcattaaggataattccttttctattcaaatgcctacaagttctggaaaaacttctctatgtgagatggtaatatataatgaaattgtttataagaggagaaaagtgcttttattagctccttatagagctttagcatcagaactgaaatattcttttactaaaaaatttagaaatcttggaataacagttaaaactatatacggtggttatacaccctctagagaagaaaaagcagaattggataatgttgatttattgatatgtactccagagaagtttatggctatagagaatcatattccaaatcttcatgaggaattctcaactgtaatttgtgatgagggacatttacttgatgatgtacacagggggttaaattacgagctattattagcaaagttcaaaaatagtagtacaaaagaaaagaagtatatttacctttctgctattattcctaatatagaaacaataaattcttggttaggcggggatgaaaatacacttataaaatctaattatagacctactgacttgaagtatggttttttaatagagaaaggtgataacaaaaacaaatactttgatttagaaatatattctaaaaaaagtgaattcgaaaaatactctataaataaatttctgagtgttaaagaagactacaaatatacgaaaagttctaccggtaaaataaacacatataattataaaacttataaaacaagagctatttccgttgctttacgttcgctaaaaaatggggttgttgcagtatttaccccccaaaagggtgaaaatggtgtaaaaggtctagctgaagagttaattaatcaaattaaattacttaactttcctaaacctttagatttttctaaaactgaggaagtagaaaatctaataatatactttgaacgggtttttggaaaggattatatattgaccaagtctgttaagaatggttttgtgattcatcatggtgatttaccgcaatttgtaagggaagtaatagaaaatagtattagacaaaagataatccctttaatagtttgtacgaatactcttgctgaaggggttaatctaccaataaaaacccttgtgttgcatacaattaaaagattcaatttttccttaaaaataatggaaccaatttggaaaagagatataaaaaatattattgggcgcgccggaagggctggtcaagaaatggaaggtttagtaattactgtaaacccaagtgagcacagttatatccaagaagtaatatctaatgaaaaaatagaaccagttagggggtacttgtaccaaataattaatgaaattacaaatgaattaaaagaagacagattgttaataacaaatgaacttattaatgagcaaagtgaagaatttaaaaggttaatagattcaattgacaagtccataatagattctctttatgaagaatcaatctccgatgatattagtaagatacttgagaatttaataaataaaacttacagctactttcaatctgatgacaataataagttaactcttgagcatatttttaaattaagaggtgaggttctaaatccgtatttaaaacggaatgaaataggtatattaaaacaaagtgactcaacagttagaatttatgaaaacattaaacgggttatcaacttaggagatgatttctggcaaaatactactcttccatttactgatgaaactattgattatcttctagatataattttttctttaaatcatctagaatttgattttgaacgatttcatgaagaaaatgatattaatcttaccaagaaattattgaaaaaagtaatattaaactggatagagggtaaatggtatggtgaaatctcagataaaaccaaagttgaagttgaagatgttctaaaaataattttatttatagaatccaatatcgtacccatactatcaaaaataattgcaatcgctaagattgaaatgcaaaaacaaggaataaatattagtaaggatcttgaagatataggtctttttattcagcatggtattaacagtcgtatttatttaatcctaatagaattaggtttttttgaaaggatggcaattctctctgtcggtaattggattaacgataatttctctacgctaaatttaaatgaaaaagatgttattgaaatgattttaagagaaaataagatagaaatcatagagtttctaaaagaaactgttcctcgtatttccttaaatgcatttagttcaaatttaagaaatatttag

SEQ ID NO: 57874 - DNA, 849 bp, Lactobacillus brevis
atgaaaaatattcctgtgtatatggattgtttttacgagaccacccatatgagaagtattgacaatcatgacatcgaactggtaaagataaaggtaccttttgataatgatgatgttgtgaaagagtgggcttcgagtttccgaaaaaaatttattagtaatgtggatctaaacgatatgattgttgctacacaggctgctagtccttataagttcttgacagattatatctatccggataaggtaagcggcaatatagttagaatcggcgattttggtgagatattagttgctgactatttgatgtttattcgtaactattggataccaagcctgctaacaagatattcgcagaaacaaaataaagataaatcgacaatgggaacagatatttttgctataaagcttgcagataagtcaataagtaataatccgaaagatgaactttgtatttgtgaggtaaaaactggattttctgacaaggcaaagaagcgtcttacagatgctgttttagatgttaataaagataatgttgagattgccgacagacgagcaagcgtatcattagctgcaacgatgttaaccttgaaaaggagaagtgacatcagtccaagttacattgatcagattcgaagatttcaaaatccattagacaatccctttaaagagtcttatttggcggcagccgtaatcgatgaaacacaaatacggcgtaaatccttagaagccgtaccaaccgtggattcaccacataaagaaaatttgaaattaattacctttcatggtgaagacttaaagaagctgatggatgctttatatggggaattcggggtgagtgatcttgagtaa

SEQ ID NO: 57875 - DNA, 3018 bp, Lactobacillus brevis
gtgatcttgagtaaaaacgaggatgtcttaagaagaatttgggctagaaaaaaagaattagaattgagtacacatagagagttgtataaacaagaagataattggagtaagctgctttactacacctttgcggctctgtctaactatttaatgaatattgaaaataatcatttttcaagagatttacaattttctgcgaaatattttgaacttttgccaacaattaacgatgatagtaacttgttagcaggagataatgaacttatgttgtttggatcagccgcgtatttctttgcagactatcccggagctgcgaatgtagcattaaagcccattgatgtcggaagtctatctttttacgaaaaagttctttatgctgtcattctgaatgatgggacctttcctgaaaaaacatttggaaaagttccgacaatgatgaacaatattttgttaggcgatttttctgaagattcattaagaagaaccttatccgaaaaattaatgaggaattctatagacaaactcactgattcagcttacaaagatggaatagatgaaaatatacttgctgctgaatgtgtatctgctgtcgtcttactaaaaattaagcattctactttgagaataatgtctgaagtttctggaggcactgatgattattggaaacaagttatacaagataaaaaggtagagcgaactttatgggcttcgcaaagggctctaggagaacatggtgtatttagtggtagatctgctgttgttcagatgcctacaggtgcaggaaaaacggcatctatttctttaattttaagatcagctctttcaaaggaaaaacttagaattgctataatagtagccccgtttaaatcgattcgtgatgaaatatatcaaaaacaagttcaaaattttcagggagaatcaattcaagttaatagacttagtacggatttaaaaatggattttgggtttattttccatcatgaaaaaccgcgagtattaattgttactcctgaaaagcttttatttatgatacgacatagtaatgaccttcttttccaaacagatctaatcgtttttgatgaagcccatcagctcgataattcagagcgtggtataacttttgaattgttacttgtaacaattcgacaaatcgttcctgaaaaggttcaaaagatatttatttcagctgtggtgggtaacccagaaacaatttccgagtggtttaatgctggaaataatgttgagattacaggagtgccagagaaacggtactcgaatgcctatggttgggctgtatggaataaaaaaaccaactctggagatctcttttttaaaataaatgttggtaatgatgatagatggacaccatacagcaacgttgttaatcccgtaaaagttaaaagaattttagaacctaatttttcacgaaaaagccccgtaaaggcgtataaatgggtaactatcttatacgccattcattttatgtcgaatggtatggtcgcagtattttcacccagaaaggatactattagtggtattgcggcagaatttaccaaatatgctaaactaaatgatagttttagttcaatattgaatgtaaatgaagatacgaaggctatagcaagcttatttagccacaactttggaaataatagtaaacttgttaaagcatttcaatcaggtatttttgttcatgatggtgagattcctaacagtataagaaactcaattgagtttgcagcacaacgaggaaaaataaaacttctcctctgtacgaatactttggcgcagggtgttaacttaccgattaaaacgatgctagtcacttctgtgggacagggaagtttgaaacttaaaaatagagatttacgtaatttaattggtcgagttggtaggtcaggtattgaaaatgaaggtaatattatatttgtccagggaagtgactttgcaaataaaaatacaggtaatgcaatacgtcagcttgttgaaaacattcccccggaaaatctggggagctcgttgttaaacctttttcaaccaacaccggttgatccctataatatgcagacggaattaatcacttctgatcagtggtttacagctgattttttagagaatccagaagagtgggtttctaaccatatttcgacagatgatttagcgagagcagaagtatatcgtaaaaagggggaagcagtctcaaaaatcgaaggctttttaatgtcactatgggacttcattcaaatggggaatccaacagataatttgagattaattgccgaaagcacatatgcgtatcacattagtgattctgaggatagtcgtagggatattgagaatttgttttattttttgtataggaaaatagtacgattagttacagagagcgacctgactatatacaccaaaatgcttacaggtattaatgaatcagcgcttatgaaaaattgggtactcgagaatgaacctcttatagtgaatacaaatagcttaggccaaataatttcagatctctggccattactaaagcatgatttaaaccccaaagaaatggaacacgacaatctttttcaaaaattgttagaggggtgggttatggggacgagttatggagatctacttgatgtttggaaaagttttgaaggtgtgaagataaagaataaaaatccaaatgtggaaaccgtctacaatatctgtgaccgattatttcagtttaatatggcagaacgagtttcggctattgcggaacttattgaggatgatgtgaagaaaaaacgtttatatttattgcatactgcaataaagtcaggattaccaacgttaaccgaaaacgcaatttacagtattggactaaacgacaggtacctgtcttcccaaatagcattgcttacaggagatactagcctcacaaaaggacaagttaaagactggattagtcaccataaaaacgaaataaagcaacgtgaaaatgaaagcctcacaagatttttccttaaagttttagatgaaattgtataa

SEQ ID NO: 57876 - DNA, 861 bp, Lactobacillus brevis
ttgaatatacctgagtacatgagcagttatgctcattttggttccattcaaaatattgaagaaaaaaatattgaagtaattgctgttcaagcacaatttgacaatattgagttgattactgactgggcgaagtcctttcgacataaatatatctcggatgaggatttgctagaaggcatggaggatattggggagaatgaaccaattgatttcctaaaggaaatgatatatcccgaaaacaagaaatttaaaagtggtgattttggtgagattttggttgcagagtacctgatgtataccgaaaacttctgggttccaacattgtctttaagatattcggaaaaatccaataaggaggaatctacgaaaggctcagacataattgcaattcgttttgatcaagacccggctcatgagtctgtctacgatttactatgtattggtgaagttaagaccggatcaacaagtaccagtactattcgtggaagattgcaagatgctataaatggctctaataaagatagtatccaactacttaatgctaagcgaggtagtgttggattgaatgcggttaaattgaaaataaaacatcgagaaccaaaggaaaatcaaggtgaatattcataccgtgaaatagcaagatttgagaatccgattgagagaccgtaccaaactcagtatgttgcagcagcagttgtggaccagaaacacattaatcaaaataccgtgaaaaaagttgtgacgaaagagtctcagcatgttgattcattgagaatgattgctgttggagtctcagatattcaaaaattaatagatgctctatacagtgaattaggggtaagtaatcttgacaacgaataa

SEQ ID NO: 57877 - DNA, 2997 bp, Lactobacillus brevis
ttgacaacgaataatgaagtactacgcgatatctgggtaagacttaaagaacaagaatttgcaagcagctcagacttaactagtaatagagaaatgtggaataagcttctttattatgcactatcatctgtaactgattatttgtgtgaagataatttggctgttaatcaacagcttcgttctcaattagaatttgctggcaagttctttgaaacattgccacagattaatttagatgttaataagctatttggtgatgaagaactgatcttattttcagcgacggcgtactcatttgcgggatatccaggtgcaagtgcggttgtactaaaagggctaaccggtgataaacttagtttaaccgagcgagtattagctgaggttatcagatacggagacgcaaacttcccatgggaaaatagccaaattgggttgactacatcccttgttttttcgggtcacgaagatatcagtatcttatataaacaggtggattcattaatagaggatgcatatcggcgtgatgatgatatggatataattgcagcggaatgcgtgaaaaaaactatccggcagtgttgggaaaatgccacaattaagctaatgccgaacttttcagatacggatcagcaaaagtggatttcatcacttactactgaaaaattgcatccagtcctttggagtgcccaacaagaacttgggaaacataacgtttttcgaggaaattcggcagtggttcaacttcccaccggatctggaaaaactgcctcattttcgcttattcttcgggccagtttgtatcgtgattcattccacgtagcgatcattgtggcaccgtttaaatcaattcgtgatgagatttactgggacttgaagctacaatttcatggtgaagaggttgatattaatcgtattagcaccgaactaaaagttgacttttcagactttagtttgatagaacgacccgcaataataattgttactccggaaaaattattatttatgattcgacacaatcctaattttttagatgaaaccggattattcatttttgatgaggcccaccagttagataatagcgagcgtggaataacattcgaattgttgcttagtacaattaattttcttgtggcagacgaaatacagaaggtatttgtttcggccgtgattggcaatcctgatgaagtgtctgggtggtttaattctggcaataatgatattgttagcgagctacagccaagaaaatttgaaaaggtcctaggatattcatattggaataatgagacgaatcatggagagcttcttatttggaacaaacttcaagaaacagaaccattggttaaatttccgtacttttttgacccgattaagattagaaagaataagactcaacctgattttactattaaaaatcacacggctggtatacgttgggccacagcattaactacaagacgatttatgaggggcggaatggttgctgtatatgctccgagaaaggatactattaaaggactagctaaagtttttatggagctacaaaaagcggcaccgatttcaattaatgatagcgaatcaattgcagcactgtgtaacctgtttgaactgaattttggcaaaaattcagttcttgtaaaggcgtatcagagtagaatatttatacatgatggtaatataccggatggtattcgtagctctttagaatttgaggctcaaaaaggaaatattccgttactattgtgtacaaatactcttgcgcaaggagttaacttgcctattaagaccattattataacatcagtcggaaatggtgaccttgaactgaataacagagatacgattaatttagttggacgtgttggaagagctggagtcattaatgaaggaaatatcatttttatgcaaaatatcaatcctaactctgataaacgtgcgagaactgcgttaaatgatctagtaaatgaaacccctgcagatcctattggaagttctctcgcatcattgttcatgcgtacagcagttgattcatatgataatgcaacagagtatatccaagcatctgattggtgtactgcggagtttcttaatgatccgctgaagtggatctcaaatctagtcgaagatgtttctcctaaacaggcaaaggcatatagccacgtatttcttgaaaaagcaaacggtgtatggaaaatcgaaaactatcttatgtctatatgggatgtaattcaggagggggatcaggaagcaaatatagaaaaagttattcggaaaatgtttgcttccacgcgtatacaagatgatgaatttgatctaatggtctggacatttaagtatctcggtgaaaaaatcagtagtttagctgtcggtggatatgatatcttagtcatgagtaaaatgatggttggaattaatgaggcattaaatgttgaaagctttgtggatagcaatggtgaatcaattattgaaagcgatgatctagaacagattattattgatatttggccaatcttgagaacttccgtttctgtaaaaaatcaatccgaggaaaatctttatagttttctgttaatcgaatggattaaaggcaaaagttatattgaaattcttgagtcgtggaaattagaatatccagaagttgggttgtcaaatcgcaagctcgaagttgaaagagtgtatattatttgtagtcaggtattccaatatgatatgcagttaaaactgactgctctaatggaagttattacagaccctgtaaagcatgcgcgattagaaaaactacagattgcgatgaaaactggattacctaggaaaacagaacaattaatgtatggaattggaattagtgatcgtgttttggcgcgtctactttgtgaagaaatgggtgttgatactgcagatcataaagaagtgttacattggctacgaatgaacaagaagcaaattattgaaaaatttggcagtatgatccctgagtatttcagaagccgcatgtggtaa

SEQ ID NO: 57878 - DNA, 684 bp, Lactobacillus brevis
atggaggatattggggagaatgaaccaattgatttcctaaaggaaatgatatatcccgaaaacaagaaatttaaaagtggtgattttggtgagattttggttgcagagtacctgatgtataccgaaaacttctgggttccaacattgtctttaagatattcggaaaaatccaataaggaggaatctacgaaaggctcagacataattgcaattcgttttgatcaagacccggctcatgagtctgtctacgatttactatgtattggtgaagttaagaccggatcaacaagtaccagtactattcgtggaagattgcaagatgctataaatggctctaataaagatagtatccaactacttaatgctaagcgaggtagtgttggattgaatgcggttaaattgaaaataaaacatcgagaaccaaaggaaaatcaaggtgaatattcataccgtgaaatagcaagatttgagaatccgattgagagaccgtaccaaactcagtatgttgcagcagcagttgtggaccagaaacacattaatcaaaataccgtgaaaaaagttgtgacgaaagagtctcagcatgttgattcattgagaatgattgctgttggagtctcagatattcaaaaattaatagatgctctatacagtgaattaggggtaagtaatcttgacaacgaataa

SEQ ID NO: 57879 - DNA, 2178 bp, Lactobacillus brevis
ttgtatcgtgattcattccacgtagcgatcattgtggcaccgtttaaatcaattcgtgatgagatttactgggacttgaagctacaatttcatggtgaagaggttgatattaatcgtattagcaccgaactaaaagttgacttttcagactttagtttgatagaacgacccgcaataataattgttactccggaaaaattattatttatgattcgacacaatcctaattttttagatgaaaccggattattcatttttgatgaggcccaccagttagataatagcgagcgtggaataacattcgaattgttgcttagtacaattaattttcttgtggcagacgaaatacagaaggtatttgtttcggccgtgattggcaatcctgatgaagtgtctgggtggtttaattctggcaataatgatattgttagcgagctacagccaagaaaatttgaaaaggtcctaggatattcatattggaataatgagacgaatcatggagagcttcttatttggaacaaacttcaagaaacagaaccattggttaaatttccgtacttttttgacccgattaagattagaaagaataagactcaacctgattttactattaaaaatcacacggctggtatacgttgggccacagcattaactacaagacgatttatgaggggcggaatggttgctgtatatgctccgagaaaggatactattaaaggactagctaaagtttttatggagctacaaaaagcggcaccgatttcaattaatgatagcgaatcaattgcagcactgtgtaacctgtttgaactgaattttggcaaaaattcagttcttgtaaaggcgtatcagagtagaatatttatacatgatggtaatataccggatggtattcgtagctctttagaatttgaggctcaaaaaggaaatattccgttactattgtgtacaaatactcttgcgcaaggagttaacttgcctattaagaccattattataacatcagtcggaaatggtgaccttgaactgaataacagagatacgattaatttagttggacgtgttggaagagctggagtcattaatgaaggaaatatcatttttatgcaaaatatcaatcctaactctgataaacgtgcgagaactgcgttaaatgatctagtaaatgaaacccctgcagatcctattggaagttctctcgcatcattgttcatgcgtacagcagttgattcatatgataatgcaacagagtatatccaagcatctgattggtgtactgcggagtttcttaatgatccgctgaagtggatctcaaatctagtcgaagatgtttctcctaaacaggcaaaggcatatagccacgtatttcttgaaaaagcaaacggtgtatggaaaatcgaaaactatcttatgtctatatgggatgtaattcaggagggggatcaggaagcaaatatagaaaaagttattcggaaaatgtttgcttccacgcgtatacaagatgatgaatttgatctaatggtctggacatttaagtatctcggtgaaaaaatcagtagtttagctgtcggtggatatgatatcttagtcatgagtaaaatgatggttggaattaatgaggcattaaatgttgaaagctttgtggatagcaatggtgaatcaattattgaaagcgatgatctagaacagattattattgatatttggccaatcttgagaacttccgtttctgtaaaaaatcaatccgaggaaaatctttatagttttctgttaatcgaatggattaaaggcaaaagttatattgaaattcttgagtcgtggaaattagaatatccagaagttgggttgtcaaatcgcaagctcgaagttgaaagagtgtatattatttgtagtcaggtattccaatatgatatgcagttaaaactgactgctctaatggaagttattacagaccctgtaaagcatgcgcgattagaaaaactacagattgcgatgaaaactggattacctaggaaaacagaacaattaatgtatggaattggaattagtgatcgtgttttggcgcgtctactttgtgaagaaatgggtgttgatactgcagatcataaagaagtgttacattggctacgaatgaacaagaagcaaattattgaaaaatttaggcagtatgatccctga

SEQ ID NO: 57880 - DNA, 861 bp, Lactobacillus plantarum
atgaaaaaaaagcctacatacatggattgcttctgtgaagttgttcctataaaaaatattaataatcatgaaatcgagctagtggaaataaaagtacctttcactaacacgtcaattatagagaattgggcaataagtttccgaaacaagtatattaataatgatgatctgaaagatatgactgaagcaacgggcatcggaagtttctttgaatacttaatccactatgtttatcctgataaagatgatcaacagggtaaaattgttagaattggagacttcggtgaaattcttgttgccgattacttgatgtttgtacgtgattattggataccaagtttgttgacaaggtattcgtcaaaacaaaacaaagacaggtcaaccatgggcgcggatatttttgctattaaatttgttgataatatgacaagtgacaatcctgaagatgaactttgtatttgcgaggtgaaaaccggtttttccaagaaggccaggtatcgccttaaagatgctgttgacgatatcaataaagataatgttgcagaattagataaacgtgcaagtatatcattagctgcaactatgatagccctgaaaaaaagaaatgatatcgaagccaatttcattgataaaattagaagatttcagaatccagttgagaagccatttaaaacgtcttatttggcagcagccgttattgatgagactcaattgcgcgaaaaaaatttaatggatgtaaagactgatagttcaccacaccgagagcaacttgggttaattacatttcacggtgagaacttaaagcagctaatgaatattctgtatggagaacttggggtgaaaaatattggcgataaatga

SEQ ID NO: 57881 - DNA, 2997 bp, Lactobacillus plantarum
ttggcgataaatgatgatcttttaaaagatatttggggtagaaaaaaggaaattgagctcagtactcataatgtttcttcaaaaaaagagaatacttggagtaagttgctttattttactttcggagctttgtcggattatttggtaagtaaggataaaaatgagcagttttcaacacgattgcaattttcagccaaatattttgaacttcttccagcaataaaggatgaaagtaatccattgtctggagacaatgagctaatgctatttggagctgcggcatatttctttgccgattatcctggtgctgcaagtgttgcattaaaaccgatagttgttagtgaactatcttcattcgaagaagtgttatacgctgttatttctggcaacgtacatatctctaatgaaatctttaaaagtattcccagtactttaaacgaaatattactaggatttcaaacagaagacgcaattaatgaaaatctcaaaatttttgttgatcaagcttataactatggaacagatgaggatatactggctgtagaatgtgtatctgcagttattcgacgcaagatcaaaacatcgactttaaaattaatgcctcaaatgtcaggtggttctgtcgattattggaaggacatcatccaaaataaaaaggtagaacagaccatgtgggcttcacaacgtgctttaggagagcaaggagtatttgatggaaaatcctcggtaattcaaatgccaacgggagctgggaaaaccgcctctatttctctgattttaagatctgctctttcaaaaagacaacttggaattgctataattgttgctccattcaaatcaatccgagatgaaatatatcaaaaacaagttcataattttcgtaatgaaccaattagggttaataaacttagtacagatttaaaaatagattttgattttatccttcagcaagaggactctaaaattttagttgttacacctgagaaacttttatttatgattcgtcacagtccagatcttctgtctcaaactgagttggttattttcgatgaagcccatcaactggataacgctgaacgaggtataacatttgaacttttacttgcaactattagacaacttgcatcagacaaaactcaaaaaatatttatatctgctgtagtgggaaatccacaaactgtttctgaatggtttaatgctggaaataatgtagaaataactggaattcagcaaaaacgttactcaaaggcgtatggaatagcccaatggaatatagatagcaactctggtcaattatttttaacaacggatattaatagtaccaagaaatggatacagtataataacgttgttaatccaattagggtaaccaatagaactattgagcctaatttttcacgtaaggatcccgcaaatgcttatagatggttaactgttttatttgctgggcgttttgtgtcaaacggtacagtggttgttttttctccacgaaaagattcgttaagtgttatcgcaattgaattcactaaatatgcaaaaattagtgatgagtttcgctcaaacttagtattagatagtgatactaaagcaattataagtttatttaagtgtaattttggtcagacaagtaaactcgtaaaagcatttcaagcaggaatctttattcatgatggagaaattcctagcagtattagaaattcattggaatacgcaatacaacacagatcaatacgattgctactttgtactacaacgctggcacagggggttaatttaccaattaaaactatgctagttacttctgtggggcaaggaagcttacatttaaagaatagagatttacaaaacttaattgggcgtgtaggtaggtcaggcattgaaaacgaaggtaacattatattcgtacagggtaagagtgcaagttcaaagtacaatatattagaggcagtgagtatgattactaacaaaactccagcagaaaatttaggtagttctctgttaaatctttttcagccaacacctctggatgattataacccacagtcagaggtgataacatctaaccaatggcttaccactgattttttagaagatcctgaaaaatggatttctgataatgttttaaaagaagataccaaacggatagaaatatatcgaaggaaaggtcaagctgttgcaaaaattgaaaacttcttgatgtcgctttgggatcttatacagatgggagattcgacagataatttagaaagcatcgttaagaatacttatgcctatcacattagtgaatctgaggaacaacacaaaaagctcgaaaatctgttttatttattatacgacaagatagtccgactgataactggagaaaatgatatacaggtgtatagtaaaatgctcatgggtgttaatgaagcattggctatgaagaagtggatatttgaaaatattgaaaatataataaatactagcgatatcaagcagatagtttccgaactttggccgttattaagcatggttttaactgacaaggagatgcaatataataatctgtatctggaaattttaaaaggttggattactggagaaaattatgaaaatttagtgaatatttggaatcaatttgctgatgtaaaaattaagaataaaaacccaaacgttgaaacggtatattgcatctgtgatcaaatgtttcagtatgatatgtccgcaaaagtatcggcaatcgcagaaattgtggaaaatgataatgttaagagagaacgtctctatatgttgcatactgcaatgaaatctggtttgccaacattgactgaaaattcaatttacagtattggaataaatgatcgatacctggcttctcaaatagctatacaaattggaaattacgatttatcagaaaatcaagttaaaaagtgggttaagcagcacaaagaggaaattattcaaaatgaaggcgaaaatttaccaaaattctttcttgaattgataaaccaaatataa

SEQ ID NO: 57882 - DNA, 858 bp, Lactobacillus paracasei subsp. paracasei Lpp229
atgaagattcccgattacatgagcagttatgttaaactactgccaatcaaaactaatgaaggcaatccaattgagctcatcgaagttcatgcaccgtttgataataatgaacttattacggaatgggctcgattatttcgtttaaaatacatctccgacgaagatttgttggagagtatggaagatactggactgcagagtggaattgaattcctgcggagcgtggtgtatccccaaaattccaaatttagaaacggagattttggtgaaatcttagttgcagagtacttaatgtatgtagaaaaattttgggttccaactttgactttaagatactcagacaaagctaccagtgaagaatccgtaaagggatcagatataatcgcaattcattttgaattgaattcaaaccaggagtcacctgatgatgtactgtgtatttgtgaagtgaaaactggttccgtgagttctgttcgtggaagactgcaggatgctgtgaacgattctaacaaagatgatcttcaactacatgcggcaaagcgaggtagtattggactgaatgctgtaaagctcaagttgaagcgtaaggaacgtgctgggaacagcgattcttattcatatcgtgcaattgcacgattccagaatccattcgaacacccgtaccagacacagtatgcggcagcagccgttgtggatcaaaagcgatttaatcgagaaactataaaaaaaattgaggcaaaggaatctcaacacgttgattcattacgaatgattgtggttggagtcacagatatcaaaaaattaattgatgttttgtacagtgaactaggggtagcaaacattggcaacgaacaatga

SEQ ID NO: 57883 - DNA, 3000 bp, Lactobacillus paracasei subsp. paracasei Lpp229
ttggcaacgaacaatgaagtactaaacgatatttggattcgtttaaaagagcaggaactggcaaataactcatcgttatcaagcaataaaacgctgtggaacaagttgttttactacacagttggagccattactgattacttatgccaagatgatgcgttggcagacgctaatctgcgttggcgattagaattttcaggaaaattttttgaaatattaccacggattgatctttccaataacggtttgtttggagatgaagagctggcattattttcggcagttgcgtatgatttcgcgggatacccaggagcaagtactgtagcattagagggcctgaagggtaataggctcagtcttgttgagaaagtactggctgatgtgctggaacatggcagttcaaatttcccgtgggagagaagccgaattgggctaacgatggcgttagtcttttcgggtaatgaggacataacgcttctatatgaacaagcagattcattgatagagaacgcatataaacatgataattatatggatattattgcagctgaatgtgttcgtagggtcattagcaattattggtcgaattccacgattaggcttatgcctgatttttcgaatacaaaaccggaccagtggactccagcaatcgttgcggggaaactacacccagtactgtggagggctcagcgtgaactggggaaacataatgtttttcgggggagatctgcagtagtacaactcccaactgggactggtaaaactgcctctttttcactaattctccgatccggactttaccgcaattcatatcatgttgctattgttgtggcacccttcaagtcaattcgtgacgaaatattcagaaatttggaggaacagtttcaaaacgaacagatagatattaatagtattagtactgaattaaaaattgacttttcagactttacgttcaaggaacgacgcgcggtgttgattgttacgccagaaaaattattattcatggttcaacatagtcctaatttcttagttgaagttggtttgtttatttttgatgaggctcatcaattagataacagtgggcgtggagtgacttttgagctgcttctcagcactattgatttactggttagtaaagaagtgcagaaggtgtttgtctctgctgtcattggaaaccctgatgatgtttcacgatggtttaatagtggagaaaatgttgttgtcagtgaactgttaccaagaaaatttagccgaattttggggtactccaagtggcaagacaagacaatgcatggggaattgcatacatggaataagttgcaaaaaactaactcttgggtagagttcccgaatttttatcggccagtccagatcaagaaaaataagtttcaacctaatttcaatgtaaaaaatcacactgagggaactcgttgggccacagccctaactacgcggcaattcgttaagggagggatggtcgccgtttatgctcccagaaaggattcgataaacggactatctaaggtgttcatcaagctaaagaataagctttcagaacataatgagatgaaacaatcaatttctgcactgtgtaatttgtttgcgctcaattttggtaaaaattcagtccttgtcaactcatatctaagtggaatatttgtacacgatggggacgttcccgatggaattcgtacttcgttagaatatgaagcgcatagaggaaacattcaactactgttgtgtactaatacgcttgcacaaggggttaacttaccgataaagacccttattattacctcggtaggaaatggtatgcttgaactaaatgatagagatacgattaacttggtggggcgtgcgggaaggacgggtgtcatcaatgaaagcaatgttattttcatgcagaatggtaattcgtcagcagataaacgttcacgacgtgcgctaacaaatctgatgtgggatagaccggcaaatgcacttggaagttctcttgcttcgttgtttatgccgactgctattaacgcatataatcgctcattgggagatctgcaagtaacggattggtgctttgaggacttcctagatgacccgcttgcttggattacacttcgagttgaaaaaacttcaccaaagcagtcgaggtcctatagaaatgtgttattagaaaaggcgaatggaatctggaaaatcgagaattatctcatgtcagtgtgggatataattcaagaaggaaatcaggaagaaaacattgagtcgattgctcgcaggacatttgctgcgacacgaataggggccgacgaactagagctgatgatttggacttttaaatatttgggccgtaaaattgcgcaattggcgtcacagcataacgttactattatggggaaaatgatggttggtgtgaacgaggccttaaaaatagaggattttgtggaaagctatgctgaactaattttaaccgatgacgctctagatcaaatcatcatggacatttggccaattttgcgagatacaattcctgtaaaagaccagagcaacgaggagctttatcagcttttgctgtttgaatgggttcggggaaaaactttctttgagattctcgaatcttgggagtcaacttatcctgaaaaacggtttggaaagcgaaagcctaatgtggaaaaagtttatcaaatttgcagtcaaacatttcaatttgacatgcagttaaaagttaattcattaatggagcttgtctctgatcatgacaagcatcaacggcttgaacgattacaaatagctatgaaaaccgggttaactgagagaaccgccaactccttttacgaggctggaatcaatgatagagttctggcaagtcagtttagtgcaaagatgggagttgtgggagcaggcaaagatgaagtggtaacttggatgcataaaaatcatgagaaaatactcgccaaattcgaagatattcttcccacctatttccgagaaaagataaagaaggcgtag

SEQ ID NO: 57884 - DNA, 801 bp, Listeria monocytogenes serotype 1/2a str. F6854
gtgtctgaaaaaaatttgtcatataaggaaaataaacatcctttttttatctctcttgatgtttcagatgaaaaaactgatagtaacattccgcataaagtattgattgaaaatgggaataatgacgttttgattaatcatatggttcccctaattaaaaatcatcatattgaaccagaagcattaatacggcgtaaagaattagtcgaatcacttagaatattaaatctgccatcaacgccaataaagtccccataccctagaaatttttctactcaaaagggtaatttcgcagagatatttttagctgaatatttaacttctaccagtgatgtggagcttcccatatacagattaagatacaattcgaatcctgatcagtcaatgaaaggtgacgatgttctattatttgacttagacgcagaacctgtaaggattattgttggtgaatcaaaataccgaggaattccagataagacttctgtaatggaaatgatggacgggcttattcgttctaatagagaaggattaccaatttcactaatgtttgtatcggaaatgttgattaaagaaggtaagctggagttaggaaaaaaggttcaaaattgcgcacttttgtttgcaactaacaagttgactattgaatatgttggtttactaatgggaaatcaaaatgctaaaaatccaattaacaaacacacacctaagggccttcgcaatttattaatgatttccttgggtattagaaatcctgaaaatataataaaatcttcttttgaaaggttggaggactcattatga

SEQ ID NO: 57885 - DNA, 3327 bp, Listeria monocytogenes serotype 1/2a str. F6854
atgagtttgcctattgaatatattagagaacttcttgcagaagtttccaatgataaaatagaaaatattataactcaaacagacgctagaagaattctgcaagaagttaaagaagattctgaaaactatccgaattttgatgtatcattaaccgagaaagctactcatattgcatatttgctaatatcttgtggatgctctctgctagcacaggaaaatattaaatcaggtgaagggttacttatattagaaaaagcagggaaaatattatctgataactttaaatataattcagaagaaatggatacgaaggataataatttgttgatttcaggtatggctttatatgctgcaaaacagttttcacgttctttcatagttctagacaatgtgaatttagacttctcagtcggacaaatgattattctatttttgaaaaaagattttatgtctttaattaaaatggcaagtagtatattttttattcgtgaaactgaagagttggatatacaagaatttgatgactgggtaatttctcacgaaattgcacgatgcttcttaataattattgacttcatgtatactggaaacgaagataactttagacttgttaatgatattttagaaaaattagaaaaaatttcttttgaaagtaatttaactttaaattggctaattatccgacttttaaaaattatttttttaacttaccaagatgtaactttttggtcaacattacctccatttttaccattgagttctatgactacaaattatattcgattgctgtgtagtctaaaatcaccaattacagaactttggccatcccaaacagagtcacttccgctagcgctagggaatagtaaagggggagtggttaacctccgaacaagtggcgggaaaactagggttgcagaactagctatcttaaaaatgttgactgaaaatccagcgtcaaaagttctatatcttgcaccatttcgatcattggcttttgaaatagagcaaagtcttagtatgatatttgaaccattagatattaccgtatcacaattatatggtggatctaccgcaaatgtatctgattttgagattatcggtttttcacaagttattattgctacacctgaaaaagcaaaggcacttatccgttctggaacagaattagaaaatgaagtcaaactaatcatcattgacgaaggtcatttgtttggtgcagaaaaacgacatataaaaaacgagatgttctttaatcatttacaaaaaatttcagatttgaaaggtataagaatgttacttttatcagcagttttgcccaacgcatcagaattagcaaagtggcttaccaatgattctagtcttgtagccaaatccgattggaagccctctctagaaaggttaggattacttatatggaatggaaatcaagttaaccttgagtggaaaagtgaaggttccccatttaacccgagtttcataaaaaaagcaccgttaggatatggaaggagaagaaatctttttccaaataaaaagaatgaagcggtagctgctacagctgttcggttatctaaaatcggcactgtaatgatatattcagcaagggcaaattcaatagatggtttagctgaaaatgtgttattggcattaggagaaaatcctgaagattttccttgggattttcttcaatggagaatctttgaaaatatatgcaaagaagaattatctgatgatgatatcgtattagttgctgctagaaaaggaattatatgccatagtaaccgattgccagcacaagttagaattgcaatagaaaaacttatgcgttcaaaagaagctttaattattatagcttcttcaactctcgctcagggtgttaatatcggaatttcgacagttatagtgtctactccctattatagtgctgaacctataaacaatagagatttttggaatatttgtggtcgtgcaggtcgtgctttttctgatgtagaaggaaaaatactttatgcaatagatacttctgatgcgaaagatgaatggcaaataaaaaaagactatcaactagcacaaaattattttaatgatcaacaaatgaaaaaggttgaaagcgggctattgctagttcttaaccatttcaatagtctttccgctcagttaggcattgatttttcttttctaatagaaatggtagctaatgacttcataaaatataatattgcagatgatactgtaaacaggataaataatttttttgatcttatagacgacgaattgcttgcaatgcatgaaaatttaggaaataattttaatttagattgggtggatgatacctttagaaactctttagcaattatccaggcagatagaggcaataaagagctctatatattgttactaaaatctagagcaaacgcattattaaaaagaatgccggatagaacaattagaaaaaaagcaattgcttctggtgtgccactatccgtagctaaggcattaattgatgattcagagtattttcgaaatctgtcttttaattttattgattcgattcaaagtggtgaaaataaaagtgaggcgattaatgttattttacaaaatatagaactttggagtagacaaaatgctggtactgtcattgaaaatattccagatcaatccgttcttaatgttatacgtcaaccatggttgagcggaatgccattaaaagaaataagaaaaatagatcgtaatatagacgatatagcgaaaaattattatgggtttaatctaccttggatagtgaatgctattgctcaaatattcgataaggaagctgaagaagaaattaacaaaatatatagtaaccttgcaatatttgttgaacttgggttacccgatatgacagcagttaacatatatttagctggggttcgctctagaaatattgctctagaattatcttccaaagaaatattcaatgatagaaatgtgtcccaaataaaaagactacttactaattttcctagtgaagatattaaaataacagatgcagctaatttatggattaataatttttcggaaaatatagatttgaaaggaaatcaaacaatatctttttcagcatttacaattgagagtgacagttataacggtcgtttgtatattagagaagcaaatcagaaatgttttttaacatcagttgatgggtactataacattagtgtacgatctacactagacctaccatttgtcaagatagcaaatataccagatttatattttgagtcgaccgataatatttggtatctgaagtcttataatccgcaagtcagaataaattataattaa

SEQ ID NO: 57886 - DNA, 801 bp, Listeria monocytogenes F6900; identical to SEQ ID NO: 57884

SEQ ID NO: 57887 - DNA, 3327 bp, Listeria monocytogenes F6900; identical to SEQ ID NO: 57885

SEQ ID NO: 57888 - DNA, 786 bp, Listeria monocytogenes J0161
ttgtcatataaggaaaataaacatcctttttttatctctcttgatgtttcagatgaaaaaactgatagtaacattccgcataaagtattgattgaaaatgggaataatgacgttttgattaatcatatggttcccctaattaaaaatcatcatattgaaccagaagcattaatacggcgtaaagaattagtcgaatcacttagaatattaaatctgccatcaacgccaataaagtccccataccctagaaatttttctactcaaaagggtaatttcgcagagatatttttagctgaatatttaacttctaccagtgatgtggagcttcccatatacagattaagatacaattcgaatcctgatcagtcaatgaaaggtgacgatgttctattatttgacttagacgcagaacctgtaaggattattgttggtgaatcaaaataccgaggaattccagataagacttctgtaatggaaatgatggacgggcttattcgttctaatagagaaggattaccaatttcactaatgtttgtatcggaaatgttgattaaagaaggtaagctggagttaggaaaaaaggttcaaaattgcgcacttttgtttgcaactaacaagttgactattgaatatgttggtttactaatgggaaatcaaaatgctaaaaatccaattaacaaacacacacctaagggccttcgcaatttattaatgatttccttgggtattagaaatcctgaaaatataataaaatcttcttttgaaaggttggaggactcattatga

SEQ ID NO: 57889 - DNA, 3327 bp, Listeria monocytogenes J0161; identical to SEQ ID NO: 57885

SEQ ID NO: 57890 - DNA, 801 bp, Listeria monocytogenes J2818; identical to SEQ ID NO: 57884

SEQ ID NO: 57891 - DNA, 3327 bp, Listeria monocytogenes J2818; identical to SEQ ID NO: 57885

SEQ ID NO: 57892 - DNA, 801 bp, Listeria monocytogenes; identical to SEQ ID NO: 57884

SEQ ID NO: 57893 - DNA, 3327 bp, Listeria monocytogenes; identical to SEQ ID NO: 57885

SEQ ID NO: 57894 - DNA, 801 bp, Listeria monocytogenes; identical to SEQ ID NO: 57884

SEQ ID NO: 57895 - DNA, 3327 bp, Listeria monocytogenes; identical to SEQ ID NO: 57885

SEQ ID NO: 57896 - DNA, 801 bp, Listeria monocytogenes; identical to SEQ ID NO: 57884

SEQ ID NO: 57897 - DNA, 3327 bp, Listeria monocytogenes; identical to SEQ ID NO: 57885

SEQ ID NO: 57898 - DNA, 801 bp, Listeria monocytogenes; identical to SEQ ID NO: 57884

SEQ ID NO: 57899 - DNA, 3327 bp, Listeria monocytogenes; identical to SEQ ID NO: 57885

SEQ ID NO: 57900 - DNA, 801 bp, Listeria monocytogenes; identical to SEQ ID NO: 57884

SEQ ID NO: 57901 - DNA, 3327 bp, Listeria monocytogenes; identical to SEQ ID NO: 57885

SEQ ID NO: 57902 - DNA, 834 bp, Listeria monocytogenes
atgataaacttgatttataataataatggggtgaagtttatggtattgaaatatttatcttatttggaagaggaagaaataataacgactgaaataggaaaaaaaataaaagtgttacacttaaatgtttgtaaagatgataatattttaaatgaatgggcaagtcacttcaggaaacattattgctcggatgaagagatcgatgatttaagatctggatatgggatgactagaaaagaatttcttagagagatcaagtttcctgatagaagtagtttaggaagtgctacacgctcgggagattttagtgagattcttgtggcagattatgtggagtttattttaaattattttgttccacgaattagatatgatggaaaattcaacaaaaatacctctattcagggaagtgatttaattgctttcaaagttgataataatatttccgaaaatgatgaattaatggtattcgaggtcaaggcgcaggcatcgaatgcaaaagcaaaaaataagttacaagaggcaattgaacattcgaagaaagatttccgcagggttggggtatcgttaaatgctatttatcaaagactgagatacaagggtttaatagaggatgcaaaaaaagttcaaagatttcaaaacgcaacagatagaccttataagcaaacgtatggggcagcggcagtgcattctaatttctcatactctaaagaaatattgttagatgtaacgactgagggacatcatgatccaaatcttgaattaatagtaattcatagagaaaatttaatggagtttatacatgaattgtatgaaagggcgtgcgggtgttga

SEQ ID NO: 57903 - DNA, 3156 bp, Listeria monocytogenes
ttgattggtagtaggtcacagtttttattgaagaaagcgagagccaaggcaaagatgatagaatataacattccaaagcaagaccacattgaagtcgaggctgatgttcccaaattgtttttgatagccatatcggcaataggaaatatagctaatgatattattcaagaaccagatgacagtattaatataattaagaaggaaaatgataatttaaaattttcctctatattttttgatgcatatttaaatgctcaattcgaaacagaatctgattactatttttatctctttggatcaatagcgtatttttttaatgattatattggtaattccaaagtactaattaataaaattgatttagataaaattgattttggtactcacgacattgaaagagcactggtagcactcttacaaggtcaatttgtagaatttgaatttataaatattgatgccaaatatgctatgcatctgaaaaatatgcagaatgatttacagctatattactctaatggaaccattccagacttacatacacttgaatatatacgaaggcaagtgtatgaggacgggagcgatatagaagtattactcgttgatgcattgtgtgctatatatatattaaaaattagatattcagcaattaatttattacctaggtacatgaatctctcgctcaacgacttaaatagtttgttattcaaaagtaatattatatcagaattatggccatcacaaagattacttggtgaactagatgtttattctggaagatcagcagtaattcaaatgcctacaagttctggtaaaacaaaatcaatatctttgattattgcctccgcatttttggcaaataagactaatctagctattattgttgctccatatagagccttatgtagagaaataagcactgatttggcaaaagatttttcatttgacgactcaatctatattgatgaactatcagatatacttcaagaagacgagctgttatttgaaactgtgaatgagggcgaacaaaaagttttagtcgcaacaccagaaaaacttatatatattttgagaaaaaatccagagataattgatgatttaggtttaattatttttgatgaaggccatctttttgatgatccaacacgtggcacaacatatgagcttctaatatctacaataaaaacttttctggctgaagatatacaaaaaataattatatctgcagtaatttctaatgccaaagaacttaataattggtttactgatgctaatggggcggttatatcggggaacattattaattcaactcataagtctttagctattacagactggaaacgaagtaaagctcaaatgtatggatatttatactttgttaatcctgaaaatccagaagaagaagaattttttgttccaagattaatctccatcgttgacttagagaagaaaggaaaagagcggaaattaagacgatttccagaagttgatttcaaaacaaaaaaagttaaaaataatgatattgctatcaattatgctttaactctctctgataatggaggagtagctattttctgcgggagtaaaataatagctaatagtattttgaaacgtactttagacttagcgagcagaaattattcaatagcatcgttgttaaataattctgagatagatgaagtagaaaaaatcagtcgattaatagcacttaactacggtatagataatgattactataaatctgctaagaaagccttattcgtgcatcatgcaggtatttccactggaattaaaatagctattgagcatgctatgagagaagaaaaaataaaagttgtagtctgtacatctacattatcccaaggtgtaaacttacctataaaatatttagtagtgactaatatttatcaaagcacaaatctaataaaagtgagagattttcataatttacttggtagagctggtcgagcgggaatccatacagaaggaaccattctttttacggaaacatttgtttataatcagcctcatagttctaaaaattggaaatggactaattataaaaatatcattgataataataactctgagccctgctcaagtaggatactatttttagttcaacaagcacatatatcacctactcaatctttaaatattaataacattgttaatatgtattatacagatcccgacaaatatttggatagatatcacaaaacgtatgaaaaaatttcagcagagtcagtagatttagctaataattattttaatgttttagatttagccatacaatctttagaatatattgaaagttttttattaacatatttaacccaaaatacttgggaagagtgtaaggaaagcataaatcatgtgattaaacaaacactggcatattcacttgctaatgatattgaaaaagaaaaacttttagaacttttccaaatgatttctcagtattgtatcgatttagttcctgatagtaatgttaggtatatatttagtaaatcactattaggcattaaaaaaatgatctttattaaagagtgggcttctgaaaatgtacaattaatacttgagtgtaaaacaactaatatgctgtatgatattttaattgaatgcatcatagatgaatcattagatatacctaaaatgaagaagctatatgacccaacaaatttaaaaataataggagcagcttggattaatggaatgtcatatatggatatatggaataaatgtaaaagaaataacataatggtatattacagaaataaaccaaagctaattgatttagatgatataattcttatttgcgacaatattctttcttacaatggatctttaatagtaagtgcgctaagtgaggtggttgatttaatagtgggaggcgataatgatatttctgaactatttaagcaactggctacttcgatgaaatacggaatttcatatggagctgaaaccttaatatatgaaatgggatttagtgatagagttgtttctcaagttatagctaattattttcatgataataatattaggattactacgcaatctaattgtagaaaacagttaaaatcacactcagagaacataggagaaataatttcaatatttccaagcgttttcattgaaaaattacttgctttgtaa

SEQ ID NO: 57904 - DNA, 801 bp, Listeria monocytogenes; identical to SEQ ID NO: 57884

SEQ ID NO: 57905 - DNA, 3327 bp, Listeria monocytogenes; identical to SEQ ID NO: 57885

SEQ ID NO: 57906 - DNA, 801 bp, Listeria monocytogenes; identical to SEQ ID NO: 57884

SEQ ID NO: 57907 - DNA, 3327 bp, Listeria monocytogenes; identical to SEQ ID NO: 57885

SEQ ID NO: 57908 - DNA, 834 bp, Listeria monocytogenes; identical to SEQ ID NO: 57902

SEQ ID NO: 57909 - DNA, 3102 bp, Listeria monocytogenes
atgatagaatataacattccaaagcaagaccacattgaagtcgaggctgatgttcccaaattgtttttgatagccatatcggcaataggaaatatagctaatgatattattcaagaaccagatgacagtattaatataattaagaaggaaaatgataatttaaaattttcctctatattttttgatgcatatttaaatgctcaattcgaaacagaatctgattactatttttatctctttggatcaatagcgtatttttttaatgattatattggtaattccaaagtactaattaataaaattgatttagataaaattgattttggtactcacgacattgaaagagcactggtagcactcttacaaggtcaatttgtagaatttgaatttataaatattgatgccaaatatgctatgcatctgaaaaatatgcagaatgatttacagctatattactctaatggaaccattccagacttacatacacttgaatatatacgaaggcaagtgtatgaggacgggagcgatatagaagtattactcgttgatgcattgtgtgctatatatatattaaaaattagatattcagcaattaatttattacctaggtacatgaatctctcgctcaacgacttaaatagtttgttattcaaaagtaatattatatcagaattatggccatcacaaagattacttggtgaactagatgtttattctggaagatcagcagtaattcaaatgcctacaagttctggtaaaacaaaatcaatatctttgattattgcctccgcatttttggcaaataagactaatctagctattattgttgctccatatagagccttatgtagagaaataagcactgatttggcaaaagatttttcatttgacgactcaatctatattgatgaactatcagatatacttcaagaagacgagctgttatttgaaactgtgaatgagggcgaacaaaaagttttagtcgcaacaccagaaaaacttatatatattttgagaaaaaatccagagataattgatgatttaggtttaattatttttgatgaaggccatctttttgatgatccaacacgtggcacaacatatgagcttctaatatctacaataaaaacttttctggctgaagatatacaaaaaataattatatctgcagtaatttctaatgccaaagaacttaataattggtttactgatgctaatggggcggttatatcggggaacattattaattcaactcataagtctttagctattacagactggaaacgaagtaaagctcaaatgtatggatatttatactttgttaatcctgaaaatccagaagaagaagaattttttgttccaagattaatctccatcgttgacttagagaagaaaggaaaagagcggaaattaagacgatttccagaagttgatttcaaaacaaaaaaagttaaaaataatgatattgctatcaattatgctttaactctctctgataatggaggagtagctattttctgcgggagtaaaataatagctaatagtattttgaaacgtactttagacttagcgagcagaaattattcaatagcatcgttgttaaataattctgagatagatgaagtagaaaaaatcagtcgattaatagcacttaactacggtatagataatgattactataaatctgctaagaaagccttattcgtgcatcatgcaggtatttccactggaattaaaatagctattgagcatgctatgagagaagaaaaaataaaagttgtagtctgtacatctacattatcccaaggtgtaaacttacctataaaatatttagtagtgactaatatttatcaaagcacaaatctaataaaagtgagagattttcataatttacttggtagagctggtcgagcgggaatccatacagaaggaaccattctttttacggaaacatttgtttataatcagcctcatagttctaaaaattggaaatggactaattataaaaatatcattgataataataactctgagccctgctcaagtaggatactatttttagttcaacaagcacatatatcacctactcaatctttaaatattaataacattgttaatatgtattatacagatcccgacaaatatttggatagatatcacaaaacgtatgaaaaaatttcagcagagtcagtagatttagctaataattattttaatgttttagatttagccatacaatctttagaatatattgaaagttttttattaacatatttaacccaaaatacttgggaagagtgtaaggaaagcataaatcatgtgattaaacaaacactggcatattcacttgctaatgatattgaaaaagaaaaacttttagaacttttccaaatgatttctcagtattgtatcgatttagttcctgatagtaatgttaggtatatatttagtaaatcactattaggcattaaaaaaatgatctttattaaagagtgggcttctgaaaatgtacaattaatacttgagtgtaaaacaactaatatgctgtatgatattttaattgaatgcatcatagatgaatcattagatatacctaaaatgaagaagctatatgacccaacaaatttaaaaataataggagcagcttggattaatggaatgtcatatatggatatatggaataaatgtaaaagaaataacataatggtatattacagaaataaaccaaagctaattgatttagatgatataattcttatttgcgacaatattctttcttacaatggatctttaatagtaagtgcgctaagtgaggtggttgatttaatagtgggaggcgataatgatatttctgaactatttaagcaactggctacttcgatgaaatacggaatttcatatggagctgaaaccttaatatatgaaatgggatttagtgatagagttgtttctcaagttatagctaattattttcatgataataatattaggattactacgcaatctaattgtagaaaacagttaaaatcacactcagagaacataggagaaataatttcaatatttccaagcgttttcattgaaaaattacttgctttgtaa

SEQ ID NO: 57910 - DNA, 834 bp, Listeria monocytogenes; identical to SEQ ID NO: 57902

SEQ ID NO: 57911 - DNA, 3102 bp, Listeria monocytogenes; identical to SEQ ID NO: 57909

SEQ ID NO: 57912 - DNA, 714 bp, Propionibacterium freudenreichii subsp. freudenreichii
atggtgcacatggttgccccgtcggcgaccatcgggacgggggtcgactgggctgcgtcacagatcccgaaccagtacacgggtccggaccgcgtcgccgcgatcctcgccgatctggggaagcctgctgcggccgaatacctggaagggaagctccctacaagcaagcgcacccgctcgggcgacctcggagagatcatcggagcgcagtacgcgacgcttgagctggggtttcgagtcgtggaacgcctgcggtggaaggaccaccgcgagatgtcgatgcgtggcgatgacctggtcggggtgcgcgcggccaccaacggatcactcgaattgctgaagggcgaagccaagagccgtacaacgctcggaacggcgacggtcacagacgcggaccttgcgctcagacgcgatcggggacgcccatcgcctcacgctctcagcttcgtcgctgaccgactccacgaactcggcgagcatgcattggcgaaccttgtcgacgacgctcaactgactacagggatcagcgaacggcaggtggtgcaactgcttttcaccttcacgggcaacgacccacgcaacctcctccggacaaacacgaccgcatatcgaggcggcgtaaagcgcctcgccgtcggcctgcaggtctcagagcatcaagcgttcatcgcgaacgtgtactcgaaagtgatcgccaatgaccgagacagttga

SEQ ID NO: 57913 - DNA, 3501 bp, Propionibacterium freudenreichii subsp. freudenreichii
atgaccgagacagttgaggacattgaggccgcgatcgaagaggcgaccacccccggctttcgcgaacagcttctggcgcgaggcgaagcccggtcgctgatctggcgtgacggcgtcctgcccgaggacgcgcccgcgttcgatcagctactcagctacgaccttctctcctacggctattcgctcctgggcctggggctacgtctcgtggaggcgagtgggtcgcaaagcctcgcccaacgcgccttcgagggcgcagccacagccatcgaatcagtcatcgccagaggacctaactcgcgcgaacggggcttccaccgtgtcgtcgcagcagccgcctaccacctcggcagctactccgcgcgggcatactcgctgcttcagacagcgctcgattccggtgaagtcacgattggcgagcgatccctcatccacatcatccgcagagaactcgacaccctggccgcgctcatcctgagccaccgcgacgaggacgcggcagcagacgccaacctggttgagacgttgcgcgggctcctcgagcccacgagcgatgagaaccaggacgatgacagcggcgacaccgatgtcatcgacgtcgtcgacctcgcactgacagacgcgttcgtcggtgcgatcagcatggcgctgcttgcgttcgaacggggcgagcaagcgctgctggatgaggccctgagcacactacaggtcggtctaggagccgccagcgaactgaacatggtttcgcagtggtggtgccatcgacttgcgattcacctactccgcggcctctgggaggccagtttccatcgcctgctcccggacggtcccatcgacggtgatggtggcgactgggcacgactgcgtgcgacgttcatcgcatccctcttccggaggcgacgctcggagatcgacctatggccgtcgcagctcgccgccgcagagcgggtgctgaacaccagcgagaatctggtgttatctctcccgacgagcgccggcaagacccggattgccgaactttgcatcctcgcgtgcctagccgggggccggcgggttgtgttcgtaaccccattgcgggcgctgtcagctcagaccgaaacggccctgcaacgcaccttcacccctctggggaagaccgtcacatccctctacggcgcgatcggggccagcagcgccgacgaggatttgctgcgagagagggacatcgtcgtcgccactcccgagaagctcgacttcgccctgcgcaacgacccaacactcctcgacgacgtagggcttgtcgtcctcgacgaggggcacatgatcggggcggatgaacgtgaggtccgatacgaagttcaggtacaattactactgcgccgtggggatgcggccaccagacgtatcatctgcctctcggcgatcctgccagacggagacgaagtcgaggacttcgtcaactggctcaccgatgaccagcccgacggcctcatcgcgagctcgtggcggccgacgaagcttcgctatggcgaagtgatttggcaaggcgatcgagcccgcctgagcatcatcgtgggagacgaggagcccttcgtgccccggtttctcgagcccttcgttccaccgatcggccgcaggacgacgcccttccccaaggatcagcaggagctgacgctggctaccgcctggcggctcgtcgacgacgggcagaccgtcctgatcttttgcccactcaagtcatcggtgaacgccttcgccaaagtcatcgtcgaccttcatacgcggggagcactcgggagtgtcttcgaaggagatccgggcgacctcgcctcggccatcacgattggagaggaatggttcggtcgagatcactcgatcctcgcctgtctgagactcggcgtagcgattcatcacggatcgctgcccgcaccctaccgacgagaggttgaaagtctgctacagcgaggagcgctgaaggtcacggtctcttcaccgaccctcgcccagggactcaacctctcggccagcgcgctcgtaatgcacagcctctggcgcaaccgagaactgatcaaggcgtctgagttccgcaacatcgtcggcagagccggccgagcgttcgtggactccgtcggcctcgccgtccacccaatcttcaaggacgtgtcccgaggcaggcggaactggaggcaactggtcgaggacactgctctgcgcgacatggaaagcggcctactgaaactggtgatgaacctgctcgtccggatgcaggccaagcacggtttccgggacctggacgcgctgctggaatacgtcgccggcacagcggcgtgggattacccagaagtcgctgccgagagcgacgaggaagccgagcattcccgaactgcgtggcgctcgcagctcgccagcctcgataacgctctcctcagtctgctcaacgattccgcagttgcggacgacggagtcgagggggctctcgacgacgtgctcgcttcgtccctttggaacaggagcttggctcgacggcaggagcccgttcagacagcgcttcgagccggcctgaccgcacgcgcacgcctcctctggagccagtcaaccgcggcacagcgccgagggtacttccttgcgggggtcggtctcgagaccggacgccaactcgatgagcacgccagcatcttggagcagcacctgcgcgacgcagacgagggcatccgaatcggcgaccccggtgcagcaatcgatgtcctaacgagcttcgccaggatcgcattcggcatccaccccttcgcgccccgagctcttcctccattttgggaaggcgtcctcgctggttggcttcgcggtgaggacccctcgcagatagcgggagaggaggtcacggacacgctggaattcatcgaggactcgctggcctacaggctgccatgggcgctggaagcggtccgggttcgagcgaccgcccacgaagaccctgtcggcgacctttgggcgctcctcaccgacgagcacggactcgcagttgcagcgctagagacagggacgctgaaccgttccgccgcgctgctcatgcaggctggattctcttcccgagccggtgctctcgccgcggtcacggtcggaggcggcaccttcacgaccgtctcggagcttcaccagtggatgaactcggaggagatccggcgacgcgcagacgacacgcactggccgactgtgtcatcccacgatctctgggtcggtttcatcagccgcagtactgctgcaccggagagaacctggatcaacacggtcgaggatgccgcggtgacgtggctcctcgatcatcagccgagtagcgggacgccgtatcgggctgtgtcccttgcgaacggggagaccattctccaggccgctgacggtcgacgggtcggtctgcttgaggaaccgctcaatccgaatcggcgcggcttgctcgcagtcaccggggccagcgctgccaacgtcgtcgaacttcgctatcgaggcccatccgaccttcgtgcatag

SEQ ID NO: 57914 - DNA, 825 bp, Mobiluncus curtisii ATCC 51333
ttggacaataattcaattaactgctccaatatcagggaacttccagaaccttctttccttagctgtcttaaaaaagaaggacatgtcctgatttatgacgccaaggtgcagtgttttagtatcgagggaaacattgatgacaagattcttcaggaatgggcgttgcatattagaaggcattacgtacgagatgacgaactaactgattatgtccatgtctatgagattgatgccaaaaagcatcttcgtgaagactgcattccagacataccacaaatcagaagtggtgactttgcagaaataatcataagtgaccttatccaatttatcgagggatacgaagtcccacgttacaagcagcatggacgggaagacaagaacaaatcagaacacggaactgatgtgattgcctacaaggtcaccaacggttcagaagccaacaataacgatgagctgcttgccgtggaagtgaagtcccgtagctcctccccaaatctaaaaggtgctatcgccgatgcggcgagagactccttgaaagacagaagtcgaatagctatgacgcttgcctattatgcaaatagagcccttgctgcacacgacactcgcacatcgacggaactgaaaaggttcctccatgctagcgagcacccgttcaaagaaacgtttgcaatcggagcagtcgtcggtataaaagatgcggagcactcgcttagggacaaaagcgcctccgacttatcgattaatcatggtcagcgggttttcatcatccacaggacaagactcatggacctaatccacagtatctataacaggtgcgtctcatga

SEQ ID NO: 57915 - DNA, 3009 bp, Mobiluncus curtisii ATCC 51333
atgatttacgggaaacgctcggaccgcgagctcatgtgtgcgaaggccaaggcgaaagcctcggaattcttcgtcgatcctcactccatccctgattccggattaaattcggcagagttgcactactcttcggtgctgacattatcaacctatgtgaatgctaggttatctggagccgatggacttgaacacatggaagatttgcagaagacggcgtctttctacgatgcagcatccaacgatgagggaaacaaacctttcaccgacggttactggatgcttgcgatggcgacctactttctgttgggaaattacggaagcgcaaaagtgtctgcagcaaaagttcacgaccccagtttttacggggagagagcccaaacacttcacagccttgtttcgtatctgcttgaagctgatatgcccgctccatcggagcttagcgctctggtcagctatctaagaggcttcgatatgaaggaggaggacgtgattaaagatgcgtccgcccttttgaccaaaagcaaccctgaagatgccttctttagcggcatactctacgtcgcaatatccgatgccatgtcaacttcgataagagcgctgctgccacgttacaccggcttgagtatagacgtttggagaccgtacctctcgatgcaaacgtcaccgaaactgttatggcaagcacaaaggcaattaggggttgtcggcgtctttgccggcggcaatgcgttcgttgagctacccacggggtcgggaaagacaaagagcatcgaattgctgctccgcgcacgattcctagctggaaaatgtaagcttgccatagtggttgctcccctgcgggccctttgctcagagatagcacgcgacttagcctcggcattggatgacgtggctaaggtcgagcaagcctctgaagtcatggaaatcgactcctggtttactgaaagcccgcaaggatttagagtcatggtcttcacacccgagaaactggggttcgtcatgcaccgcaacgccatgcttcgcgaagactcggacctgtttgtatttgacgaggcgcatctgctggacagcgaatcgagaggaccaggatacgagctacttctgacggaaatcttcagaacgaaacccgatgttcaaaaagttctcatgtctgctgtcgtttcgaacgcggacgaaatcgctaaatgggcatttcgtgattctaatttaattgcaagtggaaaagatatccaggttactgaaaaatcgattggactgattcagaatgagggcacaaagatttcttatgtcgagcaggatgacatttccagcgagaactatttcttgtgtgtggatgtctccccgcaaccattaaaggtccgcaaacgcgaaaaagaacggttcttccctgataaaatttcaaaagcatcgaatcacacgcgagatctcgctatttactacgcaaaccgcttgcttcccaacggtgcatgcgcaatctacgttcccaagcaggtctcacttccacccatgttcaacaggctgcaggaactgattcaacggggcgcaaacatttcaaacttgcagggctctatggaagagattgataaggaaaaaatgtctaatctggtagacgcccactacggaaagggtaactggattacctccggcatcagagcaggcgtgcttccccattatggggatctacaggggtcgataagacaggcggtcgaatacgaaatcgcgaaagagaatgctggatgcatagcctgcacatcgaccctagcggaaggcgtaaacctgccaattaaatatctcatcatcactggcgcgatgaggggattcggcgtgccaaggacgagggatttccagaatctcataggcaggaccgcaaggtcaggaaagttcagcgagggcagcatactgcttgccgatagtacgggagatctcagaagcaaacgaatgtactcaagtctaatgaggaagtcaaacactgagcgatgtgagagcgcgattctaaacctgcttgcagatgcgtgcgataaagaggagaatccgattaagagggttgcggggcatgacatcgtgaaggtgcttttgaaccatattgaagatcctcgcctggaatttgtgcttgcagatttctttcggcaatcgctaggctgcaataagaatcgtgcatacgtgctcgcttctagaaggatgcggcctctggaggccattgagagttatctgtccggagtcatcgctgcaagcaatgacgaggtcgacgtcactaatctatgttcctccacctacgcatacgcgtcatcagatgaagaaactcaagggcgcctcctaaagctattccagacggtctatgattcgctagaatcagtcagtaaggaaagggcatcgttgtaccacaagatgcaattgggagcacgagatgccgcatcgctaattaggtgggcggaatctccagaggggaaagactttatctacaacggctgctcgaacattgtctcggcagtccagcagttcctgatgtcgaggcctgacgtcgcggctacgttaagcgatgagcagctagcggatattatagaactatgggtcggtgggaacgatttgtcccaaatgacgattgttctgaacaagaattacccttccaagcccaagctaaaaattgcaaggatggagagagtaacttcgaaagtcatccggtattctttcagccattttatttcatgcattatagatatcgcgagtcaagatgcgggactttctgcgcaaagcaatctggagaatctcgcagcctttcaacgcaaggtaaaatacggtgtctccaatttgcgcgaggctgctgtctgtgaaaaagtcatcgacgatcgtgtaatagccaaaaggattgtgtctatgctcggcgctaaggaatcttcggatgcgaacaaaatgaagcttgaggcaatagcaagtcgagcaaaaatcgagcagctagcagatacgttgcccgcatactgctcagaacgcatattgggttggattagcaaatag

SEQ ID NO: 57916 - DNA, 831 bp, Gardnerella vaginalis JCP8151A
atgaatttgtcttttgataatagtgaatactttaaatttgataaatctatacttactaaagatggaaatgaaattcatatatataaacttaatagtgaattattagatgataaaagtttgaataattgggcttttggattgaggaataattatattgaagaacatctattgacaaaagctatttcaggaactgggttaacgaaaaaagaatatttagaaaaaaggatttttccagatccaaatgttcctcaaggtgctgcaactatgtcaggggaatttggtgaattgttagtatatgattacattaattatgtattaaaatattatgttccaagaattagatatcttaataaagttaaccctaatacacctattcatggtagcgatgttatcggatataaaataaaaataggtaatcaaccaagcaaagatgatgaattattagttgcagaggttaaaactcgctcaactgtatctggagataaaaccaaggcttgcacaaagattgttacggacgcaattactgattctaataaagatagagttagagttggagaatctttaaatgctgaaaaattaaaattattaagtagaaatagaatcgaagaagctaatattgttgagaggtttcaaaacaaaacagataatccatataaattagaattttttgcagttgctgtgatggacaatgaattgtattcagatcaagtagttttggatgtaattaatagtcagggtggaaatataaaatctactaacatactgataattcattctaaaaaattaaaactcttcttaagagatttgtataggagagcttgtttatgttga

SEQ ID NO: 57917 - DNA, 3102 bp, Gardnerella vaginalis JCP8151A
atgttgataggaaatatttcaaaatattatttgaaaaaagttcgagcaaaagcaaaaatgtatgaatatggagtgccagagaatcttcatattgcagttgaaaacgaatccaatgatctcatatttcttagtatcggaataattggagatatcgctaatgaaatattgaacatgaaaaatgaacctataattcttcctaaggaaaaagaagaagagttgtactttgtatcaagattttttgattcttattttcaatctaaaatgagcaaagagtttaacccatattatatactaatgggatcggttgcttattatttttgcaatatgaacggtagctcaaaagtaatgttgagtgttatgccaaatttattaaatgactttgaattttctgcttctggattagaaaatgtaataatatatctgttagatgatagctctaaatttgatatttctataatagctgaaaaatacagaaattatattaaacaattaattgattatcacaatattttttttgctggaaagaattcagagaaagctcaatttgaaaaatttagaaaatatgtttaccgttatggaaacgatagagaagtattatttacagacattattctagcaatattgaagaaaaaaatttgcaattcatgtattaatctaatgccacgctattctggacttgataaggataaatggctcctgacatttaataataatacaatgatgaaagaaatgtggtcatcacagattttgctgggagaaaaaggaattttcaacggtaaatcaggtgttattcaaatgcctacaagttcaggcaaaaccacatcaatctctcttgcaatacaatctgcctttttatcagaacgaacatctgttgtaattgttatagctccattcagagcattatgcaaagaaatattgtttgatatggagaagtttttttcatttgatgaaaatataactgtgactgaattttctgatattccagaacctagtgaaataaaatttgttacatctgagtcaattaataaaaaagtactggttatgactccagaaaagttggtttatattttaaagcataatacgaaaataattgaaagcattaacatgattgtttttgacgaagctcatttgttcgatgatgaaactagaggaacagattacgagcttctattagcaaccatcaataactatcttagacaagatgcacaaaagatactggtttcagcagtgatttctaatgctaaacaattaaacgcgtggattaacaatgacggcactgttataaacaataatactatcaagacatcagagaaaacagtagcctttaatgtatttccttcgaataacgttaatagtgattatagtaatctttattttgtaaatccgaataagtgtctagaagaagaattttttgtaccaagagtagttcaaactaaagaattaaataaaaaaagtaatgagagaaaaacaagatactttcctgattttaaaaataataagcaagatgtaggcatctattatgcgattaaattaattaaaaatggaaatatcgcaattttttgctcaaaaaagagtaccgtgaataatattctaatgagatttattgatttaaagcatagaggtatcttactagatgatttttgtaccttgtcagatgaagttgaatgtttaaaaattgcatatttaataagagagcatatgggtgaaaactatttatataacgcagcgttaaatggtattttaggacatcattcaggcgtacccaatggagtaagaattgctgaagagtatgctttgaaaaaatctttagttcattgtgtggtatgcacttctacgctggcacaaggggtaaacctgccaattaaatatttaatcgtttcaagtgtttatcaatcaaataaagtaattaaagttagagatttccataatttgattggaagaacagcaagagcaggaaaagagacagagggaaccattattctaacagaaaatgtctataagaattataaaaaatataataagttaaatacctataaacgtcttctcaatgttgaaaattctgaggagtgttctagtaatcttttgaaattagttagaaaaatacagttagataatgctgattgtgtttctattgaatcattgcataaatatatttctttaagatattctgaacctgaaaattattctaatataaaaaataaaatttttgaatataaagaacaatataaagaatacggtgcggagtttattgacaaaataaatgaaatagaacacattttagtatcactggaaaattttatacttagatttgcagatgacaaagatgaaagttttgaaattattcaatctacatatggttattatttggctaataaagaagaaaaggaagaactaaagaatatatacaatctaattaaaagtaatattgatagtcttgaagttaatgataaattactttatagaaaaagtatgttaagtatactgcaaacgaaaaaactatctaaattcataaatgaaaatttatatgaaatattagatgctgaatttgatacattacttaatttgattgttaataaattgaaggaatcagaagattgtaagattatacctaaatttattgatgatagatatctttgtgaactattaaaaatgtggatcaatggtcaaagttatgttcagatttggaactatgcaaaaacagtaaatttgctaattaagcgtggaaaaaatagtaaaataatatcgttggaagatataataaccttatgcgatttagactttggatatgcttcattagcgataatacagactattattgagatactaaataccaaagattgtagtgaaaatgtgcaggagaaattgactgaattaatttatagaataagatatggtttaccaaacaaagagtctgcatttatatatgaactcggatttgcagatagaattatttctcaaaaaattgctgatgaaataagttattctgactgtagcacaaaaaagaaaactaaatgtacaattaaaggtaatagagaaaaattacaagaattattggcagactatccatcctattttttgaatatactacagaaattacgatag

SEQ ID NO: 57918 - DNA, 819 bp, Legionella sainthelensi
atgccatggagttcagaacatactaaatggctggtcgacactggcgagcgattgcaaacttccgatggtaaagaaatctcaatttgggagtttcagtatcaggacaatgccccaatattttcagcttgggccaaacattttcgaaaccattattgttttgatcatgaaattgataaatggcgcaaaggaaccaaacactcccgttcagaataccttacaaatataaaatttcctgatgaaaaaactgcaccaggtccaagcactcgtgctggtgattttggggaaatcttggtagctgattttcttgaatacctacttggttattgggttccccgcacccgctacagagataagactatccgaaacgaatctacaaaaggtagtgatgtcatgggtttttatttcataaatgaaggcaaaacatccgtggaggataaacttgcaatttttgaggtcaaaacgcaattttcaggtaggaaatccaaagcacgacttcaagacgcagttaacgattctgcaaaagatattaccagaaaggctgagtccttaaatgctattaagcaaagattatatgcttccaataaatgtgatgatgctgaaaaaattgaccgcttccaaaacgaagttgataatccatataaggaactatatggcgcagtagcactttttgaaaacaaactgtttgacaatgaactcatgtcatcgatcatcacagcaactcacccctgttcaaatgaccttaaactgattgttataaagggggttgatatgatgtcgctcgttcataatttatataggaaagctgcggatgaggcctga

SEQ ID NO: 57919 - DNA, 3138 bp, Legionella sainthelensi
atgaggcctgaacagaagtctaagcagctacttagcatcacccgttcaaaatctaagatgttggaatatagtattcctgaagaacaccacatcagaatcccacaagatccttttaaattattcactctctcaattggcttattgggcgaccttgcttcctctattaacagagaaaaatctgattctccaattctctcagagttacgagaaaatctacttttctctacccatttttttgattcctatctgcaatcgaagctgaatgaaacactcgacccatatttcgccctccttggatctgcatcttattacctttgtaatcttcctggaagcgcattattgttagcaaatcgtcttaatgaacagactctggatttagatgctgaaggtttagagaatctattactatggttattacaagcaaacctaaagccttatttaagtaatcctaatagcccattcagaaaatacattgataatattgccagtgagtttgttcagttttttaaaaatggtactggtgaggaaaaccttattaacttgagtgtaactctaaaaaaggcagcctacgaatttggcactcccagacaacttttattcggtgacattattggggcagttattcgggttaagcttgaaaattctacttggaagtccttgcctctatattctgcattgtctctcgacaaatggctccccactttagagaaagagtcatttattaaagagctatggccagcccagcatctattaggtaaggccaatgtccttaaaggtgagtctgctatcgttcaaatgcccactagcgcaggaaaaacaaaagcaattgaattaatcttgcgaagttcttttttatcaaatcgtataaccctagcaataatcattgccccgtttagagcgttatgccatgaaataaaaaatagtctaacggatgccttccataatgaaaatatcaacgtggacgaactttctgatacaccccagacagactttgaaatagctgaacttctaggacaccagcaaattctgattataacaccagagaaatttctgtatgtccttcgccattcgcctgaactagcatctatggtgggtctgttggtttttgatgaaggacatcaatttgatagcggtactcgagggatcacgtatgaattacttctaacatcattgcgatccatgatttctgaagaagcgcagaaagttttgatatcggctgttataagcaatgcggaaacgattggcaaatggctaaataataagcctactgttgtagaaggaagtacactaaatccaacgtttaaatcgctcggatttgctagttggcttgatcccttaggaaaaattgaatatgttgacatccgaaatacggaacaaagtgaattttatgttcccagagttattgagagattaaatcttgggaagaaagttaaagaaaagacagatcgctactttccagaaaaaactggacaagatattgcactttatctcggtctaaaactcgctcataacgggagtgtcgctatattctgcggaaaaaaaacaacagcagctagtatttgcaaaagggctgtagaatgtattaaacgaagtattcctcttccaataccattagaattttcaaatcaggaagaggttgataagctttataaccttcacattaaaaatcttgggagtctagcgcctgcatctataagtgccaaacatggcatttttacccatcataacaatacaccacatggtattcgcctagctgtagaacatgccatgcgtgaaaacttagtcaaatttgttatttgcacatccacattagcacaaggcgtaaatcttccaatccgttatctgattattaccagcgtttatcaagggacagaacaaattaaagtccgagattttcataatttgatcgggcgtgctgggcgcgctggtatgtatactgaagggagtattctatttgcagatccaatagtttatgacaaaaaactaagccgatatgatagctggcgatggaaagtggttaaggacctcattgatcctacaaaatcagaagagtgcgtaagcagtctatctaaattaattcctttgatcatccagaatgacaggaataaatcaaatgataaaaaggatcattcattaacgtgggacatcttatcttttgccaaagcctacattaaaggatgggactccttaaatgaaattatcatagaaatagaaaaatcgcataacacgcagggatttacagaagatgcactgagacctcaattcgaatctttcagcattatgctctcgtctattgaaggatttctactttctaactggggtgtaactgataatgaattatcagaggttgaacttctggatctcaccaaacaaacattggcttatttcttagctgaggataaacaacgagagcaactccaagaattatttaaaattttggctaaaaatatatctacaaatataacagatataaatcgtagaaaagtattcggtaaaaccctttatggtgttaatgaagctcaagcaatagaaagatgggtacaactacataccgaagaactcattacagttaaggaagaagaatttattgaactaatatggccattgttcaatcaacatattcatagtaaaacttttagaaattttaatagacaagatgtattgatggcaattgctaaacagtggtttttaggagttccctttcacgaattgtttaaaatttctaaagaacaagattgcaagcttggcaaagggaaaaaacctagaaaaattaaaattgaaaatattatcgatatttgtgaaggtgggctatcctatgatggagctttagttataaatgcagtctgtgaattttatgcgaatttagattgtaaagctggtaatgatgtttcaaagcgtctccaattttttcaaaagcgtattaaatatggcctgcctacagaagcatctatctctttttatgaacttggttttgcagatcgcgttatttgccaagaccttgctatgtctattaatctttctggtactcggaagaaagaatgtattaagactctaaaacaaaacagcgaatctgctcttatattaattaagaaataccctcattactttcaagagcgaatgaatgaactactgcggtga

SEQ ID NO: 57920 - DNA, 771 bp, Yersinia kristensenii
atggcgaattttgatgtttggtgtgattcagtaaacattaatttaggtacgaacttccttcaaaaactcactgcaagaattgccgattttgatggtggtgttcagtccaccgcatccattgtgccccatcattatacttcgcctgaaaatatcgcgattgcctttgaattactcggcaaacccggtgtggcagagtttatcaaagatttcctccccatttcgaagcaaactcgttcgggtgatattggcgaaatcctggcaactgagtggattaatgcacgaagcaatggttataaggtcccacttaaccggctgcgctggaaagatcaccgcaatctggctatgcgcggggaagatgtcatcggcatgtatatcgatccacagagtgaaactctttttttccttaaaactgaagcaaagagtcgtgtcaagatgaatgctagcaccattacagatgcccgaaataacttaaataaagagcagggattgcccacaccacatgcactggcttttatcgccacgcgtctgcttgaaacgggacaaacggacttggggcgggcaattctaaaggcatcgttgagtcagggaatacttcccggtcacgtccgtcacctgattttcctgctttcaggcaatgcctctgacgtattactgacgacgtctataaatgcataccaagggaatattcagcagtttggggtcacagtcatgattgctcgccacggcgagtttatcgaggaaatttttgatacggtgattagtaatgcttga

SEQ ID NO: 57921 - DNA, 3525 bp, Yersinia kristensenii
atgcttgaaacgcctgaagaaattattgaagccattcgagctgccaccgctaccggatttcgcagccgattgattgctcgtgggcaggctagggccatgatctggcgtgatggtctattacctgacgaggcgccagtattcagtcctcaactaagtgaagatcttcaggggtacgcttactcactcatcagccttgggctaggcctccgtgagttaaacggggatatcgcctattcacggcttgcatttgaatacgcagcaactgccttggagtcagtgattgcaaagggggcacgagacaatcaagacagtgattttcattttgtcatggccgcagccagttatcatttggcacacctctctgctcgtgcctattcactgctggcgatagttgatgaggatgataatttttcaccgatcgaacggaccttgacgaaactcattctgcgagatttccacacgctacgcaccagtgttctctgttatcgcgcccggggggaaggcaatgaagagagaattatagaaggtatgcggggggaggtgtcacctcgagaggaaggagatgataacgctgctggagttgaacatgacgctttgttggagggactcgatatagccctgactgatacctatatgtcagcgatggctctttacatactggccgtcgaaagaggtgagcgcatattcctcactaaggctattgataaattacgaacgggccttgaggtttgctctcgctttaatatgttacctcaatggtgggttatttttattacaattcaccttctatccgatctttggtctgatactttccacgaattgctgccggtagcctcagtcggtggtgaagctgaggcatggccagctctacgcgaggctttcatctcgcttctcatgcggcgcccacgtgccgaaatagatctctggccatcacagagagaggcggcgttacgtgcagtgaatgatgaagatgatcttgtcgtttctctaccgacaagcgcagggaaaacacgcatagccgaattatgcattcttcgttgtctcgcaggccaaaaacggattgtgtttgttaccccgcttcgtgcactttcagcgcagacagaagccacgctctccagaatgttcaatccccttggtaaaacgatttctgcactttatggcagcatcggcgtcagtggaatggatgaggacgccattcgaaagcgcgatattgtggtcgctacgcctgaaaagcttgacttcgcactgcgcaacgatcctggacttatcgatgatgtcgggttgttcatatttgatgagggacacatgattggggctgaagagcgcgaagtacgttatgaagtccaaatacaaaggctattacgcagacaagatgctaatgagcgcagaatagtctgtctgtcagctattttacccgatggagaccaactgaatgatttcgccaactggttacgacgcgataagcccgggggagtgatcaagaacgattggcgaccgaccagactacgttttggtgaagtcatttggacgggaacttctgccagacttaatctcagcgttggcgaagagaaaccatgggttccgcgcttcttggttagtactgtgcctccaacgattaaactgcatgggaaaaagcagcgcaaaaaaaactttcccggaacttctaacgaactttgccttgcaactgcatggcggctggttgatgacgggcaaaccgtgcttatctattgcccactgcgcaggagcgtagagccctttgctgaaacgattatcgatctgcaccagcgtggattactccgcccattgtttgaaggcgatgcagatgttcttgctcgggctattgctctcggagaagaatggctcggcgctcaaagcccgatactagcatgtctacgtttgggggttgctcttcatcatggcgcattgcctacagcctatcgtaaagaagtcgagcgactgcttcgtgacggtgttcttaaggttactatatcttctcctactcttgcgcagggactcaatctctcagccacggcgattgtcatgcactcgctgcacagaaataaagaacttatcaacatttctgaattcaggaatgttataggtcgggctggacgtgcttatgttgatgtggaaggtcttgtcatttaccccatttttgaacagatcatgaaacgccaaagaaactggagcagactcacgaaggacatgggagccagagagatggagagtgggttagtccagcttgtgatctctctactgaagcgaatgagccagttgctgggtaatgacattaatgtggttagtgattacatactaaataatgcgagggcttggtcattccctgtaattgcagtggaagatgcgaatgaaaaggaaagagccgcagctctctgggaaagacaaattgcaacgctagatacggccatcctgagcctgattggtgagagtgatatacccgacggtcagattgaaaccactcttgatgatatattgcagtcttcgctgtggtacagaagcctgcagcgttaccctgacgatggttctcgtaggttgattaaatctgggctgttagcacgcagtcactatatctggctgcactcaacgccagcagcccgccggggttatttcctttcgggagtgggactgacaaccggactacaactagatgccattgcgccagttgctaaccaactgctgattgaggctaacggcgcaatactatcaggcgatgaagagggggcaattgctgcacttactgccttagcagagcgggtatttaccttctatccgtttattccagctcctttaccagagaactggcaagcgatcctgcgcacttggctgttaggcgaacacattactacgatcgccaatgtagtgaaatcagaaacgctacagtttgtcgagactggcctcgcatatcgtcttccttgggctatggaagcaatccgcgtgcgtgctattgcgaatggagacattgttgatgatgatgggttaacaattgaggactatgaacttgatctggcggttgcggccgtagaaacaggaacacttaatcgttctgcatcattgcttatccaggcagggtttaactcaaggcttgcagcgataaaagttgtggcagacactggggctgattttcaatctggaagagatctccgaagatggttgcgatctgatctagccattgcttggagtgaatttgcggattggccgacaccggaaactcacgcaatgtggattgattttgctaaaggggtaagcccggtggagaataatacttggagcctgcgcaaatataccggaacagtcgactgggagggagttactcctgaactaggaaccgcgcttcattttcatcaaatggatggaattaattacatcctagctggcgatggcacccctcttggaagaatcgctgctgctattaacacagaaagaaaaggtctactgcgcgtgaaagttggagataaactgaacatagtgctggactatatggggcctgatgatatcagagtgccttaa

SEQ ID NO: 57922 - DNA, 771 bp, Yersinia kristensenii; identical to SEQ ID NO: 57920

SEQ ID NO: 57923 - DNA, 3525 bp, Yersinia kristensenii; identical to SEQ ID NO: 57921

SEQ ID NO: 57924 - DNA, 816 bp, Vibrio nigripulchritudo SO65
atgccttggactaaagaacatattcagtggcttcaccatactggtgaagtaatctctatttcaacaggtgataaagttcctgtatttgagttcgtttacgatgtgaccaatgaagaggcaatgtcacactgggcaagacattttaggaatcactattgtgctgatgatgcaatagaaatactcaagcctcaagggatgactaatagagattatttgttaaatctaaagtttccacataaaactaaaagtccagggccaagtatccgtgcaggagattttgctgaaattttagtcgctgactacttagaatttctccacgattactatgttccaagaactcgttacgaccggaagataattggtaatgaatcatccaagggttcagatgttttggggtttaagcaaacgaatcacgccccttccggcaaagacgaattattaatatacgaagtcaaggctcgccttactgagaacaatgccaaaaacactttgcaaaccgcaattgacgacagttcaaaagatgaggctaggcttgctgagtcattaaacggtgcaaagcaaaggctgtatgatcagagagattttgcaggaatgggtatcatctcaagattccaacaaaatgttgaccatccatataaaactaaatttggggcagcagcggttcttactgatagttcatgttgcgtcgaaaccatagctgaagcttcaactaaggagcattcatctccaacgcacttggagatgatagtgattagaggtcctttattgatgtctttggttcatgaactatacgagagggctgcaaatgaagcttga

SEQ ID NO: 57925 - DNA, 3108 bp, Vibrio nigripulchritudo SO65
atgaagcttgaacagtcctcaaagaaagtgctggcaattacaaagtcgaaagcaaagatgtatgaatttgctattgatgaagcatctcatatagagctacctgtcgatccgcgtaaactattgattacgactattggtatattgggcgacctgtctgctatcgaagctcgtggagaattacaggttggagatagtgatgagcatgaagaattaaagtctgagctaatatccgttgggcaatattttgatgctttgattcaatcgcacctggctgatgagatgactacttatctaaagattataggttcggcggcctactatttagcgaacataccaggcagctccatcgttctgggcaaaagtttggtctataaaacagaactactcactgatactaatcttgagggcattttgatatggatattaaagtccaacttcaatgaaaattggtatcgcgttgaaaaaacttatttaacgcaagcaatagatggtgtcggctacgccactcgacgtttctttggcttaaaccttgatacccagagctttaaacaggcaatacaggtcttaaggaatgaagtttacgaaaaaggttctgatagagagcttttgtttgccgacattatttcttctatcctgctaagaaaactcgaaaactcttcaatagtttgtttacctaaatatacacaaatccccttagaacaatgggtaaatgtaattactaagccgacatttgttcaagaattttggcctgctcagaggttgctgggcgagcaaggagtattgtctggtgtatctgctgttgtgcaaatgcccactagtgcgggaaagacaaaatctacagaattaataattagaagctcgtttttgtctgggcgttctgatgttgctgtaatcgtcgcgccattcagggccttatgcagggagattaccgctacatttgaacgcgcatttgaaggtgaagatataaatatcaatgaattgcaagatgttctggatatttccgatagtgatgacgagcttataagacttttaaccggagaaactgaacaggatggaatagctactaagtctatagttgttaccacaccggagaaacttgtttatcttcttagatatgaacccgctttagcagactcaatcggcttgcttatttttgacgaagggcatcagtttgacactggaaagagaggtgttacctacgagctattgatggcctacctcaaatctcgcgtaggtgatgatgttcagaaggtattgatctccgcagttatggctaacgccaactcaattggtgaatggcttaatggaaagaccggtattgagattcaaggagctggatgtttaccaacagtacgaagtacagccttcgcaagctggcaaacagcaataggtcagcttcaatatatcgatcaagatcgtgaggctgatagagattttttcgttcctagagttattgagcaaataaacctcggaacaagaggtcgagagaggaatgctcgactttttcccggcaaaaacgataaccccagcgtcgcagcttatttaggggttaagttatgccatcaagggcctgttgctatattctgcggtgtaaagagtactgttaagtcaatatgcgagcttttagttaattactacgaaagaggtcttgctttaccaccacctagcagttctagcgatcaaagcgaattagacaagatcgcttacctatccagtctgcattttggagaagagtctatttttactcgttcggtttcccttggaatattgccgcatagctcaaacgttcctaatggtatccgtgtttctgtagagtgggcaatggaatccaataagtcagtgttggtagtgtgtacttcaacccttgctcagggggtgaatcttccaatcagatacctagttgtttcaagcacgtttcaagcaggacaagagatcagcacacgagacttccacaatctcattgggcgagcaggtagagcaggataccataccgaagggagtgtcatttttgcggatacagacgtttttgataaacgcaatagttttcgtgaaaggtggcgatggcaaagagcaacgcatttgctcgattttactaatgcggaggactgcgccagtagcctacttgacttgacctcgccatttgactttactgaacttgatgttgatgctggccagttcatcgcaaacccaggcggctatagacaaagctgtatagacgtaggatataaaaactctattgatatcagttcgctacatgatcagatggattataaagaagctttaatcgaagcaatagaaagctattttttatcctacttgaaagacaatccaaatgcgcctcaaacgttctttgatgagttggcccaaggaacattagcttactttttgtcggacgacgatcagaaacaaaagcttcgggtggcattttcacttatcgctagcagagttctttctgtacccgaagagaaaagacaattctttggaagatcgctgctgggcttgaaaaatctatacctaatcgaaaattggcttgatgaaaattggggcgaagtagcacaagctcaaagttccaatgaacttcttgtgatttgctggccattgctatcccagctcaataacaacaagatttttctaaaaataaagcctgaaaacgttatattagattttgcaaaattatggatttcaggaagtagttacgctgatctgcatagtcacttggatcaatccggtgcgtattatcaagctgggtcgcagcgaagaaatattaaaatggaccatgtggtagacttagctgagggtgcgctttctttcgattctatgttatacgtcggagcgatagctgatgtggccgagggtaaaggaataggtgatgatgtattggaactcgttaggagcttgcaatcacgtctaaaacttggactgtcaaatagtcttgaaatgtggctctattctcagggttatgttgatagagaggtttgcaaggcccttggttctgctcttaatggtcaaggagtagatcctgacgtattcgattccgatgtattgaagacataccatcaagttgtaagtgagtgtattagtaagtttccatcgtactttagtggttaa

SEQ ID NO: 57926 - DNA, 816 bp, Vibrio nigripulchritudo AM115; identical to SEQ ID NO: 57924

SEQ ID NO: 57927 - DNA, 3108 bp, Vibrio nigripulchritudo AM115; identical to SEQ ID NO: 57925

SEQ ID NO: 57928 - DNA, 816 bp, Vibrio nigripulchritudo FTn2; identical to SEQ ID NO: 57924

SEQ ID NO: 57929 - DNA, 3108 bp, Vibrio nigripulchritudo FTn2; identical to SEQ ID NO: 57925

SEQ ID NO: 57930 - DNA, 834 bp, Colwellia psychrerythraea
atgccatggacaaatcaacacctgaaatggctagaagatacaggtgatataataactacagcttgtggtaaacaagctcctatttatactttcaatccagatatggcagatgaagctgctttgtctgcttgggcaaaacatttcagaaaccattattgtgatgataatgaaattgatgacttaagagatggtactggactgtctagaaaggagtacttactaaaaacaaaactccctgttcaaaaggttactgcgccccatgagaagaccggtcctgctactagatcaggagatttcacagagatacttgtatctgactttctagagtttaatttaaattactgggttccaaggactcgttatgaatttaaagtgaacccaaacttatctgaaaatggttctgatgttattggtttcaagttttcggatgatggtaaacctaagaatgatgagttaatgatttatgaagttaaagggtcactaactgggaataaaccttcaaatcgattacaaatagcagtaaatgactcaaataaagatcgctttagaattgcagagtctcttaatgcaataaagcaacgattaaaattaaaaggacttcaacaagatgtacctaaagtgcagcgttttcaaaatattggagatcgcccatacaaagaaaaatacggggcggcatctgttttaactaatacaatgtactctgatgcagaattgaataaaactgatactacaggacatgttaataactctgctttgagtttattggttattaaaggtgatgctttaatggatttagttcattttttatatcagagggctgctgatgaagcttga

SEQ ID NO: 57931 - DNA, 3123 bp, Colwellia psychrerythraea
atgaagcttgaacatagctcaaaaatatatctgtctattacaaaatctaaagcaaaaatgtatgaatttggtgtagaggaagaacatcatattaacttagctattgagcctcaaaagttactattattaactattgggatactcggcgatttatccgctatagaggcttctcatttagcgcaagatgacaatgatgaagaatatcttgctttaaaaagtcaactgatagatgtaagccaatattttgattctttgaacaattcaagattagaaagctcattatctaattatttaaacctgttaggttcagcctcttattacttagctgatatgccaggtagttctttagttttaataaaagatgtagattacgatattgatgaactcacaccttcctatatcgaaggagtattaatttggctgctaaaaggagatttagagcaaatctggtatgttgcaggtaattgtgactttgaaggagagttagaatattttacatcgagtatcactaagtgcttcaaacaagaagtcccatttgcccaacttgatgatgcaataagaaaattaaggaaagctgtatacgagggggggaatgatcgtgaactgctacttgttgatattttggctgctatagctaagagaaagttagaatattcatcgttaatttgtcttccaaaatatactggcttaacagttgacctttggaaggctgcactagcaaaagacagtttcattaaagaattttggcctgctcaacgtttgttgggcgagaaagggatttttgaaggaaaatcagctgttgttcagatgccaaccagtgcaggtaaaacaaaatcaacagaattaattatacgcagttcttttttatcaaaaagaagtaacttagctgttgttgttgctccattcagagcattgtgtagggaaatagctgactcatttaaaaagtcattttcaaatgaaaatatcaaaatcaatgaactacaagatgtcccacaattaaaccctaatgatttagcaatgattaacgacctgctgaatatagaggatgatgacaatgttagcgattcagttattgtatccacacctgagaaactcgtttacttactgcgtcatgaaccagaattagcctctaatataggtttattaattttcgatgaaggtcaccagtttgattcgggctctagaggtgttacatatgaattattactagcatccttaaaggttaatattccagatgattctcagctaatacttatctcggctgttatgtctaacgctgaaactataggtgactggttgtatggagaaaatggaacagaagttaaaggtactcactgtttgccaacaattaggtcaacagcatttgccagttcatcgggacaactgcagtatatagacaaagaattcgttggagaaagagagttcttcgttcctcgaataataaatcaggtaaatttagggactcaaggaacattggaaacagttgaacgaatatttcctaaaagaggcgataattccgcggtatcagcttatctagggataaagttggctcaacaatcacctacagctatattttgtggaacaaaagctataatcacatctatctgtaaaacgttagtagattactattcaagggggctagatatgccacctcctatagttaaaagtgatgaacaagagttatcaaagattgcaaacttgagtcgaatgcattttgaagacaatagtattttccctaaagccattgatttaggtattttacctcatgggtccaatattccaaatggactcagagtttcagctgaatggtcaatggagaacaataaagcttcacttgttgtttgtacctcaacattagctcaaggtgtaaaccttccaattaaatatttaattatttcaaatacagcccaaggtataaataaaatatcaactagggattttcataaccttataggtcgtgctggaagatctggctatcacaccgaaggtagcgttatttttgccaatacaaagctatacgatgaacgacttacatgggctggtgaaaaaaggtggcaagaagtaagagctctattagacccttccaattcagaggactgcgtaagtagtttaaagctactgattgaaccaattatagttggtaatcaacagttgaaagcaattaaatttataaaaaatcctactaagtatagaaagctgtgcttaaaagcagctagaaaaaatggggtgacggggcaagatttaaaagatttattatttgacttgaatagtaaacaaaagacaattaatgcccttgagagctatatgatgtcttttctgaaagatgcatcaaacgataataatgaaactgtatttttagatttggcccaaggaacgttggctcatcatttgtgctctgaaaaagaaaagctcttactcattgaggcttttgaattaatttatcaatcggtaataaatattgagccagggaaactctctttttatggcaaagcactattgggtatagaagatttaatcttcattgaggaatggttggaagaaaactatgaatctttgtgtgctcaagaagatatatttgaattatttaaatacatttggccactgctgttagatgtgtgtagaaatgaactttttgaaaaattaagtcctttagaggtggttttagaatcgtcgtgtttatggatatcaggggcaagttatagcgaaatatttaattttatgggtacgaataaagtaaggtaccaagcgggtacgcaatctcgcaaagttacaatggatcagatagttaaatatactgataacacgctaggctacgatgctatgttaatagtaggtgcattagctgacttgtgtaatggtaaatatgataacgaagaattagaagaagaccttaaacatttgcaaaatagtttaaagcttggtttatcagctaactttgaactctggttgcactcaaagggttatgtagaccgagaaatatgtaagttaatatcaaaatctttccatgaatcaggtgccgatattagtaattttgaaggtaacatattagataaaaacagcgaattagtatctagtattatgtctgaaatgccaacgtatttttcaagtatacaagttaattag

SEQ ID NO: 57932 - DNA, 777 bp, Burkholderia pseudomallei
atgctgaacttcaaagattggtgtacgacagagaaagctacagttgggttacatgagttgcgtgtgattaccgtcaattccgcaaagataaatatcggaattaccgcgactgctgaggtcgttccatctcactacgcgtcggaggagcgtattgctcgaatcttggctcgattggggaagccagaagcgtcgaagttcattcaggagctgcttcccacaaccaaggcgattcgctcgggcgacttgggtgagattctcgccacggaattcatccaggagcgaaccagatacgacgttccaatcaaacgactccgatggcgggaccatcgaaatatggccatgcgaggcgatgacgttattggtatcgctcataatgagaaaaccggtcacgcaaagttcctgaaggtcgaggcaaagagccgagttacgttgaccgccggtgtcgtcaaggaggcgcggacagctctagataaggacgatggccttccgtctccacatgctctgtcgttcgtggccagtcgccttgccgaaacaggcgacgatgaacttgccaatttgattgacgatgcgcagctgaaatatggtattcaacaggaatcggtccgccaccttctgtttactttttcgacaaatttgccaaataagattttgactgcatcattggcaggatattctggaccgattggccagtggggcgctggacttgttgtccaagaccacgctgcatttatcgctaatgtatacaagcaggtgattcacaatgccaacaacagttga

SEQ ID NO: 57933 - DNA, 3525 bp, Burkholderia pseudomallei
atgccaacaacagttgacggtatcgtcgctgacattaatgaggcttccactccaggatttcgagggcgattgattgcgcgaggacaggccagagccatgatttggcgggatggtgttctgcctcccgatgcaccggcattttccccccaactgagctatgacctccactcgtacggttattctctgctaggtcttggtctacgtcttggcgaacttggcggtgacccggcccacgctcgtatcgcgtttgagcaagccgggactgctcttgaagcagtggtggctaaagggaatcgtggcgaccacgaccgcgactttcacttcgtgatgagtgctgcggcatatcatcttgctaggttgtccgcacgtgcctactccctgttgtccattgtccggagcgaagcaaacttctcaccaatcgaacgagttctcgctctactaatgctgcgcgactttagcgctttgcaagacagcgtcttaggatttcgcatgtccggggcggcggctgacttgcggctccgagccgccatagaggctaacgttgctcgcgctgaggcagccgcagatgaggatagagatgacgagcatgctgctcacatgctggaccaagttgatttggcgctcaccgataatttttttggggcgctgtctgagtatttgctcgcactcgagcgaggtgaacagccgctccttgaggaggccttggagcgactgcgtttgggactcgacgtctgcggcgagattaatctagttccgcaatggtggtcccacaagattgctattcaccttctgtcagacatgtgggactcaacgttccacaagcagcttccggtcttacccgctggtggggatgcgcacgagtggccgcgtcagcgcgagctttttatcgcgacgttgtatcgtcgaccaaaggcggaagttgatttgtggccatcgcagctatctgcggcatcacgctctgtagaccaggcggacgacctggtcgtatcgctgccgacgagtgcgggaaagacccggatttccgagttgtgcatcttgcgctgtctggccggtggtaagcgcgttctatttatcacaccgctgcgcgctctgtccgctcaaacagaacagacactgcagagaacgttcgggccgctcgggaaatctgtttccgcgctatacggaagcataggagtgagcggattcgagaaggatgctatccggcgtcgcgacatcgttgttgcgacgccggaaaagctggatttcgccctacgcaacgaccctacgttgctcgacgatgtcggacttctcgtcttcgacgaagggcatatgataggtctcaatgagcgagaggttcgttacgaagtccagattcaacggctgttgagacgcgcggatgcccaacagcgccgtatcgtctgcttatcagcgatactccccgacggtgagcagcttgaagatttttcgagctggctaaggcgggaccggccaggagagcttgtaaaggcggactggcgtcccactcgcttgcgcttcggtgaagtgatgtggaacggcgcgaccgctcgtttgaatctgcgcgttggcgacgaacgccctttcgttccgaagttcataacgggtttcgtgcctcaactgtatgttccaccgaagcgcaaacgcaagaaaactttccccgcggaccagcaagaactcacgttggctacagcttggcgacttgtcgacgatgggcagacggttttggtgttttgtccagaacgtcgaagcgtggagccgtttgcggacgtgattgtcgagttgaatgaacgtggtgctctccggtcattgcttactgccgatgctgcgcaattggaaacggcactcacccttggtgcggagtggttgggtcaagagcacgcaattttgaaatgtctgcgattgggcgtcgcgttccatcatggagcattgccgactccatttcggaaagaagtagagcgactcttgcgagatggtgtgttgaaggtaaccatttcgtcgccgacccttgcgcagggcctcaatctctccgcgaccgctgtcgttttccactctctacatcgaagcggagaggtcatccccgccgctgagttcaaaaacgtaatcggtcgcgcggggcgcgcgtatgtcgatatagaaggtatcgttctttacccgatttttgatgagcagaagaagcgtctttcccgatgggagggcctgatttccgatgttaatgcgcgagatatggagagtgggctcgtacagttactcatgtggcttctcattcggatgtacagtaagactggcggaacgttagacgagcttgttgagtatgtcgttaataatgcagcggcgtggacttttccggaggtgccgggagaaaagacggatgcacgagagcttgcatacgcaacatggacgcgccacgttgccacactcgatactgcgattctgagcctcataggcgacaatgacattgccgacgaagccattcctgacgcgcttgatggcatcctgcagtcatcgctttgggagcgtcgtctaaagcggagagacgagggcgaccagcgagttttgaaggctgcattgacttcgcgcagtcgctttgtttgggctcgctccacgccgctcaggcggaaaggatacttcctcgctggtatagggctcgagacgggcctcgcgttagacgcaatctccgcagagttaaacgctctgcttatagcttctaatggtgcaatagtgacggctcagtatgaagcagcaattcaggcaattacttcgattgctgagctggtcttcgccatctatccgtttactccggaccctctgcccgaaaactggcgtgagattctgcggcaatggctacttggcgcacagcttgccgaggttgctgctggccaagaaaacgaaacgcttcaatttgttgagggaggtttggtatatcggcttccttgggccatggaagccgttcgtgtacgagcagcggcaaacggcgacgttgacgcagatttcggtttgccgcttgacacattcgaattggatgcggctgtggcggccgttgaaactggaacgctcaaccaatctgctgcgcttctcatccaagctggttttgcgtcgcggctggccgctatcaaagcggtcaccgacaccggtgcgaccttcctcaatgccgccgagctgagagggtggcttgcatcggatgccgtggcggcttggagtaccacaccgaattggccatctgcggagactgtatcgatgtggaaggagttcgttctcggatttgctccgcgtggcgaaagtatatggtcagagcggaagtatctggcgccagtcgcttggcacaatgtgccgccgccgcccgagacaccggttcgtctttttcatctcgacgacagacccgtcgtcctggacgcaacaggctcactcataggcgctctcagagcacccttaaacgtaatacgcaaaggggttgcacgcgtctcggtatcgcgcgaggcgggaaaagtgctcgtgacttatttgggaccggatgacctttggaccacataa

SEQ ID NO: 57934 - DNA, 780 bp, Salmonella enterica; identical to SEQ ID NO: 56508
  subsp. enterica serovar Montevideo str. 315996572

SEQ ID NO: 57935 - DNA, 3534 bp, Salmonella enterica; identical to SEQ ID NO: 56555
  subsp. enterica serovar Montevideo str. 315996572

SEQ ID NO: 57936 - DNA, 780 bp, Salmonella enterica; identical to SEQ ID NO: 56508
  subsp. enterica serovar Montevideo str. 495297-1

SEQ ID NO: 57937 - DNA, 3534 bp, Salmonella enterica; identical to SEQ ID NO: 56555
  subsp. enterica serovar Montevideo str. 495297-1

SEQ ID NO: 57938 - DNA, 780 bp, Salmonella enterica; identical to SEQ ID NO: 56508
  subsp. enterica serovar Montevideo str. 495297-3

SEQ ID NO: 57939 - DNA, 3534 bp, Salmonella enterica; identical to SEQ ID NO: 56555
  subsp. enterica serovar Montevideo str. 495297-3

SEQ ID NO: 57940 - DNA, 780 bp, Salmonella enterica; identical to SEQ ID NO: 56508
  subsp. enterica serovar Montevideo str. 495297-4

SEQ ID NO: 57941 - DNA, 3534 bp, Salmonella enterica; identical to SEQ ID NO: 56555
  subsp. enterica serovar Montevideo str. 495297-4

SEQ ID NO: 57942 - DNA, 780 bp, Salmonella enterica; identical to SEQ ID NO: 56508
  subsp. enterica serovar Montevideo str. 515920-1

SEQ ID NO: 57943 - DNA, 3534 bp, Salmonella enterica; identical to SEQ ID NO: 56555
  subsp. enterica serovar Montevideo str. 515920-1

SEQ ID NO: 57944 - DNA, 780 bp, Salmonella enterica; identical to SEQ ID NO: 56508
  subsp. enterica serovar Montevideo str. 515920-2

SEQ ID NO: 57945 - DNA, 3534 bp, Salmonella enterica; identical to SEQ ID NO: 56555
  subsp. enterica serovar Montevideo str. 515920-2

SEQ ID NO: 57946 - DNA, 780 bp, Salmonella enterica; identical to SEQ ID NO: 56508
  subsp. enterica serovar Montevideo str. NC_MB110209-0054

SEQ ID NO: 57947 - DNA, 3534 bp, Salmonella enterica; identical to SEQ ID NO: 56555
  subsp. enterica serovar Montevideo str. NC_MB110209-0054

SEQ ID NO: 57948 - DNA, 780 bp, Salmonella enterica; identical to SEQ ID NO: 56508
  subsp. enterica serovar Montevideo str. OH_2009072675

SEQ ID NO: 57949 - DNA, 3534 bp, Salmonella enterica; identical to SEQ ID NO: 56555
  subsp. enterica serovar Montevideo str. OH_2009072675

SEQ ID NO: 57950 - DNA, 780 bp, Salmonella enterica; identical to SEQ ID NO: 56508
  subsp. enterica serovar Montevideo str. CASC_09SCPH15965

SEQ ID NO: 57951 - DNA, 3534 bp, Salmonella enterica; identical to SEQ ID NO: 56555
  subsp. enterica serovar Montevideo str. CASC_09SCPH15965

SEQ ID NO: 57952 - DNA, 780 bp, Salmonella enterica subsp. enterica serovar Montevideo str. 19N; identical to SEQ ID NO: 56508

SEQ ID NO: 57953 - DNA, 3534 bp, Salmonella enterica subsp. enterica serovar Montevideo str. 19N; identical to SEQ ID NO: 56555

SEQ ID NO: 57954 - DNA, 780 bp, Salmonella enterica; identical to SEQ ID NO: 56508
  subsp. enterica serovar Montevideo str. 81038-01

SEQ ID NO: 57955 - DNA, 3534 bp, Salmonella enterica; identical to SEQ ID NO: 56555
  subsp. enterica serovar Montevideo str. 81038-01

SEQ ID NO: 57956 - DNA, 780 bp, Salmonella enterica; identical to SEQ ID NO: 56508
  subsp. enterica serovar Montevideo str. MD_MDA09249507

SEQ ID NO: 57957 - DNA, 3534 bp, Salmonella enterica; identical to SEQ ID NO: 56555
  subsp. enterica serovar Montevideo str. MD_MDA09249507

SEQ ID NO: 57958 - DNA, 780 bp, Salmonella enterica; identical to SEQ ID NO: 56508
  subsp. enterica serovar Montevideo str. 414877

SEQ ID NO: 57959 - DNA, 3534 bp, Salmonella enterica; identical to SEQ ID NO: 56555
  subsp. enterica serovar Montevideo str. 414877

SEQ ID NO: 57960 - DNA, 780 bp, Salmonella enterica; identical to SEQ ID NO: 56508
  subsp. enterica serovar Montevideo str. 366867

SEQ ID NO: 57961 - DNA, 3534 bp, Salmonella enterica; identical to SEQ ID NO: 56555
  subsp. enterica serovar Montevideo str. 366867

SEQ ID NO: 57962 - DNA, 780 bp, Salmonella enterica; identical to SEQ ID NO: 56508
  subsp. enterica serovar Montevideo str. 413180

SEQ ID NO: 57963 - DNA, 3534 bp, Salmonella enterica; identical to SEQ ID NO: 56555
  subsp. enterica serovar Montevideo str. 413180

SEQ ID NO: 57964 - DNA, 780 bp, Salmonella enterica; identical to SEQ ID NO: 56508
  subsp. enterica serovar Montevideo str. 446600

SEQ ID NO: 57965 - DNA, 3534 bp, Salmonella enterica; identical to SEQ ID NO: 56555
  subsp. enterica serovar Montevideo str. 446600

SEQ ID NO: 57966 - DNA, 780 bp, Salmonella enterica; identical to SEQ ID NO: 56508
  subsp. enterica serovar Montevideo str. 609458-1

SEQ ID NO: 57967 - DNA, 3534 bp, Salmonella enterica; identical to SEQ ID NO: 56555
  subsp. enterica serovar Montevideo str. 609458-1

SEQ ID NO: 57968 - DNA, 780 bp, Salmonella enterica; identical to SEQ ID NO: 56508
  subsp. enterica serovar Montevideo str. 556150-1

SEQ ID NO: 57969 - DNA, 3534 bp, Salmonella enterica; identical to SEQ ID NO: 56555
  subsp. enterica serovar Montevideo str. 556150-1

SEQ ID NO: 57970 - DNA, 780 bp, Salmonella enterica; identical to SEQ ID NO: 56508
  subsp. enterica serovar Montevideo str. 609460

SEQ ID NO: 57971 - DNA, 2195 bp, Salmonella enterica
  subsp. enterica serovar Montevideo str. 609460
atgatctggcgtgacggtgttcttcctcctggtgcgccggatttctcggctcaactcagcttcgatcttcacagttacgcgtatggtttgcttggactaggtctgcgccttttagagtcagatggcgacccgaatcaagcacggatcgcattcgaacaggcggcgacagcgcttgagtcggtcatggccaacggcaatcgcgaagaagctgatcgcgatttccattttctccttgcagctgccagttatcacctcgcgcacctttctgcccgggcctattccctcctcgcaattgtggccgatgaagcaaatttctcgccgatcgagcatgcgctaactctgttgatacgccgagatatcaattcgctgcgtacacgcgtatatacctttcgtctcgatggtcgtggatctgatgcgaccattacgacattcttacagcagcatctcaccgagtccatcgttgccgatgcggcggaacgagatggaaaggactttcttttcgaaggcctgaatctcgcactgacagatgttttcttcggtgccttttcgatgttcctgctcgccctagatcgcggtgaatatactcttctcgaaaaagcgatcgcccagcttcgtgaaaacctcgatatctgcggggagctgaaccttataccgcaatggtgggtgcaccggattgctatccatctgcttaaagatttctggtcgaacaccttccacgaaaaagttccgctgcttcccgctggcggcgttgccccttcgtggcctgtccttcgtgaactctttattggcttgctcgctcgacgcccaagggcagaggtcgacttgtggccgtcgcagattgaagcggcatcgcgagctgtcaaccagaccgacaacctcgttgtttcgttgccgaccagcgcaggtaagacccgcatcgctgaattgtctattctgagatgtttagccggtgggaggcgtgccattgtcgtgaccccgcttcgcgctctatctgcgcaaaccgaagccacacttcagcgtaccttcgggccactcggcaagaccatttctgccctttatggcagtatcggagtgtccggcttcgacgaagatgccatccgcgggcgtgatattgttgtcgcaaccccagagaagctcgatttcgccttgaggaacgatccgtcactgctcgacgatgtgggcttgctcgttttcgatgagggccatatgattggttcaggtgagcgcgaagttcgttacgaggttcagattcagcgcctcttacgtcgtaaggacgcagatcaacgccgcatagtctgtctatcggcaattcttccggacggagatcaaatggaagacttctcggcgtggctacggcgcgatcaaccgggaggtcccattaagaacgattggcgtccgacgcgtttgcggttcggcgaggtcacttggaattcgccgacagcgcgcctaaatcttcgcgttggtgaggaaaggccatttgtgcccagatttctgactggtgcggcaccgccgctgttcgtaccaccgaagaagcgtcgcaaccgactctttccggacaatcagcaggagttgagccttgcaaccgcatggcgtctagtcagagatggtcagacagtgttgatctattgcccagagcgtcgcagcgtcgaaccatttgccaaggtcatcgttgacttgcactcgcgcggtgcactcgagtctttgctaacagtcgaattgaccactttgcagatcgctatagcactcggtgaggaatggcttgggacagacagctatattctgaaatgccttcggcttggtgtggctcttcaccatggtgccttgccgacagcttatcgcaaggaaatcgagcgccttctgcgagaaggtatactcaaggtcacgatctcatcgccgactctggcgcagggactcaatctctcggcgacagcggtcgtcatgcactcgctctaccggcacggtgaaatgatcaaggtttcggaattcaagaatgtcatcggccgagcaggccgtgcttatattgatgtagaaggccttgttctctatcccatctttgaagatgtgaataacaggaagcacaacaaatgggtcaatctgatagaagaccacggtgctcgtgagatggaaagcgggctcatccagctcatcttctcgctgctgagccgcatgcactctcacattggcggtgatctcga

SEQ ID NO: 57972 - DNA, 780 bp, Salmonella enterica; identical to SEQ ID NO: 56508
  subsp. enterica serovar Montevideo str. 507440-20

SEQ ID NO: 57973 - DNA, 3534 bp, Salmonella enterica; identical to SEQ ID NO: 56555
  subsp. enterica serovar Montevideo str. 507440-20

SEQ ID NO: 57974 - DNA, 780 bp, Salmonella enterica; identical to SEQ ID NO: 56508
  subsp. enterica serovar Montevideo str. MB101509-0077

SEQ ID NO: 57975 - DNA, 3534 bp, Salmonella enterica; identical to SEQ ID NO: 56555
  subsp. enterica serovar Montevideo str. MB101509-0077

SEQ ID NO: 57976 - DNA, 780 bp, Salmonella enterica; identical to SEQ ID NO: 56508
  subsp. enterica serovar Montevideo str. MB102109-0047

SEQ ID NO: 57977 - DNA, 3534 bp, Salmonella enterica; identical to SEQ ID NO: 56555
  subsp. enterica serovar Montevideo str. MB102109-0047

SEQ ID NO: 57978 - DNA, 780 bp, Salmonella enterica; identical to SEQ ID NO: 56508
  subsp. enterica serovar Montevideo str. MB110209-0055

SEQ ID NO: 57979 - DNA, 269 bp, Salmonella enterica
  subsp. enterica serovar Montevideo str. MB110209-0055
atgccaacaacccctgatgctatcattgctgctataacggacgcggcgacggtcggctttcgcggcaggctaattgcacgaggtcaggcacgtgcaatgatctggcgtgacggtgttcttcctcctggtgcgccggatttctcggctcaactcagcttcgatcttcacagttacgcgtatggtttgcttggactaggtctgcgccttttagagtcagatggcgacccgaatcaagcacggatcgcattcgaacaggcggcgacagcgct

SEQ ID NO: 57980 - DNA, 780 bp, Salmonella enterica; identical to SEQ ID NO: 56508
  subsp. enterica serovar Montevideo str. MB111609-0052

SEQ ID NO: 57981 - DNA, 3534 bp, Salmonella enterica; identical to SEQ ID NO: 56555
  subsp. enterica serovar Montevideo str. MB111609-0052

SEQ ID NO: 57982 - DNA, 780 bp, Salmonella enterica; identical to SEQ ID NO: 56508
  subsp. enterica serovar Montevideo str. 2009083312

SEQ ID NO: 57983 - DNA, 3534 bp, Salmonella enterica; identical to SEQ ID NO: 56555
  subsp. enterica serovar Montevideo str. 2009083312

SEQ ID NO: 57984 - DNA, 780 bp, Salmonella enterica; identical to SEQ ID NO: 56508
  subsp. enterica serovar Montevideo str. 2009085258

SEQ ID NO: 57985 - DNA, 3534 bp, Salmonella enterica; identical to SEQ ID NO: 56555
  subsp. enterica serovar Montevideo str. 2009085258

SEQ ID NO: 57986 - DNA, 780 bp, Salmonella enterica; identical to SEQ ID NO: 56508
  subsp. enterica serovar Montevideo str. 315731156

SEQ ID NO: 57987 - DNA, 3534 bp, Salmonella enterica; identical to SEQ ID NO: 56555
  subsp. enterica serovar Montevideo str. 315731156

SEQ ID NO: 57988 - DNA, 780 bp, Salmonella enterica; identical to SEQ ID NO: 56508
  subsp. enterica serovar Montevideo str. IA_2009159199

SEQ ID NO: 57989 - DNA, 3534 bp, Salmonella enterica; identical to SEQ ID NO: 56555
  subsp. enterica serovar Montevideo str. IA_2009159199

SEQ ID NO: 57990 - DNA, 780 bp, Salmonella enterica; identical to SEQ ID NO: 56508
  subsp. enterica serovar Montevideo str. IA_2010008282

SEQ ID NO: 57991 - DNA, 1098 bp, Salmonella enterica
  subsp. enterica serovar Montevideo str. IA_2010008282
atgccaacaacccctgatgctatcattgctgctataacggacgcggcgacggtcggctttcgcggcaggctaattgcacgaggtcaggcacgtgcaatgatctggcgtgacggtgttcttcctcctggtgcgccggatttctcggctcaactcagcttcgatcttcacagttacgcgtatggtttgcttggactaggtctgcgccttttagagtcagatggcgacccgaatcaagcacggatcgcattcgaacaggcggcgacagcgcttgagtcggtcatggccaacggcaatcgcgaagaagctgatcgcgatttccattttctccttgcagctgccagttatcacctcgcgcacctttctgcccgggcctattccctcctcgcaattgtggccgatgaagcaaatttctcgccgatcgagcatgcgctaactctgttgatacgccgagatatcaattcgctgcgtacacgcgtatatacctttcgtctcgatggtcgtggatctgatgcgaccattacgacattcttacagcagcatctcaccgagtccatcgttgccgatgcggcggaacgagatggaaaggactttcttttcgaaggcctgaatctcgcactgacagatgttttcttcggtgccttttcgatgttcctgctcgccctagatcgcggtgaatatactcttctcgaaaaagcgatcgcccagcttcgtgaaaacctcgatatctgcggggagctgaaccttataccgcaatggtgggtgcaccggattgctatccatctgcttaaagatttctggtcgaacaccttccacgaaaaagttccgctgcttcccgctggcggcgttgccccttcgtggcctgtccttcgtgaactctttattggcttgctcgctcgacgcccaagggcagaggtcgacttgtggccgtcgcagattgaagcggcatcgcgagctgtcaaccagaccgacaacctcgttgtttcgttgccgaccagcgcaggtaagacccgcatcgctgaattgtctattctgagatgtttagccggtgggaggcgtgccattgtcgtgaccccgttcgcgctctatctgcgcaaaccg

SEQ ID NO: 57992 - DNA, 780 bp, Salmonella enterica; identical to SEQ ID NO: 56508
  subsp. enterica serovar Montevideo str. IA_2010008283

SEQ ID NO: 57993 - DNA, 1398 bp, Salmonella enterica
  subsp. enterica serovar Montevideo str. IA_2010008283
atgccaacaacccctgatgctatcattgctgctataacggacgcggcgacggtcggctttcgcggcaggctaattgcacgaggtcaggcacgtgcaatgatctggcgtgacggtgttcttcctcctggtgcgccggatttctcggctcaactcagcttcgatcttcacagttacgcgtatggtttgcttggactaggtctgcgccttttagagtcagatggcgacccgaatcaagcacggatcgcattcgaacaggcggcgacagcgcttgagtcggtcatggccaacggcaatcgcgaagaagctgatcgcgatttccattttctccttgcagctgccagttatcacctcgcgcacctttctgcccgggcctattccctcctcgcaattgtggccgatgaagcaaatttctcgccgatcgagcatgcgctaactctgttgatacgccgagatatcaattcgctgcgtacacgcgtatatacctttcgtctcgatggtcgtggatctgatgcgaccattacgacattcttacagcagcatctcaccgagtccatcgttgccgatgcggcggaacgagatggaaaggactttcttttcgaaggcctgaatctcgcactgacagatgttttcttcggtgccttttcgatgttcctgctcgccctagatcgcggtgaatatactcttctcgaaaaagcgatcgcccagcttcgtgaaaacctcgatatctgcggggagctgaaccttataccgcaatggtgggtgcaccggattgctatccatctgcttaaagatttctggtcgaacaccttccacgaaaaagttccgctgcttcccgctggcggcgttgccccttcgtggcctgtccttcgtgaactctttattggcttgctcgctcgacgcccaagggcagaggtcgacttgtggccgtcgcagattgaagcggcatcgcgagctgtcaaccagaccgacaacctcgttgtttcgttgccgaccagcgcaggtaagacccgcatcgctgaattgtctattctgagatgtttagccggtgggaggcgtgccattgtcgtgaccccgcttcgcgctctatctgcgcaaaccgaagccacacttcagcgtaccttcgggccactcggcaagaccatttctgccctttatggcagtatcggagtgtccggcttcgacgaagatgccatccgcgggcgtgatattgttgtcgcaaccccagagaagctcgatttcgccttgaggaacgatccgtcactgctcgacgatgtgggcttgctcgttttcgatgagggccatatgattggttcaggtgagcgcgaagttcgttacgaggttcagattcagcgcctcttacgtcgtaaggacgcagatcaacgccgcatagtctgtcta

SEQ ID NO: 57994 - DNA, 780 bp, Salmonella enterica; identical to SEQ ID NO: 56508
  subsp. enterica serovar Montevideo str. IA_2010008284

SEQ ID NO: 57995 - DNA, 3534 bp, Salmonella enterica; identical to SEQ ID NO: 56555
  subsp. enterica serovar Montevideo str. IA_2010008284

SEQ ID NO: 57996 - DNA, 780 bp, Salmonella enterica; identical to SEQ ID NO: 56508
  subsp. enterica serovar Montevideo str. IA_2010008285

SEQ ID NO: 57997 - DNA, 3534 bp, Salmonella enterica; identical to SEQ ID NO: 56555
  subsp. enterica serovar Montevideo str. IA_2010008285

SEQ ID NO: 57998 - DNA, 780 bp, Salmonella enterica; identical to SEQ ID NO: 56508
  subsp. enterica serovar Montevideo str. IA_2010008287

SEQ ID NO: 57999 - DNA, 3534 bp, Salmonella enterica; identical to SEQ ID NO: 56555
  subsp. enterica serovar Montevideo str. IA_2010008287

SEQ ID NO: 58000 - DNA, 780 bp, Salmonella enterica; identical to SEQ ID NO: 56508
  subsp. enterica serovar Montevideo str. 80959-06

SEQ ID NO: 58001 - DNA, 3534 bp, Salmonella enterica; identical to SEQ ID NO: 56555
  subsp. enterica serovar Montevideo str. 80959-06

SEQ ID NO: 58002 - DNA, 780 bp, Salmonella enterica; identical to SEQ ID NO: 56508
  subsp. enterica serovar Montevideo str. CT_02035278

SEQ ID NO: 58003 - DNA, 738 bp, Salmonella enterica
  subsp. enterica serovar Montevideo str. CT_02035278
atgccaacaacccctgatgctatcattgctgctataacggacgcggcgacggtcggctttcgcggcaggctaattgcacgaggtcaggcacgtgcaatgatctggcgtgacggtgttcttcctcctggtgcgccggatttctcggctcaactcagcttcgatcttcacagttacgcgtatggtttgcttggactaggtctgcgccttttagagtcagatggcgacccgaatcaagcacggatcgcattcgaacaggcggcgacagcgcttgagtcggtcatggccaacggcaatcgcgaagaagctgatcgcgatttccattttctccttgcagctgccagttatcacctcgcgcacctttctgcccgggcctattccctcctcgcaattgtggccgatgaagcaaatttctcgccgatcgagcatgcgctaactctgttgatacgccgagatatcaattcgctgcgtacacgcgtatatacctttcgtctcgatggtcgtggatctgatgcgaccattacgacattcttacagcagcatctcaccgagtccatcgttgccgatgcggcggaacgagatggaaaggactttcttttcgaaggcctgaatctcgcactgacagatgttttcttcggtgccttttcgatgttcctgctcgccctagatcgcggtgaatatactcttctcgaaaagcgatcgcccagcttcgtgaaaacctcgatatctgcggggagctga

SEQ ID NO: 58004 - DNA, 780 bp, Salmonella enterica; identical to SEQ ID NO: 56508
  subsp. enterica serovar Montevideo str. CT_02035318

SEQ ID NO: 58005 - DNA, 3534 bp, Salmonella enterica; identical to SEQ ID NO: 56555
  subsp. enterica serovar Montevideo str. CT_02035318

SEQ ID NO: 58006 - DNA, 780 bp, Salmonella enterica; identical to SEQ ID NO: 56508
  subsp. enterica serovar Montevideo str. CT_02035320

SEQ ID NO: 58007 - DNA, 3534 bp, Salmonella enterica; identical to SEQ ID NO: 56555
  subsp. enterica serovar Montevideo str. CT_02035320

SEQ ID NO: 58008 - DNA, 780 bp, Salmonella enterica; identical to SEQ ID NO: 56508
  subsp. enterica serovar Montevideo str. CT_02035321

SEQ ID NO: 58009 - DNA, 3534 bp, Salmonella enterica; identical to SEQ ID NO: 56555
  subsp. enterica serovar Montevideo str. CT_02035321

SEQ ID NO: 58010 - DNA, 780 bp, Salmonella enterica; identical to SEQ ID NO: 56508
  subsp. enterica serovar Montevideo str. CT_02035327

SEQ ID NO: 58011 - DNA, 3534 bp, Salmonella enterica; identical to SEQ ID NO: 56555
  subsp. enterica serovar Montevideo str. CT_02035327

SEQ ID NO: 58012 - DNA, 780 bp, Salmonella enterica; identical to SEQ ID NO: 56508
  subsp. enterica serovar Montevideo str. IA_2010008286

SEQ ID NO: 58013 - DNA, 3534 bp, Salmonella enterica; identical to SEQ ID NO: 56555
  subsp. enterica serovar Montevideo str. IA_2010008286

SEQ ID NO: 58014 - DNA, 780 bp, Salmonella enterica subsp. enterica; identical to SEQ ID NO: 56508

SEQ ID NO: 58015 - DNA, 3534 bp, Salmonella enterica subsp. enterica; identical to SEQ ID NO: 56555

SEQ ID NO: 58016 - DNA, 780 bp, Salmonella enterica subsp. enterica; identical to SEQ ID NO: 56508

SEQ ID NO: 58017 - DNA, 3534 bp, Salmonella enterica subsp. enterica; identical to SEQ ID NO: 56555

SEQ ID NO: 58018 - DNA, 780 bp, Salmonella enterica subsp. enterica; identical to SEQ ID NO: 56508

SEQ ID NO: 58019 - DNA, 3534 bp, Salmonella enterica subsp. enterica; identical to SEQ ID NO: 56555

SEQ ID NO: 58020 - DNA, 780 bp, Salmonella enterica subsp. enterica; identical to SEQ ID NO: 56508

SEQ ID NO: 58021 - DNA, 3534 bp, Salmonella enterica subsp. enterica; identical to SEQ ID NO: 56555

SEQ ID NO: 58022 - DNA, 780 bp, Salmonella enterica subsp. enterica serovar Senftenberg; identical to SEQ ID NO: 56508

SEQ ID NO: 58023 - DNA, 3534 bp, Salmonella enterica subsp. enterica serovar Senftenberg; identical to SEQ ID NO: 56555

SEQ ID NO: 58024 - DNA, 780 bp, Salmonella enterica subsp. enterica serovar Montevideo; identical to SEQ ID NO: 56508

SEQ ID NO: 58025 - DNA, 3534 bp, Salmonella enterica subsp. enterica serovar Montevideo; identical to SEQ ID NO: 56555

SEQ ID NO: 58026 - DNA, 780 bp, Yersinia frederiksenii
gtggtgcaattcaatgattggtgcgactcggctgataatcctgttggacaacactctctccgtgtgatgacaggccgtgcggcaaacctcgctgttggtgttcaggcaacagctgcagctattccggtacactacgcatctgaagaacacgtggctcgagcacttcgacgcttaggaaagccagctgctgcaacgttaatagagggcaagcttcctacaaccaagaatattcgttcgggagatcttggggaaatctttgctacggaatggatcgatgcccaaagcggtggctatcacgcaccgatcaaacggttacgctggaaagatcatcgcaacatggcgatgcgtggtgaagatgtgattggcatttttcaagatccgcaaacacatcggttaaactttttaaaaactgaggccaaaagccgagcgactttgacggcacaggttgtaacagaagcccgagcgaatttagacaaagatggtggacttccctccgggcacgcgctctcattcatttctgcacgtctacttgagctaggcaatgtccctttggctgatgcaattgatgacgctttgcttaaatacggcattcctccagctagtgtccggcaccttcttttcacgttctctggtaattcaccagaggctatgctgacagcctctcttcaagcttatccgggtatatttaatcaatacggtattggtctgcgggttgaaggtcatgctgattttatcggcgctatctatgagcaggtgattacaaatgccaacaacgcctga

SEQ ID NO: 58027 - DNA, 3519 bp, Yersinia frederiksenii
atgccaacaacgcctgaagacataattgcagatattaatgaggcggcagcagcgggatttcgcggacgtcttatcgctcgtgggcaggccagagcaattatttggcgtgatggtgtattgccgcctgatgcccctgaattctcggctcagctcagccacgagctgcattcctatgcttatgcgctgatcgggctcggtcttcggcttcgtgaactggacggtgatgcttcaaaggcgcgtatcgcctttgaacaggcagctacagctcttgaggctgtcattgctaagggcaatagagtggatgttgatcgtgactttcactttgtcatggcagctgcgagttatcatcttgcacacctctctgctcgtgcttattcactgctcactatcgttgaaaacgatgataatttctcgccaatagagcgagttattgctcgattgatacggagagattttggcacgctccgcgccagcgtgcttaattatcgcgccaacaatgaaggtagcgatgagtacattaccgctgctattcaagccaatcttgacgagattgatagtggaaataattttgctgggtctggcaacgactttctttttggtggtcttgatacggcattgattgatgcctttatggcagcaacatctctttttctcctggcagtggaacgcggtgagaggctattactcgatcaggcaattgcgcgactcagggagagtctcacaatttgcggtgagttgaatatgttgccgcaatggtgggtgcatattatcgcaatccacctcatgtcggatctctggtcgactactttccatgagaggctcccacttctgccggagggtgggggagcacctgagtggcccaagcttcgagaattgttcattgcattgctccagagccgccacaaagctgagattgacctttggccgtcgcagatagaagctgcgacccgtgcagttaaccaatcggatgatttggttgtgtccctgcctacaagtgccggtaaaacacgcatcgctgaactgtgcatattgcgctgcctggctggtggtaagcgggtcgtattcatcacacctctgcgcgccctatcagcgcaaaccgagaccacgttattgaggtcattcggcccgcttggtaagacgatctcggcactttacggcagtatcggcgttagcggcttcgacgaggacgcgatcagggagcgggatatcgtggtagcaacaccagagaagctcgatttcgcgttgcgtaacgatccaacactgcttaatgacgttggtctacttatctttgacgaagggcacatgatcggtcttaatgagcgcgaggttcggtacgaggtgcagattcagcggcttcttcgacgaccggacgctcatgagcgacggattgtgtgcctttcggctatcttacctgatggcgatcagcttgacgatttcgcagcgtggttacgtcgcgaccaacctggtggcgtggttaaaaaggactggcgtcctacacgcttgcggtttggtgaagtagtttggacttctcctaccgcgcggctaaacctccgtgtcggagatgaacgtccttgggtacagcggtttctcacgggtacagcaccgccaaattgggttcctccaaagaggcgtcggacgcgcatttttcccgataatcaacgtgaactctgcttggcgactgcatggaggttgattgaggatgggcaaactgtcctgattttctgtccgcagcgtcgaagtgtcgaaccctacgcagaggtaatcgttgatctacatgagcggggggctctacgttctttgttggaagttgatcccatcgtcctgaacacggccatcacgcttggagaagaatggctgggagcgaatagcatgatcctcaaatgccttcgtttgggtatagccttacaccatggtgccctacctacagcctaccgcaaagaggttgagcgactcttacgcgataatgtacttaaagtgacgatttcatcgccgactttggctcagggacttaacttatcagctaccgctattgtcatgcattctcttcaccgcaatggtgaagttatcgaagtctccgaatttaagaatgttattgggcgagctggtcgggcttatgtcgacgtcgaaggtgtcgttttattcccgatgttcgatgagatcgtaaagaagaaacgcaactgggaagctctaattaccgacctcggtgctcgagaaatggagagtggactagtgcgactagtcgcggttcttttgctgcgaatgcgtgcccgtattggcggagacctcaatgaactcgtcgactatgttgtcaataatgccgctatctggactttcccggaagtcgagaacgaaaagcctgaagctcgcgagcgtgctcttgctgattgggagaagcatgtcgcgaccctagatacggctatccttagcctccttggggaaaatgatgttcccgaggaagaaatcgaggatgcacttgataatattcttcaatcgtcactatggcagcgacgtttacttcgccacaatgagcagacacaacagctcctcaaggctggaataatctctcgtagcaaatttatatggggtcactcaacagcggtacttcgacgaggttacttcctagctggggtggggcttgcaaccggtcatgcgttagacgctattgcggtgaatgttaacctgcttttactcgaagctaatagcgcgattctccatgatgatgctgaggaggctgttgctactataacggccctagccgaacaggtttttgctttccatccctttaagccagacattcttcccggtagctggcgagacatcctacgagcttggctcctcggacagcctttggccggtatagccgccggacaggagtcggagacgttgcagtttatcgaggggggactggtttatcgtttaccttgggctatggaggccatccgagttcgcgctgtggcgaacggtgatgcggtcggagaattaggtttgcaactagatgaatatgaactcggccaagcggtgctctccgtcgaaactggcacgcttaatcgttcggcctcgatactcattcaagcaggtttcaattcaaggcttgccgcgatcaaggctgtaaccgataccggtgccacttttcataacggtcgtgagcttcgacaatggctcaattctgaaattgttgcaggattgagtgtacaggcggattggccaacggctgagaccaaaacgatatggactgattttgtgcaaagttttagcccaacagaaaaccgtacttgggaagagcgtagatactgggtaaacgtagcttggctcggtgctccaccgcagccggggacgccggtgcaaatttatcatggggtgggacagccacgtgttttggctgctgatggcaagcctcttggttctataccggtagcactcaatcccgcgagaagtgggctgttgcgtgcccaagtggctcaagacgtcacacggatcgaccttatttacttaggacctgcagatttattgcagatataa

SEQ ID NO: 58028 - DNA, 831 bp, Anaerococcus lactolyticus ATCC 51172
atgaatttgttttttgataatagtaaatattttatatttgataaattaatacctacctcaagtggagaagaaattcaggtctataaacttaatagtgaattgttagatgataatagtttgaataattgggctttgggattaagggataattatgttgaagaaattctattagagtctctagtccgaggaacaggattaacgcaaaaagagtttttggagaagaatatatttcccaatcatcaaaataaactgggtgcttcaactatgtctggggaattcggagagatattggtatatgactatataaattttgttctaaagcactatattactagaactaggtatttggaaaaagtcaatcctgatatgccagtatccggaagtgatgtgataggatataaagttaaaaatattaataaaccaagtaagtctgatcacttaatagttgctgaagtaaaaactcgttctagcaaagttggaaataaaaacaggttgtgtgaaaaaacagttaaagatgccatagaacactctattaaagatagggttcgaatcggtgagtcactaaatgccgaaaaaaggagattacttaatcgttcaagaaatgacgaggcaaaaatagtagaaagatttcaaaataaaacagacaatccatttacattagacttttttgcagttgctgtattggataatgaattgtattcagaccaagtggttttggatgtggttaatagtcagcatgaaaatataaaatctacgaatatattgataattcattctaaagaattgaagctcttcttaagggatttatataggagggcttgcttatgctga

SEQ ID NO: 58029 - DNA, 3099 bp, Anaerococcus lactolyticus ATCC 51172
atgctgatagaaagtacttcaaagtactatttgaaaaaggttcgagcaaaagcaaaaatgtatgaatatggagtgccagagaatcttcatattgaagttgaagatcaagccaatgatctcatattactttgcattggaatagttggagacatcgctaatgaaatatggaatatggaacaagcacctataattcttccaaaagaaaaggaagaagagttatactttgtgtcaagattttttgattcatatttccaatccaaaatgagtatagagatgaatccatattatattttaatgggagcggttacttattacttctgtaatatgaatggtagttcaaaagtaatgattagtattatgccagatttaagtgattttgagttttttgcttctggattagaaaatgtaataatgtggatgttagataataatcataaatttgacgtcggtaagatagatggaaaatacagaaactatattgtgcaattagttgattactataatatgttttttgattgcaaaaatcctaacaactcgaattttgatgattttagaagttatgtttataaacttggtaacgatagagaaatattatttacagatattatattagcaatattgaaaaagaaaatttataattcgtgtattaatctaatgccactatattctggtattgacaagaacgattggatttcaacatttaagaacaatgcgctgatgaaagaaatgtggtcatcccagattttactaggtaaagaaggaattttcgaaggaaaatcaggttttattcaaatgccaacaagctctggtaaaacaacatctgtagcacttgctgtacaagctgcttttctatcacatagaacttcaattgtagttgtagtagctccatttagagctttatgtaaggaaataatgcttgatatggaaaagttttttgcgtttgatgaaaatatatctgtaactgagttttctgatattcctgaacctagcgaaatagagttggttaaatctgagtctattggtaaaaaaatatttgttatgactccagaaaagttggaatatattttaaaacacgatacggaaataattgaaagtattaacatgattgtttttgatgaagcgcatttgtttgatgatgaatcaagaggaacagattacgaacttttactgacaacaataaatagctatcttagaccagatgcacagaagatattagtttcagcagtaatttctaatgctgagcaattaaatgcgtggattaacgatgatggtattgttataaaaaataatacaattaaaacatcagagaaaacggtagcctttaatacatttacatcgactaatgttaataatgcttatagtaatctttattttgtggatccaaataaatatctagaagaagaattttatgtaccaagagtagtccaaacaagagaaataaataaaaaaggtaatgagaaaaaattaagatattttcctgattttaaaaataatacgcaagatgtaggcatttattatgctattaaattaataagaaacggctgtattgcaatattttgctcaaaaaaagatagtgtaaataagatattgctaagatttattgaattaaaagagagaggagtttctcttgaagattttagtcgtttgtcagattatgctgagtgttcaaaaattgcatatttaataagagaacattttggtgaaaatgatttatacacggcagcattaaatggtattgtggggcatcattcaggtataccgaacggagtaagaattgctgaagaatatgctttgaaaaaatcattagttcgttgtgtagtatgtacttctacattggcacaaggagtaaatttgccaattaaatatttaatcgtatcaagtgtttatcaatcaaaacaggtaattaaagttagagatttccataatttgataggaagaacagcaagagcaggaaaagagacagaaggaactatcattctaacagaaaatatctataaaaatagtaaagaagactataaattaaataagtataaacgtttgcttaatgctgacaattctgaggagtgttctagcaatcttttgaaattagtcagagaagttgatttaggaaataatagaacaatcagttttgactttttgaaaaaatacattaattccagatattctaataaggctgaatacactgaattgaaaaaaggtattattgaatataaagagcagggaaaggaatgtggtgaagaaattttttataaaatgaatgaaatagatcatattctagtatcattggaaaattttatacttggctttgtagatgttgaagatgaaagttttgaaattattaaatctacatatgggtactacttggcaaatgaagaagaaaaagaagaattgaagaatatatataaccttattaaaagtagtattgatagtcttgaagttactaataaactgatttacagaaaaagcatgttaggcatattgaaaatgaaagaactatctatatttatagataataatttgtatgaaatagtaaatgcgaattttgatgaattaattagaattattgctaatagacttaaagaatcagaggtttgcaagattattcctaaatttgttgatgatagctatgtgtatgatttattaaaaatatggattaatggtaaaagttatattgaaatctggagctatgcaaaatcagtaaatttgttagttaagcggggtaaaagaagtagagatatatcattggaagacataataactttatgtgattcggactttggatatgcttcattaactataatacaggctattatagaagttttaaataccaaggattgtagtgaaaatacacaggaaaatttaagcgatataatttatagaataagatatggattaccgaacaaagagtctgtgtttatatatgaacttggatttgcagatagaattatttcgcaaaaaattgctaatgaaataagtgattttgactgtagcacaaaaacgaaaacaaaatctacaataaaaagtaatagagagaaattacgagtattattgtcaaactatccatcctatttcttggatagacttcaaaaactaagataa

SEQ ID NO: 58030 - DNA, 777 bp, Komagataeibacter europaeus NBRC 3261
atggtcagatttccaaactggtgtgacagtgcgcgtgaggatgtggggccgcatgcgctgcaagtgatatccgcacgcgcagcagacacggcgaacggatgcgtcgcagtcgccgcgatcgtttcggaacattatgccgccgaagtgcaggtcgttcgcatcctgcgccggctcggccgcccgaaggcagcagcattcatcgaaaacaaactgccgacaactaagtcgatccggtccggcgatctcggggagatcctcgcgaccgaatatatcaccggcgaaacgccctatgatgtgccgatcaaacgcctgcggtggaaggatcatcgcaacatggcgatgcgcggtgacgacgtgatcggcctaatgcgcgatcaagcgactgggcgacttcattttcttaaaaccgaggcgaagagccgtgcggctttggcgggcggggtcgtcacagaggcgcgggaggggctagacaaggagggtggcttgccctccgcacatgctctcgagttcatctccgcacgattgatggaggctggcgaagacgcgctagccgatgcgatcgacgacgcgttgttgaagcatggtattgccccgcagaccgtcacacacctcctctttacattctccggaaacgaccctggcaatatcctgcgtacgaacttacaaggctatgctggcggatatccgcagcactatgttggagtgcggatcgacgcccacggcaccttcatcgccaacgtttatgaccgggtgattgccgatgccaaccacggttga

SEQ ID NO: 58031 - DNA, 3405 bp, Komagataeibacter europaeus NBRC 3261
atgatatggagagacgacgtccttccgccggaggcgcctgcttttacgccgcaccttagcaatgacctcctcggctatgggtatgctcttctggaaatggggattcggctgcgcgacaaaggcggtgatcgtgtccgggctcgtacggcgttcgagcaagccgcgaccgcgatcgaggccgtgatcgctcgcgggccacgcgggggaagcgaccgtagtttccatttcgtggtgggtgcggccagctatcatttggcgcggttatcagcacgggcctattcgcttctcagccatgtgattgccgatgcgaatttctcgcgatcagagcgagcacttgcactcctgatgcttcgagacttggatgagctggaatccatggttctggctttccgggggagcggcgccggatcagaccgcacgatcaccgcctcgcttgagaatcagttgcttgtggaggaatcgctgggacgccccgagggagacgatccgggctttatcttcgacgcggtcgataccgtgctaaccgaccgcttcttcggcgcgatcgcgatgttccttgtggcactcgaacggggggaacgcgcccttgtcgatgccgcaatcgcggagctcgccgaaaatgtagcggccagtgaagaattgaaccttgtcccccaatggtggatcaaccggatcgcaatccacctgctttcggacctttgggactgcagttttcacaatctattgccgatcgtgccagccggcggggatgcgccgacatggccggggctcagaacattgtttcttgcggtgctgcacagccggcggaaggcagagttggagctatggccttcgcagatcgatgcggccgcgcgaagcgtgaaccaagccgacgatctcgtcgtgtctctgccgacaagtgcaggaaagacgcgcatcgcggaattatgcatcctgcgatgcctagctgcggataagcggatcgtgtttgtcaccccgcttcgcgccctgtccgcgcaaaccgaaatcattctccaacgaaccttcggtccgctgggaaagacaatctctgcgctgtacgggagtacgggtgttagcgacgtcgatgaggatgcgatccgcacgcgcaatatcgtcgttgcgaccccggaaaagctcgattttgcgctgcgcaatgatccgacactgctcgatgatgtcgggctgctgatctttgatgaaggccacatgatcggattgagcgagcgtgaagttcgctacgaggttcagattcagcggctcctgaagcgagcagacgccgccgatcggcgtattgtctgcctgtcggcgattttgccggacggagatcaactcgatgacttcgcgtgctggctgcggcgtgaccagccaggcgggctgatcaagaatgattggcgtccaacgcggctgcgatacggcgaggttctgtggaacggcaattctgctcgtctcaacctgcgagtgggtgacgagcgcccgtttgtaccgcgctatctggcgagcttcgttccgccggtcggtcggcggacgaccccgtttcccaagaatctcggcgagctttgcctggcaacggcgtggcggctggtcaacgatgggcagtcagtcttggtattctgtccggttcgcaagcacgtcgaacccttcgccgaccgcgtcattgacctgcatcgcagaggcgcgttgagaagcctgctgaccgtagacccggctgtgctcgagacggcgctcgtgctaggagcggagtggctcggtgctgcccatccgatactcgaatgtctgaagcttggcgtcgccatccatcacggcgctcttccgactgcctatcgcaaagaggtcgagcgactgcttcgcgaaggcgtaatcaaggtcacgatctcttcgccgactttggcgcaggggctgaatctttccgcgacagcagtcatcatacattcgctgtatcgcaaccgcgcgaggatcgaggcagctgagttcaagaatgtcgtgggccgggcaggtcgtgcctatgtcgatgtggaggggcttgtcctctatccgatttttgaccagcactattatcgcaccgcccaatgggaagggttgatcgcggacatcacttcgcgcgagatggaaagcggtctgcttcgtctggtcctgacgttgcttcggcgcatgcaggcgcaggtcaagcgtagtctacctgatctcacggaatatgtgctcaatcaggcccaggcttgggctttcccggcggtagccggtgaaagtcccgaagacgcggagagggaatgccgggcatgggacggctatgtcgcttcattggacacagctatcttggcattgctcggtgatgccgaggtaccagacgacgacattgccgaagcgctcgataccatcttgcgatcttcactgtggtcgcggcggctcaatcgccgcggcgaggaagcgcaggcggcgctgcgtgcgggcttgatcggtcgcagccgggtagtgtgggcgaattcgaccccgcaacagcgacgcggctatttcctcgcgggtgtcgggctaggcactggccatgcgcttgatgctatcgccgcacaggcgaataacctactagtggcggcaaacgcagccctgcaagagcccgatgtggacgcagttattcaggcgatcaccggacttgcggagcttgtgttcccaatcttccctttcacgccggatgttcttcctgacaactggcgtgacattttgcgggcatggttgcttggccagccgctggcacatttgggacccggcgacccttcggcgacgcttcaattcgttgagggcgcgttggtgtaccgcttgccgtgggcgatggaggctattcgggtgcgcggcattgcgaacggcgatgcgctcggcgattttgctctcgacgatttcgagcttggattggccgtggccgcagtcgaaacgggcacggtgaaccagtccgccgcgatcctcatccaagccggcttcacctcgcgtctcgccgcgatcaaggcggttaccgatactgaagcgaactttgcgacgatgggggagcttcaggtttggttaggcagcgatgtggtgcaggcattcgaccaacttgctggttggcctacggccgagacgaaggtgctgtggaaggagtttgtcgctggtttcgtccccgtcgagaagcggacctggtccgagcgccgctattgggcgtgggtgaaatggtgtgagggcatcgtgccggctgctggttcggcattgcgtctcaaggtgctcgatggccagcggctcgttgctgcggccgatggaagcgtgatgggcgaactgcaggcggtattgaacccaaatcaccgtggactcttgcgaacgcaggtgagcgccgaggtgaacaaggtcgacatcacgtattatggacctgacgatctttggttggcatga

SEQ ID NO: 58032 - DNA, 825 bp, Streptobacillus moniliformis DSM 12112
ttgttttttgataatagcaaatattttatatttgataaatcaatacctacctcaagtggagaaaaaattcaggtatataaacttaataatgaattgttagatgataatagtttgaataattgggctttgggattgagaaataattatattgaagaacatctgttggaacaagcaatttcaggaactggattagcgaaaaaagaatatttagaaaaaatgatttttccaaatccaagagttcctcaaggtgcagcaactatgtcaggggaatttggtgaactgttagtgtatgactatataaattatgttttagaatactatgttccgagaatcagatattttaataaagttaatcctaatacacctatccatggtagtgatgttattggatataaaatggaaagttataataaaagaagtaaaaatgataaattattagttgcagaggttaaaactcgctcatctatatctggaaataaaaccaagatttgcacaaacattgttactgatgcaattacggattctaataaagatagagttagagtcggagaatctttaaatgctgaaaaattaaaattgttaaatagaggtaggattaaagaagccaatattgtggagcgatttcaaaacaaaacagataatccatataccttagatttttttgcagttgctgtgatggatagtgatttgtattcagaccaggtggttttggatgtggttaatagtcagcatgaaaatgtaaaatgcacgagtatattgataattcattccaaagaattgctgctcttattaagagatttatataggagggcttgctcatgttga

SEQ ID NO: 58033 - DNA, 3099 bp, Streptobacillus moniliformis DSM 12112
atgttgatagaaagtacttcaaaatattatttgaaaaaagttcgagcaaaagcaaaaatgtatgagtatggcgtgccagaaaatcttcatatagaagttgaagaacaagcaaatgatcttatattacttagcattgggatagttggagacatcgctaatgaaatatggaacatgaaacaagctcctataattctttcgaaagaaaaggaagaagaattgtattttgtatcaaggttttttgatgcttattttcagtctgaaatgagtattgacttgaattcatattatatattgatgggagcggttacttattatttttgcaatatgaatggcagctcaaaagtaatgatgagtattatgcataattggaataattttgaattttctgcttctggattagaaaatgtaataatatggctgttagatggcaactataaatttgatgtttccgatatagatgaaaaatacaaaagctatattatccaactaattaattatcacaataggttttttgatggtgagaatctagagaaagctcaatttgaagaatttagaaactatgtttatcactttgggaatgatagagaaatattatttacagatattattttggcaattttgaagaaaaaaatttacaattcatgtattaatctaatgccactgtattcaggacttgataaggacaattggatttcaacatttaagaataatgcgatgatgaaagaaatgtggtcatctcagattttgttgggagaaaaaggaattttcaaagggaaatcgggtgttattcaaatgccgacaagttcaggaaaaactacatcagtctctcttgccgtacaatctgcatttttatctaaaagaacatctattgtaattgttgtagctccatttagggcattatgtaaagaaataatgtttgatatggagaaatttttttcgtttgataaaaatataaccgtaactgagttttctgatgttcccgagcccagtgaaatagaattagtcacatctgagtcgattgtcaaaaaaataattgttatgactccagaaaagttggcttatattttaaaacacaatacggaaataattgaaagtattaacatgattgtttttgatgaggctcatttgtttgatgatgaaacaagagggacggattatgaacttttattaacaactattaatagttatcttaaaccagatgcacagaaaatattagtttcagcagtaatttcgaatgctgaacagctaaacacatggattaacaaagatggtattgtaataaggaataatactattaagacatcagaaaaaacggtagcatttaatacatttacttccactaatatcaataatgcttatagtaatctttattttgtggaacctaataaaaatttagaggaagaattttatgtacctagagtagttcaaacaaaaaaactaaagaagatagatggagagagaaagttcagatattttcccgattttaagaataataagcaagatgtaggtatttactatgcaattaaattgattgcaaatgggagtatagctattttttgttcaaaaaaagatactgtaaataatattctaaagagatttattgatttgaaagaaagaggcatctcgttagaggatttttccaccttatcagatgaaactgaatgttcaaaaattgcatatctaataaaagaacatcttggtgaaaacaatttatatatatcagcattaaatggtattgtagggcatcattcgggtgtgcctaacggggtaagaattgctgaagaatatgcattgaaaaaatccttaattcgttgtgtggtatgcacttctacgctggcacagggtgtaaatttacctattaaatatttaattgtatctagtatttatcaatcaaagcaggtaattaaggttagggattttcataatttgattggaagaactgcaagagcaggaaaagaaacagaagggacaatcattttaacagaagatatttataaaaatagtaaagaggcttataaattaaataattataaacgattacttaatgctgataattctgaggagtgttatagtaatcttttgaaattggtcagagaagttgatttgggaaataatagagtaatttcttttgactttttgaaaaaatatatcgagtccagatattctaataaggcagaatatacagaaacaaaaaaaggaattcttgaatataaagagcaaggaagagaatatggtgaagaaattttctataaaatgaatgaaatagaacatattttagtgtcattggaaaattttatactcggatttgcagatatagaagatgagagttttgaaattataaaatccacatacggttatcacttggcaaatgaagatgaaagggaagaactgaaaaatatttataatctcattagaagtaatattgaaagtattgaagttggtgacaggttgctttatagaaaaagtatgttaggtatactgacaatgaaaacattatctagatttatagatgagaatttatatgaaatagcaaatgcagattttgatacattaattaacctggttgctaataaattgaaagaatcgggaaattgtaagcttatacctaagttgattgatgatagccatgtttatgagctattaaaaatgtggattaatggtaaaagctatattcaaatttgggactactcaaagtcagtgaatttgctaattaaatgggggaaaaggagcaggaatatctctttggaagatataataacattatgcgattcagactttggatttgcctcattaacgataatacaggctattgtagagatattaaatactaaagactgcggtgaaaacatacaggaagctttaaatgatataatttatagaataagatatggattacctaataaagagtcggtatgtatatatgaacttgggtttgcggatagaattatttcacaaaaaattgctgatgaaataattgaatttgattgtagtacaaaaaagaaaacaaaatctgcaataaagagtaatagagaaaaattaaaggagttattgacaaattatccattatatttcatagataggttagaaaagatacgctaa

SEQ ID NO: 58034 - DNA, 777 bp, Burkholderia xenovorans LB400
atggttcagttcaacgattggtgcgattctgccgacactcccattgggaatcactatgtccgggtcattaccagcaggccggcagatgttcccactggtatccagttgaccgcgtccaccgtgcctggtcactacgcggcggaagagcgcgtgtcccgcgcactggcgcgcctggggaaggtcgaagctgcgaggatggtgactgacctgttgccccaaacaccacaaatcaggtccggcgatcttggcgaaatctatgcgacggaatggatcaactcccaaagcggctatcgcgctccggtaaagcggcttcgctggaaagatcatcgtgaaatggcgatgcgcggtgacgacgttatcggcatgatcctcgatcccgagacccaacgtctacgcttcctgaaaaccgaggccaaaagccggaataatctgcgcgcacagacccttacagaggcgcgggccggacttgacaaggatggcggtcttccgtccgctcacgccctctctttcatttctgcgagactgctcgacctcgcggatcttccgttagcggacgcaatcgacgacgcgctcctccgacatggaattcccgtcgataacgtacgtcatctgttgttcactttctccggtaacgcaccacaggcgctgttggagcagtcgctgcaggcgtatcccggtccaatcacccaatggggcgttggcctccacgtcgatggacacgccgcttttatcggtgcggtctacacacaagtgatcgccaatggcaaccacccctga

SEQ ID NO: 58035 - DNA, 729 bp, Burkholderia xenovorans LB400
atggcaaccacccctgacgcaatcggacaagccatcaccgaagccgcggccgctgggttccgcggtcgattgatcgcacgcggccaggcgcgtgcaatgatctggcgggatggcatcctgccagctgacgcgccggccttttcgccccagctcagcttcgaccttcacagctacggctatgccctcctcaacctcggcctgcgcctcctggagatgggcggcgatccgggtcaggcccgtctagcttttgaacaggcggcgaccgccctcgaggccgtcatggcgaaaggcaaccgccgagaagtggatcgagactttcacttcgtcatggcggccgccagctaccatctcgcccacctgtcggcacgcgcgtattcgttgctcgccatcgtcgctgcagacgagaatttctcgccggtcgaacgagctctcgcactactcatgcggcgagatatcgctaccctccgggctcatgtctacgcctttcgtctcgatggtcaaggttccgatgctcggatcgctggcctttttcaggaacgccttggacaagaaaatgtcgctggcgaccttcagcgcgatggtcacgacttcctgttcgaaggcctcgatctcgccctaacagacatcttcttcggcgcgcttgctcagttcctgctcgcgctggagcgcggtgagcgacaactcgtcgagcgtgctattggtgcgtatttcggcgaagccgaacactga

SEQ ID NO: 58036 - DNA, 777 bp, Burkholderia xenovorans LB400; identical to SEQ ID NO: 58034

SEQ ID NO: 58037 - DNA, 633 bp, Burkholderia xenovorans LB400
atgatctggcgggatggcatcctgccagctgacgcgccggccttttcgccccagctcagcttcgaccttcacagctacggctatgccctcctcaacctcggcctgcgcctcctggagatgggcggcgatccgggtcaggcccgtctagcttttgaacaggcggcgaccgccctcgaggccgtcatggcgaaaggcaaccgccgagaagtggatcgagactttcacttcgtcatggcggccgccagctaccatctcgcccacctgtcggcacgcgcgtattcgttgctcgccatcgtcgctgcagacgagaatttctcgccggtcgaacgagctctcgcactactcatgcggcgagatatcgctaccctccgggctcatgtctacgcctttcgtctcgatggtcaaggttccgatgctcggatcgctggcctttttcaggaacgccttggacaagaaaatgtcgctggcgaccttcagcgcgatggtcacgacttcctgttcgaaggcctcgatctcgccctaacagacatcttcttcggcgcgcttgctcagttcctgctcgcgctggagcgcggtgagcgacaactcgtcgagcgtgctattggtgcgtatttcggcgaagccgaacactga

SEQ ID NO: 58038 - DNA, 819 bp, Enterococcus casseliflavus EC30
ttgagttttatggatattccgaaattcattgattactttattcatgaagaaatcgttatcactgacaaaggaaaagatatctctgttataaaaattgaaataaatgatgatctgaccgttttcgaacaatgggcaagacatcttagagagcattattgttcacttgaagaattggatgaactaagagaaggtactggtctttctagagctgaattccttagagatatgaagtttcccaatccaaattttggattgggttcagcaacaatgtccggtgatttttcagaaatattaattgcagattacattgaatacatcttgaattatatagttccaagagtacgctacagacaaaaattcaatcgaaatacttccacacaaggaagtgacttaattgggtacaaagtagagtctattgaaactaatagtatcaatgatgaaatgttaattgttgaagtaaaagctagaaatagtgaatcaaatccagaagcaactctacaaaatgctgtagatcattctgcaaaagaccttgttagaatagctgaatctttaaatgcctcttacagaatgttaaagaactataatgaagaggaaggtatgcgtttagtaagaagatttcaaaatcctacagacagacctcataagagaacttttgctgcagcagctgttagttcggataaagctttttctagagagttattaaaagaaatcgatacttcagaacatcctagtccagatgttcagttaatagctgtacactctcctaaatttttagaatttattaaacaaatgtatgtgagggctgccaatgttaattga

SEQ ID NO: 58039 - DNA, 3081 bp, Enterococcus casseliflavus EC30
atgtttgaatacaatgttcctcttgaagagcatatccaagtagaatatatggcacaagaattaatagtccttgcaatagcgacaattggtgatgcatctaattttatttgggataatagatatactgaattttcttcaaaattaaataatgaactatttgaaaatttaaatttcacatcaatttactttgattcactacttacttcagagattggtgaagcaagttataatgattattttggattattaggggcaatttctttctatctttcggatgcacttggaagtacaaaagtaatgataaacaagatagattgggcaatggatttagaaattaatgaaattgatacttttcttttatatctattagcagacagattggacgaattaaaggggtacgagttttccagtcaatatggtaatctcttctattatctaatatatgacttatctcaattttacttagatggtacacccattgattttgaaaaattaaatgacttaaaacaagaaatatatctatctcaaaatccacgagagattctttttggagattcattattggcagtttttattaaaaagtataaaaattctgctttgaatcttttgcccaattattctgatacgacaatacaagattgggaagatttattgttaaacaatcatacaataaaagaattgtggcctagtcaaattttgctaggagaaaagaatatttttaaaggtaaatctggagtcattcaaatgcctacgagttctggcaaaacaacttcaattggtttaataattagatcagcttttattacccatcgaacaaaacttgccgttgttgtggctccatttaaagctctctgcaaagaaataactctaaatttaatagaattcttttcaaatgatgaggtaatcataaacgaactgtcggatattgcagaaaaagatgatattgcgttctttgataatgatatcgctacaaacacattgattatactcactcctgaaaaattactgttcttaattagaaataatagtgaaattttggaagaacttaacttgattatttttgatgaagctcacttattcgatgatagctcgcgaggtactaattatgaattgcttgtttcaacaatcagatattacttaaatgaatcttcacaaaaaatactgatctcagcggttattgcgaatagtgaagtaatcaatgaatggttaaatggtactgatggagaagttatttctaacaacaatattatttcttcccaacgatcaatagcaataggtgattggatgggacaaactggacagttatattttctaaatcaagataatcctgacatagatgatttttatgtcccaagaattgttgatatacgtgaaataaatagacttgatagagaaagagcaaaaaggtattttcctgacgtggattttcgtaaaagaaaactcaataaaccttacgatatgcaaatttattatgcattaaaaatggttcacaatggagcaacagctatattctctggaacaaaaaaaactgctgataagaccatcgaaagactacttgaacttgaagaaagaggactagatatatcagccttttcaaatgaagttagtcaaaatgagaatacaaaaatagcaagtcttattaatatgaacttaggaagtgatactgaatattatatttcagccttgaagggcatatttattcatcatggtaatattcctctaggaattcgattatcagttgaatatgcaatgtcgcagaatttaatcaattttgtagtttgtacttccaccttagctcaaggagtgaatttaccaattaaataccttattatttcaagtctctatcaaggaaaaagtcaaatgaaggttcgtgattttcacaatttattaggtagagtgggtagagcaggtaagcatattgaaggaacggttatattatcagaaccttttattcattctaacaaatcaaattggaaatggaacagatacaaaaatatgctagatattgataattcagaagacagtgagagtaatttattaaagcttgttaggcctattataattgataaattcccccctattaatctttggaatgtactgccacaaaagtatactaatcaagaacagtttaatgatgtaatcaataagataaaaaccgtaattagcaactcaaattttccgaataaaatatcagacttcaacttcgaattaaagataattttagatattttaaaagatgtcgaaaactatgtaatgtactttgtgaaatactttaaagattcaaatccaaattttactaatatggtaactcagcaaactttaggttatcatttggctagcgatagcgaaaaagaaaaattagttgaactgtttgaggtaattaagacttattctctttctttcactgaagctgaactatctctttattcaatatcctctttaggatttgataactctaaagtcttgtctcaatggatttcagagaaaattgaaaacattactcaagcaaggtcagaatttgaattgattgacataatctttcctcagttaatattattctcagaaaataatattataaataggattgatgatacttctatttttactcagatatgtgaattatggactcaaggacaaagctattctgatattttaaactattgtcaaagcaatcaattccaaattagtaagcgtaatcagctagttccgctcatattacaagatatcattgaaatatgtgataacatactagcttacagcactatattacctctaaatggagttgcaacatttatggaaaattccgaaaatgattcaacacttcatttgattaaaagtctacaaaagaaaatacgttatggacttcctagcaatctatcaataaatattttcgagcttggtttttctgatcgagtaattgctcaaattttggctcgaattattgaaaattcttcttcttttacaattacttcaattagtaaaaggataactaaagaattacttagacaaaataaacgagagattgaagaagcactaaaagtttttcctcaatattttctggatatattgagaaaaatataa

SEQ ID NO: 58040 - DNA, 819 bp, Enterococcus casseliflavus EC10; identical to SEQ ID NO: 58038

SEQ ID NO: 58041 - DNA, 3138 bp, Enterococcus casseliflavus EC10
atgttaattgaaaataattcaaaatattacttaaaaaaagttcaagcaaaatcaaaaatgtttgaatacaatgttcctcttgaagagcatatccaagtagaatatatggcacaagaattaatagtccttgcaatagcgacaattggtgatgcatctaattttatttgggataatagatatactgaattttcttcaaaattaaataatgaactatttgaaaatttaaatttcacatcaatttactttgattcactacttacttcagagattggtgaagcaagttataatgattattttggattattaggggcaatttctttctatctttcggatgcacttggaagtacaaaagtaatgataaacaagatagattgggcaatggatttagaaattaatgaaattgatacttttcttttatatctattagcagacagattggacgaattaaaggggtacgagttttccagtcaatatggtaatctcttctattatctaatatatgacttatctcaattttacttagatggtacacccattgattttgaaaaattaaatgacttaaaacaagaaatatatctatctcaaaatccacgagagattctttttggagattcattattggcagtttttattaaaaagtataaaaattctgctttgaatcttttgcccaattattctgatacgacaatacaagattgggaagatttattgttaaacaatcatacaataaaagaattgtggcctagtcaaattttgctaggagaaaagaatatttttaaaggtaaatctggagtcattcaaatgcctacgagttctggcaaaacaacttcaattggtttaataattagatcagcttttattacccatcgaacaaaacttgccgttgttgtggctccatttaaagctctctgcaaagaaataactctaaatttaatagaattcttttcaaatgatgaggtaatcataaacgaactgtcggatattgcagaaaaagatgatattgcgttctttgataatgatatcgctacaaacacattgattatactcactcctgaaaaattactgttcttaattagaaataatagtgaaattttggaagaacttaacttgattatttttgatgaagctcacttattcgatgatagctcgcgaggtactaattatgaattgcttgtttcaacaatcagatattacttaaatgaatcttcacaaaaaatactgatctcagcggttattgcgaatagtgaagtaatcaatgaatggttaaatggtactgatggagaagttatttctaacaacaatattatttcttcccaacgatcaatagcaataggtgattggatgggacaaactggacagttatattttctaaatcaagataatcctgacatagatgatttttatgtcccaagaattgttgatatacgtgaaataaatagacttgatagagaaagagcaaaaaggtattttcctgacgtggattttcgtaaaagaaaactcaataaaccttacgatatgcaaatttattatgcattaaaaatggttcacaatggagcaacagctatattctctggaacaaaaaaaactgctgataagaccatcgaaagactacttgaacttgaagaaagaggactagatatatcagccttttcaaatgaagttagtcaaaatgagaatacaaaaatagcaagtcttattaatatgaacttaggaagtgatactgaatattatatttcagccttgaagggcatatttattcatcatggtaatattcctctaggaattcgattatcagttgaatatgcaatgtcgcagaatttaatcaattttgtagtttgtacttccaccttagctcaaggagtgaatttaccaattaaataccttattatttcaagtctctatcaaggaaaaagtcaaatgaaggttcgtgattttcacaatttattaggtagagtgggtagagcaggtaagcatattgaaggaacggttatattatcagaaccttttattcattctaacaaatcaaattggaaatggaacagatacaaaaatatgctagatattgataattcagaagacagtgagagtaatttattaaagcttgttaggcctattataattgataaattcccccctattaatctttggaatgtactgccacaaaagtatactaatcaagaacagtttaatgatgtaatcaataagataaaaaccgtaattagcaactcaaattttccgaataaaatatcagacttcaacttcgaattaaagataattttagatattttaaaagatgtcgaaaactatgtaatgtactttgtgaaatactttaaagattcaaatccaaattttactaatatggtaactcagcaaactttaggttatcatttggctagcgatagcgaaaaagaaaaattagttgaactgtttgaggtaattaagacttattctctttctttcactgaagctgaactatctctttattcaatatcctctttaggatttgataactctaaagtcttgtctcaatggatttcagagaaaattgaaaacattactcaagcaaggtcagaatttgaattgattgacataatctttcctcagttaatattattctcagaaaataatattataaataggattgatgatacttctatttttactcagatatgtgaattatggactcaaggacaaagctattctgatattttaaactattgtcaaagcaatcaattccaaattagtaagcgtaatcagctagttccgctcatattacaagatatcattgaaatatgtgataacatactagcttacagcactatattacctctaaatggagttgcaacatttatggaaaattccgaaaatgattcaacacttcatttgattaaaagtctacaaaagaaaatacgttatggacttcctagcaatctatcaataaatattttcgagcttggtttttctgatcgagtaattgctcaaattttggctcgaattattgaaaattcttcttcttttacaattacttcaattagtaaaaggataactaaagaattacttagacaaaataaacgagagattgaagaagcactaaaagtttttcctcaatattttctggatatattgagaaaaatataa

SEQ ID NO: 58042 - DNA, 783 bp, Oligotropha carboxidovorans OM5
atggggctgtatgagcggtggtgcgaatccaccaaggaaaaagacaagcgcaaacactactggacctatgtcgagaaggatggcggccgcgacgagatcagcggcgacctcgccgagaccattcgttcccactatgatcgtctcgagcgtatcgccgaggatgtcgagcgcctcggctacacggttgccgccaagattctgagcgaggcgatgcctcagacggccaagggccgctccggagacctgggggagattctcgcgaccgagctggtggaggaagatatcggcctgcgcgtccccgtgcgccggcttcgctacaaggacggccgcaacatggccatgcgcggcgatgatttcatcggcgccggctatggcggcaaggacgagaaattgtggcttctgaagggggaagccaagagcaacaagaagctcgggaaatccacggtgaacagcgcccgcaaggtgctcgaccgcgacagtggccgctgcacgccggactcgctgctgttcgtcgccaaccgcctgctcgagagcaatgatcccgccgaaaacgcgttgggccgtgatcttcgcgacgaggtgggcgtgaagtcgctgcgcgccgatcgcatcgaccacatgcttttcaccgtgtcgggcaacggcccccatgcctcgctgagggaagacctcgacgctgccgggaccaatcgggaccactacgtcgtgaacatccacgtcgaagaccaccaggacttcatcgcggccatgtaccagggggcggaagaccttggagacgcctga

SEQ ID NO: 58043 - DNA, 3525 bp, Oligotropha carboxidovorans OM5
ttggagacgcctgacgagctaacggcttttctcgcaaccgcgaccgtcgacggcattctcggccggctgctctatcgtggcgcggcctggtcgctgatgcgggaagccggcgtgttgccgcagaacgcgccgccgttgggcgcgactattgaaaccgaccttgccgaacatggtttcgcgctgcttcggggcgccatggcgctgcgcgcccagaccggtgcatcggacctgacggacaaggcgttcgagcgggccgccaacgcctttgaagccttggtgcgcaacggcgatcccgaggcgccggagcgcggctttcgccgcaccatagctgccgcagcctatcacctcgcgggttattcggctgtcgcctattcgctgttcaacgagctggccgaagatctcaacgccgcgcctggcgaaacggcgatccgtcacctcatcctgcgcgatctcgatcagttgcgcggctttgttcgcgactggcttggcaatgaggcccacagcgatgagcagatggccgaaacgctgggcggcgacgagcccgatatcgacgatgtgctgtcgaccatcctgaatacgacgatctgccgagccttggcctttttcgatttcgccctggagacgggcgaggatgagccgattgacactgcgcgggatctgcttgccaccgccgtcagcctggccgacaatgccgagaacgtcccgctgtggtggatctcgaatctctgccgccacctgatcgacgatctctggcagcacgcgctgcaccagaacctaccgaccgagccgcctgcgggaacggaggagcgataccccgacctccggcggctgttcatcggttcgctgtacgcgcgcaaaacctccgaagtggagctatggccttctcagcgcgaggccgcgcagcggtcgaccgatgtcaccgacgacctggtcgtggcgctccccacgagcgcagggaagacgcgcgttgcggaaatcgccgcattgatgaccctgtcttcggctcgccgggtgctgatcgtcaccccgcttcgcgccttgtcggctcagaccgaacggtccttccgcaagaccttcgccccgctcggattcagcgtttcctcgctgtatggcgccagcgggctatcggtgggcgacgaggacgcgctgcgcacccgcgagatcattattgccacgccggaaaagctcgacttcgcgctgcgaagtgatccgtcgctgatcgatgacgtcggcctgatcgttctcgatgaaggtcacatgatcgggccaagcgagcgcgagattcgttacgagacactcgtgcaacgcctgctgcgacgcgcggacgcggccgaacgccggatcgtctgtctttcggctatcctgccgagcggcgacgaactcaacgatcttaccgcgtggattcgctctgatgaacccggcgagcccgtgcgctccgactggcgccccacgcgccagcgtttcggcgcactgacctggcgcggcaaggatgcgctgcttcggctcgacctcgatgacgacggtccattcctcgacaagtttgtcgaggagaagcccgcgcgcggccgggagaagaacccctatccgcgcaagaattcgcatctcgccctcttcgcggcctgggaattcgccggccagggcaagcgcaccctgatcttctcgacccaggccaactgggtcgaaagctacggcaagcaggtcgttgacctctgcaggcgcggctatctcgattctttgctggaggatgaggcgccgatcgcgcgcgcgttggaggtcggcaaggaatggctgggtgaagaccatccggccgtcgccagcctgaaggccggcgtcgccatccatcatggccgcctgccgagtccgttcctgcgcgagctggaagtccttctgtccgagggcgtgctgaaagtcatcgtcgcttcgccgacgctttcccaagggcttaatctcaacgctgcggtcctgctcgtacccgcgctctaccgcgctggtgagaagatcaagggtgaggaattcgccaatgtcgcggggcgcgccgggcgcgctttcgtcgacgtcgaaggcctgatcgtccatgtcatgttcgacaagaccgactggcgaaagaaggaatggaggaagctggtcgcctccgccaaggcccgaaccctaaagagcggccttatccagatcgtcgccgagatccttgagcgcctgtcgcgcgagggcgtgctcgaccgtgacgatgcgtgggaatatctagcaaatgcccgggaggcctggagatcgccgaccgaagaggccgaggtagccgaacgtctggccgccgctggcgagtacgactccgttcccgacgcggatgaggatgacgaaaccgacgagggcgacgaagaggagaccatcgacgaagagccgttgtcgcagctcgtcgagcgcctcgatgcgaccgtgttcggcctgatcgaagcgctggacgccgatcgtgccgaccttccaaagttgctggacgaagctctcaaggggtcgctctgggcccggcaaatcgcccacgaagaagaggaggtcgcgcccctgcacaagaaggtgttcgaggcccgcgccgcgctgatctggaagtcgaccacgccgcaggcgcggcgcggacatttcgcaatgggggttggacttgaagccggcctttctatcgacaccatggctgatgaactggcccagctgctcgatcgcgccgacgatgcggcgctgagcggcgacgtcgacgagctcgccgacgcccttggtggcctgggagaacggttgctgttcatgcggcccttcatccccgacaagaagaacgcgctgccggccaattggaaagtcatcctgcgcgcctggatctcaggcgacgcggtcgagaagatcggaccgcagaacatgcgggcggtcgaagaggctttcacctatcgcttggtctgggcgctggaagccgtccgcacccgccgcatgtcgctcggctggtcaccggagacggtggcgggcggcgcagcggcggcggtcgaaaccggcgtcccgcagttcatgatggcgatgttgatccgggcggggcttccgtcccggcgcgcggccatcgcggccattcaggacgccgagccgatcttcgtgacgcccgcggagatgcgggcctggctcgaatccgacgagattacggcctacactgatgccggcgactggcccacgcccgacactgcagcgctttgggcgcgctttcgcaccgaagctctcagcggcggaatccagaaatggtcggtcgaacgctataagcgtctgctcgacatcgcggcggccccgcccgcgggcctttatcgaatcgtcacggacgagggggacggacgaacttggctcgaaacgcctgactaccggcgggtcgcgcccttcaagaagccggcggtggacccaaagcccagcctcttctcaggaaggctgccgggcaacaccaggctggtcgaagccttgcgcgttggtcgcggaaaactgcggtggccgcccgctgacgctagaggggaaaattag

SEQ ID NO: 58044 - DNA, 783 bp, Oligotropha carboxidovorans OM5; identical to SEQ ID NO: 58042

SEQ ID NO: 58045 - DNA, 3525 bp, Oligotropha carboxidovorans OM5; identical to SEQ ID NO: 58043

SEQ ID NO: 58046 - DNA, 783 bp, Oligotropha carboxidovorans OM4; identical to SEQ ID NO: 58042

SEQ ID NO: 58047 - DNA, 3525 bp, Oligotropha carboxidovorans OM4; identical to SEQ ID NO: 58043

SEQ ID NO: 58048 - DNA, 780 bp, Stenotrophomonas maltophilia
atggcgcaattcaacgattggtgcagttcggtggatacgatggtgggaaaccaccaccggcttgtcatgaccgcacagcccgctaacctagccatcgcaatacaagcaacggcagctatcgtgccctctcattacgcttcggaggagcacgtggcgcgggcacttttccgtctcggtaagcccgcagccgccgccttgattgaggagaagctaccaaccactaagcagatccgatccggtgatcttggtgagatctatgcaacggaatggatagctgcttatagcggtggctacagcgcgccgattaagcgtctacgctggaaagatcatcgcaatatggccatgcgtggtgaagacgtgattggaatccgtcaagatcctcacacgctcgggcttcagttcttgaagacagaggctaagagtcgcgcaggcctgaccgctcaggtcttgaccgaagcccgggctggtctggacaagaatggggggttgccttcggcgcatgccttgcactttatctcagcgcggctcgtcgaactcggagatctggcgctcgctgatgcgatcgacgatgcgcaactcaagcatggcgtccaatcccagagtgttcagcacctacttttcacgttttcaggcaatgcgccagatgattttctagctaccactctgcaagcatatacgggccatattaatcagtgggctgtggggcttcgcgtggaagggcatgtagctttcatcggtgcggtctacgacagagtaatcgccgatgccaacaacccctga

SEQ ID NO: 58049 - DNA, 3534 bp, Stenotrophomonas maltophilia
atgccaacaacccctgaatctattgctgcggatatagctcaagcgactgctcccggctttcgggggcggctgattgctcggggacaggcacgggcgatcatctggcgtgatggcgcccttccacccgatgcacctgacttcgcgccgcagctcagctacgacttgcacagctatgcctactccttgcttggtcttggcttgcggctacgagagctcggcggcgacccggctgtggctcgcacagctttcgaacacgccgcgactgcgcttgaggcagtgatcgcgaagggcaatcgtgaagaggaagatcgcgacttccactttgtaatgtctgcggctgcttaccatctcgcacatctgtcggcacgcgcctattcgctccttgcaatcgttgagcgggaagataatttctctccaatcgagcgggcgctagctcatttgatgacgcgaaatttcaatgccttgcgtacaagcgtcctcgactaccgcactttggggcaaggcagtgatgagcgggtcgccgcgttcatagaatctcacctcaaccaactgaaggtcgcgaacgtatctccagaccctggtggtgatgactttctcttcgaaggtctgaataccgcggtcaccgacgccttcatgtccggcatgtcactgtacttgctagcgcttgaccggggagagcgagagctagttgatcacgcgctcgagaagctacgtgtcagtctggcggtctgtggccagatgaacttgctgccacaatggtgggtgcatcgagtgactattgatctgctttctgatctatggtcgagtacgtttcatgaaagggtgccattgcacccactaggtggagcagcggcagattggccgcagttgcgcgaactattcattgcagcgttgcagcgccgccgcagggcggaagttgacctttggccatcccagattgagagcgccgcccgtgctgtcgatcagtcggatgatctggttgtctcgctgccgacgagcgctggcaaaacgcgcattgcggagctgtgcattctgcgttgccttgccggcggcaagagggtggcgttcatcacgcctctgcgtgccctctcggcacagactgagtcaacactccaacgaactttcgggccactcggaaaaaccatttctgctctctatggcagtatcggaatcaccgattttgatgaagatgcgattcgcaagcgcgacatcattgtggccaccccagagaagctggacttcgcgctccgcaacgatccttcacttctagatgacgtcggccttctggtctttgacgaagggcacatgatcggtatcaacgaacgtgaggtccgttacgaagtccagattcagcggctcttgcgccgtgccgacgccggagagcgccgaatcgtgtgcttatcagccatcctcccagatggggatcaacttgaagactttgctgcgtggctgcgtcgtgaccaccccggcggtctaatcaagaatgattggcgcccaacccgcctgcgcttcggcgaggttgtatggacatcgcccaatgctcggctcaacctccaggtgggcgaggagcggccttgggtccaacggttcctcactggcatcacccctccaaactgggttccaccgaagcgtcgccgggcacaactattccccaagaaccaagctgagctctgtcttgccacggcctggcggctcgtagatgacggtcaaaccgtgctgatcttttgcccagagcgccgcagtgtcgaaccatacgctgacgtcatcgttgatctgcatgagcgaggcgccctgcgctcgctgcttgacgctgatccgaatatcctgaatacggcgatcgcactgggggaggaatggctcggctcaacgaaccctattttgaaatgcctaaggttaggtgtagcccttcatcacggtgcgctacctacagcttaccgtaaggaggtcgaacgtctactgcgggacaacgtcctgaaagtgacgatctcctctccgacattggcgcagggcctgaacctttctgccactgctgtcatcatgcactcgctgtaccgcgccggagagctgatcgacatcagtgagttcaagaatgtcattggtcgtgccggaagggcttacaccgacgtggaaggcctggtgctctatccgatgttccaggacgcctatagaaagcgagccgcttgggccgatcttgtcacggatctgcgcgcccgcaatatggaaagcggtcttgttctgctagtggtggagttgctgacgcgaatgagcgctagcattggtggggacatcaatcagttagttgagtacgtggtgaacaacgccgcggcttggaattttcccgagatagcaaatgaacagcaggagcgccgggcgcgtgctgcagaggattgggggcggtacatcgccacgctcgatacagccattctgagcctcatcggggagagcgacatcccagatgaagggatcgaggctgcgctggacaacatcctccaatcttcattgtggcaacgacgtctgctgcgtatagagcctgagatgcggcggctattgagggcaagcctttcgtctcgaagccggttgatctggagcaactcgacagcagcaaagcgtcgtggctactttctggccggcgtgggtctcaccactggtctcgcccttgatgctattgcatccgaggtcaacatacttctcatccaagccaacggtgcagtgcttgcaggcgacgccgaggccgcgatcagttcaatcacaagtatcgcggagcgagtttttgcattctatccttttacaccagacacgctgccggtgaactggaagggaatcctgcgggtctggttgcttggagagcccctcacgaccctagttggtgagatcacatctgacgtactccagttcgttgaagggggcctaatttatcgtctcacttgggcaatggaggcaatcagggtccgtgccatcgcgaactctgacaccgtgggcgaagaacgcttgggtcttgaactctttgagctaggtcttgctgtgccagcgctcgtaaccgggtcactcaaccgctctgcatcgattttgatccaagccggcttcaactcacggttggctgcaatcaaagccatcaccgataccggtggtaatttcagtacaagaagcgaactgcggcaatggctggacggagacgtagtcgcagcctggaatgcgcaggccgactggcccactagggagaccaggaaaatttggttggagttcgtccaaagcttcgcgccaagtgcgggttcgagctgggccattcgtccgtactgggcgagcatcgaatggctgtcagtgccaccaccgcccggaactgtaatccagttgcaccacttggacggacgtacgtgggctctttctgcggagggcgctccgctgggcatgcttaagggtaccctgaaggccaatcgcagtggcctacttcgtgcaaaggtggcgcaggacgtcagcaggattgacatcgagtatcttggccccgacgatctggctactgccgagcctgcgagctaa

SEQ ID NO: 58050 - DNA, 372 bp, Blautia obeum ATCC 29174
ttggtagcagcagaagttaaagctaccctctctaatacggagtacataccaatcaaaaatgcaattatcgattccagaaaagatgagcatcgattagcaagatcagtaaactactgcagaaagcgattaaaagaactgggcaaaatagaagaggcagaagaggtaaagagattcttatttaaaccagataataattatcgtattacatatgtagctgcaggagttagtagtcgtgaaaacgtagatgatgccatagaattagatttttctggtgaagaacttgaaattagaaaaaatgaactgattttttatgtacatggtaaaaagttgatggaattggctcataacatttaccagaggtgttgtaaatga

SEQ ID NO: 58051 - DNA, 3051 bp, Blautia obeum ATCC 29174
atgatttttgggaaaaatgcaggcttaatgttaaaatatcaaaaagcaaaggctaaaatggtagaatatgatgtttcaaagcaggagtatccacattttccgctgaattctaatgaattatcgtatccaacaacttatgtgctgtcacgatactcagaatgcattatagaaaataatcatgacgaattaaaagagctggagttacttttgattacaactgcagaatattatgattcagcttttaagtccaaagatagaccagaatatgattgggattttttgctatctggagcatctgcctacttcctacgaaaggattttggtagtgctaaagtgttggcagcaagagtagttgatttaattgatgaggagcgatctccgcagaaattgttgacgaatatctataattatcttctgggtggagtgtatttgccatatttgagagttatagatacctatgagcgaataaataattttttcttggattactttggaaagggtaagtctttagaagcattaaagtcaaacttatgggtatatagaaatgaaatatatgagaatggagatccggatagtatattttatgtagatatattagtggcagttattattgtggcgtgcgaaaattcgtcatggagtcttttgccgagtagttcaggtatcttggatgaagaatgggagtcatatctacaaagtaagatgtcaataaagatgttatggccagcacaaagattaatagccgaaaagggattgttgcgtggagaaagttctatcgttcaacttccgacaggggtaggcaagacaagaagtattgaactaattattagagcagcttttttatctgaacgagcgaatattgctattatagtggcaccattaagagcgttgtgcaacgaaataacaatggatatgtacaaagcttttggaaatgatgtcacgataaatcagttttctgatgtacttcaaaatgatttttggaacttgttttcagaagatattaaacggcagatactaatatgtacgccagagaaactgagttatgtattacatcatgatccgtttttcttaagtgctatagatttatttgtgtttgatgaaggtcatatgtttgatgatggagggagaggtgcaacatatgagttattagtaacacatatacgtcagaacataacgagcgaacagcagttggttttgctatctgcggtattgccaaattcaggggatattgcacagtggttgtttgaggatagaggttgtttggcgacagatgatagaattgtatctacacctaaatcaataggattttcatcgacacaaagggatattcatttcttttctgatgataaatcaaatgaagattattatattccccgaatccttcgagttgaacaattgaagaagttaccccgagaaagaagtaataaatattttccagatttatcatcatctatagatgtggccatttataatgcaataaagttgtgtcataacggcagtgttgctatctatcttgggcagcaacgttcaatgaaaacggtatttgaaagaattataaatttggataagcgaaactatgatttgaaagcattaaaagataatacaaatcaagcagagctttccaaaatcaagggatttatagaaagctattatggttcagagcattattatacgaaagcagcggaattgggtgttttgcctcattcatctaatcttcaaaatggagttaagcttgttgttgaacatgcattgaagaataaatatgtttcttgcgtagtgtgtacatcgacgcttgcacagggtgtgaatatcccgataaaatatttattggttaccagcattcgaaatggattgaaattagtaaaagctcgagattttcaaaacttgatgggtagaacagcacgagcaggtatatacacagaaggaagtattattattacggattgcaaaatatacgacaaccgtaccaactggaaaaatggtggaggatatttatggaatgattgcgtgaagctatttgatacaaaattgacagaaccttgtggcagttctattctttcgttagtccaggattttaacatagattatgatgtgaccgtaagtggtgagaaatttattgatatagtgatagatcaccttgacgaaagagatttcttgcttgattacgcaaagaagttagaaaaagcatacttaaaaaccaatccaaaaagaacacaaaatctgattgtgcaggaaatattattgcgtcaggatattatatcaaatatagaaaattatttgtgtttagtacgttccgcagagacattggtcaatgatagtaagaaaagtattgtggatatttgtacaaatacattggcgtatgctattgcaacagaaaaagagaaagaattactgattaaagtttttcagaagatagaagagaatattcaacaatattctgttgaaaaattgagcagatattctaatgcaatgtcaggaataggtttgtcttctctaatagaggaatggattgttcagaatgaacttacagagaagatatatacagaaacagaactgttatctgttattgcagaattgtatctgcaaatctgtggagactttagataccaagagcatatacaaagcatttgtaaaaaatggattgatggccagactccaatggaaattaacaacaaagaaactattggaattgcagaagtagaatcattatgtaataaaagaatctcatatgaaatgaattttcttatcggcaatatctgtgatctgatagaagttgacggagaaaatgaggagcaagttgatcaaaggaacatcttgacattgttacaaaagaaagtaaaatatggcgttccaaatatgacagcaatttctatttgtgagagtatttttaatgatcgtctattagctatagaattagctcaaattttatctgatgcgaatattggaacggacaagatacttaatatgttgaaagctcatagtgaagaaatctttagttgtcttgattcgtatccggaatatttcaaggatagattatctgtgttgatgaaataa

SEQ ID NO: 58052 - DNA, 795 bp, Pseudomonas denitrificans ATCC 13867
atggatgatctcggtttcgacttcggtaacgctgttcagtggttcccgcacgagcaggagcagccgtacgtgctggtcaggatgaccgcccagcaggtggcgcttttggaggcggccatggccgagccattgcgtcgctgttacatcaccgatgaggtgcttgaggctgcggcggatcgccatgggcttactctttcagacgttctggcgagcaagcttccggatgccggcgcaactatggcgggagacttcggcgaggtgctcggttacttctaccagtccgccatggagtatccgggggccgcgataggccccaagaaatggcggctcaagcaggacagaaccaaaccggcacccaagtcggatgtcattcacttcatcatgccccaacgtccatccgccagtgctgatgaccaggtgctttgcgctgaggtgaaggtcaaatccacttccgcttcctcagacccaatcggctctgctatcacagactgcgccaaagatcgcaccagccggctcgcgagcacactggtgtggctccgtgagcgcgccatcactgaggatcttggtgacgtcgacattccgcttctcaaccggtttatcaacgcggttgatcatccgcctgctgccctgcgatacagggccgtcgccgttatctgtgagagctttgtcactgctgagctcagcaatgcacccgccacggccagtgacaagtacacactcgtggtgatctcagtgccgaatctacatgccacctacaacgcagcttttgcagctgcgcgggcgtcggtgctttga

SEQ ID NO: 58053 - DNA, 2985 bp, Pseudomonas denitrificans ATCC 13867
atgagagcctccctccagaattggatcaacgacgccgacatggcccggcacctaggtcagttttctgtagccgcattgcccattgagcttgcccagatcgggaatcgccttgccgactactacatctcgctcgtgggagagctgttcgacggaatccactccacgaataccccaagcgacgactgggcacagctgggtaatgccttcctccagttttcgaaagagactccggctgagcaggttgaagcgctgggtatctcgaaggatgaagcagcgctgtttgccgcagcagcgttttactttggcgactttccagcgtcggcctgcctggccatgcgtcagtctactcggcccactgatccacaaagcccatgggctgcgtgctatgacttcctggcccgcccgagcagcctgggatctcagactgctatcgaggtgcgggagcaattgcgcagtggcgacctgtttggtcttagcgacaacgtagaggcgagcgccaccgaggcacaaagcgcgttagcggatgggccggatacgtgggtggcagcggccttgctcagtcggctgctggctcgcttcgaggcatcgaattttcgggctgtgctgccagagggggcgaatgctttttggacgcctctgatcaattccttcatcaatcgcaaaccatcgacctgggagttcttcccctcccagatacaggctatcgaaaggggactgctaggtaacgccgaaagctattccttgcaaatgccaacgggggccggcaaaaccacgctctgcgagacgttgctgtactggcacctgaagcgcaatccgacccacgtcgcgatcatgatcgtgccgtaccggtcgctggcttcggagcttcgccattctctggtgcgtcagctaaacggcctggggatcgcggcgcgctgcgcatatggcgggacgattccatcgggagacgaggtgcatgggctcgatcacatcaacgcgcttatcgcgacccctgagtcgctgtccggaattctcagtgctgatccagcgtttgctcagcggatatcgctggtcatttgcgatgaggggcatttgctcgacagctccggcaggggtattggtctggagctgttactggcgcggatgaaggcccgccaggtcaatccgatccgcttcgtattcatgtcggccatcatccctaatatcgaagaaatcaacgcatggcttggcggcggcgaggacaccgtcatcaaaagcacctatcgaccggcgatcgccgaattttccgtccttcgatccgctggtagtggagtgggcaagtccgttcgtcttgacatgcacccgcatgctcagcaacggcagtactcaatccatggcttcctggatcggaacaccttccagtacgtgaacgcccgcacggcgcgcacgaagacctatggcttctcatcaaccaagaccctggctgttgccgctgcccggaaggttttgtcgatgggaaccacggcgatattcgccgcaaacaagcgcggcgatcagggtgcgatcggtttggcggaagagctcatcaagcagttggagtatccattaccgttacccaagcccattgaccatgcggatcttgaagcgctgcgtacgcgagtcgactacctcgaaactgaatttggtgcagcctggataggtacgaggtcgctgcacaatggggctgtgctgcatcacggtgacatcccccaggagacacgagaggttttggaggagcttctgcgggatcgacgagtccaactggtcatctgtaccagcacgctcgcagaaggggtaaacctgccgatccgctcgcttgttctgtattcggtgcagcgtcgcatgggcagcggacggcccgagaacatgctcgcccgtgacatcaagaacctggttggtcgagccggtcgtgccggcgccaataccagggggttggtgatctgtgcgaatcctgatcagtggtggttggttcttcccgtcgctactgcgggggcaggagagcccgtcagaggttcactgcgtaccttgattggagagcttgagcacttcctgaggactcacagtatcgcgctcgacaatcagttcttggagagtcagcctgccagtcatccactcattgatggtgtggatgcaacgctcatcgagctgatcgcggaagagatcggggacgctgagtttctaaggttggctaccgacctgtccgaccatacgtttgctgcccaccagcttccagttggttctgccgtcacgctgcggacggtctttaagttgcgcgcccagcgtctaattgcgctcagggcagatggcaagatcgcatggcttcaagctactggagccaaggtgcgccttctggagttcgtcgaacaggttctgttgccgagcagggcagattgggcgagccctgtcgatcctgcttcggacgatatcctttcagcgattctggagtgggcctggcaggatacagagctcaagtcagatgtgcgcgtggcattcaggctcgagaatggtcaggatcttgaaaccgtcaaagccacgttcttcgggatcattcggcagtgggtacgtggtgcaacctacgccaagatcgcccaagcaacacagatggaagttgacgagatcctggggatccacacgcgcgcgatcacgtattcgttgcaaacactggtcgagcagggcgtctcgcttcttgcccgactgttgctcgaacgtgggattgcggtgaacgacggggtagcggcattcgccgagcatctcaagtttggtgcgccctcgcgtttcggagttctactggctaatggtggggtacggcatcgaaaggcatacgtcgcattgggtaatgcaatccaagccttaactcctgctgtccaacacgcgagtgccaaggcagtggcgctgcagtcacttgaaaactatccggatgagtggcgtgacgcgctaggcgagtttgtctactccaacaccctgaaggatgtcggcggagtggggtag

SEQ ID NO: 58054 - DNA, 537 bp, Bacteroides caccae CL03T12C61
atgctacggaaatattacttactgattatattcaagcatcacaaaaaaaaagaatttatcaaggtatataaattgaaatataatccaaatgttgatcaagccattaaaggagatgacactttgatggttgatttatttgaagaaaatggtaatgagaaaatcaaaatttatttgggagaatcgaaatttcgcactactcctcaaaagaatgtagttgaagatattaccaaatctttaaacaaagatactttgcctttatcgtacactttcttagtagaagaaatagcaaaatcagatgaattacttgctcgaaagctggatgattatatagtgcaagatataaaagatagaggcgaccttatttatgttggtttgttactaagtaataccaagacttcagaaacagttgaaaaacatttgaatagtgataattcaaatttggttttcatttctattggaattggtcagccagaagagtttattaaatccatatttgaaaaagcagaagaactaatatctaaccctgatttattatga

SEQ ID NO: 58055 - DNA, 3351 bp, Bacteroides caccae CL03T12C61
atgaatatagagcatgttgaaaaaagctaccaagaattagaatcagattctactttgcaaaacttaatagctcaagctaacgctagatatatcctatataatacggaagaatctaaagaaaattttcctcgatatacaattaaagatgagcagctaaatatcttagctttcaaatatctaaatattggatgtaattattttagtgaacataattatctaaaagcatctcattctctagaaaaaggagctttaatacttgagtatatacacggttctattcatattcagacaaaaaataagaaactattttgtctaatctccgctctttcttattacgtttgttttcaatactctaaggcatttatacttataggcaaacttgagagtgatacaatgatttcaagtttagtatctctatttcttaatagaaaatttgatcagttattaagtgaaatcgataaacttattacaaactccagttatggggatgaatatctggctgaacattttgaagaagataatgctacaaaaatttatgagataattatagcaaaatcattaaattattatgtgcaattttatcagacaggaaacaaagattttttagaaattgcaaaaaaggatcttgtaaatcttcaagaagtagccgcaatgagaggtgaacctgatgtttggtgggttattcgattattacttctcattatagatggatttaaagaatcctcattatggtatgtattaggaaattattttaatacggaagataaacttccgttaaagtatatacaatcattagtttataaaaatggcagtataacagaattgtttcttactcaaagaaactctttaccaaaggttttgaataataagcaggggagtattgttagcattcctacaagtagtggaaaaacaagaattggtgaaattgcgattttaaactgtctattaaatgaacctaaagcgaaaattctttttatagccccttatagatcactagcttacgaaatagaaaattcgtttgatgagatttttagcaatcttgatgtttcagtctcacatctatatggtggaagtttatttagtaagcttgatgaaagaattatagacgaatcatccgtaattgtagcaacaccagaaaaggccaaagcactctttagaagcaatgaggatattttatcatgtatcaaacttgtaattatagatgaaggacatttattgggaactgataaaagactcatagttaatgaaatgttttatgaggaattaaagtatcatgtaaaagctaatggtggaagattcttgttattatctgccgttttacccaatgcagaagatctatctgaatggctaacggattctactgataatgtttacaaagagaattggcgaccttctgatgaaagaatcggaataatggaatggaatggagtttctgtgaatttaaattggaaaagcactgatgcagaaagaaattcatttaatcctaattttattatgcgacaaaagttgcctaagaagcctaaagaaaggataatgcattactttcctgaaaataagaaccaagccatagcttctactgcatataaactaaggaagtttggtcctgttttaatattcgttggaatcaagaaatctgtttttgccattgcaagagagtatgaaaaatgtattcagcctgaagaacagaagtttagatttagaaacaaggccaattggagagcctttaaactggcttgcatagaatcttatggtgaagatacggaatgggttaagtttgctaaacaaggaattttctgtcataatgcagatttgatctcagatgtgcgaattcccttagaaagattaatgagaagtgagaagccaagagttattatagcgacttcaacattaggacaaggagttaatcttggagtttctactgtaattttctcaactttgtatcaatcaggtaatcctattacgaaaagagatttttggaatattgctggtagagcggggcgtgcttttgtagatcatgaaggcaaaattttagttgctcatgatataaccaaaaaagacgagaataaaataaattgggaaagaaaaatgatttctgcatatcttaataagagtaatatagatagagcagagagtggttgtttggaactaataaggacacttaaaacagtggctcaacttaacggaatagcatttgataacttaattaatttacttgctgaaaatcgtattaatgaaattgatgagtctttagatgaagttaatgatcttcttgatttgattgatgacggattattatcattgcataattcgaataattttgaaggaaacacattggaatggattgatagttattttactaaatccttagcctatatacaagctcaatattatgaagatattactggcgatgaagttctcgattttataaaggctagaattaaaggtataacaaaaaaggtagggatagaaaaaagtatttgggaaagtattgtatcttctggtattccaatcaattcagatttgcaaatagatgagaagcttagcgagattattagtattgttcaaagctatatagtaagtgataaaacattagaagaacgcatttcacttcttgaaaatatagaagacgtcattagagatgtgaatatatataaagaaaaatttgaagatagtgttgatataaaagagatacgaaaaaagtggttaagtggaatatccatgtcagatatcgttcaacatgaaaatgcagttaatatagtaactcaacattattctttcaatatgccttgggttctcaatggtatttcaaagaaaatgaagaaacagaatttaattgaagaagcggatactatcgaagaattggctattcttgtagaattaggattacctaacataaaatcagttaaaatctatcaagcaggaattcgctcaaggatttctgcctatgaaattgccaacttatatgatgatgatctttgggaaaaaagcattagaacatataaacaagatttaatagaccatgctgattactataaaaaccaagtatcagaaaatgcagcattatggatcgatttattagtaagattttcgaagagaaaatttataaaaattaaaaaagttcctaacttcagatatggaaaagtacataaaagaacaaaaaggttaatggcaagaataattaatgataagcaatatttagttagtccgaattttagtgttataaatgaaataggtgaatcagatattgacttttctaaagtcagtaatattaatggaatttactttgattatgacgaagatgataaactttggaaaataacttgcatgaatccttatgtggtatttacgtaa

SEQ ID NO: 58056 - DNA, 822 bp, Bibersteinia trehalosi USDA-ARS-USMARC-190
atgtctttttcatttcatcatatgaaatggctgattgatactggtaatcagctaaaaacacaagatggtaaagaagttaaagttttagaatttcaacacgaatataatgatgagattctatctgaatgggcaaagcatttccgaaaccagtactgcaaagatgagcaaattgactcattacgtaatggaacgggattatctcgaaaagagtatcttaatcaaataaaatttccagacaaatcaattccccctggtcctagcataagagcaggtgattttgctgaaatattagctgctgattatcttgaataccaattaaggcactgggttccaagaacaagatattcgcataaaacaattcgtaatgaatctgaaaaagggagtgatactatcggttttttattttttactgatgatatttccaaaggctcgtctcaagatactttaactattattgagtcaaaagcaaaatatacaggacaacatgataataaacttcaaactgcagtagaacactcaaataaagatgtgatacgtaaagcagaaacgcttaatgcaataaagcaaagatttttagataaagaagattatacaaactcgaaacgcatagaaagattccaaaatgaagctgataatccttatattcagcaatttggagctatagcccatttagataacaacaactacgctgatgatgttattacgtcagttaatgcatcaaaacattcatatagcaatgagctatttttaatagtgataaaagggaaagaaatgatgaaattggttcatgaattatataagagagcagcagatgaagcctga

SEQ ID NO: 58057 - DNA, 3165 bp, Bibersteinia trehalosi USDA-ARS-USMARC-190
atgaattatataagagagcagcagatgaagcctgagaaaaaatcacagaacttgcttagtatcactagagcaaaagctaaaatgtttgaatatgatgtacctgaaaatgagcatattagaatttctgataacccagataaattatttacattgtcaattagtttactaggtgattttgctgctgctattaatagaggagagtctgagcttccctattttttagaaatgcagaaaaacttacatttttctgcatatttctttgattcttatattcaatcaaaactagataactctgttgatcagtatttgttactacttggagctgctgcatattacttatgtgattctccaggttcttcattggttcttattgaaaaattgaaaaagacgatctcaagttctggcatagatgaactatattttcctaatttaaatggagatgggttagactttttattattttggattcttgaatcaaattacacatttcatttcagtaacattcaatcaatatttggagaatttattgaaaaaatatccaagaagatttgtatgtttttctctttgggaaataaaaacaatatagatgatttattagatgaattaagagaattttcctatgcaaatggttctgcaaggcatattttattaagtgatgtaatttgtgcagtaattaataagaaactttataattcttcttgggaatgtttacctaaatatagtcttctgtcaaagggaagatggtctgaaaccttaaaaaaagaaagttttattaaagaattttggcctgcacaacatcttttaggaaaagcgaatgtatttcagggaaattccgcaattattcagatgcctacaagtgcgggtaaaacaaaagctatagaattgattattagaagtgcatttctagctagaagggcttcactctctatcgttattgcaccatttaaagcattatgtaatgaaataaaaaatagcctttctgatgcatttcataatgaaattaaggttgatgagttatctgatgtattacaggctgattttgaaattactaaacttctaggtcataaacagattttagttgtaacaccagaaaagttattttacatacttcgtcataatccagaattatctgagtatataggtttactaatttttgatgaaggacaccaatttgatagtggaatgcgtggaattgcatatgagcttttattagcttctttaaaatttatgctccatgaaaatattcaaaagattcttatttcggcagttattggaaatgccgataaaataggggaatggctaaacaggactcctaatgttattaatggatctacattaactgctacatttaaatctattggttttactagttggttggatcaattagggcgtattgaatatgtaaatgcacataatattgagaataatgaattttttgtgccgagagtaattgaaaaaatcagtcttgcacgaaaagaaagagagcgaaaaaatcgttatttcccagaaaaagaagatggacaatccatagctctttatctcggactaaaattagttccaaatggtagtatcgctatcttttctggaagaaaggatactgcagctaaaatttgtgaaaaaatcactgatattgttagtcgaaacatccccttgccattgccttccgaattttctgataatgaggaaattgaaagattaaagaatctacatattgcaaatcttggttctgcttcatctgcttcaataagtgcgggatatggtattttttctcatcatggaaatatacctcatggaatccgtatttctgtagaacatgctatgcgtgaaaatcttatacggtttgttgtttgtacatctacattagctcagggggtaaatcttccaattcgttaccttattgtaagtagtgtatatcaaggtggagaacgtataaaggttcgtgattttcacaatttgattgggagagcaggacgttcaggaatgcatacggaaggaagtattttatttgcagatcctattgtatatgacaaaagatatgtgtttaaagaaaaatggcgatgggagcaagtaaaagaacttttagatcctaataattcagagccttgtatcagtaatcttttatctatttttgatcctataaaaagtgatgatggtaagtctatattagatatagatgctttattacttgttgagttgtatatcaatagccctgatgaaattgaaagactgactagtgaaatagcaaaaaaggataaaaatttttcatatactggtgtacaacaacagattttttggaaaatagatttggtatgttctgtagaaagtttcttgctttcttattgggattatcaaacagagactttttcgggagaaaatatagtaagtttagtagaaagtactttggcattctttttggcaaatgaacaagaaaaagaaaatcttaaaaaattatttaatcttttagctcaaaatatatctgtaaatcttacaaatcccttatatcgtaaggtgtatggtaagacactttatggtataaacgattcaaaaattattttggaatggttaaataacaatgttaatgatcttattcagtcaagaaatataaaggatatttatgaaaaattatgggggatagttgaaaaatacattcgaaattcttcttttaataaatttaataggaaagatgttcttaaagaaatagtgatgaattggattgcaggtcattctttttatgaactttttttgcttgcagaaacttgtaggattggagagggagagagacctagaaaagtaaagattgaaaatatcattgatatttttgagagaggaattgcttatgatggggttctccttattaatgcactcattgaatttcttgagttaatagatcttaatgattatgactcaaaattattatttgaacgtctccaatttatccaaaagcagtttaaatatggtttaccatcaaaaacttcaattattctttatgaattgggcttttctgatagaactatttcacaagaactaataagattacttaatttaacatcgaatcaaaaagatgaattgttggaagaattaaaacaaaaagcagaaatagttaaagatatcatggatagataccctagttattttcagaaagtaatgttaagaatattagaataa

SEQ ID NO: 58058 - DNA, 795 bp, Pseudomonas amygdali pv. lachrymans
atggatgatctcggttttgactttgccaacgcagtgccgtggtttgctcatgagcaggagctgccctacgtgctggtgaggatgactgcccagaacgtggcactcctggaagcagccatggccgaaccgctgcgccgttgctacatcactgacggcgctcttgcggcagcggtagcacgccatggagtaacgcctgctgatgttttagctgccaagcttcccgatgccggggcaaccatggcgggggatttcggagaagtgctcggctacttctaccagtccaccaaggagcatcctgatccggccattggccctaagaaatggcggctcaagcaggacagaacgaagccagcgcccaagtcagacgtcgttcacttcatcatgcccaaccgacctgctgcgagtgcggatgatcaggttctttgctctgaggtgaaggtcaaatctaccagcgctgcctcaaatccaatcggctcggctatcgctgactgcgctaaagatcgcaccagtaggcttgcgaacacattggtgtggttgcgcgagcgtgcgctgtttgaggatctgggagatgtcgatatcccgctactaaaccgcttcataaatgccgttgatcatccaccaacgactcagcgcttccgggcagtcgctgtcatctgtgagagcctgctcactgcagagctccccaatgccccggtgacggccagcagtgagtacacccttgtagtgatctccgtgccgaatctttataccacttacaacgcggccttcgaggctgcgcgggcgacggtgcgttga

SEQ ID NO: 58059 - DNA, 2985 bp, Pseudomonas amygdali pv. lachrymans
atgagagcttccctgcagacctggatcaacgatgcagacaaggcccggcatttgggccagttttccgtagctgcgttgcccattgagctggctcaaatcagcaatcgatccacggattattacatttcgcttgtcggagagctgttcgacggccttcactccacgacggtctcaggtgatgactgggcgcagttgggaaacgctttcctccagttctcgaaagacatgccagctgagcaaattgaagcgatgggtatctcaaagaatgaggcggcattgtttgctgctgccgcgttctattttggggatttcccagcgtccgcctgcttggccatgaggcagtcgtcgccgcccgctgatccgttgagtccatgggctgcatgctatgacttcctggcgcggccagaaacgctggtatctcaaacggcacaccaggtgcaggagcacctgcgaacaggtgaccttcccggtctgcgacgcattgtggaggcgagtactagcgaggcggacaacgccttgcaggttgggccagatcagtgggtggctgcggctttactcagccgccttttggcccgcttcgatgcatcgaatacccgcgctgtgctgccggatggcgcagatgcattctggacgccgctgatcaacgccttcatagatcgcaaaccctcaacgtgggagttcttcccctctcagattcaggccatcgatgaagggctgctgagcacctcagagagctatgcgctgcagatgccaactggggctggcaaaaccacgctctgcgagacgctgctgtattggcacctgaggcgaaaccctacgcacgtcgcgatcatgatcgtgccgtaccgctcgctggcttcggagcttcgacactcgctggttcgtcagctgaatggtctcggcatcgcagcgcggtgcgcatacggcggcacgattccgtcgggagacgaggtacatgggcttgatcatatcaacgcgctgatcgcgacccctgagtcgctgtccggaatcctcagtgccgatccagccttcgctcagcgaatatcgctggtcatctgcgacgaagggcatctgctcgacagcgccggcaggggaattggccttgagctgctgttggctcggatgaaagcccgcctggtcaacccgatccgcttcgtgttcatgtcggcgatcatccccaatatcgaggaaatcaacgcctggctcggaggggacgatgagacggtcatcagaagcacctatcggccagcaatcgcggaattctccgtgctgcgatcatccggcgccggggccaacaagtctgtacgtctggacatgcacccgcacgcactgcagcggcagtactcgatccatggctttctggatcgaagcaatttccagtaccggaatccccaaacccgccgaaccaacacctataccttcacgtccaccaagaccctggccgtcagtgcagcccgcaaggtgttgtcgatggggacgactgcgatttttgccgccaataaacgaggacatcagggtgcgattggcttggcagaagagctcatcaaacagctagagtgcccactgccattaccgaagcctgtggatttcgccgatctcgatgttctcaggtcgcgcatcgagtatctcgaaaccgagttcggtgacagctggatcggcgcgaaggcgctgcgaaatggcgcggtgttgcaccacggagacatccctcaggagacgcgggaggtcttggaagagttattgcgggatcggaagatccagttggtgatctgtaccagcacgctcgcggagggggtcaacctgccgatccgctcacttgttctgtattcggtgcagcgtcgcgttggtagcgggcagccagagaacatgcttgcccgcgacataaagaacctggtggggcgagccggtcgtgccggtgccaataccaagggcctagtgatatgcgctaatcctgatcaatggtggatcgttcaacctgtagccaccgcaggtgcaggagagttagtcaggggttctctgcggaagttgattgtcgtgcttgaagcgcatctgagaaccaccggcatcgtgcttagcaatcagttcttggaagcccagtcagccagtcattcgctcatcgacggggtggatgcgacgcttattgagttaatggcagaggagattggagacgccgattttgtgagactggctgctgacctgtctgaccatacctttgctgcccagcagttaccagccgctgccgttgtcactctgcggactgtttttgagctgagagcgcagcgtctgatcggactgaggactgatggcaagatcgcctggctgcaagatacaggtgccaaggtgcgcctgctggatttcgttgaacagaccctgctacctagcagagtcgattggacggctgaggtcgatcccgtagctgacgaactgctgactgccatcctggagtgggcatggcaggacagggaactgaagtcggacgtacgtgtggcattccgactggaagatagccaaaacactgagcaagtgaagcctaggttcttcgagatcgttcgccaatgggtacagggcgcaactttcgcagaaattgccgaatccacccgtatggaggtggacgatgtcctgggaatttacacgcgcgccgttacctactcgttgcaaacattagtcgagcagggcatctcgctgcttgcccggctgttgctcgaacgcggtatcgaagtaaacgaaggcgtgacggctttcgtcgaacatctcaaattcggcgcaccttcacgcattggggtattgctggcgaatggcggggtgaggcatcgcaaggcgtttgtcgaattggggaacgcgatgcaggcgctcaccactccgattactgcagcaaacgccaggacattcgcacgacgttcgcttgagactcattcaggagcatggcgtgacgccctgggtgagtatgtgttctctaacacgctgacggatgtgggcagagtaggatag

SEQ ID NO: 58060 - DNA, 795 bp, Pseudomonas amygdali pv. lachrymans; identical to SEQ ID NO: 58058

SEQ ID NO: 58061 - DNA, 2985 bp, Pseudomonas amygdali pv. lachrymans; identical to SEQ ID NO: 58059

SEQ ID NO: 58062 - DNA, 777 bp, Leptospira fainei serovar Hurstbridge str. BUT 6
atggacatctataaaaaatttactaaaaagataatcaatgattacgttcgatttgaaattgatagatcagaatgggtgaacgtaaaggattatataaaatcccatggtaaagagttttacttaaaagaagatgaattacctcgtttttctaaaaaatcggcagatgaaagaaaaaagtatttagcgaacaatgttttaccttctaaagggaaaataaggtcaggagattttggggaaatattttctttcttctttatacaaagtgaatatacttctaaaaaaattgatttatacggaccaaaaaaatggagatggaaagagcatccagactctcctgctccattctctgatgtaatatttctgtttgctaaggatccgatgaatcctcacagcaatgacttggctatatctattgaatctaagatgaatgctacaaagccatctaaaaagaaaaatagaattcaagaagcgttagatggagccgaaaaggatcgatttacgcgattcgcgcaaacaattaactgggttgagactaaatatgaacgtgaagacattcaatcagatctgcctttggtgcgaagattcaaggatcctgtcaattatccgtatcggcaagaatattatgcgattgcaatattcgatatcggttatatcgattcggaaattagtaaggggtatacaaagccgtcaaatgaaataaagctttatcttctttcaattaacgatctcaagaagctctatgaaacttattttcaagaattaatcaatgaagcttga

SEQ ID NO: 58063 - DNA, 2997 bp, Leptospira fainei serovar Hurstbridge str. BUT 6
atgaagcttgagatatcaaataaactttcaaattggatagcgcaatctgcttcttaccaatcttactttgattttgcaattgaagaagattcgatagcagactacacaatagtaaagaaatactccgatttttatacttcgctctatcatctggcccttgatctttttaagggcaaatatactgaaattagttccaaggagataattgctcttgcccgtggaatggagacgtttacgcttaaaggaagaaattcctttttgggaattaatatttatgaagtttatttgatgactgcaagtttacgtcttttggcaggattttccgcaacttctaacttgattgtcaaaaacttaatattcgacaactttgaaggaaaaccaggtctacaatttgttctatccatactgggtagaagtatatttccaaaaaatgaattttcgaaaagtatttctagatttcttaattcaggagaattttctgttctagatcaaattacgtacgacctagaggcaaagattgaagagggtcttaacactaaccctcaagcttatgctgaaagcgtgcttgctaagtcgattttcgaatattttaaaaagaactcaatttggaatacattactctcgatcgatgataattcaaggttctggaaaaaatatgtaaaagagaacattgaaaaacgtatctggtatttctttccttctcaacttgaggcgatagagaggggattaatctcttcagaaaagacttttgctatgcaaatgcctacgagcgctggaaaaaccgctctatgcgaacttattatttattaccatgttaaaaaaaatccattatcaaaaatagttctcctcgctccttttcgatcattagcctctgaacttcgccaaagtttggcgcaaaagttacatcgatatggaattaaagtaaagacattatatggtggttcagtgccgactgctatcgagaaaaactcgatagataattcaaatttgcttatcattactcctgaaaagatgatggcgattgaagacatatttcccgaagtcttgaataatgttgatcttgtcatttgtgatgaagggcatctgcttgatgataaaaatcgaggatttgattacgaattatttctcactcgattaaaaatcctcaaaggagaagatattagatttatatatttatctgcaattgttccaaacattgaagatgtgaacaattggcttggggggtcatccgaaactatagttcgttcaaattttcgcccaacgcttttcgattatgctactgttcaactttctgaaaaggatgaagaagggtttgttttacattttaaccctaaggataaaagaccgaaacgatatgaattgtacaatttcttaaaaaaatcagactaccaattcataaatccgcaaacaggacgtgaaaatacatataaattttgggattcttctaaaaaacgtctttctgttgcatgcgctttgaaatcacttccagctggaactgttgcattatttgctccgactaaattcgataacggtgttgctggtttatgtactgaaattattagtcaaatcaaattgatttctgactatgcaattaagaataacaatccgtataactatgcagatagcgagtatgttgctatagtggccgaatatgcctcacgtttattttctgaaagctatttgctcgtccaatgtcttagaatgggtttttgctttcaccatgggtcattacctcagtatattagagagattctcgaaaattgcattcgtgatgagaaaatacggttagtagtttgtacaaatacattggcagagggtgtgaatttaccattaaaaacaatggtaatacatacaacaaaaagacaatttgatcaaagatggcatcagctgactaatagggaaattaagaacctacttggaagggttggaagggcaggaaaagagaaaaatggggttataattattccgcataaagaagatcttgaaccgatctttgaagcctgtaatgatattaagattcatccagtgaagggatacttatatgcagtaatagaaagaattactagggtaatttcaaatagaaaaatagcattgactaatgatatgatagaaaatcaaaacgaatcattccttaaacttattgattcaatcgactcggctattcttgatttaattggagacaatgttgatctgtctgctttagacgaaattgcgtcccgacttgtagaaaatacattttcctacgttcaatcaaacgaacagcaaagaaataattttaaacatttaattcagcttcgttccgagaaaataaaaaataatatttcaaatgaatctttacctaagattaagaagagtggatcaagcctgcgcctttatttgagtattttggaaaatgcagattttgaaaatgatatttggtttaaaaaaatcaatccgcttgatgctgaatggattgatttcatttttaatcacttggaatatatttctgcaataaaggaagatttggaggagggaagttatagtgatattgggtcattagatagattaaaagatattacgctttcctggctaagcggaatgacttacggacaaatttcggagaattacaatctttcgatagaaagatccctggacattgttaataatcttctttcttatcaattgaccaatgtgttttcagctattatcagaataagacaacagaatcttgaacaagaccaaattattgatgaatcaatttcttcctggcctctactcttacccctaggccttgacaattatttgaagctaaaattgcattctattggatttgcagacaggataggcattattgggcttgcaaattacctcgaaactagttttgatatattgaataaagatgaagaagaaataaaagttattttaatggagaatcttgaaacgattttgcaagatttatccgtgacactaccgaggctttcaattttagaaattgagaatagtttaaatgtcgaatag

SEQ ID NO: 58064 - DNA, 801 bp, Aerococcus urinaeequi
attttaaagaaacatgaagaaacccacaaagcaattgcaaactattttacttctgaagataaaactactgattccggcatagaacatagagtgttgttaggagataataatgcagctttatttgttgatttcataactccaatagtaagaaaacatcaaatatctgaacaagattatagtactcgaaagaaattacttgagaaactaaaaatagaaaacttaccaaacaccataccttcgccatttcctaaaaacttgtctacacaaaaaggtaattttgccgaagtattcttagctgaatacttggaaaaggccaccgattttacacttcctatttatagactaaggtataatccaaatgttgaacagtcaatgaaaggggatgatgttctgatgcttgatttagattcagagcccgtcagaattattattggagaatcaaagtttcggaccactcctcagaaaaaagatgttactgatattattgaaggattaatccgagctaataaagcaaaggtgcctatttccttgatgtttgtagttaatttgttgagagcagaaggaaaaatcgaattagcggaaaaagttcaagaatgtgtagttctttttgcgtcagataaaatagaaattgattttgtgggattattgatgtcatctacaaaagctagtaggacagtagatcgtcatacatcagcggaacttcgaaatattttgatgatatcagttggagtggataatcctgtagaaatcgttaaaaacgtttacggaaacttggagggtgattatgagtgtatcgattga

SEQ ID NO: 58065 - DNA, 3309 bp, Aerococcus urinaeequi
atgagtgtatcgattgagtctatacagagaatccttcaaattttagacgataataaaattaaaaatctaggggcacagtccgatgcaagacgggttttacaagaagttggtgaattatctttaaattttccaaactatgatccacatttgagtgaaaaaaattcatatatcgcttatttattgatttttaatgcctgtgatattgttgaaaatagttttgagaaccaaatatcatctgcggaaatatttgagcgtgctggaaaacttcttgctgataattatcaatttgcacaggaagctgaagatatatcaaatataaacttacttatttccagcatgtctttttattgcgctaagcacttttctcaagcatatatctccgtagagcgtgtaaaaccaaataactcaatagtttcaatggtcaaattatttttaagaaaagattttaatcaattatttactgagtcaatagaaaacttttttgttgaacaaccatatttatcagaattagatcaattggatcaatggataattagccatgaaatagctcgttgttttatgatttacttaaatactttatattcaggagatctaggacaatttaatcaaatatcatttattctagaaactcttgaagatttatgtgaattgaatcgttttgttacttcatggttaattattaaacttcttaaaataattttcaaaacttttgaaacctcttctacatggaaaaacattccaccgcgtatacccaatgcttctctaacgccgaagtatattcgtttactcagtgaacttcgaccatctgtggtagaattatggccttcacaattatcagcgatagatttagcaactagtaagaacgatggaggagtcatcaatttacgaactagtagtgggaagactcgtgttgcagagattgcaattttaaagactttagctactaatccagagtctaaagttctatatctcgccccttttcgttctttggcatttgagatcgaaaagagtttattacaagtttttggtaaattaggatttggagtatcgcaattatatgggggttctacagcaaataaaacagacttagagttattctctgataatcaaataattattgctactcctgagaaagctaaggctatgatgaaatctgacgatgaatttataaatcaaattgaattgattgttgttgatgaagggcatcttattggtaaggaatttcgaaatattaagaatgaaatcttcttaacacatattagtgagattgctaaaaacaaaggaaaaagaattctgttactatcagcagtgttgccaaatgcaaacgaaattgcggaatggctaacaggcgatgaatcagccgtttctaaatctagttggaaaccttcccttgaaagattcggaatactaaactggaacggtgaaggtgtgacattaagatggcttaatggtgagaaaccgtttaatcccaactttattgaaaagaaaccactaggctttagtaaaagaagaaatcattttccaaattcaaaaaatgaggcagtagctgctactgctgtcaggttatctaaatccgggcctgtgatgattttttctgcaagagctaactcaattagaggtctggcgagggatgttttgttggcaatgggagaagcgcctaatgattatgaatgggatgaaaatctttgggatattgtggaaagtacttgcgaggaagaattgggtgtagatagtatcgagattaaagcagcgcgtaaagggataatttgtcatagtaatcgtttaactacaaatgtccgtattgttcttgaacaattgatgagatccaaaccacctaaaattgttattgcatcttctacattggcacaaggggttaatataggtatatcgacgatcattgtttcaactccttattatgcccaagatccgatttcaaagcgcgatttttggaatgtttgtggtagagctgggcgtgctttttcagattccgaagggaaaattctttatgcaattgacttgactaaggaatcgtggcagatacgaaaggatttaagtttggcaagggactactaccaaggtgttcaaacagaaaaagttcaaagtggtttgtattatttgttaaatcgaatttatgaaattagtttaatatcagaagttacatttgacacattacttgaaaaaattgcaaatgatactttcgttgatagcctattagaagaacaaaagagtgaagttcgtggattgtttgatttaatagatgatgaactattatctatgaatcaagagtttcaatctttggatgcggatttaagttggattgataatattttccgaaattctttagcatttattcaatccaaggatgctgaattgtcagtctatcctgaaattctaaaagcaagaactaaatttttgttacaagaaacggtaaccttggagaatagaaggatgattatttcaacggggcttccgttctctgtggctcaaaagatggtagcagatattgattattttagggacattgcttcagatgtgcttcaaaattactataatgatgaagttgaaacaattacatacttactaaaggcagttgaagtttgggcatcgaagtttgctagtagtattataaaatcaagttatgactctgaaattctagatagtgtgagaaataattggctaactggtgtttctatcaatgagatgcgagagttaactacagatattaatgaaatcgtaaaagattattttgggtatacacttccttggatattgaatggtatcgcgcaaattttttatttagaagatagggaaatatcgaaattgtattcaaagattgcaactctaacagagttcggtctaccaagcactgatgcagttaaaatttatctttgtgggataaaatctcgtgcggcagcaattgaaattagtgcattaagtgaatttaaaaccaaatcaatgattcagctaagaaaattattgtccgattattctttggagcaaaatgaattatcgttgacttcaaaaaagtggatttcaatatttcgtgaatcatatagtatggccaaaagtgaaattatttcatttccaatttttaatattaaggattggaaaggtgctgataatatagttgtaagaaaggtaaatcaaaacgtctatctatctactgttgatggttattattttatttctgtcaagagtacgaaggaattaccctttgaaaaaatagccaatatacctggcatattctttgtacgaaaggaaacagggtggcatattcggtcaaatagttctcgcattgaaattgaataa

SEQ ID NO: 58066 - DNA, 807 bp, Enterococcus durans IPLA 655
atgacttttccgaaattcattgaatactttattcgagaagaaaatgttgttactaaccaaggaaaagatatctctattataaaaattgatatcaataatgatgaggatgttttaaaacagtgggctatacatctcagaaatcattattgttcacttgaagaattggatgaattaagggagggaccaggtctttcaagattagaatttcttagagatatgaagttccccaatcctacattgggcttgggttcagcaacaatgtccggtgatttttcagaaatattaattgcagattatattgaatatatcttgaattatatagttccaagagtacgctacagacaaaaagccaatagaaatacttccacacaaggaagtgacttaattgggtacaaagtagagtctattgaaactaatagtatcaatgacgaattgttaattgttgaagtaaaagctaggaatagtgaatcaaatccagaagcaactctgcaaaatgctgtagatcattctgaaaaagatattgttagaatagctgaatctttaaatgcttcttacagaatgttaaagaactataatgaatatgaaggtatgcgtttagtaagaagatttcaaaatcctaccgatagaccgcataaaagaacatttgccgctgcttcagttcattcggatacctctttttctgttgatcttctcaaacaagttgatatttctaagcatccagaagacgttaaactaatagctatccattcgcccaattttttaacttttataaaagaaatgtatgtgagggctgccaatgttgattga

SEQ ID NO: 58067 - DNA, 3135 bp, Enterococcus durans IPLA 655
atgttgattgaaaagaattcaaaatactatttaaaaaaagttcaagcgaaatcaaaaatgtttgaatactatgtccccattgaagaccacattcaagtggaatatatggcacatgagttgataattcttgcggtagcaacaattggtgactcttcgaattttatttgggataacagactttctaatactgcttcatcattgagtgaagaactatatgaaaatttaaattttacatcaatttactttgattctctacttacctcagaaattggtgaagccagttataatgattattttgcattattaggagcagtttctttctatctttcggatgttcttggaagtacaaaagtaatgataaataaaatagatagggcaatggatttagaaattaatgaaattgatacttttcttttatatctattagcagacagattgaatgatttaaaggaatacgagttttccagtcaatatagcgatctcttcgaccacctgataaatgatttatctcaattttacttagatggtacaccaattgattttgaaaagctaaatgacttaaaacaagaaatatatttatctcaaaatccgcgagagattctttttggagattcgttattagcagtttttattaaaaagtataaaaattctgctttgaatcttttgccaagttattctgatacgacaatacaagattgggaaggtttattgttaaacaatcgtacaataaaagaattgtggccaagtcaaattttgttaggagaaaagaatatttttaaaggtaattctggtgtcattcaaatgcctacaagttctggcaaaacgacttcaattggtttaataattagatcagcctttattacccatcgaacaagacttgcggttgttgtggctccttttaaagctctctgtaaagaaataactctaaatttaattgattttttttcaaatgatgaggtaatcataaatgaactgtcggatattgcagaaaaagatgatattgcattctttaataatgatagcgatacaaatacattgattatactcactcctgaaaaattactattcttgattagaaacaatagtgaaattttggaagaacttaacttaattatttttgatgaagctcacttattcgatgataattcgagaggtactaattacgaattacttatttcaacaattaaatattacctaaatgaatcctcacaaaaaatacttatttcagcagttatagcgaatagtgaagcaatcaatgagtggttaaatggaacagacggagaagttatttcaaacaacaatattatttctgctcaacgatcaatagctatgggtgattgggtaggacgaactggacaattatattttctaaatcaagataatcctaacatagatgatttttatgtcccaagaattgttgacatacgtgaaataaataggattggaagagaaaggtcaaaaagatattttcccgatgtgaattttcgtgatagaaaactcaataaaccttacgacatgcaaatttattatgcgttaaaaatggtgcataatggtgctacagcaattttttcaggcaaaaaagatgcagcagacaacactgctaaaagaataatagatcttgacaagagaggagtagatatatctgtattctctaaaaatattatcaataatgaacaccttaaaatagcagagcttataaaaagaaatttaggaataaacaatgagtattatgactctgctttaatcggcgtatttgttcaccacggaagaatacctcttggaattcgtatttctattgagtatgctatgtctcaaaattcaatcagttgtgtaatttgtacttctactttagcacaaggagtgaatttaccaataaaatatttgataattccaaatctttatcaaggtcaaagtaaaatcaaagtgagagattttcataatctcctaggtaggacagggagagcaggtaagcatattgaaggtaccatcatcctttcagaacctttcgtacattcaaataaacgaggatggaaatggagagattatgaatcaatacttgatattgcaaactctgaagatagcgttagtaacttactgaaattagttcgccaaattagaatcagaaatttgccagcaataaatttatgggaaactattttgctaaaatattctaatattgaagaatttaatcgtacaattaacagattaaatcaggttgttcagattaattactctaaactttatcttttgttcagtgaagagctacaaacaattcttagtagtttaaatgatatagaaaactatgtaatgttctttatgaaatattttggtgaagaagaaatgaattttacagatattgtaattaaacaaaccctaggttatcaattagctgatgaagaggaaaaagaaaagctagttcatttatttgaaacaattaaagtcaaatcacttgcgtttacacaagaagagttaaacttatattctatcacttcactaggatttgaaagttctcaaaacttgtctcaatggatttctgataaatttgacattattactcaaccaaactctgaaattgaattgattgacgtgattttccctcaagtaatactcttcacagataacactattataaataggattgatgattcttctatttttactcagatatgtaaactgtggattcaaggacaaagctattttgatatattagtctattgccaagaccatcaatttcagattactaagcgtaataggttggtttctttcatattacaagatgtcattgaaatatgtgataacctgttatcttatggtactatattacctctcaatggaattgtaacatttatagatggcttcgaaaataactctacaattcatttaattaaaagcctacaaaagaaaatacgttacggacttcctagtcatctatcaataaatattttcgaacttggtttctctgatcgagtagttgctcaaattatggctcaaattattgatggttcttctttctccactcctacattaattagtaaaaggagaactaaagaattacttagacaaaatagacaagaacttgaagttgcattacaagatcttcctcagtattttttagatatattgagaaatatataa

SEQ ID NO: 58068 - DNA, 780 bp, Pseudomonas coronafaciens pv. porri
gtgccgctatacaagcgatggtgcaagtccagtaaaaccaaagccaaacgtaaattctattggacgtatgtggagagggctggcggacgtgctgatatccatgaggatctctgcgaaaccatacgttcgcactacgatcacctcgaacgaatagccgatgatgtcaaacgattgggtttcgtggtcgctggaaaaatcttgagcaaaggaatgccgcaagacaaaaagggccgctctggagacctaggtgaaattttggccactgaactggttgaggaagaggtaggactgcgagttcccgtccggcgtcttcgctataaagatggccgaaacatggcaatgcgcggtgacgacttcatcggcgcaggctacgacaaaaacggcgagctttctttgttgaaaggcgaagccaagagcaacaaagtgctcgggaagacgacggttactagcgctcgcaaagtgctaaaccgtgacaatggcaggtgtacacctgattctctgttgttcatagccaaccgtctgcttgaaagctccgatgccgccgacgtacggctgggccgttgcatccgtgatgaggttggtctggaatcgctgcacgccaatcaaatcagccacatgctgtttaccctctccggaaacggccctcacccatctcttaagtcagacctagacgccacggaaactaccagggaccagtacgtagtcaacgttcgtatcgaggaccaccaaaacttcatcacagcagcatatgaaggggcggaagaccttggaaacaattga

SEQ ID NO: 58069 - DNA, 3522 bp, Pseudomonas coronafaciens pv. porri
ttggaaacaattgacgaactgaccacattcttacgagctgcgaccgaggaaggcatattcggtcgcctcctctatcgtggcgaagcatggtcgttaatgcgtgatcgcggcgtgttggctcccaccgccccgagtttcgcctcaagcctggagaccgatctcgctgagcacgggttcgccctgcttaggggcgcaatggctctacgggctcgtaatgggagttcagatctaacctccaaaggtttcgagcgtgcggcgaatgcgttcgaagcactgattcgaaacggggacctagaggcgcacgaacgcggattccgtcgtacgattgcagctgctgcataccatctcgcgggcttctccgcagtcgcttactctctcttcaatgagtctgacaacgacctcaacatgactccgggcgagacggccttacgtcacctcatacttcgtgatctcaatgaactccaagacttcatacgcgattggcttggagatccgttgcatggcgacgaacacgttgccgagatgctgcgaaccgacgaatctgacgtcgacgacaccttggccatagtcctgaattcgactatatgcagagcgctggcgtacttcgattttgcgcttgaaaccggtgaaggcgaacccatggataaggcgcgctcaatgctagagaccgccgtcagacttgctgataacgccgggaacattccgctttggtggacctgcagcctctgcaaccatttgatcgatgacttatggaagcactcactccacaacaccattccatctgagctaccaggcgctcctgaagaaagttttctggatttgcggcaaatgtttatttcctcgctctatgcccgcaaaacgtcagaggtcgagctatggccttctcagcgtgaagccgctttaagatcaactgacgtcactgatgatctggttgtcgcgttaccaaccagtgccggcaagacgcgagttgctgaaatagcagcactcatgaatttatgtttaggacaacgggttttgatcgtcacgccacttcgtgcgttgtctgctcagaccgaacgcgcattcaagaagaccttcgctccactgggatttaccgtttcgtcgctctacggcgccagtggcgtttcagcgagtgacgatgatgctctaaggactcggcatatcatcatcgccacccctgaaaagcttgatttcgctttgcgcagtgatgcagatctcatcaacgacgtcgggctaatcgtcctagatgagggccacatgatcggtccgagcgaacgggaaatccgctatgaaactttagtgcagcggctactgcgccgatcagacgcagaggaccgccgaatcgtatgcctttcagcgatcttgcccagtggtgacgagcttgatgacctcacagcatggatccgctcagataaagaaggtgaacctgtacgtagcaactggcgccctacgcgccaacgtttcggggcgctcacgtggcgcggttctagcaaaaatgcaattttgagattggatctcaacagaagaggtccatttttggataagttcgtttcggaaaaaccagcacgaggaagggagaaaatcccttatcctcgcaaaaactcccacctcactttgttcgcagcatgggaatttgcgaaccagggcaaacgcactctcattttttccacgcaagcgaattgggtggaaggttatgggagccaagtagtggatctctgcaagcggggttatctggagtcattgctggacgacgaggctccaatcgctcgtgcaatggaagtgggcaaagaatggttaggtgagggccatcccgctgttgactgcctcaagtggggagtagcggtgcaccacggccggctgccgagcccattccttcgagaacttgaaatcctactgtctgcgggtgtcctcaaggtcatcattgcttcacccactctgtcacaagggctgaacctgaatgccgctgttctcctcgttcccgcgctttacaggtcgggggtaaagatcaaaggcgaggaattcgccaatgttgccggtcgcgcaggccgtgcctttgttgatgtcgaaggattgattgtccatacaatgtttgacaaaccgaccgagcgcatgcgcgcctggcgccacctggttgcctccgccaaagcgcggacgctgaagagcggtctgatccaaatcgtcgccgagatcatcgatagacttgcgagcgatggcgttttgggccgcacagacgcttgggagtacctcgccaattcccgcgaggcttggcggtcgcccgatgaggagagcaacgtaactgagcatcttggtttccctacagaactcggggctgatgacggcgatgaaaccttggagggacaagacagcgcggacgaggaaagcacgagcctaggtaaggagcctctctcccaacttgtcgagcgccttgatgcagtcgtattcggcttaatagaatcgctggacgccgaggaagaagatctcccagtgcttctggatcgagcgctccaagggtctctgtgggctcgccaaattgaacgagaagacgacggtgaggcccaattgcatgctcgaatatttcgagcgcgcgcggcccttatttggaagtccacctcagcgcaaacccggcgcggccattttgccatgggcgtcgggctcgaagcaggcttggctatcgatgccatggcagccgagttagcagtaatgctcgaccaagccgacttggcagcgctcaacggggacgtcgatattctcgctggcgcgctctgcggcttgggagaacggttgctggtgatacggccattcataccagacaaagcaaacgcgcttcctgtgaattggagagacattcttcgcagctgggtttcgggcggcgatgtaggtgagatagggccagagaacatgcgaatcgtggaggatgcgttcacgtatcgcatggtctgggcgttagaagcgatccgaacccgccgcatatgccttggatggtccccagatatcgtggcaggcggcgctgctgctgcaatcgatacaggagtaccaaggttcatgatggctatgctgattcgcgcaggcctgccatcacggcgcgcagcaatagctgcagttgaagacactgcccccgtcttcgtcacccccgccgagatgcgggcttggcttgagtctgatgaggtcgttgcctataccgatgccgggaattggccgacccccgataccgccgcactctggacaagattccgaaccgaggcacttagtggcaacattcaacgatggtctataactcgctacaagcgcctgctcgatcatgggaatatcccatcggcgggtctttatcgaataataaccgacgaaggtgatggacggacttggctagcaacacctgactataaactggtctctaccttcaaaaagccggcgcttgatcccaaacctagtctcttctggggcagagtgcatggagacgaccgactagtcgaagtaattcgcgtgggtcgtggaaggttgcgctggccacgcgcaaatagctga

SEQ ID NO: 58070 - DNA, 540 bp, Sulfobacillus acidophilus TPY
gtgaaggagcattatcaacccaactatgttctcaaggggcccaaaaagtggcgttggaaagaggaccgcaatcagcccgtccacaagaccgatattgtcttatttgcgaaacaggcggatagcccttctaacgatgatcttgttgtggcggttgaggtgaaggctaaggctacgcagaaaaactcctacgacccgattcatgacgcggtaaaaggcgcccatgatgattccactaggcgccttgcagctacgatcaactggttaaaatcacagtacgttaagagaaacaatcccgaggcagtggagtatcttgaacggttccgaaatccagttgaacacggttcgtatcaaaaacactttaatgcggtggcggttgttgatgaacaactagcagaagcggaattgacgcggccacgcgatttaagtccatattcattttcagacccgttttgcatcattgttgtatcaatccctagtctcaagacgatgtacgaaaacgtttacgaaaaaattcctgcgtcggggggggacttattttga

SEQ ID NO: 58071 - DNA, 3024 bp, Sulfobacillus acidophilus TPY
ttgattgaaagcaagctggcgtattgggtagctcaatcgaaatcatggcatacctttaaggaattcaagctgtccatcgaaaatcaagccgactatccatttttagggcatcctaaagatttctatattacgttatttgggaaaatgtttgaactaattcataaagacccatcagaagaaaatgcagcactaaatcgcatcaaaaatcagatgctgcaaatcgccaaaggcatggaaatatattcgctcaaggaaacccgttcggagtttcagggggtagacttttccaggaatatgctttatgtagcttctctatattacttggctgattatcccgcatcggcctatattttggcgaagttgtttcctccgactgtatatgaaggagaagtcgaccagttcatatcgtcatttctttgtagggatctagaccatttgccaacctttgccgaccccttcgcccgttttgttttaaccggtaaacgggagaatttagagggtttgtccgcgacacttcatgacgggtcagtgaaagcccgtgatcccgatgagtttgtgtcgtttcgaattgccgaagcattggtcaaaagctttatggctaacaacgtatggcaggatctcgcagaccgtttcgatgttctgactgaagagcggtggaaacagtttattcggcacgggtttgaccgaagaccacccgtgtggtctttctttccatcgcagaggcaagcaattgcacaaggaattttgtccgaagacgcgagatgttttgcgctccagatgccaacgagcgccgggaaaaccgcactttgcgaactgatcatctttaaccatatcttgcagaaaccagggaaagtcttgtttcttgcaccatatcgtgcactagcctccgaactgctgagcgggtttggtaggcgtttagctacccttggaattagttcgaaagctatgtacggagggcacgtacctaacaatgaagagcgagcggctatacaggacgttgacgtgctgatcgcgacacctgaaatgtttttagcggtcgaatctgttatccctgaggtgtatgagagtttctctcttgtaatttgcgatgaaggacacctccttgatgacactactcgggggttgaactacgaactgttgttggcaaaattcaagcttcggtcgccaaatgcccggttcgtgttcctttctgcggtagtaccgaacataaatgaaataaatcagtggttgggtggcaatgagtcggttgtccggtcgaattaccggccaacagaattagatttggcttatcttcaaaaaacagccagaaatgggtacatgttaaactttaatccccataaacggcgacccgaaaactatcagctctatcacttcttaacccgaggggatatggaatttgttaatattcaaactgggcggattaaccattatcgacttgaaaccagtgtaactcgccaatccgttgccactgctatgaaagcgttacttgctgggaaagtcgctctattctcaccccataaaagaaagaatggggtagagagtctagctgaaaagctgatcaggcaaacaattagctcctctttgccaaagccgatcgaatttgcggattccacaatgatcgaacgtctccaagaatactttgggcgagtgtttggaaaggattatctattaacaagattggttcgggttggtgctctgtaccaccatggggacttacctcaaaatatacgtgaagtagtcgagtccgccatccatacgtcggcatttaggttattaatctgtacgaataccttggctgaaggcgttaaccttcccattaaggtggttgttattcactctgcccgtcggtttgataagtatacaggaacgctcaaaccgctgaaactgcgtgaccttgccaacttatttggccgggcgggaagatctggtcaggaaaccacaggcatggtgattgttgtaaaccctgttgatcgacagatagtcagcgatgcaatagagggaacaaagaacgaggcggtaagcggctacctgtttggtttaatcgaaaaccttgagcgggttattcgagaacatcggcttgtactcgataaccgactgttggagagtcagagcgaagattttttgcggttgctcgattcgattgatgtgtcgcttattagcctactcgcagaagagatcgatgtcgatcatttaacacgcgagatcaatacgctaatacaaagtacctttgcatatcatcaaggcgacagcgaacaacgcgacacgctccgggcgattttcaaaagtcgtggagaacgattggtgccttatgtgcaaaacggacaatttaaagccataaaaaacagcggggcaaccctgaggttcttcgagcaggtcgtccataggttgcaccttgaagacgaagtatggagcaagacgacccatccatgcgatgaccggtggatggcacatctgtttgatatcctcttttccctgcctcaaattatagcaacggtggatgattttaacacaggacgatccaaagacgagatggccgttgacgccaccgttattcgtgacatctgcactttgtggatgaagggacattggtatggagaaattgcaacacgtcttaatgttgaagtgtcttatctactgcgtattttctcgtccatcgtgcactccacaattgggacgtatgtggcacaaattatccgattagcgtcgtatctttcagaacatgaggtcgggatttcgatttctgagacaatcctcgactggccgcaatatcttatgagtggccttcagtataagactgaactggagttggttaaccttggctttactgagcgtgaaggtgttattgctatagctagatggatggcgctgaataatgttcaggggttttcaggtcctgcgttaaaaagctggcttgtgttgtttgaggataaactcttagctgagatcaaggacctcattacgacagtggcctacgataaaagcgctaaggattttgaccttctgagacatcaaccaatcttatag

SEQ ID NO: 58072 - DNA, 750 bp, Sulfobacillus acidophilus DSM 10332
ttgatttttcgggcaagcgaaggtaaactcggtcagttgataaataaattgccagccgagtatcgacgatgttacataacggatcaagatttactagatcgggtttcaacgttcaagcgttcttatagcgacatattgagggaagcttatatcccggatgagcccaagataaaatcagcggaatttgctgagattctatcgtatttcctcgtgaaggagcattatcaacccaactatgttctcaaggggcccaaaaagtggcgttggaaagaggaccgcaatcagcccgtccacaagaccgatattgtcttatttgcgaaacaggcggatagcccttctaacgatgatcttgttgtggcggttgaggtgaaggctaaggctacgcagaaaaactcctacgacccgattcatgacgcggtaaaaggcgcccatgatgattccactaggcgccttgcagctacgatcaactggttaaaatcacagtacgttaagagaaacaatcccgaggcagtggagtatcttgaacggttccgaaatccagttgaacacggttcgtatcaaaaacactttaatgcggtggcggttgttgatgaacaactagcagaagcggaattgacgcggccacgcgatttaagtccatattcattttcagacccgttttgcatcattgttgtatcaatccctagtctcaagacgatgtacgaaaacgtttacgaaaaaattcctgcgtcggggggggacttattttga

SEQ ID NO: 58073 - DNA, 3024 bp, Sulfobacillus acidophilus DSM 10332
ttgattgaaagcaagctggcgtattgggtagctcaatcgaaatcatggcatacctttaaggaattcaagctgtccatcgaaaatcaagccgactatccatttttagggcatcctaaagatttctatattacgttatttgggaaaatgtttgaactaattcataaagacccatcagaagaaaatgcagcactaaatcgcatcaaaaatcagatgctgcaaatcgccaaaggcatggaaatatattcgctcaaggaaacccgttcggagtttcagggggtagacttttccaggaatatgctttatgtagcttctctatattacttggctgattatcccgcatcggcctatattttggcgaagttgtttcctccgactgtatatgaaggagaagtcgaccagttcatatcgtcatttctttgtagggatctagaccatttgccaacctttgccgaccccttcgcccgttttgttttaaccggtaaacgggagaatttagagggtttgtccgcgacacttcatgacgggtcagtgaaagcccgtgatcccgatgagtttgtgtcgtttcgaattgccgaagcattggtcaaaagctttatggctaacaacgtatggcaggatctcgcagaccgtttcgatgttctgactgaagagcggtggaaacagtttattcggcacgggtttgaccgaagaccacccgtgtggtctttctttccatcgcagaggcaagcaattgcacaaggaattttgtccgaagacgcgagatgttttgcgctccagatgccaacgagcgccgggaaaaccgcactttgcgaactgatcatctttaaccatatcttgcagaaaccagggaaagtcttgtttcttgcaccatatcgtgcactagcctccgaactgctgagcgggtttggtaggcgtttagctacccttggaattagttcgaaagctatgtacggagggcacgtacctaacaatgaagagcgagcggctatacaggacgttgacgtgctgatcgcgacacctgaaatgtttttagcggtcgaatctgttatccctgaggtgtatgagagtttctctcttgtaatttgcgatgaaggacacctccttgatgacactactcgggggttgaactacgaactgttgttggcaaaattcaagcttcggtcgccaaatgcccggttcgtgttcctttctgcggtagtaccgaacataaatgaaataaatcagtggttgggtggcaatgagtcggttgtccggtcgaattaccggccaacagaattagatttggcttatcttcaaaaaacagccagaaatgggtacatgttaaactttaatccccataaacggcgacccgaaaactatcagctctatcacttcttaacccgaggggatatggaatttgttaatattcaaactgggcggattaaccattatcgacttgaaaccagtgtaactcgccaatccgttgccactgctatgaaagcgttacttgctgggaaagtcgctctattctcaccccataaaagaaagaatggggtagagagtctagctgaagagctgatcaggcaaacaattagctcctctttgccaaagccgatcgaatttgcggattccacaatgatcgaacgtctccaagaatactttgggcgagtgtttggaaaggattatctattaacaagattggttcgggttggtgctctgtaccaccatggggacttacctcaaaatatacgtgaagtagtcgagtccgccatccatacgtcggcatttaggttattaatctgtacgaataccttggctgaaggcgttaaccttcccattaaggtggttgttattcactctgcccgtcggtttgataagtatacaggaacgctcaaaccgctgaaactgcgtgaccttgccaacttatttggccgggcgggaagatctggtcaggaaaccacaggcatggtgattgttgtaaaccctgttgatcgacagatagtcagcgatgcaatagagggaacaaagaacgaggcggtaagcggctacctgtttggtttaatcgaaaaccttgagcgggttattcgagaacatcggcttgtactcgataaccgactgttggagagtcagagcgaagattttttgcggttgctcgattcgattgatgtgtcgcttattagcctactcgcagaagagatcgatgtcgatcatttaacacgcgagatcaatacgctaatacaaagtacctttgcatatcatcaaggcgacagcgaacaacgcgacacgctccgggcgattttcaaaagtcgtggagaacgattggtgccttatgtgcaaaacggacaatttaaagccataaaaaacagcggggcaaccctgaggttcttcgagcaggtcgtccataggttgcaccttgaagacgaagtatggagcaagacgacccatccatgcgatgaccggtggatggcacatctgtttgatatcctcttttccctgcctcaaattatagcaacggtggatgattttaacacaggacgatccaaagacgagatggccgttgacgccaccgttattcgtgacatctgcactttgtggatgaagggacattggtatggagaaattgcaacacgtcttaatgttgaagtgtcttatctactgcgtattttctcgtccatcgtgcactccacaattgggacgtatgtggcacaaattatccgattagcgtcgtatctttcagaacatgaggtcgggatttcgatttctgagacaatcctcgactggccgcaatatcttatgagtggccttcagtataagactgaactggagttggttaaccttggctttactgagcgtgaaggtgttattgctatagctagatggatggcgctgaataatgttcaggggttttcaggtcctgcgttaaaaagctggcttgtgttgtttgaggataaactcttagctgagatcaaggacctcattacgacagtggcctacgataaaagcgctaaggattttgaccttctgagacatcaaccaatcttatag

SEQ ID NO: 58074 - DNA, 780 bp, Raoultella ornithinolytica 10-5246
atggtcccgttctatgattggtgcgactcggccgacatgccattaggtaatcaccacgttcgtgtcatgacgggccgactaggagatattgcgactggcattcagatgacagctagggctatccccgcccactacactacagaggcgcggattgcgaccgctcttgcgaagttgggtaagacagcggctgctcatatgctcagcgatctccttccgcaaacggcgcaaattagatcgggtgaccttggcgagatctatgctacagaatggatcgaagcgtacagcggttatcgcgcgcctatcaaacgactgcgctggaaggatcataggaatatggcaatgcgcggcgatgatgtcatcggtatgcttctcgacgctgaaacacagcgactcagcttcctgaaaacagaagctaaaagccgtattaacttgcgcgctcaaacgcttgatgaggctcggagcggcttagataaggataacggccttccctcgtcgcatgcattatcttttatctcggccagacttatggagataggcaccaatgcaccgctcgtagacgcaatcgacgaagcgctctaccggcacggtatcccgcccgagagtgttaaacatctactcttcacgttttcaggtaaccccccacaggcgctactaacgcaggcgctacaggcttatcctggtccgattggccaatggggtgtcggtttgcacatcgacaaccatgctgcttttgtcggagctgtctacgatcgagtaattgcagatgccaacaacccctga

SEQ ID NO: 58075 - DNA, 3438 bp, Raoultella ornithinolytica 10-5246
atgatctggcgtaacggtgttcttcctcctggtgcgccggatttctcggctcaactcagcttcgatcttcacagttacgcgtatggtttgcttggactaggtctgcgccttttagagtcagatggcgacccgaatcaagcacggatcgcattcgaacaggcggcgacagcgcttgagtcggtcatggccaacggcaatcgcgaagaagctgatcgcgatttccatttcctccttgctgctgccagttatcacctcgcgcacctttctgcccgggcatattccctcctcgcaattgtggccgatgaagcaaatttctcgccgatcgagcatgcgctcactctgttgatacgccgagatatcaattcgctgcgtacacgcgtatatacctttcgtctcgatggtcgtggatctgatgcgaccattacgacattcttacagcagcacctcaccgagtccatcgttgccgatgcggcggaacgagatggaaaggactttcttttcgaaggcctgaatctcgcactgacagatgttttcttcggtgccttttcgatgttcctgctcgccctagatcgcggtgaatatactcttctcgaaagagcgatcgcccagcttcgtgaaaacctcgatatctgcggggagctgaaccttataccgcaatggtgggtgcaccggattgctatccatctgcttaacgatttctggtcgaacaccttccacgaaaaagttccgctgcttcccgctggcggcgttgccccttcgtggcctgtccttcgtgaactcttcattggcttgctcgctcgacgcccaagggcagaggtcgatttgtggccgtcgcagattgaagcggcatcgcgagctgtcaaccagactgacaacctcgttgtttcgttgccgaccagcgcaggtaagacccgcatcgctgaattgtctattctgagatgtttagccggtgggcggcgtgccattgtcgtaaccccgcttcgcgctctatcagcgcaaaccgaagccacacttcagcgtaccttcgggcctctcggcaagaccatttctgccctttatggcagcatcggggtgtccggcttcgacgaagatgccatccgcgggcgtgatattgttgtcgcaaccccagagaagctcgatttcgccttgaggaacgatccgtcactgctcgacgatgtgggcttgctcgttttcgatgagggccatatgattggttcaggtgagcgcgaagttcgttacgaggttcagattcagcgcctcttacgtcgtcaggacgcagatcaacgccgcatagtctgtctatcggcaattcttccggacggagatcaaatggaagacttctcggcgtggctacggcgcgatcaaccgggaggtcccattaagaacgattggcgcccgacgcgtttgcggttcggcgaggtcacttggaattcaccgacagcgcgcctaaatcttcgcgttggtgaggaaaggccatttgtgcccagatttctcactggtgcggcaccgccgctgttcgtaccaccgaagaagcgtcgcaaccgactctttccggacaatcagcaggagttgagccttgcaactgcatggcgtctagtcagagatggtcagacagtgttgatctattgcccagagcgccgcagcgtcgaaccatttgccaaggtcatcgttgacttacactcgcgcggtgcactcgagtctttgctaacagtcgaattgaccactttgcagatcgctattgcactcggtgaggaatggcttgggacagacagctatattctgaaatgccttcggcttggtgtggctcttcaccatggtgccttgccgacagcttatcgcaaggaaatcgagcgccttctgcgagaaggtatactcaaggtcacgatctcatcgccgactctggcgcagggactcaatctctcggcgacagcggttgtcatgcactcgctctaccggcacggtgaattgatcaaggtttcggaattcaagaatgtcatcggccgcgcaggccgtgcttatattgatgtagaaggccttgttctctatcccatctttgaagatgtgaataacaggaagcacaacaaatgggtcaatctgatagaagaccacggtgctcgtgagatggaaagcgggctcatccagctcatcttctcgctgctgagccgcatgcactcccgcattggcggtaatctcgaccgtttgatcgactatgttatcaataatgctgctgcatgggtcttcccagaggttgccggtgaaaaggttgatgagcgagagcaggcgctgaaagagtgggatcgccatatggcgacactagataccgccattctcagtctcattggtgaggccgatgtacccgatgatcagatcgagaccgctctcgataatattctccaatcttcactctggcaacgccgcctgctgcgtgttaacgacgaatcacgggctgcctatcgcaccgcgctgtttactcggagccgttatatctgggcgaattcgactgccgtcacacggcgtggctattttctggctgggcttggccttgaagctggacatgcactggatgcaattgcaccggaggcgaacaatcttctcatgcaagctaatgcagccttggttgtatcagatcatgaggctgcaatcactgcgatcacagaaatcgccgaacgcgtgttcaccttttatccgtttgaaccagacacactcccggcgaattggcgtgaaatcctcagaggttggctgcttgggcatccgttggcaatgatgatcgccggagaggaggtagatgcattgcaatttattgagggcggtctgggctaccgtcttccttgggctatggaggcgttgcgggtacgtgccgccgccaacggtgataccgttggcatgcctgcactagcgttggaagactatgaactcggccttgctgttccagctgtcgaaacggggacgatgaaccgctcagcctcaatactgatccaggcgggttttaattcacgactggcggccatcaaggccgtcaccgatacggctgctaacttcacgaacggggcggaattgcacgattggttgcgttcacctggtctcgctgtctattcggcacaaccaaactggccaacggtcgaagctaggactatatggctcgaattcatccaggaatttgctccgtcagacaacctttcttgggcgcggcgagattatcttggaaacgtcaattggttcgatgttccggcgctccccggaactccagtcggtctctttcattggaacggacaaccgctagtgcttgcaccagatgggcacgcgattggtctgctacaacaccctcttaaccttaatcggcgaggtcttgtgcgagcgacggtcgctatgaataacggccagatcaatctgagctatctcggccctgatgatttgtgggtagtggcgaagccacattaa

SEQ ID NO: 58076 - DNA, 771 bp, Pectobacterium wasabiae WPP163
atggcgaatttcaatgattggtgtgattcaattgacagcaatgtaggacagcactttcttcagacacttacggtaagagccaccgatttcgacaatggtgttagggcgacagctgaagttgtccctcatcactatgcctctcctgaaaacatcgcagttgccttcgaggttctcggcaaacccggtgtggccaattatataaaagagtatctccctatctcgaagcaaacccggtcgggtgatattggcgaaattctggctaccgaatggattaatgagcggagcaacggatacatcgtgcctctcaatcggttgcgctggaaagaccatcgaaatctggccatgcgcggggaagatgtaattggcatctatgcttccccggattcacagactttgtttttcctaaaaacggaagccaaaagtcgtgtcaacatgagcgccagcacggttacggaagcccggaataacttaaataaagagcaggggttgcccacccctcatgctctttcgtttatagcaacgcgcctgcttgaaactggtcaaccagaactggggcgggccattcttagggcatcgttatctcaaggaatattgcctgggcacgtccggcatttaatctttttgctgtcaggcaatgcctccgacggtttactgaaaacatccatgcacgcatatcagggaaacattgagcagatgggcgtcaccgttatggttgtccggcatggtgattttattgaacaaatttttgaaacggtcattcgccatgcttga

SEQ ID NO: 58077 - DNA, 3594 bp, Pectobacterium wasabiae WPP163
atggtgattttattgaacaaatttttgaaacggtcattcgccatgcttgaaacgtcagaagaaatcattgaagccatccgtgccgcaactgctaccggatttcgtggccgacttcttgctcggggccaagcccgggctatgatctggcgtgatggtaagttacctgaggatgcgccagaatttactcctcagctcagtgaagaccttcaaggttatgcttactcattgattagccttgggcttggtcttcggaatctgaacggagatgcctactactcgcgactggcatttgagtatgcggcgaccgctcttgaatcagtaattgcgaaaggtgctcgggaaagttatgacaataattttcactttgtcatggctgccgctagctatcacttggctcacctctctgcccgcgcttattcattactcgcgatggttggcgataatgacaatttctcccctatcgaacacgtcctaacgaagctcatccggcgaaattttcataccctgcgatccagcgttctcagctatcgagtgcgtggggaggggagtgaggagcgaattattgatgacatgcgtgcaaatgttgacccgcaggtcgaaggaggggctgaagacgatagagagaataatctcgctgaagcagaatacaacgctttgtttgaggggctggatactgcgttgaccgatacctatatgaccgcgatgtccctctatattcttgctatcgaaagaggtgatcgcctctacctgaccagggctatcgagcagctccagtcaggcttggcagtctgctcgcgctttaatatgcttcctcaatggtgggtcatttttattaccatccatctgctgtcagacctctggtctgatacgttccatgaactgctgccactcgacacggctggcaatgaagctgaagcatggcccgaacttcgtgagttgttcatcgcattactccatcaacgtccccgtgcggaagtcgacctctggccatcacagagagaagctgcggtgcgtgcagtaaacgatgcggatgacttagtggtctccctgcccaccagcgcaggtaaaacgcgaatagctgagctatgcatactccgttgtctggcgggaggaaaacgggttgtttttattactccacttcgcgcgctttccgcacagacagaagccacactatccagaacgttcaatccccttggaaagacgatctctgcgctctatggcagcatcggcgtcagtggaatggatgaggacgccattcgcctgcgcgatatcgtggtggctacacctgaaaagcttgattttgcactgcgcaatgatccgggtctaatcaatgatgttgggctattcatttttgatgagggacacatgatcggggccgatgagcgcgaggtccgttacgaggtccagatccagcgactgttacgccgctccgatgctaatgaacgcagaatcgtttgtctatcggccattctgcctgatggcaatcagcttgatgattttgccaactggctacggcgtgacaaacctggcggcgtcgtcaggaacgactggcggcccaccagcctgcgttttggagaggtaatttgggctggtgcagccgccagactcaaccttagcgtaggggaagaacggccatgggtttcacgattcctagtctctgccgaaccgcctgtggttaaactgaggggaaggaaacagcgtaaaaaactcttccccggtacgtctaatgaactctgtttagcaacagcgtggcgacttgtcgaggatggacagaccgtgctgatttattgcccgcttcgcaaaagcgtggaaccctttgctgacacaatagttgatcttaaccaacggggattactgcgctctttgttcgaaggggaagcggatgtacttgatcgggctattgcgcttggagaagagtggcttggcgctcagagcccaatactcacctgccttcgtctgggggtggcgctccatcatggcgcgctgcctacggcttatcgaaaagaaatcgagcgcctgctccgcgatggcgtgctgaaagtgactgtttcttcacctacgcttgcgcaggggctcaatctttctgccacggtgatagtaatgcattcgctgcacaggaatggtgaactcatcaatgtttccgaattcagaaatgttatcggccgtgctggacgtgcctatgttgacgtagaagggctggttatttaccccatctttgacgaggtcggtaaacgcctaggaaactggaataagctgaccaaggacaccggtgccagagagatgcaaagcggcttggtccagcttgttatttccttactgacacgaatgagcctgcaagtaagtggtgatattgacacgctcactgactatgttctgaacaacgcgagagcgtggacattccctatcaaaaccggggaaaacgctaatgaaagggagagagcctttactctctgggaaaagcaaatcgccaccttggatacggctatcctcagcctgattggcgagagtgatgttccagacgatcagattgaagacactcttgatgacattttgcattcctcgttgtggcaaagaagccttcaacgttacccgggtgataacattcgcgggttgatcaaatccgggctgttatctcgcagtcatcatatttggcaaaactcaacgccagccgcccgtcggggttactttctctcgggggtaggactgaaaaccggccagcaactcgattccatcgcgccggaggcgaaccgtctcttaattgaggctaacgccgccatcatgcggagtgatgaagaaggggcgatagccgcccttacggccttagcaagtcgggtctttactttttatccttttacaccagacccccttcccgatgactggcaggcgatactgcatgcttggctatccggcaaacctactactgcaatcgccgacgtcgtgaaaacggaaattttgcagtttgtggagaatggccttacctatcgccttccctgggcgatggaagctatccgggtgcgagccatcgcgaatggcgacatcgtggatgacgaaggattgacgttggatgcttttgaacttggtccggcggttgcggcagttgaaactggcacgctgaaccgagcggcgtcactgctgattcaggctggattcaactcaaggcttgctgcaattaaggctgtaaaggactccgacgccgatttcatttcaggccggggacttcgtgagtggttaagatccgaccttatcgttgcttggggcgagcttccagactggccgactccagaaactcacaggatgtggattgattttacacgagtaacaaaccctgctgacgatcagacatggagccttcgtcggtatactggtacagtaaaatggattggcgcaatacctcaaccgctaacaccacttcatttctatcagttggatggggtcaattatctgctcgcagaagacggcaggccacttgccagcattacaggtgcgatcaatacaaaaaggaaggggctgatgcgggttacagtgggaaaccaatcgaacatagaggtggactacctggggcctgacgatattgcggcccaaagagagggctga

SEQ ID NO: 58078 - DNA, 798 bp, Streptomyces canus
atgttcggcaagtggctggagcaggagccggtggagcagccggagggcgagctgcactacgaagccctcgtcgagtccggagaactcggtgacgaggaactgatggaccagctcggccacgatgtggcccgcaactacctcagccccagcgagctcgcgctcgtcttcgacgacctggggtccccggaggtcgccgactacctgcgcgccaacaagttccccacccgggtcgcggtgcggcacggcgacttcggagagatcgtcaccgccgccctctaccggagggtgcgccgctggtgcgtgccgattctcaagctccgctataagcagaccccgaaccaggccgtacagggcacggacgtactcgccttccgcttccgccagacgcctccggtgatcgccgtgcccgaggtcaagacccgcgccacacgcaaacgggacctggggaaggaggcgtacgacagcctggagaaggtcctcgtccgcttggacgagagcattcacttcgcgatggtccgctgcgctgagcgcgaccaccagttcctggtacgccatctcgccggcctgctgcgccgccccaaggaacgggtggtggagcggcacatggtcttcgtgcacgatgcccaggcatggaaggacgacgtcgtcgacatcctcgcgggcgtggtgacccagcccaccgaactgacggtcgtcaagatcagcggcctgcaggcgttcgtcgcccgagtcttcgaagccgccgagaccggcgccggcccccgtcgtaccgagaccagcgaggacaccgcggcgtga

SEQ ID NO: 58079 - DNA, 3600 bp, Streptomyces canus
gtgaaggactacaacggcaccctccaccggctcggcgaggaagtgctcaccgacggcgacgccgccccgggtctgcgcgcccagctgcgctcgcacgtcctgggcgaccagatcagcctcgaaggcgcccccgtcgcctacacctacgacctcgacggcatgcgcaacggcctgaccctcgcccggctgggccagctcacccgcaccccgcgcgaacgccgcacagatcccggcccgctgaccgagatcgccgaggcgtacgccgacctcgccgaccggtacgaggccgcgcacccccagcgcgtggaactgctggcgatcgccgcgacgatgtggagcctggccggctaccaggccaacgccgccaccctcgccgtcgccttcacccgcgaggcacggtccctgttcgccctcggcgagaacgaggtcttcgagacaccgaccacggcctctccgtaccggatcgccgaactgaccggcgccgtcctgcgccgtgacctcgacgaggtctcgcgcctgggccagcagaccgccgacgaccttcgcggcctgggacagcggctcctgggggaaaccgccgagggacgtgccgatgtggcggacgccgccgtgctcgccgcctacggcctcgccggacgcgccgcacgcaacctcgccgccctgtggcgcaccggcaaccgggccgccggccacacggccgtcgccgacctgcgcaaggccgcctccatcctgctggacgcctcggtggccgacacctggaccctgatcgactccctcgcccacgtcgccgaggacatcgtcgccacctcgccctggctgctgctgcgccgcgcggccacctggggccgcctgtgggagcactacctcaaggccctgatcgtcgccgagcggcccgtcatccaggtatggccctcccaacgcgccgccctggacgccggcctggtcgacgccgcagcacggaacatggcggtgaccatgcccacctcggcgggcaagacccacatcgccgagtgggccatcctgcacgccctcgccccccggcccggcgacgagaaccgctggtggctcgtctcccggctcgccgtctacgtcgtccccacccgagccctcgccgcccaggtcgagagacacctggccgagagcctcgaactgctcggcctgagggtctcctccctcttcggcggcgccgagcacgtccgctacgagatgcaactcctggacttcaccgacgtcctcgtcgtcaccagcgaaaaactcgacctgctgctgcgcaacatgcccgaactctcctcgcgcctcgccctggtcctcgtcgatgagggccacgccatcgaccgctccgagcgcggactgcgcctggagatgctgctgacccgtatccgccgcaccgccccggccgcccgcctcctcctgctctctgcggtcctgcccaacggcgaggacctcgcccgctggctcgaccccgacgccgacgccaccaacctggccaagatcaactggtcgccctcccggctgagaatgggggtcttttcctggcgcggccgcgaggccgacggacaacagggcgccatcgactacggcaacggcggcaacggcgacttctttctcccccgcgtcctgacccggcacaagaagcgcgtcaacctcttccccagcgcgcccaaggacgtcgccgcggccctggccctgcacttcgaccggctcggccccgtcctcatcgcccagcccaccaaggtcaaggcccgcgccgcagccaaggcgctgggcgaggcactgaagaaacagggcgctccgaaactcggcaccgcggacggatccttcagcgccgaggtcgcacggcgccgcctggaagcctccgccgagatcggccggcacatcggcaacaaccacgagctggccctcatggtcctcggcggctacgcctaccaccacgccgaggtcccccaggccgtccgcaactgcctcgagcgcgcctaccgcaacggcgcgctccgggtcctgtgcgcgaccagcaccctgtcccagggcatgaacctgcccaccaagaccgtcctcgtcccggacacctggcgcggccagggcgagcgggtcagcgtccgcgacttctggaacaccgccggacgggccggccgcgccggccaggagaccgagggccacgtcgtactgatcgccaaggactccagcgccgcccaggaactacgccgtcactacctggaccgggacaggatcgaaccggtcgtctccacgatcggctggctctactacgaactggtcatcgcccgtctcggccaccggcccggcgccggcgaggacctcacggcgctggacctggccgaccccgccggcgggaaactggccgagtgggccgagggactggacatccagctcctggccctgctcgccgaggaggtcgtcgacacccccgaccagcacctcctcgagcaggccgcccaggccctcctcggcgacaccctcgccgcacaccaactcggagcccaggactggtccctggccccgctggcccgcttctccgcccgccgcgtcgcagccatcgcccagcgcctgcccgaccggcccgcacgcgccgcgatcgtccgctccggcctcagcgtccagggcggcaccgacgcactcgccgccgccgaacagatccagaccgtcctcgacgtacgccccgaactgctcacccccgagcactggccccacctgcaacgtctcatcctgaccctcgccgccaacgtgcacgaagtccagcgcggcatccgccagaagaaggtcgccgcccccgcactcctccccctggccgccgactggatcgccggccacccggcagccgacctccaccagaggcaccacggcaacctgctcacccccgacatcaccgcgacgaccagcgcgatcgacaagatcatcgtccaggacctcgcctgggtcgtctccgcgctgctccagatcctcgaactccggcgcggcgtccccgccgagggccacctggccgccctccctgccatgatcaaatacggggtcagcagccccgccgcctgctacgcctccagcatcggcatccacgaccgcgccaccgcgaccaccctcgccaccaactgcccctacccggagccgaccttccgccagttcctcgactggctcagccagctcaccaccgacgagatcaccaccctcaccgaccccgacaccgcccgtctcctcatccgcagcaccgaacgccgcagcccccgcgccacccaggccgcgatcctcagcggcaccgggaccttcacctgccctctgcgcggcgtccgccacagcggcaacgacacccacctcgcgcagctgccggccggcacccccctcgacctcgtccgcgaccccggcaacgaggccgacccgaacgccatccaggtccaacaccaaggggtcttcctcggatggatcgcccgggagatcgcccgcccgctcgccctcgccctcgacgaggaccccacaccccacatctacacacagctcaccaccgacgcccgctcgatcgcacagcacaacggcgccgaccagctccacagccacaacgcggtcaccctgaccatcatgctcgccccccggtaa

SEQ ID NO: 58080 - DNA, 801 bp, Streptococcus macedonicus
atgcatagttatataaagtatctaactcaagaagatcctattattactgatgaaggtaagcagattgagattcttcacttagacattcaagatgacccagaaatttttgaagattgggcaaaacaattcagaagaaattattgttctgatgatgaacttgctgaaatgataggttttatgaatatctcccctaaagagtatcttgaaaattttaaattaccctcggatagtggtattggcctttcaacgatgtcaggtgattttggagaaatattagtatctgattatcttcagtatattgaagaatatgtggttcctaggactcgttatgatagtagggtcaataaagatacttcaactcaaggaagtgacgttctaggatataagcaagattcttcgaatgtatcgaatgatgaggtcgtagttattgaagtaaaatcatcggcatcagattctagtagctctaaagcgaaaaataagcttcaagaagctattaatcattctgataaagattttgaacgattttcaacctcaattgtagccagctatttaaggttaaagaaatctaatagtgatcaagcaaatgtagtagaaagatttttaaacataacggataaaccatttaatgtaatctatggagctgttgcagtctactccaatcaatcatatgatattgatgttatcaagacagtagtttcaaaaaaacacagagattttcagaaattacgaatattggtcattcattctgatgaattaatgaaatttattagagaactttattcgaaagcgagtgaggtatga

SEQ ID NO: 58081 - DNA, 3070 bp, Streptococcus macedonicus
atgatagaatttgggagaaagtcattatatttttcaaaattagtgcgttcaaaggcaaagatgattgaatttgatattcctttagaaagtcatattccaatttcagaggatgctcaaaaatcgtttcttggggcactagcaattgctgcagatactgctaggaagtattttgaagattatatcaatcataagagttttgattcacaattaaaaaatcaattacacaatgttgctgaatattttgatgcattgctggtgtcaggattaggaaattcagctgaatatcaagactatattgcaatactaggtaccacagcttattatctaggcgattataatggtagttcgagagttatggttaactacatatcggatgatatgcacttattagaagagagtataactcttgtaaaagtatttattgacgttataacagataaactctttttgaatcattcgccaatagaaggtaaatactctagtgagttaaatactctagtggaatcatatagaaattatattttatcaaaaactgagttttctatagatatttatagagatttacaagataaagtatataggaatggaagtgatttttctgtaattattgtaaattgtctcttagcagttgtatgtaaaaaaatagatagttcatcaacgaaattattacctgaattttcaggattagatttttctttatggcaggattatatacaatcaacaggaagcataaaggagctttggccatctcaaattgaattaggaaggaaaggaatgttttcaggtaaatctggaatcgttcagatgccaacaagttcgggtaaaacagcctcaatcaatctaactttaagatcagcattttattcaaatagaattgataatgcattgattgttgcaccttttagagcattatgtagagaaatatatcgagatattaatgcacatttcgttgatgagaataatgtgattgttagtgaagtttttgatttaccggagattccacaggatttctcaatttttaatgatggtaaaaaaagagtttttatacttactccagagaaattattgtttttattgagaaatcatcaaagttttattgatgaaataggactttgtatatttgatgaagcacatctttttgatgatccaagtcgtggaaccaattttgaattactgttgtcaacggttaaacaaattttcccaaaagaaatacagaagattttaatttctgctgtaataccaaatagtgaagctataaatcggtggtttaacgaagatggagtaatcgtttctaataattcgattaaaacaacagagaaaagagttgcgtttagtgatttaaacgggagtaatgagcaattatatttcatagatcctattacatttgaagaagaattttttgttccacgtactgttggtgttagtgaattagagcggcttggaaaagaacgcaaacaaaaagtatttccagaactgacaaacgcaaatgatataagtatttattatgggactaagctaattaataatggtggagtaggaattttttgtggaagaaaagacacggtcaatgttgttttacgaagatttatagacttaaataataggaattatgatctaactgatttcttaaaaaactcagataggtctgaagttgaaaaaataggaaatttaattggtcaaaatttaggatatgatagtgttgaatatacaagtagtcagctaggagttttttcacatcattcaggtatacctatggggatacgcattgctatagagtatgctttttcaaaaagtaaaataaataacgtagtatgtacttcaaccttagcacaaggtgtaaacttacctattaaatacttgattatctcaagtgtgtatcaagcaggagatgcaataaaagttcgtgattttcagaatttgataggtagagcaggaagggctggaaaatatacagaaggaacaataattttaacagagcccaatatttataaatcaccaaaaaataagtggaaaaaacaaaactatgaagcattgttaaatcctattaatacagagggttgtcaaagcaatattctcagtattatacagtttaaatcagtagttcccactgattatcgattcgaacctataaaatttgattattggagtttgattaaagagaaatttgacagttctgtagactacagaacaaaaataaataatattttatcagaattaaaaggacagaacagtccttattttaaggattttaattctaagatagatcagattgataataccctaattgcaattgaaaattatattgcttctatgtatgctactgaattggagactgatagtttagctgaaaatacttttggatatttcttaggtaatgaagaggagcaagaaaaaataaaagaattatttatcttgataaaatctaaaataattaccagtttagtagaaactgaaataattgcaaaaaactcaattggattatatcaatctgagttattaaatgaatgggttcaggaaaataaaacttctatcctttcttgtgagaaggaggaagatttattaggtgttttaactaagataataatagatctttcaaataacaaggcgatgagaaaattaagtatagaaaatctaaattatatttctcaactctggattaagggtatttcttattttcaaatattggaaagttgtactgaaaaatcaattagtattgagaaaagaggtaagtcaaaaccaattgatatgtctgacataatctcaatttgtgataatggattagggtatgaaacatcaatggttttaaatgcgattaataatattcttgaagaactagttggagaggaattggacgtattgactatgttaataaagaggctgaaatatgggctacctctggaaaaagaaatcaatatctatgaattaggtttttcagatagaattgtggtccaagttattggtcaagagattaattctgtaagtaagaatcaaattagaaatgaaatcaaacggaaatcagctagactagaagataaattgagtgattttccaagttattatacacagataa

SEQ ID NO: 58082 - DNA, 810 bp, Shewanella baltica OS195
atgccatggactaacgaacacataaagtggctccaaaatacgggaaatgtcctggtattagcatgtggacgggaggcaaaggtctttcgttttaatcatgatgttaatgatcaaaaaaaaatgagtgcatgggctaagcacttcaggaatcattattgtaatgatgctcagatcgatttgcttaaggctacgagcctgactcgtgcagattatctactctcaatgaaatttcctagtgcttctaaagctccaggcccgagtattcgtgctggtgactttgcagagattcttgtggcagattatttaacttatctacataactacactgttcctagaactcgttatgatcgaaaaggtgtaccgaacgaatccacgaagggttcagatgtgttggcttttaagcaaacgataggaaagccgagcgatgatgaactgttagtttatgaagtgaaggcaaaattgagccctgggggtaggtctttacttcaagaggctatagatcattctgcgaaagatgatctgcgcttagctgaatctctcaacggtattaagcagcgtatgattgaccgaaatgaattacaaagtgttggcatgataaatagatttcaagactctgttaatcagccctataagttgaggtttggtgcggcagctatatgttcagatagtgcgtacgatacagcgatactatctggtgcaagtacaacagaacatccttatgctcaaagcctagaacttctggctattcaaggaagtgaactaatgtctcttgctcacgcactatatgagagagctgcttatgaagtttga

SEQ ID NO: 58083 - DNA, 3195 bp, Shewanella baltica OS195
atgagagagctgcttatgaagtttgagaataaatcttcgaaacttttttccatcactaagtcgaaagccaaaatgtatgagtttggcttagatgaagaacaccatatccatttagcagaatcacctacgaaactactgttaatgacaattgggataataggtgatttatgtcgtgaagagctttcctcaaaaaaagatattactctttatgagcaaagaaaaggagaactccgaaacgttgctcggtatttcgatgctttaattgagtcaaagttgcaaacaaagcacgactactacctcagtttattaggaactacctcgtactaccttgctgacatgccgggtagctcttctgtgttatcaaaaaagctagaacagtcacgagtactattaactaaaagtggtgttgaatttgtacttgagtatgtaatcaattttcatgagcgacctaaaattgtgattgttgatagtgacgatgtaaagttccatctattaaatcccgagcacttgccttttcctgatttacctatatttatgcagctttttgagtcactaaatcgttttttttatccgaaagcgcaggttgagttcaatgaagaagaagagaagcggcatttttcatggatagttgataccattctgaagtacttctttgagaatggttcggatagagagctacttctttctcaaatattagctgctgttattaaaaagagattgaatagctcaacaaaaatgttgttaccaaggtattcaggattggattggagtcactggtcgtcagtgtcgttgaagccaacatttatcaaagaattttggcctgctcaaaagttgcttggagatgcaggtgttttcagtggtaagtccgccgttgttcaacttccaacaagtgcgggtaagaccaagtctgcagagttaatcattcgctcgtcgtttttgtctggtagggcttctgttgcagtgatcgttgcgccatataggtcgctatgtagagaaatcagtacttcattatcggcggccttcaccaatgaggatattctggtcaatcaattgaatgacgtccctcaaatagacaactttgacgttgagttattgcttcaattatttggacaaacagatactaacacaacggattttcctactattattgtcgctacaccagaaaagttagtgtatttactacgccataaacccgagctatcagaagtcatttccttggtgatatatgacgaagggcatcagttcgatacaggcagtcgaggggttacctatgaattgttgctgactagcttaaaactagacctaagagtcggaacgcaacacgttttgatttctgctgttctatctaatgctgaatctattggtgactggttgtatgctgggaacggcactatagtgaatggagctgaattcctgtcaactgagcgaagtattgcttttgctagttggataggaggaaggggacagtttcattatgttgagccgtttgacataaataaagaggagttctttgttccccgtgttatggagtctttcgatatacctaaaaaaggtagagatctaaaacaaagggtattcccacctagaggtgataagacactagttgctagttatttagggattaagttatcaaaacatggctcagtggccattttctgcggtaagaaaagctcggttataaagatttgtcgagaaatagttcaacctttagaacgtatcgaacaacttcaagcaccgattgaacatagtgaccatgatgagattaataaaatagggtatttgtctgaattacatttaggcggaaaatctgatgtaactaaagcgataaagttaggggtactaccacatagtgcaaatatccctaatggtttgagaatatcagttgagtttgcgatggaaaacggcctagggcgctgtgttgtatgtacttcaactcttgctcaaggagtaaatctccctctaaagtacctagtcgtatcaggtttgtttcaagataaaaataaacttatttcaacgagagattttcacaatctcttaggaagagctggtagggcaggaaaacatacggaaggcagtattatctttgcagatacagagttatttgatcaacaccgtatcctgaaatcgaaacactggtctcaaatgaatgatttgcttgacccttctaattcagaaggttgtttgagtagccttcttagcttggctcagccattatctggtaaggattactatatcacacctatggatttccttaagcaaccagataactatcaaaagcgttgtattgaattaattagtgagggagaggattattctgggttacttaagcagatgaaacagagaattggttatttagaaagtcttgagagtttcttacttgctaatttaagtactgatgaaatgcttgatggcgaggcattaactgaactttacagtggcacttttgcttttagccttgctagtgatgaggaaaaggaatacttagctcaagtatttagggttgttgcgaatagagttaaacaagttaaaccagaaaagcgctcacactatggaaaagcattgctaggaattcaggaactaaattatctagaaaagtggttgagtgaaaatctcacagtcttcggtgaagaatctagtgttatagatatgctggagcttttatggcccgtcattgataatttagcaatgaacaatagtttaggtaaattgataggtaaagatgcaagtttatctattgccaagctatggtgttcaggtgtttcttaccatgagattttattgcaatcagatatgttcggttacaaatataaagctggcagtaaacaatggaaattaaaaaccgaaaatatcaccgatatttgtgacaatagtctaggctatgaagttatgttggtagttggcgcaagtgctgatttgttagaaaacctatttggaaatccattatttacagctgttgttagacaattacagttgtccttgcgtatcggagttagtgatcgtcttgctattgagctattttcgctcgggctcgctgatagagttgtagcatcaaccatttcagagatgcttagaagttctggagtcgtgataaaagaatctggaaagaagattattacaacacatagacaaatcattgaatcggagttacgtaaatatccttcagtatttatcgagtctctttatggaaatatttag

SEQ ID NO: 58084 - DNA, 846 bp, Legionella waltersii
atgactacgaaaaataatctggttgctcactcattggaagaaagtattcttggtactcatccaagtgatggcttattcggctgccatacaattgcaagtgaggggtatactcaatcaaatgtacttcacagagcactagatatggaggaagctaatagtagtcaaatggttgcccaattaagaccagccttaataaaacaccatgccgatgaagacaagatttctcgcattaagcaacagttagagaggcttggttatgattattcaaaactctctcttagcccatttccaacaaaggataaaactcggaagggcaatttagctgaaatttttttagccgagtatattacagcatctacaacttttgacctcccaatttatcgtttacgctttaatcctaatgttgagcaatcaatgaaaggagacgatctccttgcgtttgactttagcaaaaaccccataaagataattgtgggagaggctaaatatcgtactaatccagataaaactggcgttcaagatatgatcaatgcattggcatcatcgaatcatgctgggatacctgcatcaatacaatttatagctaaccgcttatttgaaataggaagagctgatcttggccaacaagttgaaagttgtgctgaaggaatagtaaatggcaaacatgacataatgtatgtaggatttatgatgagcagcaacaattgtaaaaacaatgttgataaacatactgagtccttattgccaaatctagctgtattatctttttcattacgaaatttaaatcagttttatgaagactgttttattcaacttgaggaggaagcttttggccctcccaaatga

SEQ ID NO: 58085 - DNA, 3333 bp, Legionella waltersii
ttggccctcccaaatgaagtttcattgaatgtattgaaagcacatgatacaaaatggattcgcaatctttttgcacagtccagtgcaagttatgttttgcaggaagttaatgaaaaccacaataattttccacaatttgatccactactaggggagaaagttactacctctgcctatgctatacttgctgctggaatcagcctacatgaaaaacaaccctcattacaatcagctgctgcgataaaggaggcagcatcacttttaactaacattcatagttcccaagctaaagcagagaaggttagtagtcatcatattttaattgctgcgatggctttttattcgtgtggtgaatactcacgctcttttataactatatcctcggctaaatttacatccattacagctataatgataagtttgtttttaaggcgagataggaatgaattgatatcctttcttaataaagtattttttgctaataaagaggaaattacctgtatttcaatggtatgtgaacccgctgttgaattagctgtagcccaagcgctatcccaagtacttttatttcagatcacaggagataatcattatcttgattcggcattagatgcaattgatgcaggaatgaatatagctgctgaattgatgtcgcctacactttggtggattgctcgcttgttgaagcttatgctaagaaatttggggaatggatctctttggaagtgtcttccaccatttttccaggatgctccagatatacttcgacaatatattcaactatctgcatttttaccaaagcctttagttgaattgtggaattcacaaataagtgctcttcctatcgttcttgatctggataggtctggtgctgtagttaatatgcggacaagttctggtaaaacaagaattgctgaattagctatacttcaaactcttgcacttaatccacaagcaaaaatactatatattgcaccttacagatctcttgcactagaaattgaacaatccttgtgccagacttttgatttgttgggatttcatgtttcacatttatatggtggctttagatttagctcagctgataaacgtcttgctaatgatgcgtcaatcacaattgcaactcctgagaaaactagagctatagttcgtacctttccagaattactagaagaatttaaacttattattgtcgatgaaggtcatttaatcggtgttgatccacgcctagtaaaaaatgaaatttttttagatcacctcagagttgtagcacattccattggagcaaaaatgcttcttctttctgcagtactaccaaatccagctgatttagctaaatgggttactgagtctccaaccaatgtagcaaaatctgaatggaaaccgtctgctgagcgttttggacttctcctatgggatgggagtcgagtgaaaatagaatggaaaggggagtttgaatgctttaatcctaattttgtagagtctaatcctattaacttaaaaggacgtcgtcgtcattttcctggaaataaaaacgaagctattgcggctacagctatacgtctctcatccattgggcctgtaatgattttttgtggcaaaacaaatagtgtttcaactatggctaaatcagttttaattggattgggtacgaatccaaatattcatccttggcctcagtatgtttgggatgtatttgcttcttcttgtcaggaagaattaggtttagatactattgagtataaggctgcacgagtagggataatttgtcatagtaataaactaccccctttagttcgtatggcaacggaaaagttgatgagatctataccacccaagataatcatcgcaacaagcacactagctcaaggcgttaatattggtatatcaagtgtaatcattgcttcgccttacattgggcggaacgcgattaatcatagtgatttttggaatatatgtgggcgtgcaggtagggcttttgtcgataatgagggaaaaattctttatacaatagatgagacggataaacccagaaaaattcaaaataataaaaaaatggctgaagcctacttcaatatggtcaattacgaatcagttcgctctggtctgctttcatgcatgataaatatcagaaaaatagctaattcggctgggatagattttgaaacgctattagggcttgtcgccgagaatgatttttcaattttcggtgagaatcaaaatgcatttaattctttatgtagtatgattgatgatgatctattagccataatagaagatcaaaatgtccaatctgaagaagatgatccgctgcatacaatcgatcgggtatttagagggtctctagcggctatccaggcccagatctacggcgaggggttggacgaaaatgaggttgtgagtattttgcaacacagacttttttatttaataaataattgtcctgataaaagtgagcgtcaaatttgtgtggcttcgggtctgccatataaatgtgcaaaaaaactatactctgatcatttggaattgaaagcaaaattggatgaaatgtttgttgatggctatgaactaaataaattttttgcgtttgtggagtggattgagagctgggttcggtcgaatggtgagcagattatcgatgggaaatggccagaacaatcagaattcaatcttatacggaatgggtggattatcggaacaccattatatgaattaactaatttatctaaaaatgcactaaaaatatgtaaagacgtttacggttatcaattaccatggattatacatggagcggctcaaatattagctaaaaaaggctataaagaagactctgatgttttggatgcccttgcagctatgttggagtttggtttacccaatccaatagcagtaaatatttttctagccggaattagatcacgagttgtggcatgtgaattagtttctttaaatgaggaatgggaatcaactcctgctgctattagaaaacaattatgtaattccgaaatagtgctgcgtattacacctcaaatttcagataatgctctctcttggttgagggttttagaagcggatacaactaaatcagaggttataattcctacctttcctacttttacgttaaatgattggaaagactctcctgaacgaattatagtaagaactttcgatggttcaacttatctgtgcacacctgatggtcgacaattcatggcagttaaaactaatgaaaaatggccatttgatactatagcagatgatttgcgatttgcatttatattaaatgatggtacttatcatttagaaatccttgatccacatcaaactttataa

SEQ ID NO: 58086 - DNA, 714 bp, Mesorhizobium amorphae CCNWGS0123
atgacgggccggccggcggactcggcgaccggtatacaggtgacggccacggctctgccggtccactacgccgccgaggaacgtatcgccggcgcgcttgcgaggctgggcaagcctgccgccgcgaagatgatcaccgatcttctcccgcagacgccgcagatccgttcgggcgacctcggcgagatctacgcaaccgagtggatcaacgcgcacagcggctaccgcgcgcccatcaagcggctgcgctggaaggatcaccgcaacatggcgatgcgcggcgacgacgtcatcggcatgatcctcgatcccgcaacgcagcgcctccgcttcctgaaaacggaagcgaagagccgcatcgacctgcgtgcccagacgctgcaggaggcgcggatcggacttgacaaggatggcggccttccgtcgtcgcatgcactgtccttcatctcggccaggctgatggaattgggcactgacgcgccgcttgtcgacgcgatcgacgaggcgctctatcggcacggcatcccgcccgagagcgtcaagcatcttctcttcaccttctccggaaactctccgcacgcgttgctgacgcagtcgctgcaggcttaccccggtccgatcggacaatggggtgtgggtctgcacgtcgatggccatgccgcgttcgtgggggccgtctacgctcaggtcatcgccgatgccaaccagccctga

SEQ ID NO: 58087 - DNA, 3519 bp, Mesorhizobium amorphae CCNWGS0123
atgccaaccagccctgaagcgatcatagccgccataacggaagcgacgacgacgggcttccgcggcaggctcatcgcgcggggccaggcgcgcgcgatgatctggcgcgacggcgttcttccccctgaagcgcccgccttctcgccgcagctcagcttcgacctccatagctacgcttatggcttgcttgggttggggctgcgcctcctcgaactcaatggcgacccgacccaagcacgcatcgcgttcgaacaggcggcgaccgcgctcgaggcggttatggcgaaaggcaatcgtgccgaggcggatcgcgatttccacttcgtcatggcggcggcgagctatcatctcgcgcacctgtccgcccgggcctactccctcctcgcggtggtagcggccgagggcaacttctcccccatcgaacaggcgctcgcgctgttgatgcggcgagacatcaccgagctgcgggcacgcgtctatgccttccgcctggacggccgaggatcggatgcgactattgcgacgctgctccagcagcgccttgccgagccggtggccgacgcgccggagcgcaatgggcaggacttcctcttcgagggcctcgacctcgcactgaccgacgccttcttcggcgccttcgccatgttcctgctggcgctggatggcggcgagagagccctggtggaccgagcgatcgcgcagcttcgccagaacctcgacatctgcgcagagctgaaccttctgccgcaatggtgggtgcatcgggtcaccatccatctgctctccgatctctgggcgagcaccttccacgaaaaagtgcccctgttaccagcgggtggcgctgcgcccgcctggcccggccttcgcgagctcttcatcgccctgctcgcgcggcgcccgcgagccgaggtcgatctgtggccttcgcagatcgaggcggcggcgcgcgccgtcgatcagatcgacaatctcgttgtctcgctgccgaccagtgccggcaagacccggatcgccgaactgtctattctaagatgcttggccggcggccgtcgggtcatgttcgtgacgccgctgcgcgccctgtcggcgcagactgaaaccacgctccagcgcaccttcggcccgctcggaaagaccatctccgccctttacggcagcatcggcgtgtctggcttcgatgaggacgcgatccgcgagcgcgatatcgtcgtcgcgactcctgagaagctcgatttcgccttgaggaacgctccctcgctgctcgacgacgtcggccttctcgtcttcgacgaaggccatatgatcggacctggcgagcgcgaggttcgatacgaggttcagattcagcgcctcctgcgtcgccaggacgccaatcaacgtcgcatcgtctgcctgtcagccattcttcccgatggagaccagctggaggatttttcggcgtggctacgctgcgatcaggttggcggacccatcaagcacgactggcgtccaacgcgcctgcgcttcggcgaggtgacctggaattcgccgacggctcgcctcaaccttcgcgtcggtgaggaaaaacccttcgtgccccggtttcttaccggtgcggcgccgccgttgttcgttcctccgaaaaagctccgcacgcggctcttcccagacaaccagccggagttgagcctcgcgaccgcctggcgtctcgtcaacgatggccagacggtcctgatctattgccctgagcgccgaagcgtcgagccgttcgccaaggtcatcgtcgaattgcactcgcgcggcgcgctcgcatcgctgctcacggtcgatccgaccatgttgcgaaccgctatcgcgctcggggaggaatggctcggcgtggacagcgacatcctcaaatgcctgcggctcggcgtagcgctacaccacggggcgttgccgaccgcctatcgcaaggaggtcgagcgtctcctgcgtgacggcgtgctcagggtcacgatctcatcacccaccctggcccagggcctgaacctgtcggcgaccgcagtcgtcatgcattcgctctatcggcatggcgaaaagatcaaggtctctgagttcaaaaacgtcatcggccgcgctggccgcgcttacatcgatgtcgaaggccttgtcctctatcccatttttgaggacacaaagaataagaagcacgacgagtgggtcggcctgatcgaggatgtcggcgctcgcgagatggagagcggactcgtccagctcatcttctcgttgctcacgcggatgcacaagcgacttggcggcaacctcgaccagctcatcgactatgtcgtcaacaatgcggcggcatggaccttcccggaagttgctggcgaaaaggccgacaagcgcgagcgagcgctgaacgagtgggagcgccatatggcgacgctcgataccgccatcctcagccttgtcggtgaggccgacgtgccggatgaccagatcgacgccgcgctcgacaccatccttcagtcttcgctctggcagcgtcgcctgctgcgcgtggacgatgcatcgcgcgccgcctatcgcgctacgctcctcacgcgtagccggtacatctgggcaaattcgacagccgcgacgcgacgcggctacttcctggctggcctcggcctcgaagccgggcgcgccctcgacgccgtcgcgcccgaagccaacatgctcctcatccaggcgaacgcagcgttgatggagtcggaccatgaagcagcgatcgcggccatcaccgggatcgccgagcgcgtcttcgccttctacccgtttgaacccgacccattcccggacaactggcgagacattctgcgatgctggttgctcgggcaatcccttgtggggactgttgccggtagggaagcagagacgttgcaattcatcgagggcggtctggtctatcgcctgccttgggcgatggaggcactgcgcgtccgtgccgccgccaacagcgatgtcgttggtgtgttcggcctgtcactaacggatcatgagctgggcctcgcggttccggccgttgaaacggggacgatgaaccgctctgcttccatcctgatccaggccggcttcaactcgcggcttgcggccatcaaggtcgttgctgacatcggcgccacattcacgaccggcgcggaattgcgcgcttggcttcgctcgcctggcctcgcggcatggtcggcccaaccagagtggccctcctccgagactcgcggcatgtggctcgaattcatccaggaattcgcgccatccgacaatcggacctgggcgcggcgagactatctcgggaacgtgcagtggttcgctgcaccggcgcccccggggacgcccgttagcctccatcatcgcgacggacagccgttggtgctgacgcccgacgggcgcgcgatcggcctgctgcaacacccgctcaatccaaatcggcgtggtctcgtgcgagcaagcgtcgctcaaaatgtcgcccagctcaatcttagctatctcggccccgacgacttatggggggcctag

SEQ ID NO: 58088 - DNA, 783 bp, Thauera terpenica 58Eu
gtgggactgtatgagaggtggtgcgagtccaccaaagaaaaagacaagcgcaagcactattggacctatgtcgagaaggatggcggccgcgacgagatcagcgacgacctcgccgaaaccatccgctcgcactacgatcgcctcgaacgcatcgccgaggatgtgaagcgactcggattcgaggtggctagtgaaatcctcagcaccgcaatgcctcaaacgcccaagggtcgatccggcgacctcggcgaaatcctcgcaaccgaactggtcgaggaagaaatcggccttcgcgtccccgtgcgccgcctccgctacaaggacggccgcaacatggccatgcgcggtgacgacttcatcggcgccggatacgatgcggccggcgaaaagctttggctcctgaaaggcgaagccaagagcaataaggcactcggcaggaccaccgtcacgagcgcccgcaaggtacttaaccgcgacagcggccgttgcacgcccgattccctgctgttcgtcgccaaccggctgctggagagcaacacccctgccgacaacgaattggggcgcagcctgcgcgacgaggtcggcttgaagtcgttgagcgccgatcgcatcgaccacatgctcttcaccgtttccggcaacggcccacacgcctcgctgaaagaggatctcgacgccactggggccaaccgggatcattacgtcgtgaatatccacgtcgaagaccaccaagacttcatcgcagccatgttcttggaggcggaagaccttggagacgactga

SEQ ID NO: 58089 - DNA, 3504 bp, Thauera terpenica 58Eu
ttggagacgactgacgagttgaccgccttcctggcgaccgccaccgctgacggcatcctcgggcgcctcctctatcgcggcgcggcttggtcgttgatgcgcgaagagggcgtgctaccgcaaaacgcgccgccgcttggcgcaaccatcgaaaccgatcttgccgagcacggcttcgctgtgcttcgaggggcgatggccttacgcgctcaggatggagcttcggacctgacgggcaaggccttcgagcgagccgccaacgccttcgaagccctggtgcgcaatggtgaccctgacgcgcccgatcgcgggttccgccgcaccatcgctgccgcggcctaccatctggccggcttttcggccgttgcctattcgcttttcaacgagacggcggaagacctcaacacctcgccgggcgagacggcgatccgacacctgatactgcgcgatctcgaccagctgcgcggcttcgttcgcgaatggttggacgacgaggctcacggcgatgagcagatcgccgaagcgctgcggggccaagaccctgacgtcgacgaggcgctgtcgaccatcctcaacacaacgatctgccgggccctggcgttttttgacttcgcgctggagacgggcgaggtcgagccgatcgaatccgcgcgggacatgctcgacaccgccgtcagcctggccgacaacgctgagaacgtccctctgtggtggatttcgaacctttgccgccatctgatcgacgatctgtggcagcactcgctccatcagaatctgccgactgagccgcccgagggtgcagaggaaaagtaccccgacctccggcggctgttcatctcctcgctctacgcccgcaagacctcggaggtggagctatggccctcgcagcgcgaagcggcccagcgctccacggacgtttcggacgacctggtcgttgccctgccgaccagcgcgggcaagacgcgggtggcagagatcgccgcattgatgaccctgtccaccgaccgccgggtgatgattgtcactccgctgcgcgccttgtcggctcaaaccgaacggtccttcaggaagacgttcgcacccctcgggttcggcgtctcctcgctttatggtgccagcggcctttcggccggtgatgaagatgccctgcgcactcgtgagatcatcattgcgacgcctgaaaaactcgacttcgcgttgagaagcgacccgtcgctgatcgacgatgttggcctgatcgtcctcgacgagggccacatgatcggtccgagcgagcgcgaaatccgctacgagacgctcgtgcagcgcttgcttcggcgcacggacgcggtcgaacgccggatcgtctgtctttccgcgatcctgccgagcggagacgaacttgacgacctcaccgcctggattcgttccgacgaaccgggtgagccggtgcgttccgactggcgtcccacgcgccaacgtttcggggcactcacctggcgcggcaaagatgcactgctgcggcttgacctcgatgacgatggtcccttccttgacaagttcgtcgtggaaaaacccccactcgggcgggagaagaagccttatccgcgcaagaactcgcacctagctttgttcgcggcgtgggagttcgcaagccagggcaagcgcaccttgatcttctccacccaggcgaactgggtcgaaagctacggaaaacaggtcgtggacctctgcaagcgtggctatcttgactcgctgatagataacgaggcgccgatcgcccgtgccctagaggtcggcaaggaatggctgggcgaggatcatcccgccgtggccagcttgaaggtgggcgtcgccattcaccatggccggcttccgagcccgttcctgcgtgaactggaagtccttctgtccgaaggagtcgtgaaggtgatcgtcgcatcgccgacgctctcgcagggcctcaacctcaacgcagccgtcctgctagtgcccgcgctgtatcgcgcgggcgagaagataaaaggcgaagagtttgcgaacgtggcgggccgcgccgggcgcgccttcgtcgacgtcgaagggctgatcgtccatgtcatgttcgatcgggtcaactggcgaaagagcgaatggcgcggtctggttgcctccgcaaaggcccgaactctgaagagcggcctcatccagatcgttgccgagatccttgagcgcctgtcacgcgagggcgtgctggatcgcgacgacgcctgggaatatctcgccaacgcccgcgaggcctggagatcactcgacgaggaagccgaggtagccgagcggctggctggtgccgtggaatacgacgccgatgccgatgccgatgacgaagacacggacgacgaggaagaatccatagacgaggagccgctgtctcaactcgtcgaacgcctcgacgcgatcgtgttcggcctgatcgaagcgctggacgccgaccgcgccgatctacccaagcttctggacgaggcgctcaagggatcactctgggcccgccagattgcccgcgaggacgacgacgtcgcccccttgcacaagaaggtattcgaagcgcgcgctgacctcatctggaaagccaccacggcggaggcccggcgcgggcatttcgctatgggcgtcgggctcgaagcaggcctcgccatcgacgccatggccgacgagttagccgaattgatcgaccgggcagaccaagcagcgctgagcggcgacattgacgcgctcgtcgacacactcggtggtctcggcgaacgcctgctgttcatgcgccccttcatctccgacaaggcgaacgcgctgccgacgaattggaaagccatcctgcacagttgggtgtccggcgaggaggtctccaggatcggatcgcagaacatgcgagcggtcgaggaagccttcacctatcgcttggtctgggctctcgaagccgtccgcacccgccgcatgtctcttggctggtcgccggagacggtggcgggcggcgcgtcggcggcggtcgaaaccggcgtcccgcgattcatgatggcgatgctgatccgcgctggcctgccgtcacggcgcgcggccatggccgccatcgaggacgccgagccagtcttcgtcaccccggcggagatgcgggcttggctcgaatccgatgaaatcacggcttacacggacgccggcgactggccgacgcccgacacctctgcactatgggcacgcttccgaaccgaggctctcagcggtggcatccagaagtggtccgtccaacgctacaagcgcctgctcgacatcgaggccgctccgcccgctggcctgtaccggatcgtcaccaacgagggggatggacggacctggctggcaacccccgactaccagcgggtcgctgccttcaagaagccggcggtagatcccaaacccagccttttctcgggccgcctgcccggcgatacaaggctcgtggaagccttgcgcgtcggccgcggaaagttgcgctggccgaccgctgatgcttaa

SEQ ID NO: 58090 - DNA, 810 bp, Roseateles depolymerans
gtgccagctccggcatatctgcaatatttgaagcagcacgagtcgctgaccttgaattccggcgaggcttgtgaggtttgggagctcgatgttccagccgatgaggcctgcctgaaggactgggcttggcggttccggcagacgtactgcctcgacagcgacatagacattctccgtcacggtacgggtaaaactcgcgccgagtacctcatcgacctcgtcttcccggacaagagcatcgcgccaggcccaggtgttcgctccggagattttgcggagttgctgatctcagacttcgtcgagttcatgctcggctattgggtgccgcgcaccaagtacgccgagaagagcgttcgcaacgagtcagtcaagggagtcgacatcgttggcttccggtggaacgctcatgggcaccaaccgaccgacgaaatgctgaccttcgaggtcaaggctcagctcagcggaggcaaatacacgaaccgcctccaagtggctgtcgacgattcgggcaaggactatctacgtgccggtgaaacgctggctgcgatgaagcgtcggatgcacttggcaggtcagcacgagcagctcttggtcgttcagagatttcagaacgtcgccgaccggccataccgtctgctctcaggcgcggccgcagttctatctgacgactcgtttgacgctgactctctcaaaggaacgagcatcgctgcccacaataatggtggaagtctcaggctcatcacagtgagaggtagcaagctcatgctgttggcacactacctctaccagcgagccgcagatgaggcctga

SEQ ID NO: 58091 - DNA, 2343 bp, Roseateles depolymerans
atgccaacgagtgcaggcaagacacgctcggttgaggtcatcctgaggggcgcgttcctggctgacaggacccgtgtggcaattttggtcgcgccgttccgcgcgctttgccacgagatagccggctcccttaggcttgcgttcaagggggaggacgtcaaggtcaatgagctgtccgatgcgctccaattggatttcgtggaccagctcgcggagctgctgggcgcggttgcacctgctacccgaaatctgctggtcctgactcccgagaagctgctctacgtgctgaggcaggagcccagcctggttgcgcacattggtctcgttgtttacgacgaaggccatcagttcgacaccggcgcgcgaggcatcacctacgagctgctgttgacggagattaagagcttgcttcaggaagctgcccagaccgttctcatttctgccgtcatcacgaatgcaaccgccgtggggacctggctcattggagccgagccaaacgtggttgacggaaccggactgctttctacggctaggtcggtagcgttcgcgagatgggccgagcagcgcggccaacttctgttctttgagtcgggtgcatacgagcagtccgactacttcgtcccgcgtgcgattgaagcccaagaactgcagctacggggcaaggagcgcaaggtgcgcttcttcccagagaagggcgacgattcgtggaaggacgtgtcgctgtaccttgggattcgacttgctcccagcggcgctgtggcggtcttctgcggacgaaaggatacggcgtccggtcttgccgagcgcgctgtggaggtctacggccgcggctttgcgttgcctccgccggctacggtgtcgaatgctgccgagattcaaactctgacccatctagcgaccatgcatttcggtgcggagtccacggtggctcaggccgccgcgctcggcgtcttcgttcaccatggaacgacgcctcagggcctccgtctggcaattgagcatgcgatgcagcgggagctcatcaagctggtcgtctgtacttcaacgctggcccaaggcgtcaacctccccattcgctacctcatcgtttcaggagtgaaccagggcgaagaccaaatcaagacaagagactttcagaatttgatgggccgggccggtcgagcaggcatgcacaccgaaggtctggtcctcttcgcggacccgcgagttgtcgaccgctggcctgcgcgggactggcgcatgaacgccgcgattgggctcatgcagccggagaacgcagaggcgacttcaagctcgctcctgacattactggcgccattgacgtcacccgaaggcataagcttgcccctggcaaccgacgcgctgcttgcggcctacttcctgcggggtgagcagctcagtgcttgggcggacgaggttgtggcggcccttccgcagtacgggctcaagcaagtcgacgtcatcaaggcgatttccaagcgacagaagttggtcaccgctctcgagagctatctcatggcaaaccgcggcgcggagagcttcgaagagctaacgcctcgagtgcgactattggctcaatccaccctggcccacgctttggccgatgaaggctccaaggcggctttgggcagactgttcgagctggccgccgcccacattgaacaggtgcttccagacccagctcgtcaggctacttacgccaagacgctgttgggcgtgctagatgctgcccgcgttgaggcgtgggtgagtgaacgcgcggagctgttgcgagcgctgacgacaaatgacgagtggctgcgcgcggtatggtctttgtttttggaggtcgtcgataacaagattctcacagggacggagccgcctgaggttccatttcagctggcgcaggggtggatacagggctccacctatcaaggcctcatagcgtttgcgaaagctacagaggcaaccaaaccatggggagagaagcgtcggcgcaaggtgagcgatgccgatgtgttggatttcttggagggatgcttagggtttgactgctcgctggtagtcgccgcaattgggcagttcctgttcggtgcaaccgggctcaactcggagggcacggcatcgttgacggagttccagaaggcgctgaaatacggcctgccaagcaagctggccgtgtctgtctacgaggctggtcttgcggaccgattcatcgcgtacgacgttgccttgtcgctgtcgctcttcggctacgcggggcaccactttatcccggctctcgcagagcatcgagacgttgtctcggaggtgttgcagcgatacccgtcgtatttcaccgatgtgttgcaagggctttga

SEQ ID NO: 58092 - DNA, 807 bp, Treponema brennaborense DSM 12168
atgaattattttaattggttaaaaaaagaaacatcattattgtctgtcgatggaaaaacaattgaaatttattctttaaattgtgatctaaataatgatgccattatgtctgaatgggctactcattttagaaatcaatattgtgatgatgctgaaattgatttactaaaaccaaagaatcaatctagaaaagattatttaaatcaaattaaatttcctgatccatctaatgcaccggggccatcaattaggtcaggagattttggtgaaattttaatttcagattttcttgaattcttagaaaattactggattcctagaactcgttataatagaaaagatattcaaaatgaatcttccaaaggaagtgatgttcttggatttaagttcgcttctactaattctttttctgcagatgatgagctatgcatttttgaagtaaaagcaggttatagtgagactaagggcaattatgaccgtcttcaagatgcagtaaacggttcacaaaaagatgaaaaacgaaaagccgaatccttaaatgcaataaaacaaaggtttattgatttaaaacaatttaatgaagcaaataaaatagaacgttttcaagatccagcagatattccttatatacaagaatatggtgcagccgctctttttgatgaaaatatttttctaccaaccaggattatttcagtagattgtaccgaacattctaacaatgatattctaagattaatagtgataagtgtaaaagaaatgaagactttaattaatagtttatataagagagctgcagatgaagcctaa

SEQ ID NO: 58093 - DNA, 3087 bp, Treponema brennaborense DSM 12168
atgaagcctaagacaaattcaaaaaacttacttagtatttctcaatctattgcaaaaatgatagaattccatgttcctgaagatgataggcaattaagaacatcccagaaacctgaaaagcttttttctatttctattggattattaggagattatgcaagattaattaatacagattatgagaaccctcagaaaaaagaacttcaatcagacttattatactcagccgaatttttggaatcatatgcaaattcaaatttagataaaaatccaatttatgaacttttggtcggggcggcagcatattatctttgtgatctaccaggaagttctcaagttcttataaataagatacacgaaaattacgagtatgaatttaactgttcaaacctcgaccgttttctatattggctattaaaaaatgattatcaaaacattcctgattgggattgtggtatatataatagtcatgttcttattctttctttttattttcaccgttattttaataaatctacagaagaagaattatgtattaatatagcaaattcattcagaaaaaatgcatatattgacggtaattcaagagagttattttttagtgaactgattacttcaattatcattgaaaaaattaaaaattcttgtttaaaacttctacctctttactcaaatcttcaaagttctgtttggttaccaataataaacaatggattatttataaaagaattatggccatctcaaaaattattaggggaaaatggtgtgtttcagggtaaatctgctgttgttcaaatgcccactagttctggaaaaacaaaatcgattgaaataataattagatctggtttctattcagaaagagcttcaatagctgttatagtagcacctttcaaagctttatgttccgaaataacagatgaactacgttattctttttctaatgataaactgatagatataaatcaacttaatgacgcatttgaaaattctgaacaatcattgtttttttctgatagtaaaaagcatattttagttgttactcctgaaaaactgtattatttattatctttggacaagtcaattgcaaatactattggtttaataatttttgacgaaggacatcaatttgataatggctcaagaggtataacatatgagcttttgataactgaattaaaagttcttttaccagaatcttcacaaaaagtattaatttcagcagtaattcataatgcatccgaaatagcaagttggttaatgcctgattccataacaattacaaacagttatgttccaacaaaaaagaatattggttttatcgatttctcaatgagtccttctattagatttattgattctgtaacactaaaagaaaaatactttgttcctagagttcttcctgctttacatagtactcaaaatccattattacgaaatatttcgcctacaaatattagtttatatatggcttttaagatggttacggaaggaagtgttgctgttttttgtggccaaaaaaaatcagtaactaaaattatgagagatacaatttctgctatggatttatctccagaagaattcaatatatcttcattagggaatctagatgaaattaataaaattggttctttatgcaatgaaaatttaggttctgaatcattaattacaaaatcatgtacaaaaggtatttttccacatcatgcagatattcctaaaggtattagagcggcaattgagtttggaatgagaaaaagtctaattaaatttgtagtttgtacatcaactttagcacaaggagttaatcttcccataagatatatgtttgttaataatacataccaagttggcggagaaataagtgttcgagacttcaacaatttaattggaagagttggtcgtgcaggtaaactaacagaaggctgtattatttttactgatccagacatatataaataccgtgatattccatataaagataagcaatggaaaaaaacaactaaattattagatccaaatcaatctgaagattgtttaagtaaaattttggatatccttcaatataaaaatcgatatgggacaagcattcttcattcaactaatgttgactcttttgttaatcaatattatgaatctgctccagaggaatatcaagatattgcttctcaacttataaaacacttcgatttaaaaaatatttctgttaatgatttagtttcacagatgaatgaaaaattacatttaattaaatcaattgaaaattttttaatggttcttggagatgatttatcagatactaatgtagaattagttgcaaagaatactttggcatattcattggcagatgatgaaactaaggaagtaattatccgattgttttcacttatcaaagcaaaaattctttcccaaattgaagatatatctactttaccaatttttgcaaaatctttatctggaattgatgaatcaaaaataatttcatcttggttatcagataatcataattcattaattcaaacatcttccattacggattttatcacatcaatttggcctttaataataggagccaataaaaactcatatttccaattttatgaagataaagcaagcctgctaaatgctttgttattatggattgaaggcaaaccatatttcgaaatattctcgtatcttccaaaactaaaagttaataaacgtgatacacttacaatagaacatgtcattaatatttttgaaaatgggtttggatatgatgtacctattttaattaactgtattactgaattattatcactttatttagaagaagacgaatacaaggaaatctgtactaaattacataattttcaaaaaattataaaatatggattaccagaaactggtgccatattactctatgaagaaggtttttgtgatcgaacaatttgtcaaaaaataaatagtattttaggaaaccctgataaccgttcagaactatttcataaattagtattaaaagatgcagaaatttctcttttattacaaacttatccatcatatttttacaatcattattgtgtcttaattcataaagaaaataattaa

SEQ ID NO: 58094 - DNA, 780 bp, Aminobacter aminovorans
atgacgcagttcaatgattggtgcctttcggtggacgagcccgtcggaaaccactttcgccgggtgatgaccggacaggccgcgagcctggctacggggatccaggcgacggcggccattgtcccgggacactatgcgtcggaagaatcggttgctcgggcactcaaccgactcggcaagccggccgccgccgcgctcatcgagggcaagcttccgacaacgaagaatatccgttccggcgatctcggcgagatctacgcaacggagtggatcgacgcacacagcggcggataccgcgctccgatcaaacgcttgcgctggaaggatcaccgcaacatggcgatgcgcggtgatgacgtcatcggcatccttcaagatgccgccacggagcgcttgctgcttcttaaaaccgaggcaaagagccgcgtggcgctgaccggtcaggttctcaccgacgcgcgcgtgggcttggacaaggacggcggccttccgtccgctcacgcgctgtccttcatctcggcacgcctgctggaactagacaatctgccgctcgctgacgcgatcgacgatgcgctgctcaagcacggcattcccgtgcagaacgtcaagcacctgcttttcacgttttccggcaatgcgccggatgccctgctaaccgcttcgatccaggcctaccccggacctatcaaccaatggggtgttggccttcgagtggagggacacgccgccttcatcggcgcggtctatgatcgagtgatcgccgatgccaacaacgcctga

SEQ ID NO: 58095 - DNA, 3519 bp, Aminobacter aminovorans
atgccaacaacgcctgaagccatcgcggccgatattacagaagcggctaccgccggctttcgcggccgtctcatcgcacgtggtcaggcacgagcgataatctggcgggacggcgcgcttccgccggacgcgccggcctttgcgccgcaacttagctacgacttgcattcctatgcctatggccttctcgggcttggccttcgacttcgtgagcttgccggcgacgccgcacaggcgcgcacggccttcgaacaggctgccaccgccctcgaggcggtgattgcgaaaggcgaccgcctcgagaccgatcgcgacttccatttcgtcatggcggcggcgagctaccatcttgcgcatctctccgctcgcgcctactcgctgctcgcaatcgtcgaaaccgacgagaatttcgcgcctatcgaacgggcgctcgccctactgatgaggcgaaacttcagcgcgcttcgcatcagcgtgctcgactatcgggcgtcgggtgaaggcagtgatgcccggattactgccgtcattcaggccaacctcgaccaggccgaggcggcggacaatcctgcggatggcaacaacgatttcctcttcgatggtctcgacaccgcgctgaccgacgcctttatggcggcaatgtctctgttcctcctcgccctggaacgtggtgagcgaccgttgctcgatcaggccctcgaacggctgcgcacgagcctttccatttgcagcgagatgaacatgctgccgcaatggtgggcacatcgcatcgcactccacctcttgcctgatctctggtcgagcactttccacgaaaaggtaccgctccaaccagccggcggcaacgcggcagactggcctcgactgcgtgagctgttcatcgccctgctgcaacgacggccaagagccgaggtcgacctgtggccgtcgcagatcgaggcggcgacccgcgcagtcgaccagtccgacgatctcgtggtgtcgctgcctacgagcgcgggcaagacccgtattgccgagctctgcatcctgcgctgcctggccggcggcaagcgcgtggtcttcgtcacgccgcttcgcgcgctgtcagcacagacggaaacaaccctgcagaggacctttggtccgctcggcaagacgatctcggcactctatgggagtattgggatcagcggcttcgatgaagacgcgatccgcgagcgcgacatcgtggtcgcaacgccggaaaagctcgacttcgcacttcgcaacgatccgtctcttcttgatgatgttggcctgctcgtgttcgatgaaggccacatgatcgggctcaacgagcgtgaggtgcgctatgaggttcagatccagcgcctgctccgccgacccgacgcgcacgaacgacggatcgtctgcctttcggccattctgcctgacggagatcagctagacgacttcgccggatggctgcggcgcgatcatccgggtggcgtgatcaagcacgactggcgcccgacccgactacgcttcggtgaggtcgtatggacgtcgccaaacgcgcggttgaatcttcgcgtcggcgacgagcggccttgggtccagcgcttcctcacaggagccgcgccaccgaactgggtgccgccaaagcgtcagagaacgcggctcttccccgacgatcagcgcgagctctgcctggcaacagcgtggcggctgatcgaggatgggcagaccgtcctgattttttgcccggtacggcgaagcgtcgagcctttcgccgacgtgatcgtcgaccttcatgagcgcggggcgctgcggacgctgctcgtagccgatcccgcggtcctcagcaccgcaatcgcgcttggcgaggaatggctggggccgaacagcgcaatcctgaaatgcctgcgcctgggcgtcgcgttgcatcacggtgccctgccgacggcctatcgcaaggaggtcgagcgcctgctgcgcgacggtgttctcaaggtgactatctcctcaccgacccttgcacagggcctcaatctgtcggccaccgccgtcatcatgcattcgctccaccgcagtggggagaggatcgacgtttccgagttcaagaatgtcatcggccgcgctggccgcgcctatgtcgacgtcgaaggcatggtgctttttccgatgttcgacgatattgcgaagaagcggcgtaattgggaagctcttatcagcgatcttggtgcgcgaaacatggaaagcggactggcgcttctcgtctggacgcttttgtctcggatgcacgctcggatcggcggcgacctaaatcagctcgtcgactacgtcgccaacagtgccgccgcctggaccttccccgagatcgcaaacgaaaagcccgaagacggtgagcgcgcgctcaccgattgggagcggcatgttgcaacactcgacacggcgatcctcagcctcatcggcgaaaacgacatccctgacgaaggcatcgcgggcgcgctggacgacatcctgcaatcatccctttggcatcgtcgcttgctgcgtcagaacgagcaggtgcagcaggctctgaaggcaggccttgtgtcccgcagccgccttatctggagccagtcgacgccagcgcgccgccggggctatttcctggccggggtcggcatgacgacggggcaggagctggacgccatagctgacgatgcgaacctcctgctcattcaggccaatggcggaatcctcgaaggcgatgctgaggcagcaatcgtggcgatcacgggtttggcggagcgcgtcttcgcattttatcccttcacccctgatcccatgccggcgaactggcgcgacatcctgcgcgcctggcttctcggccagcctcttgccggcatcgccgccggtcaggaatccgagacactgcagtttatcgagggaggcctcgtctatcgtcttccctgggccatggaggcgatccgcgtccgtgcggccgcgaacggcgatagggttggcgtctttgatctcgcactcgaagatcacgaactcggccttgccgttcccgccgtcgagaccggaacgttgaatcgatctgcctccatcctgatccaggcgggtttcaattcaaggctagcggcgatcaaggccgtcaccgacaccggcgcggccttccagacgggtcaggagcttcgacaatggctcaactcggaagctgtcgcggcgtggagcgcgcagccggaatggccgacggccgagacgaaggcgatgtggaccgaattcacgcagagcttcatcccaccggaaaaccgtacttgggtcgatcgtcgatactgggcgaatgcctcctggcttggcgccccgccgccgcccgggacccccgtccagcttcaccattggggcgatcaccctcgggtgctctcggccgatggtgcgcccctcggcacggtacaggccgcgctcaatccggcgcgagcgggattggcgcgtgcccaggtagctcaagacgtcaacaagatcgatatcagctatctgggaccggccgacctgtccgctgcatga

SEQ ID NO: 58096 - DNA, 783 bp, Aminobacter aminovorans
gtggcgctttacaaagattggtgtgacgacgatggcgacgaggacggcctcaagcgctatctcgctctgacagagaaggagggcggacgcgcggccgtcatcgacctgctgggcgaaaccgttcggagtcactacgaacggcttgaccgcatcgctgacgacatcgacctgctcggatacgaaacagcggcagctattctccgcgaactgctgccaaccaagccgaagatgcgcgccggtgatctcggcgaggtgctggcctcggagctcgcgcaggaaatgctcgagttcgacgtgccagtccgccgtatgcggttcaaggacggccgtgaagtgccgatgcgcggtgatgatttcatcggcgtcaatttctgctccgatgacggaggcctgtggttgctcaagggtgaagcaaaaagccgacgaaagctcggcaaaaccacgattaccgaagcgcgcgaagcgctgaaacgggacgatggccggtgcacgcccatttcgctgctgtttgtcgccagccggctgatggacagcgacgatgaggatcaggctgacctgggacggcgcatccgcaacgaagtcggtaagaaggcgctcgcgcgtaaccggatcgaccacgcgctcttcacgctgtccggcaacggtccgatcgatgcgctggtcgaggactataaggcggccgaggccggccgaaaccatgcagtcgtgaatctgcacatcgaagactacgacgacttcatcgcggacatctacgagcgggcgggcgaccttggagacgactga

SEQ ID NO: 58097 - DNA, 3441 bp, Aminobacter aminovorans
ttggagacgactgacgaacttcaggcctttctcgaggagatggttcagcccggcatttggggccggctcgttgcgcgggggtcggcttggtcgctgatgcgtcaagatggagtcctgccggacggggcgccgcagttcggtcgcaccatcgcgacggacttatccgagcacgctttctcggtgttacgcggcgcgctcgcgttgcgcgaaaggggcgaacaggtggaactcgccggccgagccttcgagcgcgccgccaacgcctttgagtcactcgtccgcaacggcgatgccgcagcccccgagcgcggctttctgcgaactctcgccgcagccgcataccacctggcggggtactcggcgattgcctactcactgttttcggaccggaacgcggagcgcaacaccactgtcggcgaggacgcgcttgcgctgcttattctgcgcgactttggcgccttacgcgcgcttgtgcgcggctggctcagagacgcagatcatgctgacgcagccatcgcagcgggtcttcagaatgaaactctcgacggcgacgacgccgttcagttgatcttgaacgggtccgtctgtcgggcgctggcgcatttcgatttcgcgcttcagaccggtgatgccgcgttcgtcgatactgcgcgcgccattttggatcgcgcgctcggcctcgccgacaatacagcgtcggtgcctctctggtgggtcattcggctgtgccggagcttgattgcagacctatggcaacactctctgcacactaccctaccaatcgcgccaccgatgggcggcgaggaggaatacccagactatcgccgactattcatcgctagcctctacggtcggaagaccgccgaggttgagctttggccgtcgcagcgcgaggccgctgcgagatcaaccgatctgaccgacgacttggtcgttgcacttccgaccagtgccggcaagactcgcgtcgccgagatcgccgcgctgatgacgctctccaccggcaagcgcgtgcttgtcgtgacgccacttcgcgcactttcggcgcaaaccgagcggtcattccgccggaccttcgccccgttgggcatgaaggtctcttcgctctacggcgcaagcggagtctcagaaggggacgaagatgccctccgcacgagaccgattgtcatcgcgacaccggagaaacttgacttcgctcttcgcagcgatccgaacatcatcgatgacgtcggtctgatagtgctggacgaaggccatctgattgggccatcggagcgcgagattcgctacgaaatcttggttcagcgtctgctaaggcgggccgacgcaggcgaccgtcgaatcgtctgcttgtcggcaatccttccggatggtgaagcgcttgacgatttgactgcgtggatgcgcagcgacgtgccgggcgaacccgtcaagtcaatctggcgcccaacgcggcagctgtttggatcggtgatctggcaaggtcgatccgcgcgtctcggcttcaaccttagggacaatggaccctttgttggtcgcttcatccaggaggccgccccgcgtgggcaagaccagcgctcttacccccgcgaagtgaaggacctcactctttttgcggcgtggcagtttgcggcgcagggcaagcgcacactcatcttttcgacccaggccaactgggtcgagggctacggcacgtgtgcggaaaagctcgtcagaaaaggctatctgccgtccctcatcgatgatccagctccgctcgcgcgagcgcttgaggtcggccgagaatggcttggaaccaatcatccggctatcaaggcgatgcgaatcggcgtcgcgattcaccacggcaagctccctcagcccttccttcgcgagatggagctcctgctcggcgaaggcgtgctcaaggtgatcgttgcgtctccgacactgtcgcaaggtttgaacctgaacgccgcagtgctcctggtcccttatctcgttcgagcaggcgaacccatctcaggcgaagaatttgccaatgtcgccggtcgcgccggtcgtgctttcgtcgatgtcgagggccttgtcgctcacgtgataatgaacaacgctgactatcggatgcagcagtggcgccagttggtcgcatcggcgcgggcgcgggatctccaaagcggcctctttcaagttattcacgaggttctcgaccgactgtccggggctggcattctgcagcgcgctgacgctttcgagtatcttgccaactcgcgcgagaactgggcgttggacgacgagcccgcggccggagacggggacgaagaagagcaggccccttcgttcctcgcgctcgtcgaaaagctcgatgcgatgatcctcgggttgatcgaggccctcgatgccgacagcgacgagcttccacggttgctcgacgaagcgctgatcggttcgctgtgggctcgtaaggtcgcaagggaggcggacgatgttgctacccgccaccgcgcgctcctgcgtgctcgcgcgacattgatttgggccagcactacgcccccgcaacggcgtggtcatttcgcgatgggtgtaggcttggattccggtttggctttggacgaaatcgcggacgaactggccgacctcgttgacgccgccgatgcggcggcaatcaccggtgatgctgatgccttgggcgacgctctggtcggtgttgccgagaagctcctcgtcatccgaccattcacgcccgactccgaattgccgaacggatggcaggcggtgctccgatcttgggtggcgggtgcagcagtcgaccagatcggcccggaccgtatgaagactgtcgaggacgcgttcgcatatcgtctcgtgtggggactcgaagccatccgcactcgccgtatggcggcaggctggtcgcccgacctgatcgctggtggaggcgcgggtgcggttgagaccggcgttccaagcatcatgatggcgatgctgatccgcgcggggttgccctcgcggcgcgcggccatggccgcggtagaaaccggcggcgcacttttcacgaactccgccgagatgcgcacctggatcgctagcgatgaagtggaggcgctcagtgcggaggatgattggcccacggtcgagacctcagcgctatggcgccgatttcgaaacgaagtcaccggcatgagtacgcccgcctggaagatccgctcgcatcgtcgccggctcgaacttgccgagggacaagctcggcccgccaatggtgactatcgggtcgaaatcaatcgccgcagcggccgagcatggattgtgtcgccagactttcagcggatcgcgaaggttcgcaaggtcgttcgcgacgcacacacagccctgtatcgcgcccgtttcgtagccggcgatgatcgcgtgcacattgaacgacttggacctggcgaagcgcattgggaagacgccgcagcgtga

SEQ ID NO: 58098 - DNA, 816 bp, Chlorobium ferrooxidans DSM 13031
atgcctaaccattacacattcgaagaagttgttggaacccatccggtttctccacatccgattggcgagcgattttcatacgaagatggtcattcagagcatggaatccccacccgcacgctctctgagacagactcggatgttgaccagtttgtcgccgcgatgagggaatttcttcgcactcatcactccagaccggaggatttagaacgtgatcggctgcgcagggaagcttacgctcggcaagggcttacactccctctcactcgatttccaactaatccaaagactcgcaagggaaactggacagaggttctcctctgcgagtatgtaactgcttcttgcaacgcggacttacccgtttatcgtttgcgatacaacccgaacgttgatcagtccatgaagggtgatgacgtgttggctttcgatttgaatgctcatcctatccgtataatcgtcggcgaggcaaagtttcgtggagcgtcatcgaagaaggctgtcactgacatcattgaatcactcgaaagatcattccgaggagggctacctgtttcccttcaattcgttgcaaatcgcctaatcgtggaaagaaatgaagcgcttgggcgacggatcgaagagtgcgctgatctatttgtgaggaatagattacggattgaccatgttggacttcttgcgagcaaccacttagcgcctacccatgttgaaaaaaacgctatttcatctctgcgaagaatcgcggtaatctcgatgaccctctccgatggggaaggtcttgttaattcttgcttcaatggattggagtccacaccatga

SEQ ID NO: 58099 - DNA, 3396 bp, Chlorobium ferrooxidans DSM 13031
ttgcttcaatggattggagtccacaccatgagcctttcagttgagcattcgcgaagcatcgcatctgcgttgcgagttgagccaattccaaatttcatttctcaggcaaaggcaaagcagttgcttcaagaagttcacgagttgcctgaacattttccgggattcacggagggcctcgacgatcgtgtcactttcgtagcctaccgaatgcttagcgctggttgtagtctggtggaacaagacttgcttggtgaggggatcctacaacttcactcggctggcgaattgctggaaagcacccatcgcacgagcgctcgaactgagagcgtaagcggattccattgcctaattggggcgatggctttttacgcatgtggtcactattcacgagcatacgtgctcatcaaagccacggaaactatcacaccagtcgcagggatcattgctagcttcctcagaaaggattttgccaagttgattccaaggcttaatgacgttcttctccgggaacagcccctatacgaagaggatttcattgaggcagacaggagagctcttgatcttcttatcgctcgatcggttgcacacgttcttgagcattcgatctcaggcgaagcagagctacttactaatgctgatgctattctagccgatgcgatgatcatcagtgaggctggagccaacccgagcttttggtggatagcacgaatcctccgattgatgttcaatgactatgggcgggggtcactttgggtctgtcttccaccgttctttggccctgacgggaagtctactatcggtgattatgcaagcctccttgctttggttaaaccgccggtaactgagctttggcgatcccaacttgcagctcttgagctcgctctaaatggcgacaacttaggtggagtcgtgaacttgcgaacaagtgcaggaaagacccgggtcgcagaacttgcgatacttaaagagttaagagccaattcgacagctaaggttctttatttggcgccgtttcgatctctagcatttgagctggagcggacttttgaaaaataccttggggctcttggtttttccatttcgcacctttatggaggctcccgttttagtggggtagaccgcgaaatggttctcgaggcacacctcctcattgcgacgcctgaaaaaacgaaggcgatgttgcgtgcggcccctgaattgtttgataacgtcaaactgatcgtcattgatgaaggtcaccttcttggagggagcgaacggaatgtcaaaaatgaattgtttcttgagcacctccggctactttctcgaaatcgaagtacgcgcattctattactttctgcagttcttccgaatgccacagagcttgcgacatggatcggtggtagtgagtccgcattagcgcaatcagactggaaaccatcggatgagcgctttggcgttctccgatggacaaagaatggagtgcaaatcgaatggcgtagcgaaagtcgatgcttcaatcctgattttgttgattttcgatgggtggttgaacctggtaaaaagaaggctagagaattcccaaggtcgaagactgaggctgtcgccgccaccgctgtgcgcctatctgaaatcgggcctgtattaatatttgccggtcaagcgcagtgggtgccatcaatggctcggtctgttatactagctctccaaggcgaggaaaagacccatacgtggcctgatacggagtggcggatatttgaggcagtttgcagtgaagagttggggcctgattgtatcgaacttgaggcggccagacttgggattgtttgccattccaatcgacttcctccccaagtccggatcgcgatcgaaaacctcatggcagcggggaatcccttagtgatcgttgcaacaaccacactcgggcagggagtaaatatcagagtttcgtcggtgattgtgtctcagaccttgataggaaaaaaaaggcacattacgaaacgtgacttttggaacatttgtgggcgtgctgggcgagcgtatgtagatggagagggaaaggttctcttcgcaatcgatggcacgaaagccgtgtggcagattaagcacgaaatgaatttggcaaaccagtatctcgacatcctgaaaatagacaaagtcgagagcggcttgttgcaggtgattcgtattttgaaacgcattgcaaaagaaaccggagtcactttcgaaacattcctcgaactagttgcaaacagtgattatgaatccttgaatcggcacgccgagggggtccgatcgttgatggatttatttgacgatcagcttttaacgctacatgttgcgtataaaggtgccgacccgtcaggagatcaaattgattggattgaatctgcatttcagggttctctcgcggtgatccaagctgaagcaatggagaacgaagacagcgcgtcagttctttcgctgttgaaagcccgaaccacatcgattctgagagatgttcctgacgctcctgcccgacaagcgattatttcatctggattgcctctctctgtaggcaaactcgcctttagggacttggagttttttcgccagtgtaccgatgcctatttggctagtgatcagaatgatactgccatcgcagttttggtttcagaattcgaggattgggcgagagttaatgcgtctgctatttgcggctcgattgcttcaaaggagcttcttgatgtagtccgcccccaatggcttagaggtcagccattattggcgatccgggaatctttagaggatgatccgctgaaaatttgcactgaattctatggctatgagctgtcgtggcttttccatgcagttgcccaaaaactcgaccaagaaactgaggaggaaaggagagaagcgcttggtttggtaagcctgttacttgaattgggtctccccaatcaagcagcagctaaggtcttcctggcaggaattcggtctcgagcttcagcagtcgagcttggagcattcgtgctggattcaaccgcaagcccaaagaggattcgtaatgcattgctcaaccctgaaacggttgaagatctcagatcatcaatctcacctaaaacagcaaactggttggatttattggaaaaggatcagacgtcaagtgaggaggaaataccgtctttttcaaacttcaagttgcaagtcccgcatgagataacaagccttcattcaagaaagcttcctgagcaagatacagcattcctatgttccaccgattgtcggtttgttttccgggccaagtcaacggaagatcttccattttatgacctagccaacgatctacggtttatcttcctgcgaaccggagatctctggtgcctacactgccgagaccctcgccttcaagcaccgacgatctcttttggtgattag

SEQ ID NO: 58100 - DNA, 264 bp, Burkholderia multivorans
atgaagaagaaagcacacgctctcggcgatgttgacaaggtgcagttagttgaacgctttcagaacaagccggaccgacccttcattgagcaaacaggggcggctgcagtattgaacaatgtcgcatacgacgaggcgcaaataatcctaacatcaacggcgaaccatcccgatgacgccgtgctgctgctgttggtgattcgagggcaggacatgatgacgttggcgcatagtctctatgagagggctgcaaatgaggcctga

SEQ ID NO: 58101 - DNA, 3114 bp, Burkholderia multivorans
atgtatgaatattcggtccccgagggcgaccacattgacgttccagcggcaacgcatccggaagacctatttgctttggcgattggcattgtcggcgatgcagctggcgagctttgtgacgaatacattcagcgcggtaccctgcaaggggatttggtggcgactgacggcccgaacctcaggttctgtgcgtcgttcttctacgcctacgtggagtctaagttcgattcggacctcgacgaagagttgttgaccctcgccgccgcaacgttttacttggccgaaacacccggaagcagtgcagttataagcaagtacctcgctgaacgtccgttgccgccagacgatgcattagtgaccgtgctgcgtcatgttctcttgagtgactggcatgacgctgacgagattcaggagggtcgatttggtcgttggattcagagggcggtgcgctctgccatagagctacggaccagcgaaggacgagacgaacaaattttactgagaaactgtgccgagttgcgagggcaagtctatcgaatcgggacggcgcgtgagattgcgtttgttgacctttgtattgcagtgattctgagaaaagtcgccaattcgagccgtctcagtttgccgcgatactcacgccttgacgaagaggcatggtcggaggttcttgggaagcccggattcataactgagctctggcctgcgcagcgccttctcgggaaggcaggtctcttttggggcacgtcagctgtgattcaaatgccgacgagtgccgggaaaacgcgcgccgttgagctgctgattcgaagctctgttctggccaatcgtgcgcatacggcggtcatagtcgcgccgtttcgagcacttgtaagcgaaatatcaaattccctccggggggcatttaccggggaacatctgtctatcgatgagctctccgatgtcctacaaatggacttccttgaatcgcttcgtgaactcctcggggagattattcaaccgcgaccaaaggttattgtactgacgccggaaaaactcctgtatgttctccgacaagagccgaggattgcagcgaatatcggcttggtcgtctacgacgaaggtcatcagttcgacacgggaagtcgaggcgtcacctatgagctgcttttgacgacgttgaagcagttgctgccttggcaggcgcagattgtgctcgtgtccgccgttatttcaaacggcgaacaggttggcaagtggctaattggcgagcatgcgaaagtcatcgacggcaaggatttaatgccgacgcaacgctcggtcgccttcgccagttggcaacaacgaggcgggagcgggagactcgagtttgtgccagttggtgatggtgagcaatcctattttgtgccacgggtaatcgaagcattcgagtttcctctgcggggaagagaacggatagtgagaaagttccccaagcgcgaagacccgtcggaaatttcgctctatttgggtctcaagctcgcagctcaaggcagtacggcgatattttgcgggcagaaagcgagcgtcgcggggatgattcgcgatgctgtcggctatttcgagcgaggtcttccgtatccgccgccggcggaggcggctgatgcagtcgagttatctaagctggtctacctgcacgaactgcactttggggaagacgcgactgcaacaaaaggcgcacaacttggtcttctagctcatcatggcaacaccccgcaggggttgagattgtcaattgagcacgccgttaaagaggggctcgcgccgctggtgatatgcacgtcgacccttgctcaaggtgtgaatcttccgctgcgatacctcatcatttcggcgttaaaccagggggatgagccgttaacgacgagggcattccaaaacctcatggggcgtgccgggcgtgcggggatgcacatcgaaggttcggtgatttttgcggacacccgtgtgtacgacggtcgtttgatgcgccgtgagggttggcgttggcgcaacgtcaatggactgcttgactccgcacgagtcgaaccgattacaagctcgttgcttagcctgattgacccgatatggaacgatgataagtcgcaggtggtacaggatgcatttgatgcgattgttgcactggtggcggatgaggacaatgcccttgctcagctgagcgacgatgcggactatttggaatccatcgatgcatcaccgaaggaagtcgcgaagcaagtgcggaagaaagcgcggctggtgaatgccgtcgcgagctttctgcagtcgagcagaggcgatatagggttcgagcagtacctggatgtcgtccggggcttatccgccagcactcttgcttactcactcgctactgatgcggagagggaaaccttaactgatagctttgtcgaaattgcacgtgctgtcgaaaggcgtgtccccgacacaggtatgcaaagtaggaattcgcggactctgctcggtttgagtgctctgaataagattgaccggtggtgtctggaccacggcgacgaagttctggctatgcgcaatcagagcgagttgctggcgtcaatttggccaatttttctggtcgtcgctgagaacgacctcttcgctcgttgtatcgggaagaatcagctattggacgtcgcgcagctctggctggccgggcaaccatacgacctgattggtcagtttatccaacaagcagggattgcaaagcgccatggcgaaggtgcgcgtcgattcacgcccgaggacgtcgtagaaatttgtgataactgctttggatatgagttttctctgtatctgaccgcactcgttacctactttgaacacaacaacgaaggtgaggcggtagcgacgattgatttgctgaagatgcttcagagtggactgaagtacggccttccagacgctctctcggtcgctattctggagtcagggttctcagaccgtatgctcgcacaggcgcttcggccgcagctggacggagtctttccttcgaaggcggccgttattgcatacatgcgcaacaacgaggcgctaatccgacctattttaacgagattcccgtcgtatttcgaccacgtgttcaccgcacagcttggagcttga

SEQ ID NO: 58102 - DNA, 777 bp, Xanthomonas gardneri ATCC 19865
gtggggctatatgagaagtggtgtgaatccactaaagaaaatgacgaacgcaagtattactggacgtatgtcgagagggatggcggccgcgctgatatccgcgaggaccttgctgagaccattcgctcgcactacgaccgacttgaacgcatcgccgatgacgtagaccgactaggatacaaggttgctgccaatatcctcagcgaggctatgcctcagacacccaaggggcgctctggcgatctcggcgaaatccttgcgactgaactagtggaggaagagatcggtctgcgggtacccgtgcgccggctccgttacaaggacggccgtaacatggccatgcgcggcgatgacttcatcggcgcgggctaccaaggcgataagatctggttgctaaaaggtgaagctaaaagtaaccagaagcttggcaaaaccacggtcaccgccgcccgcaaggtcctcgaccgcgacaatggccgctgcacgccggactcgctgctgttcgtcgccaatcgcctgctggagagcaatgacactggcgataacgcactgggtcgcgatttgcgcgacgaagtgggtcttaagtccatgcgcgccgatcgcatcgaccacatgctcttcaccgtgtcgggtaacggccctcacgcttccctgaaagaaaaccttgaagccgctggagccaacagggaccactacgtcgtgaacatccacgtcgaagaccaccaagacttcatcgcagccatgttcttggaggcggaagaccttggagacgactga

SEQ ID NO: 58103 - DNA, 3510 bp, Xanthomonas gardneri ATCC 19865
ttggagacgactgacgagttgaccgccttcctggcgaccgccaccgctgacggcatcctcgggcgcctcctctatcgcggtgcagcttggtcgttaatgcgcgaggatggcgtactgccgcaaaacgcgccgccgcttggcgcaaccatcgagaccgatcttgccgagcacggcttcgccgtgcttcgaggggcgatggccttacgcgctcaggaaggagcttcggacctaacgggcaaggccttcgagcgagccgccaacgccttcgaagccctggtgcgcaatggtgaccctgacgcgcccgatcgcgggttccgccgcaccatcgctgccgcggcttaccatctggccggcttttcggccgttgcctattcgctcttcaacgagacggcggaagacctcaacacctcgccgggcgaaacggcgatccgacacctgatactgcgcgatctcgaccagctgcgcggcttcgttcgcgaatggttggacgacgaggctcacggtgatgagcagatcgccgaagcgctgcggggccaagaccctgacgtcgacgaggcgctgtcaactatcctcaacacaacgatttgccgggccctgacattttttgacttcgcgctggagacgggcgaggtcgagccgatcgagtccgcgcgggacatgctggccaccgccgtcagcctggccgacaacgctgagaacgtccctctttggtggatttcgaacctttgccgcaatctgatcgacgatctgtggcagcactcgctccaccagagtctgcccactgagccgcccgagggtgcagaggaaaagtaccccgacctccggcggctgttcatctcctcgctctacgcccgcaagacctcggaggtggagctatggccctcgcaacgcgaagcagcccagcgctccacggacgtctcggacgacctggtcgttgccctgccgaccagcgcgggcaagacgcgagtggcagagatcgccgcattgatgacactgtccaccgaccgccgggtgatgattgtcacgccgctgcgcgccttgtcggctcaaaccgagcggtccttcaggaagacgttcgcgcccctcgggttcggcgtctcctcgctctatggtgccagcggcctttcggccggtgatgaagatgccctgcgcactcgtgagatcatcatagcgacgcccgaaaaactcgacttcgcgttgagaagcgacccgtcgctgatcgacgatgttggcctgatcgtcctcgacgagggccacatgatcggtccgagcgagcgcgaaatccgctacgagacgctcgtgcagcgcttgcttcggcgcacggacgcggccgaacgccggatcgtctgtctttccgcgatcctgccgagcggagacgaacttgacgacctcaccgcctggattcgttccgacgaaccgggtgagccggtgcgttccgactggcgtcccacacgccagcgtttcggggcactcacctggcgcggcaaagatgcactgctccggcttgacctcgatgacgatggtcccttccttgacaagttcgtcgtggaaaaacccccactcgggcgcgagaagaagccttatccgcgcaaaaactcgcacctcgctttgttcgcggcgtgggagttcgcaagccagggcaaacgtactttgatcttctccacccaggcgaactgggtcgagagttacggaaaacaggtcgtggacctttgcaagcgtggctatctggactcgctgatagatgacgaggcgccgatcgcccgtgctctagaggtcggcaaggaatggctgggcgaggatcatcccgccgtcgccagcttgaaggtgggcgtcgccatccaccatggccggcttccgagcccgtttctccgtgagctggaagtccttctctccgaaggagttgtgaaggtgatcgttgcatcgccgacgctctcgcagggcctcaacctcaatgcagccgtcctgctggtgcccgcgctgtatcgcgccggcgagaagataaaaggcgaagagtttgcgaacgtggcgggccgcgccgggcgcgccttcgtcgacgtcgaagggctgatcgtccatgtcatgttcgatcgggtcaaatggcgaaagagcgaatggcgcggtctggttgcctccgcaaaggcccgaactctgaaaagcggcctcatccagatcgttgccgagatccttgagcgcctgtcacgcgagggcgtgctggatcgcgacgacgcctgggaatatcttgccaacgcccgcgaggcctggagatcactcgacgaggaagccaaggtagccgagcgactggctgccgccgtggaatacgacgccgacgccgatgacgaagacgaagacgaagacacggatgacgaggaagaatccatcgacgaggagccactgtctcaactcgtcgaacgcctcgacgcgatcgtgttcggcctgatcgaagcgttggacgccgaccgcgtcgatctacccaagcttctggacgaggcgctcaagggatcactctgggctcgccagattgcccgcgaggacgacgatgtcgcccccttgcacaagaaggtattcgaagcgcgcgctgacctcatctggcgaaccacaacggccgaggcccggcgcgggcatttcgctatgggcgtcggtctcgaagcgggcctcgccatcgacgccatggccgacgagttggccgaactgattgaccgggcagaccaggccgcgctgagcggcgacattgacgagcttgtcgacgcactcggtggtctcggcgaacgcctgctgttcatgcgccccttcatctccgacaaagcgaacgctctgccggcgaactggaaagccatcctgcacagttgggtgtccggcgaggaggtctccaggatcggatcgcagaacatgcgagccgtcgaagaagccttcacctatcgcctggtctgggctctcgaagccgtccgtacccgccgcatgtctcttggctggtcgccggagacggtggcgggcggcgcgtcggcggcgatcgaaaccggcgtcccgcgattcatgatggcgatgctgatccgcgctggcctgccgtcacgtcgcgcggcgatcgcggccatcgaggacgccgagccagtcttcgtcaccccggcagagatgcgggcctggctcgaatccgatgagatcacgacttacacggacgccggcgactggccgacgcccaacacctccgcactatgggcgcgcttccgaaccgaggctctcagcggtggcatccagaagtggtccgtccaacgctacaagcgcctgctcgacatcgaggccgctccgccccccggcctataccggatcgtcaccgacgagggggatggacggacctggctggcaacccccgactacaagcgggtcgctgccttcaagaagccggcggtcgaccccaaaccaagccttttctcaggccgcctgccaggcaatacaaggctcgtggaagccttgcgcgtcggccgcggaaagttgggctggccgtccgctgatgcttag

SEQ ID NO: 58104 - DNA, 777 bp, Xanthomonas gardneri; identical to SEQ ID NO: 58102

SEQ ID NO: 58105 - DNA, 1325 bp, Xanthomonas gardneri
ttggagacgactgacgagttgaccgccttcctggcgaccgccaccgctgacggcatcctcgggcgcctcctctatcgcggtgcagcttggtcgttaatgcgcgaggatggcgtactgccgcaaaacgcgccgccgcttggcgcaaccatcgagaccgatcttgccgagcacggcttcgccgtgcttcgaggggcgatggccttacgcgctcaggaaggagcttcggacctaacgggcaaggccttcgagcgagccgccaacgccttcgaagccctggtgcgcaatggtgaccctgacgcgcccgatcgcgggttccgccgcaccatcgctgccgcggcttaccatctggccggcttttcggccgttgcctattcgctcttcaacgagacggcggaagacctcaacacctcgccgggcgaaacggcgatccgacacctgatactgcgcgatctcgaccagctgcgcggcttcgttcgcgaatggttggacgacgaggctcacggtgatgagcagatcgccgaagcgctgcggggccaagaccctgacgtcgacgaggcgctgtcaactatcctcaacacaacgatttgccgggccctgacattttttgacttcgcgctggagacgggcgaggtcgagccgatcgagtccgcgcgggacatgctggccaccgccgtcagcctggccgacaacgctgagaacgtccctctttggtggatttcgaacctttgccgcaatctgatcgacgatctgtggcagcactcgctccaccagagtctgcccactgagccgcccgagggtgcagaggaaaagtaccccgacctccggcggctgttcatctcctcgctctacgcccgcaagacctcggaggtggagctatggccctcgcaacgcgaagcagcccagcgctccacggacgtctcggacgacctggtcgttgccctgccgaccagcgcgggcaagacgcgagtggcagagatcgccgcattgatgacactgtccaccgaccgccgggtgatgattgtcacgccgctgcgcgccttgtcggctcaaaccgagcggtccttcaggaagacgttcgcgcccctcgggttcggcgtctcctcgctctatggtgccagcggcctttcggccggtgatgaagatgccctgcgcactcgtgagatcatcatagcgacgcccgaaaaactcgacttcgcgttgagaagcgacccgtcgctgatcgacgatgttggcctgatcgtcctcgacgagggccacatgatcggtccgagcgagcgcgaaatccgctacgagacgctcgtgcagcgcttgcttcggcgcacgga

SEQ ID NO: 58106 - DNA, 777 bp, Xanthomonas gardneri; identical to SEQ ID NO: 58102

SEQ ID NO: 58107 - DNA, 3510 bp, Xanthomonas gardneri; identical to SEQ ID NO: 58103

SEQ ID NO: 58108 - DNA, 777 bp, Xanthomonas gardneri; identical to SEQ ID NO: 58102

SEQ ID NO: 58109 - DNA, 3510 bp, Xanthomonas gardneri; identical to SEQ ID NO: 58103

SEQ ID NO: 58110 - DNA, 777 bp, Xanthomonas gardneri; identical to SEQ ID NO: 58102

SEQ ID NO: 58111 - DNA, 3510 bp, Xanthomonas gardneri; identical to SEQ ID NO: 58103

SEQ ID NO: 58112 - DNA, 777 bp, Xanthomonas gardneri; identical to SEQ ID NO: 58102

SEQ ID NO: 58113 - DNA, 3510 bp, Xanthomonas gardneri; identical to SEQ ID NO: 58103

SEQ ID NO: 58114 - DNA, 777 bp, Xanthomonas gardneri; identical to SEQ ID NO: 58102

SEQ ID NO: 58115 - DNA, 3510 bp, Xanthomonas gardneri; identical to SEQ ID NO: 58103

SEQ ID NO: 58116 - DNA, 777 bp, Xanthomonas gardneri; identical to SEQ ID NO: 58102

SEQ ID NO: 58117 - DNA, 3510 bp, Xanthomonas gardneri; identical to SEQ ID NO: 58103

SEQ ID NO: 58118 - DNA, 777 bp, Xanthomonas gardneri; identical to SEQ ID NO: 58102

SEQ ID NO: 58119 - DNA, 3510 bp, Xanthomonas gardneri; identical to SEQ ID NO: 58103

SEQ ID NO: 58120 - DNA, 777 bp, Xanthomonas gardneri; identical to SEQ ID NO: 58102

SEQ ID NO: 58121 - DNA, 3510 bp, Xanthomonas gardneri; identical to SEQ ID NO: 58103

SEQ ID NO: 58122 - DNA, 777 bp, Xanthomonas gardneri; identical to SEQ ID NO: 58102

SEQ ID NO: 58123 - DNA, 3510 bp, Xanthomonas gardneri; identical to SEQ ID NO: 58103

SEQ ID NO: 58124 - DNA, 834 bp, Bordetella hinzii 1277
atgcgtggaatcacactacgaacgaggcagggatggtcgattgggggcagcgtgggactgtacgaacggtggtgcgaagccacgaaaaagaaggataagcgcaagtactactggacctatgttgagagggaaggcggtcgagacgagattcgcgcagacttcgccgcgactattcggtcgcactacgaccggctcgaacgcatagccgaagacgtgaagcgcctcggatataaggccgcagcgcagattcttagtgaagcgttgccgcaaaccgctaaaggccggtccggcgatctcggcgaaattcttgccacggaactggtcgaggaagaggttggcttacgtgtgccggtgcgacgcctccgttataaggacggccgcaatatggccatgcgcggcgatgacttcatcggcgctggatacaatggggtggacgagaagctctggcttctaaagggcgaggctaagagcaacaaggtgcttggcaaggccacggttacaagcgctcggaaggtgctgaaccgcgacaacggccgttgcacgcccgattcccttctgtttgtcgcaaaccgtctcctcgagagtaatgatccggacgacaacgtgctgggtcgtagccttcgtgacgaggtgggtgtgaagtccctccgtgccgaccgcatcgaccatatgcttttcaccgtgtcgggtaacggtcctcatgcatctttgaaagaggacctcgacgccgcagggacgaatcgtgaccactacgtagtaaacgtccacgtcgcagatcaccaggatttcatcgcagccatgtaccaggaggcggaagatcttggagacgattga

SEQ ID NO: 58125 - DNA, 3504 bp, Bordetella hinzii 1277
ttggagacgattgacgaactaaccacgttcttagctaccgcgaccgtcgatggcatccttggacgcttgctctatcgtggcgctgcctggtcgctgatgcgcgaggaaggcgtgttaccggcgaacgcgccgccgctaggtgcgacgatcgaaaccgatcttgccgaacacggctttgccctgcttcgcggagcgatggccctgcgcgctcaggccggtgcgtcggatctgacgagcaaggcgttcgagcgcgcagccaactccttcgaagccctggtgcgcaacggcgatcccgagtcccctgatcgcggttttcgcctcacgatcgccgcagcagcctatcatctggctggtttctccgccgttgcctattcgctcttcaacgaggccatggatgatctcaatgcgtcgccgggcgaaacggcgattcggcatttgatcctgcgcgatcttggccagctgcgcggattcgttcgcgactggttggacgatcacgctcacggagatgaggagatcgccaaggcgttgatgggcgaagagaccgacatcgacgaggctctatcgacaatcctcaacacgacaatatgccgggcgctggcgcatttcgacttcgcactggagacgggcgaacccgagccgatcgagaccgcgcgggcgctgctcgccaccgcagtcagcttggcggacaacggcgggaatgttccgttgtggtggatatgcaacctctgccgtcacttgatcgatgacctctggcagcattctctgcacgaaaacttgcccactgaaccgccggagggaacggaggaaaaatacccggatttgcgccggctattcatctcgtcgctcttcgcccgcaagacgtccgaggtggagctatggccatctcagcgcgaagcggctcggcgctccacggatgtcaccgacgatctagtcgtcgccctgccgaccagtgccggtaagactcgcgtggcggagatcgccgcgctgatgaccctgtcgtcggcgcgccgggtgttgatcgtgacgccgctgcgcgcactgtccgcccagactgagcgatcgttcagaaaaacattcgcgccgctcggcttcagcgtttcctccctttacggcgctagcggcctttcggctggcgatgaagacgcgctgcgcatgcgcgagatcatcatcgcgacgcccgagaaacttgatttcgcgttgagaagcgacccctcgctgatcgacaatgtcggccttatcgttctcgacgaaggccacatgattggccccagcgaacgcgagatccgctatgaaaccctcgtgcagcgtctgcttcggcgcgctgacgcaggcgaacgccgtatcgtttgtctatccgcgatcctgcccagcggcgatgagctggaagaccttacagcgtggatacgctctgacgaaccgggcgagcctgtgcgttccgactggcgccccacgcggcagcggttcggcgcgctcacctggcggggcaaggacgcgctgctccggctggacctcgacgacgatggtccgtttctcgacaaattcgtcgtggagaaagccgcgcgggggaaagagaagaagccctatccgcgcaagaactcgcatctcgctctgttcgcggcatgggaattcgccggtcaaggcaagcggacactgatcttctccactcaggcgaattgggtcgagagctacggtaaacaagtggtggacctatgcaaacgcggttatctggactcactgttggaggatgaagcctcgattgcccgcgctctagaggtcggcaaggagtggttgggcgaagaccaccccgccgtcgcctgcctaaagagcggcgttgccatccaccacggccggctgccgagcccattccttcgcgaactggaagcccttctctccgagggtattctgaaggtcatcgtcgcgtcgccgacattgtctcagggtctcaacctcaacgccgccgtcctgctggtgccagcgttgtatcgggcatccgagaagatcacaggcgaggaattcgcgaacgtcgccggccgcgctggacgcgccttcgtagatgtcgaaggccttatcgtgcatgtcatgttcgataaggccgactggcgaaagaaggaatggaggaagttagtggcctccgcaaaggcccggacgctgaagagcggtctcatccagatcgtcgccgagattcttgagaggctagcccgcgaaggcgtcctggatcgcgatgatgcctgggaatatttggccaacgcacgtgaagcttggagatcgcccaaggaagaggccgaagtcgccgagcgactggcgaccggcgcggagtatgacgctgagggcgacgatgatgaaggcggtggcgatgacaaagaggaaaccatcgaagaggagccgctatcacagatcgtcgagcgcctcgacgcaacggtatttggcctgatcgaagcactcgattccgatcgcgccgacctgccgaagctcttggacgaggcgctcaagggatcgctctgggcacgccagatcgcgcgtgaggacaaggacgtcgccccgctgcataagaaggtgttcgaggcccgcgccgatctcatctggaaaaccaccacggcgcaggcgcgacgcgggcatttcgccatgggcgttggacttgaggcgggtctaaaaatcgacgccatggctgacgagttggccgaactccttgaccgggctgaccatgcggcactgagcggcgacgttgaggcacttgtcgatgcgctcggcggtctcggcgaacgtctgctgttcatgcgacctttcatccccgataaggcgaacgcgctaccgacgaattggaaggctatcctgcgtagttgggtgtctggcgagaatgtggccaagatcggaccgcagaacatgcgagtcgttgaagaggccttcacctatcgtttggtctgggccttggaagctgttcgtacccgccgcatgtcactcggttggtcgccggagacggtggcgggcggcgcagcagcagcggtcgaaactggcgtcccgcaattcatgatgtcgatgctgattcgcgcgggccttccttcgcggcgcgcggcgatggcagcgatcgaggatgctatgccggtcttcgtcacgccagctgagatgcgggcctggctcgagtccgacgagatcaccgcctacaccgacgccggtgactggcccacgcctgatacggccgcgctatgggcgcggttccggaccgacgccctcagcggaggcattcagaaatggtcagtcgaacattacaaacgtctgcttgacaccgcgatagccccgccggctggcctctatcgcatagtcaccgacgagggtgatgggcgaacttggctgacaacacccgactatcaacgtgtcggtgcgttcaagaaaccggcggttgatcccaagcccagcctcttttccggccgggtgcccggcggcactaggctggtagaggcgttacgtgtggggcgcggcaagctgagatggcctccagccgatgcatag

SEQ ID NO: 58126 - DNA, 834 bp, Bordetella hinzii 4161
atgcgtggaatcacactacgaacgaggcagggatggtcgattgggggcagcgtggaactgtacgaacggtggtgcgaagccacgaaaaagaaggataagcgcaagtactactggacctatgttgagagggaaggcggtcgagacgagattcgcgcagacttcgccgcgactattcggtcgcactacgaccggctcgaacgcatagccgaagacgtgaagcgcctcggatataaggccgcagcgcagattcttagtgaagcgttgccgcaaaccgctaaaggccggtccggcgatctcggcgaaattcttgccacggaactggtcgaggaagaggttggcttacgtgtgccggtgcgacgcctccgttataaggacggccgcaatatggccatgcgcggcgatgacttcatcggcgctggatacaatggggtggacgagaagctctggcttctaaagggcgaggctaagagcaacaaggtgcttggcaaggccacggttacaagcgctcggaaggtgctgaaccgcgacaacggccgttgcacgcccgattcccttctgtttgtcgcaaaccgtctcctcgagagtaatgatccggacgacaacgtgctgggtcgtagccttcgtgacgaggtgggtgtgaagtccctccgtgccgaccgcatcgaccatatgcttttcaccgtgtcgggtaacggtcctcatgcatctttgaaagaggacctcgacgccgcagggacgaatcgtgaccactacgtagtaaacgtccacgtcgcagatcaccaggatttcatcgcagccatgtaccaggaggcggaagatcttggagacgattga

SEQ ID NO: 58127 - DNA, 3504 bp, Bordetella hinzii 4161
ttggagacgattgacgaactaaccacgttcttagctaccgcgaccgtcgatggcatccttggacgcttgctctatcgtggcgctgcctggtcgctgatgcgcgaggaaggcgtgttaccggcgaacgcgccgccgctaggtgcgacgatcgaaaccgatcttgccgaacacggctttgccctgcttcgcggagcgatggccctgcgcgctcaggccggtgcgtcggatctgacgagcaaggcgttcgagcgcgcagcccactccttcgaagccctggtgcgcaacggcgatcccgagtcccctgatcgcggttttcgcctcacgatcgccgcagcagcctatcatctggctggtttctccgccgttgcctattcgctcttcaacgaggccatggatgatctcaatgcgtcgccgggcgaaacggcgattcggcatttgatcctgcgcgatcttggccagctgcgcggattcgttcgcgactggttggacgatcacgctcacggagatgaggagatcgccaaggcgttgatgggcgaagagaccgacatcgacgaggctctatcgacaatcctcaacacgacaatatgccgggcgctggcgcatttcgacttcgcactggagacgggcgaacccgagccgatcgagaccgcgcgggcgctgctcgccaccgcagtcagcttggcggacaacggcgggaatgttccgttgtggtggatatgcaacctctgccgtcacttgatcgatgacctctggcagcattctctgcacgaaaacttgcccactgaaccgccggagggaacggaggaaaaatacccggatttgcgccggctattcatctcgtcgctcttcgcccgcaagacgtccgaggtggagctatggccatctcagcgcgaagcggctcggcgctccacggatgtcaccgacgatctagtcgtcgccctgccgaccagtgccggtaagactcgcgtggcggagatcgccgcgctgatgaccctgtcgtcggcgcgccgggtgttgatcgtgacgccgctgcgcgcactgtccgcccagactgagcgatcgttcagaaaaacattcgcgccgctcggcttcagcgtttcctccctttacggcgctagcggcctttcggctggcgatgaagacgcgctgcgcatgcgcgagatcatcatcgcgacgcccgagaaacttgatttcgcgttgagaagcgacccctcgctgatcgacaatgtcggccttatcgttctcgacgaaggccacatgattggccccagcgaacgcgagatccgctatgaaaccctcgtgcagcgtctgcttcggcgcgctgacgcaggcgaacgccgtatcgtttgtctatccgcgatcctgcccagcggcgatgagctggaagaccttacagcgtggatacgctctgacgaaccgggcgagcctgtgcgttccgactggcgccccacgcggcagcggttcggcgcgctcacctggcggggcaaggacgcgctgctccggctggacctcgacgacgatggtccgtttctcgacaaattcgtcgtggagaaagccgcgcgggggaaagagaagaagccctatccgcgcaagaactcgcatctcgctctgttcgcggcatgggaattcgccggtcaaggcaagcggacactgatcttctccactcaggcgaattgggtcgagagctacggtaaacaagtggtggacctatgcaaacgcggttatctggactcactgttggaggatgaagcctcgattgcccgcgttctagaggtcggcaaggagtggttgggcgaagaccaccccgccgtcgcctgcctaaagagcggcgttgccatccaccacggccggctgccgagcccattccttcgcgaactggaagcccttctctccgagggtattctgaaggtcatcgtcgcgtcgccgacattgtctcagggtctcaacctcaacgccgccgtcctgctggtgccagcgttgtatcgggcatccgagaagatcacaggcgaggaattcgcgaacgtcgccggccgcgctggacgcgccttcgtagatgtcgaaggccttatcgtgcatgtcatgttcgataaggccgactggcgaaagaaggaatggaggaagttagtggcctccgcaaaggcccggacgctgaagagcggtctcatccagatcgtcgccgaaatccttgagaggctagcccgcgaaggcgtcctggatcgcgatgatgcctgggaatatttggccaacgcacgtgaagcttggagatcgcccaaggaagaggccgaagtcgccgagcgactggcgaccggcgcggagtatgacgctgagggcgacgatgatgaaggcggtggcgatgacaaagaggaaaccatcgaagaggagccgctatcacagatcgtcgagcgcctcgacgcaacggtatttggcctgatcgaagcactcgattccgatcgcgccgacctgccgaagctcttggacgaggcgctcaagggatcgctctgggcacgccagatcgcgcgtgaggacaaggacgtcgccccgctgcataagaaggtgttcgaggcccgcgccgatctcatctggaaaaccaccacggcgcaggcgcgacgcgggcatttcgccatgggcgttggacttgaggcgggtctaaaaatcgacgccatggctgacgagttggccgaactccttgaccgggctgaccatgcggcactgagcggcgacgttgaggcacttgtcgatgcgctcggcggtctcggcgaacgtctgctgttcatgcgacctttcatccccgataaggcgaacgcgctaccgacgaattggaaggctatcctgcgtagttgggtgtctggcgagaatgtggccaagatcggaccgcagaacatgcgagtcgttgaagaggccttcacctatcgtttggtctgggccttggaagctgttcgtacccgccgcatgtcactcggttggtcgccggagacggtggcgggcggcgcagcagcagcggtcgaaactggcgtcccgcaattcatgatgtcgatgctgattcgcgcgggccttccttcgcggcgcgcggcgatggcagcgatcgaggatgctatgccggtcttcgtcacgccagctgagatgcgggcctggctcgagtccgacgagatcaccgcctacaccgacgccggtgactggcccacgcctgattcggccgcgctatgggcgcggttccggaccgacgccctcagcggaggcattcagaaatggtcagtcgaacattacaaacgtctgcttgacaccgcgatagccccgccggctggcctctatcgcatagtcaccgacgagggtgatgggcgaacttggctgacaacacccgactatcaacgtgtcggtgcgttcaagaaaccggcggttgatcccaagcccagcctcttttccggccggttgcccggcggcactaggctggtagaggcgttacgtgtggggcgcggcaagctgagatggcctccagccgatgcatag

SEQ ID NO: 58128 - DNA, 783 bp, Bordetella hinzii LMG 13501
gtggaactgtacgaacggtggtgcgaagccacgaaaaagaaggataagcgcaagtactactggacctatgttgagagggaaggcggtcgagacgagattcgcgcagacttcgccgcgactattcggtcgcactacgaccggctcgaacgcatagccgaagacgtgaagcgcctcggatataaggccgcagcgcagattcttagtgaagcgttgccgcaaaccgctaaaggccggtccggcgatctcggcgaaattcttgccacggaactggtcgaggaagaggttggcttacgtgtgccggtgcgacgcctccgttataaggacggccgcaatatggccatgcgcggcgatgacttcatcggcgctggatacaatggggtggacgagaagctctggcttctaaagggcgaggctaagagcaacaaggtgcttggcaaggccacggttacaagcgctcggaaggtgctgaaccgcgacaacggccgttgcacgcccgattcccttctgtttgtcgcaaaccgtctcctcgagagtaatgatccggacgacaacgtgctgggtcgtagccttcgtgacgaggtgggtgtgaagtccctccgtgccgaccgcatcgaccatatgcttttcaccgtgtcgggtaacggtcctcatgcatctttgaaagaggacctcgacgccgcagggacgaatcgtgaccactacgtagtaaacgtccacgtcgcagatcaccaggatttcatcgcagccatgtaccaggaggcggaagatcttggagacgattga

SEQ ID NO: 58129 - DNA, 3504 bp, Bordetella hinzii LMG 13501; identical to SEQ ID NO: 58127

SEQ ID NO: 58130 - DNA, 762 bp, Methylibium petroleiphilum PM1
atgttggacctatcgaagtggtgtatagagaacgaggaatccgtaccgaagcacaagctgctccgcctggccgttgacgccaccaagcaggcgcaggcagttgaagcggttgccaaggccgtaccgagctactacgtagacccgaagcgaatcgcgggtctgctgaggaagttggggaagccggcagccgcggcgcacgtcgagcagaagcttccaactcaggcgtccattcgctccggtgacctcggcgagattctttgcaacgcctatgtgcacgcagccacgccattcagccttggcatcaaacgtttgcgctggaaggaccatcgcaacatgtcgatgcgcggcgaagatgtcctggcgttcaagctggaccccaagggtggcccgctgaagattttgaaggctgaggtgaagagccgggccgggatgcgtacggaggtgatcgacgaggccagaacggcgctttcggccaacaacggactgccgtcaccacatgcgcttgccttcgttgccgatcgggcgaatgaggctggcgacaccgcgctgggcgatgctctggacaaggcacagctcaaggaaggcattcgcccatctcagatctcacacatgctctttaccttctcaggtaacgaccccttgaagttcctaaaggtgaacttgcaggcgtatgcgggtcctgtgccgcagcattacgtcggccttcgcgtcgaagggcaccaggaattcatcaaggcggtcttcgtggcggtgggcaagtaa

SEQ ID NO: 58131 - DNA, 3498 bp, Methylibium petroleiphilum PM1
atggctgcgacgctcgacgaactccggataaacatcgaagcagccgtggtgcccggctaccgtgcgcgcctgctcgcccgcggccaggcgcgcggcatgatctggcgcgaaggcgttctgccagaggaatctccgaacttcggcgcggagttgtcggacgagctgctgtcctacggttactcgctcctgctgcacgggcttcgctacaccgacctgggtggcgatgccgcaacggcgcgcaaggcctttgagattgccgccgaggcactcgaagctgtcgtcgcacgcggaccggccggcgctgaacgaggctttcatcggctcgtcgctgccgccgcctaccacttgggccgcttctcggctcgggcctactcgctcctctacaaaggactcggcgaggcgaacctgtcgacgatggagacagggctggcgaaactcatgctccgcgacttggacggccttgcccgagatctcgccgattggttcgctgcggaccgaggcagcgacgatgcacttgttgctggcctaagccaacgcgacgccaaggtgaccagcgccggtgctgacgatgaagagacttcggacgaccgagttgacgccgtgctcattgcagttgaagacaacttcatggctgcgctcgcggttgcaatgctcgggctggagcgcggcgatgagaccttgctgcagtcggcacgcgaacgaatacaacgcggcctcgacgtcgccgcagacctcgacctcgtcgccgcttggtggtgccaccgcctggcgatccacctcctgggcggcctatgggagacaagcttccatcaggtgctaccgctcggtggaccgcccggggccgacgtcggcgactgggtgcgactgcgaaagatcttcatcgcttcgctctaccgcagaggccggtccgagatcgagctgtggccatcccaattgcaggcagcacgtcgagtcctcgatgccgaggtgaacctcgtgctgtcgctcccgacgagcgcaggcaaaacgcgcatcgcggagctgtgcatcctggccagcctggcgcgaggccggcgcgtcgtcttcgtcacgccgttgcgcgcgctgtcagcgcagactgaggtcgggctgcggcgcaccttcgcgccagtaggcaagtctgtctcgagcctgtacggcagcatcggcgccagtggcgccgacatcgacgcgctgcgttcgacagacatcgttgtcgccacgcccgaaaagctcgacttcgcgctgcgtagtgatccgacgttgctggatgacgtcggccttatcgtgctcgacgaaggtcacatgatcggcctgggcgaacgtgaggtccgctacgaggcccagatccagcgcctgctgcgtcggcccgatgctgcacagcggcgcatcgtgtgcctgtctgcgattcttcccgatggggaccagttggaggacttcgcgggctggctgacacgtgatcgccccgacgggctgatcaaggacgattggcgtccgacccggctgcgcttcggcgaggtggattggaagggtcagcacgcacagctcaacgtcaacgtcggcgacgagaagcctttcatcccgagattcgtggtcgcgaagaagccaacgcgtggccgcgccaggaagctgttcccggccgatcaggcgcagctgtgcatcgcgacggcctggcgcctggtggaagagggccagaccgtccttgtcttctgcccgatgcgccgctcggtgctgccgttggcagcgaccattatcgagatgcacaagcgcggccacatcgactcggtactggagcaagcgccgtccgcgctgacgagggcgctagctgtcggtaccgagtggttcggacccgatcatgacatcctcgcctgcctgaagctcggggttgccgtgcaccacggcgccctacccacgccgtaccgcaaggaggtcgagcgcttgctgcgcgagggggtgctgcgcgtgacggtctcctcgccgacgctggcccagggactcaaccttgccgcgacctccctggtcttccgcggcgtcagacgcggccgcgacctcctcgacgtagcggagttccgcaatgtcgtcggccgggctgggcgcgcctacatcgacgtcgaaggcctcgtggtgtatccgatgttcgacaaccatcggcagcggcgcaacgactggcaggacttggttgcgaaccacagcggccgggagatggagagcggcctgttgcgtctgatctttacgttactcagtcggatggccaacaagctgggcacccgcgacgtcggagcccttctcgagtacgtcgccgggcaggctgcctgggaattcccggtgctcccgtccgagacgaccgaggaagcaaccgaagcgcggcaccggtgggaccagcatctggcaagcctggacaccgcgatcttcagcctgctgggcgacaccatcgtgcttgatgccgaagtcgaaaccaagctggatgagatcctcgtagcctctctgttccagcggcgcctcgcccgccacaaagaggggatacgccaagcgctgccaaagggactgcacgctcgcgcgcgatacgtctggcgcaacagtacgcccacgcaacggcggggatactttctagcgggtgtggggctggccgcgggcaaggccctcgacaagcacgcgccagaactcgagcaactgctgctgacggcgaacgtcagcatcgacctcggccagcacaatgaggcggtcgaggccatcgtggcgtttgccgagatcgccttcgacatcgcgccgttcaagccggacaagctgatcgacgggtgggaatctttgctcaggcgatggcttctcggtcagcccgtggccgacgcattgtccgaggacagcgacgacgagattcagttcatcgagcaggcgttcgtctacaaccttccctgggctatggaggcggtacgggtccgtgctgaggcacacgaggaccttttttcggacgagatcaagctgtcggattacccgcgggcgcacgcggtcgcagcactggagaccggcacgctgtcgatcgccgccgcgacgctgatccaggcgggtttcggttcgcgcctcggggcaattcgcgccgtcgcggagacgggcgcgacctttgactcgatgagcggtctcatgggctggctcgcatcagacgaggtaggggccttgtccgcggcgccgaactggccaacgccggaatcgaacccactgtgggttgacttcaacggaccgggcggcgcgcaggcgacccagccttgggctgctaccgagtacacgagcgggatcacgtggcgcggtgcaccaatgccgcccgggacggctctgcggctgggcggcggccccgggaaggagcgcagcgtcttcacggctgacttccgggaagtcggagcgatcggctggacgccaagtgcgcagggcctgatcgtcgccgaagctacgggcgacaccggcaagttcacgttggagcacatcggccctggcaaggtgaaccgcgactga

SEQ ID NO: 58132 - DNA, 765 bp, Agreia bicolorata
attaagacatgggtgaccatcacccgggagaacgttggctctcacaaggttgtgcggatggtgccagccgacgaggtcgcgattgatgctggggtaaaatgggccgctgccgccgttcctcgtcattatgtgtctgcggatgagatcgccgcagtgttacgcgagctcggcaagccggaggcggcggaggttctcagcggaaagctgccggtcagtaagcggacccggtccggcgaactcggagagattctcgccacccagtttgtggcgcgcgaactcggataccgcatgatcgcacgcctgcggtggaaggacggccgcgagatgcccatgcgcggcgacgatctcctcggcgttcgcatggtggacgacgacaagctcgagttcctcaagggtgaggcgaaaagtcgcgcgagtctctcgacttcgacactgaatgaggcggaagccgccttgctgagcgagcatggcctgccgacgccccacgcgctgatgttcgtcgccgcgcgtctgcgcgaaatgggcgaaaccaagctgcacatgaagattctcgcggctcagcttcgtggacgtatccgatcgggcgatgtattgcacctgctattcacgttttctggcaatgactctctcagattgctccgcgatcacaccgaggcgtataagggcaagatccggcgcctcggtgtggggctgcaggtcccagaacaccaggcattcatccgtcgagtgttcgagaaggtgatccgtgatgcccgggcgcgttga

SEQ ID NO: 58133 - DNA, 3486 bp, Agreia bicolorata
atgcccgggcgcgttgaggatctcgaagcagcgatcggtcgggcaacggcgccaggcttccgtgggcggcttctcgcgcgtggggaagcgcgcgcaatggtatggcgcgaaggtgttctcccagaggacgctcccccatttgacgttctgctgagccatgatctcctctcctacgggtatgcgcttctggagcacggactggaactgagcgatctagagggatctgccgaggcatctcgacgggcattcgagaacgcggcgacagcgatcgaatcagtcatcgcccgcggggaggtaacaccggacttgggctttcacagggtggtggccgcagctagctttcatctcgctcgattctcagcgagggcttattcccttctggcagcgacgcgcaacgatcagaacacctcccccaccgagagatgcctggtgctactcatgctccgggacctggatagcctgacgacgctcgtctccggaagccgcgcggacgaacgggccgcggacgcaagccttgccgaggagttgcgctcggtgctcgccccggatgaagacaacgacgacgaggccgatgtcttggacatcgtcgatgccgcattgaccgatgcgttcatgggtgcgatcagtgtggcaatgctcgggttcgaacgtggtgaaccacctctcctcacggaggccattgcacgactcgaggtgggtatgcgcggcgcggccgctttgagcatggtgccgcagtggtggtgtcatcggctggcgactcacctgcttcggggactgtgggaatccagcttccacgtggttctgccgatggggccggaaggcggggacgctggcgactgggatcgcctacgcgccacattcatcgcctcgctcttccgccgacgccgatccgagatcgacctctggccctcccaattggaagccgcgtcacgagtactcaacacgcaagacaacctcgtgctctccctgcccacgagcgccggcaagactcgcatcgcagaactatgcatcctggcgaccctggctgaaggaaaacgggtggtgttcgtcaccccgctccgcgcgctctccgcgcagaccgagactgctctcgaacgcaccttcgtccctcttggcaagaccatctcatccttgtacggcaccaccggggtcagcgatgtcgacgagagcatcctccagggccgagacattgtggtctcgactcccgagaagctcgacttcgccctccgcaacgatccggacctgctcaatgatgtcgggctgatcgtgttggacgagggacacatgatcggagcgagcgagcgggaggtgcggtacgaagtccagattcagcgactcctccgccgtcccgacgcgaagactcgtcgcatcatctgcctctcagcgatcctgcccgagggtgacgaggtgaaggatttcgttgattggctcacagacgatgaacctaatggactgatcagcagtgactggcgcccaactgtcctccgatacggagaagtcgtctggcgcgaggacaacgcgagacttaacattactgtcggcggtgaggaaccatatgtcccccggttcctgactgcggaggccgtccccagcaagcaacgaaagctcccgttcccgaaagacgcgcaagagctgactctggctaccgcttggcgccttgtagatgacggccagaccgtcctggtgttctgcccgctgaagagctcggtgaacgcgtttgccaaactgatcgtcaagctggtccggcaaggcgcgcttcgcagcgtatttgacggcgacccgaccgtcctgaacaccgcgctcagcatcggccaggaatggttcggggccgatcatcctctccttgcctgcctgcgcctgggcgtggccatacatcacggctctctcccggggccctaccggaaagaagtcgagaaacttctgcaacagggggcgttgaaaatcacgatctcctcccccacgctggcacagggactgaatttgtcggcaagctcgcttgtggtgcatagtctgtggcgcaaccggaagatcatcgacgccgcggagttccgcaacatcgtgggccgggcaggacgagcgttcgtcgattcgtccggactcgtggtacacccgatgttcgaacccagccgacgagcacgacagaactgggaatggctcgttgaagattcccagctgcgggacatgcagagcggactcgtccgactcctcgccaccatgctccagaggatgtccgacaatctcggcgaaaccgattggggcgacttcaccgagtacgtcaccgggcttgccgactggtcctttcctgtgattgccaccgaagacgaagaagccacaaacgaatccatgaagtcttggccgggccaactcgcgagtctggattgcgcaatcctcggtctactcagcgactcctcagtcgctgaagacgatctcggcgctgcgctcgatgccgttctcgtttcatcactgtgggcacggacgatcgctcgataccaggaacctgtgcgcaacgccctgcgaacaggtctcgtggcccgggctgaggtcatctggcggagcacgacaccagatcagcggcgcggctattacctagccggcgttggcctcgcgaccggccgggaactcgattcgaatgctgagcaactcaaccgacacattcaaatagccgaagctgccatccaactcggcatgaacgacgaagcaatcgacgcgatcacccgcttcgccaggatcgcgctagaaatcttccccttcactcccaagacccggcccgacaactgggaagagatcctggtcgggtggctccgcggacgcccagtcgtggaactcgctgccgacgacagcctcgaaactgcagagttcattgaagaaaccttggcataccgactcccgtgggcactcgaagccgtccgtgtccgagctgcagcacaccccacccccgacacattcccctgggccctatccagtccggagaccggactgagcgtcgctgctgtggaagccggcaccctgaacagggccgcgtcgacgctgatgcgagcgggcttcgcctcccggtcgggagcgctcgccgcggtggagtcaaccgaagctgcattcacgaccccagccgggctacacgagtggatgatctccgaggcagcacaaatcgcaaccagagacgcgtcctggcctacgccgatcacccgcgagctgtggatgagtttcgccacccgcactgtcgtcctccgtcaacgaacctggattcatgaagtgcacgaggcttcggtgagttggattcctggctacctgcccacccccggtgagccataccgagcgatctcccactccgacgaaacaaccgtgctcgaagcagcagatgcccggcctgtcggagtgctgaccgcgcacctgaacctgcgccgtcaggggctactgaaagtcaccgcgatcggagcaggagacgtcgtcgaactcgactacctggggccgtccgaccttcttgcttaa

SEQ ID NO: 58134 - DNA, 774 bp, endosymbiont of Bathymodiolus septemdierum str. Myojin knoll
ttgttaaatataactgataagtcagtagtttctgaacatacccaagatcggcattcatttaagaaggtagaactcaagggagcagaattccaaaatcttattgaagaactcatagatattttgcctgattattatatagaccctttatcaatggctagcactcttgagcgtttaggtaagcctgctgctgcggaaaagctcagaataaaactccccaaagtaacaaaaattcgctctggcgatattggagaaattctcacaacagattatattgatgaaaaaacagtattttctgtaccaataaagaaattgagatggaaagatcaccgcaatatggcaatgcgtggtgatgatgttatcggggtacttataaatcaagaaaatcaaacaataaaattcctcaaagccgaagctaaaagcaatcaatcgttaagtcgtaatgttttgtcaaaggcaagggatgagcttgatcttgatgagggtctaccagcaccacatgctcttgaatttgtggcagaaagacttagagacacaggcaaccaaactttggcaaaccttattgaaaaagcacagctctctgatggaattggtaatagtcaagttgagcacctactttttacctttactgcatcgaagcctgagaaacttcaaaaagaagcatttgatgattatagcggtaatataaagcagtcctctgttggttttcaagttagtaatcaccaagagcttattggaagtgtttatcagggagtgctagatggcctcggcgattga

SEQ ID NO: 58135 - DNA, 3594 bp, endosymbiont of Bathymodiolus septemdierum str. Myojin knoll
atggcctcggcgattgaagagatagaaaaagctattcagcaggcaatagctacaggtttcagagggcgattacttgagcgggggttagcgcgttcaatgatttgggttgatggtgaattacctgatggttcaccaaactttgcgccaagacttagttatgatctcctgtcctacggttattcactgttatctcttgctattcgcctcacagaattgaatggtaaccctgagtttgcccgtgccgcgtttgaaaaagctgccacagcaataacagacgttatacataatggaaatcctgatgatccagagaaaggctttcataaggtgttggcagcatcaagttatcatttagggcgattttctgctaaagcattttcattgctcaatcataatattgaaaatgaaaatttgagtcgaatagagaaaatgctatcgttactcatgttaaggcaatttgctgcgcttgaaacttctgtattagcttggaaagaatcaggacttggctcagataattccctagctgaaaagatagactttgaaattgaccaactcaatggacaacttgagtcagaggatcgcccagaagaatatggaatagcatcaattgagttacctataattgatttggcaataactgataattattattctgcaatttatgagtttctattcgcactagaaatagggaacattgcactacttgaaagtgctattaatcggatagaaaatagcttgtctattactacagagcttaacatgctaccgcaatggtgggttttgagaataaccaaatacctatttcgtgatctttgggagtccagctttcatacggttcttcctgttactcctgatcaggaaaatagtgaagattgggcactactacgctggctatttattgcttcattattcaaacgtaataaagctgagattgatctttggccatcccagttagagggcgctaggcgagcggttaatgatgttgatgatcttgtggtttcacttccaactagtgcgggtaaaacgcgtatcgcagaattatgcattcttcgatgtttatctattggaaagcgcgtgctctttattacgccgctcagggcgttgtccgctcagacagaggcatcacttcgtaaaacgtttctaccgttaggtaaatcagtttcttcgctttatggcagtattggaacaagcgactttgaacagaatgtcataaagtcaaaagacatagtagtagggacgccagaaaaattagattttgccttaagaaatgacccttcattaatagatgatgttggtctcgtggttttagatgaagggcatatgattggtctaagcgagcgggagataagttatgaagtgcaaattcagcgactattaaaacgagatgatgctgagcaaagaagaattgtttgcctttcagctatattacctgatggcgatcagttagaagattttgttggctggttgcgacgagataaggaaggcggtgctatacaatctttatggcgacctacagatttaagatttggtgagattgtttggcaagcaaatactggacgaattaattttactattggtgaagagaaaccatttatccctaattatattcacccctttattccgccagttggtagaagaagcacaccgtttcctaaaaataaaaaagaactaaccttggcggcgacttggaggttagttcaggataatcatacagtcttaatatattgcccagaaaaacggtctgttaatagttttgcaagagatattatagatttgcataagcgagaggcactcgactcagtattgtctgttccgttacaacaactagatttagcaatagtgttaggagatgagtggcttggtgatggacatccaattgttgaatgcttaaaaataggtgtagctgttcatcatggcgctcttccaactcctttcaggaaggaaatggaaaagttgttacgcgaaggtattttgaaagttacagtttcatcccccacccttgctcaaggtctgaatctatctgcgactgccgttattgtttattcattaacacgtaataaaaatataatagatgcatctgaatttaaaaatgtgattggtcgagctggtcgagcttttgttgatacacatgggttagtcctctacccaatatttgaaagacatgattggtttcggactcagtggcgcaggttagtagaagatacaaaggcacgaaatatggagagtggtttggctcttcttgtcatcactcttgtaagtcgaatagctcagagtatagggaactcagatattaatgggcttcttgagtcagatattaatgggcttcttgagtcagatattaatgggcttcttgagtatgttttaaacaatactcaagcatggggatttcctaatgttgctaatgagaccacagaacagatcaaggcgcaaaaaattgcatgggataagcatatagtaagccttgatacagctcttctaagtatgttaggcgaggaagatgtttcaataattgatataccaaatgcacttgatgcaatccttcattcttcactatggcaaagaagtttaaatcgtcatgatgaagagaaaaaaggactaaaaggactgtttgattccgtattagctcaacgagctaaatacatatggaatgttacaactacctttcaacgcaaaggatactttcttgcgggagttgggcttgatactggtcagaggcttgatgctatatctcctcaagccaacgtattgcttgtaaatgcgaacggatatatatctgccaatgagcaacagttagcaatagctagaataatacagttggctgaattagtttttgatattgcaccttttaccccgcgtaatttacctgatgactggagagaaatcttggcagtttggttaagaggcgaaattctcacagagcatgaatttaatgatatcaacgaagctctgatgtttatagaggatggcttaatctaccgtctaccttggggattagaagctattagagttcgtgcgcaagccaatgaagatgttattggtgatagtgcaacaatagatgattatgaagttgggctggtagttcctgctatagaaaatgggactttaaatagaagtgccgcactgttgatgcaagctgggtttaactcaagaaaagctgcgatacatgcggtcagttcaacaaacgcctctttcacaacaggcgttcaattaaaagcatggctaaattctgtagaggtttttgacctcgctattgaacctgattggccaacacctgaaacttctaatttatggcgggattttataaaagagtatgatccaaaaccggagaccacatggaaattggctaattcaataatatctgttgtttggataaataactataatcccgttgctggaagatttgtgaagcttcataatcttaaaaaaggaaacactctaatactaggatcagatggtgagctaataggtagtattgctaactaccgatataaattactcgacggtggcatttatcgctctagtattcatagtgataccagttatattgatgtgagatattggggggcggaaggtagcccttttgattatcatgtttaa

SEQ ID NO: 58136 - DNA, 774 bp, Pseudarthrobacter sulfonivorans
atgaacgtcgtgaccatgtttgatagttggtgctcgaagggggtgctcacttcgatcgcaggccaagcatctagccaaattgactctcatgacgacgccacgggcgttgcggtcctagctgccaagcttcccgatgcctacgccgaaacgacggctctagcgttgatcgcagaacggcatggaaagcccggggtggcggcttttctccgccaccgactgccaacaaagaagagcgctcgatccggcgacatgggtgagatcctggcgaccgcgtatctcgccgaggagcgcggctacgtcgtcggaccaagtcggctcatcgaccgtgaccaccaagagtgggcgatgaggggtgacgacgtgctcgctgccaggattgacgccggctcagagctgcgcatcgtcaaagccgaagccaagagtcgcgtcaccgtcggtggagcaacagtcaaggaagcccgagaggggctcgcccgaaacgccgaaatgccctccccacattcgctgtcccagttcgctacccgactcctgaagacatctgatcgcgagattggtgaggccgtactcgacttgcagctgaccgacggggtgaggccggatcgcgtacgtcatttgatgtttctgctgacggctggcgacccaagcgctcatgttggcgcagatctcaaagcatacgctggcacggtcccccaactgaccgttacgctccgagtccagcaacaccaaaagttcatcaatgacgcctacgacaaggtggtcgccagtgtcccgtga

SEQ ID NO: 58137 - DNA, 3549 bp, Pseudarthrobacter sulfonivorans
gtgtcccgtgacgcacaagctctggtcgctggcctcagcgccgccacagacgcgcgcttccgcagtcgcctattggcccgcggacaggcccagtcaatgattcgccgggacggcgtgcttccgaacggctcgccggagttcagccccttcctcgacgccgacctcctcaactacggctacgcgctactcgccgacggaatggacctactcgaggagctagaagcagacgacgacggtgacggcgacggcgacgcgaccagccaaattgaggtcgcccggctagcgttcattcagagctcatacgctttggaagctgccactcgcaacgccgcggatactcccgacaagctgtttcatcgactcatcgcgggtgcggctagccatctcggtggttacgccgcccgtgcgttctcgctgatggaacggagccgggaatccggccagttgacgcccatggagctcaccctggcggacctgacaatgcgcaatctcgacgccatcgaggaacgaacacggctgttgcgctcttccgaaaatgtctcggacgacgtcctgctcgcttccctctcgggcggcgacaacgatgccgacaacgacgcagtcaatccgcttggccccgtggctctgctgctcggcgagaactacctctcggccgtgtccaggggactctttgggatcgaggtcggcgaacgcgaacttctagccgaggcactggaggatctgactctcggcgagcgtgcctcgatggacgtaagcgctcccggaccttggtgggtctaccggctcactcgtcggatgctcggcgacctcttcaacaccagcatcgacgccaacgttccagtcgacccgccaaccggcggcgacgacgtagtccctcgttggcgctacctgcgccgtaccttcattgaaaacctcctggcacgagggcggtccgagatcgacctgtggccctcacagctccacgtcgtggatcggattttcgccgacgtgcgcgacctcgtcgttgcccttcccaccagcgctggcaaaacccggatcgccgaactagcgatcctggcatgtctggcacaggggcggcgtactgtctacgtcaccccgctccgtgcgctctctgcccaaaccgagcaggtcctgacccggacgttcgctcccctcggagtgcgagtgtcgtcactgtacggcagcatggggatcagcgatgtcgacgacgacacgttgcgttcaagtgagatcgtggtcgccaccccggagaaactggacttcgcgctccgatccgatccctcggtattggacgacgtcgggctggtcgttctcgacgaaggtcacatgatcggggcgtctgagcgtgaggtgcgatacgaggcccagattcagcggctcctgcgccgcccggacgcctcaacccgtcggatcgtctgcctgtcagccgtgtttccctccggtacagagttggaggacttcgtcgcttggatcaccgacgacgaacccgaaggcctgcaccaggagacctggcgcccaaccctgcaacggttcggcctcgttgaatggcttggcgatcacgctcggctggcaattaccctggggtctgaccagccgttcatccctagatacttcgaggctaaacagccgatcggtaagcgcacgaggccgtttcccgcggaccagcgcgagttggtgattgcgacagcgtggcgattggtcgacgaaggtcaaacggttcttgtcttctgcccccagcgcaactccgtcgagccgtatgcgcgcgaaatcatcaaaatgcacaggcaaggcctcatcaccgccgttctacctgaccacgtcgacctgagcggggcgctcgttgtcggagccgagtggttcggtgccgatcatccgattctgaggtgcctcgagctcggagtcgccattcatcacggagccttgccgggtccgttccgtagagaggttgaaaagcttctccacgagggcacgttgaagatcactatcgcctcgccgacccttgcacagggactcaacctctcagcgtctgcggtgctattccacggtctcaaacgcggccgcgaactgctgaagggctccgatttctccaacgtcatcggccgagctgggcgtgccttcgtcgacaccgaggggctggtgctctacccgatcttcgagccgcgagcgtaccagcgacagcgactacggcaggactggctccagctgacccaaggcgatgggggcaaggcgctggactcaggcctcatcgcggtcggcttagcactgctcggccggatgcacatctcccgcggggctgggcctatcgagccttttctggactacctcacaggtggtccggactgggcccttcctgtcctgcagcaagagtcggcggcagaccacgcgacagccgctgccgcatggagctccaacctctctttgctcgatatcggcattctcagcatcatgggagacggcgcttacgacgccgacccggatgctgccacgcaggtgatcactgatgctctcgttgactcactttgggagcgtcagctacgccgccgagacaccggcgtagctacggccgtccgcgaattggtgacgggccgggtccgacatctttggcgaacgtcgacgccttcacagcgtcgcggctggtatctagctgggctgggcgccgacgccgggtcgagcttgtctgcgatttcagggcaggtggtcgacctaatggagcaagtcgaagtcggcctggtctacgaggactacatcgccgcgtccgaccgactcgtcgagatcgctgctgtcgtctttggtctggacaccttcgcccccgaagtctcaattgataactggagcgaagttcttcgccaatgggttcatgggctgcgccttgcagaccttaccggggaccgcgttgctatcgcgcagttcatcgaaaccgacctggtctatcgcttggtctggggcatggaggccgcccgggtcttcgaagctgcccagggcaacgcactcgccgagacgctgagtggcaccgccgtgaccgcggtcgagacggggaccttcaactggtctgcatcggtgctcatccgctccggcttcgaccatcgcctcgccgcgcagaaggccgtcgtcagcactggcgccgagttcgactcggtagcggacatgcgccagtgggtcaataatctcgacccttggttcgctcacgacgaagcgtggccaagccccgaatctcggcaagcgtgggagatgttcgcgtcgcacgcccgccgcccgcgcctccggcaatgggggcgcagcaccaaggacatcgacgatgttacgtggtacggagttgtgcctggcccaaagacctggctccgcatcaccgaacttgacgcaaagactgtccaaatctggacgactggctttgacctcctcggcgaggctagtatccaactgaatcccgagcgactcgggattcttcgcgcgcaacgcatgtctagctcccaagggatccgtttgctgtatcgcggcccccgagacctcttcgcttccacaggctcaaggagttcgacccagcccccgtag

SEQ ID NO: 58138 - DNA, 771 bp, Pannonibacter phragmitetus
atgattgaagactggctgaacatcgaggaggcggagcacggcgaaagaaagcgcctctttgtgcttggcgagagaggtggcggtagagtcgcagtccaggcggacctcatggagcgtgtccgcgctcactacgacgatccgcggcacattgccgacgacattgccgagctgggattccccggcgctgctgccattcttcgcgagcgcttgccgaccgacgccagaacgcggtccggcgaagtaggcgagatattggctacggagtttgtggagcaccagactggattccggatccccgttcgccgcctgcgctacaaggacggtcgcgaaatggccctgcgcggcgatgatttcctcggcatcgaggaggtagatggacgccttgcctatctgaagggcgaggccaagagcggtcaggcgatggccgcaggtgtgataaacgccgctcgtgcccggctcaatgacgacgatggccgtcccacgccgatctccctactgtttgtagccgataggttgctggaggggagcgaagaagacgaggcgctaggtcgccaaatccgcaatgctgtcggcagaggcacgattcgggcgcgtgatgtcacgcatggactgttcacgttaaccggcaacgaccggcgcgccgacctcgaagccgatcttgcaggtgctggcggtgaccacggccatatctcggtgaacctccgcataaacgaccaccaggagttcatcgcctggatttatgaagaggccgagagccttggaaacgattga

SEQ ID NO: 58139 - DNA, 3414 bp, Pannonibacter phragmitetus
ttggaaacgattgaggagcttcaggaatttatcgaagtgatggcgcagccgacggtacgcggtcggcttcaagcacggggtgacgcgcgggcgatcattaggagggccggccaacttcccgagggtgctccggctttcgcggtgagtctcgacaccgatttgtccgagtatggattctctttgctccgtgcatcgctcgccctgcgggagcggggcgagggcgacccagcaatatggcgcgagggctttctcaaggctggcaatgccttcgaggcccttgtccgcaacgggtcaccggaactctcccagcgtggcttctggcgtgtgatgggcgcggcctcgtaccatctcgcggggtacgcagcgatggcgttctcgctgatgtctcaggccgaagaagaagcgaatcttgcgcccgcagaacgcgtgatcgtacggctactccttagtgatctcgggactctgcgtgacgaggcgcgatcctggctgcgcaatcctgaatacggcgacgatgctctccaagctgctctcgaggtcggcgatcaggagatcgacgacatcttgtcgatcatgctgactacggcggtcttcagagctttcgcgttcttcgaattcgcgttgctcaccggcgataccgctatgcacgacggagcgctatcaatactccggcgcgctctgagagtggccagcaatgtcggtgcggtatcccattggtggatcatccgcgtagcccgaaatttaattgacgatctctggggcaatagcctccaccatgtgctgcctcaaatcgggccagccggcacggatggttatgccgcgctgcgggagatgtttcttgcgtcgctttatgcgcgcaagacggccgaggttgagctctggccttcgcagatcggcgcggcgcgccgcgcaaccgatttgactgatgatctcgtggtggctctgccgacgagtgctggaaagacccgcgtcgcggaaatctgcaccctcatgtcgctcagtgcagagaagcgggtgttgctcgtgacgccgctgcgggcactgtcggcgcagaccgagcggtcctttcgcaagacgttcggtcctctcggattttcggtgtcctcgctctacggtgcgagcggcgcaatgccgggagaccaggacgcactgcgctcgcacgacatcgttattgcgacgccggaaaagctggacttcgcgctaagaagcaatccgcaattgctggatgatatcggattgatcgttctggatgagggacatctgatagggccgagcgagcgcgagctccgctacgaaattctcgtgcaaaggcttctgcgccgcgcggacgcggtcgaccggcgtatcgtctgcctgtcggcgatcctgcccgatggcgaacaactcgaagatctgacggcgtgggtgcgtagcgatgccgagggcgaagcggtgaaatcaagctggcggccgacccgtcagcgtttcggaacgctggcgtggggcggacagggagcgcgcctgacattcgatcttgatgatgacggacccttcatccagaactttgtcacggagcagcctcccatcgctccgcgtcgaacgccgtttcccagagacaatcccgagttgaccattgctgcggcatggcagtttgccgatgagggcaagcgcacattggtattctgtacgcagcgggatcatgtcgagagctacgcaacgcgcattgtcgacctcgcccggcgtggcttcatcgctccacttcttgctgacgaaggcgcaatagagagggcgaaatcggttggggctgaatggctaggtgcagagcatccggccgtccgctgccttgaactgggcgtggccattcatcacgcgcgtttacctaaccctttccttcgcgaggtcgaacgcctgctaaacgaaggcgttctaactgtgactatcgcatcgccgaccctcgcccaggggcttaatctcaacgcagcggtcctgcttgtgccgaccctgtatcgcgcgggaactcccctcaccggcgaggaatttgcgaacgtcgcggggcgcgccggacgcgccttcgtcgatctcgaagggcttgtgatccacgtaatgttcgaaccgctgcgttggcgcaggcaggcatggcgcgagcttgtgaacgcatcaagggcccggacgcttgagagcgggcttattcagatcgccagcgaaattctcaatcgtctggcgcgcagcgggacgctaagtcgagacgacgcctttgagtatctcgccaacaaccgagatgcctggaacatccatgtcgacgaggaagacgacgagcctttcgagcttctgctagagaaactcgatcacgcgatccttggtcttgtcgaagcgctggatgctgatgatgcggacttgccgcggctcatcgacgagtcgctgaacggttcgctttgggcgcggcagcttgcccgccgtggcgatgacctgcgtgagcgccagcttgaattgttcagggcgcgctcggggctgatctggtcgcagacgaacgccgatcaaaggcgcggtcattttgcgatgggtgttgggcttgagtccggattgacactcgacgcgatggccgacgagctcgccgtgttgctcgaccaagccgacgaggcagcgttgcccggcgatagcgaggtgctcgttgcatcgcttaccacgcttgcggagcgcttactcgctatccgcccctttgttcctgacgatcctctgccgggcaattggcgcgagatcctggccgcgtgggtttccggaacgccagtgcacgagatcgggccggacaacatgcgtttcatcgaggacgtatttacgtatcggctcgtctgggcgctggaggcacttcgtacccgaagggttgcgcttggctggcaacccgagatcattgccggcacagccgctgcctgtcttgaggccgggctgccgcgctacacgatggcgatgcttgtgcgcgccggacttccttcaagagccgcggccctcgccgcaattaatgatcaggatccgattttcatcgataacgatggtctcgttgtctggctcgaaaccaatgaagttgtcgcgatgacagatgccggagactggccaacgccagcgaccaacgacatttggaaagcattcagggccgagatgctgaaccgcatcagccagcgttggacctcgcgcgactggcgtataaatatcgaaccggcgacgcggcagatcgttccggttccggccagtccatatcgggtcgaggtcgacgaaacagacaatgccgtgtgggttcttacgcctgacttcaaagtggtagccatgcttgggcaaagtatggttgacgccgctccaagtgtgctgactgctcgctttgatgaaggcagccctcaggcgatcattcgccggcatggtcgctcccacgcgtcttggtctgagccctaa

SEQ ID NO: 58140 - DNA, 771 bp, Pannonibacter phragmitetus
atgattgaagactggctgaacatcgaggaggcggagcacggcgaaagaaagcgcctctttgtgcttggcgagagaggtggcggtagagtcgcagtccaggcggacctcatggagcgtgtccgcgctcactacgacgatccgcggcacattgccgacgacattgccgagctgggattccccggcgctgctgccattcttcgcgagcgcttgccgaccgacgccagaacgcggtccggcgaagtaggcgagatattggctacggagtttgtggagcaccagactggattccggatccccgttcgccgcctgcgctacaaggacggtcgcgaaatggccctgcgcggcgatgatttcctcggcatcgaggaggtagatggacgccttgcctatctgaagggcgaggccaagagcggtcaggcgatggccgcaggtgtgataaacgccgctcgtgcccggctcaatgacgacgatggccgtcccacgccgatctccctactgtttgtagccgataggttgctggaggggagcgaagaagacgaggcgctaggtcgccaaatccgcaatgctgtcggcagaggcacgattcgggcgggtgatgtcacgcatggactgttcacgttaaccggcaacgaccggcgcgccgacctcgaagccgatcttgcaggtgctggcggtgaccacggccatatctcggtgaacctccgcataaacgaccaccaggagttcatcgcctggatttatgaagaggccgagagccttggaaacgattga

SEQ ID NO: 58141 - DNA, 3414 bp, Pannonibacter phragmitetus; identical to SEQ ID NO: 58139

SEQ ID NO: 58142 - DNA, 777 bp, Stenotrophomonas acidaminiphila
atggcgcaattcaacgattggtgcttggcgatcgatgttccggtaggcaatcacttcagcagggttatgacgggacaggcggagcgcctgccggtgggtatccaagctaccgcagccattgtgccgacacactatgcatcggaagaacaggtcgcacgcgcacttgcacgtctgggaaagccggcatcggctgcgctgattcaaggccggctaccgaccacgaaagcgatccgatccggagaccttggggagatctatgcgactgaatggatcgacgcgcatagcggctatcgcgcgccaatcaagcgattgcgctggaaagaccatcgtaatatggcgatgcgcggcgacgacgtcatcggcatccttcaggatgctcagacgcagcaattgctttttctgaagacggaagcaaagagccgtgccaccctgaccgcacaagtccttacggatgcgaggaccgcactcgacaaggatggcggcctgccctccgcacatgcgctttcgttcatttccgcgcgattgctcgaactgggcaatctaccgcttgccgatgctatcgacgacgcattgctcaagcatgggattccggctcagaacgtccggcatcttctcttcacattctcaggaaatccgccggacaccctgctaaccgctgctctccagacgtacccaggggcgatcaaccaatggggtgtcggactgcgcgtcgaagatcatgccaatttcatcggagcggtctatgaccgagtgatcgctgatgccaacaacacctga

SEQ ID NO: 58143 - DNA, 3522 bp, Stenotrophomonas acidaminiphila
atgccaacaacacctgaagcaattgcggcagacatcgcggaagcggcaactgcaggctttcgcggaagcctcatcgcgcgaggccaagcgcgagcaatcatctggcgtgatggggcgctaccgcccgacgccccgggcttcgcgccacagctcagctacgacttgcattcctatggctacgcccttctggggcttggccttcgcctgcgcgaactgagcggatcggatgcacaggcgcgaaccgcattcgagcaagccgccaccgcccttgaggcggtgatcgccaaaggcaatccggatgaggtcgatcgcgactttcactttgtaatggcggcggcgagctaccatctcgcgcacctttccgcgcgcgcctattctctgctggcgatcgtcgcggcagacgggaattttgcacccacagaacgagtcctgagcttgctgatgaggcgggactttcgcacgctgcgaaccagtgttctcgactttcgagcctctggcgaaggcagtgacaccgagatcgccggacggatgcgggtcaggctcgacatggtcgggacagggatcaacttggccggcgacggggaggacatcctcttcgaaggactggacaaggcgctgacggacacgttcatggcagggatatcgctattcctgctggctctcgaccgaggcgagcgggcgctgcttgatcaggcactggagcgacttcgtacgggccttgccgtctgcagcgagatgaacatgcttccacaatggtgggtgcatcgaatcgcgattcatctgctttctgacctatggtctagcacctttcatgagaggattccgtttcagccggcgggcagcgaggcggccgactggcccgcgcttcgcagattattcatcgcactaatgcagagccgcccaaaggccgaaatagatctctggccttcgcagacagaggcggccaaccgcgctgtcgaccagtcagatgatctggttgtctcattgccgaccagcgctggcaagacgcgaatcgctgaactatgcatactgcgctgcctcgccgccaataagcgagtggtgttcatcactccgctgcgagcgctatctgcacaaactgaagcgaaccttcaacggacgttcggcccgctaggcaaaaccatctcggcgctctacggaagcataggcgtcaacggcttcgacgaggacgcaattggcgaacgggacatcgtagtagccacgcctgagaagctcgattttgcgctgcggaacaaccctgcccttctcgatgacgtcggtcttctcgtcttcgatgaagggcatatgatcgggctcaacgagcgcgaggttcgctacgaggtgcagatccagcggcttcttcgccggccggacgcgcatggacggcggatcgtttgcctctcggcaatcttgccggatggtgatcaactcgacgacttcgcgggctggttgagacgagaccatcccggcggacttatcaagaacgattggcgtccgactcgactgcgattcggcgaagtgctgtggacgtcgccaacagctcgattgaaccttcgcgtcggcgatgaacgcccttgggtacaacgcttccttgttggggaagctcctccccactggataccgccgaagcgccgtcgcacgcgtctctttcccgacgaccagcgcgaactctgcctggcgacagcctggcggctgatcgaggacggccaaacagtactcattttttgcccggaacggcgcagcgtcgaacccttcgccgacgtgattgttgatctccatgagcgtggtgctctgcgctcattgctccaaaccgaccccgcggcgctcaacaccgcgatcgcacttggcgaggaatggcttgggccagatagcgcgatcctcaaatgcctgcgcattggcgtcgcgcttcatcacggagccctcccaaccgcttaccgcaaggagattgagcgcctgttgcgcgacagcgtgctcaaggtgaccatctcgtcgccgaccctcgcgcaagggctcaatctatcggccacggccgtcgtcatgcactctcttcaccgaaacggtgagaggatcgaaatctccgagttcaagaacgtcatcggccgggccggacgggcctacgtcgatgtcgagggtattgtgcttttcccgatgttcgacgagatcgccaggaagcggcgcaactgggaagcgctcatcaccgatctcggcgcaagagaaatggaaagcggcctggttagactggtcgcagccttgctgatgcgcatgcacgcacatactggtggcgacctcaatcaactggtcgagtacgttgtcaacaatgcagtcgcctggaccttccccgaactggcaaacgaagcgcccgaggatcgggagcgtgcccttgccgattgggagcggcacatcgcgacactcgacaccgccatcctcagcttgatcggtgacaacaacatccccgaagagggtgttgaagcggcactggatgacgttcttcagttttctttgtggtaccgccgactcttgcgtcaagacgagcatacccagcacgctctcaaggcgggtcttctctcccgaggccggcttatctggagtcaatcgacggcagcgcgccgccggggctatttccttgcaggggttggactggcgacagggcatgcgctcgatgcgattgctgaggacgccaatagccttctgatccaagccaatggtggcatccttcaaggcgacgccgaggcggcgatcgctgccgtcaccgcgctggcagaacgcgtcttcactttttatcctttcacgcccgaccctatgccagcaacctggcgagacatcctgcgtgcctggctcctcggagagcctcttgccgccatcgctgccggccaagaatccgacacgttgcagttcatcgagggggggcttgtctatcgtcttccctgggcgatggaagcgatacgcgtgcgcgcaatcgcgaacggcgacaccgtagacgaactgtctctggacgaatacgagctacgcttggcggtggccgcagtggaaaccggaaccctaaaccgttcggccacgatcctcattcaagccggcttcaactccaggctcggcgccatcaaggccgtgacggacgcaggagcgattttccaaacagctcaggaacttcggcattggctcaactcggaagcccatgcaggattgctcgcaagagctgactggccgacaccagaaacaagggaaatgtggatggagttcacgcgaagcttcgtcccccaggaaaacagcatctgggccgatcgccgctactgggcgggtgttgagtggctcggcgtaccgccgccgccacacacccctgttcaacttcatcaacggaatggtcagatcagcgtgctcgcggcagacggcactccgatgggcacgctactgaatgctttgaaccccaagagagccggtttgctcatcgctgaggttgctcaagacattagccgactcgacctcatttatctcggacctgatgactttgttgatatcccgtccgcatag

SEQ ID NO: 58144 - DNA, 777 bp, Enterobacter hormaechei subsp. oharae; identical to SEQ ID NO: 56546

SEQ ID NO: 58145 - DNA, 3501 bp, Enterobacter hormaechei subsp. oharae
ttggagacgactgaagaattaagcaccttcctgacggccgctacagttgacggtattctcgggcgcctcctctatcgcggtgcagcttggtcgttgatgcgcaagaatggcgtattgccgcaaaacgctccgccgcttggcgcaaccatcgaaacagatcttgccgagcacggttttgccctgcttcgaggcgcaatggcactgcgggctcaggctggtgcttcggaactcactggcaaggcctttgagcgcgcagccaacgccttcgaagccctcgtgcgtaatggtgatccagagtcgcctgatcgcggattccgccgcaccattgctgctgcagcctaccatctagccggcttctcggccgtcgccttttcaatcttcaacgagatagaggaagaccttaacgtctcacccggggaaatagcgatccgacacctgatactgcgcgatctcgatcaacttcgcggcttcgttcgcgactggttgaattatggggctcacggcgatgagcagatcgcggcggccctgcagggcggagatgctgacgtcgacgaagtactgtcgacaattctcaatacgacgatctgccgtgccctggcatttttcgacttcgcgcttgagacgggcgaggttgagtcgttcgaagccgcgcgagggctccttaccaccgctgtcgggcttgccgacaacgctgagaacgtcccgctgtggtggatctcgaacctctgccgtcacctgatcgacgacttgtggcaacactcactacaccagaatttgccgactgagccacccgagggtgcggaggaaagatatcccgacctgcggcggttgtttatatcttccctttacgcccgcaagacctcagaagtggagctatggccatcgcagcgcgaagccgcccagcgctccacagacgtcacggacgatctggtcgtcgccctgccgaccagcgcgggcaaaacacgggtggcagagattgccgcgttaatgaccctatcctccgcacgccgggtgctaatcgtcacaccgctgcgcgctctttcggcccagaccgaacgaactttcaggaagaccttcgcgcccctagggtttggtgtctcttctctctacggcgccagcggcctttcggccggtgatgaagacgccctccgcacacgggagatcatcattgcgacgcccgaaaaactcgacttcgcgctgagaagcgaccagacgttgattgacgatgtcggcctgatcgtcctcgacgaaggccacatgatcggtcctagtgagcgcgaaatccgctatgagacgctcgtgcagcgtctacttcggcgcacggatgcggcagagcgccgaatagtttgcctttccgcgatcctgccaagcggcgacgaactcgacgaccttaccgcatggattcgttccgacgaacccggggagcctgtgcgttccgactggcgcccaacgcgccagagattcggcgcgcttacctggcgaggtaaggacgcgttgctacggctcgatctagacgacgatggccccttccttgacaaattcgtcgcggaaaaaccagcgctcgggaaggagaagaagccctatccacgcaagaactcgcacctcgctctgttcgcggcatgggagttcgcgagccagggcaagcgcaccttgatcttctctacccaagcaaactgggtcgagagctacggcaaacaagtcgtggacctctgcaagcgcggctatctggactcgttgctggaagacgagactccaatcgcccgcgccctagaagtcggcaaggaatggttgggcgaggatcacccagccgtggccagcctgaaggtgggcgttgccattcatcacggccgactgccgagcccgttcctacgcgaactggaactgcttctatccgaaggagcgctaaaggtcattgtcgcttcgccgacgctctcgcagggcctcaatctcaacgctgccgtgctgcttgtgcccgcgctatatcgcgcctcagagaagatcaaaggagaggagttcgcgaacgtggccggccgcgccggacgtgcattcgtcgatgtcgaggggctgatcgtccatgtcatgttcgacaaaatcaaatggcgaaagaaagaatggagggaactggtcgcctctgccaaggccaggacgcttaaaagcggccttattcagatcgttgccgaaatccttgagcgtctatcacgcgagggcgtcttggatatagatgacgcctgggaatatctcgccaacgcccgcgaggcttggaggtcacctgaagaagaagcagtggtagcagaacgactggcagccgcagtggaatacgacgcttccaccgacgatgaagacgagacggatgacgaggaggaaaccatcgacgaggagcccctgtctcagctcgtcgaacgcctcgacgccaccgtattcggtctgatcgaagccctagacgctgatcgcgccgatctacctaaacttctagacgaggcgctcagggggtcactctgggctcgccaaattgctcgggaggacgaggatgtcgcttccctgcaccggaaggtattcgaagcacgcgctgctctcatctggaaagctaccaccccccctacgcgacgcgggcatttcgcgatgggagtagggctcgaagctggcctcctcatcgacgctatggcggacgagttggccgaactcatcgacagggcagacagtgcagcgttgagcggcgacatcaacgaactcgctgatgctctcggcggactcggcgaacgcctgctgttcatgcggcctttcatccctgacaaggcgaacgcgctgccgccgaactggaaagctatcctacgtagttgggtgtccggggaagaagtctccaagatcggcccgcagaacatgcgggcggtcgaagatgccttcacctatcggctagtctgggcgctagaagccgtccgcacccggcgcatgtccttcggctggtcgccggatacggtggcgggcgccgctgcggctgcggtcgaaaccggtgtcccacagttcatgatggcgatgctgatccgcgcaggcctgccgtcacggcgcgcggcaatggcggccatcgaagatgctgaaccaatcttcgtcacgcccgcagaaatgcgggcctggcttgaatccgacgagattacggccaaaaccgacgcaggcgactggccaacacccgacacctccgcgttatgggcccgcttccgaaccgaagctctcagcggaggcatccagaaatggtccgtcgaacgctataagcgcctactcgataccgagtcctccccgcccgctggcctctatcgaatcctcaccgacgaaggggacgcgcggacttggctgacaacccccgactaccagcggatcgccgtcttcaagaagccagcggttgatcccaagcccagtctattctcgggacagttgccgggcaaaacccggctcgtggatgctctacgcgtcggccgcggaaagttgcgttggccgactgccgacgtctaa

SEQ ID NO: 58146 - DNA, 780 bp, Enterobacter hormaechei subsp. oharae; identical to SEQ ID NO: 56508

SEQ ID NO: 58147 - DNA, 3534 bp, Enterobacter hormaechei subsp. oharae; identical to SEQ ID NO: 56509

SEQ ID NO: 58148 - DNA, 780 bp, Enterobacter hormaechei subsp. oharae; identical to SEQ ID NO: 56508

SEQ ID NO: 58149 - DNA, 3534 bp, Enterobacter hormaechei subsp. oharae; identical to SEQ ID NO: 56509

SEQ ID NO: 58150 - DNA, 780 bp, Enterobacter hormaechei subsp. oharae; identical to SEQ ID NO: 56508

SEQ ID NO: 58151 - DNA, 3534 bp, Enterobacter hormaechei subsp. oharae
atgccaacaacccctgatgctatcattgctgctataacggacgcggcgacggtcggctttcgcggcaggctaattgcacgaggtcaggcacgtgcaatgatctggcgtgacggtgttcttcctcctggtgcgccggatttctcggctcaactcagcttcgatcttcacagttacgcgtatggtttgcttggactaggtctgcgccttttagagtcagatggcgacccgaatcaagcacggatcgcattcgaacaggcggcgacagcgcttgagtcggtcatggccaacggcaatcgcgaagaagctgatcgcgatttccattttctccttgcagctgccagttatcacctcgcgcacctttctgcccgggcctattccctcctcgcaattgtggccgatgaagcaaatttctcgccgatcgagcatgcgctaactctgttgatacgccgagatatcaattcgctgcgtacacgcgtatatacctttcgtctcgatggtcgtggatctgatgcgaccattacgacattcttacagcagcatctcaccgagtccatcgttgccgatgcggcggaacgagatggaaaggactttcttttcgaaggcctgaatctcgcactgacagatgttttcttcggtgccttttcgatgttcctgctcgccctagatcgcggtgaatatactcttctcgaaaaagcgatcgcccagcttcgtgaaaacctcgatatcggcggggagctgaaccttataccgcaatggtgggtgcaccggattgctatccatctgcttaaagatttctggtcgaacaccttccacgaaaaagttccgctgcttcccgctggcggcgttgccccttcgtggcctgtccttcgtgaactctttattggcttgctcgctcgacgcccaagggcagaggtcgacttgtggccgtcgcagattgaagcggcatcgcgagctgtcaaccagaccgacaacctcgttgtttcgttgccgaccagcgcaggtaagacccgcatcgctgaattgtctattctgagatgtttagccggtgggaggcgtgccattgtcgtgaccccgcttcgcgctctatctgcgcaaaccgaagccacacttcagcgtaccttcgggccactcggcaagaccatttctgccctttatggcagtatcggagtgtccggcttcgacgaagatgccatccgcgggcgtgatattgttgtcgcaaccccagagaagctcgatttcgccttgaggaacgatccgtcactgctcgacgatgtgggcttgctcgttttcgatgagggccatatgattggttcaggtgagcgcgaagttcgttacgaggttcagattcagcgcctcttacgtcgtaaggacgcagatcaacgccgcatagtctgtctatcggcaattcttccggacggagatcaaatggaagacttctcggcgtggctacggcgcgatcaaccgggaggtcccattaagaacgattggcgtccgacgcgtttgcggttcggcgaggtcacttggaattcgccgacagcgcgcctaaatcttcgcgttggtgaggaaaggccatttgtgcccagatttctgactggtgcggcaccgccgctgttcgtaccaccgaagaagcgtcgcaaccgactctttccggacaatcagcaggagttgagccttgcaaccgcatggcgtctagtcagagatggtcagacagtgttgatctattgcccagagcgtcgcagcgtcgaaccatttgccaaggtcatcgttgacttgcactcgcgcggtgcactcgagtctttgctaacagtcgaattgaccactttgcagatcgctatagcactcggtgaggaatggcttgggacagacagctatattctgaaatgccttcggcttggtgtggctcttcaccatggtgccttgccgacagcttatcgcaaggaaatcgagcgccttctgcgagaaggtatactcaaggtcacgatctcatcgccgactctggcgcagggactcaatctctcggcgacagcggtcgtcatgcactcgctctaccggcacggtgaaatgatcaaggtttcggaattcaagaatgtcatcggccgagcaggccgtgcttatattgatgtagaaggccttgttctctatcccatctttgaagatgtgaataacaggaagcacaacaaatgggtcaatctgatagaagaccacggtgctcgtgagatggaaagcgggctcatccagctcatcttctcgctgctgagccgcatgcactctcacattggcggtgatctcgaccatttgatcgactatgttgtcaataatgctgctgcgtgggtcttcccagaggttgccggtgaaaaggttgatgagcgagagcaggcgctgaaagagtgggatcgccatatggcgacactagataccgccattctcagtctcattggtgaggccgatgtacccgatgaccagatcgagaccgctctcgacagtattctccaatcttcactctggcaacgccgcctgctgcgtgttaacgacgaatcacgggctgcctatcgcaccgcgctgtttactcggagccgttatatctgggcgaattcgactgccgtcacacggcgtggttattttctggctgggcttggccttgaagctggacgtgcgctggatgcaattgcaccggaggcgaacaatctgctcatgcaagctaatgcagccttggttgtatcagatcatgaggctgcaatcactgcgatcacagatatcgccgaacgcgtgttcaccttttatccgtttgaaccagacacgctcccggcgaattggcgtgaaatcctcagaggttggctgcttgggcatccgttggcaatgatgatcgccggagaggaggtagacgcattgcaatttattgagggcggtctgggctatcgtcttccttgggctatggaggcgttgcgggtacgtgccgccgccaacggtgataccgttggcatgccagcactagcgttggaagattatgaactcggccttgctgttccagctgtcgaaacggggacgatgaaccgctcagcctcaatactgatccaggcgggttttaattcacgacaggcggccatcaaagccgtcaccgatacggctgctaacttcacgaacggggcggaattgcgcgattggttgcgttcacctggtctcgctgtctattcggcacaaccaaactggccaacggccgaagctcggactatatggctcgaattcatccaggaatttgctccgtcagacaacctttcttgggcgcggcgagattatcttggaaacgtcaattggttcgatgttccggcgccttccggaactccagtcggtctctttcattggaacggacaaccgctagtgcttgcaccagatgggcacgcgattggtctgctacaacaccctcttaaccttaatcggcgaggacttgtgcgagcgacggtcgctatgaataacggccagatcaatctgagctatctcggccctgatgatttgtgggtagttgcgaagccacattaa

SEQ ID NO: 58152 - DNA, 780 bp, Enterobacter hormaechei subsp. oharae; identical to SEQ ID NO: 56508

SEQ ID NO: 58153 - DNA, 3534 bp, Enterobacter hormaechei subsp. oharae; identical to SEQ ID NO: 56525

SEQ ID NO: 58154 - DNA, 696 bp, Corynebacterium casei LMG S-19264
atggttgccccatcggcgaccatcggatcgggagtcgactgggctgcgtcacagatcccaaaccaatacacggatccggatcgcgtcgccacgatcctcgccaagctggggaaacctaaagcagccaagtacctgaagggaaagcttcctacaagcaagcgcacccgctcgggcgacctcggagagatcatcggagcgcagtacgcaacgcttgaactgggctttcgagtggtggagcggctgcggtggaaggaccaccgcgagatgtcgatgcgtggcgatgatttgattggtgtgcgcgcgagtacgaacggaacgctggaactattgaagggtgaggcaaagagccgtgcaaggctcggaactgcaacggtcacggacgcagatgatgcacttaagcgcgatcggggacgaccatcacctcatgctctcagcttcgtcgctgaccgactccacgaactcggtgagcacacgttggcggagctcatcgacgacgcccagttaatttctggaatcagtcaacggcaggtggtccaactgctttttaccttcactggtaatgatccgagggccctcctccgcgcaaatacgacagcgtaccggggacgtgtaaagcgtctcgccgtcggtctgcaggtctcaaagcatcaggcgttcatcgcgaaggtgtactccaaggcgatcgctgatgcctga

SEQ ID NO: 58155 - DNA, 3501 bp, Corynebacterium casei LMG S-19264
atgcctgaaacagttgatgagattgaggcagcgatcgggcaggcgactgcacccggatttcgtgaacagcttctcgcgcgaggagaagcccggtcgatgatctggcgggacggtgtcctgccagaggacgcgcccgaattcgaccagctgctcagctacgaccttctctcctacggctactcgctcctaagcctggggctgcgcctcgtggaggcgaatggatcgcgcagcctcgcccaacgcgcctttgagggcgcagccacagccatcgaatcagtgatcgcgaggggacccaactcgcgcgaacgaggcttccaccgcgtcgtcgcggcagccgcctaccacctcggcggctactccgcgcgtgcatactcgctgcttcagacagcgctcgattccggtgaagtcacgattggcgagcgatccctcatccacatcatccgcagagaactcgacaccctggctgcgctcatcttgagccaccgctacgaggacgcggcagcagacgccaacctggttgagacgttgcgcgggctcctcgagccgacgagcgatgaggaccaggctgatgacagcggcgacaccgatgtcgttgacgtcgtcgacctcgcactgacggacgcgttcgtcggtgcgatcagcatggcgctgcttgcgttcgaacggggcgagcaagcgctgctggatgaggccctcagcacgctgcaggtcggtctaggagccgccggcgaactgaacatggttccgcagtggtggtgccatcgacttgcgattcacctgcttcgcggtctgtgggaggccagtttccatcgcctgctcccggacgccccaaccgacggtggtggtggcgactgggcacaactgcgtgcgacgttcatcgcatccctcttccggaggcgacgctcggagatcgacctatggccgtcgcagctcgccgcagcagagcgggtgctgaataccagcgagaacttggtgctgtctcttccgacgagcgccggcaagacccggattgccgagctttgcatcctcgcatgcctagccgagggccggcgggttgtgttcgtaaccccattgcgggcgctgtcagctcagaccgaaaccgccctgcaacgcactttcacccctctggggaagaccgtctcatccttatacggcgcgatcggggccagcagcgccgacgaggatttgctgcgagagagggacatcgtcgtcgctactcccgagaagctcgacttcgccctgcgcaacgacccaacactcctcgacagcgtagggcttgtcgtcctcgacgaggggcacatgatcggggcggatgaacgtgaggtccgatacgaagttcagatccaacgactgctgcgccgtggggatgcggctaccagacgtatcatctgcctctcggcgatactgccagacggagatgaagtcgaggacttcgtcaactggctcaccgatgaccagcccgacggtctcatcgcgagctcgtggcggccgacgaagcttcgctatggcgaagtgatctggcaaggcgatcgagcccgcctgagcatcatcgtgggagacgaggagcccttcgtgccccggttcctcgaacccttagttccaccgatcggtcgcaggaagacgcccttccccaagaatcagcaggagctgacgctggctaccgcctggcggctcgtcgacgacgggcagactgtcctgatcttttgcccactcaaattatcggtgaacgcatttgccagagtcatcgtcgaccttcatacacgggaagcactgcgaagtgtcttcgaaggagatccgggcgacctcgcctcggccatcacgatcggagaggaatggttcggccgagatcacccgatcctcgcctgtctgagactcggcgtagcgattcatcacggatcgctgcccgcaccctaccgacgagaggtcgaaaggctgctgcagcgaggggcgctgaaggtcacggtctcttcgccgaccctcgcccagggactaaatctctcagccagcgcgctcgtaatgcacagcctctggcgcaaccgagaactgatcaaggcgtctgagttccgcaacatcgtcggcagagccggcagagcgttcgtagactccgtcggcctcgtcgtccacccaatcttcaaggacgtgtcccgagggaggcggaactgggggcagttggtcaaggacaccgctctgcgcgacatggaaagcggcctactgcaactggtggcgaacctgtttgcccggatgcaggccaagcacggtctccgggacctggactcgctgctggaatacgtcgccggcgcagcggcgtgggattacccagaagtcgccgccgagagcgaggaggaagccgagcgctcccgatttgcgtggcgctcgcagctcgctagcctcgacaacgccctcctcagtctgctcaacgactccgcgatagcggaggacggaatcgagggggctctcgatgacgtgctcgcctcgtctctttggaccagaagcttggctcgacggcaggagcccgttcagacagcgcttcgagccggcctgaccgcgcgtgcacgcttcctctggagccagtcgaccccggcgcagcgccgagggtacttccttgccggggtcggtctcgagaccggacgccaactcgatgagcacgccagcatcttggagcagcacctgcgcgacgccgacgagggcatccgaatcagcgaccccggtgccgcaatcgacgccctgaccagcttcgctgggatcgcattcgacatctaccccttcgcgccccgcactcttcctccgcagtgggaaggcatcctcgccgcatggcttcgcggcgaggatgccacgcagattgcgggagaggaggtcacggacacgctggaattcatcgaggattcgctggcctaccggcttccatgggcgctggaagcggtccgggtccgagcgaccgcccacgaagagcctgtcaacggtctttgggcgttcctcgccgatgagcacgggctcgcagttgcatcgctagagacagggacgctgaaccgatccgccgcgctgctcatgcaggccggattctcctcccgagccggtgccctcgccgccatcgcagccggacgcggcaccttcacaaccgtgtcggagcttcaccagtggctgaactcggaggaggtgcggcaacatgcgaacgacccgcactggccgaccgtgtcatcgcacgatctctgggtcgatttcatcagccgtggcgctgctgcaccggagagaacctggatcaacacagtcgaggatgccgcggtgacgtggcttcccgatcaccagccgagtagcgggactccctatcgagccgtgtcccttgcgaacggtgagaccatcctccaagccgcggacggtcgacgagccggttcgcttgaggaaccactcaatccgaaaaggcgcgggttgctcatagtcaccgggacgaacgccgccaacagcgtcgaactccgctatcgaggcccatccgaccttcatgcgtaa

SEQ ID NO: 58156 - DNA, 783 bp, Brevundimonas nasdae
gtggggttctacgagaaatggtgtgaagccaccaaagagaaagacaagcgcaagcactattggacctatgtcgagaagggtggcgggcgtgacgagatcagcgccgatctcgcgaagaccattcgctcccattatgaccggctcgagcgcatcgccgaggatgtggagcggcttggctacaagatcgccgccaagattctgagcgaagcgatgccacatacggacaagggccgctctggcgatcttggcgaaatccttgcgactgagctggtggaggaagaaatcggcctgcgcgtccccgtgcgtcggctccgctacaaggacggccgcaacatggccatgcgcggcgatgacttcatcggcgccggctatggcggccaggacgagaagctttggctcctgaagggggaagccaaaagcaacaagaagctcggcaaatccaccgtgacaagcgctcgtaaggtgctcgatcgcgacaatggccgctgcacgccggactcgttgctgttcgtcgccaaccgcctcctggagagcaatgatcccgacgaaaacgcgctaggccgcgacctccgcgatgaggtgggcttgaagtcgctgcgcgccgatcgcatcgaccacatgcttttcaccgtttccggcaacggcccccatgcctcgctgaaggaagatctcgaggccgccgggaccaatcgcgaccactacgtcgtgaacatccacgtcgaagaccaccaggacttcatcgcggccatgtacgaaggggcgcaagaccttggagacgcctga

SEQ ID NO: 58157 - DNA, 3525 bp, Brevundimonas nasdae
ttggagacgcctgacgagctgaccgccttcctcgccaccgcgaccgtcgacggcatcctcggccgtttgctctatcgtggtgctgcgtggtcgctgatgcgggaagcaggcgtattgccgcagaccgcgccgcccttgggcgcgacaatcgaaaccgaccttgccgagcacggcttcgccttgcttcggggcgccatggccttgcgtgcccagaccggcgcgtcagacttgacgaacaaggcatttgaacgggcggccaacgccttcgaagcgctggtaagaaacggtgatcctgaggcacccgatcgcggcttccgccgcaccatcgcggctgccgcctatcacctggccggcttctcggccgtcgcctattcgttgttcaaggagacggatgaagatctcaacgcatcgcccggcgaaacggcaatccgtcatctcatcctgcgggatctcgatcagttacgtgccttcgttcgcgactggcttagcgacgaggcccacggcgatgagcagatgggcgaagcgctgggcggcgatgagcctgatatcgacgacgtattgtctaccatcctgaatacgacgatttgccgggctcttgcctacttcgacttcgcgctggaaacgggggaagaggagccgatcgacgccgcgcgcgatctgctggccactgcggtcagcctcgccggcaacgccgggaatgtcccgttgtggtggatctcgaatctctgccgtcacctgattgacgacctctggcagcattcgttgcacgggaacctgccaacggagccacccgctggaacggaggagaaatatccggacctccggcggctgttcatcggttcgctgtacgcccgcaaaacatccgaggtggagctttggccgtctcaacgcgaggccgctcgtcgatctacggatgtcaccgacgatctcgttgtggcgcttcccaccagcgcggggaagacgcgcgttgcggaaatcgccgcattgatgaccttgtcctccgcgcggcgggtgttgatcgtcacgccgttgcgtgcgttgtcggcccagaccgaacgctccttccgcaagactttcgcacctctcgggttcagcgtctcgtcgctgtacggcgccagtggtctttcggcaggtgacgaggatgcactgcgcacccgcgagatcatcatcgccacaccggagaaactcgacttcgcgcttcggagcgattcctccctgatcgatgatgtcggtctgatcgttctcgacgagggccatatgatcgggcccagcgagcgtgagatccgctacgagacgctggtgcagcgtctgttacgccgcgccgacgcggccgatcgccggatcgtctgcctgtccgcgatcctgcccagcggcgacgagttggacgaccttaccgcctggatacgctcggacgaacccggcgagcccgtgcgttccgactggcgacccacgcgccagaggttcggcgccctaacctggcgcggcaaggatgcgctcctgcggcttgacctcgacgacggcggtcctttcctcgacaagttcgtcgaggagaagcctgcgcgcggaagggagaagaatccgtatcctcggaagaactcacatctcgccctctttgcggcgtgggaattcgccggccagggcaagcgcactctgatcttttccacccaggccaactgggtcgagagctacggcaagcaggtcgttgacctgtgtaagcgcggctatctcgactccctgctggaggatgaggggtcggtcgcgcgcgcgctggaagtcggcaaggagtggctgggcgaaaaccatccggccgttgccagcctcaaggccggcgtcgccattcaccacggccgcctgccaagcccgttcctgcgcgaactggaagtccttctctcggagggtgtgctcaaagtcatcgtcgcttcgccgacgctttcccaagggctcaacctcaacgccgccgtcctgctcgtaccggcactctaccgggccggcgagaagatcaagggcgaggagttcgccaacgttgcaggccgggccgggcgcgcgttcgtcgacgtcgagggcctgatcgtccatgtcatgttcgacaagaccgactggcgaaagaaggagtggaggaagctggtcgcctccgccaaggcccgcacgttgaaaagcggcctcatccagatcgtagccgaaatcctcgagcgcctgtcgcgagagggggtgctcgatcgcgatgacgcctgggagtatctcgccaattcccgggaggcgtggcgatcgcccgacgaggaggccgaggtggctgaacgccttgccgccgccgtggaatacgacgccggcggcgacgagaacgatgacgaggacgagagcgaggacgaccaagaggaaacgatcgacgaagagccgttgtcgcagattgtcgagcgcctcgatgcgaccgtgttcggcctgatcgaagctctggatgcggatcgcgccgatctcccgaagttgctggacgaggccctcaaaggatcactctgggctcgtcagattgcgcgcgaggaagaggacgtcgcgcccctgcacaagagggtgttcgaagcacgcgccgacctcatttggaagaccacctccgaacaggcgcggcgcgggcatttcgcgatgggggttggacttgaagccggcctttctatcgacaccatggctgatgaactggcccagctgctcgatcgcgccgacgatgcggcgctgagcggcgacgtcgacgagctcgccgacgcccttggtggcctgggagaacggttgctgttcatgcggcccttcatccccgacaagaagaacgcgctgccggccaattggaaagtcattctgcgcgcctggatctcaggcgacgcggtcgagaagatcggaccgcagaacatgcgggcggtcgaagaggctttcacctatcgcttggtctgggcgctggaagccgtccgcacccgccgcatgtcgctcggctggtcaccggagacggtggcgggcggcgcagcggcggcggtcgaaaccggcgtcccgcagttcatgatggcgatgttgatccgggcggggcttccgtcacggcgcgcggccatcgcggccattcaggacgccgagccgatcttcgtgacgcccgcggagatgcgggcctggctcgaatccgacgagattacggcctacactgatgccggcgactggcccacgcccgacaccgcagcgctttgggcgcgctttcgcaccgaagctctcagcggcggaatccataaatggtcggtcgaacgctataagcgtctgctcgacatcgcggcggccccgcccgcgggcctttatcgaatcgtcacggacgagggggacggacgaacttggctcgaaacgcctgactaccggcgggtcgcgcccttcaagaagccggcggtggacccaaagcccagcctcttctcaggaaggctgccgggcaacaccaggctggtcgaagccttgcgcgttggtcgcggaaaactgcggtggccgcccgctgacgctagaggggaaaattag

SEQ ID NO: 58158 - DNA, 759 bp, Acinetobacter tjernbergiae DSM 14971 = CIP 107465
atgatagaaagcttatgtactctagctgaaatacagttagatcaacataattttaaggttctagaattaaaggacgaaaattttgatgccttaaaaaatatattagtttcagaatttcctgaaacttatttgtcgaaatcttcttttgaacgaacaatgagcttattaggccaacaagcagcatatagcaaattaaaatcaaaattccccaagggaaaaaaacttcgttcgggtgatgttggtgaagtaatatcaagaacctatattgaaaaacatttagattacgttgtaccaataaaaaaacttcaatggcgcgatcatcgtgaaatggctatgaggggagatgatgttatagcaataaaaatcgatggtgatgatataaattttattaaatgtgaagctaaatcagtacaaagtctgaataaaaagactttattggaagctaggaaagaactagaccagcatgacggtaaaccatcaccacattctctagactttataattgagcgtctgtatgaaataaaaaatgatgaattagcagaaaaattagaaactcacaaatatcataaaagaattagaaaacaggattttagtcatctactttttgtatttacaaagtctaaccctaactcgctccaaaaagatgcttttgaagcttataaaggtgatttttgtcaaatttcagttggattaaaaacagcaaaacatcaagaacttgtcacatcagtatttgaagagttaaatagtcaatatgaataa

SEQ ID NO: 58159 - DNA, 3408 bp, Acinetobacter tjernbergiae DSM 14971 = CIP 107465
atgaataaagagctaatagaagaattaatcaaaaatcatttaaaaccagaatttagagggagattgattgacagagggttatctcggtcaatgatttgggataatggtattttgcctgaaaattcctctgatttctcagatgaactgacgtatgatttattatcttatggctattcattgttatctcttgcaattaaaagtatcgacaatgatgttaatgaaacgctaaaaaatcaggcatttgaaaaagctgctacagctttaatgactgtaatttataatggttcgactaactatagtaaatattcatttcatacattgatgtgtgctggtgcatatcatttagctcatttttcagcaaaaagttatagcctactaaatagagtagaagaacaccttagtaataacattttagaaaaaagcttgagcctacttttaactagggattttgataggctattagatattattcctgtttggaaatttgatttaaagaatgatttagattctttagttaataaagatatccataatgagttagacgaaacttcagtacatttaacctatttgaatagtgttttagttaatagatatttagaagtaatttatgagtatttggatcttctcaaagttggaaattctagccgattagagtctattaataaaatattaaacgaaaatatctcaattagtttgaagtacaattttattgaggattggtggatttatagaataaccctctatcttttgaatgacttatgggatcgcacatatcacaacattctaccaattgagaaaaataatcctgaatggaatggttatagaactaaatttattgagcatttaatgaataaggataatgctgaaattgacttatggccttcacaaattgagggggcaaatagagctatatatgatctcgaaaatttagtgatatccctaccaactagcgcaggaaaaactagaattgctgaactatgcattttaagagcattatcaaaaaaaaagaaagtaattttcatcactccacttagagccttatcaattcagactgaaattactttgatgaacacctttacatatttaggtaatacagtatcttcattgtatggtggaatgagcttatacggttatcaaagagaacaattttcagatagtgatatattgattggtacaccagagaagcttgattttttaatcaaacatgatccagaactcttaaacgatgttggcctaatcataatggatgaggggcatatgataggtccggctgaaagagaggttaagtttgaagtactaatacaatgcttattaaatagagaggattcagattcaagaagaatagtttgtttatccgctattttgccaagtggtcaagaactagataattttgtaagttggataagttatgatagacaaggtcaagctattacctcctcttggaggcctactgatctaagatttggaattatttatccaaacaactcagatacaggctttagactagattacgtaataggtgcacaaaaaccatttataccaaactttattcctaagattgtaaataatagatcaaaatatcctaattctcagcaagaactatgcttatccatagctgagaaatttgttcatgatggtcagaatgtccttatttattgtccaatgcaaaaatctgtaaatgctttggccaaaaaattagttcaaatgactaggagccgtaaattagatttcaaaaatttaaatattgactcagaatatttccataatgctgtaagagtggccgatgaactattcggttcaaatcactatattgttgaatgtttgaaattagggatagttgttcatcatggaaaactaccaaaagaatatcgtacagctttagagttattgattaaaaactgtaaagtaggtcttattatttcctcacctactttagcacaaggtcttaatttacaggttaatgttgttctatttcagtctatatatcggatgcgagatacaataccacaaactgagtttaagaatgtaattggacgagcaggaaggtcatttgtagatctacaaggaatagttctatatgcaaattatgataatagtagctataaagcccaaacttgggaaaaattaaccaaaggcgaagaacagctccctttggtgagtggtctcaaagatatcgtattaaatttactaataacactaataaaatctcaaacagaaaaggatattgagaaaatttatgagcacatagtaaacagtagttttaagtttgatttttctttggataattccaaaaatcaactaagtgagaaagaattagaaaaatggagtgaacgactaaatttactcgactattcaataattaatcttgtgggtgataaagatttcgatattctagagttagctgaacagatagacatcgctctacaacactcacttttttacaagcaaattcaagaatatagcactgatgaacagttaatgtttaaaaaatttgttcaaaaaagagctgagtatttatggaataaaacaactgaaagtacaagaaaacaattatatctttcaggtgttagttttgacactatagaaaatcatgaccctataattgaagagatatttgaaattataaaaaatattgaatctattttaacggggtcaaatatagataaagataaaataattttgaacataaatgaattggctgataagttgttttctataaatgagttttcgcctaatgatttacctgaaaaacatgctgatatattaactaattggttaagtggtaaaaaatacttaatgaatgatgatattgataagatagttggttttattgaaaatgatgtttcttataaactggtttgggctttagagtttttaaaatctagacataatatttgtgctaaaactgaaattgaggttgaaacttttgattatattagtcaagcactcgaatatggtttaatagataaatgtgcaatgactttgatgcaactagggattgggtcacgtttacaagttcaagaattaactgattatttagatttcatagaccctaagcacgtcattaaatggttatctgagcttaaccttgatgatatacaaaatcaattcagtacgggattgattaattcattaagaaagcttcgtacaaaaataaatccttttgataagaagaagataataacgactcttactgaagaaccagtaatatggttaattgatgatccagaaagctatatgttttcaaatttaaaattgataaacataaatttggaaacttttatattatccaataaggctgaagctattggtaagcttaaagaatttatcgagctaagttcaatgaagattttacatatctatattgaagattctacagtagacatcaaatatgagtattttgagtag

SEQ ID NO: 58160 - DNA, 795 bp, Clostridium bolteae 90B3
atggagtacattaatgggtatcgagaagagcaaagtttgctgacaaaagacggaaaggaaatacaggttcgttgccttgaggtatcggagaatgatgcagtgcttgatgagtgggcagctcattttcgggaacagtatcgttacctagatgctctggatatggaaagagaaggaacggggataagcagggaagaattcttaagagattatgttttcccgggacaagcaaagccgggacccgcaactcgtgtaggagatttttgtgagattcttgtggcagattatatcgaatatattcagagttattatgtacccagaatccgataccgtagtaaatttaatcggaacacatcaccacaaggcagtgatgtgttagggtttaaattaggaacaacaccatcgccaagagatgaagcgattatatttgaagtgaaaggcacgtctgatccaaaaggaaagaaaaaagggtatgaaaggttgcaggaggctattgatcattccaataaagatgtggctagatatgctgaatctttaaatgcagctaaaatgagattaatagaattaaatagaccagaggaagcatctattgtggctcgttttcaaaatatgacagatagaccctatgtaataaaatatggagcatctgccgttcttacaaatcaaaaatataatgccatagatatgaacaaagtaacaacggttgggcataaggcaacagtggaactgcttgtgatacatacgcaggatttaaaaggattaatcaacgagttatataggagggcggctttatgctga

SEQ ID NO: 58161 - DNA, 3147 bp, Clostridium bolteae 90B3
atgctgatagaaaatagatcgcaatatctgttgaaaaaggttcgtgctaaggcaaagatgtatgaataccatataccttctgagttacatgggaagacagaaagtgatgcaaattacctgctaattcttgcaattgcaacaattggagatttttcaaaagatgtcattgaaagttaccaaaccaaggaaatcgattataccgagcacaagaaaaatcttcaatttgcttccgtattttttgatgcttatcttgaagcaaagatgtacgagggagatcaaaaatactatcttttgttgggagcagtggtttattatttgtgtgactataacggaagttctaaagtccttgcagataaaattagtgatgatattaatcttgatgcaaatggaattgactttgtactatcacagatattacagggaaaactttgtatagagtgcttttctgaaatgttgtatctgaatgaggttgtgaatgcttataatgaattttggtctacaggtatagtgtttgattataaaaagttgtggcaacttaaaaagtttatttacaagtatggtacagatagggaacttttatttacagatgcgttaattgcaactatcttcttgaaaatagaacactcatcttatcgcttgatgcctatttatacacagattgatccagaaatctggggagatattttgagaaagaaaacactgatatcagaattatggcagtctcagagacaattgggtgaggctggtgtattcgctggaaagtcagcaactattcagatgcctacaagttctggaaaaacaaagtcagttgcactgattattttatctgcatttctaaggaaaaactcaagttatgctctcgtagtggccccctttcgctctctatgccgtgaaataaccgatgagctacaaagggcattttcttacactagcaaaatacatgttaatgaaatttcggatgtaatgcagatggacatgctggatataatacttggtaatgtaccagaaacagaagaaaagtatgtttatatagttactccagaaaaattattgtttgtcttgcggcaggagatcatgtttctatcgaacattgacttgattatttttgatgaggggcatttatttgacgataataatcgtggaataacttatgagctcttgatttctacaatcaagtcatacatgaaagataaagtgcaaaaaattctgatttctgcggtcataccaaatgcagagcaggtaaatggatggctgacagatgaacggggggttgtaataaaaaataatattattcagaccacagagaaggttgtagcaatggcagatatgaaaaaaaatactacatctggagaacgttatgcgtatctttattttgtaaatccggctgaaccagatgaagaagatttttttgttccaagggtaattaagcagactatgctttatttacgtccaagagaaagaaaagtgagagttttcccagaggtaaatgataataaatataaaaacgatgtggcaatagcatttggaataaaactatgtcacaatggttccattgctattttttgcggaaaaaaagatactgcggaaaaaatattaagtcgtatactggaaataaaggaaagaggaattaatgtttcaaatcttttagagagtgcagataagacagaaatagataagttatgttgcctgattgacaagggtttaggaaatgataatgactactataaggcagctaaggtaggggcatttgtacatcacgggggtatgcccatgggaattagatgtgcagtagaatatgcaatgcagactggaaaaatcagttttcttgcatgtacctcaacattggcacaaggagtaaatcttcctattcgttatcttattgtttcgaatatttatcagggaaaagaccgcattcgggtacgtgattttcaaaatttgataggaagagctggaagggcaggtatctatacagagggaacaattattctgtcagagacaaatgtgtataataccagaaataatccatattataactggagatggaataactacaaacggcttttagacagtgatcaggccgaagcgtgtactagtaccttattcgcgtggctgcgtgcagacgagggaatggaagtatatttagagaagatgatagaaatattcatggagagttatgcaaatggggatttcaatgaaaagatggagcaatacctgaaggaacaacaatttgaggaggaaaatcataaaaaggcagaattcatgatgtatcagatgaaacaaaatatcgaagcaattgaaagctttttgctattctatctgatggaggatacctatgaagaatcgcgtgaagatatccacaatattatgaaggaaacacttgcattttatcttgctggcaacaaagagagaattcggcttttacggattgtagatttaattggagaatttctagtacatgcagtggacactgtagataaaagaagcagatacagcaagtcgcttctgggagtaagaaaagaaattgaaattgaacagtgggtttcatcaaattattcgataatcctggaggctgaaaatgagaaaagtataatgcaagtggtttttccgttgttactcagaacagaaaatcagatagtaagaaattgtattaatagtgaattactgaatgggcttgcagaagagtggattgcaggaaagacatattcagatttgacagaatacgttacagaacatagaataatggtatataaacgtaaacaccccaaaatcatgtctctgcaagatgttattactttttgtgataacttccttggatatgattgtacgctcatacttgctgctattatagaaaatgtgatgtatttgggggatgacaatagaataaataatattttaaaaatgctatctaaaagaatgagatacggattagctggacaaacaagtattcttttatatgagatgggatttaatgatcggggtatcgctatgaaagtaggtaacatgttggaggaggtgtaccagcctggtaacagaaaggaattgattaggttgataagaaaaaataagggactgaatgaaaaaatacgattggaattggaaaagtatccaagttacttctgtgataaatgggaagaactacatagatga

SEQ ID NO: 58162 - DNA, 795 bp, Clostridium bolteae 90A9; identical to SEQ ID NO: 58160

SEQ ID NO: 58163 - DNA, 3147 bp, Clostridium bolteae 90A9; identical to SEQ ID NO: 58161

SEQ ID NO: 58164 - DNA, 837 bp, Lactobacillus spicheri DSM 15429
atgaacagttatgctcattttgatcctattcaaaatattgaagaaaataatattgaaataattttggttcaagcaccatttgacaatattaaggtgattgctgattgggcgagatcttttcgacacaaatatatctcagatgaagatttgctagaaggcatggaagatatcggggagaatgaaccaattgatttcctaaaggaaatggtatatcccgaaaacaaaaaatttcaaagtggcgattttggtgagattttggttgctgagtacttaatgtacactgaaaatttctgggttccaacattatttttaagatattcggaaaaatccaataaagaggaatctacgaaagggtcagacatagttgcaattcggttttatcaagactcagatcatgaatctgaccaagatttattatgcattggtgagattaagactggatcgacacgtactgttcgtgaaagattacaggctgctataaatgactctgacaaggatagtattgacctacttagtgctaaacgaggtagtgttggattgaatgcggttaaattaaaaataaaacatcgagagcggcaggagaatcaagatgggtattcataccgtgaaatagcaagatttgaaaatccaattgagaggccgtaccaaattcagtatgttgcagcagcagttgtggatcagaagcagcttaatcaaaataccgtgaaaaaagttgtgacgaaagagtctcaacatgttgattcattgagaatgattgcttttggagtttcagaaattcaaaagttaataaatgctctgtacagtgaattaggggtaagcaatcttgacaacgaataa

SEQ ID NO: 58165 - DNA, 2901 bp, Lactobacillus spicheri DSM 15429
atgtggaataagcttctttactatgcactatcatctgtaactgattatttgtgtgaagataatttggctgttaatcaacattttcgttcgcaattagaatttgctggcaagttctttgaaacattgccacagattaatttagatgttaataagctatttggcgatgaggaactgatcttattttcagcgacagcatacgtatttgcgggctatccaggtgcaagtgcggttgtactaaaaggactaacaggtgacaaacttagttcaaccgagcgagtattagctgaggtcatcagatacggagacgtaaactttccatgggaaaatagcaaaattgggttgactacttcccttgtcttttcgggtcgcgaagatattagtatcctatataaacaggtagattcattattagaggatgcgtatcggcgtgaccatgacatagatataattgcagcggaatgcgtgcaaaaaattatccggcagtgttgggaaaatgccacgattaatctaatgccaagtttttcagatactgacccgcaaaagtgggttttaccgcttactgctagaaaagtacatcccgttctttggagtgcccaacgggaacttggaaagcataatgtttttcgaggaaattcggcagtggttcaacttcccaccgggtctggaaaaactgcctcattttcgcttatccttagggctagtttgtatcgggattcctttcatatagcagtcattgtggcaccgtttaaatcaattcgtgatgagatttacttggatttgaagctacaatttcatgatgaagaggttgatattaatcgtatcagtaccgaattaaaatttgatttttcagatttcagtttgatagagcgtcccgcgatattaattgttactccggaaaaattgttgtttatgattcggtatgaccctaattttttaagtgaaactgggttgttcatttttgatgaggctcatcagttagataatagtgatcggggaataacatttgaattgttacttagcacgattaatttttttgtgacggacgaaatacagaaaatatttgtttcagccgtgatcggcaatccaaacgaagtatctgagtggtttaattctggtaacaataatgtcgttaacaagttaacgccaagaaaacttgaaaaagtcttaggatattcctattggaacgataagacgatgcatggagagctttatatttggaataaacttcaggaagccaaagcactggtgaaatttccgtacttttttgatccagttaagataaaagaaaacaaaatacagcctgattttactatcaaaaatcgtacaaagggtatacggtgggctacagcattaactacaaggcaattcatgaagggggggatggtcgctgtatatgttccgagaaaggatactattaagggcctggctcaggttttcatggagctacaggaaaagtctccaattctaattgatggtaatgagtcggttgtggcattatgtaaattatttgaactgaattttggtgaagactcagttcttgtaagagcgtaccggaacggaatatttgtgcatgatggggacatccctgatggtattcgtggttctttagaatttgaggctcgaaacggaaatattcctctattactgtgcacgaatactcttgcgcaaggggtcaacttgcctattaagaccatcattataacctcgattggaaatggcgaaatggaattgaataacagagatacaatcaacttaattggacgtgtcggaagaactggggtcatcaatgaaggaaacatcatttttatgcagaatatcagttccttctctgatgagcgcgtgaaacatgcgttgaatagtctagcaatagatgcccccgcagaacctctaggaagttctctcgcggcattattcatgcctacagcgattaactcatatagtagatcagaagacatccgggcatctgagtggtgtgttcctgagtttcttgataatccgatggagtggatttcaaatcgagtcaagggtgattctcctagtaaagccaaagcatatcgacgcttatttttaaaaaaagcaaatggtatatggcaaattgaaaattatcttatgtctatatggaatgtaattcaggagggcgttcaggaagaaaatatagaaaatgttgttaaaaaaatgtttgcttctacatgtatacgagatgatgaatttgatttaatgctctggacgtttaagtatctcggtgagaggattagtcgtctagttgtcgatagacatgatgttttgaccatgagtaaaatgatggttgggattaatgaagcattaactattaagagttttgtagatagcaatgatgaagtaattatcacaagtgatgacatggaacagattattaccgatatttggccaattctacgaacctccgtttctataaagaatcaatctgaagatagcctttatcgtttcttgttaaataagtggattaaagggagcagctatattgaaattctcgagtcatggaaattagagtacccggacattaggttgtcaaatcgtaaacctacagttgaaaaagtgtatattatttgtagccaggcatttcaatttgatatgcagttaaaactgactgctctaatggaagttattacagatcctgtaaagtatgcgcgattagaaaaactacaggttgcaatgaaacttggattacctaagaaaacagaacaagtaatgtatggtgctgggattagcgatcgcgttttggcacgcttgttttgtgaggaaatgggtgttgatactgcagactataaagaagtattacattggctacgaatgaataaagggaaaattattgaaaaatttggtaatattatccctgagtattttagaagccgaatttggtaa

SEQ ID NO: 58166 - DNA, 762 bp, Polaromonas naphthalenivorans CJ2
atgactcgattcgtcgagtggtgcgctcatacagatatacctgttgcgcaccacaagttgcagattttgacggctgacccagcgaagctggcggcagcggtggacatcgttgcggaggtcgtgccggaccactatgttatgcctgggcgcctggctcagcttcttacgcgcttggggcgcaaagaagtcgctgtatatgtagcagagaagctcccgaccaccaagcaaattaagtcgggtgacttgggtgaaatcctttgtacgaccttcatccatgagagcacaccctttaagcttggaatcaagcgccttcgttggaaggaccatcgtaatatgtcgatgcgcggggatgatgtgttggcgttccacattggtgcaggcgcggccggacttcaggttcttaaggctgaggccaaaagcgggggcaaaatgcaagccggcacggtcagcacggctcgtgatgcgctatcggcgtatggcgagcttccctcaccccatgctatgagttttgtggcagacaggctggaagcggcggtggacaaacctctccgagatatgttggatgatgcacagttgaagcggaacctcaaacccgcacatgtcacgcatatgctcttcacgttctcaggcaacgatacaaccgcgatgctgagcaaaaaccttgcaagttacgtgggcgggtcggcacagcactatgtgggcattcgtgtcgaagaccatcaggctttcatcaagtccgtgttcgcggcggcggaggtctaa

SEQ ID NO: 58167 - DNA, 3501 bp, Polaromonas naphthalenivorans CJ2
atggcaaccacactcgaagaactgcaggcgaacattgaagccgccgtcacgccaggatatcggcaaaaattgctggcacgaggccaggcccggggaatgatttggcgagctgggctactgcctatcgacgctccccacttcagcccggaactatccgaggacctgctgtcttttgggtactcgctgctgttgcatgggctgagatatgtagacctaggaggcaatttttctctcgcaagagtggcgtttgaagtagccgctgagtcaattgaggcggtggtagcacgcggtgaggtgaacgaaaatcgtgactttcaccgactgatagcgggcgcggcctatcaccttggccattactcggcacgcgcctactcgatgctttttgaagggctgggtcagtcgaacctgtccgttgtcgagcgctgcttggcccaacttatgttgcgagaccttgaaggagtcaatgttgcggtgtcgaactgggtcgaatctggtgtgggttcggacagcaatctcatcgaggcatttgatacgggtatcgacgcagaagtcgaggatgaggacgcgggggagagcggagtaatcgaggcaatgacgctggcattggaaggtaatttcctatcagcaatgtcccagacattgctcgccttggagcgaggggagcactctctgattttacaagcccaggcacggttggaagagggcctgtccgttgcaggagaattgaacctggtcactcaatggtgggctcaccggcttgcgattcatatcgttggcgggctttgggctaatagcttccattcgctcctaccgagtcaagggccagctggcgcagacgtgggcgattgggtccacctacgcaagctgcttattgcgtcgctaatgcgccgtcgtcgggcagagattgaactctggccatcccagattgatgcggcgaagcgtgtgctcgaatttgaagccaatctggtgctttccctgccaactagcgcgggaaagacgcgcattgcggagttgtgcatcttggcctgccttgcacgtggaaaacgggtggtctttgtgactccgcttcgggcgctgtcggcgcagaccgaggtgtcgctacggcggactttcggaccgttgggtaagacggtgtcgagtctctatggcagcattggcacgagctcgagtgatgtggatgcactcaagtccctggacatagtggtttccacccccgaaaagctggacttcgcacttcgaagcgaccctcaactcctggatgacatcggacttgttgtcttagacgagggccatatgattggtctgggtgaacgtgaggtccgatatgaggcacagattcaacgccttctgcggcgtgctgatgctgccagcaggcggattatttgtctctcggctattttgccggatggcgaccagctaatagatttcacagcgtggctcacgtccgaccgtgaaaatggactcattaagaacgactggcgtcctactcgtttgcgatttggggaggttgactggaatccagtcagtaagctggcgcaactcaaaatcgtggtcggggatgagcatcctttcgtttcgaaatttgttgtcggtaaaaccttgaatgctaataagaatgcaaaagtctacccggcgtcacagaccgatttgtgtattcttagtgcttggagattgattgaggagggccagtcggtcttggtcttctgtcccctcagggtgtcggtcgtgcccttcgcgaaacggattatcgagatgattcagcaagggctaatcgtaccgatgctgaccccgcctgcagaagtcctggcctcagccctggcagtcggtgtcgagtggttcggaccggaccacgaaattctcaagtgcctgcgcatgggggttgctgtacatcacggggaactgccggcctcattcagaaaagaggtagagcgtctactgcgagacggagtgctgaagcttacggtttcctcgccgacccttgcacaaggattgaaccttgctgcaacgagtttggtgtttcacggtcacgctcgaaaaggcgcccccattgacgtctctgagtttcggaatgtcgtgggtcgtgctgggcgcgcatacatcgacattgaggggctggtgctgtatcccatgttcgataaacatgaaaaacgtcgaactgcatgggcaaatctaatagcgagtacgaagggccgagagatggaaagcggcattttgcaactactctactcacttctcgttcgaatagcgagaaaactggatgctcctgacgtgagtactgtgcttgactacgttgcaggccaggggggctgggattttccgtttctgcggtccgaaaccggctggcgagcagccaatgcggctgaggagtggccgcgccacctgacgagtctcgatacagctatctttagcttgctcggtgacgcgcaagtcccggacgaagaaattgaggcgacgctggacgaagtgctgacatcctcgcttttcatgcgacgaatggcgcgtcgagacggcctaatacaaaatctcttgattggtggcttgaaagcacgcgtgaatttcatctggtccaattcctccgccttgcaacgtcgcggttacttccttgcaggcttaggcctagcctccggccaagcactcgatagcaaggcgaaagaacttgagtctctactactgcaagcgaacgtggccgtgggcgaaggagaggtcgaaatggcaattcaggccatcatcggctttgcacacatcgctttcgaaattccgccctttgccccgaatggactacctgggaactggaaatacatattggagctgtggcttcgaggggtgccagtgccgcacatcggcagcaatgacccggatggtacggtctccttgattgaaggcgcctttgtctataaccttccgtgggccatggaggccgtgcgggtgagggcagaggcgcatctggaccttttctcaaacgatgttagcgtcgccaactacggccgtgcacatgcagtggcagcgatagaaactggaactctatcggtagctgcatccacactcatcaaagctggttttgcatccagactaggcgccatccatgcagtcactgtcacggctgctgatttcgattcatcggctgggatgagggcttggcttttgtccgcagaagtaaaagcgcgacgagataaccctagttggcccacggtggaatcacatgagctatgggtcgacttcaccgcacctcatggtagcggatacacgaagccttggttagcgaccgcatacacgggtcctgttacttggcacggtttgcccatgccgccaggcaccccgctgagactgggcggcggaccaggcaaggagaatgcgatttacaccgcggacttcaaggaggtcggcaagataggctatgcgtttaatcaggccgctgttggcctgtccattgcgacagccacgggagctgcaaatgagattgcctttgagtacatcggtccgaacgacttggttgttctgtag

SEQ ID NO: 58168 - DNA, 780 bp, Rhodanobacter fulvus Jip2
atggcgcagttcgatgattggtgcatttcggtcgacacgccgatggggaaccactatcggcgtgtgatgaccggtcaggtcgctaacctaggggtcggcatccaggcgacggcagctatcgtgccttcgcattacgcctcggaggagcacgtagcgcgcgccctcgcgcggctaggcaagcccgccgctgcagccctgatcgagagcaagctgccgacgactaagcagatccgttccggtgacctcggcgaaatctacgcgacagaatggatagatgctcacagcggcggctaccgtgctccgatcaagcgcctgcgctggaaagaccatcgcaacatggcaatgcgtggtgaagacgtgatcggcattctgcaagacccccaaactcaacgtcttcagttcctgaagacggaagcgaagagccgcgccacattgtccgctcaggtcctgaccgaagcccgcgccgggctggacaaggatggaggattgccctcggcacacgcactgcactttatttccgcgcgtcttcttgagttcggcaatctgccgctggccgatgcaatcgacgacgcgctgctcaagcacggcgtctcgccgcagagtgtccagcatctgcttttcacattctcaggcaatgcccccgacgcactgctagccgcctccctgcgagcgtatcccggccttatcaatcaatggggtatcggacttcacgtggagggtcatggcgcctttatcggcgcggtctacgaccgagtgatcgccgatgccaacaaaccctga

SEQ ID NO: 58169 - DNA, 3522 bp, Rhodanobacter fulvus Jip2
atgccaacaaaccctgaagccatcaccgcagatatcgccgaggcgacggccgccggctttcggggccgactgatcgctcgcgggcaggcccgcgcgatcatctggcgtgacggcacccttccgcccgacgcgccggacttcgcaccgcagcttagctacgacctgcacagctatgcctatgccctgttcggcctcggcctgcgctgtcgggaggtcggcggcgacccgactgaggctcgcacggcattcgaacaggctgcaacggctcttgaagcggtgatggcaaagggcaaccgccaggaggccgatcgcgatttccactttgttatggccgcggccgcctatcatctcgcccacctgtccgctcgagcttattcgctcctcgcaatcgtcgaggcggatgagaatttctccctcgtcgagcgcgccctcgcgctgctaatgcgccgcaacttcagcgcattgcgcagcagcgttctcgactatcgggcctccggccagggcagcgacgcgcggatcgccgccgccatccaggctcggctcgatcaggttgagggtgccgccgccacgccggacggcggtggcgatgatttccttttcgatggtctcgataccgcgctcaccgacgcattcatggccgccatgtccctttacctgctcgcgctcgaacgcggtgagcgagcgcttgtcgatcaggcgttggagcggcttcgcgcgagcctggcgatctgcggcgagatgaacatgctgccgcaatggtgggcgcatcgcgttgcgatccatctgctttcggacctctggtcaagcacgtttcacgagagggttccgcttcagcccgctggtggggttgcggccgtctggccgcgtctgcgcgagctattcatcgcgttgcttcaacgtcgggcgaaggcggagatcgacttatggccctcgcagaccgaggcggccgcccgcgcggtcgaccagtcagacgacctcgtcgtgtcgctgccgacgagcgccgggaagacccgcatcgccgaactctgcatccttcgctgcctcgccggaggcaagcgggtggtgtttgtcacacccctgcgcgccctctcggcgcagaccgaaaccacgctccaaaggaccttcggcccgctcggcaagaccatatcggccctctatgggagcatcggtgtcagcggcttcgacgaggacgcgatccgcgagcgcgacatcgtcgtcgcgacgccagagaagctcgacttcgcgctccgtaacgatccttcgctgctcgatgatgtcggcctgctggtgttcgacgaagggcacatgatcggcctcaacgagcgcgaggttcgctacgaggtgcagattcagcggcttctgcgccgtgctgatgcccaagagcgccggatcgtctgcctctcggccatcctgcccgatggcgaccagctcgatgacttcgccggctggctccgccgcgatcatccgggcgggctgatcaagagtgactggcggccgacccggctgcggttcggtgaggtggtgtggatgtcgccaaccgcgcggctcaacctgcgcgtcggcgacgagcggccctgggtccagcgtttccttaccggcgccgccccacccaactggatcccgcccaagcgtcgccgcactcggctctttcctgacgaccagcgcgagctctgccttgctaccgcctggcggcttgttgacgacggccagaccgtcctcgtcttctgccccgagcggcgcagcgttgagccgttcgccgacgtcatcgtcgatctgcatgagcgcggcgcgctgcgctcgctgctcgaggccgatccgaatacactgaacaccgcaatcgcgcttggcgaggaatggctggggcccgagaatgcgattcttaaatgcctacgccttggcgtcgcccttcaccatggcgctctgcctacgtcttatcgcaaggaggtcgagcgcctgcttcgcgagaatgtcctcaaagtgacaatctcctctccgaccctggcacagggcttgaatctatcggcgactgccgtcgtcatgcactccctgcaccgcgccggcgagcgcatcgagatcagcgaattcaagaacgtcatcggacgtgccggacgcgcctatgtcgacgtcgagggcgtcgtcctctttccaatgttcgaggacatcgccaagaagcgacgcaattgggaagcgctcatcaccgatcttggcgcgcgcaatatggaaagcggtcttgtgcttctggtcgtggagctactgacgcggatgcacgcgcgtatcggcggagacatcaatcagctcgttgactatgtcgtcaacaacgccgcagcctggacctttcccgagatcggcaatgaagagccgaaggaccggaatcgcgccctggccgattgggaacggcacgttgcgacgctcgatacagccatcctcagcctcatcggggagaacggaatttccgatgaagggatcgaggctgctttagacgacatcctacaatcttctctgtggcagcgacgcctggagcgtctggacgctcaatcccagcagttgttgaaggcgggtctttcctcccgcagccggctgatctggaatcagtcgaccgccgctcaacgccgcggctattttcttgcaggcgtcggtctgacgaccggtcatgccctcgacgccatagcctccgaagtcaacctacttctcatccaagccaatggcgcgatccttgagggtgacgccgaagccgccatcacctctatcaccggtctcgctgagcgggtattcgcattttatcccttcatacccgacccgctgccggcgaactggcaggccatcctgcgagtttggctgctgggccagcctctggccgcgctgggcggggatcagccatcggaagtgcttcagtttgttgaaggaggcctcatctatcggctgccttgggcaatggaggcgatcagggtccgcgccagcgcaaatggtgatgaggtagacgcagatggccgcggcctagaagactatgaacttggccttgcggtgccggcagtcgtgacaggcacgctcaaccgccctgcatcgatcctgatccaggccggcttcaattcgcggcttggtgcaatcagagcagtcaccgacaccggcgcgatcttcgccacgggcaaggagctgcagcaatggctgaatgcagatgtggtcgccgcttggagtgctcaggccgactggccaactagagaaacgagaccgatttggatggagttcgtccagagcttcacgccgagcgagaagcacacatgggccgctcggcactattgggcgggtatcacgtggttggcggcgcccccgccgcccggcaccgccgtccagatacaccagtgggcaggtcagtcgtgggtgctttcgccagacggtactccgctaggcacagttcaggccgcactcaattcccatcgaagcggcctgcttcgcgcacaggtggcgctggatgtcagcaagatcgacatcttatatcttggtcccgacgatctggcgggcgcatag

SEQ ID NO: 58170 - DNA, 798 bp, Thalassospira xiamenensis M-5 = DSM 17429
gtggggcggttaaccaaggttggtcaacacaagaagagcgcttgtggacgggacattgagatatgggagctaaatctaaaggacaaggaagcgattttatcggaatgggctactcactttcgcaagcactatatttctgatgctgaccttccggaaatggtggcgggtacgggtaagacaaatgcggagtatttgcgtgatgtgctatttccagacgcaaaagtggcgccgggtcccagcctccgttcgggagatttcggtgaaatccttgtcgccgactatattgagtatttgctggggtattggtgtccacgtgaactgcgctaccaagagcgttggaaccgtaacgattcaacaaaaggttgcgacgttattggattcaggtttgtcgctgatggccagaatagcccgggcgacgagctcttcatttttgaggcaaagtctggaatgtcaaagtcagacaaaaaccgtttgcaagacgctgttaccgacagtgacaaggacaaactccgggaagcaatgagtctgaatgccatcaaacaaaagtttttggggcgcgaggagatggacaaagttgcccgtgtgaaacgttttcagaacatggccgacaggccatttcgccggataagcggtgccgcagcaattcttgacgacgatgtgttcgcagaaacagacctgagtgcagttgacgcttcaaatcattacaattctgataacatacagctgattgtcattaagggcccatcgcttatgcagatggttcattcgctttatgagagagctgctgatgaggcctga

SEQ ID NO: 58171 - DNA, 3135 bp, Thalassospira xiamenensis M-5 = DSM 17429
atgaggcctgaggcaaacgctcaaaatgtactttcgacgactcgagctcgtgcaaagatgcatgagttccgtgtacctgagggcgacttcaacgaactgccgcgcgatccggcgatcctctttgggcttgcgatcgctatcctcggcgagatagcgtcggctatcgcagaccaaattggtgacggttttgcgcatggcgaggaagtcttgcctactcccgctggctggagggaagatggtgccgaaccgcaagtatcactgcgtttcgcttcaacatttttcgattcctacatcaacgcggaactggatgttgagctaactcccgagttgtcacttttatgcgcgacaacttactacatcagtggcagcgtcggtagtgctgctgttatcgttcgacaaatggaagcgccaagcctggaaatcgcgggtggcttagctttcctgttatattcgatattgcaaaaccagtttcagccaattgatgtcgagcataaccatcacgaaaagacaaacactttacttggttccttggtggaatttttcaatctacagggagaccccgcagtggtggctaccgccactgaacaattgcgacgctacttccaaacaaatggatcaccgcgtgaattactctttgctgatctgattggggctgtttgcgccctaaaactcaaaaatgcagctcgtacgatacttcctatagcatcccgcctcgatatacagttatggcggtctgcacttgaaaagccgcgttttcctttggagttgtggcctgcacaaaaacggattgcggaggctggagtgctagaggggaggtccgtagttatccagatgccgactagcgctggaaagactcgcgcgactgaactgatcattcgttctgctttcctgtcccaacgtgcacggctagctgttatcgttgccccatatcggtcgctttgtcacgatatacggggtgaccttgttgtagcgttcagtggcgagaacatccgtcttgatgaagcgtcggactcgtatcagtttgatctctctcttgatgctctttttgcagccgagtcagtcctagttttaacgccagaaaagctattgtacatgcttcggcgtgcacctgaacttgccgaccagatagggttgatgatctacgatgaaggccatcagtttgacggaatggcgcgcggaccgacatatgagttattgcttacatcgcttcgcatggcacttcgtcctgagacacagatcattttgatttcggcagttatcgggaacgctggtgatgtcgcagaatggttgatcggggatcgtgaggcggttctagatggagttggtctactgccaacgtccaaaagtatcgccttctccagttggcaagaccaacgcggacgtctcgagtacgtcgacccacaagacccagatgagcgtgagttctacgtcccacgtgtcatcgaagaaactgttcttcaggcacgtggaaaggagacagcagagagaaggtttcccacgagaactggaagtgatgtggggctttttctggggcttcacgtggtcagaaatggtagtgtggcagttttctgcgggcgtaaggatagtgtgacgaccgttgctaagcgtgccgttgatctcgctgaacgtaaccttgagatggagtggcccattgcgtactccgattcagaggaggtcgaatctattcgagctcttgctgaataccagcttggggcgaatgctcctgtgactagggctgcgagcctcggtatcttttcgcatagtgcagataccccccatggcctgcggctctcgattgaacatgcaatgaagttcgaccgcgcgaagtttgttgtttgtacttctaccctagctcaaggcgtcaattttccacttaagtatctaattgttacctcaacccgtcagggtggtgaggatatgcttgttcgagatttccacaaccttatgggacgtgccgggcgtgctggaatgcatacggagggaagtgtcattttctcagccccagctacttacgaccaacgcaaccgctggggtcgtggtcgacataattggggagaagctgttaggttgcttgatccggccaattctgaaccatcaagcagtgcgatcctcggcttgtttgagccttacaccgagcgcggtgctcaatttgaagtggagatgcagcttgactggctggatctggtgtttgccgatacagaaaaggtggagctagtggtggctagcgcaatcgaacttgagccagagataaactcagtaaactttcgcaagtttattaatcgaagagctcgggtagtccagaatattggggcttttctaactgcaaatatgacgtttggcgaaggtgaggatgctgacgagaagatagcggagctggcgaccagtacgctcgcctatcacctcgctgacgaaaataccaaacctcttcttttactgttgtttcgggtgatcggcgagtctatcgcggcaaatacagatgccggtgagcgttctctcatccgacgttcaccgctgccacctaggacgataactgcgttgcgagaatggctcgttgagaatctaaaggtgctcaaggaggcggcttcagaaggacgattattggaacaaatcactcctacagtgcttgccttcgtatcttcatctaagattgctgctattagtgatcaaacagtgatccccagggtgcttgatgagtgggtatcagggcatagctttgctcgtattcttacaacactgttggaagtaaatgctcgggttggtggaaggaggcttaagcccaaagtggaagatgtggtggcgctttgtgaagggggattcggttatgatgcggcgatgatagtcgcctcaattgccgatctagcagaggatatggacgaaactttacataatgccgcgtcgttactacaacgccagattaagactggtctcaccgatgcagcagcgttggcattccatgaggcaggttttgcagatcgccatgttgcaactttcctcggccaagtttggccgcatgcggttgaccgaggcgctgtccatgcaatctgtcagaacgaggaaatagttaggtatgttctacctctgtttccaagttactttactgcagtcgctgcagaagtaggggggtgggagccgtaa

SEQ ID NO: 58172 - DNA, 720 bp, Rhodococcus sp. ADH
atcaatggccatacttcgggcgtcctcgtctccaagaacgacgacgacggaatctcagccgtggccgcaacattggctgaaaagtacacgaacacaaacactttggctgccatcgcacaaagcctcggcaaacccggcgttgcgaggttcctgcaaaatctctttccgggcgacgccggctctagatccggtgatatgggcgaaattctcgcaacctcctacctcgaagaagacctcaactacacagttgggcccagtaggcttgagcaccgcgatcaccccacatgggcgatgcgtggtgacgacgtactcggagcacgaatcgatccaacctcaggccttcaactcgccaaaggcgaggcaaagagtcgtacccgcatctatgaaaaaaccgtcgaagaagcgcggaaaggcctgttgagagagtccggacttccatcgcagcactccctcacccagtttgcgacacggctcatcgccgacggaaatcgcacgcttggccttgcagtgatggatcaccaattaaccagtgggattcgtcccgacatggtgctgcacctgatgtttttgttcacgcaaaacgaccccaccaagcacgtcacgactgacctcaccggctacagcggccccatacgacaactcgccctgattttgcgagtgactgcccatcagaggttcatcacagcggcatacgagcaggccccctcttatgctccgtga

SEQ ID NO: 58173 - DNA, 3561 bp, Rhodococcus sp. ADH
atgctccgtgaaacggaagaactcgtcacaagcctgcaagcagcactcgcatctcaagaaaacatgcttgcacaagggcaagcacaggccagtatccgccgcgagggcgctctgcctgcagattcaccacgcttcgaaccttttctcgacaacgacctcctcaactacagctacgcactcatctcgaccagcatcgatctgctcgacgcgcccagcactgagattgaagaaccgactcggacggaacagcttggcctggcgcggcgcggattcatccaggcttcgtatgcgctggaggctgccacccgcaacgcagcaccatccgaggacctcagtttccaccgattgattgccggagctgcaagtcacctcggagactttgcggctcgcgcgtactcactcgtcgacgccagcatccagtcgggacgtatgaccccaatggaagccaccctcgccgatctgatcttgcggaaccccagacgaatcgaagaacgcaccaggctgctgaagacctcagctagtttctccgatgacgcactacttcaagctcttcgaggaaacctgcccgacacagacactcatacggcagatccgacccagccggccggcgcagagatcgagaacgcagtatccgaggtgggacctatcgttgccctactgagcgagcactacatgtccgctgtctccagcgctctctttgcaattgcctatggccagggaccgctgctacaagcagcgatagcagacctcgcgagcggggagcaggcagcaagcgacatcaacgcccccggaccctggtggatctacaggctcacacgccggctgatcggcgatctccgagaaaccagcatcaggagaaacattcccatcagccggccgccggcagcaaccgccgataccaaagctcgtcaaagagactggaagcaactccgcaaaacatttgtagcatcgctgtttgtgcgcaagcgatcagaaatcgacttgtggccatctcaactccacgtagtcgaacaaatcttctctggcacacaagatcttgtcatttctctacctacgagcgcaggcaagactcgtattgccgaactgagcattctcgcgtgcctcgctcaaggccgaagagccgtttacatcactccccttcgagccctgtccgcgcaaaccgaacgcatcttcgaacgaaccttcataccattgggtgtaagagtctcgtcactgtacggaagcatgggaaccaacgacatcgacgaagatgcgcttcgaatgagcgacatcgtcgtcgcaacgcccgaaaaacttgacttcgctttgcgctcagatccctcggttctcgacgacgtcggcgtcgtgatccttgacgagggacacatgatcggcccgtccgaacgtgaaattcgctacgaagcacaagtacagcgcctactacgtcgcgatgacgccgacaacagacgaatcgtgtgtctctcagcagtatttccctcgggtgaagatctcgatgacttcgtcgcatggatgacagacgacgaccccaccggcctgcaccgtgaaaagtggcgccccaccgagcaaaaattcggtctcgtccaatggaaccagaatcacgcacgcttgacgatgacgatcggcagcggcggccttacagccttcatcccacggtacgtcgaggcaaaggccccaaccggaaggcgcagaaacgcgtttcccagcaacaatcgggagctcgtcatcgcgactgcttggcgcttggtcgaagagggccagtcggtactcgtcttctgccctcaacgcaatggagtaggaccctacgccgaccatatcctcaagctgcatcaacagggattcatccacgccgtccttcccgacggcgtcgacctcgcggacgctcgcgccgtgggcgctgaatggttcggggcagatcaccccatcctcaaatgcctcgaactcggcgtcgcgattcaccacgcggcgctacccggtccgttccggcaaaaggtcgagcgtctcctccacgacggcgtcatcaaggtgaccatagcgtccccgaccctggcgcagggactgaatctgtccgcctcggtagtgctcttccatggtcttcatcgagaaggaaagttgctcagcggttccgacttctccaatgtcatagggcgcgccggtcgtgcgttcgtcgatacggagggcctggtgctctaccccatgttcgtgaggcgcccatcccacctacgccagtggcgacaattgacgaatggccaagcgggcaagacgttacgttccgggatgatctcggcgggagaggcactgatcaaacgagtgctccacgccttcggatccgcacaggtgcaaccctttatcgactacgtcactggtggttcgaactggtcacttccggttagacaggacgagacaacggcacaacggcaagaagcacaacaatcgtggaccgacaacctggccctcctcgacaccagcattctcagtatcgtcggggaggacgaatcggacccagatcaggtgacacaactcctgatcgacatgctgcgcgactccctctgggaacgtcaactgcaacgattgacaccagaaatggccgccgcacaacgtgcagcagtcaccaaccgcactctattcatttggaacaactccacacccagccaacgacgcggttggtaccttgcaggcctgggagctgcaaccgggttcgatctgggcttgatcgcagccgacgtcatcgacaagattctcctatcagaagacgctattgcacaacgtaactcagcctcagcaatcgccctgctcactgacattgcttccctactgttcacggtcgaaatattcaaacctgaaacttctctggagttggagccagtgcttgctcactggttaagcggacgccccctgggagaactcgccgacgaccgagacagcgtcgttctgttcgtacaagcagatctcgtctacaggcttgtgtgggggatggaagccgcacgggtttacgagacggcacaagcgaacccaattgcggagatgctcaccggcacagccacagccgccattgaaaccgggacactcaatcaacaggcagcgatcctcatccggtccggatttgaccaccggtctgcagcgatcaaggcagtagaagccatcgagtcaaccttcgattcgagcaccactatgcgtcaatggatccgagacctgccctcagcactcgtttccagtccagactggccgacgaccgaaacacacagcgcttggctacaattcgcgaaaactagaagtgactcaaacaacattccgtgggaatttcacattgaacttgttgaagacgtccagtgggatgaagaaagaccccaccccgaggcgtggttgcgcgtaacagacctcggccccggcgtggtcgaactgtggtcaacaggattcacctatctgggcgaagcgcgcgtcgaaatcaaccctgatcggatgggcgtcctgtacgcccgccgcaacgcaaatgactcgtcgataaagctgtactaccgcggcccccacgatctcctcctctccatgctcgatcaaaaccagtga

SEQ ID NO: 58174 - DNA, 780 bp, Pseudomonas psychrotolerans
gtggcgcagttcaacaattggtgcgattcgctcgatcagccagtagggggccacttccgtcgagtgatgaccggccagcccgccaaccttcacacaggggtcgaggtaacggcagctatcgtgccggggcattatgcttcagaggagcacgtcgctcgtgcgctcgcccgtctcggcaaacctgcagcggccgcacttatacaaggcaagttaccgaccaccaaaacgatccgatccggcgacctgggtgagatctttgcgacggaatggatcgatgcgtgtagcggtggatatcgcgcgccgattaagcgtttgcgctggaaggaccaccgcaatatggcaatgcgcggagacgatgtcatcggtattcgccaagatgcccgtactcagcagcttcattttttgaagaccgaagccaagagccgcgccaagctcaccgcgcaagtctttactgaagcccgagccggcttggataaagatggaggactaccctcggcccacgcgctgaccttcatctcggagcgcctgctcgagctgaacgaattgcctctcgccgatgcgatcgatgacgcgctgctcaagcacggcatacctgcgcagaacgtgcagcatctgttattcacattttcaggtaatgcgccggaggccctgctaactgcctctctccagacgtatgcaggcaccatcattcaatggggaatcggcctccatgtggatgaccacgccgccttcatcgccgcggtctatgatcgagtaattgacaatgtcaacaacgcctga

SEQ ID NO: 58175 - DNA, 3519 bp, Pseudomonas psychrotolerans
atgtcaacaacgcctgaagcaattgctgccgacattgtagatgcagcgaccgccggttttcgtggtcgcctaatcgctcgcggacaagcgcgcgcgatcatttggcgtgatggtgaactaccaccggacgcgcctgcgtttgcgccgcagctaagctatgacctacattcctacggctacgcactactcgggcttggccttcgcctacgcgaaatcggaggcgatcctgcacaggcccgtatcgcatttgagcaggcaggcactgctcttgaggcagtcattaccaagggaaatcgccaggaagtcgatcgtgatttccatttcataatggctgcggcgagctatcatctcgcgcacctctccgctcgcgcatactcactcctagcgattgtcgaagcagacgaaaatttctcgcttacagagcgggtgctcgcttttttaatgcggcgaaaccttaacgcgtttcgctcaggtgtcctcgactatcgagcctctgagcagggtggcgatgctcgcatcgctgccgaaatcaaggagaatttagatcaaggggaggcagcggaagatttcgacaacggtggaaacgacttcctatacaacgggctggacactgcgctgaccgatgccttcatggcagccatgtcaatgttcctcctcgcactagagcacggcgagcgagcgctactcaaccaggcgctggaacggctccggataagccactccatttgcagtgagctgaatatgctgccgcagtggtgggggcatcgagttgcgattcacctcctcacggacttctggtcgaacaccttccacgaaaaagtaccgctccaacccactggaggcgaggcagcggactggccgcagcttcgtgaactattcattgcgctattacaacggcgtcctaaagcggaggtcgatttgtggccatctcaaatcgaggcggcggctcgcgcggtagatcaaactgatgatcttgtggtttcgttacccaccagcgccggcaagacgcgtatcgccgaactgtgcatcttgcgctgtttagccagcggcaagcgcgtagcatttatcacaccgttgcgtgcgctatcggcccagaccgaagcgactctgcagaggacttttggtccgcttggaaagacgatctcagcgctatacggaagcattggggtaagcggtttcgatgaggacgcgatccgagaacgcgatatcgtcgtcgcaacaccggaaaagctcgactttgcgctacgcaatgatccctcccttctcgatgacgtcggtctgctcgtctttgacgaaggacacatgatcggttccaacgaacgcgaagttcgctatgaagtacagattcagcgactactgcgtcgccctgatgcgcatgggcggcgaatcgtctgtttatcggccatcttgccagatggtgatcaactcaatgacttcgctggatggctgcgtcgggatcatccgggtggactaatcaaacatgactggcggcctacacggctgcggttcggcgaagttacgtggtcttccgccacgtccacagcgcggcttgacttacgcattggcgatgaacgtccctgggttcaacgatttctcacaggagcagtaccgcctaactgggtgccgccaaaacgacgtcgaaccaagctgttcccgtgcgatcagcgtgagttgtgtatcgcgacagcatggcggcttgtcgaggacgggcaaactgtcctgatattctgtcctgagcgtcgtagtgttgagccgtacgcagatgtaatcgtcgatctacatgagcgaggtgcgcttcgctcactacttgaagctgaccccgtcgttctcagcgtcgctatcgcactcggcgaggaatggctcggaccagacagcaccatcctcaaatgccttcgcatcggtgttgccttgcatcatggggcgttaccaaccgcctatcgcaaggaggtggagcggctacttcgcgacaacatcctaaaggtcactgtttcgtctccaacgctggcgcagggtcttaacctatcagccacagctgtcgtcatgcactcccttcaccgcgcaggcgaaagaattgaaatttctgagttcaagaacgtgatcggacgtgctgggcgtgcctacgtcgatgtcgaggggattgtgcttttccccattttcgacagcatcgctaaaaagcgacgtaattgggtagaactgatcagcgacctcggtgcgcgtgatatggagagcggcctagttcagcttgtcggagcgctactttcgcgtatgcacgcccatattggtggcgatctgaatcagctcactgaatatgtcgtcaacaacgccgtagcgtggactttccccgaggtcacgaatgaaaagcccgcggaccgcgaaatcgccttagccaactgggaacgtcacgtcgcgacgcttgatacagccatccttagcctcattggggaaaacgatatccccgacgacgatattgaggtggcactggacaacattcttcagtcctctctctggcaccgtcgcctacttcgacaaaacgagcctgttcagtatgcgctcaaggcagcactactttcacgtacccgactcatttggaaccaatctacggcggagcagcgtcgtgggtactttcttgcgggtgtcggattggcaacaggtcacgcgctcgatgccatcgcagcagatgcaaacctcctgcttgtgcgggcgaatggtgcaattctcttggatgagctggaggaggccatagctgctatcaccggcatcgccgagcgtgtttttgctttctacccatttacccccgaccccatacctatgaattggcgcgatattctgcgcgcatggctccttggtcagcctgtcgctgatatcgttaccggacaggcttcggagaccctacagttcattgaggggggccttgtttatcgtctgccttgggcgatggaggccatccgcgttcgtgcagttgcgaatggtgacgccatcggtgatgtcttgctggacgacttcgatcttggcttggctgcgtccgccgttgagaccggaacactgagtcgttcagcgtcgatcctcatccaggcgggtttcaactccaggctcgcagctatcaaggtcgtgtctgacacgggggcggcgtttcgaactggccaggaactcaggctatggcttaattcggcagacgttactgtatggggcgctcagaatgattggccaactgtcgagacgagggaaatgtggatggagttcgtgcagagcttcactccactggagaaccgtacctggacagagcgccgctgccaggcaagcgtgcaatggcttggcgaaccaccgcatccgggcacccctatccatattcacgactggcttggtcaaccacgtgtgcttgcggccgacggtgcaccattaggcacggtgcaggccaggctgaatattgcacgaactgggttggtgcgggctcaggtggcctgggatgtcagcaaaatcgatgtcgtctatttagggcccgatgatctagctggggcatga

SEQ ID NO: 58176 - DNA, 780 bp, Pseudomonas psychrotolerans; identical to SEQ ID NO: 58174

SEQ ID NO: 58177 - DNA, 3519 bp, Pseudomonas psychrotolerans
atgtcaacaacgcctgaagcaattgctgccgacattgtagatgcagcgaccgccggttttcgtggtcgcctaatcgctcgcggacaagcgcgcgcgatcatttggcgtgatggtgaactaccaccggacgcgcctgcgtttgcgccgcagctaagctatgacctacattcctacggctacgtactactcgggcttggccttcgcctacgcgaaatcggaggcgatcctgcacaggcccgtatcgcatttgagcaggcaggcactgctcttgaggcagtcattaccaagggaaatcgccaggaagtcgatcgtgatttccatttcataatggctgcggcgagctatcatctcgcgcacctctccgctcgcgcatactcactcctagcgattgtcgaagcagacgaaaatttctcgcttacagagcgggtgctcgcttttttaatgcggcgaaaccttaacgcgtttcgctcaggtgtcctcgactatcgagcctctgagcagggtggcgatgctcgcatcgctgccgaaatcaaggagaatttagatcaaggggaggcagcggaagatttcgacaacggtggaaacgacttcctatacaacgggctggacactgcgctgaccgatgccttcatggcagccatgtcaatgttcctcctcgcactagagcacggcgagcgagcgctactcaaccaggcgctggaacggctccggataagccactccatttgcagtgagctgaatatgctgccgcagtggtgggggcatcgagttgcgattcacctcctcacggacttctggtcgaacaccttccacgaaaaagtaccgctccaacccactggaggcgaggcagcggactggccgcagcttcgtgaactattcattgcgctattacaacggcgtcctaaagcggaggtcgatttgtggccatctcaaatcgaggcggcggctcgcgcggtagatcaaactgatgatcttgtggtttcgttacccaccagcgccggcaagacgcgtatcgccgaactgtgcatcttgcgctgtttagccagcggcaagcgcgtagcatttatcacaccgttgcgtgcgctatcggcccagaccgaagcgactctgcagaggacttttggtccgcttggaaagacgatctcagcgctatacggaagcattggggtaagcggtttcgatgaggacgcgatccgagaacgcgatatcgtcgtcgcaacaccggaaaagctcgactttgcgctacgcaatgatccctcccttctcgatgacgtcggtctgctcgtctttgacgaaggacacatgatcggttccaacgaacgcgaagttcgctatgaagtacagattcagcgactactgcgtcgccctgatgcgcatgggcggcgaatcgtctgtttatcggccatcttgccagatggtgatcaactcaatgacttcgctggatggctgcgtcgggatcatccgggtggactaatcaaacatgactggcggcctacacggctgcggttcggcgaagttacgtggtcttccgccacgtccacagcgcggcttgacttacgcattggcgatgaacgtccctgggttcaacgatttctcacaggagcagtaccgcctaactgggtgccgccaaaacgacgtcgaaccaagctgttcccgtgcgatcagcgtgagttgtgtatcgcgacagcatggcggcttgtcgaggacgggcaaactgtcctgatattctgtcctgagcgtcgtagtgttgagccgtacgcagatgtaatcgtcgatctacatgagcgaggtgcgcttcgctcactacttgaagctgaccccgtcgttctcagcgtcgctatcgcactcggcgaggaatggctcggaccagacagcaccatcctcaaatgccttcgcatcggtgttgccttgcatcatggggcgttaccaaccgcctatcgcaaggaggtggagcggctacttcgcgacaacatcctaaaggtcactgtttcgtctccaacgctggcgcagggtcttaacctatcagccacagctgtcgtcatgcactcccttcaccgcgcaggcgaaagaattgaaatttctgagttcaagaacgtgatcggacgtgctgggcgtgcctacgtcgatgtcgaggggattgtgcttttccccattttcgacagcatcgctaaaaagcgacgtaattgggtagaactgatcagcgacctcggtgcgcgtgatatggagagcggcctagttcagcttgtcggagcgctactttcgcgtatgcacgcccatattggtggcgatctgaatcagctcactgaatatgtcgtcaacaacgccgtagcgtggactttccccgaggtcacgaatgaaaagcccgcggaccgcgaaatcgccttagccaactgggaacgtcacgtcgcgacgcttgatacagccatccttagcctcattggggaaaacgatatccccgacgacgatattgaggtggcactggacaacattcttcagtcctctctctggcaccgtcgcctacttcgacaaaacgagcctgttcagtatgcgctcaaggcagcactactttcacgtacccgactcatttggaaccaatctacggcggagcagcgtcgtgggtactttcttgcgggtgtcggattggcaacaggtcacgcgctcgatgccatcgcagcagatgcaaacctcctgcttgtgcgggcgaatggtgcaattctcttggatgagctggaggaggccatagctgctatcaccggcatcgccgagcgtgtttttgctttctacccatttacccccgaccccatacctatgaattggcgcgatattctgcgcgcatggctccttggtcagcctgtcgctgatatcgttaccggacaggcttcggagaccctacagttcattgaggggggccttgtttatcgtctgccttgggcgatggaggccatccgcgttcgtgcagttgcgaatggtgacgccatcggtgatgtcttgctggacgacttcgatcttggcttggctgcgtccgccgttgagaccggaacactgagtcgttcagcgtcgatcctcatccaggcgggtttcaactccaggctcgcagctatcaaggtcgtgtctgacacgggggcggcgtttcgaactggccaggaactcaggctatggcttaattcggcagacgttactgtatggggcgctcagaatgattggccaactgtcgagacgagggaaatgtggatggagttcgtgcagagcttcactccactggagaaccgtacctggacagagcgccgctgccaggcaagcgtgcaatggcttggcgaaccaccgcatccgggcacccctatccatattcacgactggcttggtcaaccacgtgtgcttgcggccgacggtgcaccattaggcacggtgcaggccaggctgaatattgcacgaactgggttggtgcgggctcaggtggcctgggatgtcagcaaaatcgatgtcgtctatttagggcccgatgatctagctggggcatga

SEQ ID NO: 58178 - DNA, 816 bp, Vibrio crassostreae
atgccttggactaaagaacatattcagtggctttaccatactggtgaagtaatctctatttcaacaggtgaaaaagtccctgtatttgatttcgcttacgatgtggacgatgaagaggtaatgtcactctgggcaaggcattttaggaatcattattgtgctgatgatgcaatagaagtactcaagcctcaagagatgacaaataaagattacttgttaaacctaaagtttccgcataaaactaaaagccctggaccaagtatccgtgcgggggattttgctgaaattttggtcgctgactatttggtatttctccgcgattactatgttccaagaactcgttatgaccggaagataattggtaatgagtcatccaaaggttcagatgttttggggttcaagcaaatgaatcaggctccctctagcaaagacgaattattaatatacgaggtcaaagcacgcctttctgaaaaaagtgccaaaaacactttgcaagccgcaattgacgacagttcaaaagatgaggctagacttgctgagtcattaaacggtgcaaagcaaagactgtatgatcagagaaattttgctgaaatgagcgtcatctcaagattccaacaaaatgttgaccatccatataaaacaaaatttggggcagcagcggttcttactgatagttcatgttgcgtcgaaaccttagctgaagcttcaactaaggagcattcattcccaacgcacttggaaatgatagtgattagtggcccttgtttgatgtctttggttcatgaactatacgagagggcagcaaatgaagcttga

SEQ ID NO: 58179 - DNA, 3108 bp, Vibrio crassostreae
atgaagcttgaacagtcctcaaagaagatgctggcaattgcaaagtcgaaagcaaagatgtatgagtttgctattgatgaagcatctcatatagagctacctgtcgatccgcgtaaattattggttacaactattgggattttgggtgatctgtccgctattgaagctcgtggagatttacagtttggagagactggtgagcatgaagaattaaagtctgaactaatatccgttgggcaatattttgatgctttgattcaatctcatctggctgatgagatgactacttatcttaagattataggttcggcggcctactatttagcgaacatgccaggcagctccatcgttctgaccaaaagtttggtctataaaacagaactgctcactgatactaatcttgagggaattttgatttggatattaaagtccaacttcaatgaaaattggtatcgcgttgaaaaaacttatttaacgcaagcaatagatggtgtcggctacgccactcaacgtttctttggtttaaaccttgatacccagagctttaaacaggcaatacaggtcttaaggaatgaagtttacgaaaaaggctctgatagagagcttttgtttgccgacattatttcttctattctgctaagaaaaatcgaaaattcttcaatagtttgtttgcctaaatatacacaaatccccttagaacaatgggtaaatgtaattactaagccgacatttgttcaagagttttggcctgctcagaggttgctgggcgagcaaggagttttgtcaggtgtatctgctgttgtgcaaatgcccactagtgcgggaaagacaaaatctacagaattaataattagaagctcgtttttgtctgggcgctctgatgttgctgtaatcgtcgcaccattcagggccttatgcagggagattaccgctacatttgaacgcgcatttgaaggtgaagatgtaaatatcaatgaattgcaagatgttctgaatatttccgatagtgatgacgagcttataaggtttttaaccggagaaactgatcaggatggaatagctactaaatctatagttgttaccacgccggagaaacttgtttaccttcttaggcatgaccccgctttagcagactcaatcggcttacttatttttgacgaagggcatcagtttgacactggaaagagaggtgtcacctatgagctattgatggcctacctcaaatctcgcgtaggcgatgatgttcagaaggtattgatatccgcggtaatggctaacgccaactcaattggtgaatggcttaatggggaggccggtattgagattcaaggagctgggtgtttaccaacagtacgaagtacagccttcgcaagctggcaaacagcaatggggcaacttcagtatatcgatcaagatcgtgaggctgatagagattttttcgttccaagagtgattgagcaaataaacctcggaaagagaggtcgagagaggaatgctcgactttttcccgccaaaaacgataaccccagtgtcgcagcttatttaggggttaaattatgccatcaaggacctgttgctatattctgcggtgtaaagagtactgttacgtcaatatgcgagcttttagttgattactacgaaagaggtcttgctttaccaccacctagcatttcgagcgatcaaagcgaattagacaagattgcttacctttcaagtttgcattttggagatgagtccatttttactcgttcggtttcccttggaatattaccgcatagttcaaacattcctaatggtatccgtgtttctgtagagtgggcaatggaatccaataagtcagcgttggtagtgtgtacttcaactcttgcccagggggtgaatcttccaatcagatacttagttgtttcaagcacgtttcaagcagggcaagagatcagcacacgagacttccacaatctcatcgggcgagcaggtagagcaggataccatactgaagggagtgtcatttttgcggatacggacgtttttgataaacgcaataattttcatgaaaggtggcgatggcaaagagcgatgcatttgctcgattttactaatacggaggactgcgcaagtagcctacttgacttgatctcgccatttgactttacagaacttaatgttgatgctattcagttcatcgcaaacccagctggctatagacaaagctgtatagacgtaggaaatcaaaacgctattgatatcagttcgctacttgatcagatgggttataaagaagctttaatcgaagcaatagaaagctattttttatcctatttgaaagacaatccaaatgcgcctcaaacattctttgatgatttggcccaaggaacattagcttactttttgtcggactacgatcagaaacaaaagctacgggcggcattttcatttatcgctagcagagttctttctgtacccgaagataaaagacaattcttcggaaaatcgttgctggggttgaaaaatctattcctaatcgaaaattggcttgacgaaaattggggcgaagtagcacaagctcaaagttccaatgaacttcttgtgatttgctggccattgctatttcagctcaataacaacaagatgcttctaaaaataaagcctgaaaacgttatattagattttacgaaattatggatttcaggaagtagttacaccgatctgcgtagttacttggatcaatccggtgcctattatcaagctgggtcgcagcgcagaaatattaaaatggatcatgtagtggacttggctgacggtgcgctttcttttgattctatgttatatgtcggagcaatagctgatgtggccgagggtaaagggttagacggagatttattggagcttcttaggagcttgcaaacacgtcttaaacttggactgtcaaatagccttgaaatatggctctattctcagggttatgtcgatagagaggtttgcaagacccttggttctgttcttaatggtcagggagtaaactctgatgtgttcgattacgatattttgaagacataccatcaagttgtcagtgagtgtattagtaagtttccatcgtactttagtggttaa

SEQ ID NO: 58180 - DNA, 816 bp, Vibrio crassostreae; identical to SEQ ID NO: 58178

SEQ ID NO: 58181 - DNA, 3108 bp, Vibrio crassostreae; identical to SEQ ID NO: 58179

SEQ ID NO: 58182 - DNA, 798 bp, Streptococcus pseudopneumoniae
atggaagcaacacatagatatatgaattatctaatttcagaaaatccaatatatactaatgaaggtaaaaagatagaagttttccatttagatattcaggatgatccagaaatttttgaagaatgggcaaaacaatttagacgtaattattgctcagatgatatgttgttacatatgacattagttacgggtcttagtgcttcggaatatctgagtggtaataaattaccaagtaagccttcaacaaaatcaggtgattttggtgaaattttagtatctgactatctgcaatattttaaaaattattttgttcctagaactcggtttaatagtagaataaacaaagatatgccaactccaggaagtgatgctttgggatatagctttgaccctcataatccagataaagatgaagttatagttatagaagtgaaatcatctgcttcagaaaaatgcgatgaaaaagcccaaaaaaagcttcaagaagctatagataattcccaaaaagattttataaggttttcaacttcaattgttgctagttatgaaaaactgtatagtttaaatccaggtgaagctgaaatattaactcggtttctaaatttttcagataacccatttaaagttacatatggtgctattgctgttcactcgaatgactcatatgatttggagacaataaaacaagttattacagagaaacatagagattcggaaaaaatccagatgatagtgatacattctgagaagctaatggattttataaataaactttacttgaaagcgagtgaagtatga

SEQ ID NO: 58183 - DNA, 3084 bp, Streptococcus pseudopneumoniae
atgatagaatttggaaaacggtcattatattattcaaagcttattcgttcaaaagcaaaaatgattgaatttgatatacctttagaaaatcatatttcgatttcagaggactctcacaaatcttttcttgtagcactagcaattgttgcggattctgctagaaagtattttgaagattatataaatcataatcattttgatcctcatttaaaaaaccaattacatcacgctgcagagttttttgatgcactgattttgtctgagttgggaaatgctgatgaatatagagattatattgcaatgttaggagcaacagcttactatctaggggattataatggtagttcgagtgttatgcttagctatatttcagatgctacacgatttcctgaggatagttctaatctaattaaggtattaatagacatcttgacaaatagagtctttgagaactatgaattaatcacagatatatattcagctgagttaaacactctagttgaacggtatagaaactatattttagagggacgtgatattgctacagaggtttttagaaatttacaagataaagtatacataaatggaagtgatttttctgtaattattgtaaattgtcttttagcagtagtatgtaaaaaaatcaattgttcatcaacgaaattactacctgaattttcagaattagatttttcagtgtggcaggattatattcagtcagaaggaagtatgaaggaactctggccttctcaaatcgaattaggtaagcaggggatttttataggtagatctggaattattcagatgccaacaagttcaggtaaaacagcctcaatcaatctgatattaaggtcagcattttactcaaatagaattgataatgtactaatcgttgctccttttagagcattatgtagggagatatatcgagatattaatgcgcactttattaataatgaagatgtaattattagtgaaatttttgatttacctgagataccacaagatttctcgatctttaatgatagtataaagagagtttttgtacttactccagaaaaattattgtttttattgagaaataatcaatcatttattgatagaatagggctctgtatatttgacgaagcacatctttttgatgatccaaatcgtggaagcaactttgaattacttatgtcaacagttaaacaaactttacaaaaagaagtacagaagattttaatttctgctgtaataccaaatagtgaagctataaataaatggtttaatgaagatggagtagttgtttctaataattcgattaaaacaacagaaaaaagaattgcttttagtgatttaaatgggagtaatgaacaattatactttatagatcctattacatttgaagaagaattttttgttccacgtactgttaacgttagtaaattagaactacttggaaaagaacgaaagccaaaagtatttccagaactgaaaaatgcaaatgatataagtatttattatggcattaaactaattaaaaatggtggagtagcaattttttgtggaagaaaagatactgttaatattgttttgagaagatttatagacttaaataatagaaagtatgacctaagtgatttcttagaaaactcagatagatttgaagttgaaaaaataggaaacttaattggtaaaaacataggatatgatagtgttgaatatacttgtagtcagttaggaatattttcgcatcattcaggtatacctatgggactgcggattgctatagaatatgcattttcaaaaagtaaaataaataatgtagtatgtacttcgacattagcacaaggtgtaaatttacctataaaatacttaattgtctcaagtatgtatcaagcaggagatgcaataaaagttcgtgattttcaaaatttgataggtagagctgggagagccgggaaatatacagaagggacgataatattaacagaatctggtatatataaaactgaacaaaagagttggaagaagaaacagtataaaaaattgttaaatccaattaattcagaagggtgtaaaagtaatattttaaatattataaagttcgattcagtagattcaactgattatagatacgggagcatgaaatttgatttttggaatctaattcttgagagatttatcaataatgtagagtacttagaaagagtaaatagtgtttcatcaaacttaagggcacaagcaagcccttatttgcaggattttaattataagataaatcaaattgagagcacactaatagcaattgaaaactatcttgcttcaatatttactgatgaaatggagattgatggtttagctgaaaatacttttgggtattttttaggtgatgagaatgaaagagaaagaataaaagaactctttgatttagtcagagataaaataatcactagttcagtatcaactgaaatactttcaaaaaactcaattggattataccagtcggaacacttaaaagcatgggtacagggaaatcagggctctatattatcttgtgagatagagaaagatttattaagtgttttaattgagattataagggaattttcaaataataaggtgatgagaaaattgagtacagaagacctcaattatattactcaactctggattaacggtatttcttactttaatatattggaaagttgtactgaaaagctaatcagaattgaaaaaagaggcaagttaaaatcaattgacttgtctgacattatatctctttgtgacaatgggttaggatacgaaacatcaatgattttaaattcaattaacaatattcttgaagaattagttggtgagaaaatagatgttataactaagttgacaaggagattgaaatatggtttatctcttgataaagaaatcaatatctatgaattaggtttttcagatagaattgtagttcaattgattggtcaagagattaagtctcaaagtaagaatcagattagaaatgaaatcaaacgggattcagctagactaaaagataaattgagtgattttccaagttactacatacagttaattaatgaaatttaa

SEQ ID NO: 58184 - DNA, 780 bp, Lysobacter concretionis Ko07 = DSM 16239
atggcgcagttcgatgattggtgcatttcggtcgacgcgccgatggggaaccactttcggcgtgtgatgaccggacaggccgctaacctgggggtcggcatccaggcgacggcagctatcgtgccttcgcattacgcctcggaggagcaggtggcgcgcgcactcgcgcggctcggcaagcccgccgctgccgccctgatcgagagcaagctgccgaccactaagcagatccggtccggcgacctcggcgagatctacgcgacggaatggatagatgctcacagcggcggctaccgcgcaccgatcaagcgcctgcgttggaaagaccaccgcaacatggcaatgcgtggtgaggacgtgatcggcatcctgcaagacccccaatctcaacgtcttcagttcctgaagacggaggcgaagagccgtgccacattgtccgcacaggtcctgacggaagcccgcgccgggctggacaaggatggaggattgccctcggcacacgcactgcactttatttccgcgcgtctcctcgagctcggcaatctgccgctggctgatgcaatcgatgacgcgctgctcaagcatggcgtcccgccgcagagtgtccggcatctgcttttcacattctcaggcaatgcccccgacgcactgctagccgcctccctacaagcgtatcccggtcttatcaatcaatggggtatcggacttcgcgtggaaggccatggcgcctttgtcggcgcggtctacgatcgagtgatggccgatgcctgcaacccctga

SEQ ID NO: 58185 - DNA, 3519 bp, Lysobacter concretionis Ko07 = DSM 16239
atgcctgcaacccctgaggccatcaccgcagatatcgccgaggcgacggccgccggctttcggggccgactgatcgctcgcgggcaggcccgcgcgatcatttggcgtgacggcacccttccgcccgacgcgccggacttcgcgccgcagcttagctacgacctgcacagctatgcctatgccctgctcggcctcggcctgcgccttcgggaggtcggcggcgacccggctgaggctcgcacggcattcgaacaggctgcaacggctcttgaagcggtgatggcaaagggcaacagccaagaggccgatcgcgatttccactttgtcatggccgcggccgcctatcatctcgcccacctgtccgcacgagcctattcgctcctcgcaatcgtcgaggcggatgaaaatttctcaccgatcgagcgggcgctggctcagttgatgcggcggaatttcgatgccttgcgcagcagcgttctcgactaccggacctccggtcaaggcagcgatgagcggatcgccaccgacatgcagtcccacctcgagcaagcagagggcgctgccgtacctccggatgccgatggtgacgacttcctattcgacggtctgaataccgcggtcaccgacaccttcatggccgccatgtctctttatctgctcgcgctcgaacgcggcgagcgagagcttgtcgatcacgcgctcgagcggctgcgtgtgagtctggcgatctgcggcgaaatgaacatgctgccgcaatggtgggcgcatcgtgtcgccatccatcttctgtcggacctttggtcgagcacgttccataaaagagtgccgctgcagtccgcgggaggactggcggcggactggccgcgtttgcgcgaactgttcatcgcgctgttgcagcgccgcgctagggcagaggtcgacctttggccatcgcagatcgaagcggccgcccgtgccgtcgatcagtccgacgacttagtggtgtcgctgccgacgagcgccggcaagacgcgcattgcagaactgtgcatcctgcgctgcctcgccggcggcaagagggtcgtgttcgttacgccgctgcgcgcgctctcggcgcagaccgaagctacactccagcggaccttcagcccgctcggtaagaccatctccgccctctacggcagcatcggcgtcaccggctttgatgaggacgctattcgcgagcgcgacatcgtggtggcgacgccggagaagctcgacttcgcgctccgcaacgatccctctctgctcgacgacgttgatcttctggtcttcgacgaagggcacatgatcggcctcaatgaacgtgaggtccgctacgaggtgcagattcagcggcttctgcgccgtgccgacgctctggagcgccggatcgtctgcttatcggccatcctgcccaatggggaccaactcgatgacttcgccgcgtggctgcgccgtgatcatccgggcgggctgatcaagaatgattggcgcccaacccgcctgcgcttcggtgaggtggtgtggacgtcgccaaccgcccggctcaacctcagagtcggcgacgagcggccttgggttcaacggtttctcaccggcgtcgcacctcccaactggattccaccgaagcgccgtcgcacccagctgtttcccaaaaaccagcgcgaactctgcctcgctaccgcgtggcggcttgtcgatgacggtcagaccgtcctcgtcttctgcccagagcggcgcagcgtcgaaccgtttgctgccgtcatcgttgatttgcatgagcgcggcgcgctgcgctcgctgctcgaggccgatccgaatgcactgaacaccgcgatcgcgctgggcgaggaatggctgggcgccgacaatgcgattcttaaatgcctgcgcctcggcgtcgcccttcaccatggcgccctgcctacgtcttaccgcaaggaggtcgagcgtctgcttcgcgagaatgtcctcaaagtgacaatctcctctccgaccttggcgcagggcctcaatctgtcggctaccgccgtcgtgatgcactccctgcaccgcgccggcgagcggatcgagatcagcgaattcaagaacgtcatcggacgtgccggacgcgccttcgtcgacgtcgagggcgtcgtcctctttccaatgttcgaggatatccccaggaagaggcgcaattgggaaacgctcatcaccgatcttggcgcgcgcaatatggaaagcggtcttgtgcttctggtcgtggagctactaaagcggatgcaagcgcgtatcggcggagacatcaaccagctcgttgactatgtcatcaacaacgccgcagcctggacttttcccgagatcggcaatgaagagccggaagaccgtaatcgcgccctggccgattgggaacggcacgttgcgacgctcgatacagccatcctcagcctcatcggggagaacgaaattcccgatgaggggatcgaggctgctttggacgatatcctccaatcttctctgtggcagcgacgtctggagcgtctggacgctcaattccagcatttgttaaaagcaggtctttcctcccgcagccgactgatctggaatcagtcgaccgccgctcaacgccgcggctattttctggcaggcgtcggtctgacgacgggtcatgccctcgacgccatagcctccgaagtcaacctacttctcatccaagccaatggcgcgatccttgagggtgacgccgaagccgcaatcacctctatcaccggtctcgctgagcgcgtattcgcattttatcccttcatacccgatccgctgcctgcgaactggcgcgacatcctgcgggtttggctgcagggccagcctttggccgcgctgggcggggatcagccatcggaagtactgcagtttgttgaaggaggccttatctaccggctgccttgggcaatggaggcgatcagggtccgcgccagcgcaaatggcgatgaggtggatgatggcctaggcctagaagaccatgaacttggccttgcggtgccggcagtcgtgaccggcacgctcaaccgctctgcatcgatcctgatccaggccggcttcaattcgcggctggctgcaatcaaagcagtcaccgacaccggcgcgaccttcacctcgggcaaggagctgcggcaatggctgaatgcagatgtggtcgccgcttggagcgctcaggccgactggccaactagggaaacgagaccaatttggatggagttcgtccaaagcttcacaccgaacgaggagcacacatgggccgatcggcactattggtcgcgtatcacgtggttggctgcgcccccgccgcccggcacagtcgtccagatacaccagtggtcaggtcggccgtgggtactttcgccagacggtactccgctaggcacagttcaggcagcactcaattcccatcgaagcggcctgcttcgcgcacaggtggcgcaggatgtcagcaagatcgacgtcgtatatcttggtcccgacgatctggcgggcacatag

SEQ ID NO: 58186 - DNA, 780 bp, Salipiger mucosus DSM 16094
atggtacagttcaacgattggtgcgactccgctgacacgccgcttggcaatcatcacgttcgggtcatgacgggccgcccggcggacgttgcgaccggcatccaagtgaccgctacggccgttcccgcccactacgccgccgaggaacgcatcgccgcagcgcttgcgaggctgggcaaggccgctgccgcgcagatgatctctgatcttctcccacaatcgccgcagatccgatcaggcgaccttggtgagatttacgctacggaatggatcgacgctcacagcggctatcgcgcgccaatcaagcggctgcgctggaaggatcaccgcaacatggcgatgcgcggcgatgacgtcattggcatgattatcgatccggcaacacagcgcctccgcttcctgaaagcggaagccaagagccgcatcaaccttcgtgcccagacgctgcaggaggcacggaccggtctggataaggatggcggccttccatcgtcgcatgcgctgtccttcatctcagccaggctgatggagctgggcaccgatgcgcctctggtggacgccatcgacgaggcgctctatcggcatggtatcccgccagagagcgtgaagcatcttctcttcaccttctccgggaactccccaaaggcgctactgacacaggcgctgcaggcctatgcaggtccgatcgggcaatggggtgtcggccttcatgtaaacggccacgccgccttcgtcggggccatctacgataaggtcataatcgatgccaaccagcgttga

SEQ ID NO: 58187 - DNA, 3168 bp, Salipiger mucosus DSM 16094
atgccaaccagcgttgaggcgatcacagccgcgattaccgaagcggcaacggcaggcttccgtggcaggctgatcgcacgaggtcaggcacgcgccatgatctggcgtgatggtgttctcccgcctgaatcgcccgccttctcgccgcagctcagcttcgatctcttcagctacgcttatggtttgcttgggcttgggcttcgcctccgcgaactggatggagatccgagccaagctcgggtcgcgttcgagcaggcggcgacggctctcgagtcagtcatggccaagggcaaccgcgacgaagcagaccgcgacttccatttcgtcatagcggcggccagctaccacctcgcgcacctctctgcccgtgcctattccctcctttcgatcgtgactgctgaggagaatttctcaccgattgaacaggcgctcgcgctgttgatgcgccgagatataaacgaattgcggacactcgtttatgctttccgcttggatggccgaggatcagacgcgaccatcacggcgctcttccagcagcgtctcgccgaggccgctcctccagacgcgccggagcgcgatggacaggattttctctttgagggcctggatctggcgctgacggacgccttctttggcgccttcgcgacgttcctcctcgctctggatcgcggcgagcgtgctcttcttgacagggcgatcgcccagcttcgcgagaatctgaacatttgcggagaactgaatctgttgccgcaatggtgggttcataggctcgccatccatttgctttccgatctctggtcgaacaccttccacgaaaaggttccaacccttcccgctggcgacgcggccgcagcttggggcaaccttcgtgaccttttcatcgctctgctcgctcgccgtgcaagagctgaagtcgacctttggccctcccagaccgaggcggcgtctcgcgctgtcgatcagaccgacaatttggtcgtctcgctgcccaccagcgctggcaaaactcgcatcgccgagatgaccattctgagatgtttggcaagcgggcggcgggtcatattcgtgaccccgcttcgcgcattgtcggcgcagaccgaagctacgctccagcatacgttcggaccactcggcaagaccatctcctccctctacggtagcattggggtctccagcttcgacgaggatgccatccgcgggcgcgacatcgtcgtcgcgacacctgaaaaacttgattttgctttgaggaacgacccgtcactgctcgatgatgtcggcctgctcgtgttcgacgaaggccatatgatcggtcccggcgagcgcgaagttcgatacgaggtccagatccagcgcctcctacgtcgtcaggacgccgatcaacgccgcatagtatgcctgtcggctattcttccagacggcgaccaaatggaagacttctcggcgtggctgcgccgcgatcaaccgggagatccaatcaagaacgattggcgcccgacgcgtctgcgcttcggcgaggtgatctggaaatcgcccacagcgcgcctcaatcttcgcgtcggcgaggaaaggcccttcgtcccccgatttctcaccggcgcggcgcctccgctgtttgtaccgccgaagaggcttcgcaccaggctcttcccggacagtcagcaggaactgagccttgcaaccgcatggcgcctcgtcggcgacggtcaaaccgtgctgatctattgcccggagcgccggagcgtagaacccttcgccaaagtcatcatagacttgcacgcacgcggcgcactcgcgtcgttgctcactgtcgatccggccaccctgcagaccgccatcgcgctcggtgaagaatggcttgggccgaacagcgacatcctaaactgccttcgaattggtgtggcgcttcaccatggcgccctcccaacggcctatcgcaaggaaatcgagcgccttttgcgtgaaggtgtgcttaaggtcacgatctcatcgcctactctggcgcagggcctcaatctgtctgcaaccgccgtcgtcatgcactcgctctaccggcatggcgagaagatcaaggtctccgaattcaagaacgtcataggtcgcgctggccgggcctacatcgatgtcgaaggccttgtcctctatcccatatttgaggccgcgaagaacaagaagcacggcgaatgggtcgagttgatcgaagatctcggtgcccgcgagatggaaagcggactcatccaacttatctggtctttactcaaccgcatgcacgcgcgacttggcgggaatttcgaccaattgatcgactatgtcgtcaacaacgccacggcatggaccttccctgaggtcgccggcgagaagcccgaaaagcgcgagcgggcgcacaaagagtgggagcgtcatatggcgaccctcgacaccgcaattctcagtctcttaggcgaggccgatgtccccgatgaccagatcgaggctgcgctcgacgatacccttcaatcgtcgctctggcagcgtcgcctgctccgcatgagcgatgcagcgcgggcggcttgtcgcacgacgctgctcacccggagccgcttcatctgggcgaattcgaccgctaccagacggcgcggctactttttggccgggctcggcctcgaagcaggacatgcgcttgacgcaattgcgcccgaggcgaacgacctcctcatacaggccaacgcagccctcgcggctgcggatcatgaggcggcaatcgctgcgatcaccggcattgccgagcgggtgtttgccttctatccgtttgagcccgactcattcccggcaaattggcgcgacatcctcagatgttggctgcttgggcagccgttggcggcgattgtcgccggccaggaagccgaggcgttgcaatttatcgaaggcggcttggtataccgcctgccttgggccatggagtctttgcgcgtccgtgccgctgccaatggcgatgtggtcggcatcttcgagctgccgttggatacttttgtaagcgctgtcccgcggtcaccttccgcgatgtttcggcgaatgcgagagcatccttatcgtgagttagggagtgcggttcgcaatgtgcgctacaaatgcgtttctcagatcgctcggtgtggagatctacgcgtccggacaccggcgctggccggatga

SEQ ID NO: 58188 - DNA, 783 bp, Sphingopyxis granuli
atggggctgtatgagcggtggtgcgaatccaccaaggaaaaagacaagcgcaaacactactggacctatgtcgagaaggatggcggccgcgacgagatcagcggcgacctcgccgagaccattcgttcccactatgatcgtctcgagcgtatcgccgaggatgtcgagcgcctcggatacacggttgccgccaagattctgagcgaggcgatgcctcagacggccaagggccgctccggagacctgggggagattctcgcgaccgagctggtggaggaagagatcggcctgcgcgtccccgtgcgccggcttcgctacaaggacggccgcaacatggccatgcgcggcgatgatttcatcggcgccggctatggcggccaggacgagaaattgtggcttctgaagggggaagccaaaagcaacatgaagctcggcaaatccaccgtgacaagcgctcgcaaggtgcttgatcgcgacaatggccgctgcacgccggactcgctgctgttcgtcgccaaccgtctcctggagagcaacgatcccgacgaaaacgcgctgggccgcgacctccgcgatgaggtgggtttgaggtcgctgcgcgccgatcgcatcgaccacatgcttttcaccgtttccggcaacggcccccatgcctcgctgaaggaagatctcgagaccgccgggaccaatcgcgaccactacgtcgtgaacatccacgtcgaagatcatcaggacttcatcgcggccatgtacgaaggggcgcacgatcttggagacgcctga

SEQ ID NO: 58189 - DNA, 3519 bp, Sphingopyxis granuli
ttggagacgcctgatgaactgaccgccttcctagccaccgcgaccgtcgacggcatccttggccgattgctctatcgtggcgctgcatggtcgctgatgcgggaagcgggcgtattgcctcagacttccccgcccttgggcgccacaatcgaaaccgacctcgccgaacacggctttgccttgcttcggggcgccatggccttgcgtgcccagaccggcgcgtcagacctgacgaacaaggctttcgaacgggcggccaacgcctttgaggcgctggtgagaaacggtgatcccgaggcacccgatcgcggcttccgccgcaccatcgcggctgccgcctatcacctggccggcttctcggccgtcgcctattcgctgttcaacgagacggttgaagatctcaacgcatcgcccggcgaaacggcgatccgtcatctcatcctgcgcgatctcgatcagttgcgcggcttcgttcgcgactggcttggcgacgaggcccacggcgacgagcagatgggcgaagcgctgggcggcgatgagcccgacatcgacgacgtattgtcgaccattctgaatacgacgatttgtcgggctctggcctacttcgacttcgcgctggaaacaggggaagaggagccgatcgacgccgcgcgcgatctactggccactgcggtcagcctagccggcaacgccgggaatgtaccgttgtggtggatctcgaatctttgccgccatctgatcgacgacctctggcagcattcattgcaccggagcctgccgacggagccacccgctggaacggaggagcgataccccgacctccggcggctgttcatcggttcgctgtacgcgcgcaaaacctccgaagtggagctatggccttctcagcgcgaggccgcgcagcggtcgaccgatgtcaccgacgacctggtcgtggcgctccccacgagcgcggggaagacgcgcgttgcggaaatcgccgcgttgatgaccttgtcatcggcgcgtcgggtattgattgtcacgccgctgcgcgcgttgtcggcccagacagaacgctctttccgcaagaccttcgcgcccctcgggttcagcgtctcctcgctttacggcgccagcggcctttcggcaggcgacgaggatgccctgcgcacccgcgagatcatcatcgccacaccagagaagctcgacttcgcgcttcgaagcgacgcttccctgatcgatgatgtcgggctgatcgttctcgacgaagggcatatgatcgggcccagcgagcgtgagatccgctacgagacgctagtgcagcgtctgctgcgccgccccgacgcggccaaccgccggatcgtctgcctctccgcgatcctgccgagcggcgacgagttggatgacctcaccgcctggatacgttccgacgaacccggcgagcccgtgcgttccgactggcgccccacgcgtcagaggttcggcgccctaacctggcgcggcaaggatgcgctgctgcggctcgacctcgacgatggcggtcccttcctcgacaagttcgtcgaggagaagcctgcacgcggaagggaaaagaagccgtacccgcgcaagaactcacacctggccctcttcgcggcgtgggaattcgccggccaggggaagcgcaccctgatcttctccacccaggccaactgggtcgagagctatggcaagcaggtcgttgatttatgcaagcgcggctatctcagctctctgctggacgacgaggcgccgatcgcgcgggcgctggaggtcggcaaggaatggctgggagaggaccatccggcggtcgctagccttaaggccggcgtcgccatccaccacggccgtctgccgagcccgttcctgcgcgagctggaggtactgctctcggagggcgttctcaaagtgatcgtcgcctcgccgacgctctcccaagggctcaacctgaacgccgctgtcctgctcgtgcccgcgctctatcgcgccggtgagaagatcaagggcgaggagtttgcgaatgtcgcaggccgggccgggcgcgccttcgtcgatgtcgagggcctgatcgtccatgtcatgttcgacaagaccgattggcgaaagaaggagtggaggaagctggttgcctccgccaaggcccgcacgttgaaaagcggcctcatccagatcgtcgccgagatcctcgagcgcctgtcgcgagagggtgtgctcgatcgcgatgacgcctgggagtatctcgccaattcccgggaggcgtggcgatcgcccgacgaggaggccgaagtggctgaacgccttgccgccgccgtggaatacgacgccgacggcgacgagaacgatgacgaggacgagagcgaggctgacgaagaggaaacgatcgacgaagagccgttgtcgcagattgtcgagcgcctcgatgcgaccgtgttcggcctgatcgaagcgctggatgcggatcgcgccgatctcccgaagttgctggacgaggccctcaagggatcactctgggctcgtcagattgcgcgcgaggaagaggacgtcgcacccctgcacaagaaggtcttcgaagcacgcgccgaccttatttggaagaccacgaccgagcaggcgcgccgcggtcatttcgcaatgggcgttgggctcgaagcggggctctccatcgacgcgatggccgacgtgctggccgagctggtcgaccgggccgatggcgctgccctgagcggcgacgtcgacgaactcgccgacgctctcggcggtctgggcgaacgtctgctgttcatgcgccccttcatccccgacaagaagaacgcgctgccagccaattggaaagccatcctgcgcgcctggatttccggggaggaagtctccaagatcgggccacagaatatgcgggcggtcgaagaggccttcacttatcgcctggtttgggcgctcgaagccattcgcacccggcgaatgtctctcggctggtcgccggagacggtggcgggcggcgcggcggcagtagtcgaaacgggcgtaccgcaattcatgatggcgatgctgattcgcgccggtctaccttcgaggacagcagccatggcctccatcaacgaaaccaagccaatgtttgtgactccggcggaaatgcgcgcatggcttgaatccgatgaaatcacagccttcacggatttgggcgattggccaacgcccgaaacggcggcattgtgggcccgtttcaggactgaggcgctcagtggtgggattcagaaatggtcaatctatcgcaaccgacgtttgctcgatgttcccgttgaatcagcacctcgcgcagggctttaccgaattatcactgatgaaggagatgggaggacttggctagcgacgcccgactatcagcggctcgctgcgtttaggaagcatgctgttgatccgaagcctagcttgctttcaggtaggcttccagagggcgtcaatcttgtcgacgtcttgcgcgttggccggggtaaaatgcgatggccacccgcgaatgcttga

SEQ ID NO: 58190 - DNA, 774 bp, Alteromonas mediterranea 615
ttgctgaaaatagcagataagtcagaagtcacagagcacgtagctggacaaaaccgattcaaaaagattgttctcaagcctgaagagtttgagagtttagttgaagagctggtgactctagtgccggattattatgtcgatccgctctctcttgctagtaccttggatcgcttgggtaaacctgctgctgcaaaaaaattgaggcttaaactgcccgaggttaaaaaaattcgctctggagatgttggagaaataataaccagcgattacattgaagagtacacgtcatttgacgtgccaataagaaagctacgctggaaagaccataggaatatggcaatgcgaggagacgatgtgattggtcttcttgttgaccagcaaagaaataaagtattttttcttaaagcagaagcaaaaagcaaccaaacgctgggaacagcagtccttgataaagctagggaggagttggatttagatgaaggactccctgcacctcatgccttagaatttattgcagaaaggttaagagagacaggaaagcaagaccttgcagacctcatcgagcaagcccagctgattgatggtattagaccagaacaagttgagcacttattattcactttcacagcttcaaacccggacaatcttcaaaaaagtgcctttgatgcatacagtgggacgataaaacagtcgtctgttgggttccaagtcggtaaccatcaggagctgattagttgtacatatcaaggagtggtagatggcctcgacgattga

SEQ ID NO: 58191 - DNA, 3537 bp, Alteromonas mediterranea 615
atggcctcgacgattgaagagattgaacgtgcaataaagcaggctgtttctacgggtttcagaggacgtttactagagcgaggcttagcacgctctatgatctggaagaatggtaaattacctgagggtgctccaaatttcgcagaacgattgagctacgatcttctctcatatggttattcacttctctcacttggtctacggttgactgaattgagagggaactcggatatagcgcggttagcatttgaaaaatcagcgatagcaattagtgaagttgtgaataacggcagaaaagatgatccagaaaagggctttcataccgttctggcaggttctgcatatcatcttggccgcttttccgccaaagcattttcgctaattacgcatagctttcaaaacgcaaatttgagtcgaattgaaagattactttctcttcttttattaagacgttttggtgatcttgaaagtgaaatatccgagtggcagttatcaggaatgggtgaagacacatcacttgaagaaaagctggaagcagatattgataatgcccgtcagggtcaggaagagcgaactagctctggagcccaagcggtagaaattccagtggtcgatttggctgtgaccgataattactattcagcaatattcgagtttttatttgcattagagtcaggaaatgcagctctgctcgagaattcaatatcgagaattgaaactagtcttcaggtttgttcagaactaagtctactgccacagtggtggattctgagaattacaaaatacttattacgtgatttatgggatgcgagctttcattgtattatcccggttacaccagaccaccctcaagctcaagagtggctacaaatgaggtggctattcattgcatcgttactcaagcgaaataaagcagagattgatttgtggccctcccaaatggagggggcgaggagagctgtcaatgattgggatgaccttgttgtttcgttgccaaccagtgctggcaaaacgcggattgcggagctttgtattctgaggtgcttggcgattgggaaaagagtgttgtttattacaccactgcgagcgttatccgcacaaaccgaggtatcgctacgcaaaacttttcttccattaggaaaatctgtttcatcgctttacggcagtataggaaccagcaactttgaacaagacatgatcaggtctcaggatatcgttgtaggcacgccggaaaagctagattttgctctaaggaataacccctcattaatcgatgacgttggtctcgtagtactagatgaaggtcacatgattggacttaatgagcgtgagataagctacgaagttcaaattcaacggctgctaaaacggcaagatgcagatcaaagaagaattgtttgtttatctgcgatcctaccggatagtgatcaattggatgatttcgtaggttggctaagacgcgataaagacggtgatgcattgcgctcaaactggagacctacagacttgcggtttggcgaaatcgtgtggcaaagagatagggcacaaataaattttactattggtgaagcgcagccgtttatccctgattatatccagcatacagttccacccattggcagaagaacaacgccgttccccagagataaaaaagaattaacattagctactgcgtggaagctcgcaaaagataaacataccgtactgatatattgtcctgagaggcgttctgtaaacagctttgcgagagatattatcgatctgcataatcgtggagcattagagtcggttttgtctgtccccataaataaacttgagctagcaatagttttaggagaagagtggctaggggaaagtaaccccatagtagagtgtttgaaaattggcgttgcagtgcatcacggcgcattaccgacacctttcagaaaggagatggaaaaactccttcgcgatggggttcttaaagtaacagtatcttccccaactttagctcagggcctaaacctttctgctactgctgtgattgttttttcgttaacacggaatcggaatagcattgacgttgctgaattcaaaaatgtaattggtcgtgcaggcagggcatttgtagatacccatggattggttctatatccaatatttgataggcatgaatggtttcgggcacagtggcgacagctagtcgaagatactaacgctcgcaatatggagagtggcttagcgctattggttaatgaattaattgttcgtatggccaacagtgttggcaatacggccattgatacgcttttagaatatgtactaaataatgctggtggctggaattttcccgcaattacaggcgaagagcaagatcagtctgaaatacaaaaagcatcttggaataagcatattgtaagtctagatacggcccttttaagtatgttgggatcagaagacattcctaccgaagagatacctgaagcgctagatagattacttgaatcatctctttggcaaagaaggctgaacaggtatgagcagacaaatgaaggaatgaaaaacctatttgatactgttctttctcaaagggctaaacatatttgggagcgaacaaccgccgaacaacgtagaggttattttcttgcaggagtaggtttggaaacgggtttgaaacttgacgccatttctgaacaggctaatgcattgttagttaatgcgaacgcatttttacttgcaggtgaccatcagcaagtaattgcgacaaccaaacagctagccgaactggtttttaatattgagccatttgttcccagaaatctccccgaaggctggagagatattttagatttatggctttctggagacgtgatatcagagcatgaatttgctgatattaatgaatcactaatgttcatcgaagatgcactgatttatcgacttccatggggcttagaagctattaaagtgcgtgcacaagcaaatggcgatgacattggcgacggattgaccattgacgattatgaaacagaccttttagttcctgccatagaaagcgggacattaaacagaagtgcagctctactcatgcaagcaggatttaattcgagaaaggccgcaatccgggctgttgaaacaactaacgcatctttcatcaatagccgtcaactaaaggattggcttcattcagagcaagtcttcaatttggctattacttttaattggccaacaccagaaacatccaatctttggtgggagttcgttagcgagtttgaaccaagctcagaaagcgtttggaaaccttcagttgctgaattgcctgttcagtggatggactcatatgagcctcaatatggtcagctcgtcaaattgtcaaatgcgagggaggaggctacattagtccttgcgtcgaatggtgaaacaatcggcgagcttcgcagtagacttaagttacaagagaaaggtatttatctggctaaggttcatcaagacactagcttgctggacgttacctactgggggacgggaactaaaccatttgctgtagaacaacagtag

SEQ ID NO: 58192 - DNA, 777 bp, Marinomonas sp. MED121
atggattttataaaagagttgaatgagcgtcctgaaggtagcttagatgttgcctgtcatattttagctgataattctgcaaaactgctagaggattatcttgtaggtaagctggctagttgttatatatctcaagaaaagctagaagagagggctaatcaaacaggcctagcttatagtgagttgatcgctaacaaaattcctgacaagggaagtgtaatgtcaggcgatttcggggaaatatttactctttattttttagatagacagtataaagatgatttgaaactaattaagaagtggagatataagcaggatagaaaaaaagccgcgccacactcagatgttgttttatttaatattggagatttgaataatccttcagaagatgattttgttatatgtgctgagtctaaacagaaagcaactgctagtgcatttgatcctatttcaagtgctatctcaggatatgagtcggatagaactggtaggcttgccaaaacacttgtatggcttaaagagaaagccattgatgaagggaatcaagatgatttaactttagcctctcggtttgcggatgaattaaatatacgttattcgaagatatatcgagctgttgctattgttgatagggcgtttctaaatgacgagataacaaaagatattaatttgcctgaaaaaactcacagttttgagatcattgttataggtattgatgatctgaaagagcgttacgaatcggtatttcggcgtgcatgtgaagaggcaaatctatga

SEQ ID NO: 58193 - DNA, 2922 bp, Marinomonas sp. MED121
atgagtcaactactgataaaaatgatagctgagtttgaatcttgggaggccgcagctgagttcaatatacctcaacagagctggactgattatactgttaaagatagagttgatgatctttatatagctactttttctcatatatttagtacattgagggaagagtctgaagatatgaaatctaatcttctatcatgtgctaagacattactggttttttcaaagagtgcagcatcaaaatacataagtggagtagagaagaatcgaaaccttctttattctgcggcactttattatcttgcagaccaaccaccaacgtcatttctaattacaaaagatatagattcagatatatttgaaatagaacaggagaaactcttatattcatttttatctcgtattttagatgaggaaaatgagttatctgttgagatttttgacgctgtaaataaaggggagcatcaaaggtttcatcttattcttgataaattatctgaacaggttgctattgggcttaaacatgatccattactttatgttagctcgaaatttgcttatgaatgtattgctagatttataactgtcaatgtttggggtcttctggagaaatattctaactgtgatgatatgtctgtatggaatgacttactatcgtctaatggaggtcatcctatttgggagttattaccctcacaggtaaaagcagttgaatctggaattcttactggtgggaaaccagcttatagcatgcaaatgcctacctctgcaggaaagacttcactatgtgaaattatcatctttaatgaagttaaagtaagaggtaataaagttttatttcttgtgccttttagggcgcttgcagcagagataaaggctggaatgtattctaggctgagtaacgttggcatagaggtttcagctagttatggaggtaatatacccactcgatcagagtctacgactgtagaaaatgctgatgttgttatttctacgcccgaaaaatttgaggcgctctgtcaagttatccccgatttcattgataggtttgatgttttgatttgcgatgagggacatctaattgatgatggtaatcgaggcctgcaatatgaattgttgttgaccaaatttaaaagacgagagagtcctgtagataagattgtttttatatctgctattttaccaaatgtttcagatattaatgactggttaggtggagatgaaggtagtttaattaactcagattacaagcctgtagtaacagattattcttttcttagatctgttaattataattggtttttagactttaatcctcatttggatcaaccgtacagttattttttaagcgatttcattcaaaaagacgaattgaagtttattaatcaaggtacgggaaatagtaatctcttgccaggctggaactcactgctgactttggcttgtgcttcagctttcaaggcttctacatcaggctctgtaattctatttactacagagaaaggtcaatctggtgttagaggtttggcgaataaatgtttggatatgttggagagaaatgcgttcattacgcagcagtatcaaaaggaaaatcaccccgtagaccttgttaattatatttcaacacttttaggcgaaaggcatttattgacgagattggttcagagaaaaattgggtgccatcacggggacctccctcaagaattacgtcgagaaatggagcaagcaattaatgaacaaaaaataaatatattaatatgcacttccactttagcggaaggtgttaatcttccaatcagaacgatagttttacatacggtcaaacgattcaatggaagaatcaagggctttattgaaaagaggaatataaaaaacattattggaagagcaggaagagcaggaaaggaaactcgcggcagggttatttttgctaatgaatcagaaagagactatgccttagaagttataaatgatgttcaactggagtctgctcatggctttttgttctcgctcattaaagatcttaaaaactatcttgaggagatgaatttaaccttgaatcaggagttctttgattccgatgttgcaaaagatatttcttatatctttgaatctattgatatgtcacttttacagtctttaccagaagatacccctgaagaagagttagatacatttttagatcagatgctatctgaaactttagcatcaaagttttgcgatgaagagggtctaactgacctattaaaaatggttttttctttaaggacagagcgaatatataatgagacagactctactaagagagccataatgaggaatacaggttcttcgcttaactttcttaattatgttaacgaaagtcagatacttgaccaagatatatggcgatctctaagcgctcctcaggagcctaattggtttaatcatataattaagccagtgctggagcatattggatatgagaatagtgctgatcttataatagacgttttaaatggttgggtatccggtagtttttatgtagaaatggctgaagatcttgagcaggatgtagatgatgttgttagatatatttgtacaactataggctttgagttacagcagatattatctcagcttacacgtttcgcaattgaactttacgaagatgaagtacctgatcatgtcgtgaattggcctcagtatatgcaatatggtgtcaatcgtcagattcatttaaggctaattaactcaggggttacagataggttggctgtatttggagttgctcgattcttggatttccttgagctttctgaagatattccgaatattcgaaggctattaatggttaatagagaagctttaaataattttttagagaaagaccctcgtgttccagcattatcaataagtcgattctttgatgattacaatatttaa

SEQ ID NO: 58194 - DNA, 831 bp, Photobacterium ganghwense
atgagcgcaaaaaaacaaacaacagctcaaagtaagttaatcggtgaacatcctaagtcgggtttgttttttgattggttcgagtgtgaagatacacctgcaacagctaacaaaaaacatagaaagcttacaaataaaggtataagcagcgatactctagttgagcatttgtcgcaatgggtaattaaacatcatgcaaccgaagctcgtatcgctaggatagagaggaaaaaacaaatcctagctaagcatggcttcgctcagtacatggaaggaaaagtaccttttcctattaagtctgcaactacgcaaaaaggtaatctaggcgaaataatccttgcagaataccttactgaaacatcaggtttagaaatccttgtgtacaaattgaggtacaacccgaatgtagagcagtcgatgaaaggagacgatttattactatttgaaaaacagaatattcaaaatagagtaataatgggagaagcaaagttccgttcgactaaaaacaaaaaagctttagatgatattgttcaatcgttatcgaataagaatttacccatatctttgacatttgttagtgacaggctggaagaaatgggagatgaacttttagcaaacgaaattgatgatttgatcacgaaccttcatgcccaaaaaactccagttacatatgttggcttttatcacagtgaatcttctgcatatcagaccatagagaaacacttaaactctaataataaaaacctcgtcatagtatcttatggtgaagataacccagctaagcttattaaaagtagctttgacaaagcactaaaaatggtgatggagtag

SEQ ID NO: 58195 - DNA, 3324 bp, Photobacterium ganghwense
atggataccgtaaaagctcgtaagctgtttgataagcttgaaaacgatgaattcgctcagaacttaattgcacaatccaacgctaagaatattcttttagctgtcaaagaagacgaagctaactttccaaattttacagaaggattaacggatagggttaatagtattgcattcgcatatttgtctataggttgcgccataactgaaaaaagtaaaattgatgatgttgctctgcaagcatttgagaaagcgggcgacattatacattacattcacgcccctaatactgagcttagcaagaaaagtagcttttacttggttgttagtagtttatctttttacctagcttctcaatattcaaaatcgtttatagcgattaaaaatgtcaaagctggaacgccattaattggtctgtttagtagttttctgagaaaagacctacaagcacttattcatgaaattaacaatattcagtttgacgatgaatatgataaagtttctgaggatgaactagagcagaataacaagcattatgcaattatcttatctaaatcccttaatttagtgttggaatacatttactcgggcaaagatgaatatctttatctcgggaaagaatcattagctgacttgaaagaattggcttctattgatgacgaacccgctatttggtggttgtcgaggttgttaataatattacttgatgtatttaaacagtactcattttggaatgtgataccaaaattaatcgagagtaatattacaaatgattatgtagcacaactagcattacgaacaccaccaattacggagttattctttgctcaatataatgcactacaggcaatgcaagataaaaatgatattgtcctgagtctaccaacaagtagtggcaaaaccagaatagctgagatcgctattttggaagctttgattgataaccctttttccaaagtactataccttgctcctttccgttcattatcttacgaggtagaggcatcaatggagaaaacattagccccattggggttttctactacattcctatatggcggtggacaatttagtaagctagataaggcactaatcgaaaactcaaatgtgattattgcaacccctgaaaaggccaaggcgatagtgagggctgatgaagatatcgccaatggtattagtttgcttattattgatgagggtcacctgcttggggctgaagaaaggttgattaaaattgagttgtttatcgaagagctaaagcatcacgtacgtaaaaatgatggcaagattatgcttctttctgctgtcctaccgaatacaaatgatattgcccaatggatagccgaggatggtagcagtgtttatcaaaccgataagacaattgcagacaagcgatttggaataattaagtggactcacgctaaaaatgtaacaatagaatggtttggtgaaccaacctcatttaacaaaaattttgtcgataagttcttaccagctcgcgcaagaactaaatattttccgaatgacaaaaatgaaggaattgcagctacagcattaaagctatcgcaacttgggactgtcttgatgtttattgctcaggccagatatgttgtatcttcagctaatagggtactgagagcaatgggaggtactcccgaattacataactataacaatgaagtacttttcgagtcatttaggcttgcttgcgatgaagctggtgttagtgacatatacgatctggctcgatatggaattctatgtcatttcggaaaattacctaccgatgtacgaattttgactgagcaactaatgcgaacggagaatgttaaagttattgtttcgaccactagtcttgggcaaggagttaatataggcatatcaacagttatttttgctgatgtttttatgaatcaccaagacgaagttaaaatagattcaaaagatttttggaatattgctggtcgagcagggagagcctttacagatattgaagggaaagtcttgtattgtattgatgagactaattggagttataaaagggatcttggattttgccgtgaatattttgactcttctaaaatggaacatgcaaagagtggattgctggatctagtaaaatatttaaagaatatatcaacacgatgtaatgttagttttgaattattgctagatctagtcgcttctaatgattttactcagtttaaatctgataataaagattactcaaatatatttcctcaagtattcgactgggttgatgacacactgttagcattagactacaaaaataaagcatacgaattacaagatccttcgaactggattgacacagtttttaggaactcattggcttatattcaagcaggagaggatgagatggtatctcaagaagatatcattaattttctcaaaagtagaaatagagcagtgatcaacatggctggtgattatgtgaattgggaaggtatggttaagtctggcattccattaagctcatcaaaagcattagacgattatattgatcaaataacagagagcataaaactttacaaggagtcagaaggttgtgctactgatctagcagaattttcaaaaagtattgaaaagttagttcaacaactaccaacagttacttttaagcatggttatgaagaagccgaattggatgaagtccgattgaaatggtttagcgcaaaaccactgtcagaaatagctattcacgagaatggtcaagagatatgtgtttcttatctttcaatgacgctaccttgggctattaatgcaattacaagaaagttatttgatttagaactggatgacgaagctaaattactcgaagaattggcgctttattgcgaaataggcgttcctaatatggattcggtgaagatctatttggcgggattaaaatcacgagtagcagcattcgaactttctaatgtactcttaggaaaacttaccagtttaaacaaactaaagttagtcaagttgctgaaagataattcagtaaacattgaattactctgcgatgaacggacaaaacaatgggtagagttgtttactagggagcaagatggcaaagtagaagatgaattgactaaaattagtaattttgttttaaaaaatactgagcctgaaagcgaccagctaaatgttcgtagtttcaatggtagcctatatttatgcaatgcagatttgactgagaaaattttgatatcttccagtaaaaagttcccgtttaaatccatcgcagacaatcctaaagtctactttgaaaaagaagcttcgcactgggctatgagagtcagagccagtcggaactaa

SEQ ID NO: 58196 - DNA, 783 bp, Sphingobium japonicum UT26S
atggggctgtacgagcggtggtgcgagtccaccaaagcaaaggacaagcgcaagcgctactggacctatgtcgagaaggacggcggccgcgacgagattcgtgacggcctggccgagactatccgctcgcactacgaccggctcgaacgcatcgccgaggatgtggatcggcttggctacaaggtggctgcggagattctcagtgaggcgatgccgcaaaccgccaaaggccggtccggcgatctcggcgagattcttgccacggagctggtcgaggaagagattggcctgcgagttcccgtgcgccgcctccgctacaaggacggccgcaacatggccatgcgaggcgacgacttcattggtgccggatacgatgtggccggtgaaaagctctggctcctgaaaggcgaagccaagagcaacaaggtgctgggcaaggccacggtcacgagcgcccgcaaggtgctcaatcgcgacaacggccgctgcacgcccgactccctgttgttcgtggccaaccgtctgctggagagcaacgatccgggcgacaacgagcttggccgcagcctccgtgacgaggtgggcctgaagtcccttcgcgccgatcgcatcgaccatatgcttttcacggtgtcgggcaacggcccacatgcgtcgctgaaggaggacctcgacgccactgggaccaaccgggaccactacgtcgtgaacatccacgtcgaagatcaccaggacttcatcgcggccatgtaccaggaggcggaagaccttggagacgattga

SEQ ID NO: 58197 - DNA, 3510 bp, Sphingobium japonicum UT26S
ttggagacgattgatgaactgaccgcgttcctggccaccgcgaccgccgacggcatccttgggcgactgctctatcgcggtgcggcatggtcgttgatgcgcgaggacggcgtgctgccgccgaatgcgccgcccctcggcgtgacgatcgaaactgatcttgccgagcacggtttcgctttgcttcgggctgctatggccctgcgtgctcaggccggcgcttcggatttgaccagcaaggctttcgagcgcgccgccaatgctttcgaagcgctcgtgcgcaatggtgatccggaggcgcctgatcggggcttccgccgcaccatcggcgccgcggcctatcatttggccggcttctcggccgtcgcctattcgctcttcaacgagacggcagacgacctcaatgcctcgccgggagaaacggcggttcggcatttgatactacgcgatctcggccagttgcgcggcttcgtccgcgattggttggacgacgacgctcatggcgacgtgcagatcgctgcggcgctaacgggcgaagagcccgacgtcgacgaggtactgtcgaccatcctcaatacgacgatctgccgagcgctggcgcattttgacttcgcgctcgagacgggtgagcccgagccgatcgagagcgcgcggaccctgctcagcactgccgtcagcctcgcggacaatgccgagaatgtgccgctgtggtggatatccaacctctgtcgccacctgatcgacgacctatggcagcactcgctgcaccagaacctccccactgagccgccggagggaacggaggaaaaatacccggacctgcgccggctgttcatttcgtcgctttacgcccgaaagacttccgaggtggagctatggccgtcgcagcgcgaagcggcccagcgctccacggacgttaccgacgatctggtggtcgcactgccgaccagcgcaggcaagacgcgggtggccgagatcgccgcgctgatgactctgtcgtcggcgcgcagggtgctgatcgtcacgccattgcgtgccttgtcggcccagaccgagcggtcgttcaggaaaaccttcgcacccctcggcttcagcgtatcatcgctttacggcgccagcggcctttctgctggtgatgaagacgccttgcgcacccgcgagatcatcatcgcgacgcccgagaaactcgacttcgcgctgagaagcgacccgacgctgatcgacgatgtcggtatgatcgtcctcgacgagggtcacatgattggcccgagcgagcgtgaaatccgctatgagacactcgtgcagcgcctgcttcggcgggccgacgcgggggaccgccggatcgtatgtctgtccgccatcctgccgagcggcgacgagctggacgatctcaccgcctggattcgctccgacgaaccgggtgagccggtgcgttccgactggcgcccgacgcgacagcggttcggcgcgctcacttggcggggtaaggacgcattgctccgtctggacctcgacgacgatggtccgttcctcgacaaattcgtcctggagaaaccggcgctcgggagggagaagaagccctatccgcgtaagaactcacatctcgccttgttcgcagcctgggaattcgcacgccagggcaagcggaccctgatcttctccacgcaggcgaactgggtcgagagctacggcaaacaggtcgtggacctctgcaagcgcggttatctggactccctgctggaggacgaagcgtcgatcgcccgcgcgttggaggttggcaaggagtggctgggcgaggaccatcccgccgtcgcctgcttgaagcagggcgtcgccatccatcatggccgtctgccgagcccgtttttgcgcgagctggaaacacttctgtccgagggcgtactgaaggtcatcgtcgcctcgccgacgctctcgcagggcctcaatctcaacgccgccgtgctcttggtgcccgcgttgtatcgcgccgctgagaagatcaaaggcgaggagttcgcgaatgttgcgggccgcgctgggcgcgccttcgttgacgtcgagggactcatcgtccacgtcatgttcgacaacatcgactggcgaaagaaggaatggagaaagctggtcgcctccgccaaggcccgcacgttgaaaagtggcctcatccagattgttgccgagattcttgagcgcctttcgcgtgaaggtgtcctcgatcgcgacgacgcttgggaatatctcgccaacgcccgcgaagcgtggagatctcccgaggaggaagccgcggtcgccgcgcgtctggcggccgccgtggactacgatgacgacgacgatggcggtgacgatgaagacggcggcgatgacgaggaagagtccatcgacgaggagccgctatcgcaaatcgtcgagcgcctcgatgcgaccgtgttcggcctgatcgaagcgcttgatgccgatcgcgcggatcttccgaagctcctggacgaagcgctcaagggatcgctgtgggctcgccagatcgcccgcgaggatgaggacatcgcccctctgcacaggaaggtgtttgaagcccgcgctgacctcatttggaaaaccactacggcgcaggcgcgacgcggacatttcgccatgggcgtcggccttgaggctggtctcaccatcgacgccatggccgacgagctggccgaactcctcgaccgggcagacgaggcagcgctgagcggcgacatcgacgaacttgtcgatgcgctctgcggcctcggcgaaaggctgctgttcatgcggccgttcattccggacaaggcaaatgcgctgccggcgaactggaaaaccatcctacgcgcttgggtatccggcgaggaggttgcgaaaatcggaccgcataacatgcgagcggttgaagaggctttcacctatcgcctggtatgggctctcgaagccgtccgcacccgccgcatgtccctcggctggtcgccagaaacggtggcggggggcggcgccgctgcggtcgaaaccggtgtcccgcaattcatgatggcgatgctgatccgcgcgggccttccgtcacggcgcgcggcgatggcggcgatcgacgatgccaagccagtcttcgtcacgcccgcggagatgcgggcatggctcgaatccgacgagatcacggcctacacggatgccggtgactggcctacacccgacactgccgcgttgtgggcgcgcttccgcaccgaagctctcagcggcggcatccagaagtggtcggtcgaacactacaagcgcctgctcgactttgcggcggccccgcccgccggcctttatcggatcttcaccgacgaaggtgatgggcggacttggctggcgacgcccgactatcggcgcgttgccgcgttcaagaagccggctgtcgatcccaagcccagcctgttctcgggccggttgccgggcaacacaaggctcgtggaagccttgcgcgtcggccgcgggaaactgcgctggccgccggccgatgcgtaa

SEQ ID NO: 58198 - DNA, 687 bp, Sphingobium japonicum BiD32
gtgagcacgggtgtcgcatcggtggctgctgtcgttcccgggcattatgccgcacccgatcgcattggcgacatcctgcggcggctcgggaagtcggcggtggcagactatatccaaaccaagttgccgcagggtgcaaaatcacggtcgggcgatctgggggagattcttgctgccagctatgtgtcggaattcaccggctattcggtcggcgtcttcaagttgcggtggtcggaccaccgcgagatggcgatgcggggtgacgatatattgggtatcaggctcgatcctggggtcacggtcaaatttctgaagggcgaggtcaaaagccgcgcagcgcttggcaagaagacggtcgatgaagcaaggacggcgcttgcttccagcaatgggaggccgacgccgcacgcgctcgcgttcgttgcggatcgattgttcgaaacgggcgaaaccgcgctggccgaggtaatcgaccagtttcagatcaaggcccggatcgaaatcaatcagctgtcgcacctgatgttcatgttcaccggcaacaatccgagcaaactgctcaccgccaatcttaacgcctacagcggcaagatcccacagtttgcggtcggcctgcgggtatcgacccatcaggcgttcatcaaacaggtcttcgagaaggtgatcgccgatggcaacaagccctga

SEQ ID NO: 58199 - DNA, 3495 bp, Sphingobium japonicum BiD32
atggcaacaagccctgaagcaatcgcccagttgatcgcacaggcgacggccgccgggttccgtgacgatttgctcgcgaagggacaggcgcgggcgatggtgtggcgcgacggcgtggtgccgcctgaagcgccgcaattctcgaccatgctgacctatgatctcctgagttacgcctattcgctgatgaaccaggggttgcggctgctcgatcagcaggccgagtctagtgccgcgcgaagtgccttcgaacatgccgcatcggcgattgaggcggcgacagcgcgtggccgcatcacgaatgaccgggatttccaccggctgatggcaggtgcctgctatcatcttgcccgctatgccgcacgggccttctcattactgcacgaggggttgaacgaggccaatctcagcgtgccggaacgcgcggtcgcgctcctcatgctgcgggacctgatgacgctcgaaacgctgattcgcgaggagcgtgacaacgcgttggaggatgcgatgatcgcgcacctcgcgggagaagtcgcaggtgacgcgccagctttggacgacagtgaagacgagtcggtacacgaaccgctcctgcaggttgtcgatcgggcgctttccgacaatttcacggcagcgctcgccatcgcactgcttgcgttcgagcggggagacgaagcgctaatcggctccgcgatcgaacgcctgaagaccggcctgtcttctgcggccgaactcaacatcgtgccgagctggtggtgccaccggctcacgatccacctgctcgacgatttgtggtcgtcgagcttccacgtccgcctccccaaggctccggacgacggtacagccgtcgattgggccgcctaccgcgaattgttcatcgcgtcactcttgcgtcgcggtcgctccgagatcgacctgtggccttcccagatcgatgctgcgacccgggcgctggatctcaacgacaatatggtcatctcgttgccgacgagcgcgggcaagacgcgcgtcgcagagctttgcatcctggcctgtctcgctgcggggcgccgcgtcgtgttcgtgaccccgctgcgcgcgctctctgcgcaaaccgaagtgacgcttcagcgtaccttccagccgctcggaaaaacggtctcaagtctctatggcgcgatcggcgtcagcgaagtggacgaggatttcctgcgtgaaagcgacatcatcgtcgccacgccagagaagctcgatttcgccctccgtaacgaccctgacctgctcgatagtgtaggcctcgtcgtcctcgacgaaggccatatgattggactgaccgagcgcgaagtccgctatgaggttcagatccagcgcctcttgcgacgcagcgacgccaagacccggcgcatcgtctgtctttcggccatccttcccgatggcgatcagttgcaggatttcacggcgtggctgaccggcgaccaggacgacggactaatcaagatggactggcgaccaacgcgcctgcgctacggcgaggtcgaatggcgtggcgatcacgcgaagctcgaaatctcggtcggtgcagagaaaccgtacgtgccgcggttcctgacagccagcctgcccaagggtcgcaagacgcgcttcttcccgtgtgatcagcgcgaactgtgcatcgcgactgcctgggcgttggtcgcagaccggcactcggtgctgatcttctgtccgcaacgccgatcggttgagccattcgccaaagccatcgtcgacctagccaaacgcggatctatcgtgccggtgctcgatcacgacccgaccgtactggacaatgcgatcgcaatcggcactgagtggcttggcgttgatagtccggtgctggcatgtctgcgcctcggcgtcgcgatccatcatggcgcgctccccacgccctatcgcaaggaagtcgagcgcttgctccgcgatggcgttctgcgggtgacggtgtcgtcgccgacgctcgcgcaggggctgaacctgtcggccacgacgttgatcttccacggcctcaaacgcggaagtgagccgatcgacatcgcagaattccgcaacgtcgtcgggcgtgccggccgcgcctatgtcgatgtcgagggcttggtgattatgccaatgttcgaccggctcaccagtcgccgtgccgagtggaaggggatggtcgatagcgccaagggcaaggaaatggagagtggcctgttgaggctgctgctctctttgatgggccggatcgtccgcaagaccaaggccaagtcgatggcgacggtcctggaatatcttgccggcatgaccgcatgggagttcccggtgctgccgaccgaaagcagcgatgtgaacgaacaggaacgcgggcgctggtcggggtatctcaccacactcgacacggcgctgctcagcatgctcggcgagcaggaagtgccggacgatcagatcgaggcgatgctcgatgacgtgctgacgtcgtcactgtggacgcggcgccttcagcaccgcaaagctgctgtccagcagttgctcaagaccgggctggtcgcgcgcgcgaaattcatctggggccggacgacggccacgcagcgtcgcggctatttccttgccggcgtcggccttgcgaccggcgaagcgctcgacgctgatgccgccgaactgaacgagcttctggtccgggccaatggtgccattctcgtcgatgatgcggacgaagcgatcgccgcattgactgcgttcgccaaaaaggtcttcgctattgctcctttcgtccccgacgacctgcccgatgactggccaaccgtcctgaaggcgtggctcgaaggtcgcgcgctcgcgcctcttgctgccggcagggaagatgaggtcctgaaattcgtcgagcaggcgctggtctataaattaccttgggcgatggaagccgttcgggtgcgcggcctagcgcacggcgatgtgctcgaaggcgggctctcgatggaggatattgagctcggcgtggcggtgggcgccgtcgagactggctcgctcaacgtctcggcggtcatgctgatgcatgcgggatttagctcgcgcttggcggcgatcagtgcggtttcgcagacacaggcggattttaccaccatgtcggaattgcgtgcttggttacgcgaagacgccgtcgccggtgggtgcgacaatcccgattggccgacgacggcatcgcatgggctctggcttcagttcatcgagaacatggcgcccgaacgacggcggacctgggcgtcgacaagccatgagatcgatgtcaaatgggataaattcggcccgccagttggaacagcgctgcgcttcgtcgacggaggtggcgaaacccttgtctatgcggcggacttcacgcgcctcgggcgtctcgacaaaccgctcaactcggaacggctgggcttggcactggcaagtgtcggttggctcggcgataccgtcgatgtccgatatctcggtcctggtgatttattgtgcaggtga

SEQ ID NO: 58200 - DNA, 828 bp, Herbaspirillum hiltneri N3
atggtgcgttctttgtctcctaagcccgaatacctccaaaacttcaagcaaataggtactttgagtttaggtagtggtgaaaaatgcgacgtttgggagctcgctatcgctgctgatgcggcttgtctaagtgaatgggctaaaagatttcgtcagacgtactgctccgatgaggaccttgacatcctgcgagaggggacaggaaagtcgcgagctgagtatctattggaattggtcttccccgacaagagcgagaaacctggccccgccgtccgctctggagattttgcggaattacttgtagcggactacgtcgagtttgtccttggctactgggttccacgtggcaaatatgcggagaaggggagtcgagacgagtccgtcaaaggtgtagatattatcggttttcagtgcgatgacccagagcaaccgaagccgaccgacgagatgttgaccttcgaggcgaaagctcaacttggcggtggcaagtataaggaccgtctgcaagttgctgtcgatgactcaggcaaagactatctccgagctggcgagacgttggctgcgatgaaacggcgtatgcatatggctggcgaaaatatttccatgcgggtggttcagcgatttcaaaacgctgttgaccgtccctaccgactgctgtcaggcgctgccgccattctttccgacgaggcgttcgacccaggggctatcagcggaactaatgtcgccaaacacaacaacgctgccaacttaaagctaatttccattaaggggaacgccctaatgacccttgctcacaccttgtaccagcgagccgccgatgaagcctga

SEQ ID NO: 58201 - DNA, 3135 bp, Herbaspirillum hiltneri N3
atgaagcctgaaattaatagccgtcggtactttggcattacgcggtcgaaaggaaagatgtatgagttgggattgccggaagagtcccatattgctgtgccagatggggttgaacctgctgccttatttcctttggccatagggacgctgatggacgctgctgcagcgctgaatgatgctgtagacgtcgagagcggcctagggcaggacctacgggacgaaattggctttgcagccagcttcttcgacgcctacctagattctcgatttgatactaacgtatctcgagaagtcacgctgctcgcatctgctagctattttttgggtcagcgtccgggaagcagcctggtgctttcccggcggcttttggccgaaggtgtcaatgcagttgagcacctgacgatgtgggtattgcaagctgactggcgtcgtcctcctaatttggctgagcattggctcacggagcttctgtacgagttatcctttcggctaatgggtcacttcaacgacggcgcttcgcccgagcttgtacttgaattattgaataaaattcgtcgattgacctatgccagcggcacttcccgggaagttcttttagccgaagttactgctgcggtgattaagctgcgcatggctggttctgcttggacgttgttgccggacttcagtggcttggacagttctgcttgggcggaggcaatccgtcgccctggcttcccaaaggaactgtggccttcccagaagctgctcggaagagctgagctgttcgctggtaagtcagggttagtccaaatgcctactagcgcaggcaaaacacgctccgtcgaaatcatacttcgaagtgctttcttgagcgaccggacgcgagttgccgtactcgtagcaccgtttcgtgcgttgtgccacgagattgctacttcgcttcgtcatgcgttcaagggtgaggacgtcaaggtgaatgagctttctgacgccctacaactagatttttccgagcagttggccgaattgtttggccaggcagccccaacaacccgacacctaatggtattgacaccggagaagtttttgtatgtgctcaggcaagagccgtctttggttgctcatattggattggtagtttatgacgagggccaccagttcgatactggtccacgtggcattacctatgagcttctattgaccgaaattaaggggttgcttcaagaatcggcacagaccgttcttatatccgctgtcatcaggaacgcgcaggcagtcgggacttggttaattggtaatgaaccaaatgtggtggacggaagcgggctgctatctactgctcgctcagtcgcatttgcgacttggagcgagcgcctcggtcaattattgttctttgaatcagataactatatgcatccggactatttcgttcccaggagtattgaggccgaagagctggaatcgcgtccgagagaacgtacgaaacgagtatttccacaaaagggaactgatgcgtggaaagacgtttcgctttacctgggtattcgcttggcacctagtggtgccgtagccgtgttctgcggtagaaaggatactgcgagtggcttggccgaacgtgcggttgaaatttacgaacgaggtttcaagctcccagcgcctgctttggcgtcagatgctagtgaaactcaacgtttaactcatttagcaacgcaaaactttggcccggactctatggtagctaaggctgcagcgcttggcgtttttgtccaccatggaactacgccacaaggattgcggttgtcgattgagcacgcgatgcagagcgagctaatcaagctcgtgatttgtacttcgaccctggcgcaaggtgtcaatttgccgattcggtatctcatcgtatcaggcgtaaatcaaggtgctgaacgaatcaagacacgggacttccagaacctgattggtcgtgccggtcgagcaggcatgcatacagaaggacttgtcctttttgctgacccaaaggtcatcgacaataaaggggagcggtggcgtctggaggcggctgtcggattattgaaggcagagaattccgaagagacgtctagctcgctcctcaacttgctggcacccatcgaggcccccgatggcaataacgtcctaccaatctccacagaaaatatgctgcaggcctattttaaacgaggcaacgaattgcaggcctgggccgctgagattgctgaagcaaataagcaacttggatttaactaccgttcgttgataaaggagatttcgagtaggcagcggcagctatctgctctagaaagctacttgatggctaatcgtggtgtcgatagcttcgaaatcatgttgtccaaagtacgcgacctagcggcctcgacgcttgcctactctctagcggatgcggctgcgcgagagtctcttatgcgactttttgagctgtctgctacatatatagaagagttagttcctgatacagctgaacaggcgacctacgcaaagactctgttaagcgcctttgatgggagaaaggtagaggcatgggttcaggagcatgaggccacgctgagagcccttcagacatctgacgcctggctggaagcagtatggccgcttttaaactcgttggtcgacgatacgctattgaccggaatggagccagccggcatatcaatacagcttgctcgggaatggatgcggggagcctcctatcgcgagctaatcaccttggcgcaagatgtcaaagcctccaaaccgtggggagaatctaagcggcgaaaactcaacgaagctgacgtgctccagtacttggagggctgtcttggttttgactgtccgctggttgccgccgctattggtcagtttctttttggaattgcaggactcgatagccaagaggctggccccttgaatgagtttcagaagtctctggcctacggcttaccgaacaaacttgccgtgtcagcttatgaggccggtatggccgacagatgtattgcgcagaatattgcactagagctttttttggatggatatgacggatttagtttccgcgctgcgttgcccgagtaccgtgatttagtcgcagctgtgctggaagactatccgtcttactttggcacagtgcttgagagcatttag

SEQ ID NO: 58202 - DNA, 792 bp, Lysobacter daejeonensis GH1-9
atggatgaacttgggattgatttcgtggacgccgtgccgtggttcgcacacgctcaggaccagccgtacgtcctgatccatgtcagcccggcgagtgtcacgcaactggtggaaagcatcggcgtgccactcaggcgttgctacatcaccgatgccgatctcgattccgcggcgcagcgacccggcgtgacgcgcgccgagatcatccgctccaagcttcccgacgccggggcgactatgtccggcgattttggcgaggtgctcggctacttctatcaggcggcccgcgaactgccggccaccgccatcggtccgaagaagtggcgcctgaagcaggaccggaccaagccggcgcccaagtcggacgtggtgcatttcgtgatgccgaaccgtccgcatcccagtgcggcggatgcgatcctgtgtgcggaggtcaaggccaaggccaccgccggcacgtccaccccgatcgcggatgccattgccgactgcaagaaggatcgaaccagccgcctagccagcacgctggtgtggttacgcgagcgggccctgaccacggacctcggggatgttgacctgccgttgctggaccgattcatccaagccgtggacagcccgccggtcgccaagcgtttccgcgcggtggccgtcatctgcaacgcgctgttgaccaacgagctggtcgcagcgccgagcgtggccgatccggagttcaccctcgtcgtgatcggcgtgccaaacctgcagcagacgtacacggcggcattcgcagccgcgcaggcctcggcctag

SEQ ID NO: 58203 - DNA, 2979 bp, Lysobacter daejeonensis GH1-9
atgcgcgcgtctctgcagcggtggatcaacaatgccgacaccgcccgacacctgcgtcacttccagttcgcgcaacttccgatcgagctgggggccatcgaccatcgcctcgacgattactacatatccttggtcggggagctgttcgccaacctgcaccaaccccaggtcgcgcccgcggactgggcgcagctgggcaatgcgttcttgcagttctcggtcgagatagccgatgaccaattgggtgaccggggcatttcccgcgaagacgcgacgttgttcgccgcggcggcgttctatttcggcgacttccccgcatcggcgtgcctggcgatgcggcgttctgcacggccggccaatccggccagcctgcgcgctgcctgctacgactttctggcgcgaccgggcacgttgcagtccgatttttcgcgggccgtccaggacgagctcaaagccggcgacctggatcgcatcgcgttgcggagcgcggcgctgcgggagcgagaggtccgcgccttggaagagggccccgaggtttggatcgtggcccgactgctgcgcggcctgctcgagcgttttcagcagaccaacttgcgggcggtcctgccgcagggcgccagcccattctggacgccgctggtgcgttcgctggtcgaccgacagccctcaagctgggagttctttccctcgcagatccaggccattcgcggcgggttgctgacaaacgcgaacagttacgcgatgcagatgccaaccggcgccggcaagacgacgctgtgcgagaccctgctctactggcacctgggcgttcatcccgacgatgtcgcggtgctgctcgtgcccttccgctccctcgcctcagaactgaaaggaaccctcgtcacccgcttgaacgcgatgggcttgcctgcgcgttgcgcatacggtggcacggtgccctcgggcgaagaagtccacggcctagaccagatccgggccatggtggcgacgcccgagtcgctgtcgggaatcctcagcgccgagccgaccttcgcccagcgcatttcattggtgatctgcgacgagggccacttgctggacagcgatgcgcgcggcatcgggctcgagttgctgctggcgcgcatgaagtcgcgtgcgggggccgcaccgcgcttcgtcttcgtgtccgctatcgtgcccaacattgaggagatcaatgcgtggctcggcggcaccgaccagaccgtcattcgtagcgactaccgccctgcgacggccgagttcgccgtgcttcagccgctgggaaccggcgcggccgcgaccattcgcttggccatgcacccgcacgaagcgcccgagcggcgtttcaccctcgatcgcttcctggatcgcaacagcttcactttcaccaatccagtcacgcggcgcccaaacacctacggcttcgcctccgtcaagacgcaggccatcgccgccgcccgaaagctcctgccgatggggaccaccgcgatcttcgccgccaacaagcgaggcgaccagggagccgagggcctcgcgagagaactcgtcaaccagttgagacaaccgatgccgttgccagcgcccatggactacgcgcaacccggggccttgccaccatgcatcgcttacctggaggccgagtacggggcagcgtggatcggcacgcaagccgtgcgccacggtgcagtgcttcaccacggcgatattccgcaagagacgcgcgaggtcctggaggctttgatccgggacaacgcggttcgtctggtcatctgcacgagcacgctggccgagggcgtcaacctgcccatccgaagcctggtcctatactcggtgcagcgtcgcagacccggtaggcagcagcccgaagccatgctcgcgcgggacatcaagaatctggttggccgtgccggtcgcgcgggcgtgaacaccaagggcttggtgatctgtgcgaatcccggccaatgggggctggtcctgccggtcgcggcgcaaggggccggggagccggtgcgcggctcattggtgagcctggtccggcaattgagcaacttcctcgcacgacagggaatgtcgctgagcaacgagttcctcgagggcgtcgacgccgtctaccccgtcgtggacggcgtcgattcgaccttgatcgacctcatttccgaagaggtgggagaagatctgtttgtcgcacgtgctcgggaactcgccgagcagacctttgcggctaggcagttggaacctgcccaggcggagttgctgcgcgatgtcttcgagctacgggctcgccggctcattgggctgcgaccgaccggccagttggcatgggtgcgcgagacgggcgcgaaagtgcgcatgctcgcatcggtatcggccgggctttggccggctcggccaaattggcaggatccggtcgatgtcctggatgatggattgcgcacggtaatcctcgaatgggcgtggacgcacgccgaactgcagcacgcggtgttgcaggggtttcgtgtcgaggcagatcaggtggaagtcgcgaagccgcgcttcttcgagatcgtccggcggtggatgtttggggagtcgttcgtcgagatcggtcaacagctccagatcgacatgggcgacctgctggccctccacacacgggcgatcgcctacaccctgcaaacgttggtggagcagggcctgagcctgcttgcgcgccgcctgcaggccgatggcctggaactcgcggcgggtgtgtcgaacttcacgcaacagctgcgctttggtgcgccgaatgtcgctgcgcgattgctcgcggagttgggcgtgcgtcaccgtcgtgcctacgtggcgctgggcaacgccatcactcaacccgggccaccgccggatctcacgaacatcaaggccaacgcgcgcgacggactgcgccagcatgaggccgagtggcgcgcctatttgggcgacctggtctacgccaacacactcaaggacctggcctga

SEQ ID NO: 58204 - DNA, 777 bp, Chelatococcus sambhunathii
atgttcgatgattggtgcgatatcgacgaaacggcccgcggcgaaagaaagaagctgtgcggcctgaccgaaaaggctggtggaagggcggccatcaaggacgagcttatcgagcgcgtccgctcccactacgacaagctcgagcagatcgcggacgatgtggaacgtctagggtttcccggagcgtccgccatactcagggaacgattgccgcgcacggcgcgcgagcgctccggagaattgggcgagatcatcgcctccgaattcattgagcaccacactggattccgtatccccgtgcgccgcttgcgttacaaggacggtcgcgagatggcactgcgcggagatgattacgtcggtatcgatgaggatgacgagcagcggcttcttttcctcaagggcgaggccaagagcgggcgcacggtcccgcagggcgtcgtcgccgatgcccgagagcgtctttccgagaatgatggccgcccgacgacaatatccctgctgttcgtcgccgatcgtttgcttgaatcggatgatgaaaatgacaaggccctggggcggcgaatccgggatgaggtagcgcttagggctgttccgccgcagcggatcacgcacgggctgttcgcgctctcgggaaacaacacggacgccgttctggaagccgatctggaagaggccgacggggcgcacaaccacctctccgccgggttccacgtcgagggccatcaggctttcatagccgagatttacgaagaggccggcaaccttggagacgattga

SEQ ID NO: 58205 - DNA, 399 bp, Chelatococcus sambhunathii
ttggagacgattgacgaactgcaagcttttatcagcacagcgacgcgggacaatgtccgcggacgcctgctctaccgtggtgaagcccgcgcgatcatccgtcgcgaaggcgagcttcccgctggcgcgccgcagttcgcggaaacgctggacaccgatctgtccgagtatggattctccttgctccgggcttctcttgccttgcgtgaacagggcgccgacacaggcgtgtggcgtcccggattcctgaaggcgggaaacgcattcgaggcgctcgttcgcaacggctcgccggaaacgctgcaacgcggcttctggcgcgtgatgggcgcggcctcctatcaccttgccggctattcggcgatggcctactcgctcatcagccagcgtgaggagtga

SEQ ID NO: 58206 - DNA, 810 bp, Labrenzia alexandrii
ttggcagcacccgatcatgtcgcatggcttgaggatactggcgatgtaatagaaacgacagatggcctagaggctgaaatctgggttttgcagcacgccgatgatccggcaattctctcggcttgggcgatccactatcggcagcattactgccgcgatgaagacttgccggatctcgttgcagatacggggttatcaaacgccgattttctaaccaacatcaaattcccggatgctgctgcagcgcctggtccgagtacacgctcgggcgatttcggtgaaatccttgtggcggatttcatcgagtatgtcctcgggtattggtgcccgagacatggtcgttttgaggatcgtgagaaccggaatgtgccgtctaatggcactgatgtaatcgggttcaaatttacaggtgacgaacaaagtcccgacgacgaattgctggtcatagagtcgaaagccgggttccggccaacgacagcaaatcggctgcagcaggcgatcgaccattccggcaaggaccgcgcgcgcgaagcgatgtctttgagtgccatcaagcagcgacttctcaagatcaaccgcgacgaagctttaaaggttgggcgttttcagaatcaggccgataggcccttcatgcgcaccaatgccgcagttgcagtgttggacgatgaggtatttgacgaaatgactcttgatgagtcggacgcgtcggatcatccgaaccgtgacaatttgcgactgatcataattagaggaatatcgatgatggacctcgttcacgctctttatgaaagggctgcaaatgaggcctga

SEQ ID NO: 58207 - DNA, 2916 bp, Labrenzia alexandrii
gtgccctctgcctgggaagcggacgacggctctattgagcagatggtacgattctcggcatccttttttgacgcgtttctggaatcgcaactcaatgctgaactcacgccggagttctcgttgctctgtgctgcgtcctactacttggcagacagcgtgggcagtgccgtagtcgtcgctcgtaggtcggaagcaccgccgatagaattgggacatggcctcgcacgtgtggcttggcacatcttaaggggggacaccggtcccattaatggtggttctcagcataccgggttcggcaatcgcctgctgaatgctttgactaggcatttcagtcttgaagcggatgccgaagaggaaatccgcgctatgtgcgctgagctgcgagccagcgtctacgacaacggatcagctcgtgaggttgtctacgcggatattgtcacggcactctgttctcgaaagctggagaacgcagcccgcacgattctgccgccatcatcggacctgccgcttgcctcatggaccgaggctatgcgtaaaccacgcttcccgaaggagctgtggccagcgcagcgaaagattgctgaggcaggccttttaaggggtggttccggcgtcgtacagatgccgacaagtgcaggtaagacgcgtgctaccgagttaattatcaggtcggtgttcctatcggggcgctcgaacctggctgtgatcgtcgcgccgttccgttcgctatgtcatgatattcgttccgacctggcaggcgcgtttgccgatgagaatatcgcgcttgatgaagtctctgactcgttcctgctcgatatcgatatcgaaggggtgttggcgcagcgatcggttttaatcgtgacgccagagaagatgctctacatgctcaggcgcgcgcctgaactcgcggagcgaattggcctgatcatctacgatgaggggcaccagttcgaagggttcgcgcgcggcccaacctacgaattgttgctgtcatccttacggatgaccttggccccggcagcacaagtggttctgatttccgccgttatcggcaatgcgccggtaatcgccgaatggctcatcggggacgagaatgcggtcatcagtggagagggattgctgccaacgaccaaaagtattgccttcgccagttggcaacgcgagcgcgggttgctgcagtatgtgagcccggacgaccccgagcagcaggagttctttgttcctcgcattgttacgcaaaccaacctcgccctgaaaccaagtgagcgtacggcacgagtttttcccgaacggggcggtgctggcgagagcggggaagttggattgtttctcggtcttcacttggtcgaacgtggcagtgtcgcgctgtttcgcggaaccaaggaaggtgtcatatccctttgtgggcgagcagcagaaatcttcgatcgtgctgttgcgctgccgcgtccgcttgatgtttccgacgcagctgagatcgcacggcttacgcacttggcgagtctgaacctcggcgcggatcaggatgtaacccaagcgtcagcacttgggattcttgctcaccacggcaacacgcctgaaggtctgcgcctggccgtcgagcatgccatgaaggaggggcatgcaaagtttgtcatctgcacctcgaccctggcgcaaggtgtcaatttcccaattcgttaccttatcgtctcggcaacccagcagggtaaggaaaagatcaaggtgcgtgatttccaaaacctcattggcagggctggacgcgccggaatgcacactgaaggcagtgttatcttttcggcgccatcgatctacgatcagcgcggcaactgggccggacgctggcgctgggtttcggcgaaaaaccttctcgatcctgcacgtgccgagccttcacacagcagcatcctggatttgttcgaagagtacgaacaaccccccactcgtaagctgccacttccaattgactggctcgatctagcctttgcaacgcatgcggatatcgatgcggtagttgcttccgtcaaagagcggtttggctgggtcgatgtcgatatgttcaagacctttgttgctggtcgcgcgcgggccattcagagcatcgctgcctatctcgcagcctatgtggatttcacgagcgaccaggcgggcgagcgcatcgatgaattggcccacaatactttggcatggcatctggctgacgacgccacgcgtggcaacctcctcgaagtgtttcgcatgacggcaagggccatcgaggcggctggagatgatgctctgcgcgccttgatcagaaaatcacctttgccgccagcggacgttttctctcttcgcgattggacaaacgccaatatccaaacacttgtagacgctgctgaacgaggagagctggtcgataccgtctatgcagaggtccaccaatacgtgacctcgaaggctctatctaagctcaccgaccaaaaccatatccttccaacattgaaggcatggctggcaggtcagtcattcaatgagattggacaggcactgcgagcagctgatgttcgaagcggcaatcggcacatcaccgcaaaccatgtcgtcgccatctgcgagggcgggtttgggttcgagctcgctatggtcgtggcatctatggccgatcttgtagaacctctggatgaagacctctacggagagttggtgctactccagcggcagatcaagaatggcttgagtaacgcggccgcgctcgccttttatgaagctggtttcaaggatcgtgtcgtcgcccaggctctcgcggctgtgtttgaaggcgtggctgatcgcgcgggagttcgaatgatgtgccgcgcgaagcaggacgagttggtcaaagttcttggagcttttccggcctactttcaaactgtggctgaagaacttcggcattga

SEQ ID NO: 58208 - DNA, 780 bp, Sphingomonas sanxanigenens DSM 19645 = NX02
atggttcaatttaacgactggtgcgatgcggccgatactcctttgggcaatcaccatgtccgcgtgatgaccggacgcacagcggatgccgccatgggcatccagctgacggcgacggcggttcccgcccactatgcggcggaggagcgtctggcagctgcgctcgcgcggctgggcaagccggctgcagccaagatggttaccgatcttcttccgcaaacaccgcagatacgctccggtgatctgggggaaatctacgcgaccgaatggattgatgcccacagcggctaccgggctcccatcaagcgactgcggtggaaggaccatcgcgacatggcgatgcgcggcgacgatgtgatcggcatgatccttgatcctgcgacgcagcgcctacggttcctcaagaccgaggcaaagagccgcatcgatctgcgggcgcagacgcttcaggaagcgcgcgctgggctcgacaaggatggcggccttccgtcgtcgcacgccctgtcgttcatctcggcgaggctgatggaccttgggacggacgctccactcgtcgacgccatcgacgaggctctctatcgcctcggcatcccgcccgatcatgtccggcatcttctcttcaccttctccggcaacgcgccggaggcactgctgacgcaggcgctgctggcctatcccggcccgatcgggcagtggggcgtagggctgcacgtggatggacacgccgcctttgtcggcgcggtctacgctcaggtgatcgccaatgccaaccagccctga

SEQ ID NO: 58209 - DNA, 3525 bp, Sphingomonas sanxanigenens DSM 19645 = NX02
atgccaaccagccctgaggcgatctccgccgccatcaccgatgcagccgccaccggttttcgcggtcgtctgatcgcgcgcggccaggcacgggcgatgatatggcggcagggcgtgctcccggcgggcgcaccggccttttctgcgcaactgagcttcgacctgcacagctatggttatgggctgctcgggcttgggctgcgtcttctggaactcggtggcgacccggcccaggcgcgtgtcgccttcgagcaggccgcgaccgcccttgaggcggtcatggccaagggcaatcgcgccgaagccgaccgcgattttcacttcgtgatggcggctgcgagctaccatctcgcgcatctctccgcccgtgcctactccctccttgcggtcgtggcggaggaggagaacttctcgctcatcgagcaggcgctggcgcttctcatgcggcgggacatcaacgagctgcgtgcccgggtctatgcctttcgtctcgatggtcggggatcggatgaggccatcaccgcgctcttccagcagcgtcttgccgatccgcttgtcggcgacgcggccgagcgggacggccacgatttcctgttcgagggcctcgaccttgccctaaccgatgccttcttcggtgccgtgtcgatgttcctgctcgcgcttgaccgcggcgagcgcgctctgatcgaccgtgcgatcgcccaactgcgcgagaacctcgccatttgcgccgagctgaacctggtgccgcaatggtgggcgcaccgcgtcgcgatccatctgctctccgacctatggtcgaacacgttccacgagagggtgcctctcattccggccggtggagaggcgccgccgtggcggggcttgcgcgatctcttcatcggactgctcgcccgccgtccaagggcggaagttgacttgtggccgtcacagatagaggccgccgcgcgcgcggtcgatcaggccgacaatctcgtggtctcgctaccgacgagcgccgggaagacgagggtcgccgagctctcgatccttcgctgcctggctgccgggcgccgcgtgatgttcgtcacgccacttcgtgctctgtccgcgcagacggaaacgacgcttcagcgtacgttcggcccgctcggcaagaccatatccgccctgtacggtagcatcggcgtctctgcgttcgacgaggacgcgatccgcgagcgggacattgtcgtcgcaactccggagaaactcgacttcgccttgaggaacgatccgtcgttgctcgacgatgtcggtctgctcgtcttcgacgagggccacatgatcggtccgggtgagcgcgaagttcgctacgaggtccagatacagcgcctgctccgccgaccagacgcggagcagcgccggatcgtctgcctgtcggcaatcctgcccgatggcccgcagctcgaggatttctcggcgtggctgcggcgcgatcagccaggcgatcccatcaaggacgactggcggccgacacgtctgcggttcggcgaggtggtctggtcatccccccgggcacgcctcaacctgagggtcggcgaagagcagcccttcgtgcccgggttcctcaccggcgtggcaccgccgctcttcataccgccgaagaagctgcggacccggctgtttcccgacaatcagcaggagctcagccttgccaccgcctggcgtctggtcgacgatggacagaccgtcctgatctattgcccggaacggcgcagcgtcgagccgttcgccaaggtcatcgtcgacctgcatacgcgaggcgcgcttgcgtcactgctcacggtcgacccggtgcggctgcagaccgcgatcgcgctcggtgaagaatggctgggcgcggacagcgatatcctcaaatgcctgcgcctgggcgtggccctccaccacggcgcgcttccgaccgcctaccgaaaagaggttgagaggctcctgcgagacggcgttctgaaggtgacgatctcatcgcccactctcgcgcaggggctcaacctctcggcgacggcggtcgtcatgcattcgctctatcggcatggcgagaagatccaggtctccgagttcaagaacgtgatcggacgcgccgggcgggcctatgtcgacgtcgaaggcttggtgctcttcccgatcttcagcgacacccagaacaagaggcatgacgagtgggttggcctgatcggggatctcggcgcccgcgagatggaaagcggcctcgttcagctcatttttgcgctcctgaagaggatgcatgggcggatcggcggcaatctcgagcagctcgtcgactatgtggtcaacaacgccgcggcctggaccttccccgaagtggcgggcgagatccccgaaaaacgcgaacgagcgctcaagcaatgggagcgctccatggcgacgctcgatacggcgatcctcagcctgatcggcgaagacgatgttcccgatgaccagatcgaagccgcgctcgacacggttcttcagtcctctctctggaaccggcgcctagagcgcctcgatgccgggtcgcgcgccgcttaccgtgcgacgctcctcacccgaagccgctacatttgggccaattcgactgccgtctcgcgccgcggctattttcttgcggggctgggtctcgaggcgggtcacgcgctcgacgcggtggcgccggtggccaacgaccttctggtgcaggcgaacgccgcgctgctggttggagatcacgaggctgcgattacggcgatcaccggcatcgccgagcgggtcttctccttctatccgttcgagccggacccatttccggggaactggcgcgacatcctccgctgctggctgctcgggcagccactcgcctccgccgtcgcggggcaggaaggcgatgcgctgcagttcatcgagggcggcctcgtctatcgcctgccgtgggcgatggaggcgcttcgtgtgcgtgcggccgccaacggtgatgtcgttggcgtcttcggcctggccctcgccgatcatgagctgggtctagcggtccctgccgttgagaccggcaccatgaaccgatcggcttcgattctcatccaggcgggcttcaactcgcgtttggcagccatcaaggccgtcgtggacaccggcgcgactttcacgtccggtgcggaattgcgaacatggctacgctcgcctgtcctcgcggcctggtcggctcagccggactggccttctcccgagacgcgagcaatgtggctcgagttcgcccaggaggccgcgcctgcggcgaaccggacctgggcacgacgggactatgtggggaatgtcgagtggttcgcggcgccggctccgcccggctctcccgtgagcttgcacaactggaacggccagccattggtgctctctgccgatgggcgcggcatcggccgcctccagcatcccctcaaccataatcggcgtggccttctccgcgcgacagtcgcgctgaaccctgcgcagcttgagctgagctatctcggacccgatgacctttgggctgtggcatag

SEQ ID NO: 58210 - DNA, 780 bp, Agrobacterium sp. C13; identical to SEQ ID NO: 56488

SEQ ID NO: 58211 - DNA, 3519 bp, Agrobacterium sp. C13; identical to SEQ ID NO: 56489

SEQ ID NO: 58212 - DNA, 828 bp, Bacteroides sp. 1_1_30; identical to SEQ ID NO: 56722

SEQ ID NO: 58213 - DNA, 3351 bp, Bacteroides sp. 1_1_30; identical to SEQ ID NO: 58055

SEQ ID NO: 58214 - DNA, 792 bp, Lachnoanaerobaculum saburreum F0468
atgtccattataaatcaattttcagatgaaaaagaaccttttgctacatgtcttctatcaactgattgcacgactacaagcggcatagagcatagagttttagaagacaatggaaatagtgatattctgcttcgatatatggaagatgctttacaaaggtatcatattagtccggaggcattacaacgccatatggatttgattgcaacattaaaaataaaaaatctcccaatccttcgatccccttacccacagacttcaacaacccagaaaggaaattttgctgaagttttcttggctgaatatttggtttctacaaccgatatggagcttcccatatataggctgagatataatactaatccagatcagtctatgaaaggcgatgacgtcctattgtttgatttggattcagatcctgtacgtattattgttggtgaatcaaaattcagaggtataccagataagcagtctgtaatcgatattgttgatgggcttgtacgctcatataaggctgggctgccaatctctcttatgtttgtggctgaaagattgttccaagaaaacaagcctgaactcggccgaaaagttcaaaactgtgctataatgtttgccaccaataaactacatattgactatgtcggatttcttatgagcaatcaaaattcaaaagttcatgtgaacagacatactacaaataattttcacaatttgttgatgatttcgctgggaatacaaaaccccgaaactatggttaagaaagcttttgaagaattggagagtagattatga

SEQ ID NO: 58215 - DNA, 3351 bp, Lachnoanaerobaculum saburreum F0468
atgagtattccaacagattatatttccaatctagtaaatgaattgtcgcaaggtcgcctagaaaatcttattaagcaagcagacgcgaggagaattcttcaagaggtaaaagaaattccagaaaactatccagattttgccccattgcttactgaaaaagcaacgcacattgcttatgcattgctctcttgcggttgttccttgatggaaaaatcaaacagcgattttaccgtgatggaaaaaacaaacagcaattttaccgccatagaaattttatcaatattagaaaaggccggtaaattattatcggatatttataagtataatgatgatgaattcgatgggaaagactacaatttgctgatttctgggatggcattatatgctgctaaacaatattcgcgtgcctttattgtactaaataacgtaaatctcgattttgttgttgggcaaatagttattcaatttataaataaagattttaattctttgttgcaaaatgtaaaccaagttttctttgagccacccaatgagttatctgacatacaaagcttagatgaatgggttatttctcacgaaattgcacgaattttcttaatggttgttgattttgttcaaacaggaaataaaagcaactttgtttcaatagataatatatttgataagttgctatcgattgccactgaaagcaatttaatatcctattggttaatagtaagattgttaaaaattattctttcgacttttcgagaggcttctctttggacaattttgccgcctttgctgcctgttcaacatagaactgagaattacattcggctgcttagtggattcaagcctgccattacggaactatggccatcacaaacaattgccattccgcttgcagttggagaaaatagcggaggtgttattaatcttcgcacaagcggtggaaaaacgagagttgcagagattgctatcctaaataccttgtctaagcacattatgtcaaagactctatatctcgccccgtttcggtcattagcttttgaagttgaacaaagccttagtaaaacattttctcctcttggaattactgtttctcagctttatggaggttctactgcaaatgtaacagactttgagcttatcaagcaatctcaagttatcgttgcaacgcctgaaaaggcaaaagctcttatccgatgtggctcagggcttgagaccgaactcaagctgattgttattgatgaaggacatcttttaggtgcagaagaaaggtatataaaaaatgaaatctttcttacacatgtaaatgaatttgcctctcgaaatcaaataaaaatgttgctgttgtctgctgttttacctaacgcaaatgaattggctgattgggttgctgcagataccagcttagtcgcaaagtcagagtggaaacctgctttagagaggttaggactattattgtgggatggagagcgtgttaggctagagtggggaagagaatggaaaacatttaatcctaattttgttcaaaaagcacctttggggttcggaagaagaagaaagatgttccctaataataaaaaagaagctattgctgcaacagcggttcgtctggcaaaaacgggaacggtcatgatttattcagcgcgagcaaattctattgagggattagctgaaagtgtactttcagcattgggggaacaccaagagaattttttatgggattgttcgctctggaatgtatttgaaagtgtttgtaaagaagaacttagcgagaatgatattattttgattgctgccagaaagggagtaatttgccataataatcgtttgcccactctcgtccgtattgctatggaaaggttgatgcgttcaaaaccaccgcttattattatcgcttcatctacattggggcaaggtgtgaatgtaggaatttcttcaattatagtttcaacaccatattatgatcaaaactgtattagcaatcgggatttctggaatatttgcggtcgtgcaggtcgtgccttttcggatgtagaaggtaaaattttatacgcgattgatactacagaagaggcatggaaagtcagaaaaaatcataatcttgcacgaaattattttgataaccgacagatggaaagagtccaaagtggtttacttatagctctaaaggctatttatgaaaatgctatgaaaaccaatacggatttcaatttgcttgttgaagctattgccaatgattttatttattcagatatcaatgaaaagtttgtagagtggataaatagactttttgattatttagatgacgaacttcttgcaatgcacgagaatttttgcttggatgaaaatgatgtaacatgggttgatggggtttttagaaaatcattagcgatcattcaggctgattcatcgcgtgaaaatgaatatataagattattgcgagcacgcacaaaagctctcttaaaaaaagtaccagataaaaggtcaaggcaaaagataattgcttctggaattcctctctctgtatcacaaaggatgttggatagtgttgaagactttagggcactggctctattgtttgcatctcaatcaacatctgatgagtacatagctcaaattgaccgtattgttagggaaattgaaatatggagcaatttaaatgcaaaatatttggtgggagatatacctgaacaggagtgcctggaacgtatacgtcatgattggattagcggtatgccactttcggagataataaaaaatgagccgacggcagaaaaaatcacaaaagattactatgggtttacattaccgtggattatccatggcatttctcaattgtttgatccagtattggaagaaaccattgtccaaacatattcttcaattgccatgtttattgaattgggcttaccgaacattacaagctcaaacatatatatggcaggagttcgctcaagaagtgccgctttggaacttgcttcaattgacatttttaatggaaaaagtgtgcccgaaatcaaacaaattcttactagtgttgaagtatcaaaggaaaacatttcaaatatagcacaagtatggattgaccttttctcaaatacagcaaaatcgcaatcacctaaacgagtatctttcccaagttttacatggaatagagatgatttgccggatagattgtatttgagagagcagaaaaaccaatactatttactttcaagcgatggatacttttgcgagaaagttgaatccacaaaagacttgcctttttctaaaattgctaatattgttggcttgtattttgaatgtcgtgaagggacttggtatttacaatcttataatccacgtatcattataggatag

SEQ ID NO: 58216 - DNA, 780 bp, Enterobacteriaceae bacterium 9_2_54FAA
atggtcccgttctatgattggtgcgactcggctgacatgccattaggtaatcaccatgttcgtgtcatgacgggccggccaggagatattgcgactggcattcagatgacagctagggctatccccgcccactacactacagaggagcggattgccgccgcgcttgcgaagttgggtaagacagcagctgctcatatgctcaacgatctccttccgcaaactgcgcagattaggtcgggtgaccttggcgagatctatgcaacagaatggattgatgcgtacagcggttatcgcgcgcctatcaaaagactgcgctggaaggatcatcgcaatatggcaatgcgcggcgatgatgtcatcggtatgcttctcgacgctgaaacacagcgactcagcttcctgaaaacagaagctaaaagccgtattaacctgcgcgctcaaacgcttgaggaggctcggagcggcttagataaggatagcggccttccctcgtcgcatgcgttatcttttatctcggccagacttatggagataggcaccgatgcaccgctcgtagacgcaatcgacgaggcgctctaccggcacggtatcccgcacgagagcgttaaacatctactcttcacgttttcaggtaacccaccacagacgctgctaacgcaggcgctacaggcctatcctggcccgattgggcaatggggtgtcggtttgcatatcgacaaccatgctgcttttgtcggagccgtctacgatcgagtaattgccgatgccaacaacccctga

SEQ ID NO: 58217 - DNA, 3534 bp, Enterobacteriaceae bacterium 9_2_54FAA
atgccaacaacccctgatgctatcattgctgctataacggacgcggcgacggtcggctttcgcggcaggctcattgcacgaggtcaggcacgtgcaatgatctggcgtgacggtgttcttcctcctggtgcgccggatttctcggctcaactcagcttcgatcttcacagttacgcgtatggtttgcttggactaggtctgcgccttttagagtcagatggcgatccgaatcaagcacggatcgcattcgaacaggcggcgacagcgcttgagtcggtcatggccaacggcaatcgcgatgaagctgatcgcgatttccatttcctccttgctgctgccagttatcacctcgcgcacctttctgcccgggcctattccctcctcgcaattgtggccgatgaagcaaatttctcgccgatcgagcatgcgctcactctgttgatacgccgagatatcaattcgctgcgtacacgcgtatatacctttcgtctcgatggtcgtggatctgatgcgaccattacgacattcttacagcagcatcttactgagtccatcgttgccgatgcggcggaacgagatggaaaagactttcttttcgaaggcctgaatctcgcactgacagatgttttcttcggtgccttttcgatgttcctgctcgccctagatcgcggtgaatatattcttctcgaaagagcgatcgcccagcttcgtgaaaacctcgacatctgcggggagctgaaccttataccgcaatggtgggtgcaccgaattgctatccatctgcttaacgatttctggtcgaacaccttccacgaaaaagttccgctgcttcccgctggcggcgttgccccttcgtggcctgtccttcgtgaactcttcattggcttgctcgctcgacgcccaagggcagaggtcgacttgtggccgtcgcagattgaagcggcatctcgagctgtcaaccagaccgacaacctcgttgtttcgttgccgaccagcgcaggtaagacccgcatcgctgaattgtctattctgagatgtttagccggtgggcggcgtgccattgtcgtgaccccgcttcgcgctctatcagcgcaaaccgaagccacacttcagcgtaccttcgggcctctcggcaagaccatttctgccctttatggcagcatcggggtgtccggcttcgacgaagatgccatccgcgggcgtgatattgttgtcgcaaccccagagaagctcgatttcgccttgaggaacgatccgtcactgcttgacgatgtgggcttgctcgttttcgatgagggccatatgattggttcaggtgagcgcgaagttcgttacgaggttcagattcagcgcctcttacgtcgtcaggacgcagatcaacgccgcatagtctgtctatcggcaattcttccggacggagatcaaatggaagacttctcggcgtggctacggcgcgatcaaccgggaggtcccattaagaacgattggcgcccgacgcgtttgcggttcggcgaggtcacctggaattcgccgacagcgcgcctaaatcttcgcgttggtgaggaaaggccatttgtgcccagatttctcactggtgcggcaccgccgctgttcgtaccaccgaagaagcgtcgcaatcgactctttccggacaatcagcaggagttgagccttgcaaccgcatggcgtctagtcagagatggtcagacagtgttgatctattgcccagagcgccgcagcgtcgaaccatttgccaaggtcatcgttgacttacattcgcgcggtgcactcgagtctttgctaacagtcgaattgaccactttgcagatcgctattgcactcggtgaggaatggcttgggacagacagctatattctgaaatgccttcggcttggtgtggctcttcaccatggtgccttgccgacagcttatcgcaaggaaatcgagcgccttctgcgagaaggtatactcaaggtcacgatctcatcgccgactctggcgcagggactcaatctctcggcgacagcggtcgtcatgcattcgctctaccggcacggtgaaatgatcaaggtttcggaattcaagaatgtcatcggccgcgcaggccgtgcttatattgatgtagaaggccttgttctctatcccatctttgaagatgtgaataataggaagcacaacaaatgggtcaatctgatagaagaccacggtgctcgtgagatggaaagcgggctcatccagctcatcttctcgctgctgagccgcatgcactcccacattggcggtaatctcgaccatttgatcgactatgttgtcaataatgctgctgcatgggtcttcccagaggttgccggtgaaaaggttgatgagcgagagcaggcgctgaaagagtgggatcgccatatggcgacactagataccgccattctcagtctcattggtgaggccgatgtacccgatgatcagatcgagaccgctctcgacagtattctccaatcttcactctggcaacgccgcctgctgcgtgttaacgacgaatcacgggctgcctatcgcaccgcgctgtttactcggagccgttatatctgggcgaattcgactgccgtcacacggcgtggctattttctggctgggcttggtcttgaagctggacgtgcgctggatgtaattgcaccggaggcgaacaatcttctcatgcaagctaatgcagccttggttgtatcagatcatgaggctgcaatcactgcgatcacagatatcgccgaacgcgtgttcaccttttatccgtttgaaccagacacactcccggcgaattggcgtgaaatcctcagaggttggctgcttgggcatcccttggcaatgatgatcgccggagaggaggtagacgcattgcaatttattgagggcggtctgggctatcgtcttccttgggctatggaggcgttgcgggtacgtgccgccgccaacggtgataccgttggcatgcctgcactagcgttggaagactatgaactcggccttgctgttccagctgtcgaaacggggacgatgaactgctcagcctcaatactgatccaggcgggttttaattcacgactggcggccatcaaagccgtcaccgatacggctgctaacttcacgaacggggtggaattgcgcgattggttgcgttcacctggtctcgctgtctattcggcacaaccaaactggccaacggccgaagctcggactatatggctcgaattcatccaggaatttgctccgtcagacaacctttcttgggcgcggcgagattatcttggaaacgtcaattggttcgatgttccggcgccttccggaactccagtcggtctctttcattggaacggacaaccgctagtacttgcaccagatgggcacgcgattggtctgctacaacaccctcttaaccttaatcggcgaggtcttgtgcgagcgacggtcgctatgaataacggccagatcaatctgagctatctcggccctgatgatttgtgggtagttgcgaagccacattaa

SEQ ID NO: 58218 - DNA, 780 bp, Agrobacterium sp. LY4; identical to SEQ ID NO: 56488

SEQ ID NO: 58219 - DNA, 3519 bp, Agrobacterium sp. LY4; identical to SEQ ID NO: 56489

SEQ ID NO: 58220 - DNA, 780 bp, Agrobacterium sp. TS43; identical to SEQ ID NO: 56488

SEQ ID NO: 58221 - DNA, 3519 bp, Agrobacterium sp. TS43; identical to SEQ ID NO: 56489

SEQ ID NO: 58222 - DNA, 780 bp, Agrobacterium sp. TS45; identical to SEQ ID NO: 56488

SEQ ID NO: 58223 - DNA, 3519 bp, Agrobacterium sp. TS45; identical to SEQ ID NO: 56489

SEQ ID NO: 58224 - DNA, 783 bp, Sphingobium lactosutens DS20
gtggggctatacaaaaattggtgtgacgccaccagggagaaggacaagcgcaagcgctactggacctatgtcgagaaggacggcggccgcgatgaaattcgcgatgatctcgccgagaccatccgctcacactacgaccggctccaacgcatcgccgaggacgtggagcggctcggctacaacgtcgccgccaagattctcagcgaggcgatgccgcagacgcccaagggccgctccggcgatctcggtgaaattctcgcgaccgagctggtcgaagaggagatcggcctgcgcgtccctgtgcgccgcctccgctacaaggacggccgtaacatggccatgcgcggcgacgacttcattggcgccggttacgatggggccggcgagaagctctggctcctgaaaggcgaagccaagagcaacaaggtgctcggcaagaccacggtcacgagcgcccgcaaggtgctcaaccgcgacaacggccgctgcacgcccgattccctgctgttcgtcgccaatcgcctgcttgagagcaacgatccggacgacaatgagctgggtcgcagccttcgcgacgaagtgggcctgaaaaccctccgcgccgatcgcatcgaccacatgctcttcaccgtgtcgggcaacggccctcacgcttcgctgaaggatgacctcgacgccaccgggaccaaccgggaccattacgtcgtgaacatccacgtcgaggaccaccaggacttcatcgcagccatgtatcaggaggcggaagaccttggagacgattga

SEQ ID NO: 58225 - DNA, 3516 bp, Sphingobium lactosutens DS20
ttggagacgattgacgaactgaccgcgttcctagcgaccgcaaccgtcgacggcatcctcgggcgcctgctctatcggggcgccgcatggtcgctgatgcgcgaggatggcgtgttgcccgctaatgcgccgcccctcggcgcgacgatcgaaaccgaccttgccgagcatggctttgccctgcttcggggcgcgatggccctgcgcgctcaggctggcgcttccgaactgaccagcaaggcgttcgagcgtgccgccaacgccttcgaagccctcgtgcgcaacggcgatctggagtcgcccgaccgcggtttccgccgcacgcttgccgctgcggcctaccacctggccggcttttcggccgtcgcctattcgctcttcaacgagactgcggacgatctcaatgcttcgccaggcgaaacggcgatccggcacctgatcctgcgcgatctcggccagctgcgcggctttgttcgcgtgtggctggacgatgaggcgcacggcgacgagcagatcgccggaacgctgacaggcgaagaccccgacatcgacgaggcgctgtcgactatcctcaacacgacgatctgccgggctctggcgcattttgacttcgcgctcgagacgggcgagtccgagccgatcgagactgcgcgggcattgctcgccactgcggtcagtctggcagacaacgcggagaatgttccactttggtggatatcgaacctctgccgtcacctgatcgatgacctctggcggcattcgctgcacgagaatctgccgaccgagccgccggaagggacggaggaaaaatacccggacctgcgccggctgttcatctcgtcgctctacgcgcgcaagacgtccgaggtggagttatggccatcgcagcgcgaagccgcccagcgttccacggacgtcaccgacgatctggtcgtcgccttgccgaccagcgccggtaagacgcgcgtggccgagatcgccgcgctgatgaccttgtcgtcggcgcgccgggtgctgatcgtcacaccgctgcgcgccctttccgcccagacagagcgatccttcagaaagaccttcgcgcccctcgggttcagcgtctcctcgctttatggcgccagcggcctctcggctggcgatgaagacgcgctgcgcacccgtgagatcatcatcgcgacgcccgagaagctcgatttcgcgctgagaagcgacccctctctgattgatgacgtgggcctgatcgtcctcgatgaaggccacatgatcggtcctagcgagcgcgagattcgctacgagacgctggttcagcgtctgctccgacgcggggacgcgggcgaccgccggattgtgtgtctttctgccatcctgcccagcggcgacgaattggatgatctcaccgcctggattcgctcagacgagccgggcgagcctgtgcgctctgactggcgtcctacacggcagcggtttggtgcgctgacgtggcgcggcaaggacgcgctgctccggctcgacctggatgaagatggtccgttcctcgacaaattcgtcgtggagaaaccggcgctcgggagggagaagaagccctatccgcgcaagaactcgcacctcgccttgttcgcggcatgggagttcgccagccagggcaagcggaccttaatcttctccacgcaggcgaactgggtcgagagctacggtaaaaaggtcgtggacctctgcaagcgcggctatctggaatcgctgctggaggataaggcgtcgatcgcccgcgctctggaggtcggcaatgaatggctgggtgaggaccatcccgctgtcgcctgcctcaagcagggcgttgccatccaccatggtcggctgccgagcccgtttttgcgcgagctggaagccctgctgtctgagggcgtcctgaaagtcatagtcgcgtcgccgacgctctcgcagggtctcaatctcaacgccgccgtgctcttggtgcctgcgttgtatcgtgccggcgagaagatcaaaggcgaagagtttgcgaacgttgccggccgagccggacgcgccttcgtcgacgtcgagggactcattgtccacgtcatgttcgacaatattaactggcgaaaaaaagaatggggcaagctggttgcctccgccaaagctcgcacgctgaaaagcggcctcatccagatcgtcgccgagattcttgagcggctgtcccgcgaaggtgttctggatcgcgacgatgcctgggaatatctcgctaatgcgcgcgaagcttggaggtcgtcggaggaggaagcatctctggccgagcgcttggctgctgcaagacagaatgatggcgatgtcgctcatgacgacgaagaagaagatgatgatgatgacgatgcggaagagaccatcgaagaggagcctctgtcgcagatagtcgaacgtctagacgcgactgtgtttggtctcattgaagcgctcgattctgatagggccgatttgccgaagcttttggacgaggccctcagaggatcgctctgggctcgtcagatcgcccgcgaggacgaagacgtagctcctctgcacaagcgagtaatcgaggcgcgagctgatctcatctggaagacgaccaccgcgccggcccggcgcggtcatttcgccatgggtgttggactggaagcaggccttgcaattgatgccatggctgacgtgttggccgaactcctcgaccgcgcagacgtagcggcactgagcggcgatattgatgaactagtcgagacccttggcggccttggagagcggcttttgttcatgcgtccgttcatccccagcaagaacaacgcgctgcctgcgaattggaaggcaatcctgcatagttgggtgtcgggcgaggatgtggccaagatcgggccccagaacatgcgggcggtcgaagaggccttcacctaccgtttggtttgggctctggaggctgtccgcactcgccgcatgtctctcgggtggtcgccagacacggtggcgggcggtgccgcggcggcggtcgaaaccggcgtcccgcaattcatgatgtcgatgctgatccgcgcgggcctaccgtcacggcgcgcggccatggcggcgatcgaggatgccaagccggtcttcgtcacgcccgccgagatgcgtgcctggctcgaatccgacgacatcacggcctacacggacgccggcggctggcccacgcccgacaccgctgcgctatgggcgcgcttccgaaccgaagccctcagtggcggcatccagaagtggtcggtcgaaaactataagcgcttgctggacgtcgcagctgcaccgcccgccggtctctatcggatcgtcaccgatgagggtgacgggcggacctggctgacgacgcccgattaccagcaggttgccgtcttcaagaagccggcggtcgatcccaagcccagcctcttttcaggccgattgcccggcgacaccaggttggtggagacgttgcgtgtcggtcgcgggaaactgcgctggccgacggccgatgcgtaa

SEQ ID NO: 58226 - DNA, 777 bp, Mesorhizobium australicum WSM2073
atgacaaaaataacagactggtgcacaatcaaaagcgagaaggtaggaaaacaccacctcacggttcttgagctggaaagcggcaagtttgacgttgctagtgatacagtagcggcggttgtgccttcacattatgcgtcagatgaacgcacagcgaagctgctgaaacgtctggggaagacgaaggccgctgcacacctcaaagagaagcttccgaagtccccgcaggtgcgctccggcgaccttggtgaaatcctgggtgcgacctatgtgcaggaatcgacaccatttggaaccagtatcaacaagctgcgctggaaagatcaccgcaacatggcgatgcgcggtgatgacctggttggcatacagccggccgccggcgcaggaaatatccgcttcctgaagggcgaggtcaaaagcgccgccaacataacggcaaaggttctggataccgcgcgcacggcactgaagaaatcccattcacgtccttcggcgcacgccctcgggttcattgcagaccgcctgcacgaggaaggaaacgatgagcttgcggaccttatagacgacgcgctctggcgggatggcatcaggctttcgcaggtctcgcacatgatctttgccttcacgggcaacgatgcatcgaacctgctgggcgcgaacgtacagacctacactggacaggttgcgcagagtgttgtcggtcttcgtgtcaaggaccaccagaagttcatcagatcggtatttagaaaggtgatcaagaatgccgacgggaaatga

SEQ ID NO: 58227 - DNA, 3519 bp, Mesorhizobium australicum WSM2073
atgccgacgggaaatgaggccatcgagtctgcggtccgtaccgccaccgagggtggcttccgcggccgtctgctggcacgtggccaggcccggtcgctgatctggcgtgacggacaactgccgccggatgctccgaactttgcggcccagctttcctatgacctgctgtcctacggatatagtcttctggatatgggcctgcgtctccttgacggagacggaaaccccgatgttgcccgcagcgcttttgagcaggccggcgaagccctggaatccctcgtggcgcacggtgcgccgaatccggatcgggattttcaccgctttgtagcggccgccgcctatcaccttggccgttactctgcgcgcgcgtattcgatgctgcgggccaccatcgacgatgccaatctttcgcgtggagaacgctgcgttgcgcttctgatgctgcgcgacctcgatcgggcgcagcaagaaattcttgagtggcgacgggaaggcagtgctgaagacggccatctgacggagatgctggctgccatcccgaccggcgacgagattaccgatgatggtggcgatgacgacgaagacgtcggtgccgatgtcatcgatctggcactgaccgacaatctgctgggcgcgcttgcgatggctttccttgcactcgagcgcggagatgcagagctgatgggacaggcagttgaccgcgtcgatattggtcgcgaggaagcagccggggtcagcatggttccgcagtggtggtgccaccgtctgaccgcccatctgctacgcgatctgtgggatacgagttttcatcaacgcctgccgctaagtccaaacaatctagataacgcggagggatggaagcagctgcgtgagctcttcgtcgcctcggccatacggcgttcgcgtgccgaaatcgagctttggccttcacagctggacgcggttgagcaggcgatcagcagcaatggcaacatggttgtttcactgcccacaagcgccggcaagacccgtgtcgcagagctgtgcattcttcgcgcccttgcgaagggcgagcgtgtcgtctttgtaacgccgctgcgggccctctcagcccagaccgaggtatcgctgcagaagacgctggccccgctgggcaaaacagtgtcaagcctctacggcagcattggtgtatcggaaacggattccagtttcttcgaggaccgcgatgtgatcgtagccacgcccgagaaactggatttcgcgctgcgcaatgatccatcgctgctggacgatgtggggctcgtcgttctcgacgaaggccatatgatcgggcttggcgagcgtgaaatccgctacgaggtccagatccagcggctgctgcgcagaagcgatgccggcagccgacgcatcgtgtgtctgtccgccgtactgcccgatggcgaccagcttgatgacttctgtaactggctgacgggtgacgccaaggatgggttaattcgaaaaaactggcgccccacaagactgcgctatggcgaggtcacttggcggggcacacatgcgcgccttgatgcgcgcattggcgatgaagctccttgggtcgagaattatattagcggctttgttccgaaaggtcgcagaacgcagtttccgcgtgatcagcgcgagctgtgccttgcaacagcttggcggtcggtagaggagggtcagtctgcgctaatcttctgtccgctacgccgatcggtccaaccatttgctgaagctgtggtgaccctgcatcgccagggcgcgcttcgatctctgttcaagggggataaggctgtcctggccgatgcgctcgcgatcggtgcggagtggcttagcccgaatcacgacctgctaaaatgcctggagcttggggttgcggtacatcacggcgcattgcccacgccctaccgcaaggaagttgagcggctgctacgggaaggtattctccccgtgacaatatcttcgccaacgctggcacagggcttaaacctatctgcatctgccgtgattttccatggcctcaagcgaaaccgcaaagagctggcctcgtcggaatttaggaacatcgtgggtcgcgcgggtcgcgcctatgtcgatgtggaggggctggtgctcttccctatgtacgacaatcagatgacgggaaaagccgagtggaacgcgcttatcgcaaaccaggccggtcacgagatggaaagtggtctgcttcgcctgatttttaccctgcttgcgcgcctggctcttcggaccggtgacaaatcggtcaagggcttgagtgaatacgtgctcaataacacgtcagcatgggattttgtacgactgagagcggaaactgctgaagcagccgccgcaggacaggtgcagtggaacagtcatctggccagtttggatacggccatcctcagcctgctgagcgatggcgatgttgcagaggccgatctggaagatgcgctggacgatgtgctgaactcgtcgctgttccagcgtcggcttgcgcgtcggagggccaatcagcatgaggtgtaccgggccgtccttctaggccgcgcaaaactcatctgggctaacagcacgcctaagcagcgcaaaggctacttcctatctggtgtcgggcttacgacgggcaaggcgcttgatgcgaactcgcccaagctcaaccagctgctagttgaggctaatggcgcgatcctgagcaaggatgacattaaggcgatcaaggcgatcactgattttgcaaagatcgttttcgcgatcgtgccttttgtaccggataatcttcccaagaactggaaggcgattctcgatgcctggcttcgtggtcaggcgctgcagagcttcgtagcagaggatcaggactccgtgctacgctttgtcgagcaggggtttgtctacatgctgccctgggcgatggaatccgttcgtgtgcgagggatggccaatggtgacatccttgcgccgaccaaagggctgcccgacacgacgctggaggatatggaacttggcgttgccgtagcagctgttgagaccggttcgcttgatgtgagggcagcgctgatcatgcgcaccggctttgcatcgcgcagcgcggccataaagatcattgcggacatggacccgaattttgattccacacagtcgttgcgtcggtggctgcgaatccctgaagtccggaaagccacggaagacgaggcgttcccgacgccagaaacgcaccggctgtggctcgagtacatccagagcgtcattcgtacatcttctgcacgctggtctgccgaacaggaagtctgtgatgtcacatggacagacgacgcgccgtcagaaggcaccccgctacgcctgatcgaagatgaagaggatagtcagacgattgtgaccgatgccgaatttcggcctttgggcaccgtcgctcgtatcttgagcccgggacgttgcggcctcctgagaaccaccgtgatgaagggcgggaaggttgcgctgcgctatctggggccggatgatctgtgggctgaagtatga

SEQ ID NO: 58228 - DNA, 825 bp, Dehalogenimonas lykanthroporepellens BL-DC-9
atgccacctcgaaaaatattaggagaccatccagtccctgaagtctttggttgttataccgttgcggaagatgggtctacaaatagcggtgtccctcatcgttctctggctcaggacgtcgattgccgtcctgaaaccattagtcaattgcgcgacgcccttgtaaagcatcatgtcagcgccgcaatgattgctcaagaccgccgaaaaataaaaaatcttcgcgctcttggctatccaatcgaggataccaatatccgacgatttcccacatcagatacaacgagaaaaggaaacttggcagaggtattcttggccgagtacatatgtgctgcatctggtgccaacctgcctgtttaccgtcttcgttataacccgaatgtcgatcaagctatgaaaggcgatgatgtactggcctttgattttacctcgaggcgggcaagaataataatcggagaagcgaaatttcgtggaaccccttcaaagaaggcaatccaggatattgtcagtgggcttgtacgttcgcatcaagcagggctgcctgcttctcttcaatttgtggcagatcgtttgtatgagcagaacaacattgaacttgcagatcgagttgaagactgctctgtaaagatggctcaaggcagacttgatctcagttacgttggattcctcctcagtactgacaatagcaagtcgaaagtcaaccagcacacttctgcagccctgagaactcttgtaatgatttccttaggaattgattctcctgggaatttggtcgaagattgttttaacgggattgaggagttagctcatgccgatcccgactga

SEQ ID NO: 58229 - DNA, 2607 bp, Dehalogenimonas lykanthroporepellens BL-DC-9
atgccgatcccgactgagaaggccagggaaatcctgcaacaacatcaagctggccacatagaaaatctatttgcccagtctagtgcgagatatgttctatacgaggtcggcgaatcggaagataatttcccatcatttgatgccgcacttacagacaaagtcactttatcagcttactcaattcttgcggcaggggttagcctggctgaggccagattaaccgatgaagcaataactgccatggaagaggcagcggcccttctcatcaatgttcatgcgccttacgcagagacagagcttacgagtagttttcatgtcctgatcgcttcaatggcctttcatgcgtctggccaatattcacgggcctttgtttacatccggaaagcggaattgctgactccgttggcaagaattgtagcatcgcttattcgcaaaaggcctgccgatgtaatccttgaagcaaatcagtatctgctggcggatctctcaactatgaccgacgcatggtcgctatgtgaccatgcggtcacactatcaatttcgcggtcaacttcccttgttctcgaatattttgccacaggaaatcagcagcttttagcagcttccatagaaaacttaaacatcgctatggagctcgcctcagattacgattctccctcgcactggtggatagctcgtctgcttaggcttatgatatctggaaacggtcaggcatccttgtggcacgccttgccgccatattttcctggcgactcatctcttttaagtcgctatataagactgcacgccttcgcatcgaaatccgtcacagaactgtggcgatcccagctcgacgctattcctataacacttggtcaaggtcgtaccggtgctgttgtgaacatgcgaaccagctcagggaaaacgcgggttgccgaacttgccattcttcaaacactccacgaaaaccctgacgcaaagatattatatttagccccgtttcggtcgctggcattggaaatcgagcagactttaggtcaaatttttgatcggtgcggatttcttgtctctcatctctatggcgggtttcgacttagctccgctgatagacagatcgccaaagactccactatcaccatagcaacgcccgaaaaaatcagggcaatattacgatcctctccagagcttctgaatgatatcaggctcatcattatcgatgaagggcacctgattggtgcggacaagagatacgttaagaacgagatttttatagaccaccttagagtgttggccagatcttccgcatgtcgaatactcttgctttctgctgttttgcccaacccggatgagcttgctgtgtggttaaccggagatgttgggaatgttgcaagatccggttggaagccatcgtcggaacgatttggaatcctacgctggcaaggaagcagcgtacggattgactggaaaggcgattttgcttcatttaatcgccaatttattatcgcgagcaaatgcaaaaggcagtatgaccataaacttacgcggtggaaaaatcggaggtcccttttccctcagaataaaaatgaagcggttgcggcatctgcagtacgattatgttcagtagggcctgtgatgatattttcagccagggcaaatagtattccagggctcgctgcttgtgttctcactgctatcggagaaaatgctgaagatcacaattggcctaaaaatgaatggaacgcttttctggctacatgccaagaggagctacaagacagtgcggtggagctgacggctgcaaggaaaggcataatatgccatagcaataaactcccatcccaggtacgaatggccacagaacgcctgatgcgttcaacttcacccaaaatcattatcgcgtcgtccacgctggctcaaggtgtcaatatcggcatttcttctgtaatcgttgccactccttaccaaacggatcagcctattgatcatagggatttctggaacatttgcggccgtgcaggacgagcttttgttgatggcgaggggaaagttctctatgccatcgatgagacaagagaagattggcagatcagacaggaccgagaattggcggcaggttatttcaacgtcagccaaagcaagcccgttgaaagcggtctgctctttgcacttggaattatccatcaagccgccgaaagggctggcatagacttcgaagacctcatgaccatggttgctgaaaatgatttttccaatctgagtgaacaagttgctgccggttgccttgaaattatggaccttattgacgatggccttctcgctctccatgaagatcctgaagttaatcctaatttggaaaacccagaagtgtgggccgacaccgtcttccggagttcattggccgccatccaagccccaaacagtacattctcaatcgatgccgatgagttgatcaggtttcttgctgcaagagctaaaaaaatagttgagatgacacctgaaccaagccagagaaaggcgtatgtggcatcagggcttcccgtttcagtcgcatcaaacgtgtatagggatcgtgaacaatttctccaatatgcgcagtttttaagtgacgcagacaaaaaccttcagtag

SEQ ID NO: 58230 - DNA, 714 bp, Microbacterium azadirachtae
atggtgcacatggttgccccgccggcgaccatcgggtcgggggtcgactgggctgcgtcacagatcccgaaccagtacacaggtcccgaccgcgtcgccgcgatcctcgccgatctggggaaacctgctgcggccgaatacctggaagggaagctccctacaagcaagcgcacccgctcgggcgacctcggagagatcatcggagcgcagtacgcggcgcttgagctggggtttcgagtcgtggaacgcctgcggtggaaggaccaccgcgagatgtcgatgcgtggcgatgacctggttggggtgcgcgcggccaccaatggatcgctcgaattgctgaagggcgaggccaagagccgtgcgacgctcggagcggcgacggtcacagacgcggaccttgcactcagacgcgatcggggacgcccatcgcctcacgctctcagcttcgtcgctgaccgactccacgaactcggcgagcatgcattggcgaaccttgtcgacgacgctcaactgactacagggatcagccaacggcaggtggtgcaactgcttttcaccttcacgggcaacgacccacgcaacctcctccggacaaacacgaccgcatatcgaggcggcgtagagcgcctcgccgtcggcctgcaggtctcagagcatcaagcgttcatcgcgaacgtgtactcgaaagcgatcgccaatgcccgagacaattga

SEQ ID NO: 58231 - DNA, 3501 bp, Microbacterium azadirachtae
atgcccgagacaattgaggacattgaggccgcgatcgaggaggcgaccacgcccggctttcgcgaacagcttctcgcgcgaggcgaagcccggtcgatgatctggcgtgacggcgtcctgcccgaggacgcgcccgcgttcgatcagctactcagctacgacctcctctcctacggctattcgctcctgggcctggggctacatctcgtggaggcgaatgggtcgcaaagcctcgcccaacgcgccttcgagggcgcagccacagccatcgaatcagtcatcgccagaggacctaactcgcgcgaacggggcttccaccgtgtcgtcgcagcagccgcctaccacctcggcagctactccgcgcgggcatactccctgcttcagaccgcgctcgattccggtgaagtcacgactggcgagcgatccctcatccacatcatccgcagagaactcgacaccctggccgcgctcatcctgagccaccgcgacgaggacgcggcagcagacgccaacctggttgagacgttgcgcgggctcttcgagcccacgagcgatgaggaccaggacgatgagagcggcgacaccgatgtcatcgacgtcgtcgacctcgcactgaccgacgcgttcgtcggtgcgatcagcatggcgctgcttgcgttcgaacggggcgagcaagcgctgctggatgaggccctcagcacactgcaggtcggtctaggagccgccagcgaactgaacatggttccgcagtggtggtgccatcgacttgcgattcacctactccgcggcctctgggaggccagtttccatcgcctgctcccggacggccccatcgacggtgatggtggcgactgggcacggctgcgtgcgacgttcatcgcatcactcttccggaggcgacgctcggagatcgacctctggccgtcgcaggtcgccgccgcagaacgggtgctgaacaccagcgagaacctggtgttgtctctcccgacgagcgccggcaagacccggatcgccgaactttgcatcctcgcgtgcctagccgagggccggcgggttgtcttcgtaaccccattgcgggcgctgtcagcccagaccgaaacggccctgcaacgcaccttcacccctctggggaagaccgtcacatccctctacggcgcgatcggggccagcagcgccgacgaggacttgctacgagagagggacatcatcgtcgccactcccgagaagctcgacttcgccctgcgcaacgacccaacactcctcgacgacgtcggacttgtcgtcctcgacgaggggcacatgatcggagcggatgaacgcgaggtccgatacgaagttcaggtacaacgactgctacgccgtggggatgcggccaccagacgtatcatctgcctctcggcgatcctgccagacggagacgaagtcgaggacttcgtcaactggctcaccgatgaccaacccgacggtctcatcgcgagctcgtggcggccgacgaaacttcgctacggcgaagtgatttggcaaggcgatcgagcccgcctgagcgtcatcgtgggagacgaggagcccttcgttccccggttcctcgaacccgtcgttccaccgatcggtcgcaggacgacgcccttccccaaggatccgcaggagctgacgctggctaccgcctggcggctcgtcgacgacgggcagaccgtcctgatcttctgcccactcaagtcatcggtgaacgcctttgccaaggtcatcgtcgaccttcatgcgcggggagcactccggagcgtcttcgaaggagatctgggcgacctcgccttggccatcacgatcggagaggaatggtttggccgcgatcacccgatcctcgcctgtctgagactcggcgtagcgatccaccacggatcgctgcccgcaccctaccgacgagaggtcgaaaggctgctacagcgaggagcgctgaaggtcacggtctcttcgccgaccctcgcccagggactcaacctctcagccagcgcgctcgtaatgcacagcctctggcgcaaccgggaactgatcaaggcgtctgagttccgcaacatcgtcggcagagccggccgagcgttcgtggactccgtcggcctcgtcgtccacccaatcttcaaggatgtgtcccgagggcggcggaactggaggcagctggtcgaggacaccgctctgcgcgacatggaaagcggcctactgcaactggtggtgaacctgttcgcccggatgcaggccaagcacggtctccgggatctggacgcgctgctggaatacgtcgccggcacagcggcgtgggattatccagaagtcgctgcggagagcgacgaggaagcggcgcattcccgaactgcgtggcgctcgcagctcgctagcctcgacaacgccctcctcagtctgctcaacgattccgcggttgcggaggacggagtcgagggggctctcgatgacgtgctcgcctcgtccctctggaacaggagcttggctcgacggcaggagcccgttcagacagcgcttcgagccggcctgaccgcgcgtgcacgctacctctggagccagtcaaccgcggcacagcgccgagggtacttccttgcgggggtcggtctcgagaccggacgccaactcgatgagcacgccagcatcttggagcagtacctgcgcgacgcagacgagggcatccgacttggcgaccccggtgccgcaatcgatgctctaacgagcttcgccaggatcgcattcggcatccaccctttcgcgccccgcgctcttcctccacattgggaaggcgtcctcgctggttggcttcgcggtgaggacccctcgcagatagcgggagaggaggtcacggacacgctggaattcattgaggactcgctggcctacaggctgccatgggcgctggaagcggtccgggtccgagcgaccgcccacgaagagcctgtcggcgatctttgggcgctcctcaccgacgagcacggactcgcagttgcagcggtagagacagggacgctgaaccgttccgccgcgctgctcatgcaggccggattctcttcccgagccggtgctctcgccgcggtcacggccggaggcggcaccttcacgaccgtgtcggagcttcaccagtggatgaactcggaggaggtccggcgacgcgcaggcgacacgcactggccgactgtgtcatcccacgatctctgggtcggtttcatcggccgtagcactgctgcaccggagagaacctggatcaacacggtcgaggataccgcggtgacgtggctccccgatcatcagccgagtagcgggacgccgtatcgggctgtgtcccttgcgaacggggagaccattctccaggccgctgacggtcgacgggccggtctgcttgaggaaccgctcaatccgaatcggcgcggcttgctcactgtcaccggggccagcgatgccaacgtcgtcgaacttcgctatcgaggcccatccgaccttcatgcatag

SEQ ID NO: 58232 - DNA, 807 bp, Lachnospiraceae bacterium 1_1_57FAA
atggaaaagccacaatacatcgattggatagttgaagaaactggtattgtaattaaagatgacataccgttaaaatgctataaaattgattataaagatgatgaaagtattcttgatgactgggcattgcacattcgaagaaattacatagaagatactgaacttaaagaagacgcagatgacaatgcaatgactgttgaacagtatttgcatgattatgtaattccacaaaaaggagaagaattgggagctacggtacgttctgcagacataacagaaattttaatttccgatttattagagtttgttcatcagtattctgttccgagatataaattgaagaacagatccgggaaaaacaattcacaacaaggaactgatgtcattgcatataagtacaaaaatgaagataaaactccaaatgataaagatgaattggtggcagcagaagttaaagctaccctctctaatatggagtacacaccaatcaaaaatgcaattatcgattccagaaaagatgaacatcgattagcaagatcagtaaattactgcagaaagcgattaaaagaactgggcaaaatagaagaggcagaagaggtaaagagatttttatttaaaccagataataattatcgtattacatatgtagctgcaggagttagtagtcgcgaaaacgtagatgatgccatagaattaggtttttctggtgaagaacttgaaattagaaaaaatgagctgattttttatgtacatggtcaaaagttgatggaattggctcataacatttaccagaggtgttgtaaatga

SEQ ID NO: 58233 - DNA, 3051 bp, Lachnospiraceae bacterium 1_1_57FAA
atgatttttgggaaaaatgcaggtttaatgttaaaatatcaaaaagcaaaggctaaaatggtagaatacgatgtttcaaagcaggagtatccacattttccgctgaattctaatgaattatcgtatccaacaacttatgtgctgtcacgatactcagaatgcattatagaaaataatcatgacgaattaaaagagctggagttacttttgattacaactgcagaatattatgattcagcttttaagtccaaagatagaccagaatatgattgggattttttgctatctggagcatctgcctacttcctacgaaaggattttggtagtgctaaagtgttggcagcaagagtagttgatttaattgatgaggagcgatctccgcagaaattgttgacgaatatctataattatcttctgggtggagtgtatttgccatatttgagagttatagatacttatgagcgaataaataattttttcttggattactttggaaagggtaagtctttagaagcattaaagtcaaacttatgggtatatagaaatgaaatatacgagaatggagatccagatagtatattttatgtagatatattagtggcagttattattgtggcgtgcgaaaattcgtcatggagtcttttgccgagtagttcaggtatcttggatgaagaatgggagtcatatctacaaagtaagatgtcaataaagatgttatggccagcacaaagattaatagccgaaaagggattgttgcgtggagaaagttctatcgttcaacttccgacaggggtaggcaagacaagaagtattgaactaattattagagcagcttttttatctgaacgagcgaatattgctattatagtggcaccattaagagcgttgtgcaacgaaataacaatggatatgtacaaagcttttggaaatgatgtcacgataaatcagttttctgatgtacttcaaaatgatttctggaatttgttttctgaagatattaaacggcagatactaatatgtacgccagagaaactgagttatgtattacatcatgatccgtttttcttaagtgctatagatttatttgtgtttgatgaaggtcatatgtttgatgatggagggagaggtgcaacatatgagttattagtaacacatatacgtcagaacataacgagcgaacagcagttggttttgctatctgcggtattgccaaattcaggggatattgcacagtggttgtttgaggatagaggttgtttggcgacagatgatagtattgtatctacacctaaatcaataggattttcatcgacacaaagggatattcatttcttttctgatgataaatcaaatgaagattattatattccccgaatccttcgagttgaacaattgaagaagttaccccgagaaagaagtaataaatactttccagatttatcattatctacagatgtggccatttataatgcaataaagttgtgtcataacggcggtgttgctatctatcttgggcagcaacgttcaatgaaaacggtatttgaaagaattataaatttggataagcgaaactatgatttgaaagcattaaaagataatacaaatcaagcagagctttccaaaatcaagggatttatagaaagctattatggttcagagcactattatacgaaagcagcagaattgggggttttgcctcattcatctaatcttcaaaatggagttaagcttgttgttgaacatgcattgaagaataaatatgtttcttgcgtagtgtgtacatcgacgcttgcacagggggtgaatatcccgataaaatatttattggtcaccagcattcgaaacggattgaaattagtaaaagctcgagattttcaaaacttgatgggtagaacagcacgagcaggtatatacacagaaggaagtattattattacggattgcaaaatatacgacaaccgtaccaactggaaaaatggtggaagatatttatggaatgattgtgtgaagctatttgatacaaaattgacagaaccttgtggcagttctattctttcgttagtccaggattttaacatagattatgatgtgaccgtaagtggtgagaaatttattgatatagtgatagatcaccttgacgaaagagatttcttgcttgattacgcaaagaagttagaaaaagcatacttaaaagtcaatcccaaaagaacacaaaatctgattgtgcaggaaatattattgcgtcaggatattatatcaaatatagaaaattatttgtgtttagtacgttccgcagaaacattggtcaatgatagtaagaaaagtgctgtggatatttgtacaaatacattggcgtatgctatggcaacagaaaaagagaaagaattactgattaaagtttttcagaagatagaagagaatattcaacaatattctgttgaaaaattgagcagatattctaatgcaatgtcaggaataggtttgtcttctctaatagaggaatggattgttcagaatgaacttacagagaagatatatacagaaacagaactattatacgttattacagaattgtatctgcaaatctgtggagactttagataccaagagcatatacaaagcatttgtaaaaaatggattgatggacagactccaatggaaattaacaacaaagaaactattggaattgcagaagtagaatcattatgtaataaaagaatctcatatgaaatgaattttcttatcggcaatatctgtgatctgatagaagttgacggagaaaatgaggagcaagttgatcaaaggaacatcttgacattgttacaaaagaaagtaaaatatggcgttcccaatatgacagcaatttctatttgtgagagtgtttttaatgatcgtctattagctatagaattagctcaaattttatctgatgcgaatattggaacggataagatacttaatatgttgaaagctcatagtgaagaaatctttagttgtcttgattcgtatccggaatatttcaaggatagattatctgtgttgatgaaataa

SEQ ID NO: 58234 - DNA, 810 bp, Erysipelotrichaceae bacterium 3_1_53
atgaatagaccaaaatacatagactggctagtcgaagaaactggaattacattagaagatggagtgccaataaattgctatagaatcgattaccaaattaataatgatatattaaatgaatgggcacttcatttgagaaagcattatatatcagattcagaattgaaggattctactgcaggattagaaatttgtgttgaagaatatcttgaaaaatatgtgattcctcaaaaatatgatacaggcggtccaacggcaagatctaatgatataacagagatattattttctgatttatttgagtttattttgggttatacagtgccaagatgcaaacaagaaaatcgatcaggtaaatgtctctctgaacatgggacagactttttaggttacaaattcaaagtaagcgcagataagcctaataaaaatgatgaattggtagttgcagaagtgaaagcagaattgactggagagaaatgtgatagtgttattaataaggcaataactgattcaaaaaaagatgaacatcgttgtgcccatacattagatttttatagaaagagacttaaattattaggaaatactaaacaagctagtgaaattgctagatttcaaatgaaatccgaagataattatgtaataacattaatcggggcatcaataaatagtagagaaaaaatagaaaatgatattattttaggagtaaaaggatctgacttgaaaatattgagcaatcagaaattattttatattcatgggagaaaattaatggaattggctcataacatatatgagaggtgtaagatatga

SEQ ID NO: 58235 - DNA, 2955 bp, Erysipelotrichaceae bacterium 3_1_53
atgagaataacgaatacctcagagcttatgctaaaatatcaaaaagctaaagctaaattggttgaatatggagtaaaacaggaggattacccaaattttcaattaaattctaatgatttgtcattttcaacaatttatattatttcaaattatgtggaagcaattatagatgatgactcagagaaaatagaattattttctgaacaattaaaattggtgtcagaatattatgatgcctcgataaaatcaagagatagaaattactataatgaagattttttaatgataggaatttctgcatatttgctttcaaatgattttggaagcgccactgtattgtgttctatgttagatgattgtaaaagaaggtgcggatctcaatacatactaatgtcaatttacaaatacatattacttaataaaccgttagaaaaaagtgaatctgactttgaggagcaaattatatcagatttgaggaaatattataaatgtaaagatattaatatagaaattttaatgcagaaattaagtcattatagaattgatgtatataataaggggaatgcattagatgtgttttatgtggatattttgattgctgttgtaatgtctatagtggataattcttctaggagattgttgccaaaatattctggaatttctttatcaatttggaaaaattatttagaaaaaaacacttcggctaaagtactgtggccagctcaacaaatgatgggtaaaaatggattattttatggaaaaaatgcaattgttcaattgccgacaggcgtaggaaaaactaaaagtattgaacttataattcgatctgcatttctttctcaaagagcatctaaggtaatcatagttgcaccattgaggtctctttgtaatgagataaccaatgatatgatagatgcctttggtgatgatgttaaagtaaatcaattttcagatgttttacaggaagattatgaaattttatctgatgatttatttgagtcatcaatgaatgaaataattataagtacaccagaaaaattaaggttcgtattatgccatgatgatgaaattctagacagtatggatttgttcatttttgacgaagctcatatgtttgatgataatgttagaggtgtgagttatgaatttctaatgatggaaattagaaagaggcttaataatgacaatcaattgattctattatctgctgttttatcaaactctaatgaaataaaggaatggttattaggaaatgatggaatagtagcatctaatagcgaaattaagtcaacaccaaaatccataggattctcatcaaaagataaaacaacatattactattcggaaactcctaatgaatatgattattatatacctaaaagcataagtgttgaaccattgactttattacctagagaaagaaagccgcgtttcttccctgagttagataacccaacagatgtggcaatttatcatgctattcgattatgcaaaaatggaggagttgcaatatatgtaaatacaacaagatctgtaagatctgttttgaaaaaatttatttgtatagaacagcgcggttatgatatttctaatattcagcaggttacagatagtgaagaatcaattaaactacaaaaactaatgaaaatatattatggcgaagatcatgaattttataaatgtgctaagtatggtgttttcccacattattcgaatttacccaatggtattaaattatgcatagagtatgcaattcgtaataaacttattagttgcttggtttgcacaactacattagcacaaggagttaatttaccaattaaatatttattcctgactagtgtacgtaccagtcaagtcactatgcaagcaagaaactttcaaaatttaataggtaggacagcaagagcaggcatgtatactgaaggaagcattatatttacagataccaaattatatgataaaaaagatgataataaacagggtggtaattataaatggtcggaatgttttgatttatttgaggcatcgaattctgaaccttgtaatagttctatcttaagattagtaggaaatataaatgcaaattatcagcaacaccttaaaggtaagaattttgtagagtatatatgtgataattatctctttgataattatatggaaaaaattgaaatggaaattaaggagagtgctacaaaaaaagagattaagcttatgaacttctttttttctgaattagctttaagaaaagaactgcttgaatcccttgaaagttggctaatctatgcttttatagctgacgataattttaatgataattattatgaaaaagcaagacaattagcagttgatactttggcatatcatttagctacagaagaggaacgtaaattattattatctgtttttgaaatagttactactaaaataatagaaaatttaaatgaaactgaattaaaactggctaccaaaacaaatttatccgtagacatgtatgttagaattaataaatggatagaagaaaatgaattgttgtcaaatgctatttccgaagacgatttgattattctaatttgcaatttcttatacaaaatcaaagatattaatatttctattgagcaatttattgaagtggttgaaagttgggttaatggtaagtcattttattatatcaatggagaaactaatatttctatagatattctagaaacattatgcaattctaaaatttcatatgatatgagttttcttattgggaatattattgatgttttgtgtgaaaaggaagacagtgatgatataatagaaatattaacacaattacagaagaaaattaagtatggtgttaattcacaatctgcaatatcaatttgcgaaattatatttaatgacagacttatttccttaaaaatagttgaaatattaaatgatattaatataaaaaagataaaataa

SEQ ID NO: 58236 - DNA, 795 bp, Clostridium sp. 7_3_54FAA
atggagtacattaatgggtatcgagaagagcaaagtttgctgacaaaagatggaaaggaaatacaggttcgttgccttgaggtatcggagaatgatgcagtgcttgatgagtgggctgctcattttcgggaacagtatcgttacctagatgctctggatatggaaagagaaggaacggggttaagcagggaagaattcttaagagattatgttttcccgggacaagcaaagccgggtcccgcaactcgtgtgggagatttttgtgagattcttgtggcagattatatcgaatatattcagagttattatgtaccaagaatccgataccgtagtaaatttaatcggaacacatcaccacaaggcagtgatgtgttagggtttaaattaggaacaacaccatcgccaagagatgaagcgattataattgaagtgaaaggcacgtctgatccaaaaggaaagaaagaagggtatgaaaggttgcaggaggctattgatcattccaataaagatgtggctagatatgctgaatctttaaatgcagctaaaatgagattaatagaaataaatagaccagaggaagcatctattgtggctcgttttcaaaatatgacggatagaccctatgtaataaaatatggagcatccgccgttcttacaaatcaaaaatataatgccatagatatgaacaaagtaacaacggttgggcatagggaaacagtggaactgcttgtgatacatacgcaggatttaaaagggttaatcaacgagttatataggagggcggctttatgctga

SEQ ID NO: 58237 - DNA, 3147 bp, Clostridium sp. 7_3_54FAA
atgctgatagaaaatagatcccaatatctgttgaaaaaggttcgtgctaaggcaaagatgtatgaataccatataccttctgagttacatgggaagacggaaagtgatgcaaattacctgctaattcttgcaattgcgacaattggagatttttcaaatgatgtcattgaaagttaccaaaccaaggaaatcgattataccgagcacaagaaaaatcttcaatttgcttctgtattttttgatgcttatcttgaagcaaaaatgtacgagggagatcaaaaatactatcttttgttgggagcagtggtttattatttgtgtgactataacggaagttctaaagtccttgcagataaaattagtgatgatattaatcttgaggcaaatggaattgactttgtactatcacagatattacagggaaaactttgtatagagtgcttttctgaaatgttgtatctgaatgagattgtgaatgcttataatgaattttggtctacaggtatagtttttgattataaaaagctgtggcaacttaaaaagtttatttacaggtatggtacagatagggaacttttatttacagatgcattaattgcaactatatttttgaaaatagaacactcatcttatcatttaatgcctatttatacacagactgattcagatgtctggggagatattttgagaaagaaaacactgatatcagaattatggcagtctcagagacaattgggtgaggctggtgtattctctggaaagtcagcaactattcagatgcctacaagttctggaaaaacaaagtcagttgcactgattatattatctgcattcctaaggaaaaactcaagttatgctcttgtagtggcaccctttcgctctctatgtcgtgaaataacagatgagctacaaaaagcattttcttacactagcaaaatacatgtcaatgaaatttcggatgtaatgcaaatggacatgctggatataatacttggtaatgtaccagaaacagaagaaaagtatgtttatgttgttactccagaaaaattattgtttgtcttgcggcaggagcttatgtttctatcgaacattgacttgattatttttgatgagggacatttatttgatgatagtaatcgtggaataacttatgaactcttgatttctacaatcaagtcatacatgaaggataaagtgcaaaaaattctgatttctgcggtcattccaaatgcagagcaggtaaatggatggctgacagatgaacggggggttgtaataaaaaataatattattcagaccaccgagaaggttgtagcaatggcagatatgaaaagaaatgctacatctggagaacgttatgcgaatctttattttgtaaatccggctgaaccagataaagaagatttttttgttccaaaagtaattaagcagactatgctttttttacgtccaagagaaagaaaagtgagagttttcccagaggtaaatgataataaatataaaaacgatgtggcaatagcatttggaataaaactttgtcccaatggatcaattgctattttttgcggaaaaaaagatactgcggaaaaaatattaaatcgtatactggaaataaaggaaagagggattgatgtttcaaatcttttagagagtgcagataaggcagaaatagataagttatgttacctgattgacaagggcttaggaaatgataatgactactataaggcagctaaggtaggggcatttgtacatcacggaggtatacctatgggaattcgatgtgcagtagaatatgcaatgcagactggaaaaattagttttcttgcatgtacctcaacattggcacaaggggtaaatcttcctattcgttatcttattgtttctaatatttatcagggaaaagaccgcattcgggtacgagattttcaaaatctgataggaagagctggaagggcaggtatctatacagagggaacgattattctgtcagagacaaatgtgtataataccagaaataatccgtatcataactggagatggaataactacaaacggattttagacagtgatcaggccgaagcgtgtactagtacgttatttgcgtggctgcgtgcagacgagggaatggaagtatatttagagaagatgatagaaatattcatggagagttatgcaaatggggatttcaatgaaaagatggagcaatacctgaaggaacaacaatttgaggaggaaaatcataaaaaggcagaattcatgatgtatcagatgaaacaaaatatcgaagcaattgaaagcttcttgctgttctatctgatggaggatacctatgaagaatcgcgtgaagacatccacaatattatgaaggaaacacttgcattttatcttgctggcaacaaagagcggattcggcttttacggatcgtggatttaattggagaatttctagtacatgcagtggatactgtagataaaagaagcagatacagcaagtcgcttctgggagtaagaaaagaaattgaaattgaacagtgggtttcatcaaattattcgataattctggaggctgaaaatgaggaaagtataatgcaagtggtttttcctttgttactcagaacagaaaatcagatagtaagaaattgtattaatagtgaattgctgaatgggcttgcagaagagtggattgcaggaaagacatattcagatttgacagaatacgttacagaacatagaataatggtatataaacgtaaacaccccaaaatcatgtctctgcaagatgttattactttttgtgataacttccttggatatgattgcacgctcatacttgctgctgttatagaaaatgtgatgtatttaggaggtgacaataagataaataatattttaaaaatgctatctaaaagaatgagatacggattagctggacaaacaaatattcttttatatgagatgggatttaatgatcggggtatcgctatgaaagtgggtaacatgttggaggaagtttaccagcctggtaacagaaaggaactgattaggttgataagaaaaaataaggaactgaatgaaaagatccgattggaattggaaaagtatccaagttacttctgtgataaatgggaagaactgcatagatga

SEQ ID NO: 58238 - DNA, 807 bp, Lachnospiraceae bacterium 8_1_57FAA; identical to SEQ ID NO: 58232

SEQ ID NO: 58239 - DNA, 3051 bp, Lachnospiraceae bacterium 8_1_57FAA; identical to SEQ ID NO: 58233

SEQ ID NO: 58240 - DNA, 849 bp, Bilophila sp. 4_1_30
atgccttggacttcggaacatactaaatggctagtcgacaccggcgaacgaatgaagaccgccgacggcaaggaggtcgaggtctgggagttccatcataagaatgacgaggcagtgctctcggcctgggctaagcacttccggaatcattactgcctggataccgaaattgatttcctccgaggcaaacgtccgcgatcggattatctgaccaatatcaagttcccttgcagaacatccaaacttggtcctggaatcagagctggagattttggagaaattctagtttccgattatctgcaatggattctcggttactgggtacctagaatacgatggtcatcaaaggttgttcgagatgaatcccccaagggtagcgatgtcattggattcagatttcacaaaaaagacggtgaagtctccaccaaggacgtgttagttgtctttgaggcaaagacaaaattctccggctctaagatcaatcgcctgcaagatgcaattaacgactctgccaaagatcatattcgaatcgatgaatcgctgaacttcatcaagcaaaagctctttgaaaaaaaggaaatcgaacaggctcaaaggatcgagagatttcaaagtcctgtagatattccctacaaggagatctatggtgctgcagctatcatttcagacgaatgtttcgacgccgaagaattggcttcggcagactgccgcaaaatcaccaattcttcaacatcacaggaaattttccctcatcctaatggcgatagtcttgttctcttggttatcaagggacccagcatgatggcactcgtccacgaactctacaggagggctgcagatgaggcctga

SEQ ID NO: 58241 - DNA, 3120 bp, Bilophila sp. 4_1_30
atgaggcctgaacagaaatctcaactcctgctgggcgtcacacgggcaaagtccaagatgcttgagtacagcgtccctcgagactatcacatcaaaatcacccaagatccggccaaactgttcactatctcgattgctttgctgggcgaccttgccgctgctatcaaccggaacgagccagatcccgattccctctcggagatgagaaccagtctgctgttttccgctcgctttttcgactcctatctccagtcaaagctgaacgaaatacttgatccatacctcgtacttctaggctccgcctcctattacctttgcgatcttcctggtagcgcttcggtattggcgaaacgtatcgatggcgactgcagggatttgggtggcaatggtttggaaaacttgttactctggttgctgcaggccaatctgggagcctcttttgatggatctgaggggccattcggcggatttattgatgggatttcaaattggcttctccagttttttaaggatgggaatggcgaaaaaaatcttctcgatttgaccacgaagctgcggaacgccgtctatgaattcggtacgcccaggcagcttctgtttggtgatgtgatcgcggccgttctgaggaaaaagctggaaaactccacatggaaggccttgccatcatactctggactaccccgagacaaatggctccacgcgctgcaaaaggattcgttcatcaaggaactctggcctgcacaacaccttttaggccaggcgaatgttctcaaaggcgagtctgccatcgttcaaatgcccaccagcgcgggtaaaacgaaggcaacggagctgatccttcgaagcgcgttcctggctgagcgagtgtcactcgccatcatcatcgccccgtttagggctctgtgccatgagatcaagaacagtctcgtcgaggcattccacaacgaacccatcaaggtggatgagttatccgatgccctacagaccgacttcgagattgccgaactcgtggagcaccaacaaatcctggtcgtaacccccgagaagctgctttacgtccttcggcacactccagaactggctgcccacgttggcctgctggtctttgatgaaggccaccaattcgacagtggcacacggggcatcacatacgagctgctcctgacatcgctgcgctccatgattcccgaaggaacccagaaggtgttaatttcagcggtcatcagcaacgccgaggctgttggagaatggctgaacggtgagcccaatgtcgtcgaaggaactaccctgattccgactttcaggtcggtcgggttcgcgagctggcttgatcaattgggaaggatcgagtacgtcgacagccgtgacgccgaacaaggtgagtttttcgttccgagggtgattgaaagatttaatctcggaaagaagaagcgggaaaggactgaccgttttttccctgaaaagacggacgggcaggctatcgcactttacctcggtctgaaattggttccgaatggcagtatcgctgttttctgcggaaaaaagtccacagcggccagcgtctgcgagaaggccgtcgacattattgagcgtggcgcacccctagccctgccgtcagatttttcagacgcccaggaagttgcgcggctgacacatttgcatgtcaaaaatcttggcgctggcgccccagcgtccaagagtgcagcacaaggaattttttcccatcatggcaatacaccgcatggtattcgactggcggtggagcatgccatgcgtgacgaccttgtacgatttgttgtttgtacatccactttggcgcagggcgtaaatcttccaattcgatacctcatcgtgaccagtatctaccagggcacgaagcgcataaaggttcgtgatttccataatctcattggccgagcgggccgagccgggatgcataccgaaggtagtatcctgtttgccgatccggtgatctttgacaagcggaaggcccgaaacgacaaatggcgctgggaccaggtgaaagagcttctggaaccgcgcaattctgagccatgtatcagcaatcttctatcgatcttcgatcccattaagagcgatgacgaaaaatacaccatcaccatggaggcactggattttgccaatgcctatatcgacgcgcctgatcaaattgccgatctggctgcgaggatagccgcacgacatggagacaaaggtttctctcgagacggtgtcgagcggcaaatcgcctggagaatcagcttaatctgtgcagtcgagagctttctgctatctcattgggatgaatctgaagatggtctttcggaagctgatgtgaccagcctggccgatggaacgctagctttcttcctggctgatgatcagaaaaaggagtatctccgcgcgttgtttcagcttctcgctgggaatatctctgcaaacatcacagatccggctcgccgtaaaatctatggccggacgctttacggcattcaagatgcccaagccatcgagggatgggtccaaaccaacgccgacagtctgctttcgattgttgatgaaactgacgcactcgatcttacatggccattacttattcggcatatcaacagtggcgtattcaccaagttcgataagccggagatgctaaaagaaaccgcgcatgggtggatcagtggaaaacccttcagcgaactcctgaaaattatccgtaagcgaaaagccaagatgatatggggtacccgccggagggagttcaaaattgatcatgtcgtcgatgtctgcgaaggggcgctcgcttatgacggagcgcttgttgtaggcgctgtgtgtgaattcattgaaaccatcgaccaagatggcactggagacctgctcaatcgtttgcagctttttcaaaaacgcctgaaatatggtctgccgaccgaaaccaccattgccctttacgaacttggcttttcggaccgcgtcattgctcaggaccttgcatcatccttgagcctggatgcgacacagaagaaggatctcgtgaaggctctgaaaaaagatcaggacggagctagggcgataataaagaaatacccaagctatttccaaaagagaatgaatgaactcctgtag

SEQ ID NO: 58242 - DNA, 783 bp, Serpens flexibilis
gtggggctgtataagaagtggtgcaagtccaccaaaaaaaaggacaagcgcaagcattactggacctatgtcgagaaggatggtggccgcgacgagatccgcgatgacctcgccgagaccatccgctctcactacgatcgactcgaactcatcgccgaagatgtgaagcgactgggatacaaggtcgccagtgaaatcctcagcgccgaaatgcctcaaacggccaagggccgctccggcgatctcggcgagattctcgcgaccgagcttgttgaggaagagatcggccttcgcgtccccgtgcgtcgccttcgctacaaagacggccgcaacatggccatgcgcggcgatgacttcatcggcgccggatacgatggggccggcgagaagctctggcttctgaaaggcgaagccaagagcaacaaggtactcggcaaggccacggtcacgagcgcccgcaaggtacttaaccgcgacaacggccgttgcacgcccgactctctgctgttcgtcgccaaccgcctgctggagagcaacgaccctgacgacaacgtactgggtcgcagcctgcgcgacgaggtcggcctgaagtcgctgcgcgccgatcgcatcgaccacatgctcttcacagtttcgggcaacggcccccacgcctcgctgaaggaggacctcgacgccactgggaccaatcgggaccattacgtcgtgaacatccacgtcgaagaccaccaagacttcatcgcggctatgtacctggaggcagaagaccttggagacgattga

SEQ ID NO: 58243 - DNA, 2151 bp, Serpens flexibilis
ttggagacgattgacgaactgaccgcgttcctgacgaccgcgaccgtcgacggcatccttgggcgcctcctctatcgcggcgcggcttggtcgctcatgcgcgacgagggcgtgctgccgccgaacgcaccgccccttggtgcgacaattgaaaccgatctcgccgaacacggcttcgccctgctccgaggcgcgatggccctgcgcgctcaggctggcgcttcggagctgaccagcaaggccttcgagcgcgccgccaacgcatttgaagccctagtgcgcaacggtgaccccgaggcgcctgaacgcgggttccgccgcaccatcgccgccgctgcctaccatctggccggcttctcggctgtcgcctattcgctcttcaatgagacggcggacgacctcaacacctcgccgggcgaaacggcgatccgccatctgattctgcgagatctcgaccagttgcgcggcttcgctcgcgaatggctcggcgacgcggctcatggcggcgagcagatcgccgaggcgctacggggcgaagaccccgacgtcgacgaggtgctgtcgaccatcctcaacacgacgatctgccgggccctggcgtttttcgacttcgcgcttgagacgggcgaacccgagccgattgaaagcgcacgtgccttgctcgccacggcagtcagcctggcaggcaacgccgagaatgttccgctgtggtggatatcgaacctctgccatcacctgatcgacgacctgtggcagcactcgttgcaccagaacctgccgaccgagccccccgagggtacagaggaaaaatatccagacctgcggcggctgttcatctcctcgctctatgcccgcaagacctcggaggtggagctatggccctcgcagcgcgaagccgcccagcgctccacggacgtcatggacgacttggtcgtcgccctgcccaccagcgcgggcaagacgcgggtagccgagatcgcaacgctgatgaccctgtcctcggcgcgccgggtgctgatcgtcacgccgctgcgcgccttgtccgctcagaccgagaggtccttcaggaagaccttcgcgcccctcggcttcagcgtctcctcgctctacggcgccagcggcctttcggccggtgatgaagacgccctgcgtacccgcgagatcatcattgcgacgcccgaaaaactcgacttcgcgctgagaagtgacccgtcgctgatcgacgatgtaggcctgatcgtcctcgacgagggccacatgatcggtccgagtgagcgcgaaatccgctacgagacgctcgtgcagcgcctgcttcggcgcgcggacgcggccgaacgccggatcgtctgtctttccgcgatcctgccgagcggcgacgaactcgacgacctcaccgcctggattcgttccgacgaaccgggtgagccggtgcgttccgactggcgtcccacgcgccagcgcttcggcgcactctcctggcgtggcaaagacgcgttgctgcggcttgaccttgatgacgatggtcccttcctcgacaagttcgtcgtggagaaaccagcgcgcgggagggagaacaagccctatccacgcaagaactcgcacctcgctttgttcgcggcgtgggagtttgcgagccagggcaagcgcaccttgatcttctccacccaggcgaactgggtcgagagctacggcaaacaggtcgtggacctctgcaagcgcggctatctggactcgctgctagatgacgaggcgtcgatcgcccgcgccctggaggtcggcaaggaatggctgggcgaggatcatcccgccgtggccagcttgaagacgggcgtcgccatccaccatggccggctgccgagcccgttcctgcgtgagctggaaattctcctgtctgagggcgtgctgaaggtgatcgtcgcctcacccacgctttcgcagggcctcaacctcaacgccgccgtcctgctggtgcccgcgctctatcgggcgggcgagaagatcaaaggcgaggagttcgccaacgtcgccggccgcgcggggcgcgccttcgtcgacgtcgaagggctgatcgtccatgtcatgttcgaccggatcgactggcgaaagcgcgaatggcgcaggctggtcgcctccgctaagcccgaaccttga

SEQ ID NO: 58244 - DNA, 837 bp, Selenomonas sp. oral taxon 478
atgtgttattcgtcacatcatatcaagtggcttgttgatacgggcgaacgattatcaacagtggatgagaaggaaattgaaatatgggaatttaagcatgaagatgacgatgtaattttatccgcatgggcaacgcattttcgcaatcactactgtttggatacagagattgagacgcgcagggggaaagagacacgttccgagttcttgcgcaacgcctgttttccaagtgaaacagaatcattcggatcggccatacgagctggtgattttggggaaatactggttgctgattatttagcgtatcgacttggatatcatgtgccacgtgtcaggtggatgttaaagccaactccgaatgaatcaacgaaaggaagcgatgtcataggttttcaattcgcagatgatacaggttgttctcctaatgatgaactgttcatcatagaagttaaaacgaggttttctcaaagtggaggaaatagtctacaaaatgcaattgatgattcatcgaaagatgatattcgtcttgcagagtctttgaatcttattcgacaaaaatcgattgatcataaacatattgatgatgcaaatcaggtgattcgctttcaaaatcctgtggatcaagaatatcaaataaagtatggagcatcatttcttgttgacattgagtattttgataaggcaaatataccatcatcaaattgcgaacgaattcgtacatcgaaagggatcatatcacatcctcatcgtgacagcttggcacttttagtcattcgtggtgataatatgatgaaattggttcatgaactatataggagagctgcagatgaggcctga

SEQ ID NO: 58245 - DNA, 3120 bp, Selenomonas sp. oral taxon 478
atgaggcctgaacagaaatctgtgggactacttggtgtcacacgttccaaaggaaaaatgtatgagtatgggttgcctgaaaagcagcatatcaacataaacgaggatcccacaagacttttccatatttccattgcgctcctgggtgagctggccgctgcaatcaatcggggtgctgaatctcctttttcagaatctgaattaaagaagaacttaattttctctgcatatttttttgatgcgtatctccagtcaaaactcaacagtgcatatgatgcatatgtacttcttcttggtgctgcttcctattatttatgtgaccttcccggaagttcttctgtattaactcaaaagctacagaatggagagatcaatcttgatgcaggaggattggagaatctattactttttttactgggtggggattggcagatagatattgatgaaaatagtacatacggagagcgtattgcggcagtaataagaggagttcgccaattttttcagaatggaacgggagaaaaaaagctccttgaatttgctgtgaacctccgtcgtgaggtatatgagagtgggacgccgcgccagcttctgtttgctgatgtagcgatagctgtattgcaaagtaaaattgaacgctctacatggaaaacattaccggcatattccggcttaactcttgatacatggcgctctatacttcagaaagattcctttattaaggaactctggccggcacaacaccttttggggaaaaagggtgtactgcaaggggcatcggctgtggttcaaatgccgaccagtgcagggaagacaaaatctacagaactgatccttcgcagtgcttttttggcaaatcgcatttcgttggctgttatcattgctccatttcgggcattgtgcaatgagatcagcggcagtctcactgctgcatttgacggagaagcaataactgtaaatgagctatccgatgtattacagattgactatgataataatgatgtcacggcaaagaaaacaatcatggttgcaacaccggaaaagatgctctatattctccgacatgagccggcattagcgcagcagattggcttgctgatttttgacgaaggtcatttatttgatgacgagacgcgtggagctacctatgaattgcttttgacagagctcttatcacttacatcgaaagatacgcaaaaagttttgatttcagctgtgctgaacaatgccgaaaccataggtgaatggctgaatggagaagcgaatgttgtcgaaggtgcgaatctttttccaacctccaaatctgttggttatgtgagttggattggtacgttgggacaaattcaatattttggtaatcatcgttttggtcaatacgattattttgttccgctagttatttgtcaagtatcgcttaataaaaaagaacgagagcgtaaggagcaattatttcccgatcaaaaggataatgcaagtgacgttgcactatatctcgggttgaagcttgtttcaagcggagcagttgcggtattttctgggagaaaggactcgatatataagctgtgcgatcgattcattgatattattgagcggggattctctctgccgtctggaatctcagaggagtcagagactgtggaagtgcagcgattggaacgactccatcgggaaaatctaggttccgacgcaccggcggtaaaatgcgcaaaatatggtatttttacacatcatggaaatatgccgcacgggatacgttcagcgattgaatatgctatgcagcataatatgatccgttttgtaatttgcacctcgacactggcacagggggttaatttgcccatacgctatctcattgcagcaaacatgcatcaaggaaaggagatcatgcgaaaacccgatttcctaaatctgattgggcgtgtggggcgggcgggtatgcacacagagggcagtattatctttgcaaatccgcaaatttacgatggcagaaggaataggcatcaaaaatggagatgggaagaagtacaaactcttttgcgtgaaggaagttcggagccttgttcgagtaatatcatgatgctattttcccctatcgtgagccaggatcaaaaatatgagttatcgacgtacggacttgattttgttcaacgatatattgatgcagaaagtcaagatgcttttgtcgatgaaacgcttctgccttatagcaatatcgaaaactttcccgttagcgatatgaaatatctgctgttgaagcggattggtatcctgcatgtattggagagctttcttctatcacattcatataatatggaaaagggtgcgggtgaggaggatgtgcttcgtcttgtagagggaactttggtctactttttggcggatgatgaggagaaggaaaatattcgaaaggtgtttcagctgctttttcgtaatatagtgaaagaagttcctcagcctgagcgccgtgctgtctatgggaaaagtctttttggtctgagagaggtgcagcaaattgagcagtgggtgcagctgcatgaaaaagacttgcgtgccgcagagcagtcatcggaaatactggatatactgtggtcgctgttttcgcagtatatccatgcgaacgaatttaagacgtttgatccgtcgaatttgttgaaagaggtcgggcagagatggattcaaggtggttcttttggtacgatcttgtctttcgtccagaaatacgatgtccgtattggcaggcgtaagattacaatcaatcacgtagttggactttgtgaaaatatattatcctatgaggggatgcttattgtcagtgctgtctgtgaatttctagaaatgatgaacccaacgcaaaataatgaggctattcaacgtatgcggctatttcagaagcaattaaaatatggtctgccaaagcagaccatgattgtactctatgaacttggtttctcagatcgggtgattacacaacatatcgtagaagagcttcagttgactggtatcacgaagcatgccctcatgcgagaactgaaagagaagagtaaaagtgctacagatctgatgaataaatatccacactatttccaagaacagctgaaacagcatctggagatggtataa

SEQ ID NO: 58246 - DNA, 819 bp, Amantichitinum ursilacus
atgacgtcgatacccaaacactgctcattactggttaagcaacaggaaaatcttaagacttcggatggaaaagatatagagatatggtgtctcgagcagcctgttgaccctcttttgttgacggagtgggcaagacactttagagagcactattgcctcgatgatgaaatagacgtaatgagggatgggaccgggcttagtcggcgtgactatcttttagagctagttttcccggacgcaaagaaatcgccaggcccgtcaattaggtctggagattttgcagaaattttagttgctgattatttagagtatttctgccaaatgtgggtaccccgctttagatatagaaacaaatcatctccgaatgaatctgtaaagggcgcggatgtattagcatttaagatcaacgctgagcacacgcaagaaatcgacagattattagtgtacgaagttaaagcacaattgagcagcactaaatataatgcgcggcttcaaacagcgatagatgactcgtcgaaggattgcatccgcatgggctatacgctaaatgcaacaaaacaaagattaaaagacatgaaagactatgcaggggtcgccaaggtggctcgttttcaaaacaaaacagaccacccctatgtcttagaatcaggcgctgtagcactattgtcgggcatttcatattgccctgaagaaatccaaaaagctacacaaacgggtgagcacgaaaatcaagctaacttatccctaatagttattcgcgggacagaacttatgcagctcgttcattcactttatgagttggcagcaaatgaagcatag

SEQ ID NO: 58247 - DNA, 3165 bp, Amantichitinum ursilacus
atgaagcatagtcaagccagccaagatctatatgggattacccgctcaacggggaaaaagcaagagcttggtattcaagacccggaaaaattgaaggcaccagctgaaacgaaacccgaggagctgttcattttaacaatcgggacgctgggcgattgtgccaactggatatgtaataatctagagcaaggaaaagggcttgaagagaagaacttaagtgagttgcagttttcagctcgcttctttgatgcttatttagcctcaaactataatccattaattagccacgaagtttcgttgcttgcatctgcagcttattatttggctagtcgacctggcagcagcctggtcttggctcgtagattaagtggtcatgtttttgattcaccgcttgaaaattttctactttggattttgacttccaattgggcttcggtgtccaattacctagaaggtgaatacagcgaatatttaaaagaaatctcattatgcgtcgcgaagcatttttttttcggggaaaatagcagcgacgccttagaggctctgcacgagctaaagagctatatttaccaatttggttctgctaaggaaatttttctaatagatgtttgcttggcaataacttatatgcgcctgcaatattcctcgtggaataacctcgaagatttcacagatttagccatagatgcttggcgcccaatcataggggagagtgggttcccaacggaactttggccatctcagatgatgcttggacaggcgggtatattcagagggagctcaggtatcgtacagatgccgaccagtgcgggtaaaacgcgctctattgagatcattatacgtagtgctcttttggctaacagaacaaagctggttgtagttgtggcgcctttcaaggcgctatgccatgaaattacccatagtttacgtaccgcatttttgcgcgatcaaatttctgttaatgatgttaatgatgtgttccaaatggattatatggaggacatttcggattggcttcaggatgaatcagtagaagttgagggcatcgctaattccaacatattggtacttacgccggaaaagtttctttacatcttgcgccagtcgccaaaaattgtggacagtgtcgggctggtcatctatgacgaggggcaccaatttgataccggaaagcgtggtgttacgtatgagctcttgttaactgaaatatccagtattttaccaatttcagcacaaactgttttgatttccgcagtaatagaaaacgccgaagacattttgaattggcttattggtgaaggtgggaaaattgttaggggaaacggtttactgcctacatctcgctcgattgcatttgcaagatgggcagaagaggctggtgaattgttgttctacgagggagacaggttctcctcccccgattatagcttggagcagattattgagccccataggttgacgcgcggaaagggtgaaaaaaaagacaggcaatttcctgaaaaagccactcctattgatataggcttattcttgggtatccgtctcgttggtcatggggcagttgcaattttttgcggaaggccagaaacagcagaaaaaatccttaatcgcgctgttgaggtttattcgcgcggtctgacccttgacgccccggcgagcgcatcggacagctcagaaatatctcgcctatgtcatcttatttcgggacatttcggggaaggctccgacatctataaagcagcccgcctaggtttctttagtcatcatggcaataccccacaaggcatacgcctgtccgtagaacatgcaatgcagcgcggctatatacagtatgtggtatgtacgtcaactttagctcaaggggtaaatctacctatcaggtacttaattgtttctgggctttatcaagcaggggaaaaaattaaaccccgcgactttcaaaatctgatgggccgggcaggccgtgcaggaatgcatacagagggtcttgtaattttttcagatccggatgttcatgagtccagatatgaaaaatatcaaagatggcgtttcttaaccgcccttgagcttttgaattccgactcaaaagatacaacgggaagctcgatactatcaattgttcagccgcttaaaattaggggcgggcttcttatccctatcaatccagtagagctgattgacgttatcctatatgagcggaataggtggagggaatgggtagatcagctgatctctcggttacccataaaaaataaaaattttaataccaaaaatctgctaggcatcttgtcccatagaaggaatctcatatcggcgcttgagagctacatgatggcaaatcgtggggacggttccttcgaggaattccaaggagatattgccgaattagcagcacggtcattggcgtattccattgcctcggaagaagagagggtcggcatagtaggcctcttctttgctgttgcaaaatatatcgagaataaagagccagacaccggtcgacagcgtctattttccaaaacgcttatgccaattgtggatattttacaagtcgaggcatggttaaattctaattgggatatattgttgaattgccatgattctgctactttcctcgaatgtttatggcctatttttgtttcatttggtaataataaattaatctccaattccaactctggtccattcttttttgatgttgccaagatgtgggtttctggagaaccttataaaaaaatattccagctggccaaaaatgttcgaccaacgaagccatggggcgaacatggcacgagacaggtgacggaacacgatatcattgagttttgcgaaggaacacttggttttgattgtccccttgtgttggctgccgttaccgagctgctgtttggggagaattcatcggatttggagacggcgaaaccgatactcttttttcacaaagcactcaaatacggactgccagatccgctatcgatttcttgctttgaaaggggtttttccgaccgcgtcttggcccaagatttaactatggctctaagagaaaacggctacgctctagatttccttatatcgcctctcggtaagtatgaggaacttataactcagcttttatccaaataccctcgctattttcagaacctcctgctcgcgatgaattcataa

SEQ ID NO: 58248 - DNA, 783 bp, Celeribacter baekdonensis B30
gtgagcctgtatgagaggtggtgcgacgccacgagagaaaaagacaaacgcaagtactactggacctatgtcgagaagcatggtggccgcgatgaaatccagggggacttggctgaaacgatccgttcgcattacgaccgactggaacgcattgcggaggacgtggaccggctcggatacaaggtcgccgccgagatcctcagcgaggcgatacctcagacgtccaagggtcgttcgggcgatctcggcgaaattctcgcgactgagctcgtcgaggaggagattggcctgcgtgtccctgtgcgccgtctccgctacaaggacgggcgcaacatggccatgcgcggagatgatttcatcggggccgggtatgacagtaaaggcgagaagctctggctcctgaaaggcgaagccaaaagcaacaaggtgctcggtaaggccacggtgacgagcgcacgcaaggtactcaaccgcgacagcggtcggtgtacgccggactcgctgctgttcgttgcaaaccgcctgctggaaagcaacgacccggacgacaacgcgttgggtcgcagccttcgcgacgaggtgggcctgaagtctctccgggcggatcgcatcgatcacatgcttttcactgtatcgggcaacggcccgcacgcttcgttgaaacaggatctcgaggcgaccggcgccaatcgcgaccagtatgtcgtgaacatccacgtcgaagaccaccaggacttcatcgcagccatgtatcaggaggcggaagatcttggagacgattga

SEQ ID NO: 58249 - DNA, 3501 bp, Celeribacter baekdonensis B30
ttggagacgattgacgagctgacagctttcctgacggacgcgaccgtcgatggcatcctcggacgcctcctgtatcgcggcgcggcatggtcgctgatgcgcgaaaacggtgtactgccgccgaatgcgccgccgctcggcgcgacgatcgaaacggatcttgcggaacacggctttgctttgcttaggggcgcaatggccctgcgtgctcaggccggcacctcggacctgaccagcaaggcgttcgagcgctccgccaatgccttcgaagctcttgttcgcaatggtgatccggaatcgcctgatcgaggcttccgccgcaccatcgctgccgcagcctatcatctcgccggattttcagccgttgcctattcgctcttcaacgagaccgcgggcgatctcaacacctcacccggcgaaacagcgatccaacatctgatcctgcgcgatctcggccaattgcgcggcttcgttcgcgagtggctggacaacgatgatcacaaggatgagcagatcgcggaggttctgcggggtgaagagcccgatgtcgatgaggctctgtcgaccatcctcaacacgacgatctgccgggcgctggcgtattttgatttcgcgcttgagacgggcgaaaccgagccgatcgagacagccagggcaatactcgacgccgcggtcagccttgcagacaatgcggagaatgtccccctgtggtggatctcgaacctctgtcgtcaccttatcgatgacctgtggcagcattccctgcacgaaaatctgccgaccgagccaccggaaggaacggaggaaaaatacccggacctgcgcaggctattcatctcatcgctctatgctcgcaaaacttccgaggtggagttgtggccatcgcagcgcgaagcagcccggcgctccaccgacgtcacggacgatctggttgtcgccttaccaaccagcgcaggtaaaacgcgagtggccgagattgccgctttgatgaccctgtcgtcggcgcgccgggtactgattgtcacgccgctgcgcgcgctgtccgcacaaaccgagcgatccttcagaagaaccttcgcgcccctcggcttcagcgtctcctcactttatggcgccagcggcctttcggcaggcgatgaagacgcattgcgcactcgcgaaatcatcatcgcgacacctgagaagctcgacttcgcactgcgaagcgacccatctctgatagacgatgtcggtctcatcgtcctcgacgaaggccacatgattggtccgagcgagcgtgaaatccgttatgagacgctggtccaacgcctgcttcggcgctcggacgcggagagccgtaggattgtctgtttgtccgccattctgcccagtggcgaagagctagacgatctcacggcatggatacgctccgacgaacccggcgcgccggtgctctcagactggcgtccgacccgacaacgatttggcacgcttacttggcggggccaagacgcactgcttcgcctcgatctgaatcgcaatggtccgttcatcgataaattcgtcgtgcagagaccggctagaggcaaagaaaaattaccctatccgcgcaagacgtcgcatctcaccttgttcgctgcatgggagttcgccggccaaggtaagaggacgctgatcttttcaacccaagccaattgggtcgaaggcttcggcaaacaagtcgttgacctctgcaagcgtggatatttgggctcgctgctggaggatgaggcaccgattgcccgcgctcttgaggtcggcaaggagtggttgggagaaagccaccccgccgttgccagtctgaaggtaggcgtcgcaatccatcacggtcggcttccgagcccattcctgcgcgaattggaaacgctgctgtccgagggcgtcttgaaggtcatcgttgcatcgccgacgctctcgcaaggcctcaatctcaacgctgcagttatgctggtgccgtatctggtccgcagaggcgagaagatcaaaggcgaggagttcgcaaatgtcgccgggcgagccggccgcgctttcgtggacgtcgaaggcctcatcgttcacgtgatgttcgacaagatcaaatggcgagaaagagagtggcgtgagttggttgcctccgccaaggcccgcacactgaagagcggcctcatccaaatcgtcgcagagatccttgagcgcctggcccgtgaaggcgttctggagcgcgatgacgcatgggaatatctcgccaacgcccgcgaagcctggagatcgcccgcggaggaagccgcagtcgccgagcgcttggcggccggcgcggaatatgacgcagatgacggtgaagatgaaggcggtgatgacgagggggagaccatcgacgaggaaccgctttcgcaaatcgtcgaacgtctcgatgcgactgtcttcggattgatcgaagcgctggactccgaccgggcggatctgccaacgctcttggacgaggcgctcaaagggtcgctctgggcgcgccagatagcccgagaagacgaggacatcgcgccatggcacaagaaggtgttcgaggcgcgcgctgaactcatatggaagtccactacaacggaggcgcggcgtggacatttcgcgatgggtgtcgggctcgaggctgggctcgccattgatgcgatggcagacgaattggccgatctcctcgatcaagctgacgctgccgcgctgagtggagatgtcggcgaacttgtcgacgccctttcaggtctcggggaacgcctgctgtttatgcggccgttcattcccgacaagacgaacgcgctaccggccaactggaaggacatcctgcgccgttgggtgtctggcgacgatgtcgccaatattgggcctcagaatatgcgggctgtcgaagaggccttcacctatcgtttggtctgggccttggaagctgttcgtacccgccgcatgtccctcggctggtctccagaaacagtggtggggggcgccgcagcagcggtcgaaaccggcgttccacaattcatgatgtcgatgctgatccgcgcgggccttccatcacggcgcgcagccatggcggcaatcgaggatgccgagccagccttcgtcacgcccgcggagatgagggcctggctcgaatccgacgagatcacagcttacaccgatgctggtgattggccgacccccgacacggcagcgctatgggcgcggttccgaacggaggccctgagtggcggcattcagaaatggtcggtcgaacactacaagcgcctgctcgacaccgcgaccgccccacctgccggcctctatcggattgtcacagacgatggagatgggcggacctggatggcgacgcctgactatcagcgggtggcggcattcaagaaatcggcacttgatccgaagcccagcctgttctcggggcggctgccgggcaatactaggttggtggaagcgttgcgcgtcggccgtgggaaactgcgctggccacgggccaacacgtag

SEQ ID NO: 58250 - DNA, 447 bp, Pusillimonas sp. T7-7
atggcgatgcgcggcgacgacgtcatcggcatgcttctcgatccggcaacacagcggctctgtttcctgaaaacagaagccaagagccgcatcaacctgcgtgctcaaacgctggaggaggcgcggagcggcctggataaagatggcggccttccctcgtcgcatgcattgtcctttatctcggccagactgatggaactaggcatcgacgcaccgctcgtcgacgccatcgacgaggcgctctatcggcacggtatcccgcccgagagcgtgaaacatctcctcttcacgttctccggaaactccccgcaggcgctgctgacgcaggcgctgcaggcttatcctggtccgattggacaatttggtatcggtctgtacgtcgacggccatgccgcctttgtcggggccgtttacgagcgagtcatagcagatgccaaccacccctga

SEQ ID NO: 58251 - DNA, 3081 bp, Pusillimonas sp. T7-7
atgcgccgggacatcaacgcgctgcgtggacgcgtgtatgccttccgccttgatggccgaggatcggacgcggctattaaggcgctcttccagcagcgcctcaccgaacccgtcgccgtcgatgcgccggaacaagacggaaaggactttcttttcgaaggcctggatctcgcactgacagacgctttcttcggcgccttttcgatgttcctgctcgccctggatcgcggcgaacatgctcttctcgacagggcgatcgcccagcttcgcgagaatctcgacatctgcggggagctgaaccttctgccgcaatggtgggtgcatcggatcgctatccatctgctttccgatctctggtcgaacaccttccacgaaaagatcccgctgcttcccgccggcggcgctgccccttcatggcccagcctccgcgaactcttcatcgccttgctcgctcgacgcccaagggccgaggtcgacctatggccgtcacagaccgaggcggcatcgcgcgctgtcgatcaaaccgacaacctagtcgtttcactgccgaccagtgccgggaagacccgcatcgctgagctgtccatattgagatgtttagccggcgggcggcgcgtcatattcgtgaccccgcttcgcgccttgtcggcgcaaaccgaaaacacgctccagcgcacgttcgggccgcttggcaagaccatttccgccctctacggcagcatcggcgtgtccggcttcgacgaggatgccattcgcgagcgtgacatcgtcgtcgcgacccccgagaagctggatttcgccttgaggagcgatccatcgctgctcgacgatgtgggcctgctcgtgttcgacgaaggccatatgatcgggcctggcgagcgcgaagttcgatatgaggttcagattcagcgcctcttgcgtcgtcaggacgccgatcaacgccgaatcgtctgtctgtcggcaattcttcccgacggcgatcaaatggaagacttctcggcgtggctacggcgagatcaactgggaagtcccatcaagaacgattggcgcccgacgcgcttgcggttcggcgaagtaacctggaacgcgccgacagcgcgcctcaatcttcgcgtcggcgaggagagacccttcgtgccccgatttctcaccggcactgcgccgccgctgttcgtgccgccgaagaggcttcgcactcggctcttcccggacaatcagcaagaattgagccttgctaccgcatggcgcctcgtcagcgacggccagaccgtgctgatctattgtccagagcgtcgcagcgttgaaccgttcgccaaggtcatcgttgacttgcactcgcgcggtgcactcgtatccttgctcacggttgatccagccaccttgcagaccgccgtcgcgctcggtgaagaatggcttgggccggacagcgacatcctgaaatgccttcagcttggtgtggcgcttcatcatggggccttgccgaccgcttatcgcaaggaagtcgagcgccttctgcgtgacggtgtgctcaagatcacgatctcatcgccgaccctggcgcaggggctcaatctttcggcgaccgcagtcgtcatgcactcgctctaccggcacggcgagaagatcaaggtttcggagttcaagaatgtcatcggccgcgcaggccgggcctacgtcgacgtagaaggccttgtcctctatcctatctttgaagatgcgaggaacaggaaacacgacaattgggtcgagctgatccaggacctcggcgcccgcgagatggaaagtgggctcatccagctcatcttctcgctgctgagccgtatgcacgcccgcctcggtggcaatctcgaccagttgatcgactatgtcgtcaacaatgctgcggcgtggaccttccccgaggtcgccggcgaagaggccgacaagcgcgaacgggcgctgaaagagtgggagcgtaatatggcaacgctcgacacagccattctaagtctcatcggcgaggccgacgtgcccgatgatcagatcgaggctgcgctcgacaacatccttcaatcttcgctctggcaacgccgcctacttcgcgtcgacgacgcattgcgcgctgcctatcgcaccacgttacttactcggagccggcatatatggatgaattcgactgccgctacacggcgtggctactttttggccgggcttggccttgaagctggacatgcgctggacgcaattgcgccggaggcgaacgatcttctcatacaagccaacgcagccctcatggcatcggatcatgagtcggcaatcgctgcgatcactggtatcgccgaacgcgtattcgccttctacccgtttgagccagacccactcccggcgaattggcgccaagtcctcagatgttggttgctcgggcagccgttggcagcgatcatcgccggagaggaagctgatgcattgcagtttattgagggtggcctagtttatcgccttccttgggccatggaggccttacgggtccgtgctgccgccaatggcgatgtcgttggcatgtttgcacaggcgttggatgattatgaactcggcctggctgttcaggctgtcgaaacggggacgatgaaccgctccgcttcgattctgatccaagcggggtttaattcacggctggcggccatcaaagctgtcaccgacacggccgccaccttcaggaccggtgcggaattgcgcgactggctgcgttcacccggcctcgcggcctggtcggcgcaaccaaactggccaacggccgagactcgggccatatggctcgcattcatccaggagtttgctccgtcagacaacctgacctgggcgcggcgagattatcttggaaacgtccagtggttcgctgtaccggcgcctcccggaacaccagtcagcctctttcattggaacggacagccgctagtgctggcacccgacgggcacgcgattggtctgctacaacacccactcaacccgaattggcgaggtgttgttcgagcgacggtcgctatgaataacggccagcttgatctgagctatctcggccccgatgatttgtggggaggctag

SEQ ID NO: 58252 - DNA, 780 bp, Paraburkholderia grimmiae
gtggcgcagttcaatgattggtgcatttcggtcgaccagccggtgggcaatcatcaccgtcgagtgatgacgggtcaggccgcaaatcttgcggtcggcattcaggcgacggcggccatcgtgcccgggcactacgcctcggaagaacaagtggcgcgcgcactcgcccggctcggcaagcctgcggccgccgcgctgatcgagagcaagctgccgaccaccaagcagatccggtctggcgatctcggcgagatttacgcgacggagtggatcgacgcccatagcggcggctaccgcgcgccgatcaagcggctgcgctggaaagaccatcgcaacatggcgatgcggggcgacgacgtgatcggcatcctgcaagacccgcagtcgcaacgcctccagttcctcaagacggaggcgaagagtcgctccgccttgacagcgcaggtgctaaccgaagcccgcgcagggctggataaggatggcgggctgccctcggcacacgccctgcacttcatctcggcacgcctgcttgagctcgacaatctgccgctggccgatgcgatcgacgatgcgctcctcaagcacggaatcccgccgcagagcgtccggcatctgcttttcacattctctggcaacgccccggacgcgctcttggccgcctcccttcaggcctatccgggccccatcaatcaatggggtatcgggcttcgcgtggatggtcatggcgcctttatcggcgcggtctacgatcgagtgatcgccgatgccaacaacccctga

SEQ ID NO: 58253 - DNA, 3522 bp, Paraburkholderia grimmiae
atgccaacaacccctgaggccattgccgcggatatcgccgaagcggcaaccgccggctttcgcggccggctgatcgcacgcggacaggcccgcgccatcatctggcgcgatggtgcgcttccggccgacgcaccggcgttcgcgccgcagctcagctacgacctgcatagctacgcctattccctgctcggcctgggccttcgccttcgcgagcttggcggcgatcccacccaggcccgcacggccttcgagcaggccgccaccgcccttgaggcggtgatggccaagggcaatcgccaggagatcgatcgcgatttccatttcgtcatggcggcggccgcctatcatctcgctcacctgtccgcgcgcgcctattccctcctcgccatcgtcgaggcggatgagaatttctctccgatcgagcgcgtgctagctcagttgatgcgtcgcaatttcggcgtcctgcgcagcagcgttctcgactaccgggtctccggccaaggcagcgacgcccggatcgctgccgacatccaggctcggctcgaccaagccgagggcgtggccgcaccgccggaggccggtggcgacgacttcctttttgacggcttggatacggcactcaccgacgccttcatggccgccatgtcgctttacctagtcgcccttgatcgcggcgagcaggcgtttgtcgaacaggcgctggaacggcttcgcgtgagcctcgcgatttgccgcgagatgaacatgctgccccaatggtgggcgcaccgtgtcgcgatccaccttctgtcggatctatggtcgagcaccttccatgaaagggtcccgcttcagcctgcaggcggattggcggccgactggcagcggttgcgcgaactgttcattgcgttgctgcagcgtcgcgcgagagcggagatcgacctctggccgtcgcagaccgaggcagccgcccgcgccgtcgatcagtccgatgacctggtcgtgtcactgccgacgagcgccggcaagacgcgcattgccgaactctgcatcctgcgctgcgttgcgggcggcaagcgggtggtgttcgtcacgccgctacgagcgctttcggcgcagaccgaaaccacgctgcagcgaaccttcggcccgctcggcaagaccatctcggcgctctatggcagcatcggcgtcagcggcttcgacgacgacgcgatccgtgagcgcgacatcgtcgtcgcgacgccggagaagctcgacttcgcgcttcgcaacgatccgtcgctgctcgacgatgtcggcctgctcgtcttcgacgaagggcacatgatcggcctcaacgaacgtgaggtccgctacgaggtgcaaatccagcggctccttcgccgcgccgatgcccagcagcgtcggatcgtctgcctatcggccatcctgcccgatggcgaacagctcgatgacttcgccgcctggctgcgccgcgatcatccgggcgggctgatcaagaatgactggcggccgacccggctgcgctttggtgaagtggtgtgggggtcgccaaccgcccggcttaatctgagagtcggcgaggagcggccgtgggtccagcgcttcctcaccggcgccgccccgcccaattggattccgccgaagcgccgccgcacccgcctgtttcccgacgaccagcgcgaactctgtctcgcgaccgcctggcggcttgtcgacgacggccagaccgtcctcgtcttctgcccggagcggcgcagcgtcgagccgttcgccgatgtcatcgtcgatctgcacgagcgcggcgccctgcgctcgctgctcgatgccgatccgaacgtcctcaggactgccatcgcgctcggcgaggaatggctgggcgccgacagcgcgatcctcaaatgcctgcgtctcggcgtcgcccttcaccatggcgccctgccgaccgcctatcgcaaggaggtggagcgtttgctgcgcgagaacgtcctcaaggtcaccatctcctcgccgacgctggcccaaggcctcaacctgtcggccaccgccgtcgtcatgtactccctacatcgcgccggcgagcggatcgagatcagcgagttcaagaacgtcatcggccgggcgggacgagcttatgtcgacgtcgagggcatcgtcctttttcctatgttcgacgacatccccaagaagcggcggaattgggaagcgctcatcaccgaccttggcgcgcgcgaaatggaaagcggtctggtgcgtttggtcgcggtgctgctgacgcggatgcgcgcgcgcatcggcggagacctcaatcagctcgttgattatgtcgtcaacaacgccgccgcttggaccttccccgagatcgccaacgaaaagccggaagaccgcgagcgcgctctcgccgactgggaacggcacgtcgcgacgctcgacaccgccatcctcagcctcatcggcgagaatgacattcctgacgaagggatcgaggccgccctggacgacatcctccaatcgtccctgtggcaccggcgcctgcagcgtcaggatgctcacgtccagcaggtgctcaaggccggtctcgtgtcccgcagccggctgatctggagccagtcgacggctgcccgccgccgcggctatttcctggccggcgttggcctcacgacgggccgtgccctcgacgccatcgctgttgacgccaacctgcttctcatccaggccaatggcgcaatcctcgagggagacgccgaagcagcgataaccgcaatcaccggcctcgccgagcgggtcttcgcgttctatccctttacacccgacccactaccggcgaattggcgcgacatcctgcgcgcgtggctgctcgggcagccgctggcggcgctaggcggggctcagccatcggaaaccctacagttcgtcgaaggcggtctggtctaccggctgccctgggcgatggaggcgatccgcgtccgcgccgccgccaatggggacacggtcggcgtattcgacctgccgttggaagatcacgaacttggtctcgcggtgccggccgtcgagaccggcaccctgaaccgttccgcgtccatcctcatccaggcgggcttcaattcgcggctggcagcgatcaaggcggtggccgacactggcgcgacgttcacgacgggtcagaagttgcgacaatggctcaactccgaacctgtcgctgcctggagcgcgctgcctgactggccgacgctggagacaaagccgatatgggcggagttcgcccagagcttcacgccagccgagaaacgcacctggtctgatcgacgctattgggcgaatgtcgcatggctgggcgccccccctctgtctggcacggcagttcaggttcacaactgggcgggtcagccacgagtgctctcgaccgacggcacgccccttggcactgtccaggcagcactttatccgcttcgagccggactcctccgcgcacaggtcgcgcaggacgtcagtaaaatcgacatcgcatacctcggtcctgacgatttggcaggcccatag

SEQ ID NO: 58254 - DNA, 783 bp, Paenirhodobacter enshiensis
gtgagcctgtatgagaggtggtgcgacgccacgagagaaaaagacaaacgcaagtactactggacctatgtcgagaagcatggtggccgcgatgaaatccaaggggacttggctgaaacgatccgttcgcattacgaccgactggaacgcattgcggaggacgtggaccggctcggatacaaggtcgccgccgagatcctcagcgaggcgatgcctcagacgtccaagggtcgttcgggcgatctcggcgaaattctcgcgactgagctcgtcgaggaggagattggcctgcgtgtccccgtgcgccgtctccgctacaaggacgggcgcaacatggccatgcgcggagatgatttcatcggtgccgggtatgacagtaaaggcgagaagctctggctcctgaaaggcgaagccaaaagcaacaaggtgctcggtaaggccacggtcacgagcgcgcgcaaggtgctcaaccgcgatagcggtcggtgtacgccggactcgctgctgttcgttgcaaaccgcctgctggaaagcaacgacccggacgacaacgcactgggccgcagccttcgcgacgaggtgggcctgaagtctctccgggcggatcgcatcgatcacatgcttttcactatatcgggcaacggtccacacgcttcgttgaaacaggatctcgaggcgaccggcaccaatcgagaccagtatgtcgtgaacattcacgtcaaagaccaccaggacttcatcgcggccatgtaccaggaggcggaagatcttggagacgattga

SEQ ID NO: 58255 - DNA, 3501 bp, Paenirhodobacter enshiensis
ttggagacgattgacgagttgacaactttcctgacggacgcgaccgtcgatggcatcctcggacgcctcctgtatcgcggcgcggcatggtcgctgatgcgcgaaaacggtgtactgccgccgaatgcgccgccgctcggcgcgacgatcgaaacggatcttgcggaacacggcttcgccctgcttaggggcgcaatggcgcttcgtgctcaggccggcacctcggacctgaccagcaaggcgttcgagcgctccgccaatgccttcgaagctcttgttcgcaatggtgatccggaatcgcatgatcgaggcttccgccgcaccatcgctgccgcagcctatcatctcgccggattttcagccgttgcctattcgctcttcaacgagaccgcgggcgacctgaacacctcacccggcgaaacagcgatccaacatctgatcctgcgcgatctcggccaattgcgcggcttcgttcgcgattggctggacaacgacgatcacaaggatgagcagatcgcggaggctctgcggggtgaagagcccgatgtcgatgaagctctgtcgaccatcctcaacacgacgatctgccgggcgctggcgtattttgatttcgcgcttgagacgggcgaaaccgagccgatcgagacagcaagggcattgctcgacgtcgcggtcagtcttgcagacaatgcggagaatgtccccctgtggtggatctcgaacctctgtcgtcaccttatcgatgacctgtggcagcattccctgcacgaaaatctgccgaccgagccaccggaaggaacggaggaaaaatacccggacctgcgcaggctattcatctcatcgctctatgctcgcaaaacttccgaggtggagttgtggccatcgcagcgcgaagcagcccggcgctccaccgacgtcacggacgatctggttgtcgccttaccaaccagcgcaggtaaaacgcgagtggccgagattgcagcgttgatgaccctttcgtcggcgcgccgggtactgattgtcacgccgctgcgcgcgctgtccgcacaaaccgagcgatccttcagaaaaaccttcgcgcctctcggcttcagcgtctcctcactttacggtgccagcggcctttcggcaggcgatgaagacgcattgcgcactcgcgaaatcatcatcgcgacacctgagaagctcgacttcgcactgcgaagcgacccatctctgatagacgatgtcggtctcatcgtcctcgacgaaggccacatgattggtccgagcgagcgtgaaatccgttatgagacgctggtccaacgcctgcttcggcgcacggacgcggagagccgtaggattgtctgtctgtccgccatcctgcccagcggcgaagagctagacgatcttacggcatggatacgctccgacgaacccggcgcgccggtgctctcagactggcgtccgacccgacaacgatttggcacgcttacttggcggggccaagacgcactgcttcgcctcgatctgaatcgcaatggtccgttcatcgataaatttgtcgtgcagaaaccggctagaggcaaagaaaaattaccctacccacgcaagacgtcgcatctcaccttgttcgctgcatgggagttcgccggccaaggaaagaggacgctgatcttttcaacccaagccaattgggtcgaaggcttcggcaaacaagtcgtggacctctgcaagcgtggatatttgggctcactgctggaggatgaggcaccgattgcccgcgctcttgaggtcggcaaggagtggttgggagaagaccaccccgccgttgccagtctgaaggtaggcgtcgcgatccatcacggtcggcttccgagcccattcctgcgcgaattggaaacgctgctgtccgagggcgtcttgaaggtcatcgttgcatcgccgacgctctcccaaggcctcaatctcaacgctgcagttatgctggtgccgtatctggtccgcagaggcgagaagatcaaaggcgaggagttcgcaaatgtcgccgggcgagccggccgcgctttcgtggacgtcgaaggcctcatcgttcacgtgatgttcgacaagatcagatggcgagaaagagagtggcgtgagttggttgcctccgccaaggcccgcacactgaagagcggcctcatccaaatcgtcgcagagatccttgagcgcctggctcgtgaaggcgttctggagcgcgatgacgcatgggaatatctcgccaacgcccgcgaagcctggagatcgccagcggaggaagccgcagtcgccgagcgcttggcggccggcgcggaatatgacgcagatggcggtgaagatgaaggcggtgatgacgagggggagaccatcgacgaggaaccgctttcgcaaatcgttgaacgcctcgatgcgactgttttcggattgatcgaagcgctggacgccgaccgggcggatctgccaacgctcttggacgaggcgctcaaagggtcgctctgggcccgccagatagcccgagaggacgaggacatcgcgccattgcacaagaaggtgttcgaggcgcgcgctgaactcatatggaagtccactacaacggatgcgcggcgtggacatttcgcgatgggtgtcgggctcgaggctgggctcgccattgatgccatggcagacgaattggccgatctcctcgatcaagccgacgctgctgcgctgagtggcgatgtcgacgaacttgtcgacgccctctgtggtctcggggaacgcttgttgttcatgcggcctttcattcccgacaagacgaacgcgctaccgaccaattggaaggacatcctgcgccgttgggtgtctggcgacgatgtcgccaatattgggcctcagaacatgcgggctgtcgaagaggccttcacctatcgtttggtctgggccttggaagctgttcgtacccgccgcatgtccctcggctggtctccagaaacagtggtggggggcgccgcagcagcggtcgaaaccggcgttccacaattcatgatgtcgatgctgatccgcgcgggccttccatcacggcgcgcagccatggcggcaatcgaggatgccgagccagccttcgtcacgcccgcggagatgagggcctggctcgaatccgacgagatcacagcttacaccgatgctggtgattggccgccccccgacacggcagcactatgggcgcggttccgaacggaggccctgagtggcggcattcagaaatggtcggtcgaacactacaagcgcctgctcgacaccgcgaccgccccacctgccggcctctatcggattgtcacagacgatggagatgggcggacctggatggcgacgcctgactatcagcgggtggcggcattcaagaaatcggcacttgatccgaagcccagcctgttctcggggcggctgacgggcaatactaggttggtggaagcgttgcgcgtcggccgtgggaaactgcgctggccacgggccaacacgtag

SEQ ID NO: 58256 - DNA, 825 bp, Coriobacteriaceae bacterium BV3Ac1
ttggcaaacaccgctatcaatcaatcgaatatcaggaaactcccacgcccttgctttgttgattggctggtgcgggaagatgaagtatccattgaaggatgcagtgtggaatgctttcgtctagagggcgcaatagatgatgcagcactcgttgaatgggcgcgacacattcgaagacattacatacgggatgacgagctccgcgaatactctgagttttttgaaattggagaaaataagtatcttcgagagaacgtcatcccagatgtccctcagattatggcgggggatttcgccgaaatagtaatcagcgacctggtccagttcgtggaggggtatgaagttcctcgctacaagcagcatggcaggtcagacaagaatagttcagagcacggcaccgatatcgttgccttcaagatggaaaatccgtcgaacccatccaagttcgatgagctgctcgcaattgaagtcaaatcccagagcagtagcacagatctcaaaggcgccatttcagatgcagcaaaagactcccctaaggatcggagcagaattgcaatgactctcgcgtactatggcaagagaagcctggacgcaggagacatcctcacctcgagcgagttaaagagattcatgaatgcgagcgagcatcccttcaaggaagcttttgccataggcgcgattgctgggattggcaacgcggaacgccatctagaagggctaagcgcgtcggacctgtatgtcgccgaaggcggaacggttttcgtcattcacagatcgcatctcatggatttgatacgtgagatttacgacaggtgcacatcatga

SEQ ID NO: 58257 - DNA, 3024 bp, Coriobacteriaceae bacterium BV3Ac1
atgatttacggcgaacggtcggaccgcgaattaaaatacgcgaaggcgcaggcaaaggctacggaatttttcgtagactcgtctgctatcccggacttcggaatgaattcggacgagctgcattactcatcgatattgaccttgtcgtcgtatgtggatgccagactatccggcaacaacggggaggggttcctgctggacttgaagaagacgggagccttctacgatgccgcgtccaacgatggccgaaatgctctattcagcgacggctactggacgcttgcaatggcgacctacttcttgctaggaaactatgggagctccaaagtcgctgccggcaaggtcaagaacgccgattattacggcacaagggccggaaccctgcacggctttgtctcgtaccttttgaatcccggcaatcctatccctgaagagctgcacatcttggggcaatacttagagggcggagatgtagatgaagctgatgtcatcgaggaggcggcgtcgctgcttaccgacgcaaatcccgaagacctcttctttggcggagtgctatacgtctcgattctcgattcactctcattctcaacgagatcccttctgcctgcctacaccaaaattggactcgaagagtggaaaccgtatctagcacaggcgtcgttcccaaaattgctgtggcaggcacagcagcagataggacgggcaggagtgttctccggaggaaatgcctttgtacagttgcctacgggaactggcaaaaccaagagcatcgagctgctgttacggtcaagcattctcgcaggcagaagcaccctgtccgtcgtcgttgcgcccctacgtgctctttgctctgagatctcgcgcgatttatcgattgcccttaggggaatagcggatgtcaggcagacgtcggacgtgatggaagtcgattcgtggctggagcaaagcccgagtggaccaaaggtcctggttttcacccccgagaagttaggctatgcgatccatcacagtgctcctcttctagacgatgctgggctgttcgtattcgatgaggctcatttgctggacagcgtatcgagaggtcccggctatgaactacttctcactgaaatatttagagcgaagcctgacgcccagaaggtacttatctcggcagttgtttccaatgccgacgagattgcgaactgggcttttggcgattcgagccttcttgctgtaagtgaaaatatccaagtaactgataagtcggttggcttcatacagcagaagggcaaaaaggtttcatatgttgaagctgacgacatatcgaatgaagacttcttcgttcgagtcgatttgacctcgcagccacttaaacgattaggcagagagactaggcagcggtacttccctgaaatgggcaataagaacgcggattacgctcgcgatcttgccatctattacgcgaataggctacttccgaatggtgcttgtgcgatctacgttcccaagaagatttcgatacaaccgttatttaaacgattggatgatctgctccatcgggaagcaaaccttccgaacctgaagtcatccgcatctgaggaggaattggagagactttccaatctcgtctgcctccattacggaaacgataatggactaagctcaggaatcagtgcgggggtgctgcctcactacggcgacctgcagggtgctattcgccagtcggtagagttcgccgtcgagcgtggccttgcaaaatgtatcgcgtgcacgtctacgcttgcggaaggcgtaaacctgcctataaagtacttgattgtcacgggcgcacgtcggggaaacgaaactccacgtacgagggatttccagaatcttatcgggaggacagcaagatccggcaaatacagcgagggaagcattctggttgcagaggatactggcagggcaagcagcaacagaatgtattctgagctcatgaaagaatcgaacaccgagcggtgtgagagtgccatactaaacctgttcacagatgtttttgatagagagaagaatccccgccgagccctttctggccaatccgtactgaacacaatcctggagcatattggtgatcctcagctggagtacgagctaacaaatgctttcgaaataaatttagagtgcgacagggcgcgcgcacgcgctctatcggcaatgaaggtgcgccctctcgaagcgattgaaagctacatttcggggattatgtcctctgatggaagcgaagacgatgtgatgagcatatgcgtttccacattcgcatatgtctcttccgatgatgaaatgaaagaacggctcctcaagctcttccaggcgatttacgagtctctggatgccgttaataccgaccaagcgtctttatgccacctgatgcaatcggggataaggagtgcggcttcgctatcgggctggattgaatctaaggaaggtgccgaattcctcggaggcggctgttccgatatcgacacagtagcaaacgcgtttcttctgccaaatcccgatgcagcgcatcccctcgacagcaatatgctagctgccactaccaccctctggattgatggcagtgacgtgtctcaaatcacaagctatttaaacgatacgtttaggcccagcagaaagtttcggcttacaaaagtcgagggcatcgtttcgggagtcatccggttttcccttagccatttcatatcatgcctcattgacgccatcaagcagcatccagcttttgcaacggaggagaacttggacaatctctgcctgttgcaaaggaaggtcaaatatggggtttccaatgcgcgtgcagctatgttctgcgaaaacgtgcttgacgaccgtatgatcgcaaaggaagtcatttcaatcttgggggaatcggggtcatcggacgtcgacatattgcggtttgaggccatcgcacataaggccgacatcgctgagtatgcgagttgtttgcccgcatactgtgctcagcgaatttctaagtggattgacccgagcgtgagagactaa

SEQ ID NO: 58258 - DNA, 371 bp, Rhizobium sp. CCGE 510
ccaagagcaacaagaagctcggaaagtcgacggtgacgagcgcccgcaaggtgctcgatcgcgacaatggccgctgcacgccgaactcgctgttgttcgtcgccaaccgcctgctggaaagcgctgatcccgccgataacgctctgggccgcgaccttcgcgatgaggtggggctcaagtcgctccgcgccgatcgcatcgaccacatgttgttaacggtatccggtaacggcccccatgcttccctgaaggaagactttgaggccgctggcaccaatcgcgaccactatgtcgtgaacatccacatcgaggaccaccaggaattcatcgccgccatatacgaggaggcggaagacgttggcgacgcctga

SEQ ID NO: 58259 - DNA, 267 bp, Rhizobium sp. CCGE 510
ttggcgacgcctgaagaactgaccgcctttctcaccgttgcgaccgaagacggcattctcggccggttgctctatcgcggagccgcatggtccctgatgcggcaggctggtattttgccggacaatgcgccgcctctgggcgcaacaatcgagaccgatcttgccgaacacgggttcgccctgttgcgcggcgccatggcattgcgcacgcagaccggcgccaacgaattgacgagcaaggcattcgagcgcgccgccaacgccttc

SEQ ID NO: 58260 - DNA, 831 bp, Pontibacter sp. BAB1700
atgattaacgaatggctagaatatgaggagttaaatccttgcccatataaatttaaactcatcaatgtttctgaaagaaaagatattgatgaggatgtaaagagctttcttggtaaagaaatcatagagtcatatagacaccttgatttcctcaagttcatgtatgaggaaagtagtgaacaagaattaatagattacataaataagcaagtcttttctactgatcagcatcaattaggtaaaaatgttactcaaggagattttggagaaatattagcttatctaatcgttacttattttcaaggtttgactgtccctcttagaaaaatgagatggaagtttaataaagataagtctgttttcagcacagacatggtagctcataattcagtagccccattaacagatttctattactatgagatcaaaacaaaattacaactagcaaaggaatatccggtctcaggtgaacctggacaatatattactgtgattgctcataatagtttattaaaagaagaacaatctccaacatatggtattgcagatttccttttaagactgaattacgaaaagcatgactttgaggaagcgacgaaatggaaagatgtagttaagaatccaaataagtataaccgcaattatgaactcttctttgtaatcgaaagagaaaaattcctaagtaacataatcacagatttagaggacttacctccaagtataagccctttaaatgtaactgttgtacttataaaaaatttaggacgtctaatagtagagatgaaaaaaaaggctattgatgaagctgtaaattttgtatttgaaaaatga

SEQ ID NO: 58261 - DNA, 3405 bp, Pontibacter sp. BAB1700
atgagaaaagaggagttcattgcgtctattgaagcaaacttagaagaagtcttaaatgattacttttataaaaattacaaaaaccagatcctagctcgaagattaagtgttgagtttactaaaacctataatgaagaattcctttggaacagggccctctttttatctacaagctcttgtatacttttaagcgaaaatgctaatagaaggctagcttcaagaggtcttaaagaaagcgcagaaatttatgagtatttaggcttgatctctgaagaatatgatagagatttttcaaaaatcctttcttcattaagctacgatttagcggggtatcaagccaatgctcaatgtctaataagagacattttaaattatagcctcacaagtaaggagcaacataacctgcttcaagaagataattatattttaagccacattacacttatacttaataaaaatattgcaaaagctaaaactctaattaatcgaagcgagtcaaataaggttggcattaagtattttgatgaagctattagtaaatggtataacaacatactatactttgatgaaaatgattttttgtcatcaataaataagtcttatcagttcttcttggatactagaaacattcacatttcacacctactttttttattaaaagcacgtttagagatttatcttgaaagatcaatttgggaaaatctaagacaagatgaaggtatacgaaatagccttatttggaaaaagtatgtaaagcttctaacacatgacttatatacaagtagtggaattaaagaaatagataaaagaacttcaaaattcgagttttggatttctcaacttcgtgcagttcaacagcaggtattatcagatgataacttcgttattcaaatgccaacaagtgcaggtaaaactttcattgcagagatcacaattcttaatagcctcataaagcatcctgacaagaaatgtatttacatagctcctttcagagcactaacaaatgaaaaggaaatagaactatctaattatctgtctaaattaggttattctatttcatcactttctggaagctatgaaatagatgaatttcagcagattatattggaagacacagatgttctaattgctacccctgaaaaaatagatctgttgtttcgattaaatcctgactactttgataatgtatccttacttgttatagatgaaggtcatattgtaggagaaattagtactcgtgccagtttagtagaatttttactaataaaaataagaatcaaagtaccggaaataaagacactttttatatccgctgtaatgcctcctaccaatgctgatgagtattcactttggctaagtaacaagaaagagaatgttattagatcattgaacgattatgatacccctcaggatgaacaatgggaacctacaagaaaacttataggaagctttacttgggagggtgataatggacgaataacatttgctgatattgaaacagaagacgaaagaacaagagtgaaaagaggagctttcgtacctgcaatcattaagaaaaaacaatatgcttcttcttttcctaatggtaccaataaagctcaaacttcagcaagccttgctcttgagctatcaaaagatggtttgtgtttagtcttttgtgctcaagtagcaaacactaagcaagttggggaagcatttataagcattttagataaacttgaagaaagtggtcaacaagtgcctacatcttttgtaaagaataaagaacgtgaatcatatttctttgctgcaaaatggttcccagaagattcatacattccgaaatgcttggaaagaggaattggaattcattttggcgatctccctgaacaagttagacaatcagtagaaactgattataactctggcaatctgaaggttcttatctctactaatacaattggtcaagggttaaactttccaattaagcacctcattattcattcaactttgatttcacataaaatcccactcaaagtaagagatttttggaatatcgttgggcgtgctggaagagcctgtaaagaaactgaagggcaaatcatttttgtaataaatagccctactgacagaagagcttataataaatacattaacaaacgaaatttagaagaagcacatagtatcttttataaagtcttagatgaacgttctaaaagattgatagatttcgacacacttctccataatattcaaattctttcagaaccttaccttctcaacctcttaattgaagaatctgttgagactgaaacagaattattggtagaaagaattatcgataatagtttgtttaagatacaggccgcagaaagaggaaccaatattgagcctctacaaagatcttttagggaaactatcacaaaaataagagatgaggttcctgcagaattattacctgtcttcggtgaaacaggattttctgttgaaagtaataaagcgatagcgggctatattgacgctaatattgaagaacttaaaacaaaggttcaagcggatgattatttaggtttattagagtcaataacaaaactgtttagcgaaggaaaaatatatgaggtatacatagataaactcaaaaaagcagggcttgatgcctttaaagtcattgatacactaaaatcatggattaacggtaatgacatcaagacagttcaagaggaatggcaaaagatcagtgatgatcagctattactaaatatattactttctcaaggattttattatcgttacacttggggtatcacctctttcaatactattttaacttttaaactaggtgtgagcagggatgaattacctgaaggtataaataacttgcagacatttgtaaagtatggccttaacaactcaacagcttgtttagccagatctttaggtatcaaaaatagagacatagctttacttctagctgaaaaatcagatggattatcaggaagggcatttataaaatggctatccaatttaactactgaagatgttttaagtttccaaattaatcagtacgatagcaagaatgtcctttatactgctatgacgttgtcttctaatcgtggcggtaacatccccgaaactttcgattttgagatacgtggcacagcctatgaagtggaccgaagagtttcctcactttcagttaaagtgggtgaaaacttgacttattctcgtgatcactcgaattcttacgatacctatgctataacaatcttaaaagataatatccaaataggatttgttcctagagaattctccaaattaattgctgtcgaaatcgatatcaacgaagaagagtataatcttttagttacaagtgttacctcaaaaactacctacaacagcatctcagtaagaatgtcaaaaatctag

SEQ ID NO: 58262 - DNA, 810 bp, Pantoea sp. GM01
atgcttcccgaccatttaaaaggtttaaacttaagtccatccggcgtgatgaccgttgaaggtcgtaccataaatgtctgggactttattcccccaaccgatccagcgcatcttgacagctgggcattgcattttcgtcggcaatattgttcagaccaggagattccggtgcttttaatggggaccgggatgacaaccgaacaatatctgaatgcctacattttccccgacaaaaccaaagcgcccggcccttcaatacgttcaggtgacttcgctgaatttctcatttccgattaccttgagttcacgctcaatctctgggttcctcgtgaaaaatacgccgacaaggcaagcaacaatgaatctgttaaaggtgttgatatcattggcttccatcaactggacattaccacccccgcccggacagatgcactgcatgctttcgaagttaaagcctctctttcgggaaacgcctatggcggccaactccagaatgctgttaacgacggatctaacgatcagcatataaggctggctgtcaccttaaacgctacgaaacgcagatttcatcgggaagggaaagctcttgaagtaaaccggatttcacgtttccagaatcccgctgataacccatatacatacttatcaggtgctgtagctgttctctgcaacaccgctttcaatgaagaagaacttgctgaaacgctggctaaagctcactcaaatgccgcagcactatacctgatggttgtacgctctgacatgcagatgcaactggttcatgaactttacgagagggcctgcaaatga

SEQ ID NO: 58263 - DNA, 3141 bp, Pantoea sp. GM01
atgaaggccggctccaacagcaggcgcctctttggcataacgcgttccaaaggcaagatgtacgaatttggtctggatgaatctcagcacctcagagtgccagaggggtcagatccactgcagctctttgtaatgaccatagcaacgcttggggacgttactggggtgcttgctgaattaccccatcccttgactccccttccccctgaatcacaagcagaactcaatttctgcgccagcttttttgatgcagtccttgattcagggttcgcacagggtctggaaagaacaacattacttttagcttcagccgcctattatgtagctcgcagaccgggcagcagcttagtccttgcccgccgaattgattacagagcaaaaggcaacaaagtcgagcactttctgcaatggctcctcaaagcagactggagcacctattggcctcttgatgatgtacgttatggatcattgcttacttccatatcgctctctgtcataacgcattttgccgaaggaacccaactgcagcatattgaaagcttactgaaaattctccgcagtgaagtatataaaatgggtagcgctgaggagctactttatgcagatgtcgccatatcggtttgccgtatgaggcttgccgcatctgtatggtcaactctcccacattattcaggcttatccgcagattactggcgaccggtcattcagagaggacgcttccccaaagaactctggccttcgcagctgcttttgggggccagtgggatctaccgtggcgcttcagggctgattcagatgcccacaagtgccggtaaaacgaggtcgattgagttggtcctgcgcagtgcatttatgtccgggcgcaccaggcttgcggtcgttgtcgcccctttccgggcactatgtcatgaaatcgcgttgtcactgcgacaggatctggctggcgatgacattaaagtcaatgaactgacggatgcccttcagattgactttgttgaacagattgcagaactgctgggaagtgctccaccctcaacatcgaatgtactggtccttacgccagaaaagtttctctatgtactgcgccagtcacctcaggtttttaaacatgttggtcttgtcgtttacgacgagggtcaccagttcgataccggctggagaggaataacttatgaactattgctcaccgaaatcaagggattactttctgacacttcgcagactctgcttatttcagctgttatgcaaaacccgcaggcgattgcaagctggctgatgggtgcggataaggcacaggttattgacggcgcaacgctgttacccaccagccggtctgttgcttttgcaagctggactgaatcgcttgggcagttgatgtttcatgaaaatggttatgacagagaagactactttgtgccgagaataatcaaagaagcacaactttcgggactcaaagctgacagcgcgacatttcctacccgggcgaaatcgagcgacgtatcgctctacttgggtctgcgggttgcaggtaagggttccgttgccattttctgcggaacaaaattaattgcaaacggcatagcaaagagggcggtacagattgcggaggcgggatataacaccatatggcctgcggcctacgctgatcctgaagaagtcagcgcacttaaaacaactatcgaaggtaacttcggaagcaacgctctcctctttaaagccgctgagctgggtatatatacgcatcacagcaatacacctcagggtattcgcctagcactcgaacacggaatgcagcaagggctcattaattttattgcgtgtacatccaccctcgctcagggtgtaaacctgcctattcgttatcttatcgtgcagggcgttaatcagggagccgggcttgtaaaagtccgcgattttcagaatctgatagggcgtgccggccgcgccggaatgcatactgaaggtgtggtcatcttcgctgattcaactgtttgggacagaaggacaagctggcaggagtcgtggaaattccaaaacgccgttgagctgctgtctcctgaccgagcagaaggggtcaccagctcgctgcttttattattgaaaccttttgcgctttcccgtacccaggaatggcgttttagcggggagtatctgctggatttgatagataatgaggcggagtgggaacgctgggcgcagcacgtggcaaatacagtccctcgccttatcaagaagaaaaaagatgagctggagaaaacgctgttgcgatccctggccgagcgtaaaaaaatgacgcatacgcttgaaagctacttaatggcaaactgtgcgaccatttctactaccgcatttgaacagagggccggcgaacttgctcgcgataccctggcatactcgctggcctctgcagaagaagcaggcaaattggaggagtacttcagactggtcgccagacgcattgagtcggtggaaagctcgcctgttaagcaggcatttttcggcaaaacattgctcggtgcaaagcagactaaacgcatagagacttggtcagatgagcacagagacatgcttttaacgctggattctgttgatgcatggctcactgctgtatggccactgctagctgaactctgtgacagccgttttttccgcaacgtcgagccagttgatgcgggcttccagctcgcactcctgtggatgagcggaacgagctatggcgagatattcagagaagcggtgcagatgcaggttaaaaagaaagccggcaagcttaaacggaaggtgagcgacgacgatattattcagtttttggagagctcgctggcatttgattgctcgctcattctggcagcgctcgcgcaattcctctttaccccggaagatctaattggggatcctggagcatcgctcgcgcatttccagaagagcctaaaatatggccttccggataccttgtccatgagtgcatttgaggccggattcgctgaccgttttatttcacaagcaattcgtgatgctctcctgcaaaagggatatggaggaagctcatttaatgaggcttggaagattcatctgagtgctattgagcaagtcatcaaagctaccccagcatattttaagtatgttttgagctcatattga

SEQ ID NO: 58264 - DNA, 759 bp, Acinetobacter sp. NIPH 542
atgattgaaagcttatgtgagaaaaccgaaacaactgttgatcaacatatatttagagtacttgttttacaggattctcattttaatacgttgcgagatttattaatttctaaattaccagagtattatttagcatcacgatcattccaaagaactctgaatcttctagggcaagcagcagcttacgaaaagcttaaattgaaatttcctaattcacgtcaaattcgatcaggagatgtaggtgaggttatctcaagtatatatatagaagaacatttaaattactttttgcctatcagaaagctccaatggcgtgaccataaagatatggcaatgagaggagatgatgtaattgctcttaaatttgaagaagataatattaaatttattaaatgcgaatccaaatctgcaaaaagtttaagcacagctactttagtggaagcacgtgaagaactagattcatttgatgggagaccatctcctcattccatagattttataattgaacgttcatatgaaatcggaaatgatgatatagcacagcaacttgaaacgtttatctataaaaaatctataaaaaatagtgatgttaagcacttattgtttgtcttaactaaatctaatccaaatcttcttcaaaagacagcatttgataattataagggaaattatcctcaaatttctattgggcttaaagtagataaacatgctgagttaataaatgaaatattttttggtttaaataaaaactatgaataa

SEQ ID NO: 58265 - DNA, 3456 bp, Acinetobacter sp. NIPH 542
atgaataatgaacaaattgatttactaattaaacaaaatttagaacctgattttaaaggtagattacttgatcgaggtttatctagatctatgatttggaaggatggtatcttgccagaaaatgctcctcatttttctgaagatctatcttatgatttactaacatatgggtatgcacttttatctcttgctataaaaagtactgagaaaaatggtgatgttgaattgagattacaggcttttgaaaaagctgctattgcattaatggtagtagttaataatggggaagaagattatactcagcgatcatttcatatacttctctctgcatcagcatatcatttagcacactattcagctaaagcttatagtctattgaaaaaatataatgatttatatgcacataatattttagaaaaagcactaagttttcttattacaagagatttaaaacaattaacacaaaatattccaatttggaaacaagagaatcaaaaagatttagatagattggcaaatcttgaagtagattcaaaagattcagcaatggatagtatttctgcaaatttgaattttattaatctcagtctaattaatatatatttagaatccttatatgagtttttagatgctttagaggtggggtcgggaaaagtcattgaaaatattgaaaaaaatcttagtttaaatatttcaattagtcaggaatataattttctagaagaatggtggatttttagaataactaagtacctattgagagatttatggtttcaaacatatcatcatattctacctattagggataatgacacgaattggtcaaaattaagatataaatttattaaaaacttacttaaaaagaagaatgcagagatagatttatggccttcacaaattgaaggagcaaaaagtgcaataaatgattcagaaaatttaattgtatctttgccaacaagttctggcaaaactaggattgcagagttatgtattttaagagcattatcacaaaataaaaaagttatttttattacacctttgagagctctttctgttcaaacagaaattacattaatgaatacatttaaagatatggatattaaggtttcatcgctttatggggggcagagcttatatggtttccagaaaaaccagtttgaagatagtgaaattttaataggaacacctgaaaaattagactttatcttaaaaaatgatcctgttttattaaatgatgtgggcttagttgttttagatgagggccatatgttagggcttggaggtagggaaataaaatttgaagttttagtgcaaaacttacttaatagacctgactctaacttacgaagaatcgtttgcttatctgctattttacctagtggatctgaattagatgatttcgttgattggataagccatccaagtgaaggaaaagcaattagttcagattggagaccaacagatctgcgttttggagaaatatatggtactaatgaatcaaatagctatagattagattttacaataggtgagcaaaatccatttatccctaaatttattgaaaaaagattagtaagatcaagagttaattttccaaataattctcaagacctaactctcacggctgcacataaatatattaatgataaacaaagtatccttatctattgcccagaaaaaaaatcagtaaattccttagctaaaagattaattaaaattcatgatctcaattatttaaattttgatcttggtaaaattcaaagcccctattacttttctgccttaagccaaggtgaagaactattaggagaaaatcatatagcaatactgtgtttaaagcttggaattgtaatacatcatggagggctaccaaaagattaccgtacagcgatagagcttttaattaaacactctcgtgttagcttaatcatctcatctccaactttagcacaaggactaaatttacaagcaaatattgtattgtttaattctatttttcgtgcagggcaacttattccatcatctgaattcagaaatgttattggtcgagcgggaagatcgtttgtcgatttacagggaattgttctatttccgaactatggacatatccttagtaaaacgaaaaattggaattcattaatacgtgataaagataaactaacattaaatagcggcttaggattattaatagttcaattaattttgagaatcgctaatagtttaaaagaaaataatatttatactatttatgaatatattgttaattcaaattatgcctttgatttccctcaagtcgcttttgaaaatcaggatgccgtgacggaagctaacgtgaaatggaaagaatatctgggtttattggattattcaataataaatctaattggagatgaagaggttgctatagaaaatgtggctgaatttgttgatattttattaaagaactcctttctttataagcaaattagacatctttcaaatgaaaagcaaatgctgattaaatcatttgtacaaaagcgttcagaatatttatggaaaactactacttatagctcaaggcaacaattatacttttctggagtaagcttagatacaattaataataatgataaaattattaatgatattttaaataaaattaatgaaatagatactttgctaattgtggatgagtttaattactcaattttgagtaaaaaattaattcaacttgctgagttagttttttctatatctgaattcactcctaagaaaattccagagcattgggataaaatattatacaattggttgaatggtcttaattatttagtaggctttgatgttgatgtggcagttgattttattgaaaaaaatatttcttacaactttataatggctattgaattctttaaggcaagatgtagtttactttctgagtatataattgaacagtctacatttgattatattagtcaagtttttgaatatggtgtattagataggaatgctttatttttaataggattaggtttgaaatctagagttaaagcaaatgaaatttctcgctttataaactttccaagcgctggaaaattactcaagtggttgaatcaagctgactttgatagctttattgatacttttggtcaagaaaatacacagatactcaaaaattttgcttctaatatcaagaatacattattagaaaaagaagatagaatccttcggaatatatatgttaattggaaagagatagatccattggattatatgtttacgaatattaagttgcttaatatagatagtattacatatttaatttctaggaaagcacaagttgttggtagctttaattttaatttgaatttagatttaatgtcagaaatatttgtttatattaattctgatttttctgtagatatacggtataagtgttcccctgatgattctttacgaattgttaaaaatagataa

SEQ ID NO: 58266 - DNA, 792 bp, Paenibacillus sp. FSL H8-237
atgccaatcattaataattatccatctgaaaaccatccattttccatgtcactcacatgttctaatgaaaacgctactaacggtgttcctcatagatgtttaatagaaaatggacaccatgatgtttttcttgaccacatgacagtagcattacaaaatcatcacattagtcctgaggctctggaacgccgtagagatttaattgagtctttacggataattggtgcgccgatgcctctgtctccacatccacggaatctttctacccagaaaggaaattttgctgaagtttttctggcagagtatttatgtgaaacgactggggctgaactccctatttatagattaagatacaatccaaatatagagcaatcaatgaaaggcgacgatgttttgctttttgatttggattctgatccggtgcgtataattgttggggaatcaaagttcagaggagttccagataagcaagcagtggtagatatagttgacgggcttgtacgttcaaacaaagcagggttacctatttcattaatgtttgttgctgagcgtttgtttgaagctggtaattctgagttggcaaaaaaggttcagaattgcgctatattatttgtaacaaatcaactgcaaatacattatgttggtttactgatgagcaatcacaatacgagaagaattgtaaatacccatgcctcgagtgagcttcataatttattaataatatcgctaaattttgaatccccagagacgattgtgcaacaagcatttgcacggttggagaataatatatga

SEQ ID NO: 58267 - DNA, 3327 bp, Paenibacillus sp. FSL H8-237
atgagtatccctacagattatgcaatatctttgcttcgcagtttagagcaaagtagaatagaaaacctcgtcactcaagctgatgcacgacgaattttacaagaagttagagaacgctctgaaaattaccctaattttgattctgcacttacagaaaaggcaacacatattgcttacactttgatttcttgtggttgttcactgatagaaaatgaagatgcagaaactgatgaagggttagtcgtgctagaaaagggcggaaagatattgtcagatgtatttaaatttaattctgacgatattgagacgaaaaactataatcttttgattgccgggatgtcgttatatgcaactaagcagtattcacgagcctttattatcctccatgatattgatgtcgattttattgtcggacaaataatcattaattttataaaaaaagattttgaatctatgcttcagattgtaagtaatgttctattcacgcaagcgccaacacatttatatcttcgtgattttgatgaatgggtaatatcacacgaaattgcgcgctgttttttaatcgttgcggatttcattcagacgggcaatcaagagaattttacactcattaaagatattttagaaaaactattggcaatttcttctgaaagcgctttgacactgtactggctaattattcgattgttaagaatcatcttttctacttttcaagcttcatccctatggtctattttgccgccgtttctgccagaaaggtatatcactgaaaaatatatccgtttactcagcgggtttagatctcccgttacagaaatatggccatctcagacagcggcattgccgcttgctgttggtgataatagaggggctgttattaacttacgtacaagcggtggaaaaacaagagtagcagagatagcgatcctaagaaccttatctactcaactattatcaaaggtgttgtatctcgctccattccgctccttagctttcgaaattgagcaaagtttaaatagaacatttggaccactaggcattacggtttcacagttatatggtggttcaactgcaaatgttacagactttgaactaatcaatgaatcacaagttattatcgccacacctgaaaaggcaaaagcccttattcgttgtggatcaggacttgaacaagaaatcaagttaattgttgttgatgaaggacacttgttaggtgcagaagaaagatatatcaaaaacgaaatgtttcttacgcatatcaaggaatttgcctcaagaaaccaaataaaaatgttacttttatctgctgtattgcccaacgcagatgatttagctcaatggatcacaagcgactcggatttggtagcaaggtcagattggaagcccgctttggagcggttgggcttattactttgggatggtaagcgcgttaggttggaatggaaaagtgaaggtgagccatttaaccctaatttcatccaaaaaggtcctttgggatttggacttagaaggaatcattttccaaataataaaaacgaggcagtagcctccacagcagttcgattagcgcaaaacggaacagttatgatatactccgcaagagccaattcaattaatgggttggctgggagcgtacttctagcactaggagagcgcccagaagattttctgtgggatgaatccctatggaaagtctttgaaagtatctgttttgaggaactgggtaataacgatattgttctaacagccgcaagaaaaggggtcatatgtcacaataatcgattgccaacgcttgttcgcattgctattgaaaggctcatgcgttctaaagccccacgaataatcattgcttcctcaacacttggacaaggagttaatgttggtatttcaactgtgattgtgtcaactccatactatagtgacaaagtaatcagcaatagagatttttggaatatttgtggaagagcaggacgtgccttttccgatgtcgaaggaaaaatactctatgtgattgatacaacaaaagcacagtggcaagttaacaatgatagacgacttgcccaaaattattttgataatcggcaaatggaagaagtgcgaagtggattgctcgctgctttaatggctatttgcaggaatgccagtcgtacgggaacggatttcacattgcttgttgaaacaattgcaaataacttcattgaaggaaatattcgtgaagatttttctaagtggttaaactatatttttgacttcatagatgatgagcttcttgcaatgcatgaagattttagcacagatgatgccgatataaactggattgatgatgtctttagaaactcgctagctcttattcaagcagaaagcgagaacgaagaatcttacctagcgctgttaaaagcacgcaccactgcgctgctgcgcagaataccaaataggacggatagaaaaaagttgatttcttctggcgttccgttgtcagtgtctacagctatgttagaggatactgatttttttagaaatcttgctacgacattcattcaatcttctgttggcgaacatgatgatattgaaataatagatagtattattcgtgaactagaaatctggagcattcaaaaagcgcataatttaatgaattttgtaccagagcaagcggttctagataatatacgtcgctcttggataagaggagatgcgctcgctacaataatgacgtttgaaccagatgcggctgatatttcaaaagactactacggctttacgttgccatggattatacatgctgtttctcaattattcgatcatgaaacacaagagaacgtggttcaattatatacatcacttgccatgtttgttgaactaggacttcctaacaatttagccgcgaacatatatttggcaggtgtgcgttcgagaagcgcggctttagagatatccacgattgaagttttcaaaaacaagagtatttcagaaattaagcaaacactcttgaacttttcaacatcggatcatgctctttcggacagttcaaaggtatggattgagttgctttcggaatctaccaaatcacaaacacctaaaagaatatctttcccccattttacatggaagagacacaatcttcccgataaactgtaccttagggaggtcaatggggagtgttttcttacttcaagtgacggttatttctatgaaaaagttgaatcaacaatcgatttgccattttcaaatatagccaatattccaggactgttcttcgtatatgaaaatgacaagtggctattgcgttcatataaccttcgaatagttgtaaatgccggggattag

SEQ ID NO: 58268 - DNA, 444 bp, Bradyrhizobium sp. DFCI-1
atggcgctccgcggcgacgactttatcggcgtgcgatcgagtgctgagggacacctctttcttttgaaaggagaagccaagagccgggccaatctcgccggcgcaacgattatcgaggctcgaacggcgctgtcgcgtgatagtggccggccgacggcgacctccctgctctttatcgccgacaggttgatggagggtgatggtccgctcgcggcattgggccgaatcatccgaaatgaggtcgcaagccgcgcagttccctccgatcgcatcgaccatgctctcttcacgatgtccggcaatgccacgccccgagcgcttttcgacgatctgcgcggtgccggcgttgatcgcagccacactgtaatccaccttcggatcgacgatcatcaggagttcattcggctgtcctacgagggagcactcgcccttggagacggttga

SEQ ID NO: 58269 - DNA, 1203 bp, Bradyrhizobium sp. DFCI-1
ttggagacggttgacgaactggcagccttcttgacgcaggcgaccgctgacggtgtcaggggtcggctgcaagctcgcggcgaggcgcggtccatcattcgccgcgacggcgtcctgcctgacgatgcgccggcgttcggagaaacgattgacaccgatctgtccgaatatgcgctctccgtgctgcgcgcatccatggcgcttcgggaaggcggcggcaacgatgagatttggcggcgcggcttcgcgcgggccggaaacgcgttcgaagcactggtgcaaaatggctcccacgaggatgtcggccggggcttctatcggatcgcaggcgccgccgcgtatcatctggcaagctactccgctctcgccttctctctgatctctcaacggcctgagaacgcgaatctatcgccagcggaagaagcgttggcgcatcttattttgcgggatctggccggtctaggtcgccgcgcgcgagcgtggctgctgaacccagcccatggtgatgcaaatattagccaggcgttgcgcgcaggagagattgattcggacgacgccgtcaggttgatcgccacatcaaccatttttcgcgccctcgcgttcttcgaattcgctcttcagaccggggccgcggtcctgattgaggagtctcggtccctcctgcgccgcgcgatctccctcgccaggaacgccaatgccgtgtcgctgtggtggaccgcgcgcatagcgttcaatcttgtcgatgacctgtggtctagcagcttgcatcaggtgcttcccctcgacgggccggcgggcgcgggaaactatcaggatttgcgccaactcttcatcggggaactctttggacgtgacgtcgccgaggtggagctttggccgtcgcagatcgaagcagcccgacgagcaaccgatgaccgacgatctcgtcgtcgcgttgccgaccagtgctggcaagacacgaatcgccgagatcgccgcattgatggcgctcgcggcgcgcaggcgggtcctcattgtaacgccgcttcgcgcattatccgcccagacggaacgatcattccgtcggacgttctcgagccttgggttctcggtctcgtcgctctatggcgcggctggagccgctggcggcgacgaagacgcactccgtacgcaggatattgtcatcgccacaccggagaagctggacttcgccttgcggaatga

SEQ ID NO: 58270 - DNA, 801 bp, Lachnospiraceae bacterium M18-1
atgaaatacgttgattggtatgaaaatgagaacatcctttatacaaaggacggaaaagtaataagtgtgcttaatttagccgctgaagaaaatgatgaggtattagatgagtgggcggctcactttagaaataactatcgaactttggaggatttggattttgacatagaagatactggaaagacgagagaagaatttttaataaatgatgtatttcctgatacaaaaataaaaccaggaccggcaacgagagtgggcgatttctctgaattgctggttgcagattatattgaatttgtaaagaaatattatgtgccacgaactaggtactgtcgtaaaaccaatcgtaatatgtctacccctggaagtgatgtattggggtttaaacttcatggaaaacagtctcccaaagatgaggtttttgtgattgaagtaaaaggaatggcagatccgaagagtagaaaaaaagggtatcagcgactgcaggatgctattgatcattccaagaaagatatattgcgatatgccgaatcattgaatgccgtaaaaagaaaattaaaagatttcgggcaggcagataaggcctctctcatcggacgatttcaaaactatgcagatagaccgtatgtggtccgatatggtgcgactgctgtattgacaagcagtaaatttatagcgaaagatatggtcaatgtggttgcgaaagatcatgggggagaaaatctcgaattaatgattattcataatcaaaatttgaaagatttaatcaacgaattatataggagggcggcgaaatgttaa

SEQ ID NO: 58271 - DNA, 3159 bp, Lachnospiraceae bacterium M18-1
atgttaattgagggtacttcacggtattatttaaaaaagatccgtgccaaggctaaaatgtatgaatatcatatcccaaatgaacttcatagcactacagaagaaccagtaaatcaattaatcatttcagccatagcgatcattggtgatttttccgatattattattagtaacattgagggagaatcatttgattataaagattttcaggataatttgcgttttgcggctaaattttttgatggatatgtagaatcaaaattgtattttggagatcaagaatactatttgctgttaggagctgttgtttattatttgtgtgatcataatggtagttcacaagttctgtgttctcgcattagctttgatatagatttgggtgtttatgggatagatgctgtgcttacacagattttaaaaggggataaaaatgtaatatataacggcaaatacgaaatagtatcagaaatatgcagaagctataatcattttttagaaaacggtatatttgacgcatatggtgaattggctgtcttcagaagatatatctatgaattaggcagtgacagagaagtactatttgcggatgcacttattgctgtaatttatctgaagataaaaaattcagcttacgaattgatgccgcagtatacggcaatagaatttgaaacatggaaaaatgtcataagtcaaggaacacttgtcacagagttatggcaggcccagcgagaattaggtaaaagaggagtattttggggaacatcagcaacgatacaaatgccaacaagctctggaaaaactaaatcaatcgcattaattatattatctgcttttttgagcaagcgaactaattatgcaattgtagtagctccgtttcgttccttatgtagagaaataacagaggaattaaaaaaggcattttcttttgatgacagtatccatgttaatgaactatcggatgtattgcaaatggacttcatggatattattttaggaaatcgcgaaatggatggggacaaaggcgtttatattgttacaccagaaaaattactattcgttttaagacagaatattcatatcctttcaaatgtaggcctaatgatttttgatgaggggcacttatttgatgattctagtcgtggcattacatatgagttgcttatttccacgattaaactgtatatgacagatgagacacaaaaagtattgatttctgccgttattccaaatgcggaagaaatcaatgaatggattactgacggccagggagaagtaattaaaagcaatgccatacagacaaccgaaaaaactgtaagcatcgcagagataaaatataatagggaaaataataaaagatacgcatatctttattttgttaatcctgataatccagatgaagaagagttttatgtaccacgtgttattacgcaggttaacattaaattgcataagcgtgagaccaaagaaagggtatttccagaaattaataatggcaaaaacacacataaaaatgatattgcgcttgcactggcaattaatttatgcataaacggcggaactgccatattttgtggtcggaaggacactgcggatgggcttctgaaccgtatattggatataacaaacagagggtatgatatttccaatctaattaaatgtgcagaaaaagaggaagttgaaaaattatcaaagttaatagcaatgaatctaggaagtgatagtatatatttttctgctgcgaaaatcggtgcctttgttcatcacggtggaattcctatgggaattcgttgttctgtagaatatgcaatgcagatgggattaattggttttttggcatgtacgtctacgttggctcagggtgtaaatcttcctattcgctatttaattattcctacaatttatcaggggaaggatcgtatcaaggttcgagattttcaaaatctgataggacgtgccgggagagcaggcatatatacagaaggcaatattattttatcggaaacaaatgtatatcgctataaaaatgttaattatgaaaattggaaatggctgaattacaaagaattattaaatagtaatcaggcagaagcatgcacaagtgaattgctttcttggatccgcgcagatgatgaaatggagcaatacctgaatcgtatcattgagatatttgaaactcattatgcgtcagaagattttgcagaaacagtgaattcgtttttggaagatctgaaagtggaaaaagaagagacatatagaaaagcagattttattgtacatcaaatgctcaataatatagaggcgattgaaagctttttattgttttatttaatggaagacacctatgaggaagctaaagaaactatccatgaaatcatagaagaaaccttggcatttcatttggcaaaagaaaatgaaagagaacggttacttcatattactgatttaattggaagctttattgtaaaagtggtgaatacatcagacaaaagaaatcgctatagtaaatcacttttaggggtaaggaaagagatagaaattgaacagtgggtacaaggccatatttttgagatttgtacatgcaaaaatgaagaggatattttgacaatgatttttccattgctgttgcagacagataattctttgattagagcctgcaataaaccggaattgttattagaggttggcttaaactggattaagggcatcaattatcatgatattcatgaagctgctattgtcagtgatatcaggattttagcaagaaacaaatataagctgatttccataaatcagacaattaatctttgtgataattattttggctatgactgcattttaacactggctgcgattatagaaaatgtatcctacagttgtgatgacatggacttggattataatttcaaaatgttatcaaaacgattaaaatatggattgcaaaatcaatgtgctattacaatctacgaaatgggttttagtgatcgatttgtagccggggttctttctgatattattgaaagtgagtacaaagcaggaagccgtaaagaaattctgcgccttattaaacaaaatgaaaacgtgcaaaatgaggttttgtcatttttagaggagtatcctgcatactttgaagataaaatcagaagtatgattgaaaattag

SEQ ID NO: 58272 - DNA, 807 bp, Clostridium sp. CAG:349
atgaataaaccgcgatatattgactggttggttgaagaaaaagggcttgtggttcaaggcggacatgaggtgcgtagttataggattgattacactgatgattctgctgtaattgatgattgggctttgcatataagaagaaattatattaaagatgaagatttaaacgaaagtgcccaattgaatggattgacagtagaacaatatctcaaaacatatattataccacaaaaaaatgaacctttgggtgcaacagcaaggtccggtgatattgcggagatagtggtttcagatttattggaatttattatgggatataccgtcccacgctgtaaacagatgaatcgttctggaaaaaacaattcagaacatgggacagacattattggttataaattttataaaccagataaatcacctaatgagagggatgaacttattgcgacggaagttaaagcaaagctaacctctgaagattatgattcattagcaagagctattaaacattcgggaaaagatgaagatcgattagcaaggaccatagattattgtagaaaaaagttgagatgtcaaaatgactcaaaatacagcgaagaagttgcgagatttttaataaaaccggaaaataattataaaatcatatattgtgcagcaggaattagtagtagaacctctattgatgaaagtattacgttaagcatagatggagaagaattaaaaataagcgatggtcaagctatattttttattcatggaaagaagttgatggacttggttcacaaggtgtatgagaggtgcatacgatga

SEQ ID NO: 58273 - DNA, 3033 bp, Clostridium sp. CAG:349
atgatatttgcagaaaaatcacaattgatgcttaaataccaaaaagccaaagctaaactagtcgagtttgatgtggcaaaggaggattatccgcatttcccgttgaactctaatgatttatctttctcctctacatacattttgtcgcgatatgccgagagtgttattgaaaatgattataatactaaaagtgaactcggtgtatacgttcgtaatgttgcgcaatactttgatgcggctgtgggatcgaaagataggaataaatacgatgtagattttttactttctggtgcaacagcctattttttttcaaataattttgggagttctaaagttcttttgagaaaggctttgcaaaaagttgatgtaacacagaagaccgccaaggcatttttaacgaggttgctggcatttttatttgacaattatccaatggaatacatgagaaatgaagataaatattcgctgttgaataatgctgtaaaagtgtattttgaaacaggagagaattgccaaaatataaaaatgttttctgaacaatatcggaaagatgtatacaataaagatgatattgacgaagttttttttggcgatttgtctttagctattttgtttttgtcaatcgagcaatctgcatggagactattgcctaattatactgaactaccgagtgaaaagtggcgtgattatttgcgtggaaagaacggtttaaagatgctatggcctgctcagcaacttataggaaattctaatatattgcgtggaatgaatgggattgttcaacttccaacaggcgtggggaaaacaaagagtattgaattgattattcgttcggcattcgttgagcaacgggtctcaattgtcgtaattgttgctcctcttagagcactttgtaatgaaattacaacggatatgataaaaacctttggtggggaagttaagataaatcaattttcggatgtattgcaagaggatatagcattttttgatgattacttaggtaagcagatagttgtatgtacacctgaaaaacttagttacgttatgcaccatcaaaaagatattattgatatggttgatctttttgtatttgatgaggcacatatgtttgatgatggtgttcgtggggctgtttatgaacttttgatgacgcacattcgtagcattatacgcaaaaaccagcagattgttcttatgtctgcggtcttgccgaatgcagatgaaattaaagaatggcttttcgggcaagatggagtcttggcaacagatccccaaatatcatctacgcctaaatcaattgcttttgtttctgatagcagtgatatgttttatttttcggacaatccgtctaaatacgactattatattccaagaataataaagaagaaaaaattaaagaaaaagtcaaaagaacgtaaagatagattttttccggagaattcatctattgatattgcaatattcaacacattgaagctttgtaggaacggcggtgttgcgatttatgttggaaggcaatcgtcaattataacggttatgaaaaaaattatagagttgaattcgcgagaatttgatttaagcccatttcttgcagacgtagattcagtgcagttggagaagttgagcaactttttttccgaatattatgggagtgaaaatacatatactaagtgcagtaggcttggagttgttgctcactcgtctaatattcccaatggattaaaattagctgttgaatatgcgctaaaacaaaaacatatccaaattgtagtttgtacatctacgttagctcaaggtgtgaatattcccattaggtatcttatagttacgacactgcgagcagatagagaatttatgaaaattcgcaattttcaaaatttgataggtcgaacagctcgatctggaatttttaccgaaggcagtattataataactgacccccaaatttatgatgaaaggaaaagagggcagggatattataattgggaaatgtgttcaaatatgtttaattcgaacgcgtcagaaccatgtagcagttcaatcctcaaactcgttcaaaaaatccaagtcgattatgagagctctgttcctgcagagaattttgtaaagtattatatcgagcacgtcgaagaggaagatgttattgatacgttgacacaagaattgatagcagatttcttaaagaagtatcccgagaagaaaaaacataatatagatgaggaattgcgtcttagaaaaaatacgttggaagcaatagaaagttatctttttcttgcgcttgaaaatgtagaagaatgcgacagatttggcgttgcaaaaacagtatgtagggatacactggcatattctttagcgagtgatcaagaaaaaaatatgttagaaacaatttttgatgcaattgttaaaaagattaatcgtatggtcggggcagatgtaagtcgatatacattttctatgtctggagttgagttgtctaaaaaaatttcagggtggctttctgtggcagacataacgacaatgttgaaaacgggagaagactgtttaacggaaataattacattttataaggagacatttaatctgggtaaatataaggaacaatttgattacctgtgtcgtctttggataaatggagttctccctaaacagatgtctgatttgacaggaattcaagtttttgatattgacaatatctgcaacaaagaaatctcttatgaactgaattttttaattggaaacatatgcgatatgcttgataataacgtgagcactgaatttgaacgattgaaagatatgcttaatattttgcaaaaaagagtgaagtatggtgtagcgactaaaacagctgtatctatatgcgaaacgatcttcaacgatcgtgttcttgcgactaagttgacaaatattataggagacgataatatatcatctgaaaaattattggaagatataaaacataacagaaaggaaatattttcgaaattagagcagtatccagcctattttgaagatcgattaaaatttttattgtaa

SEQ ID NO: 58274 - DNA, 696 bp, Rhodopirellula europaea SH398
atgctgggcctgagcattcgacgctgttacctctccgaccacactctgtccgcacttcttgatgacaatacaagcgagcaggagttgatcgccgcgtgcctgcctgaccgtggggcaacgatggctggtgatttcggagaactcttggcctacatctttcacttggcggataatgatgctctgaatttatgcgggccgaagaaatggcggatcaagattgatcgacgcaaggcttcgccaatgtcggacgtggttcactttgcgctgccgacatggccacttgcgagcgatgacgaccagttgttgtgttcggaagtgaaggtaaagtcgaccaaaacgaaatcgcgaccgattagtgatgcacttgaagacagccgaaaagaccgcgcgagcaggctggcgaagacgctcgtttggctgcgagaaaggacaatcctcggcggtgacacggacgtcaactgcgatcaactgaatcgtttcattaaagcagccgagaatccagcattctcaaaaagcttcaacgccgttgccgttatttgcaacggcttaatcgaagacgaacttgtcgccgatcctcccgccaacgatccgcaccaccagatcgtggtgatcggcgtacctgagttgaaggaaacctaccaacaggtgttcgaggctgtcgcgcaagctggtctgccaaacggagcggtgcaatga

SEQ ID NO: 58275 - DNA, 1281 bp, Rhodopirellula europaea SH398
atgaacgacgccttggcaaaatggatcagcgacgcagaccgttcctgtccactcattgtttgtacttcgacactcgccgagggtgtcaatctgcctgtccgaacgctggtgctgtactcggtggtgcgcagaactggtcaagggcaaactgcgatgttgttgcgtgacatcaagaacttggtcggacgagcgggacgaccgggctcaaacaccaaaggcttggtcatttgcatcaatgaatccgactggggcaccgtgcaacaaattgcggaacaagcaactgttgaacctgttcacggggcattggccgagttgctctcaacgatcatccgaactctcgcacgctcgacaacaatcaacgaactcactaacgatattctggaagccaactcatggcttcatgctctagttgacggtgttgatgccaccttgattgaattggccgcacaggaactaggcatggagcagcttcaggaacttgcgaacgagattgctgagaagagctttgctgcaacgcaggccgatgacagtgagatcgacctactcaagacggtgtttcaacttcgctccgaagcgatcgttcagatgcagaccagtggcaaacttgcttgggtgcgcagcactggagcgagaccgcgaatgattcgtctcgtcgaggagggattgctaccgcttgttgaagactggacagctctctcaggaacattgaacaccgaagcagttgatgccttattgaattggtcgttcactctcggtgaagttgatgccaaactgagagaagcgtaccgcatcgaagaaggtgatgccacgtcgaccgtccacgaaccgtttcgtcactttgtaaaattgtggcttcaaggagatcgctttgtcgaaatcgcgagccaactatccatcgaggttaatcaggttcttcgcatttattcgggtgcgttcgcctacgctttccaaacggtcgccgaacagggaattgttgtcctttccgagcttcttgagtctcgactcgaaatactgccagaaagtgtaacgatgctgccagagtacctgcggcacggcgtacccgacgaatcctctctacgcttttcgatgagcggcgtacggcaccgccgagcggcaatcgacttaggaagccaattttctgttccggcaggtgaccagaggggcgctttcgagattgctagtgctgaagtgaattcagactatagcaactggctatccgaatggggtgagttaatgttgaccaacacgctgagtgatttggacgacatccttgactcgtag

SEQ ID NO: 58276 - DNA, 759 bp, Rhodopirellula sallentina SM41
atgaccgcgtttctaaagaaatggatgaacgttagccagccgcttgacgactgcgccgagcttgttgttttgacggaacagcccgccgcaaggaaggcaattgagaagacgctcgacttggtcgtaaaggatcatttcgcggacctcgatatcattcatcgcatcggcggataccgaaaatcgctagcgtatgtcaggaacaaactaccaacgaaaaagaaagtgcgatccggtgattttggcgagttgatgacgagtgagtacatcgatcaatacaccgagtattcggtccccatcaagaaactacgatggaaagacgatcgaaacacgactctgcgtggcaatgatgtgcttgcgattcagcgattgacgcgaggatccaaaatcctgaaagcggaatcgaagagccgtttgtccctcaataatgttactgtcaccgaggcacttgaggggcttgatggagatggaggacgaccgaatccaagttcgcttgcgtttatctcgtcgcgtttacgcgaacttggtcgagacgatgaagccgaggccttcgagaagctgcagcaacggttaatgccaccatccaaggttcggcacctcctgttcacactctctggtaacgctccattaaatttcctgtccaaagcaatcgttgattcatctcacccctacaagcgtgatattgttggatgcgtcattgaggaccaccaagagttcatagcggacgtattcgaccgaaattatggcagaagatccaaatga

SEQ ID NO: 58277 - DNA, 3402 bp, Rhodopirellula sallentina SM41
atggcagaagatccaaatgaccttgcacggcaaatcgaaactctggtccagccggggtttcgggagcagctattggcccgaggccttgctcgtgggttgatctggcaagacggtgaattgccgtccgacgcaccgtcatttgcgccgtccttgacgacagatctgctcgaccacggatttcagttgcttgcacagtcacttcgacttcgagacgttggccagttccccgacgttgttaggcggggcctttctgcagcggcagagtcgctcgaatctgcggctagacgtgaggcgacctcaagcaccaatcgcggattctatcttgtgatggctgcaggagcctttcatatcggcggatatgctgctcgcgcatacagtttgttttcgggcgaactggaaactttaaacttggctagttacgagcgatgtcttgttcagttaatgcgtcgtgatttgaatggcgttcgagacactgtctttcagtggatgaacaatcgagaaaatgatgatgcgagcgtgcagcgtcgtcttgaaactgacgatgactttggggctggtgatctactcgccattgctttaactcgcctgtttcttaaggcgattgcttcgttcgagttcgcactgctcactgggcgagcgacgtatcacgagcgtgcgatgggattccttcgcgacggctccaaagcgtcagcagaatccaaccatgttccactttggtggtctttcactgtcgcaagacacttgcttgacgatctttgggacaactcgcttcataatcgacttcctgtcggcggtggatctcctgagtggccacgacttcgccgcaagatgatcgatctactggcttcgcgttcagtcgctgaagttgacctttggccatcgcagcttcaagcagccggtcgcgttgtcgatactgaagatgatctagtgattgcgttgccaaccagtgcaggaaaaacgcgaatcgcagaactctgtattttgagatgccttgcagacggcctccgtgttgtctacgtcactccgctgcgtgcactgtcggcacaggttgagcacggattggcaagaacatttcgcccacttggattcagtgtcacttcggtctacggcgcaagtggaatcgcgaacgccgacatcgacacacttaggtcagcggcgatcgtggttgcaacgcccgagaagcttgactacgcgattcggcaagaacccgacacgattgacgatgttgggcttatcgtactcgatgaagggcacatgatcggtttaagcgagagagagattcggtatgagatgctggtgcaaaggttgctccgtcgcgacgactccagccaacgacgccttgtctgcttgtcggccgttttctcaccaggcgagtcgttcgatgatttcacgaactggcttcgcgacgataaaccaggaactgcaattcactcggcttggcggccaacacgccagcgtccaggtcggctgatgtggaatggtgaggtgggacgattagagcttgaagttggcgacgaaaaaccgttcgttccgcgatttgtgcaacaacaaacaccaacagtcggtaagcggagagtcttgttcccccgtgacgcgggcgaatttcttgttggtgcaacgagtgcgtttttggcacgtggccaaaacgtactcctgtattgtcctcagcgtcgttacgtcgaatcgaccgcaaaagcattcatcgagtcgcatcggcaggccttctttgcctatgacgcaggggctcgattcgttgacacaattgcagacgctgttcggattggaacggaatggttgggggcgaatcacattgcagtttctagcctaaagctaggcatcgccgttcatcacggagcactgccaaggcagtttctcgctgaaatcgaggcactattgcgacaaggtgtgttgcgagtcgtcatttgctcgccgacgctggcacagggagtcgacttgaatttcagcgtattgcttttcaagtcaatctataaaatgggccgagatcctattgatgcaaaggatttcgcgaacgtcgttggacgcgtcggacgggcgttcgtcgatttggacggactttacgtgttgccactttttgatcaagacgtaagaaagaattcgcggagccaaagagacttccgagctcttatcagcaaggcgaaaagcaggctactcgaaagcggagtgcgactactcgttgggcacatcattgacgttttgcaatcgagactcgggggcgatcctcagtcagttcgcgagtacgtcctgaaccaagaaagtacatgggaagtggaggctcgtgaggacgaatgggaaaagtggctcgacgtcgcattaaatgagttggacacagcgattcttggggtcattgacgtgctggatttgcccacggagtcactcgctgattacctggatcaatgtttgcaaagttcattttggcaacgccgcttggctaaggagccaacagaacttcgagagctacacggtgacgtaattcgtggacgtgccacgtggctatggtcaaacactaaccttgcatcgcgaagagcattcttttctgcaggaattggctacaaagccggaacggaaatttcccagtacttggacgacctacaatccaatcttgccgctgctgaatcgttgctaggcacgaatgagattgacacagcagtgaatcacatcaattttgtcgcgaaaattcttttcggcattcatccttttgaaccagaaaaacaagaggacaattgggagacattacttaagcactgggtgaaggggactgctcttggtgagttcgccgacaacacggggattcactttatccaacaagacgttgtctatcgcttggtttggggcatcgaaacagcacgtagccatctggagtttctcagtgaaagcaaaaatgatgctccaggagctttggtggctcagtgtttgacgtttggagtacccacacaaacatcggcgttcttcatgcaagctggcttgcagtcacgaaccatggctacattgatgcccacaatgatcggaatggagctctcaactttcgacgaactacgtgaatggtttggccagtacagttccggtgcgttgggggaacttgaatggtcaagtaacgatcaccaggccgagtggaagcgtttttcgcaacaattcaaccatcacgacgttcgggtacttagcaatattgtggtgaagatggctgtgacatgggactccaaaaagccgccacgagacagagtgagagttcgagttaagcgtgatgtgggctccgaagcgacagtttttagccaagcgtatcgtcgcctcgggtccacgaagattcctccgtcgataaagtccgacgaattcactggtctagtaaggaatgacggtagcaagattgcggttcgcgtttttgggtga

SEQ ID NO: 58278 - DNA, 816 bp, Pseudomonas sp. FH1
atgtcgtttactgtagagcatgtgcagtggctagaagacacaggggagcgtgtcgtgtccgtatgcggaaagtcgataccaatttttaagctatcccatgacgcttccaacgaaaaaataatgtctgcatgggctcgttattttagaaaccattattgttctgatgagcaaattgaatacataaaaaatccatcgaagacaaactctgaatatttgttgactgaaaaattcccgcacgaacaaaatcctcccgggcccagcattcgggcaggtgatttcgctgaaattctagttgcggattacctcgaatttgttaggttctataaagttccccgtactcggtatgagcggaaaattattgctaatgaatcttcaaaaggatcagacgtaatagcgtttagaaaagagcctggggttataagtgccacggatgaattattaattttcgaagttaaagcaaaggccagtgagaacagcaaaaataacgtgcttcaaaccgcaattgatgactctgtgaaagatgagatgcgaattgcagagtctctgaatgctatgaagcaaagactactggataagtatgatttggatggcgttcagttagtggatagatttcaacgcgaaccagatcatccttttaaacgtatttacggtgctgcggctgtggttacagagacctcatttaattcagtgataatttcgggatctactacagccaagcatcctaaagcgcaagagctagaattgattgttattcgctccgtacaattaatgcctttagttcatgctctgtataagagggcagcagatgaagcttga

SEQ ID NO: 58279 - DNA, 3111 bp, Pseudomonas sp. FH1
atgaagcttgaaactaactcgaagattttgctagatataactcgcgcaaagtctaagttgtacgaatttgggattgaggaagaataccatcttccattgacagataacccaaagaaactgttggtttttactatcggtattctaggcgagctagctgctttggaggctcggccagcggatatgagaaacgggtatcgtgctgagctgaaagagcagttggttttggttggtcaatatttcgatgctcttagcacttcgagacttactccggacatagatgcatatctaaaaatgcttgggtcggcttcgtactatctcgcggatatgccaggcagctcattggttttagctaaaatgctttcagatcaacctgaacagttaagtgagggatatcttgagagttttcttatatggcttttaaaggccgacgtcgccagcgtttggtattatcttgagggggcaccgttcaatggtgagctattcgaggtgttaacaatttacaaaaagttttgggcccaaggtgcccagtttcgagatgttgaaatagtggcaaaaaaacttcgtgataaggtttatgagtctggatctgatagagagcttcttttaatcgatacaatagtctcagtgatgctgcgcagaatttctaactcatcaataatatgtcttccaaagtatacaggtcttccatcagaaatttggggtgcagcgttaaatggtgctctattcgtaaaagagttttggccagcacagagacttctcggtgaacgaggggtgcttcgtggcatatctgctgtagtacaaatgcctacgagtgcgggtaaaactaaatcagcagaactgataattcgcagctcatttttgtcaggtcggtcgaaactggcagtggtgattgcgccattccgggctttatgccgagaaatatcccaaaattttgagcgcgcttttgagggtgattctattagcgtgaatgagttgagagatgtaaccaacgttgatgaagctgaggatagttttctgaaattcctcttaggcgattctttcaaaggtggaaaggaatatactgttcttgtttcaacgcccgaaaagatggtttacctgttgcgtcatgaacccatgctttcatctaagattgggctgctgattttcgatgaagggcatcaatttgacagtgggaaccgaggagttacctatgaattgttgattgcatcccttaaggctaccgtgcaatacgacgctcagaaggttctcatatccgctgtgatggccaatgcggaaactattggggaatggttgaatggcgagcgagggataagcattcaaggaagcaaatggttgccttcgctcaaaagcgttgctttctttagttggcgtactgaaatggggcagttgagttacctcagtctggacagttttaatgatagcggattgtacgttcctcgcattgtgcagcagattaatctcggtaagagaggtagggaacgaagtgatagattgtttccagacaagtctaagcctcaaacgatatcaacctatctgggattgaagttgtctgctcaaggtccagttgcgcttttttgcggcgataaaagatctattactagtattagcaaaatgttgattgagtattattctagggggcttaatttacctgcgcctcgattgtcctctgatggcgaagaattggataaaatagcttttcttgcaacactacactttgggagtgatcatgtgcttcctaaagctatttccatggggttgctgccacatagtgcaaacatacctaatggaataagaatcgcagtagagtgggccatggtgaatgataagggaagtttcgtagtttgtacctctactttggctcagggcgtgaatctgccaattaagtaccttattgtatccagtacgatgcaaggtgggaaaaagatatcgacacgagattttcagaacctaattggccgagctggacggtctggctaccatactgaaggaagcattatctttgcagacccgaaactatatgatgagcgatttacgagggatgggagatttcgctgggcggaagcgcttgaattgcttgacttcaataatgctgaagactgtttgagcagcttgaaagagcttattaagccatttagtgctgcttatgcaactgatcatttaatggcgtttttatcgaatccagcccagcataggatggattgggtgaattgggcagcgcaatcaggtaacgatataagtattttgctggacgagatggatgacaagcaacaaattattaattccatcgaaagctactttctttctgttttgaaggatgatccgaaacttcttaaagaagatggagtgatcagtcttttacatcaaacactggcttttcacctggctaatattacagagcgattggctctggaaaatattttcaagttgttatctgagcgactttttagactagaagagtataagtttagctattacggtaagacattgttggggttggatcagcttcagtatattgattcatgggtcgattcggcttcattcgaattgggcttggcagagacgtcaaatgacctgctagatctttcgtggggtttaatacagttatttgctaggcgtaagattgtcatgaatatacaacctccagagttggttattgagctgtcgaagttatggatggcgggaaatagctatcacgagcttcttgcgcatgctaggagcagtggaggtagttgtcaggcaaaaacaaaaatattaaatatcacactagaccacataatggaccttacagcgtcgcttgcatacgacggaatgctcatagtgggcggggtcgcagatatattagaggggcgtgggtttgacgaggaccgcgtaaggctgatgcgttcacttcagaatatgctaaagcttggaatgtcttcggagtttcaaatgtggttgtacagtaaaggttttacggatagagaggtgtgccgccttctacataaaaaaatagaagatgccggaatcattcccgacatcttggattttaatattcttaaaaataatcacgaattagtgtcagaggtcttgtcaatactccctacagttttttcggatgtgattataaagtga

SEQ ID NO: 58280 - DNA, 798 bp, Mesorhizobium sp. L103C119B0
ttgaactggctagtcgataccggggagcgtcaggcgacggcgtgcggccgcgaaatcgagatctgggagctcaatccacaggacgatgctgaaattctatcgaattgggctaggtattttcgcaaacattatatcgccgatgctgatttgccgttcatggcaggcggcaccgggctcgaccatgcagattatctgcgaacgattctcttccccgatgcgaaggtggcacctgggccgagcctccgatcaggagactttggcgagatcatcgttgccgacttcatcgaatatttcctgggatattggtgcccgcgcgagctgcgctaccaggatcgctggaaccgaaatgactcgacaaaggggtgcgatgtcatcgggttcaaattcgcgaacgaggacaatcccggcccggccgacgagctttttatcttcgagtccaaatccggcatgtcggcgaccgacgcgaaccggctccaagatgcgatcgatgacagcatcaaggacagacttcgcgagggcatgagcctcaatgccatcaaacggcgcttcttcgatcggggcgagatgggcgatgcccgcaaggtcgagcgctttcagaaccaggccgaccgaccctttcgccggatcaacggcgcggccgccattctcgatgaggccgtcttcgccgagtccgatctcgcggcgaccgacggtgcggctcatttcaaccaagagaatctgcgccttctggtgatccgcggaccgtcgctaatgaagctcgtgcacgcgctttacgagagggcagccgatgaggcctga

SEQ ID NO: 58281 - DNA, 3120 bp, Mesorhizobium sp. L103C119B0
atgaggcctgaggcgaccgcgctcaccatcctgtccaccgcgctagcacgggcaaagatgcacgaattccgcgtcgcgccggcggatttcaatgcgctgccgcgcgacccgtcgatgctcttttcgttggcgatcggcattctgggtgacgttgcggccgccgtcgccgacacgctcgaaggtgcggccgtcgcaccggccgcgcttccccagccgctcggctggggcgagctggacgaagatccacaagacgtgctgcgcttcgcctcgatcttcttcgatgcctatctgaacgcgcagctcgatgctgacctggacaccgagttttccctgctgtgcgccgcggcttattacatcaccgggaatgtcggcagcgcgaccgtgatcatacggcagatggcggcgcccgatctcgacctcgcgggcggcctcggccatctcgtctacagcatcctccagaacagcttcgttcccattcaggcgcctcacgctcatcaagcggtgacgagcgagctcctacaggcgttgggcggctatttcagctttgaggctgaagcaggtggcattgccgaggtttgccgcgcactccgtgagtatttccaccaatctggctcgccgcgcgaattgctctacgccgacattgccggcgccttgtgtgcgctcaagctcagaaacgccgcgcggaccatcctaccggcagcatcaggcttggagccgggcgtctggcgcccggcgctcgccaagccgcattttccgatcgagctttggcccgcccagcagcggatcgcggatgccggcgtgttcgccggtcgctccgcggtcatccagatgccgacgagcgcgggcaagacccgcgccaccgaaatcatcattcgatcggcctttctatcgggtcgagcgcacctggttgtcatcgtcgccccctatcgttcgctctgccacgacatccggggcgacctggtgaccgcctttgccggcgagaatgtgcggctggacgaagcatcggacgcctatcagttcgacctcgctctcgatgcgctgttcgccgaagactcggtgctgatcgtcacgcccgaaaagctcctctacatgctgcgccgggctcccgacctcgccgagcggatcggtctggtgatctacgacgaagggcatcaattcgacgggatgacacgggggccaacctacgagctcctcctcacctcgctgcgcatgtcgctccccgccgagacccaaatcattctcatctccgccgtgattggcaacgcgccggatgtcgccgcatggctgatcggcgatgccgatgcggttgtcggcgccgagggcctgctgccgacgaccaagagcatcgcgttcgcgagctggcaggaccagcgcgggcggctcgaatatgtgaagcccgaggatccggccgagcgagaatatttcgtgccgcgcatcatcggcgatatcgctctgccgctccgcggcaaggaaactgcccagcgcagatttcccgagaagaccggcggtgacgtcggtctgttcctcggcctgcacgtcgtgcgcaacggcagcgttgcgatcttctgcggccgaaaggacagcgtgacgaaaatctgctcgcgcgccgtcgaaatcatcgatcgcggcgtcgcgctcgaatggccgatcgaaacctcggatgtcgccgaggtggagaagatccgcgcgctttgcgaacttgagctcggagccggcgcgtcggcgacccgcgcggcagcgcttgggatattcgcccatcatgccgacacgccgcacggcatccggctcgcgatcgaacacgccatgaaagacgggctggcgaagttcgtcatttgcacctcgaccctggcccaaggtgtcaactttccgctcaaatatctgatcgtcacatcgacgcgccagggcggcgaacagatcctggtgcgcgacttccacaatttgataggccgcgccggtcgtgccggaatgcacaccgagggcagcgtcatcttctcgacaccgtccatctacgatcagcggcagcaatttcgtggccagtggacgtggaaccgcgccatcgaactcctcgacgctcgaaactccgaaccgtctcgcagctcgatccttgcgctgttcgatgcgtatcagcagcgccagccgccgatcgtccaggagatcccgcccgagtggctcgatctcgccttcgccgatgccgcccggatcgatgaggtcgtggccgcagcgctcgcggcgcaacctaatatcagcgaacgggaattccgccggttcatcgaaagccgcgcccgcgctgtccagaacgttgccgccttcctcgttgccaacatgacttttgccgaaggcgaggacgccgcagcgcggaccggcgaacttgcggccaatacgttggcccatcacctcgctgacgaggagacgcgggttcgtctcgtcgaagtgtttcggtcgatcggggagtcgatcgcggccaacaccgatggcgaccagcgcgctctcattcgacggtcgcccctaccaccggcggcggttgccgaactcaagacctggctcaccgataatctcgagatcctccagacggcagtgcaggagaaccggctgttcgccgaaatttctccgttggcgctccgtttcgccacgtcccgcgcgatccaggcgatcagcgttcaggatttacttccgcgcgctctccaagagtgggtggcgggcagatcctatgccgtgatcttcgacacattggctgaggcaaaagttcgggtcgggcgtgaccatgtcaccgtcgaagatgctgttgcgctgtgcgagggcggcttcggctacgatgttgcgatgatcgctgcatcgatagcggatctgaccgaggagctggacgacgcactgcacacgaacgccagcttgcttcaaaagcagatcaaatacggcctgaccgatcgcgcggcaattgcgtttcacgaggccgggttcgcggatcggcatgtcgcgagtcttctcggtctcgtctggggaaatgtcgtcgaccggggcggcgtccgcgcagcctgccagcaagaggagatcgtacgcgcggtgctcgcgcacattccaagctatttcgtcagggtcgctgctgagctaggaggatgggcctaa

SEQ ID NO: 58282 - DNA, 816 bp, Mesorhizobium sp. LNJC384A00
atcatggcggcacctgcgcacatcggctggctaaagaagacggcgaccaatgttgccacgaccgaaggcgtcgaggtcgaggtctgggatctggaacaccagccagacgacgcagtgctatcgtcgtgggccaagcatttcaggcagcactactgcaaggacgaagagttaccggactttatcgagggcacggggcacacgccagccacctatctcgcgacagtgaagtttccagacccagtccatcctcctggaccgggtacacgctcgggtgacttcggcgaaatcctgcttgccgacttcgcggagtacatcttgggttattggtgcccccgggagggtagatacgagaaccgcgacaaccggaacgttccgtcgaacggctgcgacgtggtcgcatttaagttccatggcgacgatcctgttcacccgaaggacgagcttcttctcattgagtcgaaggcgggcttaaaggcaaagaaacagaaccggttgcagaacgcggttgaggattccatcaaggacatcacacgcgaggcgatgtccctgaacgccatcaaacaacgtctcctgcgcaccgaccggctggcggccaaacgtgtgcagcgcttccagaaccaaaacgatcgcccgttcaaacgcgtgaacgccgccggagccgtgctcgatcaagacgtattcgacagcgtcgatttcacgacgacgctcgccaagcatcatcccaacttcaaaaacctgaagcttctcatcatccggggcacgtcgatgatgaacctggtacatgccctttacgatcgagccgctaatgaggcctaa

SEQ ID NO: 58283 - DNA, 3126 bp, Mesorhizobium sp. LNJC384A00
atgaggcctaagaacaactcgatccaactgctggcttccgtcaggtcccgggccaagatgcacgagttcagggcagcggaagccgactacaacgagttcacgcgcgcgccggactcgctggtggtgctagcgatcggaatattgggcgattccgcggcggcgcttgcggaccggttcatcacttccgacacagagagcgccatgccaaggtcctgggatgaaccggatggatcgatccgggacatggttcacttctccgcccggtatttcgacgccttcttggaatcaaggctggacgaggatctgaccaacgagttctccctgctgtgcgccacctcctactatctgtccgacagtatcggcagtgcggcggtcgtgatgaagaggacagaatctccagccctcgagttggggcatggtctcgcctttctggcctatcggattctgaaagggcttttcgcgccggtcgaggagtcgttcgcgcaccgtttgttcgccaatagaatgttagccgctctccgggcgttttacgccctgcagggcggagccgaggaaattcgtctcctctgcgaggaactcaaggcgcatgcttatttggccgggtcggcccgggagctgctctacgccgacgtggtgatagcgcttgtctcccgcaaactggacggagcggccaggacgcttctgcccccgagttcgggccttgatttggccgattgggcaccggccttgaggaaaggatcgttcccaacggagctctggccagcccagagactgctttgcgaacagggaattttgagcggacgttccgcggtgatccagatgccaacgtcggccggcaaaacccgcgccaccgagttcttgatccgcgcccatttcctagcacagcgatcgtccctggtcgtcattgtgggtccattcaggtcactgtgccacgatatccgttcggatctggtgcgctcattcgccggcgaagatgtcctgattaacgagatctcggattcgtaccttttcgacatcgatctcgcgggagcgcgaagacagaattcggtgttcgtggtgacacccgaaaagctcctttacatgcttcggcgtaagcccgaattcgccgaagaggtcggattggtcgtttatgatgaaggacatcagttcgacggactgacccgtgggccaacatatgaacttctgctagcgtccatgcgcatctcgctgcctacgaacgcccaggtcgtattgatctctgccgtcatcgggaacgcggccgagattgccggttggctcgtcggcgacgagaccgcggtggtgtcgggatcgggattgctgccgacggctaggaacatcgccttcgccagctggcagttcgagcgggcctggttgcgctacgtcagcccggccgatccgaacgcggatgaattcttcgtgccccgcatcgttgagtccaaagtactggccaaaaagggtcgcgaactgaaggtgaaacgtttccccgaacgcggcaccaccagaagcaacaccgacataggcctctttctcggtcagcatctcgccgcaaacggcagcgtggccattttctgcgggaagaaggagagcgtcggcacggtctgcgaccgcgccgtcgaaattgcagggcgcggcttggagctcgattggccggcggcttgctccgacgaaaacgagatccgcaagattgccgatctatgccaaactcacctcggagatggtcgagtatccaaagctgcgaagctcgggatcctgtcgcaccacgccaacacgccgccgggcctgcggctgtcgatcgaacatgctatgaaggcgggtctggctcgtatggtagtctgcacctccaccttagcgcagggcgtaaatttcccgatccgctacttggtggtgacgtccacccagcagggcaaagaagagatagcggtgcgcgacttccacaacctgatgggtcgtgcgggccgggcaggcatgtataccgaaggcaacgtgatcttttccgcgccatcgctctacgacgataaaaagaaagacggccgatggcgttggtcgaagaccaccaggctgctggatgcggataattcggaaccgtcggcgagcagcattctcaagcttttcgtcagcttcgagcagaaggtaaaaggaaagccgaccatcacattggatctgccgacggaatggctcgatctcacattcgctaccaagcagaccatcgcggcgtataccgccgccgcggtgagcgagcgccccgggctaatagggaaggacttcagcaggtttctttccgaccgggcgcgcgcggtgcaaagcatagcatcgtatctactgtcctacgttgatttcgagagtgaccttgccgaggagcgtgtggaggaactggcgcggagcaccctagcatatcatctctccgacgacgatctgagggtcaaggtcctggccgtttttcaggcggccgccaaagccgtccaacaagggacggacctcagcctgatcaaactggtccgaaagtcgccactaccgccggcggacgtcaaggctttggcgcaatggatcgacatgcatctggaccggctcgcggcaatcgaaaccgaggaagagctgttgaccgcgattatggaaaaggcggcacggcacgcccacgcaccggtcttggcggcggtacccgaggcaatgcggccggattgccttgccgactggatcgccggcaggacctactacgaaatccgagcgcggctgacagccgcccatgtcaagttcggtaacgcgagagcgacttcggagcacgtcgtccacctgtgcgaaagcggttacgcgtacgacctgtcgatggtcgttgctgcattggccgatctcgttgaggagcgatccgaagatctgcatgcgcggctggtgaccgtccagaaaaagatcaagtacggtctgtccagtgacgcggctattgcgttccaagaggctggattcgccgacagagtggtggcccaggcccttggcgacgcgttcccggtcatcgatggctatcgcgacgtggtcacagcatgtcggacgcagcgagaattggtactggccactattgaaccgttcccaagatacttcgaggaggtcgcgctcgagctctcgtccggctatgactga

SEQ ID NO: 58284 - DNA, 795 bp, Salinispira pacifica
atgaaaaaaactataattgatctactctacccctattctggtccatctccaatagttgatgttgaagtatattctatcccccaaaaatgtaatgtttatttggtggatttgctgtctggtgagctgtctcaatgctatatatcaggcaccaaattacagacacagcaattacgtactggtttgtcaataagagaaattctgaagagtgttttccctgatagaggtagcgtaatggcaggtgatttcggtgaaatttttacgctcaattacttatctgattatgcccattcagaagttcataaagtatataaatggagatacaagcaagatagaaataaacctgctccgcatacagatgttattgtaatatttcgagactctgatgatactgcttcagctaatgactatgtactaagcgcggaagccaaagttaagtcgactaatggaaatttttcaccaattgaggcctcaattgaaggagcagcaaatgataaaacaggaagattggcgcgaactcttgtttggttgaaggaacaagcaataaagcatgaaaataaagaaaccatagagtatatatctcgattcacagatcagcttttagagacgagttttaaaaagaagtatcgcgctgtatcactcatagacatgaattatattggacaagaattagctaaagatatttgtgtgccagaaatatcagatgatttcagggttatagcatttggtattcacaatttaaaacaactttatgaagaaacatatagctcgcctgtagagcaggatttgcatgagtaa

SEQ ID NO: 58285 - DNA, 2943 bp, Salinispira pacifica
atgagtaaactcttacgaaacttaatggctgaaattgaatcgtgggagagtgcaactgagtttggtatatcagagagtgagtgggcagattatcaggtaaaaaaaagaagtgatgatttatatattgcattgatttcaatgatctttgatcagttaaatggccgagtggatagcgcttcttcagtcccgttaattgatcttgcgaaagcattgcttgtatattcaaaaagcactgccgcaaagtatatcaccggtgtagagagagatttgaatttactttattgtgcatcggtgttttacattgcgggatattcagctaccgcaacatatttagttggctatatatcaaagactgattccctaagtgaggaagaacaaattattgtcaattttctaaatcgcgacttagatattgacgggacttggtatgagaagcttaatagccatctagaatattcaaatccaaatgcattagatgagctactactcgaatttcaagcgaataaaaaacgaggcttggaaacagacccaaggctattcattgcctcaagttttatggcagaaattataagtcaatttaagaaacaatcattggtaacaaccttagttcgaaatagttcaggtttcaattatgagaagtgggcgccactattaagtaatcatggatcgacattcaaattatgggagttgtttccatcccaaattaaaatgctggatagtggcgtcttatatactgaaaatactatttatagcatgcaaatgcccacatcttccggtaaaacttctttaactgagattattatttataacgaagtcaaaatactaaatagaagagttctttttttggtcccctttagagcacttgcttctgaaattgcaattggaattactaagcggttaagtgctgcacaagtgagggttgttgcaagttacggtggaaatttgccaacaaaagtacaaggacttacgcttgaagattcggatgtccttattattacacctgagaaattcattgctttatcccagttcgagccaggcatcgggagcggctttgatacaataatttgtgatgaaggtcacttgattgatgataataatcgagggttccaatatgaattactcctaaccagattaattaaagcagaaaatgcatctaagaaggtgattttcatgtcggctatcttaccaaatgttaatgatatccataaatggttaggtggaagctcacgcacattagtcgaatctcattataaacctgtcgagtctgattttgcatttatccggagacaagatgaccgttcttgggcattggattttaatactatatatgaaagacctaaaagctatttcatacttaattttttaacaaaagaagatttcaggtataagaacctcgctacaaatagatatagactacttgggaactattcaacaaatactagcttggcatgcgctgtagcgctaaaggcaaggaaaactggaccagttgctgtttttacgactatgaaagggagcaatgggattaatggactagccgataccatgataaattttcataatcttaatgtgaatattgtatctaagccaattgataatacatcgaaaaaacttactttgctatgccgctatatagaattgcattttggcagcgaatatcgactctctaaattattgaagtttggaattggttttcatcatggtgatctgcctcaggagatccgtagggaaattgaggacgctatacaatccggtattattcaagtgttactttgtacaagtacgttggcagaaggggtgaacttgcctatacggaccttaatcgtacataccataaggcggtacgatgggaatcgtctttcacccattaataacaggaatattaagaatattattgggagagttggtagagcaggaaaggagacgaagggtaggataattgttgtaaacgataacgagcgcaatattttagaaaatgtcttccgagaacagaatatggagcctgcaaaaggagctctttttaagctagtggatatcattaacacagcaataaacgacttcgaaatcgaacttaataatgatttattagaggcacaagacaacagttttctagctacgttagatcgaattgatattgcattaatcgaaataatgccgatggaaatgcttaatgagggagtagagcaatttgtggatgagcttgtcgagaaaacactcgcttatcaattttgttcgacaatcgaacttcaacagagaataaagcaaattttcaatttgagaataaactattttcatgacacagtgcctgtggagcaacgaataggagtaaaaaatagtggttcttcacctcgattctggagccttgttagggatatagagattgataaaaatccaatctggagggaactggatgaagttttttctgaagaatggatggatgaaataatcggtagcatccttgatctgacggttatgcaacttgaaaatgaatcatttataatccgtaaagtgattgaaagctggatgtctggttgtacctattatgagattgctgaggtaatcaacgaggatatagaaaccgcgcttaagattctcagtaaagatatcggctattcgttattggaagctctgaataggcttattgttttagtctcggagattcatgaggatatgcaagtttcagaaatagcgatgaattgggggaatctcttacagtatggattaggtagtctgcaacaacttgatctattcaatttcggtgcatctgatcgacttgccgtttggagcatttcaagatttattgagattaatgatatttcatatcgtggtgctgagttaattcaagaaatacggatacaatcctcttcattaatagcctttttatcgaatgacagcagagtaccacaactaagtattaacagaattcgggctgaaattggattttaa

SEQ ID NO: 58286 - DNA, 840 bp, Enterobacter sp. MGH 22
atggttacaatgaatgctggacaaccgtactcagcttggctcaaaaaagctgaacatagcataaccacttctgacggcaatgaggtagaggtatacgagctcgaaatcgatcttgaagcagggcttgtactatccgcatgggccaaacatttccgtgagcattactgtcttgatagccaaattgatcgcctgcgcagagggactaacaaatcgcgagccgagtatttgagagacttggtgtttcctgatgagtctgaagattttggcccagcaacgcgctccggtgattttgctgaaatccttatcgcggatctacttgaaagccattttggtttttgggttccacgtacccgatatgacaacaaaatggttcgcaacgagtccccaaagggaacagatgtcttagcgtttaagtttgatggcataggcccatcacggccatctacaaaagatatcttgatttcttttgagtcgaaagcacaactcagtggtaagaaagcaaagcctagattgcaagacgccgttatcgactcgataaaggatgtgtatagaatttcagaatcccttaatgcgatgaagcgccgtttaattgatcgtcaagatgaagaaggtgcagatcgcgtggaacgctttcaagaagggttggatgtcccttatgtacgaatgacaggggcggcggctgttttttgttcaagtctttatgatccggttcatatatctaaaactacagactgcacttcgcatgaaaatattaaaaaccttatgttggttgtgatacatgctaaatcgcttatgaaatttgttcacgctctctattggagggcagaaaatgaagcctaa

SEQ ID NO: 58287 - DNA, 3186 bp, Enterobacter sp. MGH 22
atgaagcctaaaaaacgtgctcgatatgcggcggcagttacgctatcaaaaggaaaaatgtttgagtatggagttcctgaaggagaccatatagagcttcctgatgatctcaatttggagatgcagtttccattagctgttggtactgtcggtgactttgcgtccgaagtggtggctaagaccatcggcaattcgattgaagcacaatcccaaaccccactggatgaggttattttttcggctcaagtccttcaagcttttgacgattccctgcttaacaaagaactctccttcaatcttcgcatacttgccgctgctggtttctatcttggcgatgtacccggaaatgctgcagtccaattatctaaactgagccaactagattttcctaagcacgatactttagctattgcagttaaaactgcgatggatcggccttgggagcataccaacgagacactagagtcttcacgtgcaaaagatattttggatgttttgagccaacacttcagaaatggcctgaatggccgacagaaagcctatgatgctattaaatcattgcgcgaatgggcctatagccatgcgtctgcacatgacctacttatggccgatttgctcggagcgattagtgccactcgcatcgctaattctgcttggacattacttccacgctatagcaacctcccgcaagaaaagtgggatacatatttatcgcgttctatgtcaattaaggaaatgtggccatctcagcgcttgctaggagatgctggattgtataaagggacatcaggtgttgttcagatgccgacgagcgccgggaaatctagagctaccgagcttattattcggtcggcatttctttctgctcgtacgaaattggctttagttattgcccccttccgcgcactatgccaagagatagcaaacgatcttgaaaaggcattcaaggatgatggctatgacgtcaatcaacccagtgacgcgttgcaaccagatgtcgagttcgatttttctaacttatcagattttctcgatttggaatctggaatatttgactcagaggtcgaatcgaagccacaagtcattattcttaccccggaaaagcttctttacatacttcgacaagagccagacattgttcagaaagctggattggtagtttatgacgaagggcatcagtttgacacaggcagccggggtgtaacttatgaactgctgttaacatccattaagcgaatgctacacgaaaatgcccagagcgtgttgatttcagcagtaattcagaatgctgcttctgttgctgcatggctattaaatgacggttcaaaggttgtctccagtagagccttacaggctagtagactcattgcctttgccagccttccgaaaggtaaagatggtcaacttcagttcaatgtggcctctgatagcgatcagaaattctttgtcccgcgagttattgtttcagaaaaaatgcctcgattacctaaggaaagaaaggatcgttttttccctactcaggagagtggctccatagcgttatatcttagtttacgtctgctgaaaaatggtggggttgctattttcacaggaagaaagtcttctgctgcaaaaattgttcgtgaggccgccgaagatatttttcgtcgtggaatttcacttgagccaccttctgcccatagtgaccctaatgagattcgtcgctttgtttatctcttcgaacgtaattttggtgctaatgcatatttgacacaagcagctgctttaggcatttttgctcatcacggcaacactccccaaggtgttcgtctggctattgagtatgctatgaggcaaagccttattcgattgatcatctgcacctcgacgcttgcacagggtgttaaccttccgattcgatacctacttgtaacaagcgcaatgcaggggcgtgaatcgatcaaagtacgcgacttccataatctcatgggacgcgctggacgtgccggaatgtacggtgagggtactgttattttcactgacccccgtctctatgacgagcgtttcgcaaagacgtaccgttggcaagaaacgatcaatctaatcaatcctgatagtgctgagccaactggaagtacattgctttctcttttcgatcctctgcgaaatgacctcggaacagttattctaagctctccaagctctgctgaagtagccacttacattgtcaatgactgggaagctcttttaaagtgggtagagagcgttcctatcaatattcctaaacagaacttttcggtcgcttcactaatcgaacaacttaaatccaagaaaaagataattgaagctgttgaaagcttcttaatgacatatcgtagtgatgttcagcccgaaacttttgtggacaactctcgagaattggttactgaaacacttgcctactcgcttgccactgaagagcaaaaaatactcctgacagatatcttcgagtctgtggcgcgaaggatcgaactttttgttccagatacagcgatccagaagcgtttcgggcggactttgttaggtattgatcaagcgttggcaatcgaatcatgggtcactacaaatgcaaacgcactcgagggagcaacctctgccgatcacctgtttgatatgctatggccgcttttagtactcttatctaatgaaaaacggttgagcgacatagttcctaatggggcacttaagaaattagcattggggtggctggctggagattcgtttgcagctctcgttcaacggcttgacaaattgggtgcatcctatccctatggtgcgaaccaaagaaaatttgatcttgatgtggttgtagacctgtgtgaacaaacatttggctttgagtttgcgctgttgctcgcagcggtaaaggaatcctttctcgcgttctcttcagaacatgcgggtgaggtttttagagaatatgttgatcttcttcagaagcgattgaaatatggacttccgaatcagagttgcattgccttttttgaagcgggatttgctgaacgcgtaattgcccagtgtcttgcagaaggaacgactcaaggtgctattcaagttagttttgacgcccgacacatgattcgacaaaacccagagagatttgaagtaatgctacaaggcttcccatcttatttttttgatgtatttaaaacgatcactgcaccttga

SEQ ID NO: 58288 - DNA, 780 bp, Agrobacterium sp. JL28; identical to SEQ ID NO: 56488

SEQ ID NO: 58289 - DNA, 3519 bp, Agrobacterium sp. JL28; identical to SEQ ID NO: 56489

SEQ ID NO: 58290 - DNA, 585 bp, Alcanivorax sp. PN-3
ttgattgagggcaaacttccgacgacgaaggctatccgttcgggcgatctcggtgaaatctttgccacggaatggatcgacgctcacagtggtggctatcacgcaccgatcaaacgattgcgctggaaagaccatcggaacatggcgatgcgcggcgaagacgtaattggtattctccaagatccgcaaacacagctgttacactttttgaagactgaggctaaaagccgagctactttgacggctcaggtagtgtctgaagcgcgagcgaatctagacaaggatgggggacttccatcggggcatgctctttcatttatctcggcgcgtttgcttgaactcggcaatgaaccattggccgatgcgattgatgacgctttgctcaagtacggaattctgcccgcaaacgtaaggcatcttctattcacgttctctggtaattccccagaggcgatgttgactgcctcacttcaggcatatccgggcgccttcagccagtggggtattggccttcacgtcgatggacatgctgcttttatcggcgctatctatgatcaggtgattgcgaatgccaacgacgcctga

SEQ ID NO: 58291 - DNA, 3519 bp, Alcanivorax sp. PN-3
atgccaacgacgcctgaagcgatcatcgcagacatcactgaagcggcagcagcgggatttcgcgggcgcctgatcgctcgcggacaggccagagcgatcatttggcgcgacggcgtattaccaccagatgccccagcatttgcacctcagctcagctacgatttgcactcctacggttatgcgctgctcggccttggtcttcgccttcgcgaacttggcggcgatgccgcgcaggcgcgtatcgcctttgagcaggcggccaccgctctcgaagctgtcattgccaaggggaatcgggaggaagtcgatcgtgactttcactttgtcatggcggctgcgagctatcatctcgcacacctctctgcccgtgcttactctctactcgctatcgttgaaaacgatgagaatttctcgctgattgagcgggtgctcgcccgtttgatgcgccgcgacttaggcgctcttcgtgccagcgtgctcgaccaccgagcgagcggcgaaggcagcgatgaccggatagccgctgctattcaagcccatctcaacgaagccgaagatggagtaaatcccgtcgattctggcaacgactttcttttcgagagcctcgacacggcattgaccgattccttcctagcggcaatgtccctgtttctcctggctgtggaacgtggtgaacgaccgttgctcgatcaagcaattgggcgacttcgggagagtctcaccatttgcagtgagttgaacatgctgccgcaatggtgggtgcatcgcatcgcgatccacctcttgtcggacctctggtcgaccacgttccacgagagagtgcccctccagccggcaggcggagacgcggctgactggtctcggcttcgcgaactgttcatcgcactgcttcaacgacgtcccaaagcggaggtcgatctgtggccgtcgcagatcgaagcagcgacccgtgctgtcgatcaatctgacgacttagtggtttctctgcctacaagtgctggcaagacgcgaattgctgaactctgcatattacgctgcttggcaggcggcaaacgagttgtcttcattacaccgctacgagccctctcagcccaaaccgagaccacgctgcagaggacattcggcccgctcggcaagacgatctcggcgctctatggcagcatcggtgtcagcggtttcgacgaagacgcgatcaaggaacgggatatcgtagtggcgacaccggagaagcttgacttcgcgctgcgtaacgacccatcccttctcaatgacgttggactgctcatctttgatgaaggacacatgatcggtcttaacgagcgcgaggtccgctatgaagtacagatccagagacttctccgccgtccggatgcgcacgaacgacggattgtatgcctctcggcgatcttgcctgatggcgatcagctcgacgatttcgctgcgtggctacgtcgcgaccatcccggcggcctcgtcagaaatgattggcgtccgacacggctgcggttcggcgaggtactatggacttcgcccaccgcgcggttgaacctgcgcattggagaggagcgaccttgggtgcaacggtttctaatcggcgcagccccaccgaactggattccgccaaaaaggcaacggaaacgcctcttccccgataatcaacgcgaactctgcctagcgactgcgtggcggctgatagaggatggacagaccgtcctgattttctgtccggagcgccgaagcgtcgagccctttgctgacgtgatcgtcgaccttcatgagcgcggggcgctgcgttctctgcttgaggccgatcccgccgtcctcaatactgccatcgcgcttggggaggaatggctggggcagaacagcatgatcctcaaatgccttcgcttgggcgtggcactacaccatggcgctctgcccactgcttaccgaaaagaggttgaacgcctgttacgcgacaatgtgctcaaagtgacgatctcatcgccgaccctggctcaggggctcaacctgtcagccacggccgttgtcatgcactctctccaccgtaatggcgaaataatcgaggtctccgagttcaagaatgtgatcgggcgagcaggccgggcctatgtcgacgtcgaaggtatcgtgctcttccctatgttcgatgagatcgcgaagaagcaacgcaattgggaagccctcatcaccgacctcggtgcccgggaaatggaaagcggtctagtgcgactagttgcggcacttctgtcgcgtatgcaagcccgtatcggcaacgacttcaatcagctcgtcgactatgtcgtaaacaacgctgcggcttggactttcccggaagttgcgaacgaaaagcctgaggatcgcgagcgtgctcatgccgaatgggagcggcacgtcgcgacgcttgatacagccatcctaagcctgattggggaaaatgacgtccccgacgagggagtcgaggcggcgctggatgcaattctccaatcctcgctctggcatcgtcgtcttctgcgtcagaacgagcaggtgcaacaggttctcaaggcaggacttgtctcccgcagccgatttatctggagtcattcgacggcagcgcgccgtcggggatacttcctagcaggggtcggactggcgagtgggcatgcgctcgacgcgattgcggcggacgctaatcttcttttggtccaagctaacggcgcaattcttcaaagtgacaccgaggaggcaattgccgcaataacggcattagccgaacgggtctttactttctacccctttacgccggaccccatacccgcaaattggcgagacgtcctgcgcgcttggctcctcggccagcctcttgctggcatcgctgctggccaggagtcggaaactctgcagtttattgagggaggcctagtttatcgtctcccctgggctatggaggcgatccgcgttcgggcgacagcgaacggtgatacggtcggtgaacttgatctgccacttgaagatcatgagcttggcctcgcagctcccgctgtcgaaactggcactctgaatcgctctgcctcgatcctcatccaagctggcttcaattccaggctcgccgcgataaaggctgtcaccgacactggcgccactttccagactggtcaggcgcttcggcaatggctcaattctgaagctgttgctgcgtggagtgcgcagcctgattggccaacagccgagaccaaagcaatatggacggatttcgctcaaagctttactccgaacgaaaaccacacttgggcagaccgccgatactgggcaaacgtggcatggctcggcacaccgccaccaccgggcacaccggtgcaggtctatcatgggggaagtcagcctcatgtgctcgctgccgatggcactcctctcggcactgtccaggctgcgctcaatcctgggagagccgggctgttgcgcgcgcaagtagcccaagacgtctcgcggatcgatatcacctatctgggacctgcagacctgtccggcgcatga

SEQ ID NO: 58292 - DNA, 723 bp, Candidatus Contendobacter odensis Run_B_J11
atgcacacggttccgcatcgtctgctcgatgatggccctttgcaacccgatgcgtttactgccgcgatgacgcagtggattgtaaatcaccacgtcaaacccgaattcatcgaaagtgaccgcaggaggcgtgaagcattagcccgccaaggactggttgacccttctcgatcacgccttccgactgctgataaaactaagaaaggaaactgggcggagatattgctcgcagaatatgttgccgcatcgtgcggtgctcagcttcccgtttatcgcctccgctacaacccgaacgtcgaccaatccatgaagggggacgatgtcctcgcattcgatctcgattcggatcccgctcgagttcttgtcggggaggcgaaattcaggactaccccaaacaaacaagtggtagaagaccttgttggcgcattggtgaagtctcattccgcaaatatcccagcctcacttcagttcgttgctgatatgctgtttgaagcccggaacaacgagcttggctctaaagtggcgtcttgtaatgcccttttcgcacagggacgacttcaattagactacgttggcttgctcgtaagcagcagggatgctcaccttcacgttcagagaaacgcaaaatccagtatcagccgattggctgtcatttcgctgggtcttggggatcctgagggaattgttaccgcctcgtatgcgggcgcaagagggctggtatga

SEQ ID NO: 58293 - DNA, 3351 bp, Candidatus Contendobacter odensis Run_B_J11
atgagtctccctatcgcaaacgcacgactactggtgcagtcgatgcgcatgccggtcatccgaaatctcatcgcgcaatccaaggccaagcaggttttgagggaggttcgtgaaatcccggcgaattttccgaactttgccccggaactggatgatcgcgttactttcgtcgcctacggtctgttggccgctggttgcagtctgattgaacaaggccaaactagcgagggccacgcagaactggaaacagcagcggatattcttgagtctgcacaccaaaccgaggttgcgaattgtgagacaagtgcgctgcattgtctgataggcgccatggccttctatgcttgcggccaatactcgcgggcattcgtgctaattggaagcgttgaagaactcactcctgcggctggaattgttgcttccttcttgcggaagagtcgaccccgtttgatttctaaactaaacgcggttctgctggctccatctccctcattcgataattcgagtcaatttgacgattgggcactgacaatctgtgtcgcaagatcagtggcgctcgtcgccgaacacgccatttcaggagaaccggaacttctcgcgaatgcggacgttgtccttcgcgacgcaatgacgattagtgagggagcttctcatcctaccttttggtggctggctcgtctattgcggctgatgttcaaggactatgggaatagttcattgtggtctgtgctgccgcctttcttcgggcctgatggaatcgtgcatgtggacagctacgtgaagctacttgcctttctgaaaccgccagtcatcgaactatggcagtctcagactaccgctctacagcttgcgctaaaccccaagaataaaggtggtgtaatcaatcttagaaccagcgcaggaaagaccagagtcgcagaactggcgattctccacacgctcagtaccgacccaagcgccaaggttctctaccttgcgccgttccgctcactagccttcgaactggaaaaaactttcgctaggactttggtgccactgggatactccgtgtcacacctttacgggggatcgcgtttcagcggggttgaccgcgagatggtcaatgaaggtcgcattaccatcgcaactcctgaaaaggcgaaagcgatgcttcgggctgcaccagaacttttcgaggcagtgaagcttatcgtgatcgatgagggccatcttctcggaggaaatgaacgcaatgtccgaaacgaaatgtttcttgaacacttgcgcctactggctcgccaacgtggcgcgaggattctgctgctatcggctgtccttcccaatgcggaggacttagccgcttgggttggtggtggagtcgatgcgctggtgaagtcgaattggaagccatcggctgagcggttcggaacccttcaatggaaagcctctggagtttcgattgagtggttgggcggcgagcgttgcttcaatcctcacttcatcgaattcaaagaagttccaaaagggaaaaaggggaaacgtatgtttcctgagagcaagacagaaggagttgctgctacagccgtgcgcctcgctgaacttgggccggtgttggtctttacgggccaagctaggtgggtgccatcaatggcgaaggctatcttattggctttcggtcccgacgaaccattttacccttggccagcaacggagtggagactctttgaagccgtatgtaaggaagagctaggcgacaatccgtttgaactagctgctgcacgtgttggggtgatttgccacagcaataagctgccgcctcaaatcagaatctcgattgagaaattaatggcgaaatgcccaccacggataatcgtggcaactaccacgcttgggcaaggcgtgaacattggaatctcgtctgtgatcgtcgcgacgacttcgataggtcagtcgaagatcagcaaacgtgatttctggaacatctgcgggcgagcaggcagggcttttgtcgatagcgaaggcaaggttttgttcgcgattgatatgacgggcaagccttggcaggtgaggaatgcaaaagcagcagcgaaagaatattttaatgcagccctcctagataaagtcgacagcggcctgctctatgtggttggccagatccacaaaattgcaggcgaagcaggtatatccttcgaagtccttctggagttggcagcgaacgacaactttgatcgctgtggcgttaaaaaggatgaagtgttgggttttttagactggattgacgaccagttgttggcgctgcatgtcgcctacaaaggagatgatcctgcgatgaatatcgactgggtggacgatacatttcgagattcactggcggctattcaggaaagcgcaaaacaagaagtgggccatgaggaccaactaatgggtttcttgaaggcccgagttaaaggcattttgctcaaagtgccaacttctgaagcacggagatctgttattgcgtccggccttccattgtcagtcggcgttgttgcgttcgatcaattggatgtgttccgcagaatggtggatcgttatttgggttcggaacagaatgagatggcacttagcgttctggttttggagtttgagacttgggcacgtcagcacgcaaagaccatcgttgagaagattccagaacaggtgacgttggacaaaatacgcccacaatggcttgagggtgcctcgctacgaaagatcgtcgaaacgtgtggggatgaatccacggatatttgcaccgacctctacggctatcagcttccgtggcttttccactcaattgcccagaaactcgataaatcagtcgaagaaacccgcgttcaaatactcgcaaaagtaggtcttctcgtcgaacttggcttgccaacggaaactgcagctaaagttttcttggcgggtgttcgatcccgcactgcagccgtcgagttagcctgttttgtaaccaatccagtcgcgagtgtctcaagaattcgcaatgctttgttggattctgccacagtcaaagcgctttcagccttggtgtccgaatcgactctcgaatggctaaaccttctttcagcagaacacagcgcaccagaagttgcgcccccgcaatgcacaaggttccggctggatgctccgggcgaagtaaacacgcttcacgttcgccaacaaacgccgcagggatccatttttctatgctcgactgacgctcgattcaaatacgctgtgcgggcaactgaggaaatgcctttcgataagtttgcaaacaacccacgtttcattttcgcccgagatagcgacgcttggattcaacagtgccgagatccccgaatcgatggattaagttcgggatga

SEQ ID NO: 58294 - DNA, 819 bp, Salinivibrio sp. KP-1
atgccttggaattcaacacacactaaatggcttgtcgatactggcgatagactgaagaccgccgacggcaaggaggtcgaagtctgggagtttcggcaccagaatgacagaaagatgctctccgcatgggcgacacacttccggaatcactactgttttgacaatgaaatcgattattggcgcaaagggtacaaatatactcgctcagaatatctcgatcagataaagttcccagaccccaaagctgcaccaggcccgagcattagggctggtgatttcagcgaagttttggtcgccgattttcttgaatatctcaaaggttactgggttccacgcacccgctatggtgataaaaccgttcggaatgaatcgacaaaaggtagtgacatcatcggctttcatattgtcaaagatggaaaattctcttctgatgataagttagcgatttatgaagctaaggcacaattctctggcaagaagccaagcgcacgacttcaagatgccgttaatgattcggcgaaggatatcaccagaaaggctgagtctttaaatgccatcaaacaaaggttatataaccgcagcgaacttgatgaagcttcaaaaattgagcgctttcagaatgaagtagatcacccatacaaagaagtttatggcgctgtagcactctttgataatccgctttttgacggcaacctgacctcctcgaccaacgcaacttctcatccgtattcagctaaccttgcgttggttgtcatcaaaggtgatcagatgatggctctcgtccacgaactctataggagggcagcggatgaggcctga

SEQ ID NO: 58295 - DNA, 3183 bp, Salinivibrio sp. KP-1
atgaggcctgagcagaaatcgcagcacctacttggcgtcgcccgctcaaaggccaagatgcttgagtacagtgttcctgaagaacatcatatcaagataactcaagatccggccaagctcttcagcctctcgattggcttgcttggtgatctcgccgctgctattaaccggggggagtcagattctctagcggatctgaaagccaatctgttattttccgcacgtttttttgactcttacctccagtcaaagctgaatgagacacttgatccgtatctaatgctccttggctcagcttcttactacctctgtgatcttccaggaagtgcggcggtcttggctaatcacgcaacagaattgagttctgatgaagacccatattcaatggggtgtttcattagatacctgctggctcctgatagatttacgcccccagatactcatgtcggaaattttgatggatactttttcgatagatatcgattgatttcgtatgactataaatctctatttatcaattcgtccttggatgattttgattttaatgtaatcaggaaaagaatgattgatagggcaaaagatattcgcaatgtttcttacaaaataggtggggaaagacagcttctattctctgatattgtttgcgcgattattataacaaaaattaggaattcagcttgggagtgtctgccaaaatattcaggccttaatttgaatgtttggtatcctgctattttaaagccaggagcaattaaagagttctggcccgcgcaacaccttttgggccaggcggatgttctcaaaggtgagtctgccatcgttcaaatgcccaccagtgctggcaaaacgaaggcaacggaactgatcctacgaagtgcttttctggcagagcgcgcatcactgtccatcatcatcgctccgttcagggcgctgtgtcatgagatcaagaacagcctcgtcgaggctttccacaacgaacctaccaaggtcgatgaattatccgatgctctacagaccgatttcgagattgccgaattcttggggcaccaacagatcctagtcgtaacccccgaaaaactactctatgtccttcgccactcttcggaactggctgctcacgttggcttgctggtctttgatgaaggccaccagtttgacagcggtacccgaggtataacatacgagctgctcttaacgtcattgcgctccatgatccgcgaaggaacccaaaaggttctgatctcagcggttataagcaacgcccaagctgttggagagtggttgaacggcgagcccaatgtcgtcgaaggcatgaccctgattccgaccttcaggtcggtcggtttcgcgagttggctcgatcagttgggaagtattgagtatgtcgacagtcgtgatgccgagcaaggcgagtttttcgttccgagggtgattgaaagattcaatcttggaaggaagaagggggaaaggacagaacgtttttttccagaacaagcgctcaaacctaatggcaaaccaaatcctgattttgggaaaacagtagcactctatctagggttgaaattgactccgaacggcagcatcgccgtcttctgtgggaggaaatcaacagcagcaggcatctgcaaaaaggccgtcgatattattgagagaggcgtaccgctggccttgccgtcagatttttcagacgctcaggaagttgcgcggctgacacatctgcatgtcgagaatcttggcgctagcgcgccagcttctcagagcgcggcttacgggattttttcccatcatggcaatacaccgcatggtatccggctggcggtggaacgtgctatgcgtgacaatcttgtgcgattcgttgtttgtacctcaactttggcgcaaggagtaaaccttcctattcgatatctcatagtgaccagcgtctatcagggtatggaacgcatcaaggttcgcgatttccaaaacctcattggccgagcgggccgagccggaatgcataccgaaggcagcatcctatttgcagatccggtgatctatgacaagcgaaaggctctcaacgaaaagtggcgatggaaccaggtgaaggaacttttggaacctcgcaattccgagccatgcgtcagcaaccttctatcgattttcgatcccattcagagtgatgatgaaaaatacaccatcactatggaggctctggactttgccaaggcctatataaaagatcctgatgaagttgcgaaactagctgctgagatagctgcgcagcataaggacaaaaaattctcacaagatggcgtcgagcggcaagttgcatggagaatcagtcttatctctgctatcgagagcttcctgttatctcattgggatgaatctgagggcggtctttcggaagttgatgtgaccagtcttgccgaagggacgttggctttctccctagctgatgatcagaaaaaggagcatatccgcgaattgtttcaacttctcgctgggaacatatctgcaaacattaccgatccaactcgccgaaaaatctatggcaggacgctttacggacttcaggatgcccaagccattgaggggtgggttcagtccaatgctgacagcctgcttgcgatcgttgatgaagaagaagccctcgatcttagctggccattgcttacgcggcatataaacggtggagtattcaccaagttcgataagccggaagtgcttaaagaaatctcacatgaatggatcagcggaaagcccttccgcgatctcctggacatcattcgtaagcgaaaagccaagatgatatggggtacccaccggagagagttcaaaatcgatgatgtcgtcgatgtctgcgaagggacgcttgcttttgatgcggcactcgttgtgagcgctgtgtgcgaattcaccgcaaccctcaaccaagctgcaacgtcagacctgatctatcgtttacagctttttcaaaagcgcctgaaatatggtctaccgagcgaaaccaccattgccctttatgagctgggcttttcggaccgagtcatcgctcaggatctcgccacatccttgaaccttgatgcgacccagaagacggaactcgtgaaggcacttaaaaaagatagggacagagccaaagcgatgatggaaaaatacccaaaaattttcctggtgcgaatgaatgaaatattgggctaa

SEQ ID NO: 58296 - DNA, 801 bp, Dethiosulfatarculus sandiegensis
acaacctatttagcaactacaactagagaacgattacagacgacagatggcaaggaagttgaaatctggaattttcagcatcaggaagatgaagaggtgctctcagaatgggccaagcatttccgcaaccattattgttttgacagcgaaattgattattggcgccgagggataaagtgctctcgttctgaatatctcaacaatattaaattccctgatccaaaagctgcgcctggcccaagtatccgctctggtgacttcggcgaagtgttggtggcagattttctagaatatctacttggctactgggttccccgaacccgttatggtgacaagaccatccgcaacgaatctacaaaaggcagtgatattattgggtttcacatcgtaacggatggcaaggcttcatctcaggaccaactagccatctttgaggccaaggcacagttctcagggaaaaaacctaaggcaaaacttcaagaagcagtggatggttcggctaaagatataaataggaaggctgaatccctaaatgccattaaacaaaggctgcataaccgcaatgagtttgatgaagccgtgaaaatcgaacggtttcaaaatgaaattgactatccctacaaggaagtctatggagctgtggcactgttcgacagtgcgctttttgatggtggcaccaatacatcaaccgattgctccacgcacccctattctgatcgccttacactcctgatttttaaaggtgatcagatgatgccccttgtccacgagctttataggagagcagcggatgaggcctga

SEQ ID NO: 58297 - DNA, 969 bp, Dethiosulfatarculus sandiegensis
atgaggcctgaacaaagatcgcaaaaactgcttggcgtgacccgatccaaagctaaaatgtatgaatatggcgttccggaagagcaccacattagtatcccgcaagatccggccaaactattctccttgaccattggcatgttaggcgacttagctgcagcgattaatcgcgaaggaatccagccggaatccattatcgaactacgcgacaatctcattttttcagctcggttttttgattcctatctacagtcgaagttgaatgaatcgctcgacccataccttgttctgctgggctcagctgcttactacctctgcgatcttcctggaagctcatcagtaatgtccaaatggattgatggagactgcccggatttagacggtgaggggttggaagacttgctgctctggttgttacaagcagacctttcaaccgattttgacatatgggatggaccgtttagagaatatattgaatccatttcaaaaatggttgttgatttttttgaggatggcaatgatgaggaaaatttgattgattgggtaagtcaacttagaaaagcggtctatgaacatgggacgcctcggcaactcttgtttggagacgtgatcgcagctgtaattaggaaaaaaatcgaaaattcctcgtggaaggcgctgccgttctactccgaactgccaagagacaagtggcagccagcaatacaaaaggacacctttataaaggaactttggcctgctcaacacctccttggccaaaaggatgtattaaaaggtgaatccgcaattgttcagatgcccaccagcgccggcaagaccagggctacagaactggttatccgtagcgcgtttctcgctaatcgcacctctttggtaataatcattgctccattccgcgcgctctgccatgagattaagaacagtctgttagaggcatttcgcggcgagtcaaccaaggttgatgagtga

SEQ ID NO: 58298 - DNA, 780 bp, Burkholderia jiangsuensis
atggtgcaatttaatgactggtgcgattccgcggacacccccctcggcaaccatcacgttcgcgtgatgaggggccgaccagccgacacggcaaccggggtgcagctaacagccacagccataccgagtcactatgccgccgaggagcgcatcgcccgtgcactcgcgcgtctaggtaagatcggcgcggcgaagatggtcacaggcctccttccacaaacaccgcaaatccggtcgggcgatctcggcgagatttacgcgactgaatggattgacgcccatagcggttaccgggcacccatcaaacgacttcgctggaaagatcatcgcaacatggcgatgcgtggcgacgacgtaatcggcatgatcctcgatccagagacgcagcggctccgtttcctgaagacggaagcaaaaagccgcatcgacttgcgcgctcagacgttggaggaggcgcgacgcggcctgaataaggacggtggcctcccgtcctcacacgctctgtccttcatttccgcccgactgatggagctcgacatagacgtgccacttgttgacgcgatcgacgaggcgctctatcggcacggtgtagcaaccgagagtgtcagacatctcctgttcacattctcgggtaattccccgcaggcgcttctgacgcaggcgctgcaagcctaccccggtccgattgaacaatggggcgttggattgcatgtcgagggccacgccgccttcgttggggcggtctacgatcaggtcatcgccaatgccaacaacccctga

SEQ ID NO: 58299 - DNA, 1290 bp, Burkholderia jiangsuensis
atgccaacaacccctgaaagtatcatcgccgccatcacggacgcagcgactgcgggctttcgcggcaagcttatcgcgagggggcaagcacgcgccatgatctggcgtgacggcgtacttcctcctggagccccagacttctcgccacaactcagcttcgaccttcacagttacggctacggcctgcttggccttggtctgcgtcttctagaacttggcggtgacccaagccaggctcggatcgcgttcgaacaggccgcaactgctcttgaggcggtcatggcaaaaggcaatcgtgcggagcccgacagggacttccatttcgtcatggcagcggcaagctatcacctcgctcaactgtccgctcaagccttttcgctcctcgcagtcgtcgcagctgaagataatttttcgccaattgagcacgcgctcgcgcttttgatgcgccgagacattaaggcgctacgggcgcaggcctatacgttccgtttggacggacaagggtcggacgcaagtattgctgcgctcttccatcagcgtttgaccgagccggcggaccgcgatcgacaagatttcctcttcgagggtctggatctcgcgctgacggatgccttcttcggcgccatcgcgactttccttctcgcgttggatcgcggcgagcgaaaccttgtcgaccaagcgatcgcgcaacttcgcgacagtctggaaatctgcagcgatttgaatttgctgccccaatggtgggtgcatcgggtcgccattcatctactccacgacctgtggtcaaacacttttcatgagaaggtgccggtgctccccgccggtgggcctgcgaattcgtggcaaggccttcgcgaactctttatcgctctgctcgctcgccgtcccagagcagaggtcgacctctggccgtcgcaaacggaggcggcatcgcgcgccatcgatcagtccgacaatctcgtcgtctcgcttccgacgagtgctggaaagacccggatcgccgaattgtctattctgcgatgcttagcgggcggcagacgggtaatgttcgtgacgcccctgcgcgccctctcggcgcaaaccgaaatcgtgctccagcgcacatttggatctctcggaaagaccatctctgctctttacggcagcattggagtatccggttttgacgaggatgtagattgtcaattacgatggccgcccgggcgacaactatcttggccggtcgacggggttagttgtcgctgctcagctcggcatagttgtcgctccttccgattcggggtggggtaa

SEQ ID NO: 58300 - DNA, 813 bp, Bacillus sp. JCM 19047
atgataagggattggttgagggtaaaagttagaggaaagcacatatacaaatttaatatcattgatgctacagagactgatattagaacagatctaacaatccctacatggcttgccgaagaaatcttactagcatataaagatccgggtcatttaaagagaagatattttaataggaaaaaggaagaattaaatcagtatttaactacacatatttctcctccattggaaaaaactttagaaaaaaatgttcgcagaggagattttggtgaaattataacaagtttaatacttcgagatattaattcactagaaacaactttaattaagttaagatacaaacttaatagaaaaaaatcttcttttggtatagacgtgtttggagtacagcttgataaaaacggtcaagtatgcggactttgcatatgcgagacaaagacgaagataacttacgataaagcaattggtataaaagcacacgattcgctcttttcagacgatcaatctgccatcataacaatatctgattttatgtcaaatctttattacacatcaggaaattatgatctttctgatcagtttgataaaattgtacttcagaaagccaatttcccgaccaatcaccatatcttcttagtccatgaaaaagataaatttaatgaagaaatattggatgagctagataagtttaaagatttacaaaaaggtatacatgtaaatgtactattaattgagaaccttgatgctctaatgcatgaatcacattctctgatacctactgttggggagagattagtatatggaattacatga

SEQ ID NO: 58301 - DNA, 2022 bp, Bacillus sp. JCM 19047
atggaattacatgattatttaattaagaaagaatatgatataacgaaattgataaattcatcgaatttcaaaaatcagtatgggcaattttttgctagaaaaatgagagcagattttcaacctacctatgaagaatctaatatatggggttatgctctttttttaagctcaacttcagcaaaagtacttattaacaaacaaagtgaagtttgtaatcaaggactaaaaatcgctgcagagttatttgaaactttttcaatagtttcggatgaatatgacagagaatatgcaagaattttatctgctctttgttatgatttgtctggttatcaagcaaatgctgcttgtattcttaggtcaataaattatactcttgaagaaaaatcttcaaatgacactagtataaatgaactgttaaaaaatttagtgttacttttaaaaagacagttacaagcaattccaataaccccgttaatggataaaaatgtagtacattcagaaatagataatttaaacataagttggaaaaatgcagtaagtaaatttaaagattatcaactgtcaggtaattttgttgattatgagcaagatatatcagaagcagttaaatccgctattagtctaaaggatgccacactaactacaattcttctacttctaaaattaaaaatagaagtttctaataaacgtagtatctggtctgtattatcagatgaaatttatgaatctcctgatacatggaagccatatttaaatttactggctttaaacccttatcaagataataaaatagtacctcctaataagagactatcgcaagttgaattatggaagtctcaaataactgcagtaagaagtggcattttgaagaacaacaatggctttatcatacagatgcctacaagtgcaggtaaaacactcattgctgaattaacaatcttacaacagatcggcaagaataaaaagtgtttatatatcgctcctttccgctctttagtcaatgaaatagagaataccttaaacaagcatctatcaaaactaggctattcggtttcaagtttaactggaagctatgaaatcgatgaactagaccaattttggatgaaagaagcagatgttctggtagctacatctgaaaaagttgattttctacttagggttcaaccagatttatttagcgatatatctctttttgtaattgacgaaggtcatgttcttggaaatttagatagtcgatctgctcaatttgaattgttgttaacaagattaaaaagatggtttactccaaaaggctgtcgcttcatttttatatctgcggtaatgcctgattctgatagtagcgattttgcgaaatggttgttaacagatgaaaatgcaaagatacaatcaccaagagagtatgatggtaacatgtggcaaccaactcgaagacttttaggatatttttcttgggatcaacaaattaatttccaaaatcatgtagaaaattcaggacaagacatatacataccaaattttatttccccattaaaatggaacactaaaaaaggtaaaacgaagtcattcccacaaaagttaactcaaaaggcagaaacaaccgctttattggcttatagatatttacgtgaaggatctgttcttatatattgtgccactgtcggaagaaatcgtggtgcaggagtctatagtgttttaaaagcgtttcaaaggttaattgacacattagataatgaatatgcatcagagtttcaacttccaataataaatgatagtgaagcactagaagcctctattagatggtatggggaagataatcttattacaaaatgcattagaagaggtatagcaccacattttggagatttagcagatgaggttcggagagcggtagagaatgactacaccaaaaaaataataaaaattttagttgctactcatactcttgggcaaggtgttaatttacctataaaaactctgcttgtatattcacttgatattaatgcaaatccaaaaaccgtctaa

SEQ ID NO: 58302 - DNA, 777 bp, Burkholderia sp. K24
atggcgcaattcaacgattggtgcttggcagtcgatacgcccgtaggcaaccacttcatcagagttatgacgggacagccggagcgccttccggtgggcatccaagctaccgctgccattgtgccagcgcactatgcatcggaagaacaggtcgcacgtgcgctcgcgcgtctaggcaagccagcggcggctgcgctgattcaaggcaggctaccgaccaccaaagcgatccgatccggagaccttggagagatttatgcgactgaatggatcgacgcgcatagcgggtatcgcgcgccaatcaagcgattgcgctggaaagaccatcgcaacatggcgatgcgcggcgatgacgtcatcggcatcctccaggatgctcagactcaacggctgcattttctgaagaccgaagctaagagccgtgcagccctgacggcacaagtcctcacagacgcgaggaccgctctcgacaaggatggtggcctaccctctccacatgcgctttcgttcatctccgcgcgattgctcgaactgggcaatctaccgcttgccgacgccgtggacgacgcattgctcaagcatgggattccagctcaaaacgtccggcatcttctcttcacgttctcaggaagttcgccggatgccctgttgactgccgctctccaggcgtacccaggagcgatcaaccagtggggtgttggcctgcgcgtcgagggtcatgcctatttcatcggagcggtctatgaccgagtgatcgctgatgccaacaacacctga

SEQ ID NO: 58303 - DNA, 3513 bp, Burkholderia sp. K24
atgccaacaacacctgaggcaattgcggcagacatcgcggaagcggcaactgccggcttccgtggaagtctcattgcacgaggccaagcgagagcaatcatctggcgcggcggggtgctcccccccgacgctccggccttcgcagcacagctcagctacgacctgcattcttatggctacgtccttctcgggcttggccttcgcctgcgcgagctgggcggctcggatgcgcaggcgcggatcgcattcgagcaagccgcgacggccctcgaggcggtgatcgccaaaggtaatccggatgaggctgaccgcgattttcactttgtgatggcggcggcgagctatcaccttgcgcacctttccgcgcgcgcctactctctgctggcgatcgtcgctgcggacgcgaatttcgcccctacggaacgagtcctgaccttgctgatgaggcgggatttccgcacgctgctaaccaccgttctcgatttccgagcttccggcgaaggcagtgacaccgagatcgccgcacggatgcaggccaggctcgacagggtcggggcttggattaacttggccggcgacggcgaagatatccttttggaaggcttggacaaagcgctgaccgacacattcatggcaggaatgtcgctcttcctgctggctctcgaacgaggcgagcgtgcgttgcttgaccaggcgctggagcggtttcgcacgaacctctccgtctgcagcgaaatgaacatgcttccacaatggtgggtgaatcgaatcgcgattcatctgctttctgacctgtggtcaagcacctttcatgaaagggttccgttccagcctgcaggcggcgaagcggccgactggcccgcgcttcgcgtgttgttcctcgcgctactgcagagccgcccaaaggccgaagtagatctctggccttcgcagatagaggccgccaatcgcgctgttgaccagtcagatgatctggttgtctcgttgccgaccagcgctggcaagacccgcatcgccgaactgtgcatactgcgatgcctcgccggcaagaagcgagtagtcttcatcaccccgctcagagcgctgtctgcgcagaccgaagcgaaccttcaacggacatttggtccgcttggcaagactatctcggcgctctatggcagcatcggcgtcagcggcttcgatgaggatgcgatccgcgagagggacatcgtggtagccaccccggagaagctcgactttgcgctgcggaacaaccctgcccttctcgatgacgtcggtcttctcgtcttcgatgaaggacacatgatcgggctcaacgagcgcgaggttcgctacgaggtgcagatccagcggcttcttcgccgtccggacgcgcatcagcggcggatcgtttgtctctcagcgatccttccggatggcgatcaactcaacgacttcgcgggctggttgagacgagaccatcctggcggactgatcaaaaacgattggcgaccgacccgcctgcggttcggcgaagtggtgtggacgtcgcccaccgcccgattgaacctgcgcgtcggcgacgaacgcccttgggtgcaacgcttcctcacaggagagacacctccgaattggattccgccgaagcgccgtcgcacgaccttgtttcccaaagatcagcgcgaactttgcctggcaacagcatggcggctgattgaggatggccagaccgtacttattttctgcccggagcgccgcagcgtcgaacccttcgccgacgtgattgtcgatcttcacgagcgcggcgctctacgctcgctgcttcaagccgatcccgcggtcctcaacaccgcgatcgcacttggcgaggaatggctcgggccagacagcgcgatcctcaagtgcctgcgcatcggcgtcgcacttcatcacggagccctcccaaccgcctatcgcaaggaggtcgagcgcttgctgcgcgacaacgtgctgaaggtgaccatctcgtcgccgacccttgcgcaagggctcaatctatcagccacggccgtcgtcatgcactctcttcaccgaaacggtgagaggatcgaaatctccgagttcaagaacgtcatcggccgggccggacgcgcctatgtcgatgtcgagggcattgtgcttttccccatgttcgatgagattgcaaaaaagcgacgcaactgggaagcgctcatcaccgatctcggtgccagagagatggagagtggcctagtgaggctggtcgctgccttgctgacgcgcatgcatgcgcgcattggcggtgacctcaatcaactgatcgagtacgtaatcaacaatgccgctgcatgggcgttcccggaaatcgcaaacgaagagcctgaggaccgccagcgcgcccttgccgactgggagcggcacatcgcaacgctcgacaccgccatcctcagcttgatcggcgacaacgacatccccgacgaaggcgtcgaggtggcactggatgacgttcttcagtcctctttgtggcaccgccggctcttgcgccagaacgagcaaactcagcaggctctcaaggcgggtcttctctcccgaggccggcttatctggagtcaatcgacaacagctcgccgtcggggctatttcctcgcaggggtcggactgacgacgggtcatgcgcttgatgcgatcgctgaggacgccaatcgccttctaattcaggccaatggtgccatccttcaaggcgacgacgaggcggcgatcgctgcggtcgccactctggcggaacgcgtattcaccttctatcctttcacgcccgacccgatgccagcaaactggctggacatcctgcatgcgtggcttcgtggagagcctcttgccggcatcgccgccggccaagaatccgacacgctgcagttcatcgagggaggattggtttatcgtcttccctgggccatggaagcgatacgtgtgcgtgcagtagcaaacggcgataccgtaggcggcatgccaatggacggttatgaactgcgcttggcggtggccgcagtcgaaactggaactttgaaccgcccggccacgatcctcattcaagccggcttcaactccaggctcgctgccatcaaggtcgcgacagacaccggagcgactttccaaacggcccacgaacttaggcattggctcaactcggaggccctggcggcgtggcgcgaaagacctgactggccgacagcagaaacgagggaaatgtggatagagttcgcgcaaagcttcatcccacaaacgaatcgtgtctgggccgatcggcgctactgggctggtgtgcagtggcttggggcaccgctgccaccaggcactcccgttcaagttcatcattggaatggtcagctcagcgtgcttgcggctgatggtactcccgtgggcacgctgctgcatgccttgaatcccaggagagccggtttgctcctcgcgcaggttgctcaagatatcagccgactcgacctcaggtatctcggaccagatgacttcgttgatatctag

SEQ ID NO: 58304 - DNA, 846 bp, Bacillus sp. LF1
ttgaatgaatcaatttcaggtcaatgtgtacttataggagaacaccctaataaatccatttttgcggaatggttgtctcacgaagatttacctattttaaataataaaatacataggaaattaatcgaaacagagggaatgcgtgaatatgcagttgaacaaatctctgattggatacttacccatcatatcgcggattcaacaattgctagattaaaacgaaaaagagaaatgatagtaagaaaatatggactaaatgagtatttaaatcagcagcaaatgctacctgttgctgaaaaaacaatgagaggaaatggagcggagatagttcttgctgaatatctccaggcatcaaccccacttcaattattattatataaattacggtataacccaaatgtgagtcaatccatcaagggggatgacgtactccttttcaataaggagaatctcgccgataaggttattctaggtgaatcgaagttcagaaaaacaccaaataaagctgctgttaaggaaatcacagatgaatttggaaaaaaattaaaactgccattatcaatactctttgttgcaaatagacttagtgaattaggtgaagaagagctcgcagataaattagaagaattaaatattgatgttaaacaggggaaagttccggtggttaatgttgggtttctactaagtaatcataatacagctacaaacgtagaaaaccatttaaattctgagaaccctagttttatttttttatctttgggattagataagcctgaagaattaatatcccaaagctttgccctagcaagtgagaaattgaaaaggggtattgagaatgaagattga

SEQ ID NO: 58305 - DNA, 3345 bp, Bacillus sp. LF1
atgaagattgaaaaagcagaggctttattggagcggctagaaagtgataaacttattcaaaactattttgctcaaagtgattcacgctatatcctttttaatgttcaggaaccgtttgcgaactttccgaactactcacctgatttagatgaaaaattaactggtatagctatgtcctacatatcaattggatgttcctttgctgaaaacggaagtaatagtcaatcaattttccccttagaaaagggtgccgttattttagaaaacatatatagtccaatcgccaatagaaatgagtttagtacatattttattttaacaagctctctggcattttatgcagctaatcaatactcaaaatcctttatattattgaaaaatatcagtgttgatacaataattgcaaaattaatatcgctatttttaagaagacagtattcagaactggataaattcctttctgaaatatttttgagtggtgaatatagtgataaaaccatatcagaattagatgatgaagaatttgcaaataatagggtctatgttttaatcctttcaaaatcattatcaagtttgctagaatttatcttcaccggaaatgaattatggctaaggaaggcaaaggaatatctaaaagacttattagaactattagaaattgatgctgaaccgtctttgtggtgggttataaggctatttatgttaatcgtcgaagggtttcaggagaattctttgtggaaggcgatacctccttatataaatggggaagatatgacagtaaggaagtatatagcatcaatggctttccaaaagagtcccgtagtagagattttccattcccagaaaattgctttgccggtggtattagatgataaaggtgcagtcgtaagtctaccgacaagtgcgggaaaaacaagaattgcggagtttgcaatattagattgcctagtaaaagggtatgaaaataaaatactttatttagctccatttcggtcattagcatatgaggtagaggattcaatctcaaaagtattcggaccattaggatttgaggtatctcatctttatggtggttcacagtttagtaaacttgatgagatggtaataaatgaatcaaacattatcattgcaacccctgagaaagcaaaagcaatactaagaagcaactcagaagttaaatcaaatataaaactcgtaattattgatgaaggacatttaattggaccagaagagaggcaggttttaagtgaagttttcattgaagagttaagaattcatctaaatagaaaccagggtaaaatgattcttctttcagcggtgttaccgaattcatcagaaattgcaagttggatatccgggaatgaaacaatggaggttaattcaaattggcgaccatcctctcaaagatttggtctacttgaatacaatggtaggaatgttaatattacttggaaaggtgaaatcgagtcatttaatcgaaacttcattaatccgtttattgttaagagggctaggtctgagtatagatttcctagagaaaaaaagcaggcagttgcagcagctgcattaaagttaagtaactctggctcagtattagtttttgtttgtagaaagaatatggtcttgtctcaagctaaggaagtaatactttcgatgggagaaaataaagaagaacatatatggaccagtatagatgaatggagtgtttttaaattagcttgtgatgaagcatacggtgaagaatcaaaggtttaccaatgtgctaagtatggagtattatgccaccattctggtttgcctactgaggtaagattagcaatggaaaaattaataagaaagggcaatcccaagataatcgttgctacatctactttagggcaaggtgttaacataggggtatcaactgttattttttcgaatgtctggtatgacgctgaaaataaaattagtagtaatgacttttggaatattgctggacgtgctggacgaagttttgtagacagagagggcaaaatcctctttgtagttgacgctagtagaggttccagttcatggagtgctagaagggatagaagactggcacttgaatattttgaaagtggaaatcaagataaagctataagtggtttactacatattattgattatatttatcgtgttgcaaaagctacagatgtaagttttgagacactactccaaatgatagcggaaaatgactattcctccttaaaagagaagcatactgatgacttgctcaccctatttgattggatagacgatacattgttggcgttgaatttagagttcgagagctatggatgtgaaaattcttccgaatggatagatgattactttagacattcattagcttatatccaagtgaaatattttgaaaatttaaataaggaagacattatttcatttctgaaggctcgaaataaaggggtattaaatttggcgggagagccacaattttggaagggattagtatcatccagtatcccaattcgttcagggctatttattagaaatgaactaccagttgtactagaaattttggagaaatatcaaaaatcaaataaagctattgaagatttattagtctttttaaaggatacagaaatatttatatccagattcccgtcaaagcaatttgaaaataatgaaatagaagatgatgtaagggaattatggataacagggcaatcaatttcttctcttgatgaaagaactctcaaaaacattaacgaatactttggttatacactaccttggggtatacatgcaatagctaggatgttgtctgagttaaacaatgatgagggtgctaaagaatacgaaacattagctgtattggttcaaatgggattacccaacttgtatgccgctaagatacacttggcaggtattcattcaagagttgcagcaacagagttaggaactgcattagattcagagtatgaagaactaagtgttagacgtttaaagcattatattattgattcggtgggtaagcttcctggtattactgagaatacacaccattgggtctcattgttaaaatccaatgaaactaatattacgaatgaaatggtgaaaatcccaaattttatcttcgaagaaggtatctccgttgatagtaaagtattaaatgctaagggctatgatggaaatacctttctctgtagtccggattattcttttatagataaggttgaagttaataaggaattcccgtttgataaggttacaaataattttggagtctattttactagtaataatggagagtggaaaatgcaattaaggaacccctatctaaaatatggcttaagtaataattaa

SEQ ID NO: 58306 - DNA, 783 bp, Devosia sp. LC5
atggggttgtatgagcggtggtgcgagtccgccaaagaagaggacgagcgaaagcgctactggacctatatcgagaaagatggcggccgcgacgagatccgtgagtctctcgctgagaccatccgctcgcactacgatcgactcgaacgcatcgccgaggacgtggagcgcctcggatataaggtcgcagctaagattctcagcgaggcgatgccccagacagacagaggccgttccggcgacctcggcgaaatcctcgcgacggagctggtggaggaagagataggcctgcgcgtccccgtgcgccggctccgttacaaggatggccgcaacatggccatgcgcggcgacgacttcatcggcgcgggctacgacggcaagggtgagaagctctggcttctcaagggtgaagccaagagcaacaagaagctcggcaaatccacggtcaccagcgcccgaaaggtgctcgaccgtgacaatggtcgttgcacgccggactcgttgctgttcgtcgccaaccgcctgctggagagcaacgaccctgacgaaaacgctctgggtcgcgacctccgcgacgaagtgggcctgaagtcgctccgcgccaatcgcatcgaccacatgctcttcaccgtgtcgggtaatggcccccacgcctccctgaaggacgacctcgacgctgccgggaccaaccgcgaccactacgtcgtgaacatccacgtcgaggaccaccaggacttcatcgcggccatgtaccaggaggcagaagaccttggagacgcctga

SEQ ID NO: 58307 - DNA, 3504 bp, Devosia sp. LC5
ttggagacgcctgacgagttgaccgctttcctcgccaccgcgaccgccgacggcatcctcggccggctcctctatcgcggcgcggcctggtcgctgatgcgggaagcgggcgtgttgccgcaaaacgcgccgcccttgggcgcgaccattgaaactgacctcgccgaacatggcttcgccctgcttcggggtgccatggctctgcgtgctcagaccggcgcgtctgatctgacgaacaaggcattcgagcgggccgccaacgccttcgaagccatagtgagaaacggcgatcctgaggcgcccgatcgcggtttccgccgcaccatcgccgcagccgcctatcacctgtccggcttctcggccgtggcctattcgctcttcaacgagacggctgaagacctcaacaccacgccgggcgaaacggcgatccgtcacctgatcctgcgcgacctcgaccagctgcgcagcttcgttcgccattggcttggcgacgatgcccacggcgacgagcagatggcggaggcgcttggcggcgaggaccccgacatcgacgaggtcttgtccaccatcctcaacacgacgatctgccgagccctggcgttcttcgacttcgcgctcgagacgggcgaagaggagccgatcgaaagcgcacggagcctgctcgccaccgccgttagcctggctgacaattgcgggaacgttcccttgtggtggatctcgaacctctgccgccacctgatcgacgacctgtggcagcactcgcttcaccaagctttgccgaccgcgccacccgagggcacggaagaaaaataccccgacctgcgccggctgttcatctcctcgctctacgcccgcaaaacctcggaggtcgagctgtggccctcacagcgcgaggctgcccaacgttccacggacgtgacggacgatctggtcgtggccctgccgaccagcgcgggcaagacgcgggtggccgagatcgccgcactgatgacgttgtccgcagcgcgccgggtactgatcgtcacaccgttgcgcgccctgtcggcccagaccgagcgttctttccgaaagaccttcgcaccactcgggttcagcgtgtcctcgctttacggggccagcggcctttcggcgggtgacgaggacgccctgcgcacccgcgagatcatcatcgccacgccagaaaagctcgacttcgcactacggagcgatccttccctgatcgatgacgttggcctgatcgtcctcgacgaaggccacatgatcgggccaagcgagcgcgagatccgctacgagacgctcgtgcagcgcctgctgcgacgcgcggacgcggccgaacgccggatcgtctgcctttccgccatcttgccaagcggcgacgaactggacgacctcaccgcctggatacgctccgacgaaccgggcgagcccgtgcgttccgactggcgccccacgcgacagcggttcggcgcactcacctggcgcggcaaacacgcgctgctccggctcgacctcgatgaggatggccccttcctcgacaagttcgtcttggagaaacccgcccgagggaaagaaaagaagccatatccgcgaaaaaactcgcacctcgccttgttcgcagcttgggagttcgcgagccagggcaagcgcaccttgatcttctccacccaggcgaactgggtggagagctacggcaaacaggtcgtcgacctctgcaagcgcggctacctcgactcgctgctggacgacgaggcgccgatcgcccgcgccctggaggttggtaaggaatggttgggcgaggaccatcccgccgtcgccagcctgaaggtcggcgtcgctattcaccatggccgcctgccaagcccgttcctgcgcgaacttgaagtcctcctgtccgaaggcgtgctgaaggtcatcgtcgcctcgccgacgctttcccaaggcctcaacctcaacgccgcagtgctgctggtgcccgcgctctaccgtgcaggtgagaagatcaagggtgaggagtttgccaatgtcgccggccgagccgggcgcgccttcgtcgacgtcgaaggcctcattgtccacgtcatgttcgacaagaccgactggcgaaagaaagagtggaggaagctggtcgcctccgccaaggcccgcaccctgaagagcggcctgatccagatcgtcgctgaaatccttgagcgcctgtcgcgcgagggcgtgctcgatcgtgacgatgcctgggaatatctggccaacgccagagaggcctggaaatcacccgatgaagaggccgaggtggccaagcgtctggccgccggcgtggaatacgacggcgacgatgttgatgaagacggcgaggacgacgacgaagaggaaaccatcgacgaagagccgctgtctcagctcgtcgagcgcctcgatgcgaccgtgttcggcctgatcgaagcgctggacgctgatcgcaccgatctcccgaagctgctggacgaggcgctgaagggatcgctctgggcccggcaaatcgcccgcgaggaagaggacgtcgcgcctctgcacaagaaggtgttcgaagcacgcgccgacctcatttggaagacgaccacggtgcaggcgcggcgtggacatttcgcgatgggcgttgggcttgaggctggcctctccatcgatgccatggccgacgaactggccgatctgatcgaccgagcagatggcgcagcgctgaacggcgacgtcgatgagctagccgatgcactcggaggtctgggtggacgcctgctgttcatgcggcccttcatcccggacaaggcgaacgcgctgcccgccaactggaaggctatcctgcgcgcttgggtctccggcgaggaggtctcaaagattggaccgcagaacatgcgggcagtcgaggaagccttcacctatcgcctggtctgggcgctggaagccgtccgtacccgccgaatgtccctcggctggtcgccggacacggtggcgggcggcgcagcggcagtggtcgaaaccggcgtcccacagttcatgatggcgatgctgatccgcgccggcctgccgtcacggcgcgcggccatggcggctattgaggacacgaagcccgtcttcgtcacgcccgcggagatgcgggcctggctcgaatccgacgagatcacggcctacaccgacgctggcgactggccgacgcccgacaccgccgcgctatgggcgcgcttccgaaccgaagccctcagcggcggcatccagaagtggtcggtcgaacgctacaagcgcttgctcgacaccgatgtcgcgccgcccgccggcctctatcggatcgtcaccgacgagggcgacggacggacctggctcgcaacccctgactaccagcgggtcgccgccttcaggaagccggcggtggaccccaagcccagcctcttctcgggaaggctaccgggcaacaccaggctggtggaagccttgcgcgtcggccgcggaaaactgcggtggccgcctgccgatgcatag

SEQ ID NO: 58308 - DNA, 780 bp, Pseudomonas sp. AAC
gtggcgcagttcaacgattggtgcgattcggtcgatcagccggtagggagtcacttccgtcgagtgatgaccggccagcccgccaaccttcccacagggatcgaggtaacggcagccatcgtgccggggcattatgcttcagaggagcacgtcgctcgtgcgctcgcccgtctcggcaaacctgcagcggctgcacttatccaaggcaagttgccgaacaccaaagcgatccgatccggcgatctgggtgagatctatgcgacggaatggatcgatgcgtgtagcggtggctatcgcgcgccgatcaaacgcttgcgctggaaggaccatcgcaatatggcgatgcgcggagatgatgtcatcggtattcgccaagacgcccgtacccagcagcttcattttctgaagaccgaagccaagagccgagccaaactcaccgcccaggtccttgccgaagctcgggccggcttggataaggatggaggcctaccctcagctcacgcgttgaccttcatctcagaacgcctgctcgagctgaacgaattgcccctcgccgacgcaatcgatgacgcgctgctcaagcacggcatacctatacagaacgtacagcacctgctcttcaccttttcaggcaatgcgccggaagccctgttaactgccgctctccagacctataccggcaccattattcaatgggggattggcctgcacgtgaatggccatcccgccttcatcgccgcggtctatgatcgagtgattgccaatgtcaacaacgcctga

SEQ ID NO: 58309 - DNA, 3543 bp, Pseudomonas sp. AAC
atgtcaacaacgcctgaagcaattgctgccgacattttagatgcggcgaccgccggatttcgtggccgcctaatagcgcgcggacaggcgcgcgcgatcatttggcgtgatggtgaactcccgccggacgcgcccgcgtttgcgcagcagctaagctacgatctacattcgtacggatatgcgctactcgggcttggccttcgcctgcgcgaattcggaggtgatcctgcacaagcccgtatcgcattcgagcaggctggcactgctcttgaggcggtcattgccaagggaaatcgccaggaagtcgatcgtgatttccacttcatcatggcggcggcgagctatcatctcgcgcacctctccgctcgtgcatactcacttctggcgattgtcgaagcagacgaaaatttctcgcttacagaacgcgtgctcgctcttttaatgcggcgaaaccttaacgcgcttcgctccggcgtcctcaactatcgggcctctgagcaaggcagcgacatccgcatcgctgccgaaatcaaggagaatttagatcaaggggaggctgcggagggcctcgctgacggtggaaacgacttcctttacaacgggctcgacaccgcactgaccgatgccttcatggcagccatgtctatattcctcctcgcgctagagcgcggcgagcgatcgctactcgaccaggcgctggaacggcttcggaaaagcctcgccatttgcagtgagctgaacatgctgccgcagtggtggggccaccgagttgcgattcacctcctcacggacttctggtcgaataccttccacgagaaagtaccgctccaacccgttggaggcgaggcagcggactggccgcgccttcgtgagctattcattgcgctattacaacggcgccctaaagccgaggtcgatttgtggccttctcaaatcgaggcggcggctcgcgcggcagatcaaactgatgatctcgtagtttcgttacccactagcgccggcaagacgcgcattgccgaattgtgcatcttgcgctgtttagccagcggcaggcgcgtagcattcatcacaccgctgcgcgcgctatcggcccagaccgaaactaccctgcagaggacttttggtccgctcggtaagacgatttcgacgctttacggcagcattggggtaagcggtttcgatgaggacacgattcgagaacgcgacatcgtcgttgcgacgccggagaagctcgactttgcgctacgcagtgatccctctcttctcaatgacgtcggtctgctcgtctttgacgaagggcacatgatcgggcccaacgagcgcgaggttcgctacgaagtacagattcaacgactgcttcgccgaccagatgcgcatgagcggcgaatcgtctgtttatcggccatcctgcctgatggtgaccagctcgatgacttcgccggatggctgcgccgggatcatccgggtggcctaatcaaacatgactggcgacccacacggctacggttcggtgaagttacctggtcttccgctacgtccacagcgcgcctcgatctgcgcattggtgatgaacgcccgtgggttcaacgatttctcacgggagtagtaccacctaactgggtgtcgccgaaacgtcgtcgaaccaaactattcccgtgcgatcagcgcgagatgtgtatcgcgactgcatggcgacttgtcgaggatgggcaaactgtcctgatcttctgccctgagcggcgcagcgttgagccttatgcggatgtaatcgtcgatctccatgagcgcggtgcacttcgctccctgcttgaagctggccccgccgctctcagcgtcgctatcgcactcggtgaggaatggctgggaccggacagcgccattctcaaatgccttcgcctcggcgtagcgttgcaccacggagcgttaccaaccgcctatcgcaaggaggtggagcggctactgcgcgacaacatcctaaaggtcaccgtctcgtcgccaacgttggcgcaaggccttaacctgtcagccacggccgtcgtcatgcattctctccatcgcgccggcgaaaggattgaagtttctgagttcaagaatgtggtcgggcgtgctgggcgggcctatgtcgacgtcgagggagttgtgcttttccccattttcgacagcatcgcaaagaagcgacgtaactgggtagaattgatcagcgatctcggtgcgcgtgatatggagagcggcctggttcagcttgtcggagcgctgctgtctcgtatgcatgcccatatcggcggcgatctaaatcagctcattgaatatgtcgtcaacaacgccgtagcgtgggccttccccgatgtcgcgaacgagcagcctgcggaccgcgaagtcgccttggccaagtgggagcgtcacgtcgcaacgctcgataccgccatcctcagcctcatgggagaaaatgatatccccgacgacggtatcgaggtggcactggacaatattctccagtcttctctctggcaccgtcgtttgcttcggcagagcgaacctgtgcagcaggtactcaaagctactctggtttcacgcacccggcacatctggaacaagtcaacggcggagcagcgccgtggatatttcctggcgggtgtcggactggaaacagggcatgcgttagacgccattgcagcggaggcaaacctcctgctcgttcaggcgaattattgcatgctcgacgccgacgccgacgccgacgccgacgccgacgccgagggggcgatcaccgcaatcacacgtatcgccgaactcgtctttgccttcaatcccttcacgcccgaccccatgccgacaaattggcgcgacatcctgcgcacttggcttcttggccagcctcttgctgctattgccgccgggcaggagtcggagacgctgcagtttattgaggggggagttgtatatcgcctgccctgggcgatggaggctatccgagttcgtgctgtcgccaatggcgataccgtctacgacgtcctgctcgacgacttcgaacttggtttggctgtacccgccgttgaaaccgggacgctgaaccgttcggcctcgattctcatccaagcaggcttcaactcgaggctagctgctatcaaagctgttgctgacacagacgcgacgttccgaacgggacatgagcttagacaatggcttaattcggcagccattgccgcgtggagcgctcagaacgattggccaaccgccgaaacgaaggcgatgtggaccgagtttgtgcagagtctcactccgcgggagaaccgtacctggacacatcgccactaccaagcaaacgtgcaatggtttggcgcgccaccccatccgggcacccctgtccatattcacgattgggttggtcaaccacttgtgcttgcggccgacggtgcaccgctcggtacggtccaggccgtgctgaatatcgcacgaactggacttgcgcgcgctcaggtcgcccgggatgtcagcaaaatcgatgttgtctatttaggaccagacgacctgtccggtgcatga

SEQ ID NO: 58310 - DNA, 783 bp, Bosea vaviloviae
gtggaactgtataaaaagtggtgtgacgtcaccaggaaaaaggacaagcgcaagcgctattggacctatgtcgagaaggacggcggccgcgacgagattcgcgatgacctctctgagactatccgctcgcattatgaccggctcgaacgcatcgccgaggatgtggatcggctaggatacaaggttgctgccaagattctcagcgaggcgatgccgcagacgcccaggggtcgatccggcgatctcggcgagattctcgcgaccgagctggtcgaggaagagatcgggcttcgtgtccctgtgcgccgtctccgctacaaggacgggcgcaacatggcgatgcgcggtgacgacttcatcggtgccggatacgatgaggctggcgagaagctctggctcctgaaaggcgaagccaagagcaacaaggtgctcggcaaggccacggttaccagcgcccgcaaggtgctcaaccgcgacaatggccgctgcacgcccgattccctgttgttcgtcgccaaccgcctcttggagagcagcgacccggacgacaacgcgctgggccgcagcctccgtgaccaagtgggcctgaagtcgcttctcgccgatcgcatcgaccacatgcttttcaccgtgtcgggcaacggcccccatgcctctctgaaggtggatctcgacgccacaggaaccaaccgggaccattacgtcgtgaacattcacgtcgaagaccaccaggacttcatcgcggccatgtaccaagaggcggaagatcttggagacgattga

SEQ ID NO: 58311 - DNA, 3504 bp, Bosea vaviloviae
ttggagacgattgacgagctgtccgcgttcctggcgaccgcgaccgtcgacggcatccttgggcgcctgctttatcgtggcgccgcttggtcgctgatgcgcgaagaaggtgtgttgccggcgaatgcgccgccccttggcgcgacgatcgaaaccgatctcgctgagcacggcttcgccctgcttcggggcgcgatggccttgcgtgctcaggccggtgcgtcggatctgaccagcaaggcgttcgagcgcgccgccaacgccttcgaagccctggtgcgcaacggcgacccgcagtcgcccgatcgcggattccgccgcaccatcgccgccgctgcctaccacctggccggcttctcggctgtcgcctattcgctcttcaacgagacggcggacgacctcaatgcttcgccgagcgaaacggcgatccggcacctgatcctgcgcgatctcggccagctgcgcagctttgcgcgcgagtggttggaggacgaagctcacggcgatgagcagatcgccgcagcgctcacgggcgacgagcccgacgtcgacgaggtgctctcgactatcctaaacacgacgatctgccgggccttggcgcattttgacttcggtctcgagaccggcgaggccgagccgatcgaaagggcgcgtgagttgcttggcactgcggtcagcctggcggatcacgcagagaatgtcccgctgtggtggatatcgaacctatgccgtcatctcatcaacgacctctggcggcactcgctgcaccagaacctgccgaccgagccgcccgaggggacggaggagaaatacccggacctgcgacggctgttcatctcgtcgctctacgcccgcaaggcgtccgaggtggagctatggccatcacagcgcgaagcggcccagcgttccaccgacgtcaccgacgacctggtcgttgcccttccgaccagcgccggcaagacgcgggtcgccgagattgccgcgctgatgaccttgtcgtcggcgcggcgagtgctgatcgtcacgccattgcgcgccttgtcggcgcagaccgagcggtcctttaggaagaccttcgccccactcggcttcagcgtctcctcgctctacggtgccagcggcctttcggccggtgatgaagacgcgctgcgctcccgcgagatcatcatcgcgacccccgagaaactcgacttcgcgctgagaagcgacccgtctttgattgatgatgtcgggctaatcgtcctggatgaaggccacatgatcggcccgagcgagcgtgaaatccgctacgagaccctggtacagcgcttgcttcggcgcgccgatgcggcggaccgccggctcgtctgtctgtcggccgtcctgccgagcggcgacgagctggacgatctcaccgcctggattcgctccgacgaaccgggtgagccggtgcgttccgactggcgcccgacgcgccagcggttcggtgcgctcacctggcgggggaaggacgcactgcttcgcctcgacctcgacgacaacggtcctttcctcgacaagttcgtcgttgagaaaccagcgaggggaaaagagaagaagccctatccgcgcaagaactcacatcttgccctgttcgcggcatgggagtttgcgagccaaggcaaacggaccttgatcttctccacccaggcgaattgggtcgagagctacggcaaacaagtcgtggacctgtgcaaacgtggctatctcgactcgctcctggaggacgaggcagcgatcgcccgcgctctggagatcggcaaggagtggttgggagaagaccatccagccgtcgcgtgtctgaaacagggcgtcgccatccaccatggtcggctgccgagcccgtttttacgcgcgctggaagcccttctgtccgatggcgtcctaagggtcatcgtcgcatcgccgactctctcgcagggcctcaacctcaacgctgccgtgcttttggtgcccgctctatatcgagcttccgagaagatcaaaggcgaggagttcgcgaatgtcgctggccgcgccgggcgcgctttcgtcgacgtcgaggggctgattgtccatgtcatgttcgacaagttggattggcgaaaacgagaatggaagaggttggtcgcttccgccaaggcccgcacgctgaaaagcggtctcatccagatcgtcgccgagatcctcgacagattgtcgcgcgagggcgtcctggatcgcgatgatgcgtgggaatatctcgccaatgcccgtgaggcctggagatcgcccgaggaagaagctgcggtcgccgagcggctcgccgccggcgtcgagtacgaggccgacggtgatgacgatgatgagggggccgatgacgaggaagacgccatcgacgaggagccgctttcgcaaatcgtcgagcgcctcgatgcgaccgtgttcggcctgatcgaagcgctcgattccgatcgcgccgacttgccgaggctcttggacgaggcgctcaagggttcgctctgggctcgccagatcgcccgcgaagacgaagacatcgccccactccacaagaaggtgttcgaggcgcgcgccgatctcatctggaagacgacgacggctcaggcgcggcggggacattttgccatgggcgtcgggcttgaggctggcctcgccatcgacgccatggccgacgagctggccgcgctcctggaccgggctgacaaggcggcgttgagcggctacgtcgacgaactcagcgatgctctcggcgtcctcggcgagcacctgctgttcatgcggcctttcatccccgacaaggcgaacacgctgccggcgaattggaaggccatcctacgcagttgggtgtctggcgaggatgtcgccaagatcggaccgcagaacatgcgggccgtcgaaaaagcctttacctatcgtttggtctgggcgctggaggctgtccgtacccgtcgcatgtccctcggttggtcgccggagacggtggcgggcggcgctgcagcggcagtcgaaaccggcgtcccgcaattcatgatgtcgatgctgatccgcgggggccttccgtcacggcgggcggccatggctgcgatcgaggatgccaagccggtcttcgtcacgccggcagagatgcgggcctggctcgaatccgacgagatcactgcctccacggacgccggcgactggccgacgcccgagaccgctgcactgtgggcgcggttccggaccgaagctctcagcggcggcatccagaaatggtcagtcgaacactataagcgcctgctagacattgccgccgccccgcctgccggcctctatcgggtcgtaaccgacgaaggtgatgggcggacctggctggtgacgcccgactaccagcgtgtcgccgctttcaaaaagccggcggttgatcccaagcccagcctattttcaggccggttaccaggcaacacgaggctggtggaggcctcacgtgtcggccgcgggaaactggattggccgacggccgacgcgtag

SEQ ID NO: 58312 - DNA, 819 bp, Paenibacillus sp. FSL H7-0357
atggtttttactaatgtccatttaaactggctacaagatactggattaagtttaacaacgaacgaaggtaagactattactgttttggaatttctccaccaacctgatgaaactatattatcagaatgggcaaaacatttcaggaatcattattgtcttgacaatgaaattgattttcttaggggtgggacaggactagatcggaaaaattatcttgtcgatattaaatttccaagttctcgtaatgctcctggacctagtattagagcgggtgactttggagaaatattatctgcagattatcttgagtatattttaaattattgggttcctagaactagatatagcaataaagcggtaagaaatgagtcgactaaaggtagtgacgttcttggctttaagtttattcataataatggtgaatccctggaggatacattggctatattcgaggcgaaaacccaattttcaggaagagaaccaaatccaaggttacaggacgctgttgacggctcagctaaagaccatgcaagacgtgctgagtcattaaatgctattaaacaaagatttttagataaaggcattgtgggagaagctttgcgcattcagagatttcagaatattgaagatcacccatataaagaattgtacggtgctgttgccattttaagctcaaattattacgagagtaatctacttcgggcaactataacgaacaatcatccaaattctgttgacctaatgttaatggttattaagggtgaagatcttatgccgcttgttactgagttgtacaggagggctgcagatgaggcctag

SEQ ID NO: 58313 - DNA, 3120 bp, Paenibacillus sp. FSL H7-0357
atgaggcctagtaaaaattcggaattattattaggagcaacacgttctaaagcaaaaatgtttgaatatggggtactcgaagagcatcacatagaattacccaaagatccagcaagattgttctctttaactattggattgcttggtgagtatactgccagattaaataggagagatattactttagaacaagaatccgctttaaaagaggatttacactttgccgcctatttttttgattcatacttacaatctcgacttgatttaactttaaaaccttatctattactacttggttctgcatcgtattatttatgtgacttacctggtagttccaaagttttagcgtataagatcacagattctccagatttgggagcgtttggtttagaaaacttactgatatggttgcttatgggggagtatgctgaaccattgcagattgaaggtatgtactctgcaattatttttttaataagcgaagctttcgttctattttggcataatggacgaaatacacttgatgtagagaggtattgtcaagaacttcgagagagcatttacttaaatggaacctccagagaactattaatagcagatattattttttcaatagtgaggaagaaagttgaaaattcaagctggtcctctttacctttgtatactaatttatctcttgatacttggagaagtgcaattcaaaaagagtcctttattaaggaactgtggcctgcccaacacttacttggtttgaatggtttttttattggtaaatccggtgtggttcaaatgcccactagtgccgggaaaacaaaatcaattgaaattattattagggcagcctttataactaatcgaacttcacttgcagttatagttgccccatttcgtgcactttgtcaagaaataaatagtgatttacataatgcatttattgatgaaaataatattcttgtaaatgaattgacggatgttcccctaattgattttagtttagatacatcattaaatgtaaaacaaattttaattgtaactccagagaaattactgtacatattaagacataatcccgatatatcagaagatattggtttaataatttatgatgaaggacatcagttcgataatggctcaagaggcattacctacgaactattacttacctcacttaagcacatgatatcaatagaaactcaaatggttttaatttcggcggtaataagtaatgcggatattattggtgagtggttaataggtgaaaattcgattaatgttgacgggtcacacttaactccgacttttcgtacctttgcttttgctagttggatccaccaacttgggaggttagagtttgtatctaaccataatccagaagtaggcgagttttttgtgcctaggataattgagccaatacagttaaatctaataggaagagagagaagtccaaggatatttccaaataaagaagatagccaaagtattgcgctatttcttgctttaaaactagtgaataatgggactgttgctatttttgtcggaaggaaagcaactgctgctaaagtgggagaaaagcttactgacatttttagaaggggcattccattaattagtcccaagagtttgtctgatgaaaatgaggttattagactttccaatcttatagaacataatatgggttccgaggcaatagaaacgaaatgtgcaaatctcggagtatttattcatcatggtaacattccacaaggaattcgcctagccacagaatttgcacttaaggaaacaatgattaaatttgtgatttgcacatctaccttggctcaaggtgttaatatacctgtgaggtacttgcttataactagtctttatcaaggaaatcaaaaaataaagattagagatttccataatcttataggtcgtgcaggtcggtcgggtatgtatacagagggaagtataatttttgcagatccaactgtatatgataaaaggagaagtaaaaaggatagatggcgttggtcacaagctactgaggctctaaatcctttaaattcagagccttgcataagcacattgttttcattgtttgacccgattgagagtgatatgaaagagtctaggcttgtgtttaatacatcggaactcgtccaaatatactacagctcgccaagtgaactagatgaatggaaacgcaatatagcaactgatgggttttcattgagctcaatcgaaagccaggtgtcaaacaaattttcaattatatcttcagtggaaagttttataatgacgaactgggattccgaggattacgaagttgatcagtttgtcgaattatcaacgcaaaccttagcttactttttaggagacattagtcaaaaaattcagctcacccaattattcactgaaattgcgagacacatacatttaatagttggcagtctcgaaagtaaaaggatatatggaagaacaatgttcagtttaagaaagacatatgatatgcaagaatggctacaaataaatgtaacgggtttgttatattgtggaaatgttactgagcttttaaatttcttatggcctttattatatgaaaatattgaaaacaatacatttaaaaaatgtagctcccctgagttcttggaaaatatcactttaatgtggattgcaggagaaccttataaaaatatgctagaggaagtaaggaatgcaggtgtaatgattaacggtaaaagaccacgaaattttaagatggaggatatagttgaaatttgtgataattcattatcttatgaaggcacaatgatattagccgcagttattgaattaataccactagtacacaatgatgaagataagagggtaagtcaacttattgagctcattgagacattccagaaaatattaaaatatgggttaccatctttaaaagcagtgactatttatgaacttggatttacagacagggttatcgcacagcaaataactgatattttggggggagctagaagctctagaagggctactattctacagttaaaggaatatagagagagactatcaaatcttttagaattatatccaacctattttcaaataaagttacaacaatttttagctaaagtcgattga

SEQ ID NO: 58314 - DNA, 843 bp, Halobacillus sp. BBL2006
atggaaggcaaggataacaaacttattgaattaatagggtcccatgaagggaaagaacctttctttattgagtggttactatcagaagacagcatagaattaccgcagaaaaaacatagaattcttagtgaaattgatgggacaagagaaaattctatagacaaagtttcagaatggtttattcagcatcatatggatgaaaaaagaaaaagtaggattgaaaaaaagaaaaagactttagaaaagcaagggtttcaaaattacgttcaaaaacttaatttttttccgagtgataacaaaacaataaaaggaaatactgctgaaataatactagcagaatatttaaaggctacctccgggttggatttattggtttataggttaagatataatccgaatattaaccaatcaatgaaaggggatgatgttttactattaaatgcggctgatgttttcggtagactaatagtaggggagtctaaatttagagaggtccctggaaaagctgtaatagaagaaatattagacaatataggtaatgaagttacatatccgctatccctactctttttatccaaaatattaagtgatagaggggaagatgaaatagcagaggagttggaagacttaaatagtaatatgcatacaggcaaaacagatattataaacgtaggttttcttttaagtaatcataatactgcagcaaatgttgaaaggcatctatattcgcgtaatccaaattttgtattagtttcattaggtattgaaaatcctgcgaatttcatttcggaaataagtgatttagccattaaaaaaattagcgaggtagaagatgaaagttga

SEQ ID NO: 58315 - DNA, 627 bp, Halobacillus sp. BBL2006
atgaaagttgaaaaagcccaaaaattattaagtaaacttgaggaagatgattttgtaagaagcttagttgctcaaggggattcaaagtttttgttgttaaatgttaatgagccaattgaaaattttccttcgtatacttctgatctcgaacaaaaattaactagtattgcaatatcatatctttcaattggatgttcttttgcagaaaataaacacacacaagactctatctttcccttggaaaaaggtgcaacaatcttggagaatatatatagttctaaagacgttacagataaatataatgattattttatgttagtcagttcgttagcatattattcggcacatcaatactctaaatcttttgtaatattaaaaaaagtgaagtttgattctaaaataaatgaaatcattggttttatgttgaaaagacaattttctcttttatcgaaagctatcactgaaatacttttaaataaagattactctgatgaatcaatttcggaaaatgaagaaatcgatattgctaattacaaaatttatacagttattttgtctaaatcattagctttattattagaatttatttttacaggaaaggtagagtatttaaaacaaacaaaagaa

SEQ ID NO: 58316 - DNA, 813 bp, Pseudomonas sp. 10-1B
atgtcatcggaagtgcctcatctcgaatggctggaaaaaacgagtacgtttacatcatcctgcggacggcctattaccgtttacacttttaagcatgatgctatggatactgctgtaatgtctgcatgggcaaagcacttccgaaaccattactgcttggatgatgaattgccgtacctgaaaaatccgtcaaagtctaattctgaatacttgttgacggaaagatttccagatgaaaagaagaagcctggaccgagtgtgcgagcgggcgattttgcagagatactgatcgctgattacctggagtatattcggaattataatgttccacgtacacgttatgatcgtaaaatcgttacggatgagtccgcaaaagggtctgacgtaattgccttcaaaaagcaaccgaatgtgataagtgatacggatgaattgttggttttcgaggttaaagcgaaggccagcgaaaatcagaaagtaaacgtacttcaaactgcaatagatcactcagggaaagatgaagtgcgtcttgctgagtcactgaacgcaatgcgccagaggctctacgacagaaaggactttgatgggatccaagtcgttgatagattccagcgtgaggcagatcatccttgtaagcgctcttacggcgccgcggctgtattcaccgcatcatcgatgcatgaggacattataaaagcgtctacgactgtagagcatccgagtgcagatgctcttgagctagttgtagtaggtggcacccacttgatgacgctggtgcatgagctttatcggagagccgcagatgaagcttga

SEQ ID NO: 58317 - DNA, 3111 bp, Pseudomonas sp. 10-1B
atgaagcttgaaacaaacggaagaattattttagatatcactcgtgcgaaagcgaagcagtacgaatttggcattgatgaacagtaccatatcacccttcctcaagatccaaagaggcttttggtctttactatcggcgtgttaggtgaattggcagcacttgagtcgaggccaaatgatgagcgcgttgaggctaggagcagcctaaaggatcagttggtattggctggccagtatttcgagtcaatgagtacagctcagttgatatctggctcagatgaataccttagaatacttagctcggcttcctactatttggctgacatgccaggaagctcactggttttggcgagaacagtatcggacgttccagaagagcttacggctagcgggttggaacgacttttagtgtggctattgaagtcagatataagcagtaactttcagctggttccgttaggcgtcttcaacgatttaatacgcagggttgcgcgaatttataggtctttcataaattttgaggctgatctgtcagatgtaaatgaagagcttgttgactttaggtcagctgtttatttcggtggctctgaccgagaaattcttttggttgataccatcacggctcttgttaaacggaagatagataattcatctcttatctgcttgccaaggtatacaggcctaagccttgatcgctggaagcaaactctcgccaacgataggtttatgaaggaattttggccggggcagcggcttgtaggtgagcttggtgtattgacggggtcatctgctgtaatacagatgccaactagtgcgggtaagacaaaatcagcagaactgattgttagaagtgcttttttgtctgggcgcgctaagctcgcggttgttgttgcgccttttaaagcattatgtcgagagatcacgcaaggtttttctcagacttttgaagatgacgctgttaacgtcaatgagcttcgcgatatcactaatattgatgatgatgagcatgagtttcttaagtttttactcggggatgcttacaagggagcgcatgatcatacagtaatagtctctaccccggagaaactggtatacctgctacgacatgagccatccttggcggagagaatagaccttctcatctttgatgaagggcatcagtttgatagtggtaagcgaggggttacatatgagttgctaattgcttcgctcaaggagagtgtttccgattctgctcagaaggttttaatttctgcggtgatgtctaatgctgaaactattggtgaatggctgaatggcgaatccggagtccatattcaaggcagtaattcgctcccatccataaagagtgttgcgtttctaagctgggtcactgaaatggggcagttaagctacttgggtcgcgataataaaaatgacagcggtctatatgttcctaaggtgattcagcagttaaaccttggccgtaaagggcgtgaaagaaatgatcgtgtattccccgctagaggcgaaactcaatctatttcatgttacctcgggttaaagctatgccatcaaggtccggttgccatcttttgcggcgataagagatccgttgtgtctctttgcaatacaatagtaaacgcttatgaccgaaatctcccgctctcgaagcccagcacaatatcagatgcgggtgaattagaaaggattactttcctttccaacttgcatttctctgacggccacattttttcgaaagccatccccttaggcgttttacctcatagctcggcggttcctaatggcattaggatgtcagtcgagtgggctatggataagaaatctgcccattttgtagtttgtacttcgaccttggcgcaaggggtaaacctccctattaagtacttgctggtatccagcgttatgcaaggcggaaaatggatttctaccagggagtttcagaatttaattgggcgcgctgggcggtctggataccatacggaaggcggcataattttcaccgatcccaaaatttatgacgaccgttactcttgggcggggagtttcaagtggcgcaaaacattaggattgctcgattttaataatgcagaagcttgcttaagtagtcttgtggatattattaggccgttctcacttgagcaagctagtgatgatctcatcgaattcatcaaaaatccaacgcgccgaagggcgcagtgggagctgtggggagatgaaaatgatactgacgttacgactctcatggaggagatggactccaaggagctggcattaaatgcaattgaaagctattttttgtcaatgcttaaggatgatgagtcgttacttgagataagttcatttttaggcctggcgagagagacgcttgcttattatctggcgagcgaagaagagagggaacgtctattagaggtgttttctacaattcacgcacgtttgtgtgctattcctgttgaaaaattttcattctatggaaaaacgttgcttggtctggaccaacttcggtttgtcgagggctggattgatgccaatcagtgggatcttgagctatgtagttcttcaaacgaattgctggatgcatgctgggctttaatatcgaagttttcagtctcaaaaattattacaaatataaagccccaagtgcaggcagtagagcttgccaagcgctggtgtaatggtgaaagctatcatgaccttctatcgtatgccaaagaaaacaaaataaaggttcaagcaaagtcgaaaattcatgcggttactcaagagcatattgttgacttttgctctgccatttcctatgacggaatgatgttgattgggggcttggctgatattgtcgagggcaaatctctaagcgaggaaattttgggaaatgctagggctcttcagaatcagcttaagcttgggttgtcagacgagtttcacatttggctttatggtaagggttattctgatagggaggtttgcaagcatatcgctacggtccttgaaaaagtaatgattgggaagagcactttgggctatgatatccttaaggataatagagagctgctttcagaggctttgtcgaggttgcctggggtgttctctgaagtgaaagtccgttag

SEQ ID NO: 58318 - DNA, 831 bp, Bacillus sp. FJAT-21945
atgaaggatataatatcagaacaatgcaaactgattggcgaacacccagagtcattctttttttccgaatggttggagtcaacagatgatcctataagagataagaagatacatagacatctttcggagaaaatgggaacaagagagtatgctatcgaacaaatttctgattggatagtagaacatcatgtggacgaaaaaaaattaaatagattaaaaaggaagcgcaatcaaattctaactaaatatggttttgaagaatatgtaagaaggcaaaatatgttgccaacagcagataaaacaaaaaaaggtaatggagcagaaataattttaactgaatacctattagaaacaacggggcttcatttactggtgtatcgacttaggtataatccaaacgtcaatcaggcaatgaaaggcgatgacgttcttctattaaatagggataatgtactcgaaaaagtacttatcggagaatctaagtttcgtaaagcaccaagtaaatcagtaatcgaagaaattacaaaggagttttctaaagaatcaagattgccactttctatcacttttcttgctcaaaaaatgagtgattttgggaatgaagatatggctgaagagctagaggatttaaatgccactatacatgacggaaaaattcctattataagtgttggttttttactaagcaaccacaacacagcagttaacgttaatagacatctaaaatcaagtaatccgaactttgtatttgtttcattaggaattaataatccagatgaatttataacaaagtgctttaatttagcagaagagaaaataaagagggtttag

SEQ ID NO: 58319 - DNA, 3360 bp, Bacillus sp. FJAT-21945
atgaatatagaaaaagccaatgaattattacaaaaaattgaaagagatagttttatacagaatcttattgcccaaggtgactccagatacattttattcaatgtacaagaatccgttgataattttccaaatttcactctaaatttagattctaaacttacacatattgccttttcttatttatcaattggctgtacttttgcagagaaaagctatatgagagaatcaattttacctttggagaaaggtgcaggtattctagaatacgtatacaaaccaatagaaaacagaaaagaatttagttcctattatattcttgcaagctccttagcatattacgcggccaaccagtattcaaagtccttcattcttactcaaaatgtagatctagacacagatatttcaaaactacttggattatttttaagacgtaattttaaaaaattgggacaattaatttcagagatttcattaagcaataaatataatattaatacagtctcaagtgtcgaaaattatgatgatgctaatacgctaatttatactctaatattatctaagtcattatctgctttattagaatttatattttccggagacagtgcatggttagaaaaaagcaaggaatattcaacagatcttttagaactattgtcaattgatgaagaaccctctttatggtggtgcataagattatttcaaattattattgaaggcttctatcaaaattctttatggaaaataatccctcctaaaattaatgataataatcatgagttagtaacgaaatatattaatacaatggtatttcaacaaaaacctgttaccgaattatttcaatctcaaaaagaggtacttactcaagcgttaaacccacagggtgctgtaatcagtttaccaacaagtagtggaaaaacaagaatagcagaaatttctatattacaagaattaataaatgagcctgaaggcatcatattatacttaacaccatttaggtcgttagcttttgaagtagaagaatcattaagtaaaatatttcgcccgcttggggttgaggtatctcatctatatgggggtacacaatacagtaaaatagatgaactaatcttaaatgagtcaaatgttattatagctaccccagaaaaggccaaagcaatttttcggagtaattcacatataaagaagaagattaaattagttattattgatgaaggtcatcttataggaccagaggaacgttacataactagtgagttactaattgaagaattaagattccatattaccaaaaataaaggtaaaatgattcttctttcggcagttttaccaaacactgatgaaattgcccactggattacgggcaattctggaatgaaagctcactcagattggagaccatcgacacaaagatttggactagttgaatatacgggaaataacgtcaatattacttggaaaggtgaattggaatcctttaaccgtaattttatcaatccatttacagttaaaagaccaaggtctgaatatacctttcctaaagaaaaaaaacaggcaatcgcagcagttgcattaaaaatggcatcatttgggtcggttttaatatttgtcggaagacaaaatatggttgtctcccaaggtaaagaaataattacagctatgggattaggtaccacagagcattcatggactaaccaagtagaatggtacgcatttaaacttgcctgtgaagaagtctatgggagtaattctgaaatttacaaatgtgcttcgcatggcatcctgtgtcatcatgctgggcttccttcagaggtaagactaataatggaaaaactaatgagaagttccaaccccaaaattatcgtgtcaacctcaacgttagggcaaggagttaatataggggtttcatctgttattattgcaaacgtttggctaaatcaaaatgataaaataaaacattccgatttttggaatatagctggaagagcaggtcgtagttttgtagatacggaaggaaaaatactttatgttgttgatgcaagtagtggagcaagaaaggcaagaagggaacgagagcttgcaatacagtactttcatattgagaaacaaaacgatgttataagtggactgttatatgcgttacaatactttttccaagtagctaaagcagttaatattgattttgataccttacttgaattaattgcaaataatgatttttctagatttaaacatgaacatatagatactttcgactccttattggatttactagatgacactcttcttagtttaaatctagaatttgaaagttacaatttagaagataaatcatcttggattgaagattttttcaaaaactctttagcctttattcagtcacaacatttaaaaatgaaagaagaagatattatcgccttattaaaagcgagaaacaaagctattttaagattagcaggtgaatcatcaaattggaaaggtttagtctcttccagtgtaccgcttcgtactggattgtttataaaaaaagaactttcaactatcttagatattctcttaaaattccaagaaaccgaaaaatccactattgatttaattaatttcataaatgaaatagaagaatttatttctaaatttccatctgatcaatttaaaggaaatttggatatacaggatttaaattcattcagagaatgttggattagtggaaaatcaataaatacatttgatgaaaaggatataaaaaattacaaccaatactatggttttacacttccttgggcattaaatgctatagcaagaatgttgtctacaataaagttagaggaagagtgtaaaatatttgaagatttagctgtcttagtacaaatgggactacctaacatgtttgctgttaacatatatctttctggtatacaatcaagagtctcagcaacggaattgagtaataagttagaacaaaactttcaaggtacaagtattcgaaaattaagatcaaaaataattaaaattgctgacactataccgaatatatctgagaacacaagaagatgggttcaattattaaaagacaaagaatctaaattagtttcctttactgacaaattacctgatttcatatttaaatctaatgtagcaattaaaaataaaagactatttgtaaaaaaatttaacgaagaattttatttatgtagtcccgattttgaggatcaaataaaagtcaaaattaccaaaaaattccccttcaataaatataccgataatttcgggatatatttcgaaaacataaaacaagatacatggactatgaagattaggaatccatatataaagcatgatctttttgatttgctaggtttctaa

SEQ ID NO: 58320 - DNA, 822 bp, Flavobacterium sp. MEB061
atgattgagcattactttgactacaaccaggacagaaaagacttctgttttgaatttttctatgttacccaaaataaaaaagtggatgcggcatttcttgaagatctgaaagagaaggttctcttatcatatcgctcgatcgaggcgctgaagtttcatctgagcgaatcaacagaggacgaaattaaaaaatatgttacagactatgtaatacctcaaaatgccggcatcattgaccgtattgtaaggcagggggactggggagaaatcgtagcaggactgatcgtggcaaatattcaaaaacttagcataccgatccacaaactgcgatggaaaataaataaaaacaaatccgtatttggcacagacttgatcgcctttaatctgggggatccgataacagatatacattattatgaaataaagacccgggtagcctcgcatcaaaaagaaggcacaaacccaaatcgcaactatatctcaattattgcccacaatagccttgcaaaagaaaacaatgtacccaatgaaatgctggctgactttcttatgaggtattatgtcgcgcagaacgactatgcgtctgccgcaaaatttaaagacatcgttaagaatccttcagcttataacagaaattttgaattgttttttattgtggaagagaacaattacactgacacaatttttgatgagcttcataaccttccacctcagcttgcccctttgcgcgttaccgtaattatcgttaatgacctgcaaaaaattattgatgaaacatggcaagatattgaacagcgcttggtggacatgataaaaacataa

SEQ ID NO: 58321 - DNA, 3411 bp, Flavobacterium sp. MEB061
atgactagacaggaatatacccagtttattgacagcgaagttaggaatgtcttgaaagacactactcttgccagctacaagaaccagattttcgcctggcgccttaatgcatcctttacaaaatcgttccaaattgattatttgtggaaccgtgcagtatttctttcaagcagctgcgcatatttgctggagcaggatggcgacacaagaataattacgacaggattgaaatccagcgcggaaatctttgaatatctaagcgagctcaaagaattagctgagctgtatgataaggattctgtccttcttctctctgcattgtgctatgatctgtccggatatcaggcaaatgcttattgtattgcgcaacagattagtgaattcatatttcatgacgaaagatccgaaacaagcactgaatctgagagctacatcgttaggcagattacctgtattcttttaaaaaaaatacccgaggcaaaggcaaatatccaggctacggatgatctcggcattacgctttttaatgatgcattgtcaaaatggtgtgatgctattttcaagctttctgaagaggcaggatatgaagaagctttcgagagagtctaccgatattatctaaaaaggcacaatatttttatctcgcatcttctttctcttttaaagacacgcattgctgtttttgagaacaaatcaatctggaacacgctcaaaaaaaacgggcatattgctgagagcaaagtttggagaaaatatgtaaaacttttagcgcatgactattatgacagtaattctataaaaaatatcgggaaccgcaaatcagtatttgaactctggacttcccagcatagggctatcgagcaggggcttcttgaaggaaatgaaaactttgtcgttcaaatgcccactagcgccggcaaaactttcattgctgaactttccatattaaaaaaccttaccgagtttcctgataagaaatgcatttatgtcgcacccttcagggcgcttacaagcgaaaaagagattgagcttgccagatacttctccaagctcggctactcagtctcagccctttccgggagctatgaagtggacagcttccaggatgtaatcatctcccagacagatgtcctgatagctactcccgaaaaaatcgatatgctggttcgaatcaatcccgagctctttaaaggcatttccctgatggttgtggatgaaggccacattatcggtgaagtgagcacaagggcagccttactggagtttttgatcataagattgaaaattaaatttccagaaatagcatacttgttcatttcggcagttatgcctccaaaaaatgcagaccaatacgcgcagtggctaagcggcgagcaggagaatgtgctgcggtcccttcagtttcctgacagtcccgtaactgaagaatgggaacctacacgcaaattgattggaagcttcacctggacgaaagggggcagccagatcggatttaaaaattttgaagaaactgaaactctcgctgcaatcgggaactcatttgtacctaattacctcatccaaaaagaaattggaggaaagtatcctgctgtacaaacaaaacctgcaactactgcagctcttgcctacagaatgtctctcgaaggcaatacactggttttctgcggacagcctagacgtacccttaccattgcaaaccaattattgctgatattacagggcattgatatcgatctgccggaatggtttgaggccgatgaggacaaagaatctttttattacgcaaaaatgtggtatggagaagaggatcccataacgcagtctatcagacatggtattggaattcacttcggagatatgcctgaacaggtaaggaattctgtagagcatgattaccgtacaggcagattaagactgctgctgtcgagcaatacggtcggacagggtcttaattttccaattaagaacttaattttttacaatctggcgattggacatggcgaccagggacagatattgatttcaaagagggacttttggaatattgtcggaagagctggacgcgctggcaaagaaacagaaggaaaaataatttttgtaataaatactcctactgatctgaataattatgcagattttaccaatagggataatctggaggaagcagacagcctcttctctaaagtaattaatacatataaccgcaggaggattacccgcatagttcgtgaccggcacttatcaattttatcggaaacatttctgatggaaatgtttacagaggaaatcattgggactgattatgaagaaatcataaacgatattatagaaaatagccttttcaaattccagctcgatgaagatgatcttgaactgataaaaaggtctttccgcagtacttttaagaaatttgaggaaaatctcgacgtctctgatgctgaaatatataagcagtccggttttacttttgacagcaatattataatagatgaatttatcatcaaacatctggatgtgctgaacggctatttggaagacgacaatcattttgatttctgcaggcttgtttttgagtttttgcttgatgcaggattagaggaactggatgatcacaagctgacaaatatcggtcttactaccgagatgcattatccaatcatagaaatgtggatttcgggcgagcctctcgaagaaattattgacaagtggaaagagaatcaaagcgtagacagtttccatctgtttctttcaaagggtctttattatctatatccgtgggcatttactgcctttaccaacattatgatttacaggctcggaattgaaagggatgacgtgccgtacaatatcgcaaacctatcatcctacctgaaatatggattgcctgattctgcaggctgcttggccagatcgcttggaattaagaacagggatgcggtcgttgtgcttaccaaactggcatctggacgaacaggtcctgattttataaaatggctttcaaatttgagtattggcagaatcaatagtttggagctttctgtgtttgatacggaaaatattatcagtataagcagaaaacttacacctcaccgtttcaacgctcttcccgatgtattttcttttacagtagaagcaacctcggaatttgttggttatcgcataaactcccgcagggttcgtgaaggcgccgttcttgaatataggagggtacgaggcaagaataatccatatgccatttatttattatacaaagggtatcgcattgggcgagtgcctgcagagtacagcaaggttatttcagctgaaatcgacattaatgatgccgattatctggtgacagtcaaagaggttattgaacatggaaagtacaacagtatcatcgtagagatggctttgatggatttactgtaa

SEQ ID NO: 58322 - DNA, 780 bp, Spongiibacter sp. IMCC21906
atggcgctgtttgacgcttggtgcacattaaagaaagaaaaggacaagcgtaagcgcctgtggaagcttacggagagggacggtgggcgcgatgaaatacacggagaacttgttcaaattattcgctctcattatcagcggttagagcgcattgccgaagatattgccaggcttggttactcggatgctgccaacattcttggggctgtattgccacagaacccgaaatctcgatctggtgacataggcgagattctggccactgaacttgtcgatgagacaactgggttcaacgtgcctattcgcaggcttcgctataaagatggtagggatatggcactacgcggcgacgatttcatcggtattgcctacgacgacgaagaacgactatggctgctgaagggggaatctaagagtcgaaaaaagcttgggaaaacaactatcactgaagctcgtgaggcgctcaatcgaaaccatggccgttgcacgccagactccctgctgtttgtggccgacaggctacttgatagcgatgacgatgaagagcggaaattgggtagaaccattcgtgatgaggttgggagagcgacgctaagaccgaatcggatcgaccatatgttctttactctgtccgggaatggtgtgccgagtgccatgatgaaggacctggaagctgcgagtaccaatcggaaccactatgtcgccaaccttcacgtagaagatcacggggagtttataaaaacgatctacgacgaggtgaaagatcttggaagcgattga

SEQ ID NO: 58323 - DNA, 3474 bp, Spongiibacter sp. IMCC21906
ttggaagcgattgatgaacttcgggactttttgacctcagcaactgaagatgcagtttggggacggctcttggaccggggggcggcgtgggctctcatgcgtgttgacggcaaacttccggacgatgccccgccatttggtgacaccatagatgtcgatttggcggaacatggattcgctcttctgcgagctgcgctcaacctgcgtgatgaggtaggccccactccgctgactacaaaaggctttgagcgagcagcgaacgccttcgaatcattggtccgaaatgggccgtcggatgcagtagagcgcgggttctatcgggcgctggctgcggcttcttaccacttggcgagcttctcggcggtcgccttctctctattcaacgagcatgacagagatttaaacagtagccctgctgaaatcgctatcgcgctgctgatccttcgagatatggaccgactgcgtgagtatgtccgcaactggctcagggataacaaacacagtgatgaggaactatcacaggcgttggtggcagatgaaattgagcctgacgaggctattgcgacggtgctgaataccactattttccgtgcattggcgtatttcgacttcgcgctgcaaaccggtgagagtgttctccaagagcaagccaaagcgttgcttgcgacggcagtcaggctagcaggtaatgctaacaacgttccattatggtgggtttgtcgaatcagccaatcgctgatagatgatctatgggggcattctctacatgagcgaatgccgcgcgacgggcctgggggcggtgatgaaaactacccgcgactgcggagaatgttcattacttccttgtacgcaagaaaaacgtccgaagtggaattatggccgtcgcaacttgaggcagcagctcgcgccaccgatcttgctgacgacctcgttgtttctctgcctacgagtgctggaaagacccgtgttgcggagatcgccgcactcatgacgttagcaacagaaaagcgtgttctcatcgtcacaccattgcgggcactctcagcgcaaaccgagcgctcgtttcgaaagactttcgcgccgctaggcttcacggtttcgtcgctttacggcgcgagtggcatttcgtctggggatgaagacgcgctacgcagccaccacatcgtgattgccacacccgagaaacttgatttcgctcttcgcaacgatgtcgatctgatcaacgatgtggggctgatcgtgctggacgaaggacacatgatcggcccgaccgagagggagatccgctacgagaccttggtacaacgactgctacgacgtggtgacgccgcggaaagaaggattgtctgtctttccgcaattctgcccggtggtgaagaactggatgatctcaccgcttggattcggggcgacgagcctggagaagcggttcgttcggattggcgacccacacgtcagcggttcgggacattggcatggacacgaggttcggcccgactgaactacgacctcaacaatgatggtccgtttctgacggggtttgtctccgcaatggagccgcgaggtcgggatcgaaacccatttccgagagatgtcggggactttgcaattcaggctgcttgggagtttgcaggtcaaggcaagcgcactcttatcttctcaacccaggcaaattgggttgaaggatacggcaagaaaatcgtccggtttgtggaaaaaggttatttgccgacgctgcttgacgatcaaggtgctatagagcgagcacttgaagtcggtcgcgaatggcttggctcggatcatccggcggtggcgtctctacgggttggtgtcgcgattcatcatggccgtttacccagcccgtttctgcgcgagcttgaaagccttctcgccgaagggacgctgaaagtcattgtcgcgtcaccaaccctatcccagggacttaatctaaatgctgcggtactactggtgccatatctggttcgcgccggtatgttagtttcaggcgaagaattcgccaatgtcgccgggcgcgcaggccgggcattcgtggatacagagggtttgatcgtccatctgatgttcgacaagcacccgcaacgacttcgcaactggcggcggcttgtcgaatcaatcaaagcacgatcgttaaaaagtgggctgatccagattgttgacgagatcatgcaacgtcttgcacgtgaaggtgtatgggcgcgcgccgatgcccttgaatacctggccaattcacgcgatggatggaaatcccaggcagaagaggtggctgcattggctgccgaaggcactgacgaagacgatgaggaggacaagattgaggaagaaccactgtctcaactggtggaaagacttgacgcgaccgtgttcggcctggtggaagctcttgatgctgacagcgatgacttgccccgcttgcttgacgaagcgctgatgggatcactgtgggcgcgccaaatccaaagggaggaagaaggcactgaggtggaacacaaagcaatcatccaggcacgtgcgaaactgatctggcagcacactaacgtgagagcgcggaaagggcacttcgcgatgggagtcggccttgaggcgggcttgcaaatagacgccatggcagaggaactcgaagaattgattgattgtgccgacttggcggcacttgcaggcgatgtggctccgttatccgaagcattggcggagctcgcccagcggttgctggtcatacgaccattcgtcccggacaagaagaacgcacttcctgcgaactggcgagacctgttggtgaaatgggtctcgggtaccgatgtggacgagataagtacggcaaacatgcgtattgtcgaggatgctttcatgtaccgtctggtatgggcgttggaagctattcgtacgcgtaggctcagccaaggttgggagccggaggtcgttgcaggtggcggagcggccgctttggagacgggggttccgcaactcatgatgtctatgctcattcgagccggtctcccgtctcgaattgccgccatggctgccattgaggagacgcaacctatttttttgacacctgcggaaatgagacagtggctggccagcgacgatatggagatattgaccgcccagggtgactggccaaccgtcgagacggcggcgttgtggcaacgttttcgggtgagcatgttgaccgagagtgttcaggcctgggcgattaatgaatggaagcgggcgcttgagttgcccaacgaagtggccgcaccaccgcctggcatctatcggatagagatcgacgaggacgatctggcaacttggctggtcacgccggactatctaagaatcgctcgctttaagaagcctatacaagatgtcactcccagcctctggatgggtaagttagaggctggttgcacggtggtcgatgcagtgagaatcggccgaggcaatgccgtgtggccaaaggctacggcttag

SEQ ID NO: 58324 - DNA, 783 bp, Halomonas sp. 54_146
gtggggctatatgggaagtggtgcgagcccaccaaagaaaaaaacaaacgcaagcattactggacctatgttgagaaggatggcggccgcgacgaaatccgcgatgacctcgtagagaccatccgctcacactacgatcgactcgaacgcattgctgaagatgtgaaacgactcggatacgaggtcgccagtgaaatcctcaacgctgcgatgcctcaaacgaccaagggtcgctccggcgacctcggtgagattctcgcgaccgaactggtcgaggaagaggtcggtcttcgtgttcccgtgcgccgacttcgctacaaggacggccgcaacatggccatgcgcggcgacgactttatcggcgccggatacgacggcaagggtgagaagctctggctcttgaagggggaagccaagagtaacaaggtactgggcaagaccacagtcacgagcgctcgcaaggtactcaaccgtgatagcggccgttgtacgcccgactcgttgttgttcgttgcaaatcgcctgctggaaagcgacgacctagatgacaacgatctgggtcgcagccttcgcgatgaggttggcctgaagtcgttacatgctgatcgcattgaccacatgcttttcacagtttcgggcaacggcccacacgcctctctgaaagatgatctcgacgcagctgaggctaatcgggaccattatgtcgtgaacatacacgtcgaagatcaccaagacttcatcgcaactatgtacatcgaggcagaaaatcttggagacgattga

SEQ ID NO: 58325 - DNA, 3507 bp, Halomonas sp. 54_146
ttggagacgattgacgaactaactgagttcctgacgacggcgaccgctgacggcattcttgggcgccttctctatcgtggcgccgcttggtcactcatgcgcgaggaaggtgtgctaccggagaacgcccctcctcttggcgcgacaattgaaacagatctcgccgagcatggcttcgccttgctacgaggcgcaatggccatgcgcgcccaggcaggtacttcagaactgaccagcaaagccttcgagcgcgccgcgaacgcgtttgaagccttagtgcgtaatggtgaccctgaggccccagatcgcggcttccgtcgaacagtggccgccgctgcctaccatctggccggcttctcggccgtcgcctattcattgttcaatgagatgaccaatgacctcaacacctcgcctggcgaaacggcgatccgctatctgattctacgggatctcgatcaattacgtgatttcgttcgcgaatggctcggcgacgaggctcataccgacgagcagatagcagagaagctgcggagcgaagcccctgacgttgacgaagcgctgtcgaccattctcaacacaacgatttgccgagccctggcgtttttcgacttcgcacttgaaactggagaacctgagctagccgaaaactcacgggtcttgctcgacaatgccgtcagcttggcaaacaacgctgagaatgttccgctgtggtggatctcgaacctctgcggtcatctgatcgacgacctttggcagcactcgttgcaccaaaacctgccgatcgagccgccggagggttccgaagaaaaatacccagacttgcgccgactattcatctcgtcgctctacacgcggaagacgtccgaggtagagctatggccatcgcagcgcgaagcggcccagcgttccacagacgtgactgacgaccttgtcgtcgccttgccgaccagcgctggaaagacacgagtggctgagatcgccgcgctgatgactctttcgtcggctcgccgggtgctggtggtcactccgctgcgtgcgctttcggcgcagaccgagcgctccttcagaaagaccttcgcaccgctcggcttcagcgtttcctccctttacggcgccagcggcctttcggcaggcgatgaagacgcgttgcgcacccgtgaaatcattatcgcaacgcccgaaaagctcgatttcgccctgcgaagtgacccatcactaatcgatgatgttggccttatcgtcctcgacgaaggtcatatgatcggtccgagcgagcgtgagatccgctacgagacgctggtgcaacgcctgcttcggcgagccgatactagcgagcgccgaattgtatgtctctcagcgatcctgcccagtggcgatgaactggacgatcttaccgcatggatacgctccgacgaacccggcgaacccgtgctttccgactggcgccccacgcggcagcgattcggtgcgcttacctggcgaggaaatgatgcgctgcttcggctcgacctcgacgacgacggtcctttcctcgataaattcgtcttacataggcctgcgcggggtcaagagaaaaagccatatccgcgcaaaaactcgcatcttgccttgttcgctgcatgggagttcgcaggccaaggtaagcggactctgatcttttccacacaggcgaattgggtcgagagttacggcaagcaggtcgtagacctttgtaagcgaggctatttggactcgctcctggaggatgaggcgtcgatcgctcgcgctctagaagttggaaaggaatggttgggcgaggctcatcccgctgtagccagcctgaaggctggcgtcgccatacaccacggccgcctgccgagtccgttcttgcgcgaattggaagtcctcctgtccgaaggcgtgctgaaagtcattgttgcctcgccaacacttgcccaaggcctgaacctcaatgccgccgttctgctggtgcccgcgctctaccgtgcaggtgagaagatcaagggtgaggagttcgccaacgttgccggccgtgcggggcgcgcgttcgtcgatgtcgaaggtctcattgtccacgtcatgtttgacaagatcgcctggcgaaagaaagagtggaggaaactggttgtctccgccaaggctcgcacgctgaaaagtggtctcatccagatcgttgctaaaatccttgagcgcctgtcacgcgagggcgtgcttgatcgcgacgatgcctgggaatatctcgccaacgcccgagaggcatggagatcacccgatgaagaggccgagatggccgagcgcctggccgcagccatggaatacgatgcagatagcgacgacgatgatgaaggcgatgaggacggcgacgaggaaagcatcgacgaagagccgttgactcagattgtcgaacgcctcgatgcgactgtgttcggtctgatcgatgcgctagacgccgatcgcgctgacctacccaaccttttagacgaggccctcaaaggatcgctctgggcccgccaaatcgcccgcgaggacgagaacgtcgccccgctgcacaaaagggtgttcgaggcgcgcgccgatctcatatggaaggccaccacggtacaagcgcgccgcggacatttcgcaatgggggttggcctagaggctggcctcgccattgatgctatggcggacgagcttgccgagctcctcgatcgagctgatgctgcagcactgagtggcgacgtcgacgaacttgtcgacgcccttggtggtctcggcgaacgcctattgttcatacgacctttcatcccggacaaggcgaacgcactgccggcaaattggaaggacatcctgcgcaattggatctctggtgaggatgttgccaaaatcgggccgcaaaatatgcgaaccgtcgaagaggccttcacctatcgtttggtctgggcgttggaagctgtccgtacccgccgcatgtccctcggttggtcaccggagatagtggcgggtggtgccgcggcagcggtcgaaactggcgttccgcaatttatgatggcgatgctgatccgtgccggccttccatcacgacgtgcggcaatggccgcaatagaggatgctgagccggtcttcgttacgccggcagagatgcgggcctggctcgaatccgacgagatcacggcctacaccgatgctggtgattggccgactccggactcggctgcactatgggcgcggttccgaacagaagccctcagcagcggcatacagagatggtcgatcaggcattgtaggcgtctactcgatattgggactgccccacctgctggcctctatcggattgccaccgatgagggtgatgggcgaacctggctagtcactccagactatcagcgggtcgccgtgttcaagaagccagcgctcgaccctaagcccagccttttttcgggccgactgcagggcaatacaaagcttgtggaagtcgtgcgtatcggtcgagggaaactgcgctggccactcgccgacacgtga

SEQ ID NO: 58326 - DNA, 780 bp, Magnetospirillum sp. XM-1
gtggtgcagttcaatgattggtgcctttcggtggacgagcagatcggcaaccacttccgcagggtgatgaccggccaagccgcaagccttccgaatggaattcaggcaacggcggccgtcgtgccggggcactacgcgtcggaagaacaggtggcacgcgcactcgcccgtcttggaaagtcggctgcggctgcgctggtccagggcaagctcccgaccacgaaggcgatccgctccggggatcttggcgaaatcttcgcaacggaatggattgatgcgcatagcggcggctatcaagctccgattaagcgtctgcgctggaaagaccatcgcaacatggctatgcgcggcgacgacgtcattggcattctgcaagacgcccagacccagcgcctccatttcctaaaaacggaggcgaagagccgcgccagcctgacagcccaggtcctcaccgaagcccgggccggcctggacaaagatggtggactaccgtctgcccacgcgctttccttcatctcggcacgccttcttgagttggacaatctgccactcgccgacgcgatcgatgacgcgttgctcaagcatggaatccgggcggaaaacgtccgacatctgctcttcaccttttccggcaatgcgccggaggccttgttaacggcctcgctgcagtcttaccggggaccaatcaatcagtgggggatcggcctgcatgtagaggggcacgccgccttcatcggcgccgtctatgagcgagtgattgccgatgccaacaacgcctga

SEQ ID NO: 58327 - DNA, 2175 bp, Magnetospirillum sp. XM-1
atgccaacaacgcctgaggcaatcgcggctgacatcgcagaagcggcaaccgccggctttcgcggccgccttattgcgcgcggccaggcgcgcgcaataatttggcgagatggcgtgcttccgcccgacgccccggcctttgccccgcaactcagctacgacttgcattcctacggctatgcccttctcaacctcggccttcgcctgcgtgaactcggcggtaacgctgcacaggcgcgcaccgccttcgagcaggcggccaccgcccttgaggccgtgatcgccaaggggaatcgccaggaggccgatcaggacttccacttcatcattgccgcagcgagctatcatctcgcgcatctctccgcccgagcatactccctgctcgcgctcgtagaagccgacgaaaatttcgcgaatacagaacggctgcttgcccttttgatgcggcgaaatttcaccgccctgcgcgccaatgtgctcgactatcgggcatctggccaaggcagcgatgcccgaattgcggccgccattcaggctaacctcgatcaagccgaggcagatgccgacttggcctatggcgacagcgcgctcctcttcgacggactcgacacggcactgaccgacgtcttcattgcggccatgtcgatattccttcttgcgctggaacgcggcgagaagccactgctcgatcaggcgatggagcagcttcggacaggtctctccatctgcagcgagatgaatatgctgccgcaatggtggacgtatcgaatagcgatccacctactgtcggacctctggtcgaacaccttccatgagaaggtgccgctccagcccgttggcagcgaagcagctgactggcctcgaatgcgcgagttgttcatcgcgctactccaacggcgggagaaggctgaggtcgacctgtggccgtcacagatcgaggcagcaacccgcgcggtggaccaatccgatgatttagtggtatcgctgcccaccagcgctggcaaaacacgcatcgccgagctgtgcatcctgcgctgcctcgccggcggcaagcgagtggttttcatcacgccactgcgcgcgctgtcagcgcaaaccgaaacgaccctgcagcggaccttcggtccgctcggcaaaacgatctcggcgctctatggtagcatcggtgtaagcggcttcgatgaggatgcgatccgtgaacgcgatatcgtcgtcgcgaccccggagaagctcgacttcgcgctccgcaacgacccgtcccttcttgatgacgtcggcctgctcgtcttcgacgaaggtcacatgatcggcctcaatgagcgcgaggtccgctacgaggtgcagatccaacggctgcttcgccgcccggacgcgcaccagcgccggatcgtctgcctatctgcaatcctacctgacggcgaccaactcgacgactttgctgggtggctgcggcgggatcacccgggcggcctgatcaagcatgattggcggccgacccggctgcggttcggtgaggtcgtctggtcatcgcccactgcgcgcttgaacctacgtgtcggcgacgagcgcccctgggtccagcgtttccttacagggagcgcacctccgaactgggtgccgccaaagaagcgtcgtacccgccttttccccggcgaccagcgagaactctgtctcgcgacggcctggcggctggtcgaggatggacagactgtcctcattttctgcccggagcggcgcagcgtcgagccatttgcagatgtgatcgtcgatctccatgagcgcagcgcgctaagctcgttgctcggggccgctcctgccgtcctcaacacagcaatcgccctcggcgaagagtggctcggacccgacagcgccatcctcaagtgcctgcgcctcggcgttgcactgcaccacggcgccctgcctacggcctaccgcaaagaagtcgagcgcctgctacgcgacaacgtcctcaaggtcaccatttcgtcaccgacactggcgcaggggctcaatctgtccgccaccgccgtcgtcatgcactctctccatcgctatggcgaactgatcgatatatccgagttcaagaacgtcatcgggcgagccggacgggcctatgcccgcattgcggtggctgataccatcacctcgcgaatcgcatttctgagaaactcatag

SEQ ID NO: 58328 - DNA, 777 bp, Citrobacter sp. MGH105
gtgggcctatatgagaagtggtgtgagtccattaaagaaaatgacgaacgcaagtattactggacgtatgtcgagaaggacggcggccgcgatgatatccgcgaggaccttgctgagaccattcgctcgcactacgaccgacttgaacgcatcgccgatgacgtagggcgactaggatacaaggttgcagccaagatcctcagcgaggcaatgcctaatacccccaagggccgctctggcgacctcggcgaaattcttgcgacggaactagtggaggaagaaatcggtctgcgggtacccgtgcgccggctccgatacaaggacggccgtaacatggccatgcgcggcgatgacttcatcggcgcgggctaccaaggcaataagctctggctactgaaaggtgaagctaaaagtaaccagaagcttggcaaaaccacggtcatcgccgcccgcaaggtcctagaccgcgacaatggccgctgcacgcctgactcgctgctgttcgtcgccaatcgcctgttggagagcaacgacgctggcgataacgcactaggtcgcgaccttcgcgacgaagtgggtcttaagtccatgcaagccgatcgcatcgaccacatgctcttcaccgtgtcgggtaacggccctcatgcttccctgaaagagaaccttgaagccgctggagtcaatagggaccactacgtcgtgaacattcacatcaaagatcatcaggatttcattgcggcaatgtacctagaggcggaagctcttggagacgactga

SEQ ID NO: 58329 - DNA, 3501 bp, Citrobacter sp. MGH105
ttggagacgactgaagaattaagcaccttcctgacggccgctacagttgacggtattctcgggcgcctcctctatcgcggtgcagcttggtcgttgatgcgtaaggatggcgtattgccgcaaaacgctccgccgcttggcgcaaccatcgaaacagatcttgccgagcacggttttgccctgcttcgaggcgcaatggcactgcgggctcaggctggtgcttcgaaactcactggcaaggcctttgagcgcgcagccaacgccttcgaagctctggtgcgtaatggtaatccagagtcccctgatcgcggattccgccgcaccattgctgctgcagcctaccatctagccggtttctcggccgtcgccttttcaatcttcaacgagacagaggaagaccttaacgtctcacccggtgaaatagcgatccgacaccttatactgcgcgatctcgatcaacttcgcggcttcgtccgcaactggttggatgacggggctcacggcgatgagcagatcgcggcgacgctgcagggcgaagacactgacgtcgacgaagtgctgtcgacaattctcaatacgacgatctgccgtgccctggcattttttgacttcgcgcttgaaacgggtgaagtcgagccgttcgaagccgcacgagggctccttactaccgctgtcgggcttgctgacaatgctgagaacgtccctctgtggtggatttcgaacctcagccgtcacctgatcgacgacctgtggcaacattcactacaccagaatttgccgactgagccacccaagggtgcggaggaaaaatatcccgacctacggcggttgtttatatcttcactttacgcccgcaagacctcagaggtggagctatggccatcgcagcgcgaagccgcccagcgctccacagacgtcacagacgatctggtcgtcgccctgccgaccagcgcgggcaaaacacgagtagcagagattgccgtgttaatgaccctatcctccgcacgccgggtgctaatcgtcacaccgctgcgcgctctttcggcccagaccgaacgatctttcaggaagaccttcgcgccactagggtttagtgtctcttctctttacggcgccagcggcctttccgccggtgatgaagacgccctccgcacacgggagatcatcattgcgacgcccgaaaaactcgacttcgctctgagaagcgaccagacgctgattgacgatgtcggcctgatcgtcctcgacgaaggccacatgatcggtcctagtgagcgcgaaatccgctatgagacgctcgtgcagcgcctacttcggcgcacggatgcggcagagcgccgaatagtttgcctttccgcgatcctgccaagcggcgacgaactcgacgaccttaccgcatggattcgttccgacgaacccggggagcctgtgcgttccgactggcgcccaacgcgccagagattcggcgcacttacctggcgaggtaaggacgcgttgctacggctcgatctagacgacgatggccccttccttgacaaattcgtcgcggaaaaaccagcgcgagggaaggagaagaagccctatccacgcaagaactcgcacctcgctctgttcgcggcatgggagttcgcgagccagggcaagcgcaccttgatcttctctacccaagcgaactgggtcgagagctacggcaaacaagtcgtggacctctgcaagcgaggctatctgaactcgttgctggaagacgaggctccgatcgcccgcgccctggaagtcggtaaggaatggttgggcgaggatcacccagccgtggccagccttaaggtgggggttgccattcatcacggccgactgccgagcccgttcctacgcgaactggaactgctcctaaccgaaggaacgctaaaggtcattatcgcttcgccgacgctctcccagggcctcaatctcaacgctgccgtgctgctcgtgcccgcgctatatcgcgcctcagagaagatcaaaggtgaggagttcgcgaatgtggccggccgcgccggacgtgcattcgtcgatgtcgaggggctgatcgtccatgtcatgttcgacaaaatcaaatggcgaaaaaaagaatggagggaactggtcgcctctgccaaggccaggacgcttaaaagcggccttatccagatcgttgccgaaatccttaaacgtctatcgcgcgagggagtcctggatcgagatgatgcctgggaatatctcgccaacgcccgcgaggcttggaggtcacctgacgaagaagcaggggtggcagaacgacttgccgccgctgtggtatacgacgccgccaccgacgatgaagacgagacggacgacgaggaggaaaccatcgacgaggagcccctgtctcagctcgtcgaacgcctcgacgccaccgtattcggtctgatcgaatccctagacgttgatcgcgccgatctacctaaccttctagacgaggcgctcaaggggtcactctgggctcgccaaattgctcgggaggacgaggatgtcgcttccctgcaccggaaggtattcgaagcacgcgctggtctcatctggaaagccaccaccaccccaacgcgacgcgggcatttcgcgatgggagtcgggcttgaagctggcctcctcatcgacgctatggcggacgagttggccgaactcatcgacagggcagacagtgcagcattgagcggcgacatcaacgaactcgccgatgctctcggcggactcggcgaacgcctgctgttcatgcggcctttcatccctgacaaggcaaacgcgctgccgccgaactggaaagctatcctacgtagttgggtgtccggggaagaagtctccaagatcggaccgcagaacatgcgggcggtcgaagatgccttcacctatcggctagtctgggcgctagaagccgtccgcacccggcgcatgtccttcggctggtcgccggatacggtggcgggcggtgctgcggctgcggtagaaaccggtgtcccccaattaatgatggcgatgctgatccgcgcaggcctgccgtcacggcgtgcggcaatggcggccatcgaagatgctgagccagtcttcgtcacgcccgcagaaatgcgggcttggcttgaatccgacgagattacggccaaaaccgacgcaggcaactggccaacacccgacacctccgcgttatgggcccgcttccgaaccgaagctctcagcggaggcatccagaaatggtccgtcgaacgctacaagcgcctactcgataccgagccctccccgcccgctggcctctatcgaatcgtcaccgacgaaggggacgcgcggacttggctggcaacccccgactatcagcggatcgccgtcttcaagaagccagcggttgatcccaagcccagcttattctcggggcggttgccgggcaaaacccggctagtggatgctctacgcgtcggccgcggaaagttgcgttggccggctgccgacgcctaa

SEQ ID NO: 58330 - DNA, 807 bp, Shewanella sp. Sh95
atattagggatacacccgacagtgaacagcttcggctactttgctgcttctacagatttagttactgccaaaaatattgcgcatcgagagttattaatccctgacgcaaaagttaatgatgctgttcaagaactaaggcctgcattgatccaacatcatgcaagtgccgaaatgatagcgcgagacaacagaaaaatcgcttctctaaaaaaacttggttacaccatcgatgatgcgaatgtacagcgtttcccaactcactctgatacgcagaaaggcaacctaacagaagtttttctagctgaatacatagttgcttcgtctggtgccaatcttccagtctaccgattaagatacaacccaaatgtagatcaatccatgaagggagatgatgttttagctttcgacttccgaggcagaaagccccgaataataataggagaagcaaaatttagaggtgtgccatctaaagcggccgtggaggacataattaaggggcttaatagctcttaccaaggaggcttgcctgcttccctgcaatttgtagcagatagactttatgaatctggtcaaaataatttggctgaccaagtagaaagctgtgcattacaaattgcgaatggaaacctcgatctaaattatgtcggaatactcttaagcaatcaaaatagtgccaatccgatcaatacccatgctgacagtaatataagcgaactcgtcatgatctcattggccatgtccaagcccatcgaatttgttactgcatgttttgaagggattgaggaggaagctcatggcaatccctag

SEQ ID NO: 58331 - DNA, 3366 bp, Shewanella sp. Sh95
atggcaatccctagagaaaccgcacaaagaataattgaacgctttcaagcaggtggaacggtaaatctctttgcccaatcaaatgctagtcatcttctatatgaagtcggagagacccaggacaacttccctaacttcgatccgtctctacaagacaaagtgactatatcagcatactcaatattagccgccgctattagcattgctgaagaggaatggactgatgaagcagtccatgcattggagcttggtgcaggcttgcttggcaacgtaaatcaaccccatacagaagagaacaactcaagtgtctttcacgttttgatatcggcaatggcattttatgctgcaggacagtactctcgtgcttttgtaacaataagaaaaatcgaggcaaaatctgatatagcagaaattatttctgcatttataagaaaagacccagaacaagtaattatattaaccaataaatttctactcgacgaccttacaaggtttgagtcccatcacgacattctcgaccatgctattgcattgataagctcaagagcattgagtttaacactagaatattttgcttccggcgaccaccgaatccctgaacgaatcgacgaacttcttactagtggagtcgaactggcttctgattatgactccccttcgcactggctcgtaatgcgcttattaaggctgatgttggctggcaatttagatgattcgctatggtccagattaccgcggttaatggatggtgatgaagatattgttaaaaaatacattcgattattagcctttgataagaatcgtattactgagctttggacctctcaaattgatgcgcttgataaagctttggattctacgacccctggtgctgtgataaatatgcgcactagtgcgggcaagactcgagtggccgaactagccatacttcaaacactattaggtgatccggcagccaaagtgctttatttggcaccttttagatcattagctatcgaaatcgaacaaactttaagcaagacctttgacccacttggctttcccgtatcacatctatacggtgggtttaggttgagcaggtcggacacccaactagcagagtcgtcgagcattacaatagcaactcccgaaaagactcgggcaatgttacgagcgagccctgaattaatgtcgcaaattggtttgataatagttgatgagggtcatctattaggtgcaaacgaaagatatgtaaggaatgaactgtttctagaccatctgcgaattatatctaacaagaataattctagggttttaatgctttccgctgtgcttcccaactctgaagatatctcaaattggctaacacgcaatccaaataatgtcgctcgatcaaactggaaaccttcctcagaaagattcggtatattgcaatggcaaggaaataacgttcgcatcgattggcgcggtgaatacgagtcatttaacccaagattcgtacaacagatagaatgcaatcggcaatttgatcatggagccggtatatggaagggcagacgaaaaccatttcctgcagataaaggagaagctattgcagcctctgcactgcgcttatgtaccgtggggcctgtgatgattttttctgcacgtgctaacagtattccgggccttgcctcctcatctttaaccgcaatgggagaagacgctccgcaccatagttggcctcaactcgaatgggatttatttgaagctacatgcatagaagatctaggtgaaaatgctatagaacttcatgctgcgcgtaaaggcattatctgccacagcaatagacttcctccagaaactcgtctcgcaatagagcggttaatgcgaagttttgcaccaaaattagttattgcttcaactactcttgcacaaggcgtaaacataggaatctcttcagtcattgtttctactcccttcaaaagtaaagatcctattgatcatcgagacttttggaacatatgtgggagagccggtcgcgccttcatagatggagaaggaaaaattctttatgcaattgaccgaacaaatgaggattggaaagttagaaaagacattgcgttagcaaactatttttttaaccagaaaaatagcaacgaagtacagagcggccttctttttgttttgaatctgttgaagcgtatatctgatgagcatcaactaaatttccaacaacttcttaccatggttgctgagaatgactttacagcacttgaagatcaatcccgggaggaattccattacattttagatctggttgatgacagccttttatcaattcaggaagatgaaataattaatccaaacaatatccagccagaacaatgggttgacgatttttttcgaaattcattagcttcactgcaggcaagcgcagataccggattgagttccgacgaactgattcagctcttaagtaagcgagccgactatctggtaaaatccatcccggatagggctcaaaggaaggcatatggatcttcaggccttccaatatccgttgcctcgaagctatttcttgatatagcagttttcgtcaatcacgcacagacagtatcaaactcagagttcagcattgattcaatactttcctttttaaactggctagaagattgggcgatacaaaacgcagctgctattattcaagacgcaccagcaaaaaaatcgtttaataggataaggtcttcatggctatcgggaatctcgatgcgtgaaattactttgctggatgatagtgctgatgacatttgcaaaggagtttacggcttcacgtttccttggttaatacacgcagcatctcagcaagcaaaaagtattgggctggaagatgaatcagacgtgctgagcaatgtagcgatcctcgtggaaatggggctaccttccctgttggcttgttgggtatttctatctggtattagatctcgcgcggcttcaactgaaatcgccaattccggcgtcgatttaggaaatagcctcagacgagtgcgaatcagtttaagaaggcctgatattttagacgccttaaatgtgctggttagtgatcattcaaaaaattggcttagcttgcatcgaataaatcatgcatcaacgcccgacaggctacctagcttcagaaggtttaccgtcaatgggtttgatggagagccacccgttcttttgcttcgaagtattcgacaacaagattatctatgtactccagacgggcgacagaaactactcgtaggctctgatcgccaactaccttttcgtgatgttgcaaatgattaccgggttgcatttgaacggagcaatgatggggtttatcaggtggttttgagagatcctcgcgctcaactcgaggaataa

SEQ ID NO: 58332 - DNA, 846 bp, Lysinibacillus sp. F5
atgatagaaaaagttgatttattcccacatttatatagtcatccagaagaagattcattatttagtaattggttaatttgtgaagatgattatagaaaagatgaagatggatcttataaaaatcatcgtaaattaaatgttagagaaaatgttagtcatccttttgatgaaattgtgaatttgataaagaaacatcatatttcacctgaaagaatggcttcactagaaaggaaaaaaagtatactagacaaatattcattcagtaaatatatagaagctcaacaattaataccaaaaactaaaaaaacacaaaggggtaatttaggtgaaataatattaggtgaatatcttgaaagagttacagccaatagactatttatttatagactccgttataacacaaatgtagaacagtcaatgaaaggagaagatgtactacttttaaataaagaggagcctttttccaaagtatatacaggtgaagcaaaatttcgtactacacctaatcaagaggctgtaaatgacatatgcaaaagttatggtaaagatattgttcgcccattatctattggatttacaataacattattttatgacaagggtaaaattgaagaagctgaaatactagaagaattgttaaataaagttgtcaataaagaagttgagataataaatattggtcttttattaagcaatcataatgctgctcgaaatgttgaaaaccatatgaaatctcaaaataaaaactttggaattatatcattaagtatgctgaacccagcagaatttgcggatattatttatgatagagcgtttaaaagtttaggagtggagcctgatgaataa

SEQ ID NO: 58333 - DNA, 3228 bp, Lysinibacillus sp. F5
atgaataaaattctagataattataagcgtattaatgaagatgtctactttcaaaatttaattgcgcaatcgtattcaagatctattcttagagatgttaatgaaccacttgaaaactatccaaagtatgatgaagagttagacacaaagttaatagcaatatttcaaatgtatttaaacactgcattaagagtagattttgatgaaactgattttgagttaattaatattagaactgattcttttaaattggcagcagatatattaaaaaacatgtatcattatgggattgaaaaaccagaaaaagattattatatacttattgcttcaatggcttattatctttctggagattattcgaaatcattcgcggttatgaaaaattttaatgagaaaaatgcaattactaatctagtgtcacattttttaaagaaggaatatacaattctatatgaagaagtattatttaactttagtgcacagattccgaaatcagaaagtgaaatggaaatggatagccacatatatcttaaaatactttcgattgcaatgaacaactttttaagatatttaactacaggaaacgatgcatttatttatgaagcaatagaaaatacatctgatttaatagagttgacagagttagacaatgatgttttagcatggtatatctttaagttattaaattttctatttaagtgtttccatagagtatctttatggaaaataatccctcctttaatacaaagaaaagaagtggtagataaatatatattaaacaatttatttaattcaccaagtattgttgaattatttccttttcaaatcgaggcgttagtaaaaagtatgaatccatcaggtgctgttttagcattacctactagtagtggaaaaactaaaatagcagagattaatatcttaaaaacattagttgaggatccaaatgcaataatattatatttagcgccatttaaatctttagcttatgaaatagaagatacattaaagaaaaatttaagtaatttagatataaatatttcgaatatgtatggtgatggtacagaatctttatttgatgattttttacgaggtcaatcgaatgttttaattgtgactccagaaaaggcaaaaatgattcttagaaatgataatgatattaaagaacgtctaaaattaattattttagatgagggacacttaattggtggggacctgagatttactagaaacgaattattctatgaagaactgaagtattatgttatgaaagtgaacggaaaatttcttgttttatcggctattttaccaaattcatcagaagttgcagaatggtttactagggatagtcaaaataaatatgtattaaatcgaacaaaaaatgataaaagatttggcgttttactttatacaaaaaacaatgtttcaattaaatggaaaggtaaatcaaacccatttaatcataattttgtggacaacattaaacttacggacaaagttattttacctaattcaaaaagaacttctgtaatacttagtgctcttaaattttcaaactctggtaaagttttaatatatttagcaagaaaagatatgataaaagggtatataaaagactattctcgaatactagatcatttggaagatcattgttgggaagaaaagtattggaatgagtatttatttaacttaaagactttctatggagaagatagtatttttgaaaaagtagctttaaaaggaataatagttcatcatgcatctttacctaatgatttaagaatcgctacagaaaaaatacttagatattcaaacccaaaaatcattattgcaacaagtacattagctcaaggtgttaatataggggtttcaacagttataatcggtcattatagagttaccaaagatttaattagtaacggtgaatttaataatattattgggcgagctggaaggtcttttgtagatgtagaaggtaaagtgttatttgcaatagatgctaaccaatctacaaagaagaataaatgggaaatagggatatttgaaagttttattaatggaatcatagagagagtagaaagtggcatttattatgttttaagatatatttatagattatcaattaaaaataaggtgagttttgaaacgttgttagagattatatctaacaatgaaagtttagaagataatagttatttacatcttttggatgacacgttattggcaattttaaacgaagaagattttgatgtaaataacttagatgaatttatagataatagtttcgcaattttgttagctgcaaataaagcagaagattttaatgaagaaaaattgaaaagaatgttaatagccagagccaattatataaagactacatatcaagatgcaacaaaaaaagaaatgtatttacaagctggtattgcactgacatttattaaactcttagaagaaaatctaagttctatagaagaaatattacaacaagagtattatttagacgaattaatttcaagaatactcgatatcgcaaattcagatttaaatatttatcgaaacgataattatgatatatccaaggaacatatttatgaatggatatcaggtgaacaaataaatgaatcaacatatacgaattttaaatggaacaaattatattatgagttaccactaattgttaatacattatcaaaaatcttattatttaatcaaaaggaggaatgtagcgaaaagttattaaattttaatgaatgcttgaaatatggattgcctaatatagcagctgtaaaaatatatttattaggacttaattcacgagaagtagccacaaaaatagctgaaaaatattattctgaaatcttacaaattgacgatagatttggactcaaattattattgatgactaaatctaaggacattctagaagaattcaatgaaacagaatttttcttaattgtgcagtcatggtttgaaaaggagttttctgaaagaagcctaaatacaccagaaattaggcttagaatccgcaatgtttcatcggaaattaatgaatttagactaatggaaattgataataagtattttttaatcacattagatttaaatactaaaattcagttgaatttaaatacaggtacgttagaagggaaagagtatattattaataatataaaatattcgtttatccgagaagctgatgatgtatttgttctaaaaacatacaatgattaa

SEQ ID NO: 58334 - DNA, 846 bp, Desulfosporosinus sp. BRH_c37
gtgttgggagcgaatacaattattgataaatggttgagtgaaattaaaagaaaaaaacattcatataaatttacgattattgatatcagtgaaaaaactaagataactgataatataaccgattatttagcgttgtctttactaagtcactttagagatctagagcatttgaagagaatgttcaaatgcgaaccaagaagtaagctgaaaaaatatatcagaaataatatcttcccttcaatcgattcatccctggatttaaaattgcgaaggataaattacaatgttcgacaaggagattggggagaggtactgacaacatctatcgctttagacatacgtaatgttaatgcaccagttaaaaaacttagatataaaatgaataaagaaaaatctttattcggcattgatgtactagcttttgaagaagatggagataaaaaccttgtaaaggcaattctatttgaatcaaaaactcgtcgaacttataaaaaagaaataggagtagaggcttataacagtttatgtaaaaatagcgaaaaagcatttatagatatgctcaattttctttcaaccctgttctttgacaagggaaactttgaattggcagataaatatgatgaattagtaaaaaatccaaattcaattattaaggagtatcactcatttattattatggaaaagaatgtttggagagaagcaattcttgattgtttggataatgaaactgttgattttgaaaatgtatattttaatatatttttaattgacaatttgaaggatatggttgcagaaacttatcgacggactgaaaatatagccatagaggttgtttatgaaaagtag

SEQ ID NO: 58335 - DNA, 3480 bp, Desulfosporosinus sp. BRH_c37
atgaaaagtagcatttcaaaagctgagtatctgaataagaaaaaagtagaaatacacgatattcttactgatagaacgctatcaaactttttttatcaagcaagtgcacaaaaaataggagcaagatttactcctacttttaaagaagaatatctatggaaaaaagcgcttattttgtcttctcacggaggcaagatactattaactgaacctgactatttagaagcatctaaggctgttcatattgctgcacgtatctatgaaatattgcactacatttctgaggaatatgatactgagtattgtgtagtattatcatcactatgttatgatattgcaggctatcatgctaatgcactgtgccttataaaaaatttatatcatctggaaacaaatcaggacaattatgaatatgaaaatcaaattcttgattttattcagttgtttatgataagaaaattaagcattttatccgaattaacttcacaatttgattctaataacgctgacaatatcaaagaaatttttaaaatactgtctgactttttcctaaatggtacatacgttaaaagcctcgatgaattaaatgacttcgataatatgattgaagaaaaaatagatgtagtcttttcagaatatttatatgtcggagatatcatgttcagcaatctgttctttctatttaaagtaaagtataaattatttgtacgtaaaagcatttggcataatttttataaatatgagaagctgccaaataaaatatgggatagatacgcaaagatattgagtcacaacatgtacagtgatgggaaggtcatagcttctggtcaacgtacatctattattgagttttggaattcccaagtgaatgctttaaataagggcattttaaatacaaatgataattttattatacagatgcccacaagtgcaggaaaaacttttattgcagaaatgattatactaaataatctagtccaatctccagggaaaaaatgtctttatattgctcctttcaaatcattggtcagtcaagttgaagagactctttctgaccatttaagtagaatgggttttgtagtttcgacaataataggtaactatgaacttgatagttttgataatctacttatacatgaggcagatgttttggtggcaacacctgaaaagattgatctcttatttagattaatgccggaattttttgataatgtatcaaacattacgtttgatgaaggacatgttttaggtaatttggatacccgatcatctttgatggaattcttaattacaaggctaagacaaagacttaaagataaagtttcatttatttttatttctgcagtgatgccggatataagtgttgctcaaatctctcaatggttgtcaattaaaagcgaaaataaaattacatcgaaaaatagtaacggtgaaaaatggcagccaactaggaatttgatcggaaaatttgagtggcatagcagttcaggctggcttgaatatcccacacttcgaatatccgctaaagccaatgcatttgtgccgagtgtaatcgaaagtaaacgatacagttatataaactctgaaacaaatagaactaatactgtttcttttccaaagactacaagtaaatctgagacagcagttgaattggcatacaaattctcagatcaagggcctgtcttagtattttgtgggcaacctagaaacgctaatagtgttgcaaaagcatatattgatatgattcgaattaaaacaatttcaaaaactattaaactggagaatagaaccaaatacactaaattaaatagctatgaaatagcatctaaagtcttaggaaaagagagcgagacagtattatatttaagtcatggaattggtgtacatacaggttcattacctcaagttgttagaagagcaatagaacaagattataaaaataaaagattgaagctcctaatagcaacaaatacacttggtcaaggagtaaatcttccaataaagactatcattattcattctgttaatattgctcagggtcaaattgtttcaaatcgtgatttctggaatatcattgggagggctgggagagctggaaaggaaacagagggtcaagtgttatatttgtgtaactctgataaagatagaaatctattttcaaattatgttgatgaatcaaaaattgaaccaataaacagtatcttctatcaaatcgtcaaggctcttagtgataaaagaattgatagtgatcagttaagagaattattagcagagacaattgaaccccaactatttgctcttcttgttgaagaaatggtagattctcccgatgaacaaattattaataagatgatagggactacactctttaacatccaattggcagatgagccacatgtagatgactcagagttagccaatgaacttgttaatatttcaaatagattttacattgctgctccaaattacaagaaacgtaatgcttttgcaagaacagggttttctttatctagttgcattaagttacatgattatatagaaaatgtttttgataatctgtacgaaaaagttcagataagcataattgattttattcttgacgttttgaactatattaaagggattcaggaaatgcagtcatataaagattccataaatgaattgtgccagaaagaagatattttcaacacaattattagtatgtggttgaaggaagacaatattacagaaatacgatcgtttataagaaaacatgacgttcaatcagctgtattattaaacgagttcattgaatcaatgctttcgtatcgttattcctggggagtaacgtcttttattgtaatttttaaatatgaaatagaagaaagaggattaactgatttagacttgttgaattatattccgtcatttgttaaacatgggacaaatgaaatattaacatcatgggcaaagagtctgggcattcctacaagggaaagcgcaagcgctattggtaattattatcgtaacaaattgggtagaacccttgatttaaaaaaatttgtacaatggttttcaaatataacaaaggaggaattaatagaaatactgaatataccattaacgacatacgaatttgaagctattttaattattgctcagaaaattaacactagaaaatattatgatattgaagataatcaagaatatcgtttttatgttatgggaatcaaatattatactgaaagcatagcgttagcccgaagaataaaaataaatgataaagtttcccttcggcgtgactttgacaatttgttcgattcttatgctgtaatgataatgtaccaagatgaattcttagggtatgtaccaagagaactagcaaaagaaatctctgttcaaattgacatgaatggatttaaatatcatggtcatgtattaaagaagagaaagaaatctactggaatagatatattcgtttcggttacgttggatttgtag

SEQ ID NO: 58336 - DNA, 786 bp, Smithella sp. SDB
atgaatgttgcaggtgttttcaagccacacactatgccgcgtaaagccttaccagttcgttgtcatattctgcaggatgacaaagcaaaaattcttgaagattatatggtcgaacagttaccagattgttatattaatagccgtcaactcaaagagcgaaaaaaaaagacgggcttatctgcatctgaaatcctttctaacaagttacccgatcctggttctgtcatgtccggtgacttcggagaaatgctgacacttttctttctagacagtgagcgcaccgaaagaacagtccccataagaaagttacgttacaagcaagatcgaagaaaatcagcgccacactctgatataattattttgcatcgacaagatccacatggcatgttccctgatgactttgtaatatgcgcggaagctaagcagaaagcaacaaataccgaatttaaccccatagccgaagcgttgaaaggatttgtaaaagatagaacgggacgacttgctcgaactcttctatggctccgggagaaggctattgatgtagagaacaaatcaatgatagactacattgagaggttcacgcaagctcatagcgtttcctttaaaaaggactacaaggcagttgctgttattgaccgagcgctacttgacgctgagattacccagaccctaaaactacccgcgcaggacgaaagctttgaaatagtggttcttggtgttaatcggctctacaaaatgtacaacgatgtgtacaaaagggcgattaacgaggtacgaaatgaataa

SEQ ID NO: 58337 - DNA, 2946 bp, Smithella sp. SDB
atgaataaacttttgcgtaattggctttctcaggttgaatcgtgggaagccgcggctgaattcggaattccgcgcgatgagtgggtgaaatatgacatcatacagcgtaatgaagacgtatatattgcatcgctgtccgccatatttgatgcacttcgtattgacgatatggagcaaaaacagtcagaattatggtctctggcaaaaacgctacttgtctactcgcgcggtgcggcggcccggtatctttcaggtgtaggacgcgatttaaaccaattatatgcggcaacactattttatatcgcaggatatccagcaactgccacatttcttgccagaaatattaatgatttttccactgagatcgcggaagaagagttcatccacaattttcttagccatgatgtatcttccgtcaattccctcacgcgacagttggcgctctttgttgatggtcagactgaggatatatcagaccttatggacaatctttctaatagtatagcaacaggcataatctgcgaccctcgtcaatttatagctgcaagactcgctagagagtgcatccagagattctcaaatgtaaatatatggaaattgcttcgtgaacacgcagcggattactcaaccgatgcttggaagccattttttgcaactggtggtaatgctgcaacaatgtgggaactgttgccctcacaagaaatggctttgactcaggggcttatgagcaggatggaaactactttcagcctacaaatgccaacaagtgcaggaaaaacggcattgtgcgaactgcttatctatcaagaagttaagatccatggtcggtttgtactattcttagttccttttcgtgcacttgcagctgagattcaacgcgatatgtcaagtcgtcttcatggcttaggcataaggattttagctacgcacggtggaaacatccctacaagatcagaatcctctagtgtagctgatgcagaagttctgattgtgacgccggaaaagtttgcggctcttgaacaaatgatagaaggtttttctgatcgctttcagaccataatttgcgatgagggccatcttatcgatgatgagtcacgaggattgggttatgaattgctgctgacaagactaagaggggtaaacgtactaggccggaggttcatttttctctcggccgttctgccaaatgtgagtgagatcaatgtttggttggggggtgatcaacaaacgtttgtgcaatctgagtatcgacccgtcgatactgattattgcttcattaaacaagtgtcatctaacagctattgccttgatgtaaatccaactgaagcgcagccgcgcagctattatttgtatcgatttctaaccactgacgacttccgctatacgaatccagtaaccggaaggctgaagttaatcgatggacggaataatttttcttctttggcgtgtgccgcaactcttaaggcaaggcgaaatggtcctgtggcgttgttcacaacaacgagagggagacaaggtattcaatcattaggaaagacacttctaaatatggtgcaaaaagggattcgtgctgcgcaagaaagaccgagtgaaacacctgaattaaaggagctttttgaatatgtgttattcctgctggggcatgagcacttactggcgcagcttgtgaggattggcataggttatcaccacggtcgacttccgcaggagattcgccgtgcgatagaggagggagtccaagagggttcaataaatattattatttgtaccaacactttggctgaaggtgtaaatctccctattcgcacaatggtcgttcacactgtgagaagatatgatcccgatcgggatttacatttcttcattcccaagcgtagcattaagaatatcattggtcgtgctggtcgtgccggaaaagaaacacgcggccgtatcatattcgtaaactggaatgaacgggtacgtattgagcaggtcctccgagagcaggaaattgaacctgccaaagggttattgtgtagactcatcgaaacactacatgagttttctctcaacaataagaaagaactgaccaacgaactgtttgaacgccaacgcccatggtttttagaaattattgataagatcgatttagcgctcctaaatctcatagcatctgatgcccaagcagacacattggatcaacatttgaatgatttactggaacaaacattagcgcgtcgtttatgtacttcagaagaattacaaaattgtcttgaaaaagtatttcaattacgcgctgagcaccttgtcgcgacagttgaacaggcgatatggccaaagctaagaaagagcggatcagcacccagattctggaggttcgtcaatgaaaaattgctacttcagcatcccctatggttagagttgcaagatccattagatgatcagtggcttcaagaagtcatcatgccattactgagttatgaaggcgaagatacatcgcgtgatcatggcatgttgcaagatttcataaaaggatggatgtcgggtcttacttatcaagagttggcggaggcctgtggatgtaatgtggatagaattttggattttgtctgcaatgacgttggttatgttttgcaggatctcgttgctaagctctgccaactcgctactgaaacacatgacgagagagatctctcagaaccggccagaaactggtcatctctcttgcagtacgggcttggcaccttgcagcagcttgatctattcgagagaggtgttagcgatcgcctcgctgtctggggtgccactcgatatattgaggcaacccaaacgacacttcgaggaagagatcttgttgtttatctccgaagaaacggacagtttttaaggtcctcccttgaaagagacgaaagggttccgactatgagtgtcaaacgatttattcgcgaactccgaatcagatga

SEQ ID NO: 58338 - DNA, 798 bp, Sphingomonas sp. Leaf226
attggctggattagggataccggcgagcggcgccagaccgcgtgtggccgagagatacaaatatgggaactcgaccctgttgatgacaaggtcgttctttcagcttgggcagcatactttcgacatcactactgtgcagacgccgatctgcctgcactagtggccggcactggcaaaagtaacgctgaatatttactatcaatactttttcctgacgagaaagtagctccaggccctagcctgcgatcaggcgacttcggtgagatactagttgccgatttcatcgaatttatcttgggctactggtgcccaagagagcttcgatatcaagaccgctggaaccgtcaggattccactaaggggtgtgatattatcggcttcaagttcgtgaatatccaaggcgaacacgcgaacgacgagctctatatctttgagtcaaagtccggtttgtcagcaaccaaaaaaaaccgccttcaggatgcagtgacagactctatgaaagaccatctgcgcgaagcaatgacgctgaacgcgatgaagcagcgccttctcgttcgcggcgaagccgcgcaagtcgacgctgtccagcggttccagaacgagaccgagcggccctttcgcagaataaacggagctgctgccgttctggatatcgatgtacttgccacgacaaatctcgaaacaacggacacgaccggacacaagaatgccgataacttgcgcctgcttgtgatcaaagggccatcgctgatgaagctggttcaagcgctttatcaaagggccgcaaatgaagcctag

SEQ ID NO: 58339 - DNA, 3117 bp, Sphingomonas sp. Leaf226
atgaagcctagagccacagcgaacagggtcctgtctactacccgcgcgcgggcaaagatgcatgagtttcgggtcgcgccggaagacttcattgaactctatcgcgatcccgcgatgctattcgacctggcagttggcatcctcggggacgtggccgccgtgacagcaaatgagtttcgtgaggccgaaggtctggattcattcgatccagatatcgagccggtaagttggggcggtgaagaactgactatttcggaggggctacgcttcgcctccacctttttcgatgcttacctgaacgccaagctcgatgagacgatcacgctcgaattctctctactctgcgccacgtcctattatctcaataatagcgtaggcaatgcgacggtcatcgtgaaaaagatggagccgccgccgctcgacttagcggccggactggcccgcttggtttatcagattttgctgaacgactttaccctgatcgacgcgagcgccgacagggtaaatgccgtcctgggcgacatgaacggattcatgacattcgcgtctggtgtggccgaggtgtcagtcgcctgcgatgcgcttcgtgaagtcgcttatcgaaacgggtcgccacgggagttgctgtacgccgatcttacagcggcgatctgcgcaaccaaactgcgcaatgcgtcgaggacgatccttcccgcagcatcgggactggatgccaccgcctggcaacccgctcttggcaagtcgcattttccgattgagctctggcctgctcaaaagcgcatagcgcgcgcgggcctgctgcgaggccgctcggctgttatacagatgccaacgagcgcaggtaaaacccgagcgaatgaattgattatacgttccgcattcctgtcgcagcgtgcctccttggcggtcattgtcgccccctatcgttcactgtgtcacgacatcaggggtgatctggtgacggcgttcgccggagagccgatccgcttggatgaggcctcagattccttccagttcgatatacagcttgaggaaattctggcggtaaaaacggtcttgatcgtaacgcccgaaaagctgctttacatgctacgccgagtgcccgagctggttgatcgcatcggtctggtcatctacgatgaaggccaccagtttgacggcctgacccgggggccaacttatgaactgctcctgacatcgctcaagttgaccttgccagagactactcaagttatcttgatttcagcggtgataggcaatgcaagcgcggtggcagaatggctggtcggggaccgcgatgccgtcatcgacggcgaaggcctgcttcccacgtcaaaaagcatcgccttcgcgagttggcaggatgctcgtggccgactggaatatgtgagcccggccgaccctgaggaaagcgagttttgggttccccgccttatcgacgattttgccctgagccttcgcggcaaagagacaaaggttcaacggtttcccgcgaagacaaaaggcggggaggttggcctgtttctcggactgtatgtggtcaacaacggcagcgtcgcggtcttctgcggcaagaaggatagcgccataaccatctgccgaagggcagtcgatatttttgatcgcggcgcagacctaccgaaaccagtcgatgtttcggacgccgtcgaggtcgaaaaaatacggtcgttatcggaatggcacttgggacccgacgccgtggcgacaaaagcggcttcccttggagtcttcgctcaccatgcggatacaccgcaggggcttcgattgtcgatcgagcatgccatgaaagtcgggctcgcaaagtttgtggtctgcacttccaccctcgcacagggtgtcaatttccccctgaagtacctgatcgtcacttcgacgcgacaaagcgcggaacgcatcatggtgcgtgactttcaaaatctcataggtcgcgccggtcgagccggaatgcacacggagggtagcgtcattttcgcaaccccatctatattcgatcagcggaacgagtatcggaatagatggcgctggaatgaagcgaaagagttgttggatgccaccaaatcagagcccacgaaaagcagcatcctgagtcttttcgacgattacgagcagcgagagaaggacgctccgccagtcgtccagccgatccagccgcagtggctcgacctatctttcgcgggtcaggctagaatagaagcggtggtgaatgaagcgctcgcacttcaacccaacatcagcgcggcagagttccgcaggtttatcgaaaagcgggctagagtgatccaagcgattgccgcctttctcgttgccaacatgacttttctggaagaggaagggcagggtcgggtttccgacctcgcttctcatacgctcgcctatcatctggcaccggaggaggttcgctctccgcttgtcgccgtattccagatgatagccgccgccatcgcagcgaacaccgatggcgaccagcgggctgtgataaagaaatcacccctccctccagctattatcgccgaacttcaagcctggcttgcggagaatgcggaacagcttcgggccgcgattgatgccgatcagcttctgaaagtggctggcgaaaagattatttcgtggaactccgccccgtcgatccgctcgatgtccaacacggactttctgcccgaggcgctgtcggattgggtcaatggacgcccattctatcacattcattcgagaatggagcggcttggtatccgggttagcggcaatcatgcgacagtcgaaagcgcggtcgccttgtgtgagggcgcgttcgcctacgatttggcaatgataaccgcctcactttccgaccttgcggaaggaatggacgaaaccctatttcgcggattttcgaagctccagaagcagatcaaatacgggctcacacatcctgccgctattgcgtttaacgaagcgggatttgctgatcgggtagtagcaaactttctctcggccctctggactgatgtaagggatcgtgacggcgtccgcgctgcatgccgtcacgcagcaatgttgccggcgcttacggcctatccgtcttatttctcgacagtcgcatctgagatcgcaggataa

SEQ ID NO: 58340 - DNA, 783 bp, Aureimonas sp. Leaf324
atggggctgtacgagcggtggtgcgaatccaccaaagaagaggacaagcgcaggcgctactggacctatgtcgagaaggacgtcggccgggatgacatccgggatgacctcgccgagaccattcgctttcactacgaccggctcgaacgtatcgctgaggatgttgctcggcttggctataaggtagcggccaagatcctcagcgaggcgatgccacagacgcccaaggggcgttccggcgatctcggcgagatactcgcaaccgagttggtggaggaagagattggcctgcgagttcccgtgcgccgcctccgctacaaggacggccgcaacatggccatgcgcggggacgactttattggagcgggctacgatggagctagtaaaaagcttaggctgctgaaaggcgaagccaaaagcaacatggtgcttggcaagaccacggtcacgagcgctcgaaaggtgctcaatcgcgacaacggccgctgcacgccagactccctattgttcgtagccaatcgcctgctggaaagcgccgaccccggcgacaacgaattgggccgcagtctccgcgatgaagtcggggtaaaatcccttcgtgcggatcgcatcgaccatatgctcttcaccgtgtcaggcaacggcccccacgcctcactgaaagacgatctcgacgccactggcaccaaccgcgaccattacgttgtgaacctccacgtcaaagatcaccaggacttcatcgcggccatgtaccaggaggcggaaaaccttggagacgactga

SEQ ID NO: 58341 - DNA, 3504 bp, Aureimonas sp. Leaf324
ttggagacgactgacgaattgaccgcctttttggccacggcgacagtcgacggcatccttgggaggctactttatcgaggtgcggcgtggtcgttgatgcgcgaggagggcgtgctgccgccgaacgcgccgcccctcggtgcaacgatcgaaaccgatctcgcagaacacggcttcgctgttcttcgaggtgccatggcgttgcgcgctcaggccggaacttcggatctgacgaacaaggctttcgagcgcgccgcaaacgccttcgaagcgctggtacgcaacggaaactcggaagctcctgatcgtggcttccgccgcaccatcgctgccgcagcctatcacctggccggcttttcggccgttgcgtattcgctcttcagcgaggccgatgatgaccttaacgcctcgccgggagaaaaggcgatccggcacttgatcctgcgcgatctaggcgaattgcgcggcttcgttcgggattggttgaacgacgaggctcatggcgacgaacagattgcggcggcgctgacagacgaggagcccgacgtcgacgaagtgctatcgaccattctcaacaccacgatctgccgagcactggcgcattttgactttgcgctggagacgggcgagcccgatccgatcgagatcgcgcggagcctgcttggcaccgcagtcagactggcggataacgccgagaatgtgccgctgtggtggatatccaatctctgtcgtcacctgatcgacgatctgtggcagcactcactgcaccaaaacctgcccgacgaaccgcctgaggggacggaagaaaattaccccaatttgcgccggctgttcatatcatcgctctacgcccgaaagacttctgaggtggaactatggccatctcagcgcgaagcggctcaacgttccacaaacgtcactgacgacttggtcgttgccttaccgacgagcgccggcaagacgcgggtagcggaaatcgccgcgctgatgactttgtcgttggcgcgcagggtgttgatcgtcacgccattgcgtgccttatcggcgcagaccgagcggtcattccgaaagaccttcgcgcctctcggctttagtgtatcgtcactttacggtgccagtggtctctctgctggtgatgaagacgccttgcggacacgcgagatcatcattgctacgccagaaaagctcgatttcgcgctgagaagcgatcctaatctgatcgacaatgtcggactgatcgtcctcgacgaggggcacatgatcggtccgagtgaacgtgaaatccgttacgagacgctcgtgcaacgtctgcttcggcgcgcggatgccgcgaaccgccggatcgtatgtctgtccgctatcttgccaagcggtgacgagctggacgatctcaccgcctggattcgttccgacgaaccgggtgagccagtgcgttctgactggcgtcctacgcgacagcggttcggtgcgctcacttggaggggaaaggacgcactgctccgactagacctcgacgaggatggcccgttcctcgataagtttgtcgcggagaaaccggcactcggaagagagaagagaccctatccgcgcaagaactcacaccttgccctgtttgcagcgtgggaatttgcgagccaaggcaaacggacattgatcttctccacgcaggcgaactgggtcgagagctacggcaaacaggtcgtggatctttgcaagcgtggctatctgggttctctgctggaaaacggagcgtcgatcgcacgcgccttggaggttggcaatgagtggcttggggaagaccatcccgccgtcgcttgcttgaagcagggcgtagccatccaccatggccggctaccgagcccgtttctgcgtgagctggagactcttctatccgagggcgtacttaaggttatcgtcgcctcgccaacgctttcgcaaggccttaatttgaatgccgccgtgctgctggtgcccgctttgtacagggccgctgaaaagatcaaaggcgaggagttcgcaaatgttgccggccgcgctgggcgcgcgttcgtggacgtcgaaggcctcattgtccacgtcatgttcgacaacatcgactggcgaaagaaggaatggagaaagctggtcgcgtccgccaaagcccgcacgttgaagagcggccttatccagattgttgcccagatcctcgaacgcctgtcgcgcgagggtgtcctcgatcgcgatgatgcgtgggagtatctcgccaactcccgcgaagcgtggagatctcccgaagaagaagccgcagttgcccagcgcctagccgcagccgtggactacggtgacgaggatgacagtgacgaagaagacagcggcgatgaggaagaaaccatcgatgaggagccgctttcgcaaattgttgaacgccttgacgcgactgttttcggcttgattgaagcgcttgacgccgatcgcgccgatcttccgaacctcctcgacgaagcgcttaaaggatcgctgtgggctcgccagattgcccgtgaggatgacgatatcgccccgttgcacaagaaggtgtttgaggcacgcgccgacctcatctggaaaactacaacggcgcaggcgcgacgcggacatttcgccatgggtgtcggccttgaagctggccttgcaattgatgccatggccgatggactgaacgagctgatcgatcgagcagaccaagctgcattaagcggcgaggtcgacgaactcgtcgatgcgctcggtggccttggcgaaaggctgctctttatgcggcctttcattcccgacaaggcaaatgcacttccggcgaactggaagatcatcctacacagttgggtatccggcgaggaagtcgtaaaaatcgggccgcagaacatgcgagcggttgaagaggcttttacctatcgcctagtttgggcgctcgaagccgttagaacccgacgcatgtcccttggctggtcaccggagacagtggctggcggtgccgcctctacggtcgaaacgggcgttcctcaatttatgatggcaatgctgattcgcgcaggcctcccctcgaggcgcgcagccagggcggcgatcaacggagccaagcctatctttgttacgcccgccgaaatgcgggtttggctcgaatccgatgagatcacggcgtacacggatgctggcgactggccgacgcccgatacggccgcgctgtgggcgcgctttcggaccgaagcactcagcggcagcattcagaagtggtcgatcgagcactaccagcgcctactcgacattgaggttgccccgcctgccggcctttatcggattgtcaccgacgagggtgatggtcggacttggctggaaacgcccgactatcaacgggtcgctccgttcaagaagccggctgttgatcccaagcctagcatattttcgggccggctgccgggcaatactaggctcgttgactccttgcgggtcggtcgcggaaaactgcgttggccccgtgccgatgcgtga

SEQ ID NO: 58342 - DNA, 780 bp, Rhizobium sp. Leaf371
atgacgcagttcaatgattggtgcctttcggtggacgaacccgtcggcaaccactttcgccgggtcatgaccggacaagccgcgggcctggctacagggatccaggcgacggccgccattgtgcccgggcattatgcgtcggaagaatccgttgctcgggcgctcagccgcctcggcaagccggctgcggccgcccttatcgagggcaagcttccaacaacgaagaatatccgatcgggcgatctcggcgaaatctatgcaacggagtggatcgacacacacagcggtggataccgcgcgccgatcaaacgcctgcggtggaaggatcatcggaacatggcgatgcgcggtgatgatgtcatcggcatccttcaagatgccgccaaccagcgcttgctctttctgaaaactgaggcgaagagccgcgtggcgctgaccggtcaggttctcaccgacgcccgcgcgggcctggacaaggatggcggactgccgtccgctcacgcgctgtccttcatatcggcacgcctgctagaactggacaatctgccgctcgccgacgcgatcgacgatgcgctgctcaagcacggcgttcccgtgcaaaacgtcaggcacttgcttttcacgttttccggcaacgcgccggacgccctgctaaccgcttcgctacaggcttaccccggacctataaaccaatggggtgttggcctgcgagtggagggacacgccgccttcatcggcgcggtctatgatcgagtgatcgccgatgccaactacccctga

SEQ ID NO: 58343 - DNA, 345 bp, Rhizobium sp. Leaf371
atgccaactacccctgaagcaatcgcggccgacattgcagaggcggccaccgccggctttcggggcagtcttatcgcgagaggccaggcgcgagcgatcatctggcgaaacggcacgctcccgcccgatgcaccgggctttgcgccgcaactcagctacgacttgcattcttatggctatgggcttctcgggctcggccttcgccttcgtgagcttggcggcgatgctgcacaggcgcgcaccgccttcgaacaggctgctactgcgctggaggcggtgatcgccaaaggtgaccgccttgaggcggatcgcgacttccatttcgtcatggcggccgcgtgttga

SEQ ID NO: 58344 - DNA, 789 bp, Chryseobacterium sp. Leaf405
atggtaaacatcgacatactaactcattttgaagaatcggcaggtgaaaatggaataactattttctctttaaaagaagccgaaagaaatgctttttttaataaattaccacaaccttttaggtgtttatatttaacagatgaagacttagattggcgtactaatgaatttggaacatctagagctgaagaaatagtcgacaaaatcccagacaatccaactatccaatctggggaattttcggaaattctatgttattatattatacctgaaaaatatttaccttcctcgcatttaagaccacctaaatggaaatggaaagagagtaaaaataatcccgcacattttactgatgttattcttttttgtcagaatgatcttgataaccccggtactgatgatagtctaatatcaattgaatcaaaagcaagagctactaaaccaacaaatacagaaagttctctacaaaaagcaattgatgatgctcataaagattatgtaagtcgtttaggggaaagtttgttccatttgaaaacacgttataaagacgatagaaacgcagaagctgtaaatagattaagtcgtttcatggatgtagctaattatcctactttcctaaaacacttcaaagcaattgcaacggttgacaattcatttgctgacactcatttaaataatgttactgaaattcctgatgatatcagagatacgtttgaagtgatacttataagaattgaagacttaaaaggagcttacgaacatactttcactcaaattttagcaacatga

SEQ ID NO: 58345 - DNA, 2934 bp, Chryseobacterium sp. Leaf405
atgatttatcaggaacttaaaaggtggattgctcaatctgagtcatggcaggcatttatagattataatattgctaatgaagaacaggcaaattatactttctataatcgacctcaggatttttatatctcgcttttaaccaagctgcaggacattcttgatcaatttgaggaagaggaatcagatgatgtgaaaaaaggtttactttctatagctaagggtttagaaatatattcattaagagggaaaagagaaagtttttctggcgtaaactacagccggaatatgttatatgtcgcttcattgtattatttagcagattttcccgccacttcatttttattacttaaacaatttccacaggaagagttccaaactaatattgaaaaatttatttattatttcttatcaagaaattacacaagaaaacaaggtcaagaaaatccttatttcggatatataatagaatacttacgggaaggaaacaatgaagcaatcgatatacttcgaggtatttttgataatatactctcaccagataatcaaatagaaagtcatttattcgtgttgacttatatagcaaagtctatcttaaaaaaattttcaaccaacaatctatggtatgatctaacggagtatggagcagagatagattggaaaacttatgtcagattcaatataggaaaaagcccacaaatatggagtttctttccttcccagcaaacagcaattaggagtggtttattaacatttgataaagcatttagcttacagacacctactagttcaggaaaaacatctatcgatgaattagtaatttttaatgagttatcaagaaacccagaaagcaaaatactttatttagctccatttagagctctcgcatccgagttaaagaataatttgggcagaaatcttacttctaagctaggaataaaggtcaaaactatttatggaggcaatatcgtaacagattccgatcgattaagcattgaacaatccaatgttttaatatcaacacccgaaaagtttatggcaatagaattgggattgtctggaatgcttgatgattttcaaaccgtaatttgtgatgagggacatttaatagataacacaacaagagggattagttatgaattattactttcaagattaaaaaatactgagtcagttgaaagaagatttgtttttctatctgcaattatacccaacatagagataataaactcttggcttggtggatcggataatgacattgcgcgatcaaattatagaccgactgagatagaattggcatttctgactcaggttagtgcaagtcactttaatttagaagtgaatcctaatgatgaattcccaactaaatatattctcaatcgttttttatctactaatgattttagtacaccaaatggtgtttataatgtcagtacatttaaatcaaaaacggtagcagctgcccttaagtcattaaactccggcgcagttgctatattttctccaacaaaagactataatcaaggtgttgctggtatcgcatcagaagtattaaatcaactacctacttctcttcctaaacctatacagttttgtgataccgatgaaattgcaaaaattgaagattatcttaattatattttcagcaacaattatttattggctaagtgcgctaaagaaggtttcttatttcatcatggtgatttaccacaatttataagagagttaatagaaaattcaataagagacgaaaaagttaaacttcttatttgtactagtacgttagctgaaggtgttaatcttccgataaaaacacttgtaatcaatactgcaagaagattcgatggaaacaagggatatttaatgcctctagaaacaagggatttaaagaacttaattggaagggcaggtcgagccggaaaagaaacaaaaggaactataattgttgtaaacccgaaagatcaatctatactatccgatgtgattgctgatagaaacttggaagatgttaaaggttttttataccatgttgttgaggttattgaaggctacataacaaaaaatgcgaccactttaagtaatgaacttctagatcaattaaaggaggcagattatatagacaattcgatcatgcagttattagcagaggatgtacctgtagaaaatcttgaacaggagatcaatacattaattgaaaatactctgaccttttatcaaagcgatgatgctttaaaaacaagattaagagaactattttctttaagggcagaaagagtacgccctatagttgaatatggaaaccttgatttaataagatacactggtattcctctaagatcatttaataggatcgaagaattagttgactttaaacaaaattttctatctgaaatagaaaacccattggataatcgttggatagattttctatttgacattctttatgaaattgaagattttccttcagatagatcaagggaagaattcattgaagcattagctatatggattgaaggaggatggtatcatgatgtcgcacaaggtttgaattcaacggttgatgatgctctaatcttcataagattcttagaatatggattacaaaactctgctggttcaataattaagtatatcgacaccaaacgtagagaaaacgaagaagaaacatctgatattatattgaactggtctaattacgtagtatatggggtgaataatagattgaaattggacttaatggaaattaatattcccgatagaatactagttcaacaaatagccaattggtttatagaaaatgaaataccttatgatgaccaagcagctcttagatcaattattttaagaaaccaattattgctatttgggtatttagaaggaagagttccacaaatttcaattgacttgctaaatcaatatttttataggactgtataa

SEQ ID NO: 58346 - DNA, 792 bp, Acidovorax sp. Root219
ttgcaaacagcgagcggggaccaggtcgaggtttacgaacttcagatcgacacaaacaacaagctcatgctcaaggcctgggccaagcacttccgggagcactactgtctcgatgatcacattgatgaactgatgagcgggacacctcagaaaactcgagcggagtatctgattgcgcaaaaatttccagatgcaaattccaatttcggtccccagacgcgcgctggagacttcgcagaaattctcctgtccgatgtcgtagaaagcctgctgggctattgggttccgaggactcgctacagggacaagaaggtcaagaacgaatccgcgaaagggactgacgtcgtggggattaaattccacagtggcggccccagtaagccctccgcatacgatgcactcataacggtcgaaacgaaggctcacctgagcaagtcaacaaaaggcaaccgccttcaggacgcggtggacgacgcccagaaggatgatgtactaggccaatttcgtgtcgctgagtcattgaatgctatgaagcagcggttcattgaacaaggcaagggcaaagaaaccaagtctgttgcccggttccagcaccctcacaaaaatccgtacattcaagacattggcgcatccgctctcttctgcacgactttctacaaggatactgaagttgcgcaggtctcgacttcgaaacatcgtccaggatcacgcttcaagcttatcgttgtacatggtcaggacatgatgaagttcgttcatgagctatacgatcgggcagcaaatgaagcctag

SEQ ID NO: 58347 - DNA, 2337 bp, Acidovorax sp. Root219
atgccaaccagcacgggcaagacccgcgccacggagatggtcatacgtgctgcatttgtgtccgagagaacttcaatcgcagtcgtagtcgcaccgtacagggcgctctgttatgagatcgcacgcgacctcaaactcaagtttgaaagtgacggctatcaggtcaatcagctgagcgacgcaattcagcaggactacctcgtcgactttgatgatttcatgcgcctgggcattgttaccgccccccatgtcatcgtagtcaccccagagaagttgctgtacgtcctccgccatgaagagtcttttatggagaacgtcggtcttgtggtatacgacgaaggacaccaattcgactctccgacacggggagtgacctatgaactgctgctaacgtcaatcaaggcgttgttgccttcaagctctcaaacagtactgatctcagccgtggtaaacaacgcggcacagcttgcgggttggttgctcgcagaccagtccaaggttgtgtccgatagcaatagccagacggcccgccatatcgccttcaccacctttcaagagcaggcagccggacaactgagattcgagtcggccattcgaggcgaacaagagttctttgttccaaacctagttcaacaccatcgcctctcgggtgatgagaccccgacgcatttcccgactgccgacagcggatccatcgcgctgtaccttggcctcaaccttgtgcgtcaaggtggcgtggcgatctacgttcgtgcaccggactccgcatcaaagatcgtccgagacgccgtggagataatctttccgagagctagctcacttcctacccccaggtcgtgggctgatgaacgcgaagtcaacgcgctgacaaggctgtatgaagagaacttcggagatgcgtccttcttaacgaaggcagcgcggcttggtttgtatgcgcacactggcgatactcccgagggaattcgattggccatcgaacatgccatgcgtgagtcgctcatcggcttcgtcgtttgtacgtcaacgctctctcagggtgtcaatctccccatcaagtaccttctggtgacgcagttacagacaggcgagcgacctatccaaaccagagattttcagaatctcattgggcgcgccggacgcgccggcatgtatggcgaggggaccgtgatcttcacaaaccctaggctatacgacgaaagagccacaaagcctggcgcatggagatcagcaaaggccctgctggacccaaggaaggcagcaccgacatccagcgcgttgctcaacctggttcggccgttgaaggacaggtttggtactcaggagcttaccgacctaagcgtcgttgaagttcttgacggactcgtcgaccagcctgagcatctctttactcgcattgacgagcttctcctcgacatcgaggaccatcggttcagcgctgaggatcttaggcggcaactaggcgagaggctagggtgcataaaggcggtggagtgcttccttatggctcagctcgctgccatggaagccagcgaagcactcatcggcgtctcacgccttgctatcagcacattcgcttttcacttgtcgacgccaaaacagcaggaggaccttcactacgcgttcttgaaaatctggggccgaatcgcccgcaagaacctctctccggagaccaaagctcgatatggcagaggcattcttggactcgtagacgctatcgctatcgacctttttgtgcaggataagctgttcgagctccaacttgcggagacatctcaggatctgatggatgtagtttgggaatttatcgttcaatcggaagctgggaagaagcttcgcaggctcgagcctgcaacttctactcgcacacttgcaaacgagtggattgaaggaaagccattcaaggtcatcatggacaccttggttggctctggcacgcaaatcaggtgggggcagggaactcgcgaactcacgtttgaccaggtcgtagacctttgccaagaccagatcggctatcgcaccagtttagtgctcgcgtctatcgcctctgcgtttgaagcgatcacggtaagttcagagtctcaagcccagacgcttggcctcttcaatcgtctcttaaagatgctgaaatacgggctagggaggtgggaggagatatctgtctacgaggcaggattctcggagcgaatcatcgcgaagaagctatgtgccacgattcccaaaggaattttgggggtagacgctgcaaagcgcgctttgctccaaagtaggtctcaggtaacctctattttggaagactacccctcctactatctttcggtattggatagcctttga

SEQ ID NO: 58348 - DNA, 780 bp, Sphingopyxis sp. HIX
atggcgcagttcaatgactggtgcgtctctgtcgatgggccggtagggacacaccatcgccgggtgatgaccggacaggcggcgagcctcgccaccggcattcaagcgactgccgccatcgtacccgcgcactacgcctcggaagaacaattggcgcgcgcgctcgccaggctcggcaagcccgccgctgcggcgctgatcgaaggcaaactgccgacgaccaagcaaatccggtctggcgaccttggcgagatctacgcgaccgaatggatcgacgcgcatagcggcggctaccgagctccgatcaagcgcctgcgttggaaggaccatcggaacatggcgatgcgcggcgacgacgtgatcggaatcctgcaggacgcccagtcgcagcgcctgcatttcctaaagaccgaagcgaagagccgtgccacgctcaccggccaggtcctgaccgacgcgcgtgctggcctagacaaggacggcggactgccttcggcgcacgccctgtcctttatctcggcccgcttgcttgaactcgataatctgccgctggcggatgcgatcgacgacgcgctactcaagcacggtattccgccgcagagcgtcaagcatttgctattcacattttccggcaacgcgcccgaggcgctgctgaccgcttcccttcaagcctatcccggcgccatcaaccaatggggcattgggctatacatcgacgggcacgccgccttcatcggcgcggtttatgatcgagtgatcgccgatgccaacaacccctga

SEQ ID NO: 58349 - DNA, 3519 bp, Sphingopyxis sp. HIX
atgccaacaacccctgaagcgatcgcggccgacatcgccgaagcggcgaccgccggcttccgggggcggctgatcgcacgcggccaggcccgcgcgatcatctggcgcgatggcgctcttccggccgacgcaccggccttcgcgccccaactgagctacgatcttcattcttacgcttatgccttgctgggccttggcttgcgccttcgcgactttggcggcgacgctgcccaggcgcgcaccgccttcgagcaggcggccacggcgcttgaagccgtgatggccaagggcgaccgccaggaggtcgatcgcgacttccatttcgtcatggccgctggggcctatcacctcgcccatctgtcggcacgcgcatattcgctgctcgccatcgtcgagaccgacgagaacttttcgccggtcgagcgggccctcgcgcagttgatgcgccgcaatttcggcgccctgcgctccagcgtcctcgactatcgcgcctccggccaaggcagcgacgcacgcatcgccgcaggcatccaagctcagctcgatcaggccgaagccgttgccgccccgcccgaggacggcaacgacttccttttcgacggtctcgatatcgcgctcaccgatgccttcatggccgccatgtcgctcttcctgctcgctctcgaacggggcgagcggccgctgatcgaccaagcgctcgaacggcttcgcaccagcctcgcgatctgcagcgagatgaacatgctgccgcaatggtgggcgcatcgcgtcgcgatccacctcctctcggatctctggtcaagcacctttcacgagagggttccgcttcagccggccggtggtgccgcagccgactggcagccgctgcgcgagctgttcatcgcattactgcagcgtcgcccgaaagcggaaatcgacctctggccgtcgcagacggaggcggccgctcgggcggccgaccagtccgacgacctggtcgtgtcgctgccgacaagcgccggcaagacccgcatcgccgaactctgcattctaaggtgcctagcgggcggcaagcgggtggtcttcgtcaccccgctgcgcgcgctgtcggcacagaccgagaccacgttgcagcggaccttcggcccgctcggcaagaccatctcggccctatatggcagcatcggcgtcagcggcttcgacgaggacgccatccgcgagcgcaacatcgtggtcgcgacgccggagaagctcgacttcgccctgcgcaacgacccctcgctccttgacgatgtcggtctgctggtcttcgacgaagggcatatgatcggccccaacgagcgtgaggtccgttacgaggtacagatccagcggcttcttcgtcgcccggacgcgcaggagcgacggatcgtctgcctttcggcgatcctgccagatggcgaccagctcgacgactttgccgcctggttgcggcgcgatcacccgggcgggctgatcaagaacgattggcggccgacccggctgcggttcggtgaagtggtttggacgtcgccaacggcgcggctcaacctgcgggttggcgacgagcggccctgggtccagcggtttctcaccggtgcggccccacccaactggattccgccgaagcgccggcgcacccgtctctttcccgacgaccagcgcgaactctgccttgcgacggcctggcggctagtcgatgatggtcagacggtcctgatcttctgccccgagcggcgcagcgtcgagccgtttgcggacgtcatcgtcgatttgcatgagcgcggcgccctgcgctctttgctcgaggccgacccgaaccttctgaacacggcgattgcgcttggtgaggaatggctgggcgccgatagcgcaatcctgaaatgccttcgcctcggtgtcgcccttcaccatggcgcactccccaccgcctatcgaaaggaggtcgagcgcctgctacgcgagaatgttctcaaggtcacgatctcatctccgaccttggcgcagggcctcaacctctccgccaccgccgtcgtcatgtattcccttcaccgggctggcgagcgcattgagatcagcgagttcaagaacgtcatcggccgcgcgggccgcgcttatgtcgatgtcgagggcatcgttctcttccccatgttcgacgagatcgccaagaagcggcgcaactgggaagccctcatcaccgacctcggcgcgcgcgagatggaaagcggcctcgtgcggcttgtcgcgatgctgttgacgcgaatgcgctcgcgcatcggcggcgacctcaatcagctggtcgagtacgtcgtcaacaacgcggccgcctggactttcccggaagtcgcaaacgagaagcccgaagaacgcgaacgcgcgctcgccgattgggaacgacatgtcgcaacgctcgatacggcgatcttgagcctcatcggggaaaacgacattcccgatgagggcatcgagacggccctccacgacatcctccaatcctcactgtggcaccgccgtctgcagcgccaggacctgcaggttcgacaggtgctgaaggccggcctcgtgtcccgcagccgactcatttggagtcagtcgacggccgccggacgacgcggctacttcctcgcgggggttgggctgacgacaggccatgcgctcgatgccatcgccgccgacgccaatcttctcctgatccaagctaatggcgcgatcctcgaaggagacaccgagggggcgatcactgcgatcgccggcctcgccgaacgggttttcgccttctatcccttcacccccgatcccctgccggcgaactggcgcgacatcctgcgcgcatggctgcttggccaaccgctcgcggcgctgggcgcagcgcaggcctctgagaccctgcaatttgtagagggtggcctcgtctatcgcctgccttgggcgatggaggcgatccgcgttcgggcggccgccaacggtgacacggtcggcgttttcgatcttctactggaggatcacgaacttggcgcagcagttcctgcggtggagaccggcacgctcaatcggtcagcctcgatcctgatccaagccggcttcaactcgcggcttgccgcgatcaaggcagtcaccgacaccgcagcgaccttcacgacgggacaggagctgcgggaatggctcaattcggacgccgtcgccgcctggagcgctctgcccgactggcctaccgcagagacgaaggcgatctggacggagttcacaaacagcttcatgcccgctgacaaccgcacctgggctgatcggcgttattgggcgtcagttaactggcttggagcgccgccgcctccgggcacaccggtccaagttcattactggggcgggcaaccccgcgtactttctgccgacgccgcgccgcttggcaccctccaggctgcgcttaatccagaccggatcggtttgctccgggctgtggtagccacggatgtcggcaagatcgacatcgcctatctaggaccggcagatatctcgccgccgtag

SEQ ID NO: 58350 - DNA, 780 bp, Sphingopyxis sp. HXXIV; identical to SEQ ID NO: 58348

SEQ ID NO: 58351 - DNA, 3519 bp, Sphingopyxis sp. HXXIV; identical to SEQ ID NO: 58349

SEQ ID NO: 58352 - DNA, 780 bp, Sphingopyxis sp. H057; identical to SEQ ID NO: 58348

SEQ ID NO: 58353 - DNA, 3519 bp, Sphingopyxis sp. H057; identical to SEQ ID NO: 58349

SEQ ID NO: 58354 - DNA, 780 bp, Sphingopyxis sp. H067; identical to SEQ ID NO: 58348

SEQ ID NO: 58355 - DNA, 3519 bp, Sphingopyxis sp. H067; identical to SEQ ID NO: 58349

SEQ ID NO: 58356 - DNA, 780 bp, Sphingopyxis sp. H071; identical to SEQ ID NO: 58348

SEQ ID NO: 58357 - DNA, 3519 bp, Sphingopyxis sp. H071; identical to SEQ ID NO: 58349

SEQ ID NO: 58358 - DNA, 780 bp, Sphingopyxis sp. H073; identical to SEQ ID NO: 58348

SEQ ID NO: 58359 - DNA, 3519 bp, Sphingopyxis sp. H073; identical to SEQ ID NO: 58349

SEQ ID NO: 58360 - DNA, 780 bp, Sphingopyxis sp. H081; identical to SEQ ID NO: 58348

SEQ ID NO: 58361 - DNA, 3519 bp, Sphingopyxis sp. H081; identical to SEQ ID NO: 58349

SEQ ID NO: 58362 - DNA, 780 bp, Sphingopyxis sp. H100; identical to SEQ ID NO: 58348

SEQ ID NO: 58363 - DNA, 3519 bp, Sphingopyxis sp. H100; identical to SEQ ID NO: 58349

SEQ ID NO: 58364 - DNA, 780 bp, Sphingopyxis sp. H107; identical to SEQ ID NO: 58348

SEQ ID NO: 58365 - DNA, 3519 bp, Sphingopyxis sp. H107; identical to SEQ ID NO: 58349

SEQ ID NO: 58366 - DNA, 777 bp, Idiomarina sp. H105
atggattttatagaagagctgaacgagcgtcctgaaggtagcttagatgttacttgccatgttttatccgacaattctgcacagcagctagaggattatcttgtagataggctggccagctgttatatctctcaagaaaaactgcaagaaagggctaatcaaacaggactagcctatagtgaattgatcgctaataagattcctgataagggaagtgtaatgtcaggtgatttcggagaaatattcactctttattttttagataggcagtacgaagaaaatttgaaactaattaagaagtggagatacaagcaagataggaaaaaggccgcgccacactcagatgttgttttatttaatattgaagattttaataatccttcagaggatgactttgttatatgcgctgaatctaaacagaaagcaacttctagtacatttgatcctattacaagtgctatctcaggatatgagtcagatagaactggcaggcttgccaaaacacttgtatggcttaaagaaaaagccattgatgaaggggagcaagatgatatagctttagcatcacgattcgctgacgggttgaatactacttactcgaagttatacaaggctgtagcggttgttgatagagatcttttagatgatgaaataacaaaagatattgaccttccagacagaaccgatgaatttgaagtaattgttatcgggatagatgaccttaaagttcgttatgaatcagtttttgaacgagcttgttctgaggctgatttatga

SEQ ID NO: 58367 - DNA, 2922 bp, Idiomarina sp. H105
atgagtgagttattacttcatatgatggctgagtttgagtcctgggaggccgcagctgagttcaatatacctcaacagagctgggctgattatactgttaatgatagagtggatgatctttatatagctactttttctcatatttttaatacgttgagggaagaatctgatgataagaaatctaatcttttatcatgtgctaagacattactggttttctcaaagagtgcagcatcaaagtatataagtggagtagagaaaaatcgtaaccttttgtattcagcggcactttattatcttgcagaccaaccaccaacagcatttctaattgcaaaagatattgatccagatatttttgaaatagagcaggagaaattcctatattcatttttatctcgcatttctgatgaagaaaccgagttatctgttgagatttttgacgcggtgaataggggcgagtatcaaaggtttgaccatattcttgatatattatctgagcaggttgcaatagggcttcagcatgatccattgctttttgttagctcaaaaattgctcatgagtgtattaatagatttaaaagtgtaaatgtttggattcttcttgagcgatattctgactgtgaggatatgtccgtatggaatgagttgctatcgtcaaacggaggtcatcctatctgggagttattgccctcacaagtgaaagcagtggaatctggaatccttactggagaaaaacctgcttatagcatgcagatgccaacttctgcaggaaagacttctctgtgtgaaattatcatttttaatgaagttaaagtaaggggcaataaagttttatttcttgtgcctttcagggcgcttgcagcagaagtaaaggctggaatgtattctaggctgagtaatgttggtatagaagtttcagctagttatgggggtaatatacctactcgatcagagtctacgactgtagaaaattctgatgttgttatttctacgcctgaaaaatttgaggcgctctgtcaagttatccctgatttcattgataggtttgatgttttgatctgtgatgaggggcacctaattgatgatggtaatcgagggctgcaatatgaattattgctgaccaaatttaaaagacgagagaaccctgtagataagattgtttttatatcagctatcctgccaaatgtttcagagatcaatgactggttaggtggtgatgagagcagtttaattaactcaacttataagcctgtggtaacagattactcttttgttagacctgttaatgataagtggtttttggattttaaccctcacttggatcagccttatagttattttttaagcgacttcattcaaaaagacgaactgaaatttactaatcaaagtacagggaatagtaatctcttaccaaattggagttcactgttaactttggcttgtgcttcagcttttaagtcttctatatcaggttctgtaattctatttactacagaaaaaggtcagtctggtgttagaggtttggcgaataaatgtttggatatgttggaaaaaaatgcgtttattacacaacagtatcaagaggaaggtcagcccgtagaccttgttaattatatttcaacagttttaggcgaagggcatttgttaacgagattggttcagaggaaaattgggtatcatcatggggatcttcctcaagaattacgtcgagaaatggaacaagcaattaatgatcaaaaattaaatatattgatatgcacttccactttagcggaaggcgtaaatcttccaatcaggactatagttttacatacggtcaagcgattcaatggaagaattaaggattttattgaaaagaggaatataaaaaatattattggtagagcaggtagagcgggaaaggaaactcgtggcagagttatttttgctaatgaatcagaaagagactatgccctagaagttataaatgatgttgatttggagtcagctcatggctttttattctcgctcattaaagctcttaaaaactatctagaggcaacgaacttaaccttgaatcaggagttctttgattccaatgttgcacaagatatttcttatatctttgaatcaattgatatgtcacttttacagtctttaccagaagacattcctgaagaagacatagatacatttttagatcagatgctgtctgaaaatttagcatctaagttttgtgatgaagagggtttaaccgatctattaaaaatggttttttctttaaggactgaacgaatattcaatgagacagaccctgcaatgagagccataatgaggaacacaggttcttcgcttaactttcttaattatgttgaagcaagtcagatacttgatcaggatatatggcgatctctaaccgctccacaggaatctcactggtataaaaatataattaagccagtgttgaatcatattggctatgaggatagtgctgatcttataatagatgtattaaatggttgggtatctggtagcttttatatagaaatagctgaagatcttgagcaggatgtagatgatgttgttagctatgtctgtacagttataggctttgaattacagcaaacattatctcagcttacacgtttcgcaattgaactttatgaagacgaagttccagatcatgtcgtgaattggcctcagtatatgcaatatggtgtcaatcgtcagattcacttgagattaattaactctggggttacagataggctagctgtatttggagttgctaggttcttggattcccttggggttccagaagatattcggaatcttcgcaggatgttaagggataaccgagaagctttaaataatgccttagaacaagaccctcgtgtaccagcattatcaataagtcggttttttgatgactacaatatttga

SEQ ID NO: 58368 - DNA, 765 bp, Mycobacterium sp. GA-2613
gtgactgacttcgagagctggtgtcagccagcggcattcgtgaaagtcaagaagcacaccgcgggtatgctgctgtcaaacgacgactcagtgggcgtcgatgctgtcgcggccaccttggcggagaagtacgcggaaaccgagactcttgcgctcatcgccgagaagctgggcaagcaggaggtcgcaaagtttcttcggcataggtttcccaccaaggcgaatgcgcggtcgggcgatatgggggagatcctcgcaacggcgtttgttcatgaagaccatgactacgttgtcggcccgagccgactcatccaccgcgaccatcaagagtgggcaatgcgcggagacgacgttctcggggctttcgtcgacgctcagtctcgcgtacacctggtgaaagtcgaagcgaaaagcggagtttcgatcaccgagaaggtcgtgaaggatgctcgcgaagggctacagcgaaccgacggtctaccttcgccgcactcactcactcacttcgcggaacggcttctcggtaccccggacgacgcgctgggtgaggcggtgttaagactgcagctggtcgagggagtacgacccggtgcaatgactcacgtgatgttcttgttcacggcgagtgacccgagccagctcgtccagaatgacctcaccgcctacaacggcatgatcaagcagctagcgatgacgctgagagtcaacgcccaccaagacttcatccgcaccgcctacgagaaggcgctggccgatgacacgtga

SEQ ID NO: 58369 - DNA, 3555 bp, Mycobacterium sp. GA-2613
gtgcaagaggcgaccgcccctgaattccgtcggcggcttctagccagagggcaggcgcagtccatgatccggcgcgacgggatactgcccgaagacgcgccccagttcggcgccaatctcgatgacgacctgctcagttacggttacgcgctgatcgcgacgagtcttcaactcctggaagcgggcgacccagagaacagcgacggcgttccgacagcgcaggagcggcaacaacaggcgcagactggtttcatcgaagcgtcctatgcactggaggctgcaacccgcaacgccgaacccgacgaaggaatggccttccaccgcctgatcgccggggctgcaagccatttggccggttatgcggcacgcgccttttccctgatgcaaacaagcatcgactccggacgactaacgccgatggaacacacactcgccgatctcgtccttcgcaacctcacgcagatcgagacgcgcgcgattgccctacggtcgtctgccgaactcacagacggggcactcctcgacgccctacagacgcaaagcttcgacgatcccactgacgacgacgagaagccggaaacgacacctacttccgaggcaacgacgagtagcgatgcgagtggtgtgggacccatcgcactgctgctcagcgagcattacctttcagctgtctccagcgcactgttcgccctcgcgtacaaccagacaaacatgctgcaggcagcactggcggatctcgcgaccggtgaacaagcatcgcaagagattagtgttccggggccctggtgggtgtaccggcttacacggcgcctgttcggtgacctcgggcagaccagtatcagggccaatatccctgtcccgcgcccaccagcggcgaccgcatcggacgagacgcccggaaccggcgaaatcgactgggaccatctccgcagaacatttgtatcagcgttgttcgcacgagggcagtccgaaatcgacttgtggccatcgcaattgcacgtggtgcaacgcatcttcgaagacaccaaggatctcgtcgttgccctgcccaccagcgccggcaagacacgcatcgctgagttgtgcatcctcgcttgcctggcccaagggcgtcgagtcgtgtatgtcacgccgttgcgtgccctgtccgctcagaccgaacgagttctagagcggacgtttaccccgttgggcgccgaagtctcgactctgtacgggagcatgggcgtcagcgacgtcgacgaagacgcgctgcgatcaagccagatcgtcgtggcgacgcccgagaagctcgatttcgcgttgcgctcggaccggaccgtcctcgacgacgtcggactggtcgtcctcgacgagggacatatgatcgggccatcagaccgcgaagtccggtacgaggctcaggtccagcgcctgatcaggcgcgccgacgccgacacgcggcgcatcgtctgcctttccgcggttttcccttccggcccagatctcgacgactttgtcgcatgggtgacagacgacgagcccgacggactccaccgcgaaaactggagacccactcgccagcgcttcgggctcgtcgaatggctaaccgaccacgcccgccttgcgatgaccttcgaacaagaacagtccttcattccccgttacatcgaagcgaagacaccgagtggcggcaaacgtagaaatccgttcccgcatgacaaccgtgaactcgtcatcgcgaccgcgtggcggctggtggaagaagggcagacggtcctcattttctgtccgcagagaaactcggttgagccatacgcacgtgagatccttaaactccgtggccaggggttcattgactcagtccttccgtcggaggtcgatcttgacgaggcgctcgcaatcggcgccgagtggttcggtgccgaccatccgatcctgggatgtctcagggtcggtgtcgccatccaccatggggcactgcccgggccgttccgccgcgaggtcgaacgacttctgcaccgcggagtgatcaaggtgaccgtcgcctctcccaccctggcccagggactgaacctgtccgcatcggtcgtgctctttcacggcatccgccgagggcgagctctgctcacggggtccgaattcgccaacgtcatagggcgggctggtcgagcgttcgtcgacaccgagggcttggtgctctacccccgctacgagccgaccccacgccatcgacgcgaatggttcgacctgactgtcggagacgccggcaagtcgttgcgttcagggctgatcaccgtggcggaaaacctagtccggcggatgcacgcagcggcaggctctcctcagctgcaaaccttcatcgactacctcaccggaggggtcgactgggccttccctgtcatccttggtgaggacaccgaggtgcgcgacactgccgagcagacgtggtcctcaagcctggccctgcttgacaccgcgctgcttagcatcggtggcgaagacgagtctgatccagatgaagtgacgcaactcatcgctgatgcgctgcgggattccctgtgggagcgtcagctcaatcgactcgagaatcagcaggcggccaacgcattacgcgaactcgtgagcagccgcgcccgatttgtgtggagcaactcaacggcggctcagcgccgcggctggtacctcgcggggctgggtgcggcgtctgggtacgagcttggactagccgcagctcgagtcgttgaactgatctttcacgctgagaacgcgatcgaaaagaacgacaccgacgctgcggtaggcaaccttctcgagatcgctacgatcctctttgccgtgagcgagttcaagcccgagacgtcgctcatatggcagccggtccttgttcactggctgagcggagcgcctctgggtcttctcggtgaggatcctgtcgaagttgcgcagttcatcgaagcagacgtcgtgtaccgacttgtttggggtatggaggccgcccgcgtttacgagactgctcacgaaaatatagtcgccacagcgcttaccggtaccgctctgacggccatcgagactggaacgttcaaccggtcggcatcggtgctcatccggtccgggttcgaccaccgcgccgcggcgatcgctgcggtaaccgactccgaggcgaccttcagctcatcgtccgagatgcgcgactggatccgagagttagacccagacctcaccgaatcaccggactggccaaccgttgagtcgcacgccgcgtggaagcagtttgtgaaccgcgccgaccgcctgcgctcgaatagttgggcactccatgtcgagagcgttgaggaagttgcttggcgcagtactatcccagaggcgggtgcgtggttgcgcgtaacagacgctggtccgggcaggatcgctctgtggtccacaggatttgacgctctaggcgaagcgatggtcgacatcaatccacatcggcagggcgttctgcacgcccgtcggctatcgggttcttcaggaattaaattgcactaccgaggtccgcgagatctcctcgccccgacccatcgcagtagctga

SEQ ID NO: 58370 - DNA, 765 bp, Mycobacterium sp. GA-2617; identical to SEQ ID NO: 58368

SEQ ID NO: 58371 - DNA, 3588 bp, Mycobacterium sp. GA-2617
atgacacgtgatgccagcgccctcgcggcgagcgtgcaagaggcgaccgcccctgaattccgtcggcggcttctagccagagggcaggcgcagtccatgatccggcgcgacgggatactgcccgaagacgcgccccagttcggcgccaatctcgatgacgacctgctcagttacggttacgcgctgatcgcgacgagtcttcaactcctggaagcgggcgacccagagaacagcgacggcgttccgacagcgcaggagcggcaacaacaggcgcagactggtttcatcgaagcgtcctatgcactggaggctgcaacccgcaacgccgaacccgacgaaggaatggccttccaccgcctgatcgccggggctgcaagccatttggccggttatgcggcacgcgccttttccctgatgcaaacaagcatcgactccggacgactaacgccgatggaacacacactcgccgatctcgtccttcgcaacctcacgcagatcgagacgcgcgcgattgccctacggtcgtctgccgaactcacagacggggcactcctcgacgccctacagacgcaaagcttcgacgatcccactgacgacgacgagaagccggaaacgacacctacttccgaggcaacgacgagtagcgatgcgagtggtgtgggacccatcgcactgctgctcagcgagcattacctttcagctgtctccagcgcactgttcgccctcgcgtacaaccagacaaacatgctgcaggcagcactggcggatctcgcgaccggtgaacaagcatcgcaagagattagtgttccggggccctggtgggtgtaccggcttacacggcgcctgttcggtgacctcgggcagaccagtatcagggccaatatccctgtcccgcgcccaccagcggcgaccgcatcggacgagacgcccggaaccggcgaaatcgactgggaccatctccgcagaacatttgtatcagcgttgttcgcacgagggcagtccgaaatcgacttgtggccatcgcaattgcacgtggtgcaacgcatcttcgaagacaccaaggatctcgtcgttgccctgcccaccagcgccggcaagacacgcatcgctgagttgtgcatcctcgcttgcctggcccaagggcgtcgagtcgtgtatgtcacgccgttgcgtgccctgtccgctcagaccgaacgagttctagagcggacgtttaccccgttgggcgccgaagtctcgactctgtacgggagcatgggcgtcagcgacgtcgacgaagacgcgctgcgatcaagccagatcgtcgtggcgacgcccgagaagctcgatttcgcgttgcgctcggaccggaccgtcctcgacgacgtcggactggtcgtcctcgacgagggacatatgatcgggccatcagaccgcgaagtccggtacgaggctcaggtccagcgcctgatcaggcgcgccgacgccgacacgcggcgcatcgtctgcctttccgcggttttcccttccggcccagatctcgacgactttgtcgcatgggtgacagacgacgagcccgacggactccaccgcgaaaactggagacccactcgccagcgcttcgggctcgtcgaatggctaaccgaccacgcccgccttgcgatgaccttcgaacaagaacagtccttcattccccgttacatcgaagcgaagacaccgagtggcggcaaacgtagaaatccgttcccgcatgacaaccgtgaactcgtcatcgcgaccgcgtggcggctggtggaagaagggcagacggtcctcattttctgtccgcagagaaactcggttgagccatacgcacgtgagatccttaaactccgtggccaggggttcattgactcagtccttccgtcggaggtcgatcttgacgaggcgctcgcaatcggcgccgagtggttcggtgccgaccatccgatcctgggatgtctcagggtcggtgtcgccatccaccatggggcactgcccgggccgttccgccgcgaggtcgaacgacttctgcaccgcggagtgatcaaggtgaccgtcgcctctcccaccctggcccagggactgaacctgtccgcatcggtcgtgctctttcacggcatccgccgagggcgagctctgctcacggggtccgaattcgccaacgtcatagggcgggctggtcgagcgttcgtcgacaccgagggcttggtgctctacccccgctacgagccgaccccacgccatcgacgcgaatggttcgacctgactgtcggagacgccggcaagtcgttgcgttcagggctgatcaccgtggcggaaaacctagtccggcggatgcacgcagcggcaggctctcctcagctgcaaaccttcatcgactacctcaccggaggggtcgactgggccttccctgtcatccttggtgaggacaccgaggtgcgcgacactgccgagcagacgtggtcctcaagcctggccctgcttgacaccgcgctgcttagcatcggtggcgaagacgagtctgatccagatgaagtgacgcaactcatcgctgatgcgctgcgggattccctgtgggagcgtcagctcaatcgactcgagaatcagcaggcggccaacgcattacgcgaactcgtgagcagccgcgcccgatttgtgtggagcaactcaacggcggctcagcgccgcggctggtacctcgcggggctgggtgcggcgtctgggtacgagcttggactagccgcagctcgagtcgttgaactgatctttcacgctgagaacgcgatcgaaaagaacgacaccgacgctgcggtaggcaaccttctcgagatcgctacgatcctctttgccgtgagcgagttcaagcccgagacgtcgctcatatggcagccggtccttgttcactggctgagcggagcgcctctgggtcttctcggtgaggatcctgtcgaagttgcgcagttcatcgaagcagacgtcgtgtaccgacttgtttggggtatggaggccgcccgcgtttacgagactgctcacgaaaatatagtcgccacagcgcttaccggtaccgctctgacggccatcgagactggaacgttcaaccggtcggcatcggtgctcatccggtccgggttcgaccaccgcgccgcggcgatcgctgcggtaaccgactccgaggcgaccttcagctcatcgtccgagatgcgcgactggatccgagagttagacccagacctcaccgaatcaccggactggccaaccgttgagtcgcacgccgcgtggaagcagtttgtgaaccgcgccgaccgcctgcgctcgaatagttgggcactccatgtcgagagcgttgaggaagttgcttggcgcagtactatcccagaggcgggtgcgtggttgcgcgtaacagacgctggtccgggcaggatcgctctgtggtccacaggatttgacgctctaggcgaagcgatggtcgacatcaatccacatcggcagggcgttctgcacgcccgtcggctatcgggttcttcaggaattaaattgcactaccgaggtccgcgagatctcctcgccccgacccatcgcagtagctga

SEQ ID NO: 58372 - DNA, 765 bp, Mycobacterium sp. GA-2945b; identical to SEQ ID NO: 58368

SEQ ID NO: 58373 - DNA, 3555 bp, Mycobacterium sp. GA-2945b; identical to SEQ ID NO: 58369

SEQ ID NO: 58374 - DNA, 813 bp, Stenotrophomonas sp. KCTC 12332
atgaattcgccagcttaccttcatcatctgaagcaggaaaaatcattggcgctgggtgagggcttcgactgcgaagtctgggaacttgccgtccctgacgattctacgtcactaagtgagtgggctcgtcggtttcgtgaaacctactgcctcgatagtgacctagatatcctgcgcgagggcacaggcaagtcacgagccgaatatctgctggaactggtctttcccgacgagcgcatagcacctggtcccgccgtacgctcaggcgattttgcggagatgctcgtctcagattacgtcgaattcgtcttgggctattgggttccacgtggcaagtacgcagagaaggggagtcgagacgagtccgtcaagggggtggacatcatcggctttcagtgccaagacccaactgagccgaaacctaccgacgaaatgttggcctttgaggcgaaggctcagctcggcggtgggatgtacaaagatcgcctgcaggtcgcggtcaacgactcaggcaaagactatcttcgagctggcgaaacgttggccgcgatgaaacgacgtatgctcgtatccggcgatcgtgcttcgatgctggttgttcagcgatttcaggacgcggtcgacaggccctatcggcttgtctcgggtgcagctgccattctttccgattcggcttacgatacagacggcatcaagggaacgtctatcaccggacacaccaacgctgacaacctgaagctagttgcaatcaggggcaaagacctgatgaagctcgctcatgccctgtaccagcgagcagcgaatgaagcctga

SEQ ID NO: 58375 - DNA, 3138 bp, Stenotrophomonas sp. KCTC 12332
atgaagcctgatttcaacagtcgtcggtacttcggaattacccgctcgaagggaaagatgtacgagttgggtttgcctgaagagtcccacatcgccgtgccggacggagttgaacctgccgccctgttcccgttgtctatcgggacgctaatggatgcgtcggcagcgctaaatgacgctatcgatgtcgaagggggcctagccgacgacctgcgagacgatatcggttttgctgcaagcttcttcgatgcttacttgagttctcggtttgatgccagcgtgtcgcgggaagtcactttgctcgcatcagccagctatttcttgggccaacgcccaggaagtagcttggtccttgcccgtcggcttcaagcagaatctgccaatccaatcgaacacctgacgatctgggtactgcgagcagactggcgtgcaccgccaaagctggctgtgcattggctatccgggatgctccaagagctttccttccggctcatgggccacttcaacgagggtgtgccgcccgaatcggccatcgagttactgagcgaactccgtcaattgacctatgctagcggcagctcaagggaagttgtactggtggaggtcgcatcggccgtggtcaggctgcgtttggcgggatcggcctggatcttgttgcctaagtttactgggttggacaatgcagcttgggctggcgcaatccgtcgccccggcttccctaaggaactctggccatcccagaagttgctcggcaaggccggccttttcgctggaaggtcgggggtagtccagatgcccacgagcgctggcaagacacgctctgtagaggtcgttctccgcagcgcattcttggctgaccggacgcgtgtcgcggtgatcgtcgctcctttccgcgccttgagccatgagattgccgcttcgttgcgtcaatcgttcaaaggcgaagacgtcaaggtcaacgagctttccgatgcactgcagctggacttcgtcgatcaattggccgagttgctcggccagacggtccccgcagcgcggtacttgctggtgttgactccggagaagctcctgtatgtgttgaggcaagagcctagcttgattgcgcacattgggatggtggtctacgacgaagggcaccagttcgacgcaggatcacgcgggatcacttatgaactgctgctcacggaaatcaaagcgctacttccagcaacagcccagactgtgcttatctctgctgtcatcaaaaacgcttcggacgtcggcacgtggctcattggtgcagagccgaacgttgttaacggtaagagcctgttgtcgacggcgcggtcagtagcgtttgcgacctggagtgaacgacttgggcagcttctgttcttcgaatcggatagttacgcccgcccggactatttcgtgcccaggagcatcgaagctcaagagcttgagctgcacggaagggagagaaatgtcagaaggtttccacagaagggcgatgatgcttggaaagacatttctctctatctcggaattcgattggctccgagcggtgccgtggccgtattctgcggcagaaaggacaccgcaagcggcctagcagaacgagcagttgaagtgtatgagcgggggttcaagctaccctctccagctgcggcatccgacgccaatgaagttcagcgcttgactcacctggcgacagagcattttggggcggactccatggtgacgaaagccgcattgctcggcgtctttgtacatcacggaacgacacctcaaggattacgcctatccattgagcatgcgatgcaaagcgagctcatcaagctggtcatttgcacttcgactttggctcaaggcgtcaatttgccaattcggtacctagtcgtttcgggagtgaatcaaggcgctgaacgtatcaagacgcgagacttccaaaacttaattggccgagccggtcgcgcaggcatgcataccgaaggacttgtccttttcgcggaccccaaggtcatcgataatcgtcaacgtgagaattggcgcttggaagcggcagttgggctattaaaggcagagaattccgaagaaacatcaagctcgcttctcgaattacttgaggctatttcgtcgcctgatggcagaagcactttgccaatcgcgaccaccgaagtactgcaggcatacttcaagcgaggcgaggagttggcggcatggaccaggcatatggccgtcgttcatcagtcacttggattcgacgaacggtcgttggcgaaggaaatttcgagaaggcagagattgatggtagctctcgaaagctttctgatggccaatcgtggattcgagagcttcgaaaacgtactaggaaaagtgcgggtgttggcaggctctacgctggctttttccttggcggacgaggccatgaaagcgtctcttgttcaactctttgtgttgtcggcaacgcacatcgagcaagttgtttccgaacccgctcgacagatgtcttatgctaagacgctgctgggcgctttcgacgcaaagatagtcgacgcttgggtccaggaacatgcgaatgcgctgcgcactcttgcgacacctgatgcgtggctgacggcaatatggccgcttttcatgactgttgtcgacgacaagctactgacagcgatggagcccgctgggatgccgatgcagctcgcgcagggctggatgcgcggggcttcataccgagagctgattgctatgaccaaggacgccaaagcgtctaagccttggggaaaagccgctcgccgcaagctcaacgatgccgatgtgcttcagttcttggaaggctgtctcggttttgattgcccgttgatcgtcgccgccgtaggtcagttccttttcggggcaacagggctcaatggcgaggaggctggcgcgcttaacgattttcagaagtctttggcttacgggttgccaagcagacttgcggtgtcgacctatgagtctggtctggccgacaggcaagttgcgcaggaagttgcgtttcaagttcggctgactggatatgaagggttcaatttccgtgccgcgttacgtgagcaccgcgatgtagttgtacgctcactggcggcgtacccctcttacttcgacaaggtgctcgatggtctgtaa

SEQ ID NO: 58376 - DNA, 780 bp, Enterobacter cloacae UCICRE 9; identical to SEQ ID NO: 56508

SEQ ID NO: 58377 - DNA, 3438 bp, Enterobacter cloacae UCICRE 9
atgatctggcgtgacggtgttcttcctcctggtgcgccggatttctcggctcaactcagcttcgatcttcacagttacgcgtatggtttgcttggactaggtctgcgccttttagagtcagatggcgacccgaatcaagcacggatcgcattcgaacaggcggcgacagcgcttgagtcggtcatggccaacggcaatcgcgaagaagctgatcgcgatttccattttctccttgcagctgccagttatcacctcgcgcacctttctgcccgggcctattccctcctcgcaattgtggccgatgaagcaaatttctcgccgatcgagcatgcgctaactctgttgatacgccgagatatcaattcgctgcgtacacgcgtatatacctttcgtctcgatggtcgtggatctgatgcgaccattacgacattcttacagcagcatctcaccgagtccatcgttgccgatgcggcggaacgagatggaaaggactttcttttcgaaggcctgaatctcgcactgacagatgttttcttcggtgccttttcgatgttcctgctcgccctagatcgcggtgaatatactcttctcgaaaaagcgatcgcccagcttcgtgaaaacctcgatatctgcggggagctgaaccttataccgcaatggtgggtgcaccggattgctatccatctgcttaaagatttctggtcgaacaccttccacgaaaaagttccgctgcttcccgctggcggcgttgccccttcgtggcctgtccttcgtgaactctttattggcttgctcgctcgacgcccaagggcagaggtcgacttgtggccgtcgcagattgaagcggcatcgcgagctgtcaaccagaccgacaacctcgttgtttcgttgccgaccagcgcaggtaagacccgcatcgctgaattgtctattctgagatgtttagccggtgggaggcgtgccattgtcgtgaccccgcttcgcgctctatctgcgcaaaccgaagccacacttcagcgtaccttcgggccactcggcaagaccatttctgccctttatggcagtatcggagtgtccggcttcgacgaagatgccatccgcgggcgtgatattgttgtcgcaaccccagagaagctcgatttcgccttgaggaacgatccgtcactgctcgacgatgtgggcttgctcgttttcgatgagggccatatgattggttcaggtgagcgcgaagttcgttacgaggttcagattcagcgcctcttacgtcgtaaggacgcagatcaacgccgcatagtctgtctatcggcaattcttccggacggagatcaaatggaagacttctcggcgtggctacggcgcgatcaaccgggaggtcccattaagaacgattggcgtccgacgcgtttgcggttcggcgaggtcacttggaattcgccgacagcgcgcctaaatcttcgcgttggtgaggaaaggccatttgtgcccagatttctgactggtgcggcaccgccgctgttcgtaccaccgaagaagcgtcgcaaccgactctttccggacaatcagcaggagttgagccttgcaaccgcatggcgtctagtcagagatggtcagacagtgttgatctattgcccagagcgtcgcagcgtcgaaccatttgccaaggtcatcgttgacttgcactcgcgcggtgcactcgagtctttgctaacagtcgaattgaccactttgcagatcgctatagcactcggtgaggaatggcttgggacagacagctatattctgaaatgccttcggcttggtgtggctcttcaccatggtgccttgccgacagcttatcgcaaggaaatcgagcgccttctgcgagaaggtatactcaaggtcacgatctcatcgccgactctggcgcagggactcaatctctcggcgacagcggtcgtcatgcactcgctctaccggcacggtgaaatgatcaaggtttcggaattcaagaatgtcatcggccgagcaggccgtgcttatattgatgtagaaggccttgttctctatcccatctttgaagatgtgaataacaggaagcacaacaaatgggtcaatctgatagaagaccacggtgctcgtgagatggaaagcgggctcatccagctcatcttctcgctgctgagccgcatgcactctcacattggcggtgatctcgaccatttgatcgactatgttgtcaataatgctgctgcgtgggtcttcccagaggttgccggtgaaaaggttgatgagcgagagcaggcgctgaaagagtgggatcgccatatggcgacactagataccgccattctcagtctcattggtgaggccgatgtacccgatgaccagatcgagaccgctctcgacagtattctccaatcttcactctggcaacgccgcctgctgcgtgttaacgacgaatcacgggctgcctatcgcaccgcgctgtttactcggagccgttatatctgggcgaattcgactgccgtcacacggcgtggttattttctggctgggcttggccttgaagctggacgtgcgctggatgcaattgcaccggaggcgaacaatctgctcatgcaagctaatgcagccttggttgtatcagatcatgaggctgcaatcactgcgatcacagatatcgccgaacgcgtgttcaccttttatccgtttgaaccagacacgctcccggcgaattggcgtgaaatcctcagaggttggctgcttgggcatccgttggcaatgatgatcgccggagaggaggtagacgcattgcaatttattgagggcggtctgggctatcgtcttccttgggctatggaggcgttgcgggtacgtgccgccgccaacggtgataccgttggcatgccagcactagcgttggaagattatgaactcggccttgctgttccagctgtcgaaacggggacgatgaaccgctcagcctcaatactgatccaggcgggttttaattcacgacaggcggccatcaaagccgtcaccgatacggctgctaacttcacgaacggggcggaattgcgcgattggttgcgttcacctggtctcgctgtctattcggcacaaccaaactggccaacggccgaagctcggactatatggctcgaattcatccaggaatttgctccgtcagacaacctttcttgggcgcggcgagattatcttggaaacgtcaattggttcgatgttccggcgccttccggaactccagtcggtctctttcattggaacggacaaccgctagtgcttgcaccagatgggcacgcgattggtctgctacaacaccctcttaaccttaatcggcgaggacttgtgcgagcgacggtcgctatgaataacggccagatcaatctgagctatctcggccctgatgatttgtgggtagttgcgaagccacattaa

SEQ ID NO: 58378 - DNA, 810 bp, Methanosaeta concilii GP6
ttgggctccaattgcagtattgaggataaggctcgaacacatccgcctgccgacgatagggtcgaccttttcgaccgctggttatctattaaaaaggcaaatttgggcaagcatgtgcttattatctgtaaagagaataactgctcgtgcgataatattttcgatgagctccagaacgttttactcagtcactatgtagcaccagaaattaccgcaaagagacttgcagaattaggcgctccaagaactgcagaattgttgagggagcatttgccaacaacaaagacggctcgttccggtgaccttggggaaatccttgccatagagtttactgagcgtaggcttggatttagcgtcccaattcgaaggcttcgctttaaggatggacgcaatatggctcttcgaggcgatgatcttattgccatcgatcgagatcttaaaggtagcttaaagttccttaagggcgaatcaaagagttacgcaagactgactccaactgtaatcaaagaagccgcagatgcacttgaccgatatcgtggtcgtccaaacagacattcggtgctctttgtggcagaacgtttgcgagacaagggagatcatgaccttgccaaggatttggattatgctgtgctgcagagcttccgtggttgtcctttcgagcatttgctctttacagtgtctggcaccgatcctaatacccatctatccaatcatcttagggaatgcaggaatcgcactcgcaggtatgcagtcggaatttatatcgttaaccatggcgatgttattgagcgcttgttttcggagcagtaa

SEQ ID NO: 58379 - DNA, 3426 bp, Methanosaeta concilii GP6
atgaccgaatctgcgatagaacttcagaatatcctcgaaaaggctatatcccctggatttcgggatcgtttgctggataagggattagctcgtggtctaatctggcgcaatggggaactccctaccggagcaccatcatttggagacagtcttactgatgatcttctcgattatgcctacacggtgcttgcaatggcactgcgtctgcgctcggtcaacggggatgagattttattgcagcgggctttcctcgttgctggcgaggcaatcgaagcagccgtgcgcaatggagatccgtttcgcatagaccgcggatttaatctggtgagttcagccatctcctttcaccttgcgagatatgcagcacgtgcttattccatgttgcctattggtgctaacgacgggaacctagcaccaactgagaaagcccttgtccagcttctgaggaaatctcttgatgaaatgcatgaatttgttgcggcttggctgcttgataaagagcaatgggatgagagaattgcagagcgccttcttaatgatgcagatttcgatgagactgacgcgataagcgcggttattaccagatctttcatgcgcggactcgcactatttgaccatgctataacaaccggtgaggaggtctctgctatggaagcaaagcgtctgctactttttacggccgaggccgctaaagatatgcatgctgtgagccattggtggacttctacgatggcattccacctaatagacgatctctggcaaatgagcctccaccgccaaattccaaagatactctcagacgatgatgacattgaaaagtggactaccttgcgtcaggcctatattcagcgactgcgagcagcaaagaaatccgcaatcgaactttggccatcacagatcgaggcagctcagcgcgccatagatcaatctgatgatctcgtagtagcgctacctacaagtgctggaaaaacccgaattgcagagctttgcatccttcgaacattagcatcagatctccgtatcatctacgtcactccgcttagagccttgtcagcacaagttgaacaggatcttgctgatacatttcttcctcttgggatatccgtatcctctttatatggatctgctgggatcgagagttctgacgctgatacacttagggaagttaagattgttgtttccactccggagaagttggactttgccctccgcgttgatccaacaattattgataatgttggcctcattgtactagatgaaggtcatatgctcggaccaagcgagagagaagttagatacgaagcactcgtgcaacggttgcttcgtcgatccgatgctggttctcgacgtattgtctgcctatccgcattatttccgccacccgaagaaatgagcgatttggtctcgtggcttcgacgagatgagcctggaactgcagtgtattccacttggcgtcctactcgtcaaagatttggtgtcataagatgggtaagggatgcagcgcgccttgacattaaggttgagacagagggcccctttgtgaagcgatttgtggaaactaaggtgccacccgcgggatctcggcgttttaatagctttccacatgataaggacgaattgactctggcagcagcatggcaattcgttgaccaaggaaaggacgtcctcatctattgcacaatgaggaggtctgtagaaaaactaggaagggttatccttaagtgtatcaggcagggaatgttaaagccgcttcgcctgatgaaccaggatattcaggacgtgatggctgcaggagctgaatggttgggccccgatcatccagcggtccagtgcctaaaatacggcatagccctgcaccatggccatttacctcgtcaattcttgaatgaactagaaaagcttctacgcaagggcgatattcgtcttacgattgcttctccgacgcttgcacaaggtcttaatctctcggccagcgtgcttctggtcccttcaatatggcgaaacagggatattattcctgctacagaatttgcaaatgttatcggtcgtgctggccgcgcttttgtcgatgttgatggtattgtattgcatgttatatgggaggacgatggaaaaagcgaagccagaagactatatcattggcatgatctcgtctccaaagcaaaagcgccagaaatttcgagcggccttttgctgctagctaacaagattttccagaaaatctcagatattgtcggggcgccattggaggaagtcattgaatatctcactgggcatggagatgtttgggattttactgattctcaattagagcaagtagaaatgaagcttgaagattgggaacatgatatagcttcccttgatgcggctattttggcgctattggacacagggattgaagaagaatgtcttgacaacgaacttgataatgtgttagaagggtcgctcttctctagaaagctggcatactatgaacataacatgcaaatgctagtgcgacggttcgttaaagcgcgagcccattgtatctggaggcaaacaagtacatctcaacgaaggggatatcatgtggctggcgtcgggctacgagccggtcggttcttggatgctaacattgcaaacctagtcgatctccttcttcgagcagaggcagcagtggtagcgggagattcggctggtgccaccgactccattgttgaatttgccagacttgtgtttcagactgagccttttcgcccctctgggactatgcccgactattgggagaatgcactacgagaatggattgaaggcaaatcagcatcaaaaattgttggccttgattctagtaaaggtgttgacctattgcaggaggccatatcttaccgactcccttgggcgatggaggctgttagagtgcacgcaatagctgtcagacaagacggtgcagagcagatcaaaggccatgcagctatggcagcagaggtaggaaacgccaatctctctgtcataaaattactgcgtgctggactgaattcacgcgaagctgcaatcacggctgttaccaaaacagaagcggcttttattgactacagagaaatgctcgaatggttgagatcggatcaggtagagtcgatgtccaaaatggagaactggccgacaaaacagagccgtcctgcatggctacagttcttcagcaccaagaaaggaaaccgtcttaagttgacatgccaaactcaagtcgtgcaggtagagtggtttatcgacgcaccaccaatcaacacgcatgtcatcgttgagccagacgccaggctcgttctaacaacagactatgtaagacttggtgttcttatcactgagcttagtatacaaagccatgatatcgttaatgcatgggtagcggactgcccgaatacagtcgtcgttgagtattttggcccgtcgtaa

SEQ ID NO: 58380 - DNA, 777 bp, Candidatus Nitrosoarchaeum limnia BG20
atgttaaagacttggttagaagtatcaaaaagaccatcaggaacatttcgtttcaacgttgtaaacattaatgaaaaaaattcaagagatttagaaaacataaatgaaattttttccaagatcataattaatgaatcagttgggtatgatactgccaaaaagcttgcaaaaaaatatggatggaataaaattcttgaatccataattacacctagacttactcgaacttcaaatatgaaaaaaggaaaatttggagaaatgttagaaagttctgtcctagagaccttttttgactatgtaattccaattaaaaaatggagatatgcaatttcatcagatcagagcttgcccagatgtgatattattgcagtaaaacttgaaggacaaaaaattatagaaatgagtttcatagaatcaaaattaactacaacatcagattcaaataaaattattgaagcacatagccaacttatggaagaaaaaaagagtggtttttcagacatattgtctttcataattctcagattaattgatgaaaaacatccattacaagaagcatttattgaatatacactcattaaagacaaaccaaacgattcctatcgtatcgcagcaacatatgataatgcaaaatggaatgaaaattatttaacaaagttaaatgatattcataccaagtcaacaccagagttaacggtggatctaataagaattgaagaactagaaaaagtagtaaaaacagtgtatgaaaaaaaaggatggaagccaattgagtag

SEQ ID NO: 58381 - DNA, 3432 bp, Candidatus Nitrosoarchaeum limnia BG20
ttgagtagtattcccaaaaaatggattgagcaaatagcatcatcttcaggagatgatgatttccaaaatgatgttgcacaaattacgtctaaatcgatgttgaaagaaattacagatgatatgccttcttatgcttggaattataatgaatcagtcataattagaaatgcaactacacttagtttaatgattcaaaatatggcattagaaaatccagaacacctgaagaatattggtcagtcaacattacggttagcaactctttgggaaaatcttgcacgcctacatgaaaaaatggatccagtattggcattaatgaattcagcagtatgttaccaattggctggatatcaggctaatgcaacatgtcttgcacgaaaggcttcaaaaatcatgaaaaatgataattctacatcttatctatctagtctgtttctacaaagacatttcttacaacttcgaatacaatgtcaacaatgtatgcaagaacctacagagacagataatgaatttgaggtcattagaaaattaggattagcctcattagctgatggatatcagaatattacagattattttcttcgtggtaatgaatcaagtatagaaaaagcagagaaatcattttcaaactctgaaaaacttttttctgaattatttatgatagaagattccaatcttgtacgaaaaattagaagtttggttaaacccatgatccaaacttcaacatggaaaattttaggagatattaaacaagaaaacttagtttgggatagatacttaagattattggcaagagggataggagatgatttacttcaaagtacgtctatatctgagatatggccttcacaaaaaaatgcaatagattcaggattattcaattctaattcaaataaagtaatcaagatgccaactagtgcaggaaaaaccagaatagctgagcttgcaatggtccaaatgttagctaaaaatcctgggaaaaaatgtatctatgtagcaccatatcgtgcattagtatcagagcttgaagatactttcttaaatttattcggagatttaggttttcgtgtttcaacaattgttggaacttatgaacaagatccatttgaaaaaaaattaatcgaagatgcagatgttcttgttttaactccagaaaaattagatttagttcttagatcccattcagaattacttgatgatgtgaaattattcattttagatgaagggcatataatagatgatgataaaagaggaataaagctagaactattgcttacacgattaaaaagaaaactaatcaacacaagatttatttttatttctgctgttttatcagaagaaacggtacaagaatatcttttatggtttaatggaactgctgaagatgaaattaaatcagactggagaccatcaattcaacaacatgcaagatttgaatggtcatctaggaaaaatacaggtcttttacgatatgaaccaagaaaagaaaataaactaattgataatttcgtacctgggataatcactcataaaaaatatagaattaagaacaaagagagtgggaggtatagaaatacagtatttcctaccactgcaaaaactcagactgcagctgaattagcgtataaattttcagatcttggacccgtattggtttttaccacacaagtgaattgggttttatcaatagcaaatttgcttctaaaacgaatagaacttacaaaggatatagaagaacaacttccaagccattttcaacataatgattctcgctcattaacaatttcaaaagaatggctaggtaatgatcatcccataacccaacttttacaaaatggaattgcgattcatcatgggcgacttccagacatactcagaagaagcatagaaagtgattttcgagataaaaaattcagagtaattgtctcaactaatacattggcgcagggagtaaatcttccaataaaaacaattctaattcattcttgtagaagacgtagaatggataacactcaagaaatgatttctgtgagtgattattggaatgttgcaggacgtgcaggaagagcaggtcaagaaactgaaggaacaacagttcatatcataaacacaccagaagatcaggcagattattcttattatctttctcaaagaaacaaattagaacatgtacgaagcgcattatttcaaattttaaatgatttagcaggtgaacgtctaagcataaattctcttagagaaaaaatagatgctgaagttttggcgttattaatggaagagggaggatttgattcattaaataaagtgatagatgaaattatagaatcatcattagtgaattttcagtctaaaaacacatctgaaataaaattattaatacaaggtttcaaaactatttctgaaaaaatttcacaagaagtgccagcagaatttataggagtattttcatctacaggattatcatcaagtagttgtcttgtattaaaaaattttattgaattaaattcttcaacaataaaacaattttataattctccgagtgttgaaaataatttagaatttttatctatgatattagatgcacttagtgaaattatagaaatggaacctataagcacatttgatggagatgttttagatctacttaaaaaatggattatgggtgatgatattaatgaattaatttcatcagtgaaatcacaagataaaacagaaatagcaaaattcattgaagagtattttggatataaacttccatgggggatttcatcatttttacaaattgctcaaaagatattcaatattagtgaagaaaaagttccaaatgaaatgcgttacttatcaagtatggtgaaatacggtgttcctacctatgaagcaagttggtgtatgatgatgggaattccatttagaaaattagctctaagaatttcttcaaaatatctttccttatcaaatgaatcagaatattcaaaattcatagagtggatttcaaatattgattcagaatcacttcaaaaagatttcggaataaaaagtccatttttagaagatatctcaaatgcattaaatcgaaatggagtaaatccattattaaaaaataagataaaacttgaagaaattatagaaacaccgttatcgataacgggtattagatttgaaaatagatatgttgtagctaacaaaattaaagaatcagaaactgtagtattatcgcgagattacgataacgcatatgatagaaacgccatcaaagttttttcttcgaataagtctgaattaggatttctaagtaggaatgtggctcagtatttggcaccatatcttgattgtggcatagaatttaatgcaaaagtgttctcaataatttataaaaaaattcctgaaatagaaataaaaataaacacactacctaattacagtagcccatga

SEQ ID NO: 58382 - DNA, 1194 bp, Stigmatella aurantiaca DW4/3-1
atgaccacgagcgctgatgcgacgggggccactgcgacgccccccacgtcgacgaccgattccgtaggcgccgcgcatgaatccatcgaggaagcgctgaagcgcctcgcgcgaggcacgccgaccgccttggccggccttctccacgacgtcgagagtcatgtgaccgtcgatggcacgctggtgaccgcgcactgccattgcctgaaactcgacggtaacgggcggccccgcaccgaagacctcgtgaaagtcatcgccgagcacgtcctcgactacgccatcccgaggagccacatccgcgaggcggccgaggagctccagcgaagccgatcgacgcagaagctggtccggctcgtcgacgaagcgagaagcctgttcaccgatcttgaacagagcggcgagggaggagagcttctgctgttcgccttcgcggagaaaattctccacctcccgcagctcatctgcaagatgagcctcaagaccaacaccaggatgcatgttcacggtgcggacggacttcacgctggggtcgatcccacgacgggcaagctgctcttgtactggggtgagtcgaagatctacggcgacgtcaccggggccgtgcgcgagtgcctggcatccatccgcccgatgctcgccgagtactcctcgggccagagggacctccagctcctccagaggcatgcggacctcgacgatccggcgctcgaagcggctctcaagaagtacctcgatcccgatgcggacgaattcaactcgttagagttccgcgggctctgcctcgtcggcttcgactgcgatgcgtatccgaccggtccctcgaccacgcagctcgccgccatggctaagcagatcgcaacgacgcttccgacgtggagggggcacgtcaagaagcggctcaccgaggagaagctcgatgcgttcgcgatgcacttcctgttcgtgccgttcccgtccgctgacgggttcaggcagttgctccgcgacaagctgggcgtctccaagcaggcaatgcctgctgccccgactgcagtaccgagcgcgcccgtttcaacgcctgctgttgttgccgccaaggctgctaagcccacgcccacccgtagaaccactccggcgcccgtttccggcgtgacgacgccgcgcaaggcgcgcgcgacaaagccgagggggactcccagtggcgctgcgtga

SEQ ID NO: 58383 - DNA, 2628 bp, Stigmatella aurantiaca DW4/3-1
gtggcgctgcgtgatctcggaccttggctcctcgacgttcccggcttccggcggcaggctgacaaggtccttgtcgacgccgcgtgcggcgagctcggtacggacttcgtccgcctcgatcagcatcgcgacctcgagcacgactggcggtacctgctactcgcagcgagcgtactggcacagtcgacggacggccgctgccagcttgctgcgctgcgcatcgcgcagagctgcctttcgggtgcgaatgcgaccgaggtccagcgcgactccgctgctcttgttctcgacgcactggcgaaccacccagccatcaagctcgcggagaaccggcagcttttgaagccgtccttcgtgacgagacttcccggggcggcgctcatcgagtacacgcggcgctggtacgagaactccgtcgcggtgcatggcaacaagctgctgcgggtgaaccgcttccagcggaggctttgggacgaggttcggaaccaaggatggatgtcggtctcggcgccgacgtctgccgggaagtcgttcatcctcgcccggtggatctgcgaactgatgcgcacgtcgacggttgcgacggtggtgtacgtcgttccaacacgtgcgctcatcagccaagtggagcgcgaccttcgagatctgttcaaggacgagggactccaggacgtctccgtgtcggcattgccgatcttgaaagccgactccgatgccgagccggtacgtcggcgggtctttgtcttcacgcaggagcggcttcacatcctcctctctgcgaagcccgacctcgcggtccgggcactcatcgtcgacgaggctcacaaggttggagaccgccagcgcggcgtgctgctccaagacgtgatcgagcgcgtgagcgcagagaacccggagcttcgcgtcctgttcgccagcccgatgacgagcaatcctgggcttctgctcgaggatgcggcggggggccccgccaaccctgcgtttgctagcgacgacgtgacggtcgcgcagaacctgttctgggtcagccagcgtccgcgccgaacgacggagtgggacgtgtcgctctgcgagcgaagcgaaaccatcgcgcttggcaccgtctcgctcaaggcgagcccgacgccggccagcaagcgcctgcccttcgtcgcgcacgcgatcagcgcaacgtcacccggcaacatcgtctacgtcaatcgtgccgcagatgccgagacggttgctggacagctctacggcctgatgggtgtcgactgcgaagccgaggagggcgccgcactcaaggagttgatcgaactcgcgcagcatgtcgtgcacaagaagttcctgctcgcgacctacctgcgtcgaggcgtggccttccactatgggaacatgcctttgctccttcgcgaggagattgagcgtctcttcaccgagggcatcatcaagtacttggtgtgcacgtcgaccctgatcgagggggtcaacatggcgtgccgtaacatcttcatgcgtgggccgacgaaggggatcggcaacccgctgtccgcagaggacttctggaaccttgccgggcgtgccggcaggtggggcaaggagttccagggcaacatcttctgcgtcgacgccgaccgaaaggagatctggggtgagaacggacctccacgtgagcgaacgcggcagccgattcgtcgcacgaccgacgaggtgcttcggatcgaagtagctccgcagttcgtgaagttcatcaaggacggtgcgccgctcgagacgctgaaggagcatcctgagttcgagccggtgttcgcgtacctcgccggtgttcacgtgcgctacggaggcctcctcgaagcgcgatgggcggggcgctacgacgaaacgatgctcagcgagttggccgccgtcgtggaggaagccgtcgatggactggcgatcgagcacgacatcatcgtgaggaaccctggcatcagtccgttcgctctggacgaactcctcaagtacttccgcgagcgagagggtgacgtcgaagagctcctgccgtcggagccgtcgagcaaggacgccgccaaggtgtacgcagggatcttcgggcgcctttgcaggcgggcttgccccaaactcggtcccgagggcccgagagccttcgtgctggcgctgctcgtcacgcggtggatgtcgggattcccactctcacgtctgatcgatgaccggctcaagaggaagggcgacgacaaagcagcagcagagatcaggaacgtgatgaacgacgtcgagcaaatcgcacgattcgaggcgccgcgcggtctcagcgcctactgcgacgtgctccggcagttcctgcgggaggtggagcgcgaggatctcatcgagcgcatcccgccgttcaacgtgtttctggagcttggtgtcagccttcaaacgcagatcgctcttatcggcgtcggcctttcgcgcacgtcaagcgtggcgctgtcggagatcatcaccgaggacaagctgacggagccgcaggtgctccagtggctccgtgacaacgaggaactgtggcgcaacttcccgcttccctcgctggtgaagaaggaggtcgaacgcgtcctgaatcagcacaaggagcgagctggcgtgaaggaggcctcctcgtga

SEQ ID NO: 58384 - DNA, 1194 bp, Stigmatella aurantiaca DW4/3-1; identical to SEQ ID NO: 58382

SEQ ID NO: 58385 - DNA, 2631 bp, Stigmatella aurantiaca DW4/3-1
gtggcgctgcgtgatctcggaccttggctcctcgacgttcccggcttccggcggcaggctgacaaggtccttgtcgacgccgcgtgcggcgagctcggtacggacttcgtccgcctcgatcagcatcgcgacctcgagcacgactggcggtacctgctactcgcagcgagcgtactggcacagtcgacggacggccgctgccagcttgctgcgctgcgcatcgcgcagagctgcctttcgggtgcgaatgcgaccgaggtccagcgcgactccgctgctcttgttctcgacgcactggcgaaccacccagccatcaagctcgcggagaaccggcagcttttgaagccgtccttcgtgacgagacttcccggggcggcgctcatcgagtacacgcggcgctggtacgagaactccgtcgcggtgcatggcaacaagctgctgcgggtgaaccgckwcsgagttcggaggctttgggacgaggttcggaaccaaggatggatgtcggtctcggcgccgacgtctgccgggaagtcgttcatcctcgcccggtggatctgcgaactgatgcgcacgtcgacggttgcgacggtggtgtacgtcgttccaacacgtgcgctcatcagccaagtggagcgcgaccttcgagatctgttcaaggacgagggactccaggacgtctccgtgtcggcattgccgatcttgaaagccgactccgatgccgagccggtacgtcggcgggtctttgtcttcacgcaggagcggcttcacatcctcctctctgcgaagcccgacctcgcggtccgggcactcatcgtcgacgaggctcacaaggttggagaccgccagcgcggcgtgctgctccaagacgtgatcgagcgcgtgagcgcagagaacccggagcttcgcgtcctgttcgccagcccgatgacgagcaatcctgggcttctgctcgaggatgcggcggggggccccgccaaccctgcgtttgctagcgacgacgtgacggtcgcgcagaacctgttctgggtcagccagcgtccgcgccgaacgacggagtgggacgtgtcgctctgcgagcgaagcgaaaccatcgcgcttggcaccgtctcgctcaaggcgagcccgacgccggccagcaagcgcctgcccttcgtcgcgcacgcgatcagcgcaacgtcacccggcaacatcgtctacgtcaatcgtgccgcagatgccgagacggttgctggacagctctacggcctgatgggtgtcgactgcgaagccgaggagggcgccgcactcaaggagttgatcgaactcgcgcagcatgtcgtgcacaagaagttcctgctcgcgacctacctgcgtcgaggcgtggccttccactatgggaacatgcctttgctccttcgcgaggagattgagcgtctcttcaccgagggcatcatcaagtacttggtgtgcacgtcgaccctgatcgagggggtcaacatggcgtgccgtaacatcttcatgcgtgggccgacgaaggggatcggcaacccgctgtccgcagaggacttctggaaccttgccgggcgtgccggcaggtggggcaaggagttccagggcaacatcttctgcgtcgacgccgaccgaaaggagatctggggtgagaacggacctccacgtgagcgaacgcggcagccgattcgtcgcacgaccgacgaggtgcttcggatcgaagtagctccgcagttcgtgaagttcatcaaggacggtgcgccgctcgagacgctgaaggagcatcctgagttcgagccggtgttcgcgtacctcgccggtgttcacgtgcgctacggaggcctcctcgaagcgcgatgggcggggcgctacgacgaaacgatgctcagcgagttggccgccgtcgtggaggaagccgtcgatggactggcgatcgagcacgacatcatcgtgaggaaccctggcatcagtccgttcgctctggacgaactcctcaagtacttccgcgagcgagagggtgacgtcgaagagctcctgccgtcggagccgtcgagcaaggacgccgccaaggtgtacgcagggatcttcgggcgcctttgcaggcgggcttgccccaaactcggtcccgagggcccgagagccttcgtgctggcgctgctcgtcacgcggtggatgtcgggattcccactctcacgtctgatcgatgaccggctcaagaggaagggcgacgacaaagcagcagcagagatcaggaacgtgatgaacgacgtcgagcaaatcgcacgattcgaggcgccgcgcggtctcagcgcctactgcgacgtgctccggcagttcctgcgggaggtggagcgcgaggatctcatcgagcgcatcccgccgttcaacgtgtttctggagcttggtgtcagccttcaaacgcagatcgctcttatcggcgtcggcctttcgcgcacgtcaagcgtggcgctgtcggagatcatcaccgaggacaagctgacggagccgcaggtgctccagtggctccgtgacaacgaggaactgtggcgcaacttcccgcttccctcgctggtgaagaaggaggtcgaacgcgtcctgaatcagcacaaggagcgagctggcgtgaaggaggcctcctcgtga

SEQ ID NO: 58386 - DNA, 870 bp, Rubinisphaera brasiliensis DSM 5305
ttggtatcgcgtcctcaacaattcctatccgttcgcgtaacagactgttcgagcaacccagaactaagtgcactttgcgcaggttttgaactcggtagctggcgagcagaacagctcgccagccatcttattgaatggcttccggattttgcgctaacgcatagtgaaatcgagtcgctagggcctggaaacctagttcgccttctttccaaagctgctctaaccgtttacaacgcaaaaacagcgtcatacgcaaaaaaagaaaaaggggcagaaattggcgaaatactgctacacattgccacttgccatttcctaggctcaatacctgccatatccaagtatttctacaaagacagccaaaatgacttagtaaaggggtttgatgctgtgcacgtcgtgccggcagatgatggactggagttgtgcctaggcgaagtcaagttctacaagagtattagcaatgccatacgcgatgtcgctgcagaactggagacacacctcaaacgcgactacctgaggtccgaatttgcacttataacaaataagatagacaatacgtggccgtatgcctccgacctggagcttcttcttgacaagaacacgtcgcttgatgacgtattcaagcggaccgcgatccccgttctacttggatacgaatgccctttatacacccgacacgcctgcatctccgaccagttcattgctgacctcgaaacaaaagtccagaaacactacgcgagtttttcaaaaaagatacaactgcctgaaatgcgagttcatcttttcttatttccaatgaaaagcaaggctagcctgattaaagcattcgacaagaagcttctccaatgccaatcgataattccttag

SEQ ID NO: 58387 - DNA, 2127 bp, Rubinisphaera brasiliensis DSM 5305
atgccaatcgataattccttagcatcaagggttcgcaagaacatatcctctctacccacacagagcggtgaactgttctcattactatcgcaattgtgtgcagtagtaaacagtgacccacaagaccctgtttcgcacgatctcgtcctacgcgcgatggaacatcgggaagccttcggggaaatgtcctcggtccttgacggcctggtgcgaaacattggtctgttcccatacttagacagagaatccctatccctcgcagatgcgatcgcgtacgagtcacaccgcccaattggtttcgacgatgacattgtatttcatcgcgcgcaagcccacatataccatctacttctacgcggcgaaaacgttgcactgagtgcgccgacaagctttggaaagagtctgattattgatgcaataattgcatctggaaaacactcccacatcgcgatcgttgtcccagcgttggcattgatcgacgagactcgccgtcgtctggcatcacgtttcggaaacaaatacaaaatcataactcgaacctcccaatccccttccccccagaacatatacatactcacacaagagcgtgtcttagaattccccaacttcgattcactcgactttttcgtcatcgatgagttctacaagctgtccgtcgactccggcgacaaggaaagggcgatcctcctaaacaatgccctgtacaagctacttaagaccggcgcgcagttctatatgctcggaccaaacatcgatgcaatgaacacgcaaaatcatatgcgagtcgagctaagatttgtcaaagaaccgcattaccacacggttgcaacccaagtgcatcgtgtaaaagctggcgatggcgaactcgccactttgacgaacctttgcaacaagatcgaaggagcgacaataattttctgcaagtctcccgatcgagcagcggaagttgcgaagcatttatcaactcagagaaatctgcgactgagcaagagcttgcaaaatgcgatcgaatggattgacacacactttcatcctgagtggcatttctccgaagcgttatcgaagggaatcggggttcaccacgggcgaattccacgttcacttggccaatacgtcgtcagaaagttcaatgatggcgaaattgacatactcgtatgcacctcgacgctcattgagggggttaacacaaaagcgagaaatatcgttgtgttcgacaacacgatcaacaagaaaaggatcgatcgatttacctttaacaacatcaagggcagatccggtagaatgttcgaattctttgttggacacgtttacgtattccatgtcgatccacagcaagatttaccgcgtatcgaaatccccattttttcccccgatgaatccactccagactccttacttgtgcaagtcgacgaaaaggacctgaacgataaggcggttgagaaaaggcgtcggtttcaagagcaggacgtgctgccttttgaaataatccagagaaacaacggagtggaccccgaaactcagattgagttagccatcgcaatcggggaattgacaagcaacaaaatgaaactcctttcgtggaagcaagtcccaaattacagacagttatcatttgtatgcgatctaatctacgagcatctagatggccgctccgtgcgaggaggatcgctctggaagtcaacgcaattagctgctcgtatcaaccagctaaagaatcgcagaacattacgtgaaatgatagttacacaacgagattacgccgactcattcgatgaatctgtcacaagtgtactaaactttctgaggacttgggcatcattccactttccgagaaaactccgagtaattcacaacatacaggaacatgtcttaccgcaatttggtattgcagctggcgactacgagctcttctcttaccttgttgaaaactggcacttagatccagtgatcactgccctcgacgaatatggcttgcctgtcgaacttggaagaaagcttgaacgacaaatcggaacaaacggcgattttgacgaggccatcattcggcttaagaatcttgatatttcgaccctaaaactaagtgacttcgagcgagaacttctagaagacgtgcaatcattcttgtga

SEQ ID NO: 58388 - DNA, 978 bp, Azospirillum brasilense
atggacacgcccataagccttgaggaggccctcgacctcctcgccgggaagcacgacaagttcaacgcgcgggtgcggacggtgtccagcatccccgtggacgggttcccgcgcgtcaaggccagcttctattacctggccttccaggacggcctccccacgatcgaacagttcgtcaagtacctgaagcaccagctggtggcgttctgcattccgcgccgggaccgcatgcgcgtgcgggcgcagatgcaggccgaccccgacgaggccgaacggctggtgctcgagcagttcgagaaggcgcgcgatctgttcatcaaggccaaggagcagcagaagaaggctggggagccgggcgaactgatcctgttcgtcctgttggagtgggcgttgcgggcgccgcagctgatctcgaagatgtacctgaagacatcccgggagatgccggtgcatggcaccgacggcatccatgtcggtctgcacgacgacggcatgaccctgcttctgtactggggcgagtccaagctctacgccgacctatccgatgcgcttgacgctgtcttcgagtccgtgggggatttcatcaaggacgacggcaagcggaatcgcgagatcgacattgtgcgtgaccacatgaatctcggagaggatcagcaagcgttgcgcgataccctgctcgactatctcgacccctattcggagaagggcaatcagaggcggcacgtgttcgcttgcttcgtcggcttcgattacgcccgctatgaacagctgcgaaagctgcatccggaccaagtcgaggatgagttccggaaattctttgagaagcgcgtggccgaagccgtggaattgctgcggcgcaggctcggtgctgtggggatggaggtggtgaatttcgagttcttcctgatccccttcccctcggtgaacgcgttccgcaccgcgttcttcaagcacacgggcatcggcgatgctggatga

SEQ ID NO: 58389 - DNA, 2058 bp, Azospirillum brasilense
atggtgcggcggacggccctcggctcatccgaaatcgtgctcaccgacttccaatgggatgtctggggcgcgctcgacgagggggcatcgctcgggacgtcggcaccgacatcggccggcaagagcttcctgctccaggcgttcatccggcggctctgggcggcgccgccgcgtccccgggtggtctacatcgtccccacgcgtgcactgatcaaccaggtgtcgggcgagctcgtcgccgcattgcgcagcgacggtgccgatgaggtcggtgtcgttaccgtgcccctgacggccgaccagccggtcccgaacgatgcgctgttcgttatgacgcaggagcggctgcagctcatcctcacgaaccacccggaagcggccttcgatctggtgatcgtcgacgaggcgcaggccgtgggcgacggcgggcgcggcgtgatcctcaccgccgtcctggaggagctcacgcggcggaacgcggcggtccagatgttcttcgccagccccaacctgtccaacccgcagatcttcggtcgtctgttcggcctgaagaactaccgccactacaaaagccgcgacgtcgcggtggcacagaacctcatccacctggatacctcgggcgctgatccccgccgcatccgggtttcgctcaacatgggcggcgcgaagcagccgctcggggagctgatcgccagcgacgacctgaccggggtcaagcaggcgacggtgcacctcgccaacctgttcggccaaggcggtcagagccttgtctatgccaagggcgcggctgactgccagagcttggcgaccggtctgatgcagctcgaggctgcccgcgccgagacgtccggttcgccggagcccagcgcggagcgcagacagctgtcggcattcatccgggagagcgtgcaccccaagttcgccttggccgagaccgtcctgagtggggtcggcttccactacggcgccatgccgcccctgttgcggcggaccatcgaggacgccttccgagatggcgagttaaagttcctggtgagcaccagcacactgctgcatgggctcaatctcccggcccgcagcctgttcctcaaccggcctcgtcgcggcaacaagtcccctctcgagtccgttgacttttggaatctggcggggcgtgccgggcggctcggcaaggagtttgagggcgacgtctacctcatcgattacgatgactggcccagccagccgctgaccgggagccgcaaagtggagatccgctcgaccctggaggagcacgtgcgcgagcggccggaggagctgatcgcctacattggtgagccggaccggaagcctgaccgttcgggcgccgatgagttcgagaacacctttacaaaactctatgccgaccaccgtgcggggcatctcgacgaggcgctgaatcgcctggaggtgccaccgcgatccgaggtgcgcatccagctctccgatgccctgcgcgcggcggagcagctcgttcgcctggatgattccgtcgtccgggccagcccaacggtgtcggtctaccgccagcagcggctgtacgactacatgctggcgaagatcgccaaagaggggcccgagtacctgatgccggtccatccgctcagccctggcgcctacgaaaggctggtagccatctttaagcgatgccacacccacatcttccagtggcctgccgcggatcgaagccacctacgggctgcggccttcgcccacccttggatgcgcggcgcgccgctgccgcagatcatcgacgctcatttcgagtacgaatcaagacggaacgagcggtacaccacctccaacgcgatcctcgccacactcaaggcgatcgaggaggacgtgcgattcacgtatgtgcggctgactggctgctacaacacgctgttgaagcgtgcgctagtcgagaaggggcacgccgagctcgccgagcgcatcgttcctataccgatgttcttggaagtcggcgcctgctcccagacgatgaagtcgttcatcggcatgggcctgtcgcgcattttcgcgcatttcggcgcgtaa

SEQ ID NO: 58390 - DNA, 945 bp, Campylobacter coli RM2228
atgcaagataaagagatagaaaatacaacaacgataaacacctatgtaaaaaataaagataatgataactttataataattttaaatgaaacactatgttgtcaatatcatcattttttactatctatttcaaatcaatttgaaagcaaaaagtggaaaatgaaaaattttagaaatttcattattactaatttaaaagaatgtgctctaacagaacaagaaagacaaagtttagcgggtaatgaaggtgaaattttagataaagctatctcaaaactaagaatagatgaaaggagtggagagataggagaaatttttctccacggtattatgagagaatattataatgctctacctattgttcctaaaattttttataaacaaaatcgtaatatggaagcatttggatttgatagcgttcatctaactatagaaaatcaagaataccatttgtggctaggcgaatcaaagctatataaaaacttagacgatgctataagaaaagctacaaaatctctaaaagataatctaagcgatgaaactattcttaatgaagctagaataattgcaaatctacatgaattagataatctagcaaaacatcataacatcgaaacaagcacattgacaaatttcaaacaaattattaatggaaatattaatctagataacttaaaaggtattttgcatgtgccaatatctattatttatgattgtgattacacaaaaaaaattgaggaaattaccgacgattataaaacaacgataaaaaactttcataaagaaaatggcaataaaatatcagaagagattaaaaaccttttaaatgaaattacatatatcgatagaataaaatttcacataattttatttcctattcctgataaggaggaaattattagcaaaataaataaaatctttgagagttacagaaatgccgactaa

SEQ ID NO: 58391 - DNA, 2115 bp, Campylobacter coli RM2228
atgccgactaataaacaaattggtgaaaaaatttttgataaatgtacagaaatatatgaaattctaaataatgataaagaagcagaagctaaagaaaagcttttttatttacttgatgaaattcaagataaggctttatatccgcctatattaaatcatctcattagacaatttgggttatatccctatatgaatcaagatacttcaattttagaagacaaattcttactagaatgctttaaaacagatattggagaggatgaaccaaaggttttacatagagaacaatcaagagttttaaaaagacttttaagtaatgaaagtcttatcctttctgctccaacaagttttggcaaaagctttattatcgatgctctaatagctatgaaaaaaccaaaaaatatattaatcattgtccctactatttctttgttagatgaagctagaagaagacttgtaaggaaattttataactataacataaccacaaccactcaacaaaccaatttagaaaataacaatatctttattttttctccagaaagagcagttgaatatttttcatttattaataaagaaaatatcagacttgatttttttatagttgatgagttttataaaatatcaaaggattatgaaaatgaaagatttgctccactgcaaaatgctattttgaaatatacaagtatttctgatcaaagatattatatttgccctaatatagataagataaaaaatgaaaatagcattctttgtaaaggaatgaaatttgaatgccttgatttcaatactgtttttattcatattaataaatgttataaaaataaggattttgaaaaagaagaaaaaattctagaaatagtaaaaaaagatgaaaaaactctagtttatacccaaagtcaaagcaatataaaaaaagtttgtgaaatcttggtggaaaataccattatagaaaattcaaatgctttattggaaaattttgcaaaatggttatcaaaatattacggagaacactaccttaatgatacattaaaaattggcgtgggaatacatcatggaaggcttcatagatgtctatcgcaattgcaagtaagattatttgaaggaaaagatttactaaaaaccattgtttctacatcttctttaatagaaggggttaatattccagcaaaaaatcttattttatgggataaaaaaaatggagcaaaaaatataaatcattttacttataaaaacattataggtagaagcggaagaatgtttaaatattttataggagaagtatatttatttgaatctccaaacgaagatgataatcaagaaaagatattagatgtagaaatcaaatcagaatctttatctattaatgatgagataaataatgaaatccccgataatatacaagtagaagtcgaaaacaatcaactagaaataataaaattaataggaagagataaattcaatttgcttaaaaaagaaacattgttaaaaaatgatttaggggttattataaaaataattcaaatattgcaaagcaaagattttaatagtgaaatttttacatatttatttaatgatgaacctgacaaatggtatatcttatctagaattgcgtctataagagaatttcattgtaaaaatattggtgatataaatactgttgagttggtaaaaaaattatcacaaaattggactaagtcgctaccagaacttattaaagatatgagaattgatttggatgatttttttaaatttgaaaatcatgtagcttttaaaattgcatcactattttctgatattaacactttgcaaaaaatactctatcctgaaaaagagatagatatttcaagttttgttacaaaactttcaaatgtctttttgctatctgtggtttatactcttgaagaatttggactacctagaatcatttctaaaaaacttcatgaatgtggatttattaattttgaaaataaagaattaacactagaacaagcattagataaatttaaagaacatacagccgatgatataatcaacatattaaaagaaaaaaatctttacgatgattttgaagattatatattaaattatttttatgaaggtttagggcaataa

SEQ ID NO: 58392 - DNA, 945 bp, Campylobacter coli 1417
atgcaagataacgaaatagaaaatacaacggcaataaacacctatgtgaaaaataaagacaatgataactttataataattttaaatgaaacactatgttgtcaatatcatcattttttactatctatttcaaatcaatttgaaagcaaaaagtggaaaatgaaaaattttagaaatttcattattaccaatttaaaagaatgtgctctaacagaacaagaaaggcaaagtttagcgggtaatgaaggtgaaattttagataaagctatctcaaaactaagaatagatgaaaggagtggagagataggagaaatttttctccacggtattatgagagaatattataatgctctacctattgttcctaaaattttttataaacaaaatcgtaatatggaagcatttggatttgatagcgttcatctaactatagaaaatcaagaataccatttgtggctaggcgaatcaaagctatataaaaacttagacgatgctataagaaaagctacaaaatctctaaaagataatctaagcgatgaaactattcttaatgaagctagaataattgcaaatctacatgaattagataatctagcaaaacatcataacatcgaaacaagcacattgacaaatttcaaacaaattattagtggaaatattaatctagataacttaaaaggtattttgcatgtgccaatatctattatttatgattgtgattacacaaaaaatattgaggaaattacagacgattataaaacaacgataaaaaactttcataaagaaaatggcaataaaatatcagaggaaattaaaaaccttttaaatgaaattacatatatcgatagaataaaatttcacataattttatttcctgttcctgataaggaggaaattattagcaaaataaataaaatctttgagagttacagaaatgccgactaa

SEQ ID NO: 58393 - DNA, 2115 bp, Campylobacter coli 1417
atgccgactaatgaacaaattggtgaaaaaatttttgataaatgtgtagaaatatatgaaattctaaataatgataaagaagcagaagctaaagaaaagcttttttatttacttgatgaaattcaagataaggctttatatccgcctatattaaatcatctcattagacaatttgggttatatccctatatgaatcaagatacttcaattttagaagacaaattcttactagaatgctttaaaacagatattggagaggatgaaccaaaggttttacatagagaacaatcaagagttttaaaaagacttttaagtaatgaaagtcttatcctttctgctccaacaagttttggcaaaagctttattatcgatgctctaatagctatgaaaaaaccaaaaaatatattaatcattgtccctactatttctttgttagatgaagctagaagaagacttgtaaggaaattttataactataacataaccacaaccactcaacaaaccaatttagaaaataacaatatctttattttttctccagaaagagcagttgaatatttttcatttattaataaagaaaatatcagacttgatttttttatagttgatgagttttataaaatatcaaaggattatgaaaatgaaagatttgctccactgcaaaatgctattttgaaatatacaagtatttctgatcaaagatattatatttgccctaatatagataagataaaaaatgaaaatagcattctttgtaaaggaatgaaatttgaatgccttgatttcaatactgtttttattcatattaataaatgttataaaaataaggattttgaaaaagaagaaaaaattctagaaatagtaaaaaaagatgaaaaaactctagtttatacccaaagtcaaagcaatataaaaaaagtttgtgaaatcttggtggaaaataccattatagaaaattcaaatgctttattggaaaattttgcaaaatggttatcaaaatattacggagaacactaccttaatgatacattaaaaattggcgtgggaatacatcatggaaggcttcatagatgtctatcgcaattgcaagtaagattatttgaaggaaaagatttactaaaaaccattgtttctacatcttctttaatagaaggggttaatattccagcaaaaaatcttattttatgggataaaaaaaatggagcaaaaaatataaatcattttacttataaaaacattataggtagaagcggaagaatgtttaaatattttataggagaagtatatttatttgaatctccaaacgaagatgataatcaagaaaagatattagatgtagaaatcaaatcagaatctttatctattaatgatgagataaataatgaaatccccgataatatacaagtagaagtcgaaaacaatcaactagaaataataaaattaataggaagagataaattcaatttgcttaaaaaagaaacattgttaaaaaatgatttaggggttattataaaaataattcaaatattgcaaagcaaagattttaatagtgaaatttttacatatttatttaatgatgaacctgacaaatggtatatcttatctagaattgcgtctataagagaatttcattgtaaaaatattggtgatataaatactgttgagttggtaaaaaaattatcacaaaattggactaagtcgctaccagaacttattaaagatatgagaattgatttggatgatttttttaaatttgaaaatcatgtagcttttaaaattgcatcactattttctgatattaacactttgcaaaaaatactctatcctgaaaaagagatagatatttcaagttttgttacaaaactttcaaatgtctttttgccatctgtggtttatactcttgaagaatttggactacctagaatcatttctaaaaaacttcatgaatgtggatttattaattttgaaaataaagaattaacactagaacaagcattagataaatttaaagaacatacagccgatgatataatcaacatattaaaagaaaaaaatctttacgatgattttgaagattatatattaaattatttttatgaaggtttagggcaataa

SEQ ID NO: 58394 - DNA, 945 bp, Campylobacter coli LMG 23336
atgcaagataacgaaatagaaaatacaacggcaataaacacctatgtgaaaaataaagataatgataactttataataattttaaatgaaacactatgttgtcaatatcatcattttttactatctatttcaaatcaatttgaaagcaaaaagtggaaaatgaaaaattttagaaatttcattattaccaatttaaaagaatgtgctctaacagaacaagaaaggcaaagtttagcgggtaatgaaggtgaaattttagataaagctatctcaaaactaagaatagatgaaaggagtggagagataggagaaatttttctccacggtattatgagagaatattataatgctctacctattgttcctaaaattttttataaacaaaatcgtaatatggaagcatttggatttgatagcgttcatctaactatagaaaatcaagaataccatttgtggctaggcgaatcaaagctatataaaaacttagacgatgctataagaaaagctacaaaatctctaaaagataatctaagcgatgaaactattcttaatgaagctagaataattgcaaatctacatgaattagataatctagcaaaacatcataacatcgaaacaagtacattgacaaatttcaaacaaattattaatggaaatattaatctagataacttaaaaggtattttgcatgtgccaatatctattatttatgattgtgattacacaaaaaaaattgaggaaattaccgacgattataaaacaacgataaaaaactttcataaagaaaatggcaataaaatatcagaagagattaaaaaccttttaaatgaaattacatatatcgatagaataaaatttcacataattttatttcctattcctgataaggaggaaattattagcaaaataaataaaatctttgagagttacagaaatgccgactaa

SEQ ID NO: 58395 - DNA, 2115 bp, Campylobacter coli LMG 23336
atgccgactaataaacaaattggtgaaaaaatttttgataaatgtacagaaatatatgaaattctaaataatgataaagaagcagaagctaaagaaaagcttttttatttacttgatgaaattcaagataaggctttatatccgcctatattaaatcatctcattagacaatttgggttatatccctatatgaatcaagatacttcaattttagaagacaaattcttactagaatgctttaaaacagatattggagaggatgaaccaaaggttttacatagagaacaatcaagagttttaaaaagacttttaagtaatgaaagtcttatcctttctgctccaacaagttttggcaaaagctttattatcgatgctctaatagctatgaaaaaaccaaaaaatatattaatcattgtccctactatttctttgttagatgaagctagaagaagacttgtaaggaaattttataactataacataaccacaaccactcaacaaaccaatttagaaaataacaatatctttattttttctccagaaagagcagttgaatatttttcatttattaataaagaaaatatcagacttgatttttttatagttgatgagttttataaaatatcaaaggattatgaaaatgaaagatttgctccactgcaaaatgctattttgaaatatacaagtatttctgatcaaagatattatatttgccctaatatagataagataaaaaatgaaaatagcattctttgtaaaggaatgaaatttgaatgccttgatttcaatactgtttttattcatattaataaatgttataaaaataaggattttgaaaaagaagaaaaaattctagaaatagtaaaaaaagatgaaaaaactctagtttatacccaaagtcaaagcaatataaaaaaagtttgtgaaatcttggtggaaaataccattatagaaaattcaaatgctttattggaaaattttgcaaaatggttatcaaaatattacggagaacactaccttaatgatacattaaaaattggcgtgggaatacatcatggaaggcttcatagatgtctatcgcaattgcaagtaagattatttgaaggaaaagatttactaaaaaccattgtttctacatcttctttaatagaaggggttaatattccagcaaaaaatcttattttatgggataaaaaaaatggagcaaaaaatataaatcattttacttataaaaacattataggtagaagcggaagaatgtttaaatattttataggagaagtatatttatttgaatctccaaacgaagatgataatcaagaaaagatattagatgtagaaatcaaatcagaatctttatctattaatgatgagataaataatgaaatccccgataatatacaagtagaagtcgaaaacaatcaactagaaataataaaattaataggaagagataaattcaatttgcttaaaaaagaaacattgttaaaaaatgatttaggggttattataaaaataattcaaatattgcaaagcaaagattttaatagtgaaatttttacatatttatttaatgatgaacctgacaaatggtatatcttatctagaattgcgtctataagagaatttcattgtaaaaatattggtgatataaatactgttgagttggtaaaaaaattatcacaaaattggactaagtcgctaccagaacttattaaagatatgagaattgatttggatgatttttttaaatttgaaaatcatgtagcttttaaaattgcatcactattttctgatattaacactttgcaaaaaatactctatcctgaaaaagagatagatatttcaagttttgttacaaaactttcaaatgtttttttgccatctgtggtttatactcttgaagaatttggactacctagaatcatttctaaaaaacttcatgaatgtggatttattaattttgaaaataaagaattaacactagaacaagcattagataaatttaaagaatatacagccgatgatataatcaacatattaaaagaaaaaaatctttacgatgattttgaagattatatattaaattatttttatgaaggtttaggacaataa

SEQ ID NO: 58396 - DNA, 942 bp, Campylobacter coli LMG 23344
atgcaagataaagagatagaaaatacaacaacaataaacacctatgtaaaaaataaagataatgataactttataataattttaaatgaaacactatgttgtcaatatcattttttactatctatttcaaatcaatttgaaagcaaaaagtggaaaatgaaaaattttagaaatttcattattactaatttaaaagaatgtgctctaacagaacaagaaagacaaagtttagcgggtaatgaaggtgaaattttagataaagctatctcaaaactaagaatagatgaaaggagtggagagataggagaaatttttctccacggtattatgagagaatattataatgctctacctattgttcctaaaattttttataaacaaaatcgtaatatggaagcatttggatttgatagcgttcatctaactatagaaaatcaagaataccatttgtggctaggcgaatcaaagctatataaaaacttagacgatgctataagaaaagctacaaaatctctaaaagataatctaagcgatgaaactattcttaatgaagctagaataattgcaaatctacatgaattagataatctagcaaaacatcataacatcgaaacaagcacattgacaaatttcaaacaaattattaatggaaatattaatctagataacttaaaaggtattttgcatgtgccaatatctattatttatgattgtgattacacaaaaaaaattgaggaaattaccgacgattataaaacaacgataaaaaactttcataaagaaaatggcaataaaatatcagaagagattaaaaaccttttaaatgaaattacatatatcgatagaataaaatttcacataattttatttcctattcctgataaggaggaaattattagcaaaataaataaaatctttgagagttacagaaatgccgactaa

SEQ ID NO: 58397 - DNA, 2115 bp, Campylobacter coli LMG 23344
atgccgactaataaacaaattggtgaaaaaatttttgataaatgtacagaaatatatgaaattctaaataatgataaagaagcagaagctaaagaaaagcttttttatttacttgatgaaattcaagataaggctttatatccgcctatattaaatcatctcattagacaatttgggttatatccctatatgaatcaagatacttcaattttagaagacaaattcttactagaatgctttaaaacagatattggagaggatgaaccaaaggttttacatagagaacaatcaagagttttaaaaagacttttaagtaatgaaagtcttatcctttctgctccaacaagttttggcaaaagctttattatcgatgctctaatagctatgaaaaaaccaaaaaatatattaatcattgtccctactatttctttgttagatgaagctagaagaagacttgtaaggaaattttataactataacataaccacaaccactcaacaaaccaatttagaaaataacaatatctttattttttctccagaaagagcagttgaatatttttcatttattaataaagaaaatatcagacttgatttttttatagttgatgagttttataaaatatcaaaggattatgaaaatgaaagatttgctccactgcaaaatgctattttaaaatatacaagtatttctgatcaaagatattatatttgccctaatatagataagataaaaaatgaaaatagcattctttgtaaaggaatgaaatttgaatgccttgatttcaatactgtttttattcatattaataaatgttataaaaataaggattttaaaaaagaagaaaaaattctagaaatagtaaaaaaagatgaaaaaactctagtttatacccaaagtcaaagcaatataaaaaaagtttgtgaaatcttggtggaaaataccattatagaaaattcaaatgctttattggaaaattttgcaaaatggttatcaaaatattacggagaacactaccttaatgatacattaaaaattggcgtgggaatacatcatggaaggcttcatagatgtctatcgcaattgcaagtaagattatttgaaggaaaagatttactaaaaaccattgtttctacatcttctttaatagaaggggttaatattccagcaaaaaatcttattttatgggataaaaaaaatggagcaaaaaatataaatcattttacttataaaaacattataggtagaagcggaagaatgtttaaatattttataggagaagtatatttatttgaatctccaaacgaagatgataatcaagaaaagatattagatgtagaaatcaaatcagaatctttatctattaatgatgagataaataatgaaatccccgataatatacaagtagaagtcgaaaacaatcaactagaaataataaaattaataggaagagataaattcaatttgcttaaaaaagaaacattgttaaaaaatgatttaggggttattataaaaataattcaaatattgcaaagcaaagattttaatagtgaaatttttacatatttatttaatgatgaacctgacaaatggtatatcttatctagaattgcgtctataagagaatttcattgtaaaaatattggtgatataaatactgttgagttggtaaaaaaattatcacaaaattggactaagtcgctaccagaacttattaaagatatgagaattgatttggatgatttttttaaatttgaaaatcatgtagcttttaaaattgcatcactattttctgatattaacactttgcaaaaaatactctatcctgaaaaagagatagatatttcaagttttgttacaaaactttcaaatgtttttttgccatctgtggtttatactcttgaagaatttggactacctagaatcatttctaaaaaacttcatgaatgtggatttattaattttgaaaataaagaattaacactagaacaagcattagataaatttaaagaatatacagccgatgatataatcaacatattaaaagaaaaaaatctttgcgatgattttgaagattatatattaaattatttttatgaaggtttaggacaataa

SEQ ID NO: 58398 - DNA, 945 bp, Campylobacter coli H6; identical to SEQ ID NO: 58394

SEQ ID NO: 58399 - DNA, 2115 bp, Campylobacter coli H6; identical to SEQ ID NO: 58395

SEQ ID NO: 58400 - DNA, 945 bp, Campylobacter coli H8; identical to SEQ ID NO: 58394

SEQ ID NO: 58401 - DNA, 2115 bp, Campylobacter coli H8; identical to SEQ ID NO: 58395

SEQ ID NO: 58402 - DNA, 945 bp, Campylobacter coli H9
atgcaagataacgaaatagaaaatacaacggcaataaacacctatgtgaaaaataaagataatgataactttataataattttaaatgaaacactatgttgtcaatatcatcattttttactatctatttcaaatcaatttgaaagcaaaaagtggaaaatgaaaaattttagaaatttcattattaccaatttaaaagaatgtgctctaacagaacaagaaaggcaaagtttagcgggtaatgaaggtgaaattttagataaagctatctcaaaactaagaatagatgaaaggagtggagagataggagaaatttttctccacggtattatgagagaatattataatgctctacctattgttcctaaaattttttataaacaaaatcgtaatatggaagcatttggatttgatagcgttcatctaactatagaaaatcaagaataccatttgtggctaggcgaatcaaagctatataaaaacttagacgatgctataagaaaagctacaaaatctctaaaagataatctaagcgatgaaactattcttaatgaagctagaataattgcaaatctacatgaattagataatctagcaaaacatcataacatcgaaacaagcacattgacaaatttcaaacaaattattaatggaaatattaatctagataacttaaaaggtattttgcatgtgccaatatctattatttatgattgtgattacacaaaaaaaattgaggaaattaccgacgattataaaacaacgataaaaaactttcataaagaaaatggcaataaaatatcagaagagattaaaaaccttttaaatgaaattacatatatcgatagaataaaatttcacataattttatttcctattcctgataaggaggaaattattagcaaaataaataaaatctttgagagttacagaaatgccgactaa

SEQ ID NO: 58403 - DNA, 2115 bp, Campylobacter coli H9; identical to SEQ ID NO: 58395

SEQ ID NO: 58404 - DNA, 945 bp, Campylobacter coli K3
atgcaagataaagagatagaaaatacaacaacaataaacacctatgtaaaaaataaagataatgataactttataataattttaaatgaaacactatgttgtcaatatcatcattttttactatctatttcaaatcaatttgaaagcaaaaagtggaaaatgaaaaattttagaaatttcattattactaatttaaaagaatgtgctctaacagaacaagaaagacaaagtttagcgggtaatgaaggtgaaattttagataaagctatctcaaaactaagaatagatgaaaggagtggagagataggagaaatttttctccacggtattatgagagaatattataatgctctacctattgttcctaaaattttttataaacaaaatcgtaatatggaagcatttggatttgatagcgttcatctaactatagaaaatcaagaataccatttgtggctaggcgaatcaaagctatataaaaacttagacgatgctataagaaaagctacaaaatctctaaaagataatctaagcgatgaaactattcttaatgaagctagaataattgcaaatctacatgaattagataatctagcaaaacatcataacatcgaaacaagcacattgacaaatttcaaacaaattattagtggaaatattaatctagataacttaaaaggtattttgcatgtgccaatatctattatttatgattgtgattacacaaaaaatattgaggaaattacagacgattataaaacaacgataaaaaactttcataaagaaaatggcaataaaatatcagaggaaattaaaaaccttttaaatgaaattacatatatcgatagaataaaatttcacataattttatttcctgttcctgataaggaggaaattattagcaaaataaataaaatctttgagagttacagaaatgccgactaa

SEQ ID NO: 58405 - DNA, 2130 bp, Campylobacter coli K3
ttgagagttacagaaatgccgactaatgaacaaattggtgaaaaaatttttgataaatgtgtagaaatatatgaaattctaaataatgataaagaagcagaagctaaagaaaagcttttttatttacttgatgaaattcaagataaggctttatatccgcctatattaaatcatctcattagacaatttggattatatccctatatgaatcaagatacttcaattttagaagacaaattcttactagaatgttttaaagcaaatatcggagaagacgaaccaaaagttttacatagagaacaatcaagagttttaaaaagacttttaagtaatgaaagtcttattctttctgctccaacaagttttggcaaaagctttattatcgatgctctaatagctatgaaaaaaccaaaaaatatattaatcattgtccctactatttctttgttagatgaagctagaagaagacttgtaaggaaattttataactataacataaccacaaccactcaacaaaccaatttagaaaataacaatatctttattttttctccagaaagagcagttgaatatttttcatttattaataaagaaaatatcagacttgatttttttatagttgatgagttttataaaatatcaaaggattatgaaaatgaaagatttgctccactgcaaaatgctattttgaaatatacaagtatttctgatcaaagatattatatttgccctaatatagataagataaaaaatgaaaatagcattctttgtaaaggaatgaaatttgaatgccttgatttcaatactgtttttattcatattaataaatgttataaaaataaggattttaaaaaagaagaaaaaattctagaaatagtaaaaaaagatgaaaaaactctagtttatacccaaagtcaaagcaatataaaaaaagtttgtgaaatcttggtggaaaataccattatagaaaattcaaatgctttattggaaaattttgcaaaatggttatcaaaatattacggagaacactaccttaatgatacattaaaaattggcgtgggaatacatcatggaaggcttcatagatgtctatcgcaattgcaagtaagattatttgaaggaaaagatttactaaaaaccattgtttctacatcttctttaatagaaggggttaatattccagcaaaaaatcttattttatgggataaaaaaaatggagcaaaaaatataaatcattttacttataaaaacattataggtagaagcggaagaatgtttaaatattttataggagaagtatatttatttgaatctccaaacgaagatgataatcaagaaaagatattagatgtagaaatcaaatcagaatctttatctattaatgatgagataaataatgaaatccccgataatatacaagtagaagtcgaaaacaatcaactagaaataataaaattaataggaagagataaattcaatttgcttaaaaaagaaacattgttaaaaaatgatttaggggttattataaaaataattcaaatattgcaaagcaaagattttaatagtgaaatttttacatatttatttaatgatgaacctgacaaatggtatatcttatctagaattgcgtctataagagaatttcattgtaaaaatattggtgatataaatactgttgagttggtaaaaaaattatcacaaaattggactaagtcgctaccagaacttattaaagatatgagaattgatttggatgatttttttaaatttgaaaatcatgtagcttttaaaattgcatcactattttctgatattaacactttgcaaaaaatactctatcctgaaaaagagatagatatttcaagttttgttacaaaactttcaaatgtttttttgccatctgtggtttatactcttgaagaatttggactacctagaatcatttctaaaaaacttcatgaatgtggatttattaattttgaaaataaagaattaacactagaacaagcattagataaatttaaagaatatacagccgatgatataatcaacatattaaaagaaaaaaatctttacgatgattttgaagattatatattaaattatttttatgaaggtttaggacaataa

SEQ ID NO: 58406 - DNA, 945 bp, Campylobacter coli K7; identical to SEQ ID NO: 58404

SEQ ID NO: 58407 - DNA, 2130 bp, Campylobacter coli K7; identical to SEQ ID NO: 58405

SEQ ID NO: 58408 - DNA, 945 bp, Campylobacter coli IPSID-1
atgcaagataaagagatagaaaatacaacaacaataaacacctatgtaaaaaataaagataatgataactttataataattttaaatgaaacactatgttgtcaatatcatcattttttactatctatttcaaatcaatttgaaagcaaaaagtggaaaatgaaaaattttagaaatttcattattactaatttaaaagaatgtgctctaacagaacaagaaagacaaagtttagcgggtaatgaaggtgaaattttagataaagctatctcaaaactaagaatagatgaaaggagtggagagataggagaaatttttctccacggtattatgagagaatattataatgctctacctattgttcctaaaattttttataaacaaaatcgtaatatggaagcatttggatttgatagcgttcatctaactatagaaaatcaagaataccatttgtggctaggcgaatcaaagctatataaaaacttagacgatgctataagaaaagctacaaaatctctaaaagataatctaagcgatgaaactattcttaatgaagctagaataattgcaaatctacatgaattagataatctagcaaaacatcataacatcgaaacaagcacattgacaaatttcaaacaaattattaatggaaatattaatctagataacttaaaaggtattttgcatgtgccaatatctattatttatgattgtgattacacaaaaaaaattgaggaaattaccgacgattataaaacaacgataaaaaactttcataaagaaaatggcaataaaatatcagaagagattaaaaaccttttaaatgaaattacatatatcgatagaataaaatttcacataattttatttcctattcctgataaggaggaaattattagcaaaataaataaaatctttgagagttacagaaatgccgactaa

SEQ ID NO: 58409 - DNA, 2115 bp, Campylobacter coli IPSID-1; identical to SEQ ID NO: 58395

SEQ ID NO: 58410 - DNA, 945 bp, Campylobacter coli; identical to SEQ ID NO: 58402

SEQ ID NO: 58411 - DNA, 2115 bp, Campylobacter coli; identical to SEQ ID NO: 58395

SEQ ID NO: 58412 - DNA, 945 bp, Campylobacter coli; identical to SEQ ID NO: 58402

SEQ ID NO: 58413 - DNA, 2115 bp, Campylobacter coli; identical to SEQ ID NO: 58395

SEQ ID NO: 58414 - DNA, 945 bp, Campylobacter coli; identical to SEQ ID NO: 58392

SEQ ID NO: 58415 - DNA, 2115 bp, Campylobacter coli; identical to SEQ ID NO: 58393

SEQ ID NO: 58416 - DNA, 945 bp, Campylobacter coli CVM N13165; identical to SEQ ID NO: 58392

SEQ ID NO: 58417 - DNA, 2115 bp, Campylobacter coli CVM N13165; identical to SEQ ID NO: 58393

SEQ ID NO: 58418 - DNA, 945 bp, Campylobacter coli; identical to SEQ ID NO: 58402

SEQ ID NO: 58419 - DNA, 2115 bp, Campylobacter coli; identical to SEQ ID NO: 58395

SEQ ID NO: 58420 - DNA, 945 bp, Campylobacter coli; identical to SEQ ID NO: 58402

SEQ ID NO: 58421 - DNA, 2115 bp, Campylobacter coli; identical to SEQ ID NO: 58395

SEQ ID NO: 58422 - DNA, 945 bp, Campylobacter coli; identical to SEQ ID NO: 58402

SEQ ID NO: 58423 - DNA, 2115 bp, Campylobacter coli
atgccgactaataaacaaattggtgaaaaaatttttgataaatgtacagaaatatatgaaattctaaataatgataaagaagcagaagctaaagaaaagcttttttatttacttgatgaaattcaagataaggctttatatccgcctatattaaatcatctcattagacaatttgggttatatccctatatgaatcaagatacttcaattttagaagacaaattcttactagaatgctttaaaacagatattggagaggatgaaccaaaggttttacatagagaacaatcaagagttttaaaaagacttttaagtaatgaaagtcttatcctttctgctccaacaagttttggcaaaagctttattatcgatgctctaatagctatgaaaaaaccaaaaaatatattaatcattgtccctactatttctttgttagatgaagctagaagaagacttgtaaggaaattttataactataacataaccacaaccactcaacaaaccaatttagaaaataacaatatctttattttttctccagaaagagcagttgaatatttttcatttattaataaagaaaatatcagacttgatttttttatagttgatgagttttataaaatatcaaaggattatgaaaatgaaagatttgctccactgcaaaatgctattttgaaatatacaagtatttctgatcaaagatattatatttgccctaatatagataagataaaaaatgaaaatagcattctttgtaaaggaatgaaatttgaatgccttgatttcaatactgtttttattcatattaataaatgttataaaaataaggattttgaaaaagaagaaaaaattctagaaatagtaaaaaaagatgaaaaaactctagtttatacccaaagtcaaagcaatataaaaaaagtttgtgaaatcttggtggaaaataccattatagaaaattcaaatgctttattggaaaattttgcaaaatggttatcaaaatattacggagaacactaccttaatgatacattaaaaattggcgtgggaatacatcatggaaggcttcatagatgtctatcgcaattgcaagtaagattatttgaaggaaaagatttactaaaaaccattgtttctacatcttctttaatagaaggggttaatattccagcaaaaaatcttattttatgggataaaaaaaatggagcaaaaaatataaatcattttacttataaaaacattataggtagaagcggaagaatgtttaaatattttataggagaagtatatttatttgaatctccaaacgaagatgataatcaagaaaagatattagatgtagaaatcaaatcagaatctttatctattaatgatgagataaataatgaaatccccgataatatacaagtagaagtcgaaaacaatcaactagaaataataaaattaataggaagagataaattcaatttgcttaaaaaagaaacattgttaaaaaatgatttaggagttattataaaaataattcaaatattgcaaagcaaagattttaatagtgaaatttttacatatttatttaatgatgaacctgacaaatggtatatcttatctagaattgcgtctataagagaatttcattgtaaaaatattggtgatataaatactgttgagttggtaaaaaaattatcacaaaattggactaagtcgctaccagaacttattaaagatatgagaattgatttggatgatttttttaaatttgaaaatcatgtagcttttaaaattgcatcactattttctgatattaacactttgcaaaaaatactctatcctgaaaaagagatagatatttcaagttttgttacaaaactttcaaatgtttttttgccatctgtggtttatactcttgaagaatttggactacctagaatcatttctaaaaaacttcatgaatgtggatttattaattttgaaaataaagaattaacactagaacaagcattagataaatttaaagaatatacagccgatgatataatcaacatattaaaagaaaaaaatctttacgatgattttgaagattatatattaaattatttttatgaaggtttaggacaataa

SEQ ID NO: 58424 - DNA, 945 bp, Campylobacter coli; identical to SEQ ID NO: 58394

SEQ ID NO: 58425 - DNA, 2115 bp, Campylobacter coli
atgccgactaataaacaaattggtgaaaaaatttttgataaatgtacagaaatatatgaaattctaaataatgataaagaagcagaagctaaagaaaagcttttttatttacttgatgaaattcaagataaggctttatatccgcctatattaaatcatctcattagacaatttgggttatatccctatatgaatcaagatacttcaattttagaagacaaattcttactagaatgctttaaaacagatattggagaggatgaaccaaaggttttacatagagaacaatcaagagttttaaaaagacttttaagtaatgaaagtcttatcctttctgctccaacaagttttggcaaaagctttattatcgatgctctaatagctatgaaaaaaccaaaaaatatattaatcattgtccctactatttctttgttagatgaagctagaagaagacttgtaaggaaattttataactataacataaccacaaccactcaacaaaccaatttagaaaataacaatatctttattttttctccagaaagagcagttgaatatttttcatttattaataaagaaaatatcagacttgatttttttatagttgatgagttttataaaatatcaaaggattatgaaaatgaaagatttgctccactgcaaaatgctattttgaaatatacaagtacttctgatcaaagatattatatttgccctaatatagataagataaaaaatgaaaatagcattctttgtaaaggaatgaaatttgaatgccttgatttcaatactgtttttattcatattaataaatgttataaaaataaggattttgaaaaagaagaaaaaattctagaaatagtaaaaaaagatgaaaaaactctagtttatacccaaagtcaaagcaatataaaaaaagtttgtgaaatcttggtggaaaataccattatagaaaattcaaatgctttattggaaaattttgcaaaatggttatcaaaatattacggagaacactaccttaatgatacattaaaaattggcgtgggaatacatcatggaaggcttcatagatgtctatcgcaattgcaagtaagattatttgaaggaaaagatttactaaaaaccattgtttctacatcttctttaatagaaggggttaatattccagcaaaaaatcttattttatgggataaaaaaaatggagcaaaaaatataaatcattttacttataaaaacattataggtagaagcggaagaatgtttaaatattttataggagaagtatatttatttgaatctccaaacgaagatgataatcaagaaaagatattagatgtagaaatcaaatcagaatctttatctattaatgatgagataaataatgaaatccccgataatatacaagtagaagtcgaaaacaatcaactagaaataataaaattaataggaagagataaattcaatttgcttaaaaaagaaacattgttaaaaaatgatttaggagttattataaaaataattcaaatattgcaaagcaaagattttaatagtgaaatttttacatatttatttaatgatgaacctgacaaatggtatatcttatctagaattgcgtctataagagaatttcattgtaaaaatattggtgatataaatactgttgagttggtaaaaaaattatcacaaaattggactaagtcgctaccagaacttattaaagatatgagaattgatttggatgatttttttaaatttgaaaatcatgtagcttttaaaattgcatcactattttctgatattaacactttgcaaaaaatactctatcctgaaaaagagatagatatttcaagttttgttacaaaactttcaaatgtttttttgccatctgtggtttatactcttgaagaatttggactacctagaatcatttctaaaaaacttcatgaatgtggatttattaattttgaaaataaagaattaacactagaacaagcattagataaatttaaagaatatacagccgatgatataatcaacatattaaaagaaaaaaatctttacgatgattttgaagattatatattaaattatttttatgaaggtttaggacaataa

SEQ ID NO: 58426 - DNA, 945 bp, Campylobacter coli; identical to SEQ ID NO: 58390

SEQ ID NO: 58427 - DNA, 2115 bp, Campylobacter coli; identical to SEQ ID NO: 58391

SEQ ID NO: 58428 - DNA, 945 bp, Campylobacter coli; identical to SEQ ID NO: 58408

SEQ ID NO: 58429 - DNA, 2115 bp, Campylobacter coli
atgccgactaataaacaaattggtgaaaaaatttttgataaatgtacagaaatatatgaaattctaaataatgataaagaagcagaagctaaagaaaagcttttttatttacttgatgaaattcaagataaggctttatatccgcctatattaaatcatctcattagacaatttgggttatatccctatatgaatcaagatacttcaattttagaagacaaattcttactagaatgctttaaaacagatattggagaggatgaaccaaaggttttacatagagaacaatcaagagttttaaaaagacttttaagtaatgaaagtcttatcctttctgctccaacaagttttggcaaaagctttattatcgatgctctaatagctatgaaaaaaccaaaaaatatattaatcattgtccctactatttctttgttagatgaagctagaagaagacttgtaaggaaattttataactataacataaccacaaccactcaacaaaccaatttagaaaataacaatatctttattttttctccagaaagagcagttgaatatttttcatttattaataaagaaaatatcagacttgatttttttatagttgatgagttttataaaatatcaaaggattatgaaaatgaaagatttgctccactgcaaaatgctattttgaaatatacaagtatttctgatcaaagatattatatttgccctaatatagataagataaaaaatgaaaatagcattctttgtaaaggaatgaaatttgaatgccttgatttcaatactgtttttattcatattaataaatgttataaaaataaggattttgaaaaagaagaaaaaattctagaaatagtaaaaaaagatgaaaaaactctagtttatacccaaagtcaaagcaatataaaaaaagtttgtgaaatcttggtggaaaataccattatagaaaattcaaatgctttattggaaaattttgcaaaatggttatcaaaatattacggagaacactaccttaatgatacattaaaaattggcgtgggaatacatcatggaaggcttcatagatgtctatcgcaattgcaagtaagattatttgaaggaaaagatttactaaaaaccattgtttctacatcttctttaatagaaggggttaatattccagcaaaaaatcttattttatgggataaaaaaaatggagcaaaaaatataaatcattttacttataaaaacattataggtagaagcggaagaatgtttaaatattttataggagaagtatatttatttgaatctccaaacgaagatgataatcaagaaaagatattagatgtagaaatcaaatcagaatctttatctattaatgatgagataaataatgaaatccccgataatatacaagtagaagtcgaaaacaatcaactagaaataataaaattaataggaagagataaattcaatttgcttaaaaaagaaacattgttaaaaaatgatttaggagttattataaaaataattcaaatattgcaaagcaaagattttaatagtgaaatttttacatatttatttaatgatgaacctgacaaatggtatatcttatctagaattgcgtctataagagaatttcattgtaaaaatattggtgatataaatactgttgagttggtaaaaaaattatcacaaaattggactaagtcgctaccagaacttattaaagatatgagaattgatttggatgatttttttaaatttgaaaatcatgtagcttttaaaattgcatcactattttctgatattaacactttgcaaaaaatactctatcctgaaaaagagatagatatttcaagttttgttacaaaactttcaaatgtttttttgccatctgtggtttatactcttgaagaatttggactacctagaatcatttctaaaaaacttcatgaatgtggatttattaattttgaaaataaagaattaacactagaacaagcattagataaatttaaagaatatacagccgatgatataatcaacatattaaaagaaaaaaatctttacgatgattttgaagattatatattaaattatttttatgaaggtttagggcaataa

SEQ ID NO: 58430 - DNA, 945 bp, Campylobacter coli; identical to SEQ ID NO: 58394

SEQ ID NO: 58431 - DNA, 2115 bp, Campylobacter coli; identical to SEQ ID NO: 58395

SEQ ID NO: 58432 - DNA, 945 bp, Campylobacter coli; identical to SEQ ID NO: 58402

SEQ ID NO: 58433 - DNA, 2115 bp, Campylobacter coli; identical to SEQ ID NO: 58395

SEQ ID NO: 58434 - DNA, 945 bp, Campylobacter jejuni subsp. jejuni ATCC 33560
atgcagggcaaagagatagaaaatataacaacaataaacacttatgtgaaaaataaagataatagtaattttacaataatgttaaatgaaacactatgtcgtcaatatcatcattttttactatctatttcaaatcaatttgaaagcaaaaagtggaaaatgaaaaattttagaaattttattattactaatttaaaagagtgtgctttaacagaacaagaaaggcaaagtttagcaggcaacgaaggcgaaattttagataaagctatctcaaaactaaaaatagatgacaaaagtggagaggtaggagaaatttttctccatggtatcatgagagaatattacaatgctctatccattgtgcctaagatttttcataaacaaaatcgtaatatggaggcattaggatttgatagcgtccatctaactatagaaaaccaagaatgccatttgtggctaggcgaatcaaagctatatgataatttaaatggagctataacaaatgttataaaatctataaaagacaatttaagtgacgaaatcattcttaatgaagctagaataattgcaaatccacatgaattagataatctagcagaacatcataatattcagacaagcacattgacaaatttcaagaaaattattaatgggaatattaatcttgatgaattaaaaagcattttacatgtgccaatatctattatttacgattgtaattatacaaaaagcattgaggaaattaccgacgattataaaacagcgataaaaaactttcataagaaaaatggcaataaaatatcagagaaaatcaaaaaactttcaaatgaaattacatatatcgatagaataaaatttcacataattttatttcctgttcctgataagaaggaaattatgagcaaaataaatcaaatttttaggagttatagaaatgctaactaa

SEQ ID NO: 58435 - DNA, 2121 bp, Campylobacter jejuni subsp. jejuni ATCC 33560
atgctaactaacgaacaaatttttgatgaatgtgtaaagatatatgaaaatctaaatgataacaacaaagaaacagaagctaaagaaaagcttttttatttgcttgatgaaattcaagataaagctttatatccacctatattaaatcatcttatcagacaatttgggttatatccctatatgaatcaagatacttcaattttaacagatagattcttactagaatgctttaaaacagatatcggagaagatgaaccaaaagttttacatagagaacaatcaagagttttaaaaagacttttaagcaatgaaagtcttattctttctgctccaacaagttttggcaaaagctttattatcgatgctctaatagctatgaaaaagccaaaaaatgtattaatcattgtccctactatttctttgttagatgaagctagaagaagacttgtaaggaaatttacacctgattacaacataattacaacatcgggtgctgctccaaaagaaaataatatattcatattaacccaagaaagagttttggaatatttagactttataaaagccaatagaattgatttatttatcgtagatgagttttataaaattgtcggggatataacaaggtcagatatcttacaaaatgcaataaagcaagtaagttcttattccaaacaatcatactatctgtgtccaaatgtcaaacaatttaaagaaaattcattaaaatatcaatttttgaaaaatatagaaaaagtctcaattgattttaatactgtaatattaaacatacatgatttaagccacaaaaaagaaaagaaagaatatatattaaaaaacatattaaatgaaaataaaaatcaaaaaacaatgatttatgtaaaaagcaaaccagaatcaagagaagtttgcaagtatataaaagaatatgttactacaaataatgatcaattaaacaacttttcaaattggttaaaaaagcattattggcaagactgggactttgctaactatttagcaaatggtataggacaacacaattccgctatgcatagatttatccaacaacttcaagttaaactattttcagaaaatgaatatatgaatattatggcaactaccacttctttaatagaaggtgtaaataccgcaacaaaaaatataattatatggaatgattctgttgaggggaataaagataaattaacaagtatgcaatataaaaatattataggtagatgcgggagaatgtttaaatattttgttggtaatgtatatttattagaaagcaacaaagaaacattaaaaaatgagcaagaaactatggaaataattcctcaagaagaatttttatacagaaacgacttagaaacatttgatgtaaaaacagaaatggaaaaaaacttaaaaaacttacttaataatgaaaacaaatttcatcaaattatgtcaaaaatgaaaaattacactattttaatggatttagaaagtattgtaacaattgttaaaaatgccgaactttttgaaaaaagcattagatatttaaatagcgataaacctgatgaatggggatttatcaaaaagaaagagatacaagagattgtttttgaaatattgaatgagaaatctaaaaatgcttattttaaaataattgattatggcaaatataattattgtggtgtaaaacaaaccatcgataatataaacaaaaaagcaagacaagagtggtataaaattgacattaataaatattttaatattgagagaataattagttttgatattgctagttttttcaatgatttaaaccaaattatgcaaatactctatcctgaaaaaaagatagatatttcaagttttgttacaaaactttcaaatgtctttttaccatcagtggtatatactcttgaagaatttgggttacctagaatcatttctaaaaaacttcaccaatgtggatttattgattttgaaaataatgatttaacaatagagcaagcgttaaacaaatttaaagaatgcacagctattgatacagttaatattctaaaagaaaatagtctatatgatgattttgaagactatatattaaattatttttatgatggcttaggacaataa

SEQ ID NO: 58436 - DNA, 945 bp, Campylobacter jejuni subsp. jejuni 140-16
atgcagggcaaagagatagaaaatataacaacaataaacacttatgtgaaaaataaagataatagtaattttacaataatgttaaatgaaacactatgtcgtcaatatcatcattttttactatctatttcaaatcaatttgaaagcaaaaagtggaaaatgaaaaattttagaaattttattataaataatttaaaagagtgtgctttaacagaacaagaaaggcaaagtttagcaggcaacgaaggcgaaattttagataaagctatctcaaaactaaaaatagatgacaaaagtggagaggtaggagaaatttttctccatggtatcatgagagaatattacaatgctctatccattgcgcctaagatttttcataaacaaagtcgtaatatggaggcattaggatttgatagcgtccatctaactatagaaaaccaagaatgccatttgtggctaggcgaatcaaagctatatgataatttaaatggagctataacaaatgttataaaatctataaaagacaatttaagtgacgaaatcattcttaatgaagctagaataattgcaaatccacatgaattagataatctagcagaacatcataatattcagacaagcacattgacaaatttcaagaaaattattaatgggaatattaatcttgatgaattaaaaagcattttacatgtgccaatatctattatttacgattgtaattatacaaaaagcattgaggaaattaccgacgattataaaacagcgataaaaaactttcataagaaaaatggcaataaaatatcagagaaaatcaaaaaactttcaaatgaaattacatatatcgatagaataaaatttcacataattttatttcctgttcctgataagaaggaaattatgagcaaaataaatcaaatttttaggagttatagaaatgctaactaa

SEQ ID NO: 58437 - DNA, 2106 bp, Campylobacter jejuni subsp. jejuni 140-16
atgctaactaacgaacaaatttttgatgaatgtgtaaggatacatgaaaatctaaatgataacaaagaaacagaagctaaagaaaagcttttttatttacttgatgaaattcaagataaggctttatatccgcctatattaaatcatcttatcagacaatttgggttatatccctatatgaatcaagatacttcaattttaacagatagattcttgctagaatgttttaaaacagatattggagaggatgaaccaaaagttttacatagagaacaatcaagagttttaaaaagacttttaagcaatgaaagtcttattctttctgctccaacaagttttggtaaaagctttattatcgatgctctaatagctatgaaaaagccaaaaaatgtattaatcattgtccctactatttctttgttagatgaagctagaagaagacttgtaaggaaatttacacctgattacaacataattacaacatcgggtgctaccccaaaagaaaataatatatttatattaacccaagaaagagttttggaatatttagactttataaaagccaatagaattgatttatttatcgtagatgagttttataaaattgtaggggatgtaaggtcagatattttacaaaatataataaagcaagtaagttcttattccaaacaatcatactatctgtgtccaaatatcaaacaatttaatgaaaaatcatcgaaatatcaatttttaaaaaatatagaaaaagtcctaattgattttaatactgtagcattaaaaacacatgatttaagccacaaaaaagaaaagaaagaatatatgttaaaaaacatattaaatgaaaataaaaatcaaaaaacaatgatttatataaaaagcaaatcagaatcaaaaaaggtttgcaaaaatataaaaaactatattaatgcaacagataatcaattaaaaagtttttcaaattggttaaaaaaacattattggcaagattgggattttgctgaatgtttggcaaatgggatagggcaacacaatgccgctatgcatagatttatccaacaacttcaggttaaactattttcagaaaatgaacacatgaatattatggtgaccaccacttctttaatagaaggtgtaaatactgcaacaaaaaatatagttatatggaatgattctgttgcgagggataaagataaattaacaagtatgcaatataaaaatattataggtagatgcgggagaatgtttaaatattttgttggtaatgtgtatttattagaaagcaacaaagaaacattaaaaaatgagcaagaaactatggaaataattcctcaagaagaatttttatatagaaatgacttggaaacttttaatacaaaaacaaaaatggaagagaacttaaaaaacgtacttaatgataaaaacaaatttcatcaaattatgtcaaaaatgaaaaattattctattttaatggatttgaacaatattttaacaattgttgaaaatgccgaactttttgaaaaaagtattgaatatttaaatagtgatgttccagatgagtggggatttatcaaaaagaaagagatacgagaaattgttttcaaagtattgaatgagaaatctaaaaatgcttattttaaaataattgattatggcaaacacaattatgatggcgtaaaacaaactattaataatacaagtaaacaagagagatataaaattaatattagtcagtattttgacattgaaaaagcaatcagttttgatatcgctagtttttttaatgatttgaatcaaattatgcaaatactctatcctgaaaagggtatagatatttcaagttttgttacaaaactttcaaatgcttttttaccatcagtggtatatactcttgaagaatttgggttacctagaatcatttctaaaaaatttcaccaatgtggatttattgattttgaaaataaggatttaacaatagagcaagcgttaaacaaatttaaagaatgcacagctgatgatataatcaacatattaaaagaaaaaaatctttacgataattttgaagattatatattaaattatttttatgaaggtttaggacaataa

SEQ ID NO: 58438 - DNA, 945 bp, Campylobacter jejuni subsp. jejuni 1893; identical to SEQ ID NO: 58436

SEQ ID NO: 58439 - DNA, 2106 bp, Campylobacter jejuni subsp. jejuni 1893; identical to SEQ ID NO: 58437

SEQ ID NO: 58440 - DNA, 945 bp, Campylobacter jejuni K5; identical to SEQ ID NO: 58404

SEQ ID NO: 58441 - DNA, 2115 bp, Campylobacter jejuni K5
atgccgactaatgaacaaattggtgaaaaaatttttgataaatgtgtagaaatatatgaaattctaaataatgataaagaagcagaagctaaagaaaagcttttttatttacttgatgaaattcaagataaggctttatatccgcctatattaaatcatctcattagacaatttggattatatccctatatgaatcaagatacttcaattttagaagacaaattcttactagaatgttttaaagcaaatatcggagaagacgaaccaaaagttttacatagagaacaatcaagagttttaaaaagacttttaagtaatgaaagtcttattctttctgctccaacaagttttggcaaaagctttattatcgatgctctaatagctatgaaaaaaccaaaaaatatattaatcattgtccctactatttctttgttagatgaagctagaagaagacttgtaaggaaattttataactataacataaccacaaccactcaacaaaccaatttagaaaataacaatatctttattttttctccagaaagagcagttgaatatttttcatttattaataaagaaaatatcagacttgatttttttatagttgatgagttttataaaatatcaaaggattatgaaaatgaaagatttgctccactgcaaaatgctattttgaaatatacaagtatttctgatcaaagatattatatttgccctaatatagataagataaaaaatgaaaatagcattctttgtaaaggaatgaaatttgaatgccttgatttcaatactgtttttattcatattaataaatgttataaaaataaggattttaaaaaagaagaaaaaattctagaaatagtaaaaaaagatgaaaaaactctagtttatacccaaagtcaaagcaatataaaaaaagtttgtgaaatcttggtggaaaataccattatagaaaattcaaatgctttattggaaaattttgcaaaatggttatcaaaatattacggagaacactaccttaatgatacattaaaaattggcgtgggaatacatcatggaaggcttcatagatgtctatcgcaattgcaagtaagattatttgaaggaaaagatttactaaaaaccattgtttctacatcttctttaatagaaggggttaatattccagcaaaaaatcttattttatgggataaaaaaaatggagcaaaaaatataaatcattttacttataaaaacattataggtagaagcggaagaatgtttaaatattttataggagaagtatatttatttgaatctccaaacgaagatgataatcaagaaaagatattagatgtagaaatcaaatcagaatctttatctattaatgatgagataaataatgaaatccccgataatatacaagtagaagtcgaaaacaatcaactagaaataataaaattaataggaagagataaattcaatttgcttaaaaaagaaacattgttaaaaaatgatttaggggttattataaaaataattcaaatattgcaaagcaaagattttaatagtgaaatttttacatatttatttaatgatgaacctgacaaatggtatatcttatctagaattgcgtctataagagaatttcattgtaaaaatattggtgatataaatactgttgagttggtaaaaaaattatcacaaaattggactaagtcgctaccagaacttattaaagatatgagaattgatttggatgatttttttaaatttgaaaatcatgtagcttttaaaattgcatcactattttctgatattaacactttgcaaaaaatactctatcctgaaaaagagatagatatttcaagttttgttacaaaactttcaaatgtttttttgccatctgtggtttatactcttgaagaatttggactacctagaatcatttctaaaaaacttcatgaatgtggatttattaattttgaaaataaagaattaacactagaacaagcattagataaatttaaagaatatacagccgatgatataatcaacatattaaaagaaaaaaatctttacgatgattttgaagattatatattaaattatttttatgaaggtttaggacaataa

SEQ ID NO: 58442 - DNA, 945 bp, Campylobacter jejuni subsp. jejuni
atgcagggcaaagagatagaaaatataacaacaataaacacttatgtgaaaaataaagataatagtaattttacaataatgttaaatgaaatactatgtcgtcaatatcatcattttttactatctatttcaaatcaatttgaaagcaaaaagtggaaaatgaaaaattttagaaattttattataaataatttaaaagagtgtgctttaacagaacaagaaaggcaaagtttagcaggcaacgaaggcgaaattttagataaagctatctcaaaactaaaaatagatgacaaaagtggagaggtaggagaaatttttctccatggtatcatgagagaatattacaatgctctatccattgcgcctaagatttttcataaacaaagtcgtaatatggaggcattaggatttgatagcgtccatctaactatagaaaaccgagaatgccatttgtggctaggcgaatcaaagctatatgataatttaaatggagctataacaaatgttataaaatctataaaagacaatttaagtgacgaaatcattcttaatgaagctagaataattgcaaatccacatgaattagataatctagcagaacatcataatattcagacaagcacattgacaaatttcaagaaaattattaatgggaatattaatcttgatgaattaaaaagcattttacatgtgccaatatctattatttacgattgtaattatacaaaaagcattgaggaaattaccgacgattataaaacagcgataaaaaactttcataagaaaaatggcaataaaatatcagagaaaatcaaaaaactttcaaatgaaattacatatatcgatagaataaaatttcacataattttatttcctgttcctgataagaaggaaattatgagcaaaataaatcaaatttttaggagttatagaaatgctaactaa

SEQ ID NO: 58443 - DNA, 1203 bp, Campylobacter jejuni subsp. jejuni
atgctaactaacgaacaaatttttgatgaatgtgtaaggatacatgaaaatctaaatgataacaaagaaacagaagctaaagaaaagcttttttatttacttgatgaaattcaagataaggctttatatccgcctatattaaatcatcttatcagacaatttgggttatatccctatatgaatcaagatacttcaattttaacagatagattcttgctagaatgttttaaaacagatattggagaggatgaaccaaaagttttacatagagaacaatcaagagttttaaaaagacttttaagcaatgaaagtcttattctttctgctccaacaagttttggtaaaagctttattatcgatgctccaacaagttttggtaaaagctttattatcgatgctctaatagctatgaaaaagccaaaaaatgtattaatcattgtccctactatttctttgttagatgaagctagaagaagacttgtaaggaaatttacacctgattacaacataattacaacatcgggtgctaccccaaaagaaaataatatatttatattaacccaagaaagagttttggaatatttagactttataaaagccaatagaattgatttatttatcgtagatgagttttataaaattgtaggggatgtaaggtcagatattttacaaaatataataaagcaagtaagttcttattccaaacaatcatactatctgtgtccaaatatcaaacaatttaatgaaaaatcatcgaaatatcaatttttaaaaaatatagaaaaagtcctaattgattttaatactgtagcattaaaaacacatgatttaagccacaaaaaagaaaagaaagaatatatgttaaaaaacatattaaatgaaaataaaaatcaaaaaacaatgatttatataaaaagcaaatcagaatcaaaaaaggtttgcaaaaatataaaaaactatattaatgcaacagataatcaattaaaaagtttttcaaattggttaaaaaaacattattggcaagattgggattttgctgaatgtttggcaaatgggatagggcaacacaatgccgctatgcatagatttatccaacaacttcaggttaaactattttcagaaaatgaacacatgaatattatggtgaccaccacttctttaatagaaggtgtaaatactgcaacaaaaaatatagttatatag

SEQ ID NO: 58444 - DNA, 933 bp, Campylobacter jejuni subsp. jejuni
atgcagggtaaagaaatagaaaatacaacggcaataaacacctatgtgaaaaataaaaatgatgttacttttgagatttgccttgattctgtaatggatgactcgtgtagtagatttttattatcattaattaacgactttgaggaaggtgagtggagatttgagaaatttaatcaatatataatgaatgcattggctgaaactgccttatcgaaaacagaaagagaagctttagcttcaaaagaagagtattattccataatacaacgatctgttgcaaatctaaataaaaaagaaggagagataggagaaatttttctttatggtattatgaagaaatactataatgctttacctattgtgcctaagattttttataaacaaaataccaatgataatgcaaaaggcgcagatagcgttcatttaactatagagaataaagaatgtcatttgtggctaggggaatctaaattttatacagatataaccaatgcaattagtgaagctataaaatccattaaagactttttagtaaaagacaagttaaataaagaaaagtctattattatggatataaatgatgttgaatcttttatcaaagataaaatctctaaagaaagtatagataaaataaaaagagttttaaaacaagatacttccatagatgaactaaagaatatcttgcatattccaatatcaatcatttatcaatgcgagacaactaaaacatatagcgagttatcagaagaatataaacaaaaaatagtaaattttcatcaaaagaaagcaaagcaagttattacaaaaattaccaatgagctaaacaatgtgcataagatagaaaaaataaaatttcatatcattttatttcctgtaccagataaagaaaaaatcaaacgcgattttgccaaaaaactagaggcagccaaatga

SEQ ID NO: 58445 - DNA, 2103 bp, Campylobacter jejuni subsp. jejuni
atgaccagtgagcaaatttttgataaatgtgtagaaatatatgaaattttaaatgataacaacaaagaaacagaggctaaagaaaagcttttttatttgcttgataaaattcaagataaagctttatatccacctatattaaatcatctcatcaggcaatttggcttatatccttatatgaatcaatctacttcaattttagaagatagattcttactagaatgttttaaaacaaatataggagaagatgaaccaaaggttttacatagggagcaatcaagggttttaaaaagacttttaagcaatgatagtcttattttatctgctccaacaagctttggcaaaagttttattattgatgctttaatagctatgaaaaaaccaaaaaatatattaatcattgtccctacaatttctttattagatgaaactagaagaagacttgtaaggaaatttacacctaattacaacataattacaacatcgggtgctactccaaaagaaaataatatattcatattaacccaagaaagagttttggaatatttagactttataaaagccaatagaattgatttatttatcgtagatgagttttataaaattgtcggggatacaaggtcagatattttacaaaatgcaataaagcaagtaagttcttattccaaacaatcatactatctgtgcccaaatatcaaacaatttgatgaaaaatcattgaaatatcaatttttaaaaaatatagaaaaagtcctaattgattttaatactgtagcattaaaaacacatgatttaagccacaaaaaagaaaagaaagaacatatattaaaaaacatattaaatgaaaataaaaatcaaaaaacaatgatttatataaaaagcaaatcagaatcaaaaaaggtttgcaaaaatataaaaaactatattaatgcaacagataatcaattaaaaagtttttcaaattggttaaaaaaacattattggcaagattgggattttgctgaatgtttggcaaatgggataggacaacacaatgccgctatgcatagatttatccaacaacttcaggttaaactattttcagaaaatgaacatatgaatattatggtaactaccacttctttaatagaaggtgtaaatactgcaacaaaaaatatagttatatggaatgattctgttgcgagggataaagataaattaacaaatatgcaatataaaaatattataggtagatgcgggagaatgtttaaatattttgttggtaatgtgtatttattagaaagtaacaaagaaacattaaaaaatgagcaagaaactatggaaataattcctcaagaagaatttttatatagaaacgacttggaaacttttaatacaaaaacaaaaatagaagagaacttaaaaaacgtacttaatgataaaaacaaattttatcaaattatgtcaaaaatgaaaaattattctattttaatggatttggacaatattttaacaattgttgaaaatgccgaactttttgaaaaaagtattgaatatttaaatagtgatgttccagatgagtggggatttatcaaaaagaaagagatacgagaaattgttttcaaaatattgaatgagaaatctagaaatgcttattttaaaataattgattatggcaaacacaattacgatggcgtaaaacaaactattaataatataagtaaacaagagagatataaaattaatattagccagtattttgacattgaaaaagcaatcagttttgatatcgctagtttttttaatgatttgaatcaaatcatgcaaatactctatcctgaaaaagagatagatatttcaagttttgttacaaaactttcaaatgcttttttaccatcagtggtatatactcttgaagaatttggattacctagaatcatttctaaaaaacttcatcaatgtggatttattgattttgaaaataatgatttaacaatagagcaagcgttaaacaaatttaaagaacatacagctgatgatataatcaatatattaaaagaaaaaaatctttacgataattttgaagattatatattaaattatttttatgaaggtttgggataa

SEQ ID NO: 58446 - DNA, 852 bp, Campylobacter jejuni subsp. jejuni
atttgttttgattatgcaataaatgatttatgcaacaaatttttattatcattaatcaatgattatgaagaaggtaagtggagatttgagaaatttaatgattatatcatgaatacattggctgaaaccgctttatcaaaagcagaaaaggatgccttaagagaagaaccattttctttgataaaagattctatcaaaaatttgaataaaggagaaggagaaataggagaaatttttctttatggtattatgaaaaaatattataatgccttgcctattgtgcctaagattttttataaacaaaatgccaatgattatgcaaagggtgcagatagcgttcatttaactatagaaaatcaagaatgtcatttgtggctaggtgaatctaaattttacaaagatataaacaaagcaattaatgaagctataaaatccattaaaaatcttttagtaaaagacaagctaaataaagaaaagtctattattatggatataaatgatgtcgaatcttttatcaaagataaaatctctaaagaaagtatagataaaataaaaagagttttaaaacaagatacttccatagatgaactaaagaatatcttgcatattccaatatcaatcatctatcaatgcgagacaactaaaacatatagcgagttatcagaagaatataaacaaaaaatagtaaattttcatcaagagaaagcaaaacaagctattacaaaaattaccaatgagctaaacaatgtgcataagatagaaaaaataaaatttcatatcattttatttcctgtgccagataaagaaaaaatcaaatgcgatttcgtcaaaaaactagaggtagccaaatga

SEQ ID NO: 58447 - DNA, 2145 bp, Campylobacter jejuni subsp. jejuni
atgcgatttcgtcaaaaaactagaggtagccaaatgaccagtgaaaaaatttttgatgaatgtgtaaagatatatgaaaatctaaatgataacaacaaagaaacagaagctaaagaaaagcttttttatttgcttgatgaaattcaagataaagctttatatccacctatattaaatcatcttatcagacaatttgggttgtatccctatatgaatcaagatacttcaattttagaagacaaattcttactagaatgttttaaagcaaatatcggagaagatgaaccaaaagttttacatagagaacaatcaagagttttaaaaagacttttaagcgataaaagtcttattctttctgctccaacaagttttggcaaaagctttattatcgatgctctaatagctatgaaaaaaccaaaaaatgtattaatcattgtccctacaatttctttattagatgaagctagaagaagacttgtaaggaaattttatagctataacataatcacaaccacccaacagaccgatttaaaaaataacaatatctttattttttctccagaaagagcagttgaatatttttcatttattaataaagaaaatatcagacttgatttttttatagttgatgagttttataaaatatcaaaggaatacggaaatgaaagatttgctccattgcaaaatgctattttgaaatatatgggtatttctgatcaaagatattacatttgtcctaatatagataagataaaaaatgaaaatagtattctttgtaaaggaatgaaatttgaatgccttgatttcaatactgtttttattcatattaataaatgttataagaataaggattttaaaaaagaagaaaaaattctagaaatagtaaaaaaagatgaaaaaactctagtttatactcaaagtcaaaacagtataaagacggtttgtaaaattttgacaaaaaatatcatcatagaaaaatcaaatgctttattagaaaattttgtaaaatggctatctatacattacggtgagtattaccttaatgatatattaaaagtcggcgtgggaatacatcacggaaagcttcatagatgtctatcacaattgcaagtaagattatttgaggaaaaagattcactaaaaaccattgtttctacctcttccttaatagaaggggttaatattccagcaaaaaatcttattttatgggataaaaaaaatggatcaaaaaagataaaccatctgacttataaaaatattataggtagaagcggaagaatgtttaaatattttataggcgaagtatatttatttgaatctccaaacgaagatgataatcaagaaaagatattagatgtagaaatcaaatcagaatctttatctattaatgatgagataaataatgaaattcccgataatatacaagcagaagttaaaaataatcaactagaaataataaaattaataggaaaagataaattcaatttgcttaaaaaagaaacattgttaaaaaatgatttagaagttattataaaaataattcaaatactacaaagtgaagattttaattatgaaatttttacatatttatttaatgatgaacctgacaaatggtatatcttatctaaaattgcatctataagagaatttcattgcaataacattaataatactagtaatataaataatattgaattggtaaaaaaattatcacaaaattggactaaaccgctaccaaaacttattaaagatatgggaattgatttggatgatttttttaaatttgagaatcatgtagcttttaaaattgcatcactattttccgatattaacactttacaaaaaatactctatcctgaaaaaggggtagatatttcaagttttgttacaaagctttcaaatgtctttttgccatctgtggtttatactcttgaagaatttgggctacctagaatcatttctaaaaaacttcatgaatgtggatttattaattttgaaaataaagaattaacactagaacaagcattagataaatttaaagaacatacggccgatgatataatcaacatattaaaagaaaaaaatctttacgatgattttgaagactatatattaaattatttttatgatggcttaggacaataa

SEQ ID NO: 58448 - DNA, 852 bp, Campylobacter jejuni subsp. jejuni; identical to SEQ ID NO: 58446

SEQ ID NO: 58449 - DNA, 2145 bp, Campylobacter jejuni subsp. jejuni; identical to SEQ ID NO: 58447

SEQ ID NO: 58450 - DNA, 945 bp, Campylobacter jejuni
atgcaagataacgaaatagaaaatacaacggcaataaacacctatgtgaaaaataaagataatgataactttataataattttaaatgaaacactatgttgtcaatatcatcattttttactatctatttcaaatcaatttgaaagcaaaaagtggaaaatgaaaaattttagaaatttcattattaccaatttaaaagaatgtgctctaacagaacaagaaaggcaaagtttagcgggtaatgaaggtgaaattttagataaagctatctcaaaactaagaatagatgaaaggagtggagagataggagaaatttttctccacggtattatgagagaatattataatgctctacctattgttcctaaaattttttataaacaaaatcgtaatatggaagcatttggatttgatagcgttcatctaactatagaaaatcaagaataccatttgtggctaggcgaatcaaagctatataaaaacttagacgatgctataagaaaagctacaaaatctctaaaagataatctaagcgatgaaactattcttaatgaagctagaataattgcaaatctacatgaattagataatctagcaaaacatcataacatcgaaacaagcacattgacaaatttcaaacaaattattagtggaaatattaatctagataacttaaaaggtattttgcatgtgccaatatctattatttatgattgtgattacacaaaaaatattgaggaaattacagacgattataaaacaacgataaaaaactttcataaagaaaatggcaataaaatatcagaggaaattaaaaaccttttaaatgaaattacatatatcgatagaataaaatttcacataattttatttcctgttcctgataaggaggaaattattagcaaaataaataaaatctttgagagttacagaaatgccgactaa

SEQ ID NO: 58451 - DNA, 2127 bp, Campylobacter jejuni
atgccgactaatgaacaaattggtgaaaaaatttttgataaatgtgtagaaatatatgaaattctaaataatgataaagaagcagaagctaaagaaaagcttttttatttacttgatgaaattcaagataaggctttatatccgcctatattaaatcatctcattagacaatttggattatatccctatatgaatcaagatactttaattttagaagacaaattcttactagaatgttttaaagcaaatatcggagaagacgaaccaaaagttttacatagagaacaatcaagagttttaaaaagacttttaagtaatgaaagtcttattctttctgctccaacaagttttggcaaaagctttattatcgatgctctaatagctatgaaaaaaccaaaaaatatattaatcattgtccctactatttctttgttagatgaagctagaagaagacttgtaaggaaatttacacctgattacaacataattacaacatcgggtgctgctccaaaagaaaataatatattcatattaacccaagaaagagttttggaatatttagactttataaaagccaatagaactgatttatttatcgtagatgagttttataaaattgtcggagataacagatcaaatatcttacaaaatgcaataaggcaagtaagtccttattccaaacaatcatactatctatgtccaaatgtcaaacaatttaatgaaaattcattaaaatatcaatttttgaaaaatatagaaaaagtctcaattgattttaatactgtaatattaaacatacatgatttaagccataaacaagaagataaaaaagataaattaaaaaatatattaaatgaaaccaaaaaacaaaaaacaatgatttatgtaaaaagcaaaccagaatcaagagaagtttgcaagtatataaaagaatatgttactacaaataatgatcaattaaacaacttttcaagttggttaaaaaagcattattggcaagactgggactttgctaactatttagcaaatggtataggacaacacaattccgctatgcatagatttatccaacaacttcaagttaaactattttcagaaaatgaacatatgaatattatggtaactaccacttctttaatagaaggtgtaaataccgcaacaaaaaatataattatatggaatgattctatatataataatgagaataaactaacaagcatgcaatataaaaatattacaggtagatgtggaagaatgtttaaatattttgttggtaatgtatatttactagaaagcaataatgaaatattaaaaaatgagcaagaaaccatggaaataattcctcaagaagaatttttatacagaaacgacttagaaacatttgatgtaaaaacagaaatggaaaaaaacttaaaaaaattactcaataacgcaaataaatttcatcaaattatggcaaaaatgaaaaattacactattttaatggatttagaaagtattgtaacaattgttgaaaatgccgagcttttacaaaaaagtattagatatttaaatagcgataaccctaacacatgggggtttatcatgagtgagaatatacaaaaagttgttttcagaatattgaatgataaatctaaagatgcttattttaaaataattgattattacaaatataattattgtggtgtaaaacaaaccatcgataatataaacaaaaaagcaggacaagagtggtataaaattgacattaataaatattttgatattgagagaataattagttttgatattgctagttttttcaatgatttaaaccaaattatgcaaatactctatcctgaaaaaaagatagatatttcaagttttgttacaaaactttcaaatgtctttttgccatctgtggtttatactcttgaagaatttggactacctagaatcatttctaaaaaacttcatgaatgtggatttattaattttgaaaataaagaattaacactagaacaagcattagataaatttaaagaacatacagccgatgatataatcaacatattaaaagaaaaaaatctttacgatgattttgaagattatatattaaattatttttatgaaggtttagggcaataa

SEQ ID NO: 58452 - DNA, 945 bp, Campylobacter jejuni; identical to SEQ ID NO: 58434

SEQ ID NO: 58453 - DNA, 2121 bp, Campylobacter jejuni; identical to SEQ ID NO: 58435

SEQ ID NO: 58454 - DNA, 954 bp, Campylobacter rectus RM3267
gtgtcagtaaaatttatgaatcctacttttactaattatagtgagccggagtttgaagtaattactgatgagtgtttgtcttgtaatggagatattatagataaacactattttttaataatagcgaatgattatgaaagctataaatggagatacgataaattcattgattttttacttgattatatttcacacgatgctcttagcgcaaaagaaagagaagcatgcattaataagcccggtagcatgcttagaaaatcccttagaaatctaagaactgttcaaaaaaatcaacaggatgaaatagatgaaaaaggtggtgaaattggtgaaattttattatacggcataatgaaaaaatactataacgctcttccggtcgttccaaagattttttataaacagaataaaaatgattatgcaaaaggtgccgatagtgtacacattgtaattgaagataacgacaaatttagtctatggctcggagaatctaaattttataaaaatatagatgatgcaataaacaatgccattcaatcagtaaataatggtttgcaagatgataagctaaaaaaagaaaaaagtataattacaaatataagcgatttggatgagttattaaaagataatacaaatttactggaacaaattaagaccaagcttaatgacaatagatcactggacgaattaaagccatttttgcatattccaatatttttgttatatgagtgtagcttaactaaacaaaataaggaatttaacaaggaatatcaggataagataattgaaaataccaaaaaaaatactaaaaaaatatataagcgtctaaaagatgaactaaaaaacatatcgtatattgatagaatatattttcatataatattttttccaatcccagataaaaataagataatagaagatgtaaataaatctatggaaggttttaatgactga

SEQ ID NO: 58455 - DNA, 2055 bp, Campylobacter rectus RM3267
atgactgaagaaaatatttttaataagtgtgctagaatatttcaaataaataataaaacagaacaaagaaatgaaactattaaattactcaatgaaatagatcaaagccaatatatgccaattgtaaatcacctaataagagaggtggggctttatccatatatgcaatatgatagttgtaaatggtttgataaaatcctaataaatagtttcacaataaatataggagaaaaagaacctgttactctacacttaaaacaatccgaaattttaaaacaacttatagaaggtaacgatttgatactaagcgcaccaactagttttggtaaaagctttataatcgatgcactgataaattttaaaaaaccagataatgttttaattatagttcctactatttcacttatggatgaaacaaggagaagacttaataaatttagtaaacaatacaatattatcacaacgtcaaacgcagatattaaagataaaaatatttttgtctttccacaagaaagagctgtcggatatatcgataaaattaaggaaattggattagatttattcatagtcgatgagttttataaaattttatctagtgataatagagcattaactctaaaaatagttatatcaaagctatcaaaaatttctaaacaaaaatactatttatgtccaaatataagtaaaataaatctttcactctttggaattaatagaatgaaatacgtaaaattggatttcaatactgtatttttaaatataaagaaggaaatatgcaaaagtaaaaaaaataaggataatctagtattaaatattatcaataataataaaaataaacaaaatttgatttatgtaaaccagccgagtacagcagataaactagcaacatttttatcaagtggttttaaaaagagcgattctaaaattctacaaaactatgagaaatggttgatcaaaaattattttaaggattggcctttggccgatagtgtatcaaagggcatttgtatacactatggaaaaatacatagaacaattactcaaatgaatgttaaattatttaatgaaaatcaaatattcactacaatatgtacctcatccttaatagaaggcgtaaacacaagtgcagaaaatttaataatttatagcaacaagattgatcgaaaagatccatttgataactttacttataaaaatattattggtagaagtggtagaatgtttaaatactttatcggcaatgtatatattttagaagatacaccaaaagaagaagaaaagaatttagaattatctccaattgtcgatgatatctttaaaatggatgaagagttacaaattacggaagagttaaacactaaagcaaataaaattaaagatgaaatttataattgtgtagaggataaaaataaagtagacttaatattaaaacttattaaatctggaaaaataaactcaaatatggaagatgttgtttacattttaaaaaagttaattaacctggatcctaatgcctttaattacttaaaaaccaatgaaatatcacaatggagtgcttttaaatatttcatgagcagcaaacaccatattgactttaaccatcttgaaattataatgaaaagttggaataaaacaataccagaactcataaaagagcttaaaatagacaatatcttaaagtatttcgaactagaaaataaagtaacatacaatctatcggcatatttttctgacattaatgaactgcaaaaaattatatttagtaagcaaaatattgatatttcagattttgtaaatagactttccagtctttttatgccggcaaaagttttgcagctagaagaatatggattgccaagaatgatttccaaaaaaattagtaaccttaaattgctacctattgataataatgaaatcacaataactgaacttttagatcattttagatgtattagtaaggaaaaattaataaacaaactaatagaagctgaattattagaacctttcgatcaaaatttcatagattatttttatgatggtattatgattatgtag

SEQ ID NO: 58456 - DNA, 675 bp, Campylobacter rectus RM3267
atgtatcatgaagccaaaaaactttttagaaaatggaggcagcaagagattacggataaaaataagtccacatctggtgagatgggagaaatgatattgtggtttttaatggaagctgtattggaatcacctcaaatagttgcaaaaatggatctaaaaacaaatagacagatggagtcttttggttctgatggtattcatatgaagataattgatgatgttttaaacatattttttggagaagcaaagctttataatgatgttggaaaagctatagatagtatttttgaaagtattgaaaagtttcataaagataaaatgtgggagcatgaatacaatatggtaactactcattttaaatacctaaaagaaggcgaaaagcaaaaagtttttgattttataagtggtaaaataaaaagccaagatataaaaataaatcatgcctgtttagttggatataattggagtgaatacaaaaagcttgacgatcaaatcaaaaggcaagaatttattgatgcatttaaaactaaataccaaaaagataccactaggttggcgagattaatacagttgcggtttgacaagttttcaaaaaagcaatttcattttgaagttttctttttgccggttaaaagcgtacaagaattaagagataaatttaatgaggagctctaa

SEQ ID NO: 58457 - DNA, 2478 bp, Campylobacter rectus RM3267
atgaatgttttaatagaaaaactcgtcaagtatgatattgtaaattatttatcgggtctaaacattaaacaggacaataatttggagcaatttagtggagaagaaattctgcagttatgtaagtatgcttctttgttagcattatctgataaggatgatgaacaaatgctttcatatgaaatttctacaaagctatttattaatttttatgaaaaatatccaactttatattctattgtttttagcattctttcaagattgggtaattttcctaatagggatttattaaaaaaatataaaccttctgaagaatttcgatcgcaaagtcttttgattgacctagaaagaatggcaagagaaaaagaaaatcaactcatattgcaaaataacgagcaaatttttttaacggactttcaaaagcgattttttgacgtattgactgatagacatttctttagtgtatctgctccaacatctgcaggtaaatcgtttatttttactctagcaatagtaaaaagactacttaaaaatcctaatgaggtaattgttttaattgttccaaccagagcattgattaaagaattgagtgaaaaaataataaaaaaattaaaacattataatctatttgaaaaagttgatgtcagaattttgcctattttggaagataaatcaaatgacaaaggcagggtatatgtacttactcaagaaaggttgagcactttattggaagaaaatataaaaattaatacatgctttatagatgaagcgcaagaaatacagaataatagaggtgtggtgctgcaaaatacaattgagcttttaatcaaaagaaaccatgatataaatttattttttgctagcccattaattaaaaaccctgagtattttaataaattgttcgagcaaaaatttgataatgagtattttatagaaaacatatcgcccgttggacaaaatattttattgttaagtgaaatcaaaaataaaccaaaaagcgtatttattgaaaatatagattttaactcgcaaagaaaaaatttaggcgaatttaaattagattttaaatttagaaaaaatgaaaaaataatttctcttgctaaacaaatttgtagagaagatgaacttacattgatatattgtaatgatccaggtgaggcagaaaaaagggctttgttgctaacggaaaaaataaacaatattgatactgatgatgaaatcattggtttaataaatttcataaaagaagatatacataaggattactcaataattcaatgtctcaaaaaaggaatcgcctaccattacggctatatgccatcttcaattagagcagagattgaacgtcttgctaatattgggaaattgaggtttgtattttgtactagtactttattgcagggcgttaatttgcctgcaaaaaatattataatatctcgccccaataaaggcaaaaatcaacctatgaatcgagctgattttctaaacttaattggaagggccgggaggcttttatatgaatttcaaggaaatatttggtgtatagagccaaatcagtgggagttaaaaagctttgaaggtaataagcttcaagaaataggagcttattttgaaacttccttattaacaaaaactgatgaaattatagaaatcgccaaagatcagaataatgatagcaatgaagttgctgttttcggaaaattttatttagattttattattaatgaacaaaatattgatcaatttaaagagcatataagctatgaaaaaattcaaaatctatttgatatttccaaactaattgcgcatcaattaccagataatattataagaaagcattattcaatccatcctgcaagattacaaaagatgtatgtgtattttaaggaaaatagtagtaatgatttaaatgaatttattcctaaaaaagcctatcagaaacatacaaatgataatttaaaattaatttttaagcttatagatttaatactgttcaataaagggaatgaaaataaacaatatgaactttttagttttattgcttcatcttggatgcatgataagccgataagtcaaattatattagaaagaaacaaatatacaaaagaaaacattaattctactataagagaagttcttgaaataatagaaaaacagatcaggtataaatatgttattgcgacacatgcatatttagatatattgaaactagcacttttggaaagaggtaaagatttcaatgttgatttgattccaaatttaccattatatctagagtgtggcacatcagacaaaactatcttgagtcttatttcgctaggattatctagacttactagtattaaattaaaaatgtcgaagaaattccgttgtgatgaaccaacggttactaattgtttttatgctcttcaaaaaattgatatcaaaaatcttaatataccagaagtttgcaaacatgaaattatgggattgattttataa

SEQ ID NO: 58458 - DNA, 939 bp, Helicobacter muridarum
atgaacgattatacttttacaaaatataaagacaaggataaggtagattttgaggttttgattgatgagtggcttataaatacttcagcaaatcacgctatgctatctcttgttaatgattttgagagtaatcaatggaggagcaagaaatttaggaattttattataaataatctaaaagaagttgccttaaataaaaaagagagagatgcgttgagtggaaatgaaggcgatatattagaaagagctatttctaaaatgcacattgataacttaggaggtgaaattggagaagtttttttatatggtattatgaaaaactattacaatgctttaccagttgttccaaaaatattctacaaacaaaaccctaatgataacgcaaaaggtgcagatagtgttcatataaccttagaagaaaatgcttatcatatatggcttggagaatcaaagatctatagcgatataactcgcgccattagtgaggtagtggagtctgtatatgaacttttggcaaccgataaattaaaaaaggagaagtctttaataacaaatttaaatgatattgatggttatttaagtgattctaataatttacataaaacttcaataacagagttaaaaaatatactcaatgacagaacttcactagatgagatgaaaaaaatcttgcatatacctatttctattatttatgagtgtgatattacaaaacaacatttacaaaattatccagtttgtcttgataataattataaaaatttaattattgaactccataggaatcaatgcagtaaattatcgcaaaagattattagcaaacttaatgatatacctttgattgaatatattaaatttcatattatggtttttccaattcccaataaaaaagaattagtagcgcaaatcaataaaatttttgaggcacatagacaatga

SEQ ID NO: 58459 - DNA, 2073 bp, Helicobacter muridarum
atgatgactaacgaacaaatttttgatgaatgcaaaagaatctacacacttgaggacaaagaaaaagccaatgagctttttagattgcttgataaaattggtgataaacaagcttatccccatgtattaaaccacttaattagagaggttggaatatatccttatatcaatcaagatacagccatattttcagataggctcgtgtgcgaatgttttaaagcagatgtaggagagaatgaaccaaagatactacatagagagcaatcaaggattttaaaacgattattggagggagaaaatctaattctttcagctcctacaagttttggaaaaagctttattattgatgcactcatcgccattaaaaaaccaagcaatattttaattatcgttccaactatttcgcttatggacgaagcaagaagaagattaacgctaaaatttggcggtgagtatcatattattacaactagcggttctcaactaaaagataaaaatatatttattttcccgcaggaaagggctttagaatattttgagaatcttagagaaaaaagcttagatttatttatagtagatgagttttataaaatgtctaataaagacagaagaacgcatatacttcacaatattgttaataagtttaaaaatattgccaaacaaaaatattatatatgccctaatgcagacgacatagaagataagtctaaaaataaaatttttctagcaggtttaaagaaagaaattttgacaatcacaacagtggctctcaataaatttgacttaagcaaagagacagggagcaaggaattaaaaattcaaaatcttttaaaaaatgaaattggcaaaagtttgatttatgttagcacaaaacctaattctaaaaaattatgtaaaattttattaaaatttattaaagcaggcaatgaggaacttaattcgttttctcaatggctgcaaaaatactatgccagagaatgggattttgcaacaaatataaaaaatggtatagggcaacataattccgcaattcatagatatatacaacaattacaagttaaattattttctgaaaaccctagtatgaatattatggtaagcactacttctttaattgaaggggtaaatactgcagcaagaaatattattatatggaataatcaagttgctaatgattctttgaatagctttacttataaaaatataattggtagaggcggaagaatgtttaagtattttgtaggaaatatttatttgttggataatgaaaataaaatagaagaaaaagaagttgaaaaaattgatattaatcctgatgaagagtttttatatagaaatgatttagaaaatcctgatttagaaagtaaaaaattaattgaacagaagctattcagtctcataaaagataaacaaaaatttcaaaaattaataagctatataaaaaattacaaaataataatgaatattgaaaatgtcctgcaaatcatagaaagtgtcaatgaaattatgaagagcattaaacatcttaacaatgataatccagattcttggggattgttagaggtaaaatctgttggaaatattttttctaacaatgataagaagctagatagagcatataaaaatattaaagtatttgcaaaatataattggaatggcacttctacattattgaataatagcactattaacatagatgattattttaatattgaaaaaatcattgtttttgatatcgctagtttttttaatgatattaatgaaatacagcaaattctctatcctgataagcacattaatatttctccctttgtaagcaaactttctaacgcatttcttccctctgttgtctataccttagaagaattcggtttgccaagaatgttatcaaagaaactgcacaaatataactttattaactttgaaaataatgatttaaaaattgatgaagctttagaaaaatttaaagaatctaatgttgaagaaataataaacttatttaaaaaatataaagatttcgatggttttgatgagtatatattaaaatatttttataatggattaggaaaatga

SEQ ID NO: 58460 - DNA, 1104 bp, Xanthobacter autotrophicus Py2
atgacgaaagcgagccaaatcccagtgcccgatctgcttgacaccctgctcttttcttgcgagccaattgggaggcggcgaggaaagggcatctttttcgatgcaaagggcgatcgagcgtttgggagtaggatgcgtaatctgctttcggtctcggcaaaggccgtctgccgaatgatcaatatcgccttcgaaacgctgatagacgattctctatctaagatcacgaatgtcgcccagttaaaggcgctattgaacaagcgcgtcctgagctttgtaaacgactttgaagatggaaggtggcttagcagtcgtttccagagttatctttgggacaacatcgctcaaaccgctctctcagagcgtgagcgcttggcactggctgatcagagccattcggcgttggtagcggccgctcgaaatctcaggctcacggacaaagacgaggtcggccaagggagcgaaatcgctgaggtttttctctacggaattatgaaaaaccattataaggcgctacccgtcgtacccaagatattttataaacaaaattcacaggataacgccaaaggcgcggatagcgtccatatcgtcgtcagcgatgatggcgaagactttactctgtggtttggcgaagcgaaattctataattcaatcgccgatgcgcgtttggactcggtcgtgaattcggtttactcaagcctagacaccggcaagctgaaaaaagaaaacgccatcatcaccaacgtgtccgatcttgaccagctggttatggcggaggcgctccgagcaaaaatcaaggcagcactgagcagccaggtttcgatcgatcatttaaaaccgaagatccatgttccgatcctcataattcaccaatgcgccgagacggcgaaatgcgccgagctttccgaccaatatcgtcaggcaatctccgcccatcacacagaaagagccgaggcctacttcttaaagcagctatccggatcgtctaaggtccataagtatggaaatatccaattccatctgatcctttttccggttccggataagaaggcgattgtggacaccttcttgggagcagtctctttttacaagggggcagcatga

SEQ ID NO: 58461 - DNA, 2112 bp, Xanthobacter autotrophicus Py2
atgatggagctgtttgctgcatgttcggaggtcaatgatctaattgaaggcggtaatgacctagctgcgcgcaatatgctgataaaacttttggacgacctggatcgtagcaaaacgccatatccccaggtcttgaaccagctggttagatcggcggggctttttccctatctgcagctcgagaatgcgtcatgggaccagaaattcgtccatgaggcgttcgcagtcgatgtaggcaacagaaccgccacattgcaccgggagcaggccacggttctttcaaaacttctcggcggcaaaagcattgccgtgagtgcgccgacaagcttcggaaagagcttcataatcgacgcgtttatcgcggccaagcgacccgacactgtggtgatcatcgtgccgacgattgcgttgatggatgaaactcgccgtcgcctgtacaagaagttcgcccgcgattacggcattatcactgcgcctgacgcgccgctcgaggcgcgaaatattctgatttttccgcaggaacgagccttcggttacatcaataaactcaaaaagatcgatcttttagtcatcgatgaattctacaaggcaagcattgttcacgacaaggagcgggcaccgtcactgattaaggcaattgttctattatctcgccttgctgagcagcgttactacttagctccgaacatcaaaaaactagaagataatgtgttcacgagggacatggagtttcttgagctcctcgatttcaatacagtcttccttgaaaagcatgaaatttacaaggatattggtggagatgcgcaaaggaagtctgaagcgcttctgtcaattatcgcgccaagaagccagaaatcccttgtttacgccggaacttacacggagattaaaaaaattaccgatctcgttgtaggtcgaatgaacaaggtagaccgggcgcatacaaaccattttgcccgctggcttagagaaaactaccagcagaattgggttttagctgacctcgtggagcgcggtgtgggtgtgcacaatggccggatgcacagatgcctcagtcagcttcaggttctacttttcgagcatgaaaagggtttcgacagcatcgtgtcaacttcttcgattatcgaaggtgtgaatacatccgcacaaaatgtaataatatggaagagtaagctgggtcaaaacaatctcaaagattttacatataaaaacattatcggccggggtggccgcatgttcaaacattttgttgggcacatctaccttttggattcgccgccgaaggacgaagatacgcagcttcagatcgagtttcccgacaaagttctcggcggcttggacgagacccaggatcgtgaaagtctaactgagcggcagatcgaaaggattatcgagtataagcgccagatgtccgatatcgtcggtgccgacaatttcgcgcggatccagagagataacctactgcaggatagtgatgccgattttctgctccaggttgccagtgatatgaaagacaatccagatgactggaagggctttggctatcttaactcgagcaagccttctgactgggatcggatgctttataaggtaatcgcccttaaaccttcgggatgggatgcccctcatgggcgtgtcgtcgcggtggttaaggctctcgcggaaaactggacaaccaacatgccgactatgctgtggaagctctctggcaatggaatcgatgttgagggctttttccaacttgagcgaacgattacgttcaagctatcagctctcctaagcgatattaatgagcttcatagaatgatcgtaaattcatccgttgatatcggcggttttattggaaagatcagccacgcatttttgccaccagcagtgcatagtttggaagaatatgggcttccgcgaatgatctcgcgtaagttgcaccaagcgcgctatatagacttttcgcaaacggaactcgacctcagaagcgcgttgaatattttccgccgcaacgggctcgaggccgctctcagggtcgaaagcttgacggcgtttgatcgctacatccttcggtttttcttccacggcatcacgcccgacgacgtcgcttcagcaccagtgtag

SEQ ID NO: 58462 - DNA, 765 bp, Pseudomonas aeruginosa ATCC 700888
atgcggaatgccgtcgttgattatgcgattccgcgttcgaagctcgccgacgcaaaggcgcgcgacaacagattcaacagcaccgaggcagtcgccgaactaatcgagcgggccaagcgctcgtttaccgatttggcgaacaccggcgagggtggagagatgctgctgttcctgctggcggagcgctttctcaagctgccacagattctttgcaagatggatctcaagacggacacacgtgtgcactatcacggcgcggatggggtgtatgcgggcgtgacagcggagggcactttaaaactctactggggtgaatcaaaagtctacgcggatgcgagcgctgcgattcgcgactgtctcaattccctctccccgttcctgatcgagcccgaacacgaggaggcagggcgggagcgcgacctgatgctcctgagcgacaaggccgaccttagcaacccagccctcaccgatgcactcaagaagtattttgacaggtcgtcggtcatgtctaagcgggtccaatactgcggcgtggcccttgtaggcttcgacgcaccgttctacccgaaggacaatgcgaaggcggttgctgaggagattgtcgaggcgtcccgcaccgcacttaccggttggagcaatcgtattggcgagcggctcaaattggagaagctcgatcagatggaaatcgagttgttctgcgtccctctgccgtcggccgaaggtttccgcgcagcattcctcaaagcaatggggatcaaggaataa

SEQ ID NO: 58463 - DNA, 2601 bp, Pseudomonas aeruginosa ATCC 700888
atgagcctcgccgacctccaatcgtggctacttcaagagggtgttcgagacgatctcgatgcgatcactcgactaacagtacgcaacgaactcgataatctggcaccagatacctcggttcaatccgacgagcctattgactggcccagattgttgctcgccggcagtattcttgcgcgctccgatcaaaggggagatcaagaggccgcgcttcgagtcgcaaccgctgcagtttctttgacggatgatcaagcactcaaagacgctggcgcggttcttatgggcaagctttccaactttcgggccattacgttagccaccgaccgcaaattggtggcagccggccttgatgggcggcttggtatcgcattgcgtctcgaggctcagcggcgtgagatggaccgttctgtcttggtgcagtcgagcggggcttggctacaagtaaacgattttcagcagcgcttctggattaatgcagccggagatagctggctatcggcatccgcgcctaccgcctctggcaagacgtttctcgttcttcaatggcttatagaccaagtggttgcgggcgaagccagagttgcagtctaccttgctccgactcgcgcactggtttcagaaatagagaccaatctcaagagcatcctcggtagctccgaggagatagaggtgtcgtcccttccgctccctgataaatacaaagctgctcgggccggcagtgcacgagtgattctcgtatttactcaggagcgattacatcttctcgccaacgtgcttggtgacatgttcttaatagaccttctcatcgtggacgaggcgcacaagatcggggacaaccaacgcggcgtgattttgcaggatgcaatagagcgagccacccgcgccaaccccaagctgaaagctgtgtttatcagtccagcgacccagaacccggaagagctactcacggacgcgcctctcggtgtgcataccgtcgccgtcgatagcgactcgtccacggttcttcagaatttgatagttgcaacgcaggtgccgcggaaatcgaagctgtgggagcttactctccgacagcagggctcaaccctgccagtaggggttcttcagctcgcgagcacaccggaaggggtcaagaagcgcctcgcgtttatcgcagcagctgtcggcgaaagaggtggaacgctcgtatacgcgaacggagcaggagaggcggaagaggtcgctgacttgatcagtcagctcttgcccaagcttccaaccaccgatcctgagctttcagagctcgctgaacttgctcgtaagggagtgcaccaagacttccgactggcaccgctcgttgaactcggagtggcgtttcattatggcaatatgccgtctctactccgactcgagatagagcggctattccggtcagggaagatacgtttcctagtttgcacctccactctgattgagggcgtgaatttgtcctgccggacaatcgtggtgcgcggaccgcgaaaagggagaggccacccgatggagccgcacgacttctggaatttggctggccgcgcaggtcgatggggtgatgaattccaaggaaatattatctgcattgatccagaagatacgcaggcttggcctgcgggcgttccgggcagggcacgttatcccattaagcgcgaaagcgatgcggttctcgagcttggcgacggtatggcgggttatctagccaatcgtgggctatcggacctatcaagcatcgaggataaggataagttcgagcaggttggggcctatctactcaccacctttatgcggctcggctccatatcagcggcaagcctcgcgaaacgccatgatgccgagtcaattgcgaagctagatcaggccttgggggcgcttgcagaacagatcgaaatcagtgttgacctagctgctcgtcatccaggcgtaagtgcggttggtcttcagcaccttcttgaagcatttcgtgcttatccgggcgatgttgaaaaccttcttcctgctgacgttgcgagtttcgacagttatgaccgattcgtcacaattatgggaagagtcaacgatcacttgtttcttgctttcaaccccccagctcgcatcaggctgtatgcgttaattgtcgtcaaatggctaaagggctactcgctagcccgtatcattcgcgacagcatcgattggcatcaaaaaaacgataagcctttcagtcttcctggactgattcgtggcacaatggagttggtggagcaaatcgcgcggtttagggccccaaagtacctttccgcttatatggatgtgctgtatttgcatcttcgcgaaattggtcgtgaagacttgatcgacgatggtttggatattggcacgcaacttgagttcggtgtttcgtcgacgacacttctctcgctcatggaactgggtctttctcgtatgagcgctgtcgctttgtacgagagaattgcccgcgacgacctcaatagagatgaatgcttagcgtggatctccgagcgcatgagtcaattccgagcaatggacatcccggctatcatcatccgcgaggtgcgtgaacgtcttacgcttcctggcgaatcaaccacatag

SEQ ID NO: 58464 - DNA, 864 bp, Pseudomonas aeruginosa M8A.1
atgaagaagttatacaagcgtttttctaagttggcgatcaagtttgagtctgacgttctatgtagcggtctgcagaaagacccttatcatttgacgtatgagaatggggcttatcgtcaagacgagcttgtgaaagtcattcgtggcgcgcttcctcattttgctttgacttctgaagagtatcagaggctcaaggatgacgatgatgtcgatgagatgtatagacttgcattctctagaatctctaaagctaagaaagataagaaaggtgactatggcgaacttctgctgtttctcattttaaagactttttatgatgctgatcgcctagttacaaaggtgaagttacgaagctcggtcaaggatcaaattaaaggatttgattgtgctcactttactgtggatgagaacgaagaggtcaagctttggcttggagaagtaaaattctataaagatttttcaaaagctcttgatgatgtcgttggggagattgaacgacatactcaggggcaatatttgaaagatgagttttctatcctttgtcccaatgtcgaagtaaatcatgaggttccagtctcagaaaaaataatcgagatgcttgatgggacaatctctttagatgacgtccgcattgtgattccggcattgataacttacgagactgctatgtttaatgggtttagtaagttggatgacgcctttaaggcgaagatggcgaagcaaatagaagggaaatttgatctgattgataagagagagatcaaacagaatgttaatattgaagtatttttcattctcctgccattggcagatgtaggaagtattaaggaaaagcttgaggcaatggaggccgtatttgcatga

SEQ ID NO: 58465 - DNA, 2184 bp, Pseudomonas aeruginosa M8A.1
atgagtatatatcaggttttggcggatagggcatatagccggttagtgggaacggatgctcttgctatgcggaattctgaagcctttgactatattaaataccttgaggatatttataagctccttcaatctgaaagctattactcggttgctgtgcgtgagctgtgcttcgcttgtgaggttgccgacgatagtgattcgctcgcgaagagtattcttcagcagtgtattaaggcgtcacgtatatttttatatgaagagatgctgagaaagcgaggggttgatatatctgaagagaacggtctcttggacttggctcaaaatgctttctattctattgatggcgagattttgctgacaaaagaacagaaagacctatttgacctattcatgcgaaagcggcgcttggtggtaagtgctccgacgtcatttgggaagtcgagaattgttagagagataattacgcactgttcctacaactccattgcggttgttgttccaactaatgcgctgcttagcgagacttatcaggcctttagggaggatgtgcgcctctctgagtatggactcattttctccacccatatagagccgcctgaaggtaaggtgatttatatatttacgcctgagaaatttgatgtctatacagatgagcacaaaatatcttatgacttctttgtgtttgatgaggtttataaggtggacgctgaggatagaagatcgtcggttttctcaaactgtctgtataaggcctacttgaagaagtgtgactattatttaattggcccatattttaaagggtttagtaaagaatatctcgagcgcaccgatggtcacttcgttaagtttgagacagatatagtccaaaaagagactgttaattactatgatggggtcgccatttacgatggtaggacgctccctgctcgagaaagtaaagatgctagattgacccaggtactttcgaagatcgatggccaatcgattgtctatgttggcaggaaggactctgccgaaactagagcgaagtttatcgctaagtctagaaagctcgaaaagaaggatgacggactttttgagttaatagagtatattaagaaaaatatttcctctgaatggcacttgatagattttctgaaggtgggtgttgcttttcatcatgcaggagtccctaagtatattcagtctgagatagttgatttgtttaatgcgggggtgctggatgtaattgtgtgtacgccgactttgacggaaggtgttaatactagcgcaaaaaatgtaatattctacgatactacgaaagctgatatagctttaaccggattcgaggtgaagaacgttgttggccggtctgggcgctttggacaacactttatagggcgcgcaattttcctcgagagtcatgaggagcagagagatatgggggagatatttttcccgatattcgattatgacagtttgttgcccgaggataatattcagatttcttatggtgatttaagtgctaaggctagggagcagagggaggaaataaatagtattgtaggctctaaaaatgtcccgattgaaatcctcaggcagaataaatatgtgccatttgataatcagcttaggttaattgaatatctcaggtcgaaccctgatatacgtttagagctgaagggggctctcaatcccccgaataagcgacaggttgatctgattattgagttggtccacgaaatattatttgctgactctgacaaaagaagggcttggtctacagggaatatttctcgatttgttaaatttcatatttaccataatccgtctattaagcagatgattaaagagcactctgcggctaaggaggatacgaggataaggaatgtccttgacttggtttatacgtattttgaatatgctttgcctaagtatataaagtctttagagaatatatataatttcgtgtatcatgagaaggttagcttctctctttttattacaaggcttcaatatggaagtacggagcctcaagatattttactggcagatgcagggcttccacggtcaataatatcagtgctttcggataggctgtctggggtcaaagatatagaagagattcgaagaaggataaggggggctggggctatggatggtctgagcaatattgagaaaagaatgctgaaaaggcgtctttga

SEQ ID NO: 58466 - DNA, 765 bp, Pseudomonas aeruginosa BL21; identical to SEQ ID NO: 58462

SEQ ID NO: 58467 - DNA, 2601 bp, Pseudomonas aeruginosa BL21; identical to SEQ ID NO: 58463

SEQ ID NO: 58468 - DNA, 1629 bp, Pseudomonas aeruginosa BWHPSA016
atggatgtcgtgatggaacccaatgacgctggcggagtcgctgccaagcacggcttcatctttcaggattgtgttgccgcctactacgttacccagatgctgcgtgataaggcgattcagcgtgtgcgctgtgaggtcaccgacgacattgatgtcgtgtacgacaatttcgtcgaattcgtgcaggtgaagactactaacaaggcgcactgggccagaagtgatctagtcgttctcagccgaggtgacgggaaggccaagattccacacagctcgattctgcataagtcgatgcaaagtgaaccagagctcaccgtgccaagaaaattcaaaatcgtcacggagcatccggtcaacgtttcccttgaatacctgcgtatcagccgtgacgaacgcaatggcaagccagggcgtgatgagttgatcgactacctgaactcgaagacctctaatttcgtcgccaccagtggcgtggatgtggctacctgggttgacgcaatgtattgggaggtgttccgaaccatgcgcgagattgagctcatgggtattaggaacattcgaaacgctgcgtatgagcttcatggggttacattgagcaccgaggccacggcggaggatatttggcgagggattttagatacggtcactcgtaaaggtgccctgtcgcgcaaaatccactcggcagatagcaagtcctatcttcgtgcagatttgaatgcgtggttccagaccctggttgaagaggatcaaaagcacgcgggccgtaaagtgtatgtcaaacgccagctacctcatattttggttccgttccgcagcacactggtcaccccatgcgctaagcgtagtggccttgtcctccaccagaagtacagcctcaagcgttaccgataccagtatatcgccgacaatgtttgcaaatggctagatgaggttttccttcgccccaatgaactcgctgacatccacaagctatcgattgtcgagcagaggcagcgcttaagaaacacggtgttcgcttcattggcggatgtacgttcctttctggggcgcgttctccttcatgccacgatacggcaattgcattcgagtcagcccatcccgtgcctgctttatcttgaaagccaggggaaagaaaagatactcgaaaatgtacacatcgttcggcgagatccggaaggcgatcagctgtgggttggcttcagtgagcttgtcacggcggtcaatattataaagcgtctgcctgagatccgacagcagctatacgatgagatcgaagcgtgctttagcgaagcccgaggaaaaattctcgacatcaaggatgatgcctacctactacaccatgacatcgacgtcattctggacgaaagcaactcttttgatgagcacttggatcgattccggtttgtgctgttcattggttatgactcttcgttacttacagaccctgaaactccagggcatgaagataaactggaggatgaaactgcagcactcttcgaagcatttgtcgatgacttgcagcgaaaccccatcttcgcgaagctcacaatcgatgtgtttatctaccctgcaccaagcttggacgcattgacccaattggtagacaggaaggtcagggaggctgtatga

SEQ ID NO: 58469 - DNA, 2181 bp, Pseudomonas aeruginosa BWHPSA016
atgaacgaagtgtatcaggcggcaaagatgagtttggacagtgatgggttctctgcatttaggtacctatcagctatcaactctctgttgtccaatccagtttccacttccctggggagagacctgacaatccgagcgctcggtgcccgtgataaattcaccggccatgtaggaattctgcgcaatatggttaggaaggccggactgtttccatacttgaaaaaagagttttctgagcattctcccagtgatcgggtagccttgaatttataccgaacgccgttctcggctgacttcgttttccattcgatgcaatttcaggttttcgatctcctcaaggcaggtcgtaatgtcgtgctcagtgctcctaccagtatgggtaagagcgccatcgtcgattcgctgctggggctccgtagtttcaaacgggtcgtactcgtagtgcccacggtcgcgctggctgatgagacccgacgacgtcttcaagagcgcttcggcgatacctatcagatcattcatcacagttcacagaagagccacagagactgggttgtgtacgttttgactcaggaaagggttaacgagcgagatgatatcgaagatatcgacattttcgttatcgacgagttttacaaattggcttttcggcaactcaaaaagggtatcactgacttcaaagacgagagagtcattgagttaaatattgccctgagcaagctattaaaggtgtccaggcagttctatctgaccgggcctttcgtcaacagtattcgtggcctcacagagcttggttacgaccatgcgttcatcactgccgacttcaataccgtagccgtcgatgtgcagacctacggtgtcgatgccaatgatgacgaaggaaaactcaaggccctagccattatcgcgccgcagtgcaaagggtcgacaatcatctattgcaagtcctcaggcgtggcggggaaggttgctcgcgaacttgtccggcttgggtatggccaaccattccaagatgcccatgtggaatgggttagtaaggaattcgatcctgactgggactacacttacgcgctcaaaaacgggataggtttgcacttcggtggcctgcctagggctcttcaacaatacactgcagaccgtttcaacgcaggtgaccttcgttttctactgtgcacctctaccattattgagggtgtgaatacgattgcgaagaatgtggtcatctatgacaaccgtaatggcaacactgggatcgacaaattcacccacggaaatatcaaaggccgtgcaggcaggatgggtgtccatttcgttggcaaggtgttctgcctggaagatgttccggaagacaacctgaaccaggaggtcgatgtccctctggggattcagggtgctgatacgccattgaacttgctcgcgagcgcacagcctgatcacttgtccgaatattcccaggacagatgtgaagccgcctttgcccaggatcggttttctatcgatctggtcaagaaacactcttacttcaggatggagcagttcgagcagctgtacagtatggttgagatgctcagggaggaggagttcgactcactcgtgtttcactggtcaccagcgcctggttttctgacagccttggccaagatcagcagcaggctcgtgccaaaggcgttttctacgaatggactgcagaccaaaacccacgatgccatcttggccaagctaacgagctatcagaaagcagagagttactcggcttatctgaaaagccagatagagcacaccaagcaatggagcaaggttgatgagaaggtaaatctgtccaccgcactcaacaacgacctaaaactggtgagcaataccttcggctacaccattccgaaggtgctcgggctgctggaagacgtggttcgcttgcacgctatcaagaagggcatccgcagcacgattgactacagttacgtcagaatgagctttgagaatctccacctccctccaggggtgaatgcgcttgaggaaataggtatccccattcagacactgcaccgtatgtctaagctgctgaacttcccagaaggagcaagtgtggatgagttggctgactatcttcgacagaacgagcgggcttggaggtctatgggccacgtcgaccagagcttcgtcagacgcgcgttgggagcggcatga

SEQ ID NO: 58470 - DNA, 765 bp, Pseudomonas aeruginosa X13273; identical to SEQ ID NO: 58462

SEQ ID NO: 58471 - DNA, 2601 bp, Pseudomonas aeruginosa X13273; identical to SEQ ID NO: 58463

SEQ ID NO: 58472 - DNA, 765 bp, Pseudomonas aeruginosa S54485; identical to SEQ ID NO: 58462

SEQ ID NO: 58473 - DNA, 2601 bp, Pseudomonas aeruginosa S54485; identical to SEQ ID NO: 58463

SEQ ID NO: 58474 - DNA, 839 bp, Pseudomonas aeruginosa VRFPA08
ctcatattttggttccgttccgcagcacactggtcaccccatgcgctaagcgtagtggccttgtcctccaccagaagtacagcctcaagcgttaccgataccagtatatcgccgacaatgtttgcaaatggctagatgaggttttccttcgccccaatgaactcgctgacatccacaagctatcgattgtcgagcagaggcagcgcttaagaaacacggtgttcgcttcattggcggatgtacgttcctttctggggcgcgttctccttcatgccacgatacggcaattgcattcgagtcagcccatcccgtgcctgctttatcttgaaagccaggggaaagaaaagatactcgaaaatgtacacatcgttcggcgaaatccggaaggcgatcagctgtgggttggcttcagtgagcttgtcacggcggtcaatattataaagcgtctgcctgagatccgacagcagctatacgatgagatcgaagcgtgctttagcgaagcccgaggaaaaattctcgacatcaaggatgatgcctacctactacaccatgacatcgacgtcattctggacgaaagcaactcttttgatgagcacttggatcgattccggtttgtgctgttcattggttatgactcttcgttacttacagaccctgaaactccagggcatgaagataaactggaggatgaaactgcagcactcttcgaagcatttgtcgatgacttgcagcgaaaccccatcttcgcgaagctcacaatcgatgtgtttatctaccctgcaccaagcttggacgcattgacccaattggtagacaggaaggtcagggaggctgtatga

SEQ ID NO: 58475 - DNA, 1995 bp, Pseudomonas aeruginosa VRFPA08
atggttaggaaggccggactgtttccatacttgaaaaaagagttttctgagcattctcccagtgatcgggtagccttgaatttataccgaacgccgttctcggctgacttcgttttccattcgatgcaatttcaggttttcgatctcctcaaggcaggtcgtaatgtcgtgctcagtgctcctaccagtatgggtaagagcgccatcgtcgattcgctgctggggctccgtagtttcaaacgggtcgtactcgtagtgcccacggtcgcgctggctgatgagacccgacgacgtcttcaagagcgcttcggcgatacctatcagatcattcatcacagttcacagaagagccacagagactgggttgtgtacgttttgactcaggaaagggttaacgagcgagatgatatcgaagatatcgacattttcgttatcgacgagttttacaaattggcttttcggcaactcaaaaagggtatcactgacttcaaagacgagagagtcattgagttaaatattgccctgagcaagctattaaaggtgtccaggcagttctatctgaccgggcctttcgtcaacagtattcgtggcctcacagagcttggttacgaccatgcgttcatcactgccgacttcaataccgtagccgtcgatgtgcagacctacggtgtcgatgccaatgatgacgaaggaaaactcaaggccctagccattatcgcgccgcagtgcaaagggtcgacaatcatctattgcaagtcctcaggcgtggcggggaaggttgctcgcgaacttgtccggcttgggtatggccaaccattccaagatgcccatgtggaatgggttagtaaggaattcgatcctgactgggactacacttacgcgctcaaaaacgggataggtttgcacttcggtggcctgcctagggctcttcaacaatacactgcagaccgtttcaacgcaggtgaccttcgttttctactgtgcacctctaccattattgagggtgtgaatacgattgcgaagaatgtggtcatctatgacaaccgtaatggcaacactgggatcgacaaattcacccacggaaatatcaaaggccgtgcaggcaggatgggtgtccatttcgttggcaaggtgttctgcctggaagatgttccggaagacaacctgaaccaggaggtcgatgtccctctggggattcagggtgctgatacgccattgaacttgctcgcgagcgcacagcctgatcacttgtccgaatattcccaggacagatgtgaagccgcctttgcccaggatcggttttctatcgatctggtcaagaaacactcttacttcaggatggagcagttcgagcagctgtacagtatggttgagatgctcagggaggaggagttcgactcactcgtgtttcactggtcaccagcgcctggttttctgacagccttggccaagatcagcagcaggctcgtgccaaaggcgttttctacgaatggactgcagaccaaaacccacgatgccatcttggccaagctaacgagctatcagaaagcagagagttactcggcttatctgaaaagccagatagagcacaccaagcaatggagcaaggttgatgagaaggtaaatctgtccaccgcactcaacaacgacctaaaactggtgagcaataccttcggctacaccattccgaaggtgctcgggctgctggaagacgtggttcgcttgcacgctatcaagaagggcatccgcagcacgattgactacagttacgtcagaatgagctttgagaatctccacctccctccaggggtgaatgcgcttgaggaaataggtatccccattcagacactgcaccgtatgtctaagctgctgaacttcccagaaggagcaagtgtggatgagttggctgactatcttcgacagaacgagcgggcttggaggtctatgggccacgtcgaccagagcttcgtcagacgcgcgttgggagcggcatga

SEQ ID NO: 58476 - DNA, 843 bp, Pseudomonas aeruginosa BWHPSA046
atggtggtgaagtatcctgaccctcttctcgaggtaagggcttgttgcatagagagccctccattcacctcactatgtgttggttatgaggggggggtatggcgttcgaaagctttggccgaccacttattccagtggattccttatgttgctcttgatcaagaaagccagctttccatgggatcgcataatttccttgagcttctccaaagagctacagcgcatatttacaataccaaaaagactgaaaacagaggtgagatcggagaaatccttctacacatcgcatgcgttactagcttcaacacctcacccatactttgcaagctaatattaaaaacctcttcaaacgataccgttaaaggttttgatggggttcacgtcctagtaaaagacgataaagttgaactctggcttggagagtctaaattctactcagacccaagatcagcaatcagagaagccgtcaaatcaataaaagagcacatacttccagatttcctcaacacagaaaaggccatgatcatcggacatatcggccataacattccaaaaaaagaagagataactcgcttattcaaaagacaaacatcctccgatgagcttctgagaatatcagtattccctatcctcatagcatatgagagcaagagcgttgcctcctttacagagctaacagatcgatactacgaagagcttctgatcgaatcggaagctctgagacagtatttcgctgatcaatcaaagaacatgccactgcgctttcagataatttttgtccccatagaaagcaaatcagatgtaatttcaaaatttgacaagcgactggagtcattttcatga

SEQ ID NO: 58477 - DNA, 2151 bp, Pseudomonas aeruginosa BWHPSA046
atgagcattcttgaggaactaaaaaaccttaagcaaagtgacttcctcagctccgatcaagtatttgaagcaatattcctagcaggctcactgctaaatgatagtgatcgggagagctccgagccgcttgatattgcagttagactattagccgctagacagaatggacagacgcccaacagctgctctgacgcaattgaatatcttgccgaagagtgcggactataccagtacatagacaaaaataaattcagtttagttacccagtcgataatcgagtcacacgctgtaattttgggaaaaaaattttatcttcatgcaaaacagatgcaggccctcctgcatcttttatcaggaaaaaatctgatacttagtgcgccaaccagctttggaaaaagcattttggtagacgcctttatatctattaaacgcccacatacagtggtaataatactcccaaccatagctctcatcgatgaaacgagaaggcgactaatgtcgtcatttcgcgagcactatacaatactgacctctgcgaccaagtcatacaacaaagaaaaaccaagtatattcatacttacacaagagcgattcattcttagagatgacgtggactatattgactttttatttgtagatgaattctataaactcgacccagatagagaagactctagatacgaaccgctaaacattgcattatataaggcccttaaaattaccaaacaatcctttatggccggaccaaacataaaggacatcgaaataggccctaagtggacaggaaaattcaccttccttcaaacggacttcagcactgtatctgtaaatattattgatcgatcacgcagcgaaaatagattaaatacctttctacaagacctacggggaattcgcacaggctcgtcgcttatcttcaccgcatcgcccggctctgcccagaacctactgaggataactatgctcaaggagtttgggcatgcatccaaaataggatcaagcttgggcgactggattgccagaaactaccactcggaatggtccctcgccaacggcgtacgaaggggactcgcaacacaccatggtcgcctaccaagatcactcggacaactcttcatcaacttgtttgacaagggagttatcaatactctcttttgcacatccactttaattgaaggagtaaacacgtccgcagccaacgtattcatttacgataaaaagattaatagaacaaacttcgactttttttcctttgcaaatattcgaggaagagtcggccgtatgatgcagcactttgtcggaaatgcttacctctatcatgagccgccggaagaaattgaaaccaacgtaatagttcctgttctggcagaccctggaaactcaacagactacattctcatgaacgttgactatgagtcgctctctgccgatggaaaacagagacaggatgagctcctcgagcaaaccggactcacggaacctgtacttaaagaacatggcggtctcggcataaacatgctgattctgcttcgagaaaaaataatagaagtaatggctagaagcccaaatggactaatttggagcggcatgcctagcaatgcacaacgtagaaccttagcagagctagtcgtatttgtagcaaagagcaaaaacgagcgctttggactatttacatacaagcaggtctcgtgggcatggtcccagttaagctactatcaaaagacagctgactttttaagctggtttacaattaaattttctgccgaagagattgaggaatcaatcgaccgtgcatttcaattccttcaggcgtgcgaattcaagttccctcaaaaagtaatggcaatagagtcaatagtcaaaagcctttatccaaaatcgaaaattgactatagcttttacgccgcagcacttgaaagctggttcaggccctcctggatgaagcagctagatgaaataggcgtaccccttccattgtcagagagactctcaatatatttacgaaaccctgactcctcagaagaagcaatacagcaaatatcaaaactcaataccagagaaattagtgaaatagatgtaattgatcgctacctaataagaaacatactcatagacaccaaaggggttggcgtgcagttaaaacttgcgtaa

SEQ ID NO: 58478 - DNA, 927 bp, Pseudomonas aeruginosa 3579
atggtcaaactagcagaaataaataagttaatagctgttgagccagaggactataaagagtgcatagactcaattgagcatacacaaagtacaaaaaatctaaaaaccatcttaagatttcaccaccttaagtttgatggcaacggccgcccaatgtctagggccctcgccgagctactgtaccaatacataattcactattgtatttctgcgaaaaacagatcgtctccaattacagcgaaggagtcggctcagcttacgaaagaagctcgaaaattatttcgtcaccccgacgttaccgatacgagtcctgatagaacgggagaggctggcgaaacattactattcttcctcatggagtcaataatccaagcaccacaaatcgtatccaaaatggaactcaagacaaatagaaaactcgaggccaatggatcggacgggattcatgccagatggaactctgaggatcagatagttgatttctattttggtgaatcaaagctatatcaaaacatagatgccgctatcaactctgcattagaaagcatagaaagcttccatgcagacgagatatataagcatgaattcacaatgataaccaagcacttcaagtatgcagacccggaagtacaaaaagcagtcaccgagcacataaagctaggcgaaccgggaccagatgcgagaataaaccacgcatgtctaataggctacaactggaatgcatatgaaaatcaaaataacaaaagcagccgcgaactttccgcagaattcaaagagaaattcttgctagaaacctcatcaatcgccgaaaagctcgacaacaaactaaatgggttcacgagaaagcaccttcgctttgatatatttttcatgcctttcccttccatccagaacttccgaaacgagttcaacgaagcgctagattaa

SEQ ID NO: 58479 - DNA, 2172 bp, Pseudomonas aeruginosa 3579
atgcttttatcattggaaagacttgccagagaagttgaaaacaccactgaggacggcataaccctaacggacttccaacataaattctacacaaacttggaaacacagaagtccctaagcatttcagctcctacttccgccggaaagtctttcatcctaaacttagacttaatcagaagactaaagaccggaaaagaagagaatatagtctacatagttccgacgagagctctaatctctgaagtctcagcacgaataaggaaaactgtaaaagacagagaaatagccggaattgtaataagaacagcaccatttccggtaaaagaaacagcccacctaaagaatgtgatctatgttctaacaccagagcgcctgttaagtctcctgaaaccagagaacaataaaaaaaagatcacctcaatttttgtagatgaagctcatgagatccagaaggggaacagagggataactctacaaaatgctgtagatctagcactaggcctccacccatatgcctcagtactatttgccagcccactcatcaataatcctggttatttcttaagcttatttggaagacaggaccaggggctattctttactgagactagatcaccagtttcgcaaaatattcttctaatatcagaagcaccgagacagccaaacaagatacagctatcacttcttgctgcaaataaaaatatcgacttaggtacaacaccagtaaatttcagattcagagggtcaaaattcaggcagcgcgcggagtttgctaacgaaataaccctcagcaatgaatcgacaattatatttgcaaatggccctggcgatgctgaaacagttgcagaagaattattaaccatagacagagaatacaagccctctgaggaagtaaaagactttataagctttataaagtctgaagtacatgaagaataccccctagccagaactctagaacaaggtatcgctgtacattatggagacatgccatcgattgtcagagctggcatcgaggatctattcaagtctaccgagataagattcctttgctgtactagcactttactacaaggcgtgaacctgccagccaagcatattgtcattgagaaccctcatagcggtgacaaaccgatgacacgatcagattttctaaatctttcaggccgtgcaggcaggttacttcaagaatttcatgggaatatctggtgcattcgaccaagcgactggagcgaatcatcgtatacgggagaaaaactacaagaaattaagtcatcgatgtcaaaactaatggatgacggaggagaattaatcaataaactagtttcaggggaaatcggagaagacagcaagaaccttgccgaagcaggctttagtcgactatatcaagaaacaagaaccttaggcgaagaggaaattatattaaaatacaagacagaggataaccttgagactctaacaaaaaatttagatcatataaaaagcctcaccataactcttccacaagaaatattagattctcacagcagcttaaggccagatcacttacaggttctgtacgataagcttttcggcgcaatctacacagagcaattctctctgataaatccgtttcaacagggcggatacaaaagaatgtgcagcgcaatagaaataatttccgaagtatttggatgggccgaaaacccaaaatacagaaattttatagcctatcaggcccatcagtgggcaaccggaacaccaataggctccctaataaaaagtcgcgttaacttcagaaaaagagaaaacgaatccgaaaagacctcaacaataatcaggcaattcttaaaagttattgaaacagagatcagattcaaactagtaaagtatttcagtgcatatgaggatataataaaacattgcctcatagagaaaggctttagcgaagaaagtgcaaagcaggctccttaccatacattccttgaatttggctcatgctccccaatcgaactaagcctaatgtctcttggcttctcaagattcactgcaatacgcctaaaaaatgcagttaactgggggaactcagaagagatagaagactatctttttgcactatccaagataaatctatccaacataaacatgcctagagtttgcataaaagaaataagagacattcttggccaatag

SEQ ID NO: 58480 - DNA, 927 bp, Pseudomonas aeruginosa 3578; identical to SEQ ID NO: 58478

SEQ ID NO: 58481 - DNA, 2172 bp, Pseudomonas aeruginosa 3578; identical to SEQ ID NO: 58479

SEQ ID NO: 58482 - DNA, 843 bp, Pseudomonas aeruginosa 3576; identical to SEQ ID NO: 58476

SEQ ID NO: 58483 - DNA, 2151 bp, Pseudomonas aeruginosa 3576; identical to SEQ ID NO: 58477

SEQ ID NO: 58484 - DNA, 1011 bp, Pseudomonas aeruginosa BWH055
atgaacggcgtgcaggacaacgacaagacggatgccgagatcgtccaggacgcgctcgagaaactgctcgacaagtcaccactggggaaattcgtcaagctcacaatccggtccgaggatccgacaactccactgacgaccttgatgcatatagggttcaaggaaaatctcggtaacacgctggcgctagcagactttctttggacacaggcgctgaactacgcactgacgagaaggcggcgcgagcagattcgggccaggctggaggatgcaccgcctggagacatcagcgcgatcgcagcccctgtcaacgccgcgcgcgacgcctttatacaattccacaaagactaccccagccgcgccagtgaagtaggagaggtgctggcctactgcatcgccgttaacgatctcggtgctgctcaggtggcggcgaagatgtcactaaagacctcagggaacatgcccgtgcacggactcgatggtatccatgccaaggtcgaggcaggggcgctctatgtattctttctggagtcgaagctaagtcaaagcgcgaacgcaggcgtcaaagattacgctgaatcggttgcaggattcggcagcaacctcaagcagtatctcttggaatactcgattgtcagggatttgggcaacctagattcgcttactggcgccgagcgcgacttagcgcttgcttgcttcgacgtgatggacagtccggacaccgtcgagcggcgagagcgatccgtaggcgtgattctgtataaagaaaatcagttcgaaaaactctctcccgtaaagcaggggcagccagtcggattccacgaggccgagttcgtagcggcatatgcctcgcagctggcccaccaccaaaacgcggcactgaaacacctcgccgctggaaacgtggatactaacaagtgccaggtgtatttcgtagccgtccccgacgtcgacgaactgcgtgagcagttctaccagcgtatgggctacatacccaaggtcaaggaatga

SEQ ID NO: 58485 - DNA, 2607 bp, Pseudomonas aeruginosa BWH055
atgagtacgttcgcccaagacttgtctagacgactgaccggtcacgcgtccttttggacctatcttggacagcttcagggagctggagctgcccgcacactggccagaccgttggacgatgctccgaccttagatatcgataaggtactcaaactgctctactgcgcatcggtcttcgtgcagaccgatgcggacgaactaaagcggctcgctcaggcaatcgttctcaacacactgttgctacacgaggacggcgaactgcgcgaacggagcctccatgtcctcacagaactgggaaacttcccggggttgtcctatgccgaacgcgcctatggtgcgggcgaccagacgctgctcggcagaatgaaccgtcaggtatcgcaggcattgaatacggtagccataaatgggttgcccgtggcgctcaccgactatcagaaacaggtttgggacagactgcctattacccgagcgcttgccatatcggctcccacttcggcaggaaagtcatacgttgttatcgaacatctttgtcagcaggccgagaagcaccaacactttacagccgtctacatcgcgccgacccgtgcacttctgtcggaggtgcagcagaagatccaactccgcctcaagggccgggacgaaatccgaatatcgaccgtaccatcgctggacccactccagcgcacctgtcaggtcttcgtcctaacacaggagaggctgcaggtactcctatctatatatggcgcagcattcaacgtcgtagtcgtggacgaggcccagaacctgtcggaccacgcgcgagggatgatcttgcaagactgcctccagacgttgatgtcgcgaagcagcacaacgcaattggtaatgctcgctcccggcgccaccggccttccggaaattgccaaggcgattggcgtagatgcactgcgccccgagttcactggtgtctctccggtacttcagaaccgtatcgtcgtaagcaaagttaaaggcagtcctaacgagatgcgattgcagttactacgcggtcctgaggagcgcgtagagatcggtaatctagtgtcctctctcggcctggacaataaggccacaaggctggcagccattgcgctcgagcttggcggcggcgaaggctcgctcgtttatgagacaggccctcgggaggctgagaagaccgctctgcagctaatgaacgagcttcgtcgaagacccccagatccccaggatcaggcgctgctggatctgtccgagttcattaaggaacatatccatcctgagtatcagctcgcggcaatggtcacccacggagtcgcttatcactatggccgaatgccaagcctgctgcgcgaggcgatcgagtcatcattcaagcagacgcgaactggactgcgttatctcgtttgcactacgaccctcgcacaaggaatcaatctaccggcacggaatgttttcatcgacacgcccaagcgcgggcggggagaaaacctcgatccagcgttactctggaatttcgcgggtcgagctggccgtctaagtcaggacatcgtcggcaacgtattcctactggactacgacgaatgggacaccaggcccatggacgatttcgttccgttcgaggtgaagtcagccatcacgactactctctcccagcagttcgaccgtgtgatgggagctgtacgaggcaacatgccagtagcgcttccgtggaatgccgaggccactcggataaaagcatgtgcgggcctacttatcgcaaaagctgccgagggaatatctgacaagttcctcgcatcggtccttcctccggaccggcaggactccgctgctgaggtctcagagtccgccgtcggcgcggcacaaagtattggcctacccgcatcacttctccatgctaactggaccatcgacccgtatggcctgcgacgactgtatgaccgactgctggagaagatcgacagtgatgatctaagcgatgtaattccgctaaacccccgtgaggctcccgaaggcctttaccagagtatcttcaagcgcatactacggacggtcgataaacagcagggaaactttggagcgttggtagcgggcctcgcgatccagtggatgaaagggatgccatatcccgtaatactgaaatactgggtgaaaagggcacgtttagcagaagagcgcgatgctcagaaagccgccgaagcagggacacgccctaagcgtcccaggaccgtcgatgcgctgatacgagaggccttcgacctcatcgaggatgtggtccgcttccgcttcgtccagctaggaaaggcctatcgcgacctgcttgtgctggcgctacaggagaaaggcctacataagcgcgtcccagaggtctacgacttcgcactcgcacttgagctcggcgtctcgacggagactggcaccgcctttgtcgaactgggcctttcacggatcgctgcatcggcgctggaagatctgttcccgagctcaagcatgacagttgccgaagcacgccaagctctgcgtacactcgatgttgtagcgaacaaacttaaccccatcatcgtgggcgagctcgacaggctaggtcttcgagatccaattgagggataa

SEQ ID NO: 58486 - DNA, 843 bp, Pseudomonas aeruginosa BWH052; identical to SEQ ID NO: 58476

SEQ ID NO: 58487 - DNA, 2151 bp, Pseudomonas aeruginosa BWH052; identical to SEQ ID NO: 58477

SEQ ID NO: 58488 - DNA, 966 bp, Pseudomonas aeruginosa
ttggctgacgcgcgaacaaccgtcttcgacgggctacttgatccgatcacgggtatcgacaacgtgctcaaggaggtagcgggagacccgaagctcgagcagccccggctcatctacctgcggatgcacgaagacgaaccgcagcttgcgttgctggccgagctgttgaccgatcttctcgtcgactatgcactacccctgacaaagaggcgacgagctaaccaggccgggaccacctcacactcaggcggcagtacagccgcacactcaaggctcgtgcgcgaagcgcggcaactgctcctgaagttcacggagcagcacaaagctcgctttggcgaactcggtgaattgctctcctacgctgttgcggttcactacatgggcgccgcacaagtgggctcaaagatggcgctaaaaaccaacagcaacatgcccgtgcatggggttgacggtctccacgtgaaggcaaacgaggacggaaccatcaccttcttcgttctagagtccaagattgttcccaatgcgaccgacgcatcacgggacatgatcgagtcgatcttcgagtaccaagcggatcgagccaaactgctcaacgagcttcgacttgtcaacgatatgtcgaacctcgatgcgctggagggtgctcagcgcgatgaggccaagtcgtacttcgatgcgtactcgaacactggcaaccacctcaagcgccgagacgtgcacctaggaagtttggtgatcagcgaggaggcatacaaagacaagctggcctatgaccctaatgcagaccacgatgctcacgagaagcatctcgagtccctatacaaggcaaagcaccagcgatttcgagacaaccttacccgccaagctcaagctcgaaacgtcaatttggcgaagtgcgaggtcttcctcatcgcagtgccggacgtcgatgaatttaagcgtgcttttgccgcactgaacccatga

SEQ ID NO: 58489 - DNA, 2634 bp, Pseudomonas aeruginosa
atgactagcttcgcaaccgaagtctctggcgacattcgccaaaacgctgcattctggaaagatttggcgggcttgcgcgcgatgggcatccgatcaaccttgccctctgagcatgacagcaaggctggcatcgtcgggccggctcttggcgacgacgggctggccagactgctgaactctgccagcatctttgctctcgcagacgacgaggaaagccgtgaccttgcccagcagattgctgtcttcgcatcgctcgccttcgacagcccagaggttcgcggcgcagcggtgcacattctgtccggcttgggaaacttcccaggccttaagaaggttgagcctgaaatttcggagggattagggtttcatactcatttacgcagcgcgctgctgaaggagctcgcatcggtcgagatagacggatctcgcatctcactaacagacttccagctagacgtctgggaaatcctgaagtccagcgcagcaactgccatctcggcgccgacatccgcgggcaagtcgttcgtcgtcctcgagcatctggccgagacagcaattcaagctgaacacttcgttgcgatgtacatcgctcccactcgtgcgttgctagctgaaatccagggcaagctcgaacgtcggcttgcgaagatcagcagcgagcttcgcattacaacgattcccgttcctgatcccgagcatcgggcgaagcagatttacgtcctgacgcaagagcgcgcgcagttgctgctctctgcgatagatctggctgatgctgtcgacctagtcatcatcgacgaggcacaagcgatcggagacgacagccgcgggatgatcctccaggacgtcattgagaagattcacaaagcgagcccaagcgctcgcttcctattcctggcaccaggcgcgacaggcttcgccctggtcggcgaaagcgtcggcttgaacaaccttgacgttatggagacaggactgtctcccgtcgtgcagaaccgcatcagcgtcaacttcccgccagagaacgaacacgtcgtccatcttgatctggtaacggccgaccgcttggattccattggatcctacacgttcaaccgcggctttgccttggacgatgaccagaagctagcggctgtcgccgaagagttcggtgcgtccgggcggtcgctggtctacgcaactggtgccaagaatgcggaagacctcagcaagctgctggccctcaaccgaaaggacagggacacggcgtcgctcaatgagctggcaaagttcatcgagcagcacgtccacaagcgctattcgcttgcgcgatttgtgcggcgcggcgtcgccttccactacgggaacatgccaagtctcttgcgcgagggtatcgagacgagcttccgcgagggtcatctcgactacctgtgctgcaccacaacgcttttccagggtgtcaatctgcctgcacgaaatgtcttcatcgacacgcccactcgtggcaacaggggcgagcttctcgaggaagcgtcgctgtggaacttcgctggacgagccggtcgcctcggcgaggaagttgtaggcaacgtgttcctggtcaactacgaaaagtgggagcacaagctcctgactgagcgcaagccattccaactgaaggtggccttcaaagacaccatagagaatgactttaacgcagttgtcgaactcttggatgccgcagccgaaccaaaacctgacgaagaacgcaagcgccccgcaccgcggacgacagctgcggcgggtctggtactgttccgcgcggcgcaaggctcgcttgaatcgctgttgaagcgcccgaatctatcattgacgtccgagaagcgcgagcagctgtccgcctccactgaccgagcgttggccaaccttggcctgccggagtcggttctagcgagcagctggatgctcgatcccgtggccctggccagcctgctcgaacgccttcggcagggcgttcacaagaaagagttcgcgaagttgatgcctgtgaacccgtcatccgacgcgtatgcagtctacaacgccattttcagacgtctctacaagcacctcggcagagccaagctcacaggcgatgagaataaaggcacgagaggctacgtgaaccacgtgacagtgacggccctcaagtggatgcgcggcgacgcgttgactcaactggtgaatgaagctgttaggttcaagctctctgccgcgaaacagtccaccaggaaaacaccggaacaaacggtcgttgacggcgctatccgcgacatgttcgttacgattgagcagactatccgcttcacgctcgtccagtgggcaaaggcttacgtcgacctactgaagttcgtgctagtagaaaagggatatgccgagcgcgttgcagaagtttatgacttctcgctcgcgttggagctgggcgtgtctacgacgactggcaggtccctgatcgagttcgggctgtctcgcatcactgcagctgccgtggctggtctgattaccgactcctcgcttacgcccgagcaggtcaaggagtggattcgcgcccagcctgaggacatgctctcccagctgtctgggctagttttggcagaacttcatagcaaggagctgttggcgcctgtagcggccgaagattaa

SEQ ID NO: 58490 - DNA, 948 bp, Pseudomonas aeruginosa
ttgtcgatcatcacccctgccgatctcgagtctgctctaacggggaacccggaagcacttgaggttcacctgacgctcgtcgagcgagacgtaccgattgacgggcatttagtcaagattcactgccactgtctttcagtggatggaaatggccgtgttcaaccgcatcggctggcagagttcatgcggaatgccgtcgttgattatgcgattccgcgttcgaagctcgccgacgcaaaggcgcgcgacaacagattcaacagcaccgaggcagtcgccgaactaatcgagcgggccaagcgctcgtttaccgatttggcgaacaccggcgagggtggagagatgctgctgttcctgctggcggagcgctttctcaagctgccacagattctttgcaagatggatctcaagacggacacacgtgtgcactatcacggcgcggatggggtgtatgcgggcgtgacagcggagggcactttaaaactctactggggtgaatcaaaagtctacgcggatgcgagcgctgcgattcgcgactgtctcaattccctctccccgttcctgatcgagcccgaacacgaggaggcagggcgggagcgcgacctgatgctcctgagcgacaaggccgaccttagcaacccagccctcaccgatgcactcaagaagtattttgacaggtcgtcggtcatgtctaagcgggtccaatactgcggcgtggcccttgtaggcttcgacgcaccgttctacccgaaggacaatgcgaaggcggttgctgaggagattgtcgaggcgtcccgcaccgcacttaccggttggagcaatcgtattggcgagcggctcaaattggagaagctcgatcagatggaaatcgagttgttctgcgtccctctgccgtcggccgaaggtttccgcgcagcattcctcaaagcaatggggatcaaggaataa

SEQ ID NO: 58491 - DNA, 2601 bp, Pseudomonas aeruginosa
atgagcctcgccgacctccaatcgtggctacttcaagagggtgttcgagacgatctcgatgcgatcactcgactaacagtacgcaacgaactcgataatctggcaccagatacctcggttcaatccgacgagcctattgactggcccagattgttgctcgccggcagtattcttgcgcgctccgatcaaaggggagatcaagaggccgcgcttcgagtcgcaaccgctgcagtttctttgacggatgatcaagcactcaaagacgctggcgcggttcttatgggcaagctttccaactttcgggccattacgttagccaccgaccgcaaattggtggcagccggccttgatgggcggcttggtatcgcattgcgtctcgaggctcagcggcgtgagatggaccgttctgtcttggtgcagtcgagcggggcttggctacaagtaaacgattttcagcagcgcttctggattaatgcagccggagatagctggctatcggcatccgcgcctaccgcctctggcaagacgtttctcgttcttcaatggcttatagaccaagtggttgcgggcgaagccagagttgcagtctaccttgctccgactcgcgcactggtttcagaaatagagaccaatctcaagagcatcctcggtagctccgaggagatagaggtgtcgtcccttccgctccctgataaatacaaagctgctcgggccggcagtgcacgagtgattctcgtatttactcaggagcgattacatcttctcgccaacgtgcttggtgacatgttcttaatagaccttctcatcgtggacgaggcgcacaagatcggggacaaccaacgcggcgtgattttgcaggatgcaatagagcgagccacccgcgccaaccccaagctgaaagctgtgtttatcagtccagcgacccagaacccggaagagctactcacggacgcgcctctcggtgtgcataccgtcgccgtcgatagcgactcgtccacggttcttcagaatttgatagttgcaacgcaggtgccgcggaaatcgaagctgtgggagcttactctccgacagcagggctcaaccctgccagtaggggttcttcagctcgcgagcacaccggaaggggtcaagaagcgcctcgcgtttatcgcagcagctgtcggcgaaagaggtggaacgctcgtatacgcgaacggagcaggagaggcggaagaggtcgctgacttgatcagtcagctcttgcccaagcttccaaccaccgatcctgagctttcagagctcgctgaacttgctcgtaagggagtgcaccaagacttccgactggcaccgctcgttgaactcggagtggcgtttcattatggcaatatgccgtctctactccgactcgagatagagcggctattccggtcagggaagatacgtttcctagtttgcacctccactctgattgagggcgtgaatttgtcctgccggacaatcgtggtgcgcggaccgcgaaaagggagaggccacccgatggagccgcacgacttctggaatttggctggccgcgcaggtcgatggggtgatgaattccaaggaaatattatctgcattgatccagaagatacgcaggcttggcctgcgggcgttccgggcagggcacgttatcccattaagcgcgaaagcgatgcggttctcgagcttggcgacggtatggcgggttatctagccaatcgtgggctatcggacctatcaagcatcgaggataaggataagttcgagcaggttggggcctatctactcaccacctttatgcggctcggctccatatcagcggcaagcctcgcgaaacgccatgatgccgagtcaattgcgaagctagatcaggccttgggggcgcttgcagaacagatcgaaatcagtgttgacctagctgctcgtcatccaggcgtaagtgcggttggtcttcagcaccttcttgaagcatttcgtgcttatccgggcgatgttgaaaaccttcttcctgctgacgttgcgagtttcgacagttatgaccgattcgtcacaattatgggaagagtcaacgatcacttgtttcttgctttcaaccccccagctcgcatcaggctgtatgcgttaattgtcgtcaaatggctaaagggctactcgctagcccgtatcattcgcgacagcatcgattggcatcaaaaaaacgataagcctttcagtcttcctggactgattcgtggcacaatggagttggtggagcaaatcgcgcggtttagggccccaaagtacctttccgcttatatggatgtgctgtatttgcatcttcgcgaaattggtcgtgaagacttgatcgacgatggtttggatattggcacgcaacttgagttcggtgtttcgtcgacgacacttctctcgctcatggaactgggtctttctcgtatgagcgctgtcgctttgtacgagagaattgcccgtgacgacctcaatagagatgaatgcttagcgtggatctccgagcgcatgagtcaattccgagcaatggacatcccggctatcatcatccgcgaggtgcgtgaacgtcttacgcttcctggcgaatcaaccacatag

SEQ ID NO: 58492 - DNA, 948 bp, Pseudomonas aeruginosa; identical to SEQ ID NO: 58490

SEQ ID NO: 58493 - DNA, 2601 bp, Pseudomonas aeruginosa; identical to SEQ ID NO: 58463

SEQ ID NO: 58494 - DNA, 948 bp, Pseudomonas aeruginosa
ttgtcgatcatcacccccgccgatctcgagtctgctctaacggggaacccggaagcacttgaggttcacctgacgctcgtcgagcgagacgtaccgattgacgggcatttagtcaagattcactgccactgtctttcagtggatggaaatggccgtgttcaaccgcatcggctggcagagttcatgcggaatgccgtcgttgattatgcgattccgcgttcgaagctcgccgacgcaaaagcgcgcgacaacagattcaacagcaccgaggcagtcgccgaactaatcgagcgggccaagcgctcgtttaccgatttggcgaacaccggcgaggggggagagatgctgctgttcctgctggcggagcgctttctcaagctgccacagattctttgcaagatggatctcaagacggacacacgtgtgcactatcacggcgcggatggggtgtatgcgggcgtgacagcggagggcactttaaaactctactggggtgaatcaaaagtctacgcggatgcgagcgctgcgattcgcgactgtctcaattccctctccccgttcctgatcgagcccgaacacgaggaggcagggcgggagcgcgacctgatgctcctgagcgacaaggccgaccttagcaacccagccctcaccgatgcactcaagaagtattttgacaggtcgtcggtcatgtctaagcgggtccaatactgcggcgtggcccttgtaggcttcgacgcaccgttctacccgaaggacaatgcgaaggcggttgctgaggagattgtcgaggcgtcccgcaccgcacttaccggttggagcaatcgtattggcgagcggctcaaattggagaagctcgatcagatggaaatcgagttgttctgcgtccctctgccgtcggccgaaggtttccgcgcagcattcctcaaagcaatggggatcaaggaataa

SEQ ID NO: 58495 - DNA, 2601 bp, Pseudomonas aeruginosa
atgagcctcgccgacctccaatcgtggctacttcaagagggtgttcgagacgatctcgatgcgatcactcgactaacagtacgcaacgaactcgataatctggcaccagatacctcggttcaatccgacgagcctattgactggcccagattgttgctcgccggcagtattcttgcgcgctccgatcaaaggggcgatcaagaggccgcgcttcgagtcgcaaccgctgcagtttctttgacggatgatcaagcactcaaagacgctggcgcggttcttatgggcaagctttccaactttcgggccattacgttagccaccgaccgcaaattggtggcagccggccttgatgggcggcttggtatcgcattgcgtctcgaggctcagcggcgtgagatggaccgttccgtcttggtgcagtcgagcggggcttggctacaagtaaacgattttcagcagcgcttctggattaatgcagccggagatagctggctatcggcatccgcgcctaccgcctctggcaagacgtttctcgttcttcaatggcttatagaccaagtggttgcgggcgaagccagagttgcagtctaccttgctccgactcgcgcactggtttcagaaatagagaccaatctcaagagcatcctcggtagctccgaggagatagaggtgtcgtcccttccgctccctgataaatacaaagctgctcgggccggcagtgcacgagtgattctcgtatttactcaggagcgattacatcttctcgccaacgtgcttggtgacatgttcttaatagaccttctcatcgtggacgaggcgcacaagatcggggacaaccaacgcggcgtgattttgcaggatgcaatagagcgagccacccgcgccaaccccaagctgaaagctgtgtttatcagtccagcgacccagaacccggaagagctactcacggacgcgcctctcggtgtgcataccgtcgccgtcgatagcgactcgtccacggttcttcagaatttgatagttgcaacgcaggtgccgcggaaatcgaagctgtgggagcttactctccgacagcagggctcaaccctgccagtaggggttcttcagctcgcgagcacaccggaaggggtcaagaagcgcctcgcgtttatcgcagcagctgtcggcgaaagaggtggaacgctcgtatacgcgaacggagctggagaggcggaagaggtcgctgacttgatcagtcagctcttgcccaagcttccaaccaccgatcctgagctttcagagctcgctgaacttgctcgtaagggagtgcaccaagacttccgactggcaccgctcgttgaactcggagtggcgtttcattatggcaatatgccgtctctactccgactcgagatagagcggctattccggtcagggaagatacgtttcctagtttgcacctccactctgattgagggcgtgaatttgtcctgccggacaatcgtggtgcgcggaccgcgaaaagggagaggccacccgatggagccgcacgacttctggaatttggctggccgcgcaggtcgatggggtgatgaattccaaggaaatattatctgcattgatccagaagatacgcaggcttggcctgcgggcgttccgggccgggcacgttatcccattaagcgcgaaagcgatgcggttctcgagcttggcgacggtatggcgggttatctagccaatcgtgggctatcggacctatcaagcatcgaggataaggataagttcgagcaggttggggcctatctactcaccacctttatgcggctcggctccatatcagcggcaagcctcgcgaaacgccatgatgccgagtcaattgcgaagctagatcaggccttgggggcgcttgcagaacagatcgaaatcagtgttgacctagctgctcgtcatccaggcgtaagtgcggttggtcttcagcaccttcttgaagcatttcgtgcttatccgggcgatgttgaaaaccttcttcctgctgacgttgcgagtttcgacagttatgaccgattcgtcacaattatgggaagagtcaacgatcacttgtttcttgctttcaaccccccagctcgcatcaggctgtatgcgttaattgtcgtcaaatggctaaagggctactcgctagcccgtatcattcgcgacagcatcgattggcatcaaaaaaacgataagcctttcagtcttcctggactgattcgtggcacgatggagttggtggagcaaatcgcgcggtttagggccccaaagtacctttccgcttatatggatgtgctgtatttgcatcttcgcgaaattggtcgtgaagacttgatcgacgatggtttggatattggcacgcaacttgagttcggtgtttcgtcgacgacacttctctcgctcatggaactgggtctttctcgtatgagcgctgtcgctttgtacgagaaaattgcccgcgacgacctcaatagagatgaatgcttagcgtggatctccgagcgcatgagtcaattccgagcaatggacatcccggctatcatcatccgcgaggtgcgtgaacgtcttacgcttcctggcgaatcaaccacatag

SEQ ID NO: 58496 - DNA, 948 bp, Pseudomonas aeruginosa; identical to SEQ ID NO: 58490

SEQ ID NO: 58497 - DNA, 2601 bp, Pseudomonas aeruginosa; identical to SEQ ID NO: 58463

SEQ ID NO: 58498 - DNA, 948 bp, Pseudomonas aeruginosa; identical to SEQ ID NO: 58490

SEQ ID NO: 58499 - DNA, 2601 bp, Pseudomonas aeruginosa; identical to SEQ ID NO: 58463

SEQ ID NO: 58500 - DNA, 978 bp, Burkholderia cepacia
atgaacagaaagtcgcccgtgtctggaagtgacgtgtcgaagcacatccgccgcttgatcgggcgacatttggtcgacgagcggatcagacgtttgaccgtcgacacgggtcacgatgctgaatttaacgcatatttcctctatccggcgtttcggaatggaaagccgaccgtagggccgctcatcgagatgctcatgggggagattactgcgttctgtatcgcgaaggaggaaaggaggaaggcgaaactcgcagacaagaatcttccctacgatgcgcccgctatggataggcttgcccggagagcccgaaggttgttcatggatgcgcgccaaaatcagtcaaggtcgggggaagggggagaacttcttttgttcgtgcttatcgaacattttttgcaggcgccgattgtcctgtcaaagatgcgattgaagacgaatgcgaatatgccggttcatgggaccgatggagttcatgcattttgggatgacgagaggaatactttggtcactgtgttcggagaatcaaagctacacaagtcattttcaagtgcggtggcggacgcggcagaatcactcgaggagttcgtgaagaacgtaggcggccgatatgatcatgagcttctattgacgttgaatcacatcgatcttgatggatttccgaaggatataaaagaacatctaataaaattcttgaatcctttcgaaactgcagagggaaatcgccgtcttgagcgatttgcagttctggtagggtttgatgctaaacaatacaacgaagtggcttcattgagtttgcaagaagctgaagagaagttcaggcaactatacgaatctggtgcgaagagagcaattgggactgcatcctccaatctttcgatgagaggcattgacctcgcaagcgttgatctgttcatgttcccgattccttccgttgatgacttccgtggccaatttgagagggcgctaagtgagtaa

SEQ ID NO: 58501 - DNA, 2529 bp, Burkholderia cepacia
ttggcgacccgcgtggctcaagcgccacgattcaaaattgcttacgaagcactgcaacgggcgagcctatcggatgtagtcgggaaggacgctcttctgagcgtcgatgtcgtctataaactcgcgcaatcagcgcttattctggcgcaggcgagcgacacaaagaactggatgcttgcacaagacattgcatatgctttggcatcgttgcacttgactgaagagcaaagagaggtgtgcagtcacgttcttgcgacgctgggaaatttcccagcggccgatttcttgcttccagagtcgacgagcaaggcacttccgtgggctctgcagctcgatgaagggcttcgaaaggcagacaacacgattgaggtgatgggacagaaggcggttctcacggatttccaggcagacatctggaatggactgaagagtaaccgttatctgagcgtctctgcgccgacgtccgcaggcaaatcgtttgtcctccaagcattcattcttgatgcgcttgagtcttatgatggatttcaggacatcgtctatcttgtccccacgcgctcactcatccaagaggtgtctgcctcactcgggaaatcgctcgcatcgttgggcgaaaaagtggttgtgtcgagcgtgccccttattgacgatgaactcaaccatgctcagtcacgcgtcctcgtgtacacgcaggagcgcttgaggactgcgctcgaccggtccgatcttgagcccgcgatcatcatcgttgatgaggcgcagcagatcgccgatgatgagcggggcatgctactgctcaattgcctggaggaggccatccgacgttcgccggacgtcaggcttctttttattacgccgaattcgaagtcggcatcctccatgaacgggcttcttgacttgaagcgtctgctgtctattcagagcgacctgaagccggttaggcagaacctcatctacgttaagtttcaggcccgagcgaaggaaatttccctacggttgcaccggcctggcctcgaacccctagagatcggaacttacaaagcgcagcgtagatttctcaccaaggacaagcgactgatagatgcggcgatagaactcggtgggggcgggcaaagcctcgtctacgtcggtgggccagattcagcagagaagatcgcgctggcgatttcaaagcacaggaccgatgctgtgcctgccagcgctgatctcaaggtgttgtcggaattcgtcgctgaacatgtgcatccagaatacgcgctcgtaagctcggtcctgaccggggtagggtatcactatggacacatgccatctgccatctcctcggcagttgagcaatacttccgtgaaaacaaacttccgtatcttgtctgcacctcgactttgcttcaaggtgtcaacctgccggcgcgaaatatctttttgcacaagccaacgaagggaaaaggcaagccaatcaatgggagcgatttctggaaccttgctggtcgcgctggacgcatgcagaaggacactcacggtaacgtgttcttgatcgagtacgaggactgggaatcgaagccggtcgacgagaacgagcgtcgtgaggttgtgtcttctctctcccatgctctgaagtccaggcaaggcgagattgtcgactatgcgcgtgatccgaagcacccgtcgggaagtaaggattatcagttcgttgagagcgtcttctgcaggctttttatcgacgccaagctcgatcgtttcgatgagacgattcgacgtgcgacgttcggccaagacgtgtccgatgtccgcgaagtgaagcgggcaatctatgagcaacttgataaggtgacgcttccgatcgaaatcatcgccaagaacaatttgatttcccctattcgacagcaagcgctatttgatttcttcgaaggttcgataaagcgtggacgataccgcaacctcattccacctcatcccaaaggggagagcgcaaaggaacgtatgactgaaatcatgcgaatctcgcgaacgtatcttgaaggggtggaaaataagcaggaaaatttcttcggatggttctctcttctctggatgaatgggacaggtctaaaacaaatcatccaaaggcagatcgatcacgaaataaaaacgagagaggagaatggggatgagacacccgtcaagtcagggacagtaattcgagagacgctgaaaagtatcgataactttctgcgtttccactacgtcaagtatcttgggtgttacatcaacattcttcagtatgcgcttgccaagcgtgggatcaatgctgcatcggaaattccggctgttccgcttttccttgagctgggggcatccgaccccgtgatgattcaagcgatgagtcttggcttgtcgagggtagctgcgaaggaagtgagtcgtctattccgatcggcgccccgttctcccgctgcgttgcggctccggcttcgctcgatgaacagagagcttctgacattgccgcgtcttgtgctagctgagcttcaaaaatttggactctaccgcgcttaa

SEQ ID NO: 58502 - DNA, 963 bp, Burkholderia cepacia
atgacgaaggcgaataacagctttgccgcgttgctggacccgattcatggcgtcgataacgttctgaaggaagtgacagcaacgccactgcttgagcagccacgacttcttttcgttcggatgcaggagcacattccgcaagtcgatgcgcttgcggagttgctcgttgaccagctcgtcaactacgtcataccccttcgcaaacggagagaggccttcgcccagagtagcaactcttcgacgggcggcgatatggcagcggtatcgcgacttcgccgtgaggccaaacgactcctggtcacgtacaaccagaagcaccccggacgctacggtgaagttggtgagctcattgcgtacgttgtcgcggttcgatacctcggcgcggcgcagcttggcgcgaagatggcgctcaagacgtcttccgaaatgccggtgcatggggttgacggactacatggcagtcaagcagacgacgggtccgtgctcttctaccttctagagtcaaagctcatcccgagcgcagcagatgcatcgcgagaaatggtcgattcaatcgcggagcatcaggcagaccgcggacggatgctgaacgaacttcgcctcgttagcgacttgtctaacctagactctttacagggagacgcacgcgaagcggccaaatcgttcttcaactcctacactggagacggcagtcatctccggcgtcgtgacattcacgtcggcagcctcgtattcagcgaaagcgcctttcaggacaaactgcctcgcgacctgaaaaagccaccagagattcatgaggaacatctggagaagttatacgcagccaaacacaaggcgttcagcaagaacctgaaaaaccaagccgacgcgaaaggcgttgaccttggcggctgcatcgtctttctggttgctttacctgatgtaaacgaattcaagcgaatctttgccgagttgaacacatga

SEQ ID NO: 58503 - DNA, 2628 bp, Burkholderia cepacia
atgagcacattcgccaccgaagttgcgattgaaatccggcgggaaccgggcttctggagcgaccttgccgaacttcgtgcggtcggcatccggtcgacggtcctacaggaaaatcaacaggttcgtgttgaagggcccgttcttgccgaaaaggccctggcgcgcctgctcaataccgcgagtgtgttcgcatccgcgacagacgaacagagtaaagagctggcacagcagattgcagtgttcgccagcttgacctcgagcgacgacatcgttcgcgaagcaagcatccgcattctttccgacctcggcaacttccccggtctccgtaagctggagcgcgagcatcctgtcgacctcggattcgaaacccatatgcgtagtggattgcttcgcgaactcaacacagtcgacatggccggcgcgcgggttccacttacggagtaccagctcgacctctggcgaagcctggactcgtccgctgctacagctgtctccgcgccgacctcgtctggaaagtctttcgtcgtgctcgagcacctgtccgagcgcgcgattgcttccgagcggtttggcgcaatctatattgcaccgacacgagcgttactgaccgagatacacggcaaactggaaaagcgcctatcgagcatttccgactccatccgaatcacgaccattccggtgcccgacccagagagccgaccgaagcagatttacgtgctcacgcaggaaagagcgcagtttcttctatcgacagtggccgtggctggtctcattgaccttgtcatttccgacgaggcacagtccctcggtgatgacagtcgcggcatgattttgcaggacgcgcttgagaaattgcgcgagtcgaatcctgctgcacgcttcctgtttttggcgccgggagcatccggcctgcaactcattggcgacagcatcgggctacccgacatcaacgtgaaggaaaccaccctttcgccggtggtacagaaccgtatcagcgtcggattctcggacctagacgagcacgtagtgcgtctcgacctagtcaccccgaagaggcttgagccaattggaacgtaccacttccaacgtgggtttgcgttaggcgacgatacgaagctcgcggcagtcgcacttgaactgggcgcctcgggccggtccttggtctacgccacaggagcgaagaacgcggaagatttgacggcactgctcgcgctcaatcgccaacccggaacctcgaaggggttatcggacctagcgaaattcatcgagcaacatatccataagcaatactctctcgcgaattacgttcggcaaggcgtcgctttccactatgggaacatgcctagcctcttgcgcgaggggattgaggcggcgttcaagcgcggtgagttggattacctctgctgcacgacaaccctctttcagggagtgaatctccctgcgcgaaatgtcttcattgatacgccgactcgcggtaaaggcgcggcgctcgatgaagcttcgctctggaacttcgcgggtcgtgccggccgtcttggcgaggaagtagtcggcaacgtgtttctcgtgaactacgagaactgggaaacgaagccactaaccgagcgcaagccgttcgcaatgcaggcggcgttcaaggagacagtcgaggcggactttggtgcggtggttgagctactccaggcagccgtcgacaaggctcccatactcgagcgcgaccgcgcgtctgaggaccggattaccgcagctgcaggtctcatcctgtttcgttcgtcccaaaagacattagacgggttactgggtcgccgcggcctctcgctgactaccgagcaaaaagataccctcactgcgctggccgagcaggcgcttgcgagtctagagctaccggcttcagttttgactacgagctggatgctcgacccggtcgcgctcgcaggtcttctgcagcggattcgtgaactcgtgcgccatcgcgacttctcgaaactgatgccttcgaatccttcgggcgactcgtacacggtgtacaactcaattatccgcaggctctacaagcatttgggaggcatgaacctctccggagaagaagggaaaagacagcgcggctacgttagccacgtaaccgttacggccttgaagtggatgcgaggcgaaccgctgacgcaattggtcgctgaagctgtgaagtataagaagaaggttgcacagcaaacgaacaaacggccgctcacgcaggcggctatcgatggcgccatccgcgacatgttcacgcttatcgagcaaacgattcgattcaaactagtccagtgggccaaggcgtacgtcgacctgttgaagtacgctcttgcccaagaggggctcgatgaaatggttacccaggtctacgacttctcgttggctcttgaactgggagtgtcgacgcgtaccggtcgttcgctggtcgagtttggcttgtcgcgtatcacggctgcggcaatggcgtcgctgattacggattcgtcgttgagcgcggaccaggttcggggctggttcttgcagcaaccagcgtcgctgatacagcaactatcgccattagtggtagctgaattgcgtgaacgtggtctcgtcgcaatcgaatattcagcttga

SEQ ID NO: 58504 - DNA, 963 bp, Burkholderia cepacia; identical to SEQ ID NO: 58502

SEQ ID NO: 58505 - DNA, 2628 bp, Burkholderia cepacia
atgagcacattcgccaccgaagttgcgattgaaatccggcgggaaccgggcttctggagcgaccttgccgaacttcgtgcggtcggcatccggtcgacggtcctacaggaaaatcaacaggttcgtgttgaagggcccgttcttgccgaaaaggccctggcgcgcctgctcaataccgcgagtgtgttcgcatccgcgacagacgaacagagtaaagagctggcacagcagattgcagtgttcgccagcttgacctcgagcgacgacatcgttcgcgaagcaagcatccgcattctttccgacctcggcaacttccccggtctccgtaagctggagcgcgagcatcctgtcgacctcggattcgaaacccatatgcgtagtggattgcttcgcgaactcaacacagtcgacatggccggcgcgcgggttccacttacggagtaccagctcgacctctggcgaagcctggactcgtccgctgctacagctgtctccgcgccgacctcgtctggaaagtctttcgtcgtgctcgagcacctgtccgagcgcgcgattgcttccgagcggtttggcgcaatctatattgcaccgacacgagcgttactgaccgagatacacggcaaactggaaaagcgcctatcgagcatttccgactccatccgaatcacgaccattccggtgcccgacccagagagccgaccgaagcagatttacgtgctcacgcaggaaagagcgcagtttcttctatcgacagtggccgtggctggtctcattgaccttgtcatttccgacgaggcacagtccctcggtgatgacagtcgcggcatgattttgcaggacgcgcttgagaaattgcgcgagtcgaatcctgctgcacgcttcctgtttttggcgccgggagcatccggcctgcaactcattggcgacagcatcgggctacccgacatcaacgtgaaggaaaccaccctttcgccggtggtacagaaccgtatcagcgtcggattctcggacctagacgagcacgtagtgcgtctcgacctagtcaccccgaagaggcttgagccaattggaacgtaccacttccaacgtgggtttgcgttaggcgacgatacgaagctcgcggcagtcgcacttgaactgggcgcctcgggccggtccttggtctacgccacaggagcgaagaacgcggaagatttgacggcactgctcgcgctcaatcgccaacccggaacctcgaaggggttatcggacctagcgaaattcatcgagcaacatatccataagcaatactctctcgcgaattacgttcggcaaggcgtcgctttccactatgggaacatgcctagcctcttgcgcgaggggattgaggcggcgttcaagcgcggtgagttggattacctctgctgcacgacaaccctctttcagggagtgaatctccctgcgcgaaatgtcttcattgatacgccgactcgcggtaaaggcgcggcgctcgatgaagcttcgctctggaacttcgcgggtcgtgccggccgtcttggcgaggaagtagtcggcaacgtgtttctcgtgaactacgagaactgggaaacgaagccactaaccgagcgcaagccgttcgcaatgcaggcggcgttcaaggagacagtcgaggcggactttggtgcggtggttgagctactccaggcagccgtcgacaaggctcccatactcgagcgcgaccgcgcgtctgaggaccggattaccgcagctgcaggtctcatcctgtttcgttcgtcccaaaagacattagacgggttactgggtcgccgcggcctctcgctgactaccgagcaaaaagataccctcactgcgctggccgagcaggcgcttgcgagtctagagctaccggcttcagttttgactacgagctggatgctcgacccggtcgcgctcgcaggtcttctgcagcggattcgtgaactcgtgcgccatcgcgacttctcgaaactgatgccttcgaatccttcgggcgactcgtacacggtgtacaactcaattatccgcaggctctacaagcatttgggaggcatgaacctctccggagaagaagggaaaagacagcgcggctacgttagccacgtaaccgttacggccttgaagtggatgcgaggcgaaccgctgacgcaattggtcgctgaagctgtgaagtataagaagaaggttgcacagcaaacgaacaaacggccgctcacgcaggcggctatcgatggcgccatccgcgacatgttcacgcttatcgagcaaacgattcgattcaaactagtccagtgggccaaggcgtacgtcgacctgttgaagtacgctcttgcccaagaggggctcgatgaaatggttacccaggtctacgacttctcgttggctcttgaactgggagtgtcgacgcgtaccggtcgttcgctggtcgagtttggcttgtcgcgtatcacggctgcggcaatggcgtcgctgattacggattcgtcgttgagcgcggaccaggttcggggctggttcttgcagcaaccagcgtcgctgatacagcaactatcgccattagtggtagctgaattgcgtgaacgtggtctcgtcgcaatcgaatattctgcttga

SEQ ID NO: 58506 - DNA, 939 bp, Burkholderia cepacia
atggagcagttctttgctcctcttattggaccaaacttcattggggcacgggttcgacatctgacgcggcataccaaagacctccccgaggtcaatgcgcattttctttacctcgcgtttcagaacgacaggcccgccatagatgcactcgtcgatgcgctaaagtactgcatattgccgttttgcacgaccaaagaagagctggcgaaggcgaagcgggctgatgaggcgtttccgtatggtagtccggagattcaaaggttgctcgaaaccgccaaacgtcgattcatcctctctaccaagggtccgtcaaagtctggcgagggtggtgagctccttctgtttgcattcatcgagcattttctccaagctccgatcattctttctaagatgcgactgaagacaagcgccaggatgccagttcatggtgcggacggagtccatgctcgttgggatagcaagaacaaccgtctggtgatcatcttcggggagtccaaggtgcatgcatcatgcccctcggcgattaaagcggctgcgaagtctgtcggagattttgctaacaacgtcaacgatcgcaaaacctatgagttgcaactcacgacggatcatatcgacctcgacggctttccggagggggcgaagacggagctgctgcgctaccttcatccatttgcgacgcaagaagcgaatcgacgcgaagaccgtttcgcaatccttttagcctacgagagcgctgtatatggtgaactcgaggacgttgatagtgcagaattggcattcgtggagcgctatcgggaagatctcgagcacgtcttggggcatgcaaagttacatctgaaagagcacaaggtgtcgctccggcacgtggatctatttttgtttccgctgcccaacgtccaaacgtttcgggaccagttcaaggatgcgcttcgtgtctga

SEQ ID NO: 58507 - DNA, 2556 bp, Burkholderia cepacia
atgcgcttcgtgtctgaatttcgactgcaactcgcgcgtgaggtagctgggcatccggacttcaagactgcataccaggaattgcagtggcatagcttggcttcattgcttggtcgaaaagcaaagctcgacggggagaagtctcgcaagctcgtgcagtccgcgctgattttcgcgcagagccctgatgctgaccttcatattgttgcccaagatatcgcgtactgcctggctgcgttgaagatctcggcagaggcaaaagctatctgtgcgcacattcttgcaacactcggtaactttccggccggcgactttgtctctgacgccgcggctgcggttgaattcctcccatggcagctcgccgcgtccgagacggtgcgtcgcgacgctaattcggttgtggtgcggggggagacggttcttctcacggacttccagatgtctgtgtggagagaactgcacgaacggcagtacgtgagtgtgagtgcgccgacgtcgtccggaaaatcgtttgtcattcagaccttcctgaaggacttcatttcgtcgtcggacagaaacttggatgtggtctacgttgtcccgtcaagatcgctgatccacgaggttcaggcaaacatggcacaagagttgccagacgtcgtggtgcagagtacgccgcgcgctccgattgagcacgcagtgagtcagtctcgagtgttcgtgttcacgcaggagcgcctccgtaccgcacttgaacaagaggattttgggttggacgtcctcattgtcgacgaggctcagcaaattggagacggcgcacgaggaattctccttcatagttgcctcgaggaggtgatcaggcgctttcccgcgacccagatacttctcatcactccgggcgcacaaagtggtgcgccaatcggaagactgctgcagctgaaggggatgacggatctgcagactcatttgaggccagtgcgtcagaatctcatctatgctgacttcgaggaagcacgaaaaggtgattatttgtcgctctccttgcaacagagggaaggggggcggctacatatcgggcgcctcaccgctaatgcctgccacagcgacttcgagcggttagtcgagacagtccggttggttcgtgaccgtgggcaaagtctggtctacgcttcgtcgaaagttcctgccgaggcgacggcgattgcgctggccgagctcgctgaaacgactgatgagccggaccgacggctgggtgaactggcagcattcattcgccgccatgttcatcccgattttgtactagctgattgtgtggagcgaggtgtcggattccactacgggaacatgccgaccaatattacgaaggcacttgaggactatttcagtaatggcctgcttaacacgctcgtttgcacgtcgacgcttcttcagggagtgaacctcccggcgcgcaacattttcatctgtaacccctacaaggggcaaggggttccaatgagcgtcgatgacttctggaacctcgcaggccgggccggacgccttcagaaggatactcacggaaacgtgtttctcgtgagctacgacaagtggaaatcaaagcccgcagacgaggagccagcaaagaacgtgatcccagcactatccaaggcactgacgattgatcggcggcctgtagttacttacgctgaaaacccggaacatacgtccggaaataagaaaacagcgtttgcggagagcgtcttctcgcgcttgctggtggatgcgaaaagtggtgtgttgatggagaccatcgaacacgcagctcccgacgtagcgcatggggcggtagcgaggttgatcaatgcagtcgagcgatacgttgatgaggtgacgctcccggtcagtttgctaaagcgacacggcatgatttcacctgttcgtcagcaacagatgttcaatgttctacgtgctgcagttgcggatggtcgaaaagatgaactaatccctctccatccgatgggaggaggtgaggcccgcgaacgccttgagttcattcttcatcacatccacaagtactttgaggggcgcgataacaaggcgcatagattctacggctggttctcgctctcatggatggagggcaagtcgcttagggacatcattgaataccaactcaagcacgcccgggagaaggcacaaaagaatggccaacgtcgggaggtccccgcaggcgacattatcaagtatgttctgcatgagatcgaagagacccttcgattcaagtatgtcaaattcctatcctgctacttggatctgcttcgtcatgccctgttggtggagggcgaagatgaaatcgagtttctaccgattcctctctttctcgaacttggggcatgctcaaagacgatggtgtcgtgcatggatcttggcctttcccgaattgccgctcgcgaggtgatggatcttctgaaaagcaaggagctcaacgccgtggttgtgagaaggaggctttcgcagatgccaactagggcgcgggaagagctctcgccacttgttgtgcgtgaaatccagcggctcaagttgtggcagcgttga

SEQ ID NO: 58508 - DNA, 1455 bp, Pseudomonas fluorescens NCIMB 11764
ttgagtaatgcactgactgacgagtacaaactcgataacgtctttatcctagaagcctatgacgacctaggtgaacccatttcaacaggcagttgcttttcggtgggtgcgtctattttttttacatcttggcacgtcgtcaaaaatgcctacacgcttcggattttccaaagtagagatgattattttcgtcaagagttccatgccgctaaatgtgttttttacgataaagaaactgacttcgcaatactgtcatcagacagccttacgatcaaatcaaaaattgaaataggaatatacaaagctgagctgaatgatgaggtaaaagctatagggtacgcggccgaaaaaagcagattgcatttccctataactagtaaaatatcaaacgtctttgatttctctacaacatataaatatgactttgagtttggaaagccggctgagctagacaaagcaaatggcttatccggggggccagtattctttaaaggctacgctattggcttgcttgcactgcaaactgtgggatcggcattgcaagcagtatctttccatacaatatttgaacggccatccgctcttgaagccattgaaagccaagggttggttataaccggtggtgacgaaatatcctatgataggccagaccatcctgaaagcccatttgttgtctcaatagactgtgccgcttcggatccaaacataaagggactagatataggatttgatcttggcgaatggcgcagtcagaacctgattgatcaaacgctcaactggatcgaagactacgcgctgaccccgaagcaaaaaaaagctttggggcaacacaacttcaaaagaattcaaagtgcaaaaagaaacttccagattggcaacccagcagcaatggccgatttattcttacacatcgcgattcgccaaaattataaaaccatccctattatttcaaatgtaataacggtagatggcgagtctgtgttttcctgctcgcatatcgttatttatagaggcaaagttgagctatggcttggaatctctgctatggaggtttccatggagcaaacagtaaaggaggctattcacagagttgactccatcatacgttccggaggaatccaagaccggttggttgttatattatcagaactagaccctacttggccgtatataaaaaagctggaaaaattatcaaactccaacctcaaattaactgacaaaattgataagataattatacctatgtttttatcaagcaatgcagacttgataaataattatgacccaagcaatttttcaaactcatttcaaaaagatatagatgagtgcagggaaagggttgctggcgcctacaatgctcgaatcgttcccttgatcaacctccgcatctttctatttccggtcgacaacatacacgagttacatacgaaatttgttaaggagttcgaattttga

SEQ ID NO: 58509 - DNA, 2172 bp, Pseudomonas fluorescens NCIMB 11764
ttgaatacggaaatttataacaaccttcgtaagcaaatcgacaactctgctttcaccggatggcaaaggttattcgttgaacttataaatctatacaacttacatgatgacaatcaattcttgattcaggacctgacgctgagatgcctagagaggcgtggggaattcaaacagcttcatggtctgttgaacatattgatttccgagctaggtttgttcccgtacttagatccagatctgatgacgtcgaaagacagcataaggatgaatatttttaagtcgcctatagctggcgatataacattccacctaaaacaggctgagatttattacaggattgtaaatggagataacatcgtactcagtgcacctacaagcttcggaaaaagcttagttatagatgctctcatcagctctgaagaatacgacaacattgtggtagtagtcccaaccatagctttgatggatgagttacgaaagaaatttagcaaatataaagaaaactacaagataatcactcagtcctctcaagagccagcgacaaaaaatctatatatctatactcaagaaagggtcttggaatgcaagaaccttgaacgagtagacttctttattatcgatgagttttacaaattagcacctctcaatacatctgactatcgaagcgacagactaaatctggcatttcacaaactttttaaaatgtgcagtcgcttttacatgctcggccccaacattaatggcctggccgaaggcatagaagacaaactaaattgcaattttgtaaaatatgacaattacaaaactgtagtagctaacgaatatcgctacattatccgtgaagatgggaatgataaagaaaaagacattgatcgcgacgcgcacttagtcaatattttgcaaaaaatcggtcaaaacgaacagactttaatttactgcaagactccaaaacgagcagcctcgctagtaaaaaagatcatgaaactcagagagaaccaagagataagaaaaggagagttttctgactggctgagagagacatatcacgatgactggtcgatggcagacgcagtggaacgcgggattgcctgtcaccatggcagacttcctcgtgtcgtctccgggtatgtggtggaagcgttcaatgaaaagctcataaatattttggtttgcacctcaactttgattgagggtgttaacacaaatgctagaagcgtcataatttacgatgactgtattcgagggaccacccaactggattcgttcacttttaacaatatctctggacgtagtgggcgtatgtttgaacactttgttggagatatacatgttattggacgaaaaccatcagcagagcttccttggatcgacgtcccaatagtgactcaagatgactccgcctctagacccatgctgctaagcataatcgacgagctaagcaccgaacaaagggctagtttatcgagatatacaactcaacaatatgtacctatcactttacttaataagcatctcggtgttcctccggaaaggataataaaattcgcagaagccttaatggagaaatgtggcgcctggaactcaattatggcatggacgggaaaattcccaactagcgagcaactaagacacctatgcaacatcatgttcgatcacttcgcaatatcacgaatgggcggaggatgcgtcaaatcaaaaaagcagctgttttatagagtgctcaacattgtaaatagaaaagaagacaaagatctaattcaaagcgaatatgatttttggtccccacgaaacgcggaatatgagattgatgacgcagtgcaaagcgttttcgatttcaaaagaaacttaattggctacaacctccctaagattattttggcgataaacgacgtacagcgcttaatattttctcgattcaattaccgttgtggcgactacgcagcttttgcccactctctagaagcaatgtttttaccaccttcaattgtggctcttgaagagtttggaataccaactcgtgtagcacaaaaaatataccaaattagcaacgtcggcgaggacgccaccgtagatttaatcctagagcaggtaagatcgcacccgggtctctacatatcgaaatttgatgattttgaaaaaactctcctgaaccgagcaattcaatatctttaa

SEQ ID NO: 58510 - DNA, 927 bp, Pseudomonas fluorescens FH5
atggtcaaaattgcagagataaaatctctgatcacagtaaatagtaatgactataccgcgtgtatcgactctattgaacatagcgatactataagttctattagaaccaagctgcgatttcatcacctgaaattcgatggtaacgggcggccgatggtgaaggctttagcagggcttttatataactatataatcgattattgtattgctgcgaagaatcgacctacgcctataacattcaaagatgctgctcgtctcactaaagaggccaggaagctctttcgtcatccggacataactgatgatagtcccgataagacaggtgaggccggagaagctttactgtattttctgattgaagcaatagttcaagctccgcaagtagtagcgaaaatggagctaaagacaaacagaaagttagaggcaaacggctctgatggtattcatgttaagtggaatgcggatgatcagcttgtcgatttttattttggtgagtcaaagctttatcagaatatagatgatgcaattagttcggctatcaaaagtattgatagctttcatgctgatgaaatctataagcatgaattcacaatgatcacaaaacatttcaaatacgcggataaagaagttcaggatgctgtcactgagcatatccggcttggtgagcccggtcccggcgcaagaataaatcatgcctgccttataggttataactgggatgcatattcaagtgcgcccggtgtttctcatcccgttttaactaatgagttcagagcaaggttttcgaaagaaacaaatctaatcgcttctaaattagagaaaaaactcttgggtttttcaaggtctcatctatgtcttgatgttttttttattccatttccctctgtgcaggagtttaggaatgaattcaatgcggcgttagactga

SEQ ID NO: 58511 - DNA, 900 bp, Pseudomonas fluorescens FH5
atgcaaaaacttatggatgatggtggttccatcattcatagtctcatgactggggagattgatgccgacaagaaagatttcgcggaagcaggtttcagccgactttatcgcgaagtaatcgaaaatgaagaaagcgagattataaaaaaataccaaacagtggaaaactctgaagtgttagctcaaaatttgaggcacgttcaaaatttgacaataacgctgcctcaagaaattctggagtctcatagtagtctaaggccggaccatttgcagatgctttacgataagctgcatggagcggtctacacagaagaattttcgttattgaacccttatgctgtgggtggttatcatcgaatggtaagagccattgatatgatatctgatgtgtttcagtgggctgaaagccaaaaatttagaagttgggtttgctatttatctcatcagtgggtaactggaacgcctataaatgttctgattagggatcgagttaattatatcaggcgtcaagataatttctctactaagacttctactatcattagggagttgttagggattatagaatctgacatacgctttaagcttgtgaagtattttagcgcgtatgaagatgtcattagttattgccttaagaacaaggggctttctgaagatgaagcacgacaagcggcttatcacacttttcttgagtttggagcatgttccagcgttgagctaagcttgatgtcacttgggttttctagattcacagcactgcgtttagggaaaatgttggattggggggattcagtggaagtggaggactttgcgtcagtgattgcgagaagcaatgttgactcgttgaaaattcccagagtttgtataaaggagataaaggaaattcttggtcagcaatag

SEQ ID NO: 58512 - DNA, 1617 bp, Pseudomonas fluorescens
atggaacctaacgatgccggcggagttgctgccaaacacggcttcaattttcaggattgcgttgccgcctattacgtcacacagatgcttcgtgacaagacaattcaacgcgtccgctgtgaagtcaccgacgacatcgatgtcgtttgcgatgatttcgtcgaattcgtgcaggtcaaaaccaccacgaaggcccagtgggcgaagagcgatctcgtcgtcctcgggaaaggtgctggcaacaaaaagattccctgcagctcgatcctgcacaagtccatggattgcgagccagtactcaccgtgccgaggaaattcaggatcgtcacggagcacccgaccaacgtcaccctcgaatacctgctcatcaaccgtgacgaacgcgacggaaaacccggacgcgatgacctgatcgactacctcaactcgaaaacatcgaattacgtggctaccagcggggtggacgtggcgacctgggttgacgctgcgtgctgggaagtcttccgaaccatgcgcgagattgagctgctgggcatccggaatatccgcctggcttcctatgaccttcacggagtcatgttgagtaccgaggcatcggcggaggatatctggcgtgggatcctggacacggtcacccgtaaaggcgctctgtcccgcagaattcactccgtggacagcaagtcctaccttcgttccgatttgaacgcctggttcctgacgtatgttgaagaggatcagaagcgtgcgggtcgtaaggtctacgtcaaacggcccctgcctcatatcctggttccgtttcgcaacccgctgtccactccatgcgccaagcgcaatggtcgcgtcctgcaccagcagtacagtctgagacgttaccgctacaagcacatcgtcgacaacgtatgcaaatggctggatgaagtcttcctccgacccaatgagctggcagacatccacaagctgtccgtagtcgagcaggggcagcgccttaagaaaatggtgttcgcctccatggcagacgtccgttccttcctcgggcgggtgcttctgcatgccacgattcggcagatgcatgccagccagccaatcccatgcttgctttacctccagggcgaggatgaagaaaagatccttgaaaacgtccatatcgttcggcgagacccggagggcgatcagctgtgggtcggtttcagtgagcttgtgacggcacccaatatcaccaaacggctgactgagatccgcgaacagctctatgaggaaatcgacaattgtttcggcgatgctcggggcaaaatcctcgacatcaaggatgacgactacctactgtcccacgacattgatgccatcctggacgagagcaacccattcgacgcccatttggatcgattccggttcgtgctgttcattgggtacgactcgacgctgctcactgagcccgaaacatcggggcatgaggatcacctggagcaagaaacggcagccctcttcgaagcttttgtcgatgacctagaacacgacccgacgttcgcagagctcgcaatcgatgtgtttatctacccagctccgagtttggagacgttgactcagttggtggacaagaaggtcagggaggccgtgtga

SEQ ID NO: 58513 - DNA, 2223 bp, Pseudomonas fluorescens
gtgaccgaaatttacgatgcagcaaagctgagcttgggcagtgatggattctcagcattccgctacctgtcagcggtcaactccctcctgtccaacccagtctccacctccttgggtagagacctgacgatacgggccctcgatgcccgagacaaatttactggccacgctggcatcctgcgcaacatggtcaggaaggctgggctgttcccttacctgaagaaagagttttctgagctgtcccaaggtgaccggattgcacttgatgtgtaccgaacgccgttctcggaagatttcgttttccattcaatgcagttccggatcttcgacctgctcaaagcgggtcgtaacgtagtgctcagtgcgcccaccagcatgggcaagagtgccatcgtcgactcactgctagggttaggtcgcttcaatcgggtcgtcttggtggtgcccacggttgctttggctgacgaaacgcgaagacgtcttcaggagcgcttcggtgaggtgtatcagatcatccaccatagctcgcaagagtgccgcagagagagggtcgtgtacgtactgacccaggagcgggtcaacgagcgggatgacatcaaggacatcgaccttttcgttatcgacgaattctacaagctggccttccagcagcttaaaaacggcaccaccgactacaaggacgagcgggtcattgaactgaacatcgcacttagcaagttgctgaaggtgtccaagcagttctacctcaccgggcccttcatcaacagcattcggggtctgacggagctggggtacgaacacacgttcatttccgccgacttcaacaccgtggcagtcgatgtgcagacgttcggtgtggatgcaaatgacgaggaaggtaagctggagatgctggcgactattgcgccccagtgcaaaggtgccacgatcatctactgcaagtcatccagcgtggccggtaaggtcgcccgcgagctcgtccggcttgggtatggccagccattccagagtgagcacattgactgggttgccgaggagtttgatccagagtgggactacacctatgccctcaggaacggcattgggcttcattttggcggtctccctagggcgctacagcagtacaccgcagaccgcttcaatgccggtgaccttcggtttttactgtgcaccgccaccatcattgagggggtgaacacagttgcgaagaacgttgtcatctacgacaaccgtaacggcacccgtgggatcgacaaatttacccatggcaacatcaagggccgtgctggccggatgggcatccatttcgtaggcaaggtcttttgcctggaggatgttccagaggacaacctgaaccaggaggtcgatgtgcctctgggaattcaggatgaggacactcccctcaacctgcttgccagcgcacagcctgatcatttgtttgaatactcccaggacaggtttgaagctgcattcgcgcaggatcgtttttccatcgacctggtcaagaagcactcttacttcaggatggaacagttcgagcagctctacagcatggtagagatgctcagcgatgacgacttcgagtccctcgtgttccattggtcgccagcgccaggctttctgaccaccttggccacgatctgcagcaagctcgtgcctagggcgttttccacgaatgggctgcagaccaaaacccccgataacatattggccaagctgacgaactatcagagagcagagagctactcggactacctgaaaggccagatcgaatacaccaaacaacggatcaaggatgatgagaaacgggttaggacggggcaaaaacggaataaggctgacgagaagctgaccctttccagcgggctcaacaacgaccttaagctggtgagcaacaccttcggctacaccattcccaaggtgctgggactgctggaagacgtggttcgcttgcacgccaccaagaagggtatccgcagcaagattgactacagctatgtcaggatgggctttgagaaccttcatcttccgccaggagtgaatgcgctagaagagatcggtatcccaatccaaacgttgcaccgcatatctgagttgctggagttcccggaaggtgccggtgtggatgagttggctgatcacctgcggcagaacgagcaggcctgggagttcatggggttcgtcgaccagagcttcgtgagacgggcactgggggcagtgtga

SEQ ID NO: 58514 - DNA, 939 bp, Pseudomonas fluorescens
atgaaccctgatgatctagcatctgctttgacagggaaccctgaggcacttgaagtccacctcacgcttgtacagcgtgacgtacaggttgaagggaatctagtcaaaattcattgtcactgcctctcagtggacgccaatggccgtgttcagccccgccgtcttgctgaattcatgcgtaatgccgtagtagactatgcaataccacgctcaaagctcgccgaggcaaaagagcgcgataatagatataacagtactgaagcagtaaccgagttgatcgagcgagccaagcgctcattcactgatttaacgaacactggcgagggaggagaaatgctacttttcctcttagcagaacgttttttaaagctgcctcacattttatgcaaaatggacctaaagacagacacgcgcatgcattatcatggcgctgacggggtatatgcgggagtaacctctgacggaactttaaagctctactggggcgaatcaaaagtttattccgatccaagctctgccattcgcgactgcctcagttctctctcgccttttctaattgagcccgaaagtgaagacgcggaaagagagcgtgacttaatgctcttgagtgacaaagcggacctaagcaatcccatactaaccgctgctctcaggaagtattttgacaagtcctcaccaatgtctaaacgagttcagtactgcggtgtagcccttgttggtttcgatgcatcattttatccaaaagacgaagccaaggcggtggcggatcaaatttctgaagcctctcgtgccgaactcagcggatggagcaaacgaatcggtgagcgaataaaattggaaaagcttgatcaaatagaaattgaattattctgtgttcctctgccttcggctgaaggctttcgcgccgcgttcctcaaggccatggggattaaagagtaa

SEQ ID NO: 58515 - DNA, 2589 bp, Pseudomonas fluorescens
atgagtctagccgacctgcaatcttggctacttgaagaaggcgttcgctccgacctcgaagctgtgactcgacttacggtacgccaagaacttgacaatattgagccaaccgatccgccaatgtctgttacaagcattgactggcctagattattgcttgccggaagtatcttagcccgatccgatcagagaattgatcaaggggccgcgctgcggatcgcaaccgctgcaatttctctagcagaccaccaagcggtaaaggattccggcgccgttctgatgggcaagctttcgaattttcgagcagttgatttagctgtcgctcgaaaactattagaaactgacctagaagcgcggctcggaacatcactacgccttgaggcccagcgtcgggaaatggaacattccgtgctagttcactcaaccggcacctggctgcaagtaaacgatttccaacaacgcttctggaataatgctaccggagataattggctttcagcctcagcaccaactgcatctggcaagacattcttagtccttcagtggcttattgatcaaatagttactggtgacagccaagttgttgtctatcttgcaccgacacgcgcgcttgtatctgaaattgagaccaatcttaaagagctccttggcaacacaaaaaatatagaggtgtcatcccttccactaattacgaaatataaaaccgcccgagccggtggcgcacgcgtagtgttggttttcacccaagagcgactgcatcttctcgccaacgtactaggcgatgcattttcagttgacctacttattgtggacgaagcgcataagataggtgacaaccagcgaggcgtgatcttacaggatgcaatagagcgagctactcgcgccaatccaaaattaaaagctgtctttatcagtcctgcgacgcagaatccaggggaactattaactgacgctccaactggagtaaaaacaacggcagtagacagtgactcttccacagttctccaaaatctaatatttgcaactcaagtaccgagaaattctaagctttggaagttggatcttcgacaacagcactcagagttacctataggaatcttaaagctcgctagcacgccagcgggtttgaagaaacgcctcgctttcatcgctgccgccgccggagagagaggtggaacgcttgtatacgcaaacggttctgcagaggcagaagaggtcgctgatttaatcagtcaactgctaccgaagtccgaggcaattgatgtagagctttcccaactagctgaactcgctcgtaaaggcgtacatgatgattttcgtctagctccacttgtagaactaggcgtggcatttcattacggcaacatgccgtcacttataagacttgagatagaaagattattccgctcaggcaaaatacgctttctagtttgcacctccactctcatcgaaggagtaaacctctcctgtcgcacaatcgttgtgcgtggcccacgtaaagggaaaggccacccaatggagccccatgatttttggaacctagccggccgcgcaggaagatggggagatgaatttcaaggcaatattatttgtatcgacccaaacgatgagcaggcttggcctactggtgttcctgacagggcgcgctatcctataaaacgtgagagcgacgcagttcttgagcttggcgacgatatcgttgactatctctacaaacgcggtcttccggctactttagacattgatagcaaggataagtttgagcaggtcggcgcttacttgctagccacctttatgcgcctagggtcaatttcagaatcaaacctagcaaaacgccacgatccagtttttatagccaaaattgacgacgcattggaatcactagcgcaacaggttgaaatcggagtggacttagctgtacggcatccaggtgtaaacgcaataggcctacagcacctacttgaagcttttcgggcctatcctaatgatgtcgaaaacttacttcttgcagaagtttccagcaacgacagctacgatcgctttataacaataatgggaagaataaacaaacacttgcttcccgtcttcactccagaaaccaggataaatatttattcgctcattattgtaaaatggcttaaaggatactccctatctagaattattcgcgacagcatcgattggcacgagggcgccaacaaggctttcaaactgcctgagctaattcgaagcaccatggaactagtagagcaaattgccagatttagagcaccaaaatatttctccgcctacatcgatgtcttgcatttacatcttcgcgaaatcaatcgtgaggatttaatcgatgatggcttggacattggaacgcaacttgagtttggtgtttcctcaacctcacttctgtctctaatggaactcggattgtcgcgaatgaccgctgtagctctatacgaaaagatttctcgagacgacctcagcagggagggatgcattgaatggcttcaagagcgcgcgaaccagcttcatgcaatggatctaccgaccatcataattcgtgaaattactgaactacttacctcactagattaa

SEQ ID NO: 58516 - DNA, 933 bp, Pseudomonas fluorescens
atggattttgaagttctaattgacagcagttttattaatttaaatatagaccctaaactaatcccaatagaaaacaaacatgtacttagcataataaatgactttgaagacggtgattggcgttacgaaaaatttagtaatttcatttgggacaatatcgcacaaaccgcgctatctcatcaagaacgtaaaaatcttgaacacaaatcacagtcaaccctaaagcgtgcggcagagaacctaagactaactgataaggaacaagatataagcaagggtagtgagctagcagaaattgtcctatatgccatcatgaagcataaatacaatgccctacctgttgttccaaaaatattctacaaacaaaatgctcaagacaatgccaagggagcggatagcgtccatattgttctggaaggggacgacgatttttctttatggttcggggaagctaaatttttcaacagtattgaggattcaagattaccaagtattattacctccgtagggaactcattaaaaacagataaactaaagaaagaaaacagcataatcaccaatatcgctgatattgatctcttagaaataaatgatcagctgaagaaaaaaataaaagactcgctatcacatcaagcctcaattgacacattaaaaccgaaaatcaacatacccatactactgctacacgagtgcggcatcacaagtgcgtcaacagagatctctgacgactacaaagaaaaaataatcgcattccactcagagcgagcaaactcttatttcaagaaacaaataaaaagcctggccaatatacacttctacgaaaaaataaaattccacataattcttttccctgtacctgagaaggagcccataatagaggcattcgtaagcgacgcagaacattataaaaaaccgaaaaaaaagcaggactaa

SEQ ID NO: 58517 - DNA, 2118 bp, Pseudomonas fluorescens
atggaaatctttgaagaatgtggaagaataaacaacctgatcaccgagggtaatgaattttcagcacgcaatgaacttataaaactactcgattacttccaacgccagaagctagaatacactccacttctaaacaacttgattagacaaactggtctgtacccatacctagaacttggcagctcaatttggcaagataggtatgtgcacgaatcttttaaggtagacacaggagcaccagagctagtcaccttgcaccgtgagcagtcattacttcttagcaaattactctcgggaaaaagtgtagcggtaagcgcaccaacaagtttcggaaagagttttgtaatcgactcttttatttcaataaaaaagcctaaaaatattgcgataatcgttccaacaattgccctaaccgatgaaacaaggcgtcgactacaaagaaagttcggacttgactataaaataattaccacatcagaccaagagctttccgatcaaaacattttcatattccctcaagaaagatcaatatcttacgtagataaaattgatgtgttggatatgcttgttattgatgaattttataaagcaagttctgtttttgataaagaaaggtctccatccctgctaaaggctattttgaagctcggcgacaaggcaacgcagcgatattttttagcccccaacataaacaagttgaaagacaatatctttacaaagggtatggagttttgcagccttgatttcaataccgttttcttagaaaaacaagatttatacaaagaaataggaaaagacgaaaccaaaaaaagccaggagctcctacgaatattggactccactactggcaaaactttaatctacgcgggcacctatacaaatattgaaaaattatccactctcatattaagcaatcgaaacaaacaaaacaccaagctacttagtaatttcagtaaatggcttgctaagaattatgaccctaactggggactcaccaacatggttttgcggggaactggaattcacaatggccagctacacagatccctaagccaaatccagataaagctttttgaagagccggatgcacttcaaaccataatttccacctcatcaattatagaaggagttaatacatccgcccaaaacgtaatactatggagtaacttaagtggaaaaggcagagcgcgaataaccgacttcacctataaaaacattataggccgaggtggacgaatgcttcgccactttgttgggaaaatttatattcttgaagaaccaccaaaagagacagataacgcactcaatcttgaaatcccggacgaactagtttctgacttggaaagtagagtcgcctctgaagaactgactccagaacaaatcgctaaaattattgcctaccgagaggaaatgtcagagctcattggggagaagagctataaagatataaaaaacaatagcatgcttcaaagcagcaattcgtttcttattatggacatcgttaaagacctcaaaaacaatcctgcctcatggaacggactcggataccttaattcacaaaacccagaaaactgggaaagattattatacaaagtcattcgacttcagccagctggctggggaactgactatacgaaagttgttgaatttgtaaaaatcctttcccaaaactgggcaaaaacgatcccggaacttctacagcagctcaacgacattgatgttggagttgatgatttcttcaagctagaaagaactgtaacgtttaaacttgccgccctattcaatgacgtatctataatacaaaaagaaattctcggcgatagcgcacaagacatctcaccatttgtatcaaaactatctcatgcgtttctcccgaaagtcgtatatcaactagaagaatatggactcccacgaaacatctccaagcaaattcatcatgcgggccttatagacttcaactctgaagaattaaacatataccaagcgattgataaactacaaaccttgaatacacaaggactcaaccaccttatcggcgaactggatgagttcgatttatacatcctagattacttttttgatggcgtcgaaacacagactcgcaatagtaagccttga

SEQ ID NO: 58518 - DNA, 1614 bp, Pseudomonas fluorescens
atggtgcttatcaatatcccatcgaacaaaggtgggcctgcggcaaggcaaggtttcaagtaccaggatcacgttgccgtttccttcatactgaagatgcttcgcgatagcagttaccagcacgtcgagtgtgagactgctgacgacatcgtgctggtctctcgccagtctggtgagacggttaacgaatatattcaggtaaaaaccaccgaaggtgacagcaagtggaaccagagtgaagcaacagctctggacagcggtcgggctgacacttctctactgcaaaagtcactgctatgtgactgccgccctggaaaagctctgtttcgaatggtcaccaagcgcgataccgccaaagctttgagttgcttcaagttagagcttgaaaagcgaactcagcctgatcttgcgaccagtcgtggggcagcccttgctaagaagtttaagaaaacacgatcacccatggggcgtgacttttgctattgggcggataattttgtgtggcagatctgtggcgatgtggacgcgctggagtcagtgaatctgcgtaagcttgcagaaataatcgacattcaaggctcgtggcctacgcacaaacaacagcaggcaatttacgcggaatttctgagctgggcagatgatgcggcaaccgcaaacgtcatctcagaatctatccaaaaggtcattacgcgcgcggatgccatggatcgccttgatgcactcttggcggcggctgatagcaaaaacatcacttactcgaagccctataaatccaagcctccgccgtttctggtcgaattccatgctgcaaccgacgagggattgctacgaagcctgactgggtacgacgttcagtatgactttggcgagtggaggcatagggaacttgctgagcacctggttcagtggcttcccgagttctgtttacaagccagcgagattgtgaattttcaggttcaccatgctcagacgattctgtcgaaggcgattgctacgttcactcagaatggtatggagcgcgataagttaattgcagaactaatcctgcatgtgattttgagaaataaggaaaatagcgagcctatagcgtgcaaagtattttttgcctcaaagacaggcctatccgagttcgggaacgcccatattgttcagcgctcaggcgaggttgatcaactctggttggggttggcgaggatgattactgtgggaaccatggcccagactgtggcgcaggtttgcagtactctggattcgacaattaacaaagccgcactgaccaacgagcgcgagatcattatctcgctgcgcgaaccgaatcaccttcgctccaattcggaggagttgaacaaagcattagaacgaaacgcgcctgctgaagaaatgctgaaggtgctgtgctttcctgtgttattggcttatgacagtgatgccttatcctccgggtacctctctgactatattgatcggctgaagcacgagatcaacgatcactatagttcattgaaagtccatctgccgaagaaaatggatcaaatccgaattgctgtgttccttgttcctatcgaaagcatccagaacttgatcaaagagtttaactcacgttgtagggtttag

SEQ ID NO: 58519 - DNA, 2145 bp, Pseudomonas fluorescens
atgaaatatgaagtagttaaggaacgactcgaacggctcggtgaagattcaagctccaggatcgagcttctccaagctatcagtgttgccgtgaaccgggggaacccagagtgggaaggacgggacctcgtcatccgtgcgctggataaattcgccttgtttggtgaagttgagcaatcccttttgctgagtatgatccgcgcggtgggcctattcccttacatcactccgtacctcgatggaatatcgatttcagaccgtctggcctatgaggtacatcgggtggacggagttgaagcgggcatggtttttcatcggctgcaggctcatgtgttcagcttgctgatgcaaggacgcaacgtcgtgctgagtgcctcaacaagcgtcggtaaaagcttggtgatagacgccgttctggcccaggaaaaatttcgcaagatcgtggtcatcgtcccaaccatcgccctcatcgacgaaacgcgccgacgtctggtcaagcgcttcaaacagaggtgcaatgtcattacgcatccgactcaggaagccgacgacgcccgagtaaacgtttacctgctgacccaggagagagtcctccagcgtgacgatctacaggacgtcggctttttcgtcgtagatgaattctataaacttgacctgtgcagtgactcagaaactggcagccgtgcaattgatttgagcttggctttccacaagctggcaagacagggggcgcagttctatctactcggcccgcatatccaaaatatccacggtctcgacgcttatgagtacaatttcatcccctccaacttttccacagtggccgtcgatgttgagtatttcaatttgccgaccaacggagatgcacgcaaggacaagctcctagaactctgccgcaaaattgccacccccacgctcatctactctcagtcgccagcaagcgctaacaaggttgcacagctccttatcgaaaagggtgggttttcgccgctcgcgcagacccaagacattgctcaatggatcgcgaaggaataccacccccagtggaacgtcgctaaggccatatcgcttggtatcgccattcaccatggtggcgtccctagagcgctgcaacagtattttgtgaagctcttcaacgaggggacaatcaagcacatcatctgcacgtcaacgatgattgagggggtcaatacctcagcagaaaacgtcatcatttatgaccgccgggttagtaacacgccgttcgatttcttcacgttcaagaacatttctggccgcgcgggtcgcatgaaccgctacttcatcggcaaggtttacatgctggaggctccgccggaagaaaaagatctcactgttgattacccgatcggactgcagaacgaagattctccgatggggcttttgatgaagctagagccggagtacctcacggatatatcccgtcaacggctggatcgggcgtatgcgacaccgttgttgtctactgcgaccctcgtcgaaaatcggcatatcccggttgaccggcagatagagatcgccgaatcaattatcaggaatcttgcagtgagtcgccgaatgctcacttggaaaggaaaccctgaacaaaaccagctcgaatacgtgtgcaccttagtctgtgatcaccttcagaccaaactgatggattatggaatcatttcaggccctcagctcgcctttcatatcaactctgtccgaatggagaaagacttctcggcgtatctgcagaacgcaatcgacactaaccgagcgggcaccactgcgagcgaagcgatcaaccttcgtctcaagtttatccgtaacgtcctgtgctatcgccttcctcgtgattttatggccataagcaagatccaggcggatatcttcacccagcgcaatattgagccaggagacttcagcttcttctctgagcagatggagaacctttttcacgatcccttactgacggcgctggacgaatatgggattcccacgcaggtctcgacgcgtattaagagttcaattcttccatctgacaacctgaatgatctgctgaacaagttacggcacttggcgatccgcctggatgggatgcagctgtccccgtttgagcgaaatattatgaaatgggcgattgccgagatgtag

SEQ ID NO: 58520 - DNA, 1614 bp, Pseudomonas fluorescens; identical to SEQ ID NO: 58518

SEQ ID NO: 58521 - DNA, 2145 bp, Pseudomonas fluorescens; identical to SEQ ID NO: 58519

SEQ ID NO: 58522 - DNA, 1632 bp, Pseudomonas marginalis ICMP 9505
atggtacgtattactagcccatccaacaaaggtgggcccgctgcgaggcaaggcttcaagtatcaagaccatgtagccgtcagcttcattttcaagatgatgcgcgatagcagttacacccaggtagagtgcgagaccgccgacgatatcgtggccgtattcaagtacgcggggcagctcgtcaacgagtacattcaggtcaagacaactgagggtgaccacaaatggaatatggaagaggtgaccaagctggacggcaccaaagccgactcgtccttgctccataaatcgcttaagtgcgatgtacgcccaggccctgctcgcttccgaattgtgacccagagggacgtcgcaaaaattctcgacggattcaaaacggagctggataagcggaatctgcctgacaccaccacggcccgaggcaaggcgctgctcaagaaattcaagagattcacctctccacaaaatcggagtttcgctgactgggcggacaactgcgtctggcaggtctatggggatgtggaggcactggaagcggtcaacatcaaagccctttccaagcttgctgaggatttcgggaaccgtcccaataatactcagatgcaggccatttacgatgagtttttggagatggctgacaaggctgccacggccaacgtgaaaacggctgcatcggaaaaaattattctgcgggaaccggctctggcccagctcaagcagctgctagatgcagctgatgaccagtcaacggccacagccaaaccctacaaaaagcggccagatcccttcctaatcgaatttcacgcaagcaccgatgagggcctgctgcaatcattttccggctttgacgtacgctatgcgctgaaagcgtggcggcacgacggttttgctaaacacctagtcgaatggctcccagaattctcactcaaggcgagcgagatcgtgaacatcctcgcgcacaatgccgaagccatgctcgcacgttccatcaatgcattcagcgactgcgacctgccccgtgacaggctgatcgccgaattaatactccacgccatcctgcgcagccgccaaaatagtgagcccgtggcgtgcaaggttttctataaatccggtggcaagctctccgaatttggcaacgcccacatcgtccagatacctggccaggacgatcagctatggctggggctagcacgcctgattgaagcagacaccatggacgcgacgttggcgcagatctgcggcgtcctagacgcaaccatctcggagacggtgctttcgtcggaaagggaaatcatcatcaacctgcgcgagcccctgcaccatcaaccgaaagcggacgccttcaaccaggcactgcaccggaactcgtcagtcgatgacatgctgaacgtcctgtgctttcccatcctgctgacctacgacagtcacgtactctcgtcaggttggctcgctgattacgtgaacaaccttagaaaagaaatcgaggcccacttcagcaccttcaccacccagctgccagagaacatcaagcaagtaaaggtcatggtcttcctcgtgccaatggaaagcatcgagaagctgacaaatgccttcaacgcccgctgcaaaacacttgaagacctgcaggtataa

SEQ ID NO: 58523 - DNA, 2142 bp, Pseudomonas marginalis ICMP 9505
atgaactacgaaacgatcaagaacagcctagcgaaactcagtgatgagggcgtttcgacggtcgatgtgctgctcgccattaacgccatcgtcaaccgaagcaacgccgagtgggaaggacgggatctggtgatccgtgcgctcgacaagttcgcactcttcgacgcagtcgaacaatcgctcctgctcaatatggtgcgagccgtggggctatttccttacatcacgccacacctgagcaacatggccctgtctgatcgcttggcttacgaggctcacagagttgaaggtgtggaacctggcatggtgtttcatcacctccaggcacacgttttcagcttgatcatgcaggggcaaaacgtcgtcctgagcgcctccaccagcgtcggcaaaagcctggtcatcgacgcagtacttgcccagcgccggttcaagaaggtggtggtgatcgttcctaccattgcgctgattgacgaaacccgccgccgcttggtcaagcggttcagagacttcaacctgatcacccaccccagccaagaagcggtgcccgacgtcaccaacgtctacctcctgacgcaggagcgcgttattcagcgtcctgatctggatgatgtggaattcttcgtgctggacgaattttacaaaatcgatttggggagcaataaggatgagagctcgcgcgccgttgatctgagcttggcgttccacaagctcgcaaagaccggagcacagttctacatgctcgggccgcacattcagaagatctctgggttagacggttacgagtatcatttcatcccgtccgacttcagcaccgtcgcggtcgatatccagaatttcaatctgggcatgcgctcagaggagcgcacacagaagctcttggaactggtcaggacgctggagtcccctaccctgatctactgtcaggcgccggcaagcgcaaacagggtcgctgagtatcttatccaggatggtgggttgatcccggtgccagagacgcaggaaatcgctgcatggatctccaagcattaccacccagaatggaacgttgccagggcgatcgccctgggcatcgggatccaccatggcggggtgcctcgcgcgctgcagcagtacatggtcaagctgttcaacgagggcgtcatcaagcgaatcatctgtacatcaactatgattgagggcgtcaacacgtcggctgagaacgtgattatttacgatcgtcgcctcaagatgtcgacgctcgactacttcacttacaagaacatttctgggcgcgctggccgcatgaataaatacttcatcggcaaggtgttcatgctcgaagccccgcccattgagcagggactgacggtcgagtaccccatcggccatcaggatgaaacctcacctatcggccttttaatgcagctggaaaacgaatacctcacggatatctcgcgaggccgccttcaggacgcgtatgccaacccgttgctgtcacctgccaccctgatcgaaaaccgccacattcctatcgagcgtcaggtcgaagtggcgaaaactatcatcagtgaccttcctgatggtcaggagttgttaggctggaaaggcatccctgagccaaaccaactgaattacttatgcgagctggtctacatactagaaggtaagaacctgatggattacctgatctcgtccagttctcagttggcttggcacatcaatgaacttcgaaatcaaaaaaacctgccggcctatctgagcgaagcagtggagaatcggtgggagaatatctcggcgagtgaagccgttaacctgcgcctgagattcatcagaaacatgatgtgcttcagattacctcgggacatcatggcgattcacaaaattcaggtcgacgtgctggagcaacacgggtacgagcctggagactttagcttcttcgctgagcaactggaaaacatgttccttgacccactgctcaccgcactggacgaatacggaattcccactcagatctcaaccaagatcaagcacttgattttgccatcagagcacctgaacgatttgctggcaaaactacgatcgctttcccgtcgggtggagagccttcagctcaccgccttcgagaaaggcctaatgcaatgggcggtcgcggacatgtaa

SEQ ID NO: 58524 - DNA, 744 bp, Pseudomonas putida CSV86
atggaatggcttccggaattcgctttgaattactcagagttggaagagattgggcactataacgcgatccgtatgacaaaaaaagctgcgaaaatcgtttaccagtccgaaaagtatgggttgcgtggcgagtttggtgagatttttttgcatatagctatcaggcaggtttataaaactttgcctgcagttagtaagatttattataagtcttcggctaatgaaacggtaaagggctttgatgccgttcatgtagtgaaggggagagatgggctagagctatggataggtgaaactaaattttataatgatatcactagggctatatatgacgtgtgcaaagagattgttgatcatctggcaacggattatttgcgtactgagtttatattgattcaaaataaaattgacccagaatggcctgaggcagaatctctaaaaaaactactcagtagtaatgtgtcgttggatcaagttttcaaaaaggcctgcataccaatactgcttacttatgatagtcaagcggttgaaggctctagtgaatctaattctgattatttgaattgccttaaggctgaagtggccattgcatataaaaatcttcgagaaaaacttggtgcacaatatcgggataaatttggttcggatttgccggttacggttcatgtgatccttataccgcttaaagataagaaagaactaatttctgccatggatactaggttgaaggcgcttcaattatga

SEQ ID NO: 58525 - DNA, 2148 bp, Pseudomonas putida CSV86
atgatggatattaatgaggtcagagcggcccttaaaggggagcggttagtcgagtcaccattttatcttgtttcaaatattgcgaaaatttgtgtcgaaaacgttgaattgggtcgtgaattagtaataagggctttggatagcgaactcatattggttcatggctatcgagaaatagttgatgagcttgccatgcaggttgggttatatccttatgtggaaagtttgtctgatctgtctctgcgaagtgcaatgatgcacgctgctcacagagcggacggagagatgagtgactttgtcattcacagtgcccaagccaaagttttgcgtaagctcatggctggagagtcagttattttaagtgcaccaacttcttttggtaaaagtctgttggtggatttgttgatctcggctaaggatttttcaaatatagttttaattgtgccgaccttggcgttggtggaagaaactaggagacgcgtttcgaggtttgtagatagatactcaattgtcacatctgcaaatcaaaaaatagaagggcgtaatatatttgttcttgctcaggaacggtttcttagtattgagggcaagcttcctagtattgatttctttgtgattgatgagttctacaaattatcgatatctggagagggggatagagctactctgctgaatcaggcgtttttggcgctatcaaggactggtgctcagttttatttgctcggtccctctataaaggctatccctgaagaggtttacaacaaggttgaatgcagttttgttgtggagaattttcagacggttgctgttgagttgcatcatatcaagaaaaagcctaacaaggctttagcgcttgcgggtctactggaccgactggatggtcagacaatgatttattgtcaatctccatcaagcacaaggactgtattgagcgagtatctcgagaatagagaactccagcaaacgggtgatgaagagctcatagaggcagctggttggactgctaaacattaccatcacgattggttagtttctgtcggcttaaagtatggcatcggcatccatcatggacggctacctaggtctttagggcgcttcatgattcgagcttttgaggagggtaagttaaaaatattgctctgtacttcaactctgattgaaggtgtaaatacagcggcgaaaaacgtcattatatacgacaataaactgaatcggcagccgctggactttttcacttttaacaatatcaaaggtcgctctgggcggatgtttcgtcattttgtcgggaatgtatacttatttgaggctccgcctgaagaagatttgccattcgtagatatacccgcactcaaccctactgatgcaactccaagcagcttgctacttcaaatgagtaaggatgatttgccaactggattagaggaaaaagttgagagactcacgaagcagaattttttacctgtggccattttgaaggctcactcggggatcgagccggaatatttgattgatacagccaagtatttgcatgagttggatatccgctctcttatgcagtgctcttgggttgctcgccctacttatgatgaattaaggttctcgtccgagataatttgggaaaagctgggtggtgctcagtcggcgcgtagagcagcaatgagaacatctagtatgatgacgaagtggatatgggatttgtttaggctcaagagcgtcccggtatttagaaagcagaaaattatcaatcagatggagtatggctcggcagccgatgaggcggttgagaatgtactcgctttcatacgtgggtgggcatcttttaactaccctaaatatctttctgctttaaatgatattgcagcctttgtattggcggcgagagggctgagtgggtgtaactatattccctttgcggcctcgattgagcatttatttcagcctgacagtttttcctctcttgaggaatatggtttgccaactgagattactgaaagattaatgcagaggagtctcttcggtaaggatgaatctcttgatgttgtaattcaaaggttgcgtggccctgaactaaagcgatatgctgatggattgtttgaaaaaagaattattgaagattttcagagcggaatcggggtaaaaaaaaattaa

SEQ ID NO: 58526 - DNA, 870 bp, Pseudomonas putida S610
atgaaccatccagaacaatttctaagtttggttgtgcatgaaattgatgctgctggtgatgatctagcattgtgtgcagggttcgagcgcggggtgtggcggagagatcagttagcaaatcatgtaatggaatggcttccggaattcgctttgaattactcagagttggaagagattgggcactataacgcgatccgcatgacaaaaaaagctgcgaaaatcgtttaccagtccgagaaatatgggttacgtggcgagtttggtgaaatttttttgcatatagctatcaggcaggtttttaagactttgccagcggttagtaagatttattataagtcttcggctaatgaaacggtaaagggctttgatgctgttcatgtagtgaagggggaagatggactagagttatggataggtgaaactaaattttataatgatatgactagggccatatatgacgtgtgcaaagagattgttgatcatctagctacggattatttgcgtactgagtttatattgatccaaaataaaattgaccccgaatggcctgaggcagaatctctaaaaaaactactcagtagtaatgtgtcgttggatcaagttttcaaaaaagcctgcataccaatactgcttacttatgatagtcaagcggttgaaggttctagtgaatctaattctgattatttgaattgccttaaggctgaagtagctgttgcatataaaaatcttcgagaaaagcttggtgcacaatatcgggataaatttggttcggatttgccggttacggttcatgtgatccttataccgcttaaagataagaaagagctaatttctgccatggatactaggttgaaggcgcttcaattatga

SEQ ID NO: 58527 - DNA, 2157 bp, Pseudomonas putida S610
atgatggatattaatgaggtcagagcggcccttaaaggtgagcggttagtcgagtcaccattttatcttgtttcaaatattgcgaaaatttgtgtcgaaaacattgagttggggcgtgaattagtaataagggctttggatagcgaactcatattggctcatggttatcgagaaataattgatgagcttgccatacaggttgggttgtatccttatgtggaaagtttgtctgatctgtctctgcgaagtgcaatgatgcacgctgctcacagagcggacggagagatgagtgacttcgtcattcacagtgcccaagctaaagttttgcgtaaactcatggctggagagtcagttattttaagtgcaccaacttcttttggtaaaagtctgctggtggatttgttgatctcggccaaggacttttcaaatatagttttaattgtgccgaccttggcgttggtggaagaaactaggaggcgtgtgtcaaggtttgtagatagatactcaattatcacatctgcaaatcagaaaatagaagagcgtaatatatttgttcttactcaggaacgttttcttagtgttgagggcaagcttcctagtattgatttctttgtgattgatgagttctacaaattatcgatatctggagagggggatagagctactctgctgaatcaggcgtttttgtcgctatcaaggactggtgctcagttttatctgctcggcccctctataaaggctatacctgaagaggtttacaacaaggttgaatgcagttttgttgtggagaattttcagacggttgctgttgagttgcatcatatcaaaaaaaagcctaacaaggctttagcacttgcgggcctactggatcggttagatggtcagacaatgatttattgtcaatccccatcaagcacaaggactgtattgagcgagtatctcgagaatagagaactccagcaaacgagtgatgaagagctcatagaggctgctgattggactgctaaacactaccatcacgattggttggtttctgtcggcttaaagtatggcatcggcatccatcatggacggctacctaggtctttagggcgcttcatggttcgagccttcgaggagggtaagttaaacatattgctctgtacttcaaccctgattgaaggtgtaaatacagcggcgaaaaacgtcgttatatacgacaataagctgaataggaagccgctggactttttcacttttaataatatcaaaggtcgctctgggcggatgtttcgtcattttgtcgggaacgtatatttatttgaggctcctcctgaagaagatttgccattcgtggatatacccgcactcaaccctactgatgcaactccaagcagcttgctacttcaaatgagtaaggatgatttgccagccggattaatggaaaaagttgagaggctcacaaagcaaaattttttacctgtggccattttgaaagctcactcgggtatcgagccggaatatttgattgatacagccaagtatttgcatgagttggatatccgctctcttatgcactgctcttgggttgctcgccctacttatgatgaattaaggttgtcgtccgagataatttgggaaaagctgggtggtgctcagtcggctcgtagagcagcaatgagaacatccagtatgatgacgaagtggatatgggatttgtttaagctcaagagcgtcccggtattcagaaaacagaaaattatcaatcagatggagtatggctcggcagcagatgaggcggttgagaatgtactcgctttcatacgtgggtgggcgtcctttaactatcctaaatatctttctgctttaaatgatgttgcagcctttgtgttggcggcgagagggctgagggggtgcaactatattccctttgctgcctcgattgagcatttatttcagcctgacagtttttcctctcttgaggagtatggtttgccaactgagattactgaaaggttaatgcagaggagtctgtttggtaaggatgaatctcttgatgttataattcaaaggttgcgtggccctgaactaaatcgatatgccgatgggttgtttgagaaaagaattattgaggattttcagagcggaatcggggtgaaaaaaattaagcaaacatag

SEQ ID NO: 58528 - DNA, 951 bp, Ralstonia solanacearum
ttgtcgaccatcaccgccaccgatctcgaatctgccctaacgggaaacccagaagcgcttgaggttcatcttacgctcgtagagcgagatgtgcccattgacggacatttagtcaagattcactgtcactgcctttcggtggatggaaacggccgtgttcagcctcatcggctggcggagtttatgcggaatgccgtcgttgattatgcgattccgcgttcgaagctcgccgacgcgaaggcgcgcgacaataggttcaacagtaccgaggcagtcgccgaactcgtcgagcgggccaagcgctcgtttaccgatttagcaaacaccggcgaaggcggggagatgttgctgttcctgttggctgagcgcttcctcaagctgccacaaattctttgcaagatggatcttaagacggacacacgtatgcactatcacggcgcggatggggtgtatgcaggtgtgacaccggaaggcaccttgaagctctactggggggaatcaaaaatctacggcgatgcgagtgctgcgattcgcgcctgtctcaattccctcgctcccttcctgatcgaaccagaaaacgaggaagcggagcgggagcgcgacctgatgctcctgagcgacaaggccgaccttagcaacccagcactcactgacgcgctcaagaagtattttgacaagtcgtcagtcatgtctaagcgcgttcaatactgcggtgctgcccttgtaggcttcgacgcagcgttttacccgaaagccaatgcgaaggcggttgctgaggagatcgtcaaggcgtctcgctcggaacttactggttggagcaatagtattggagagcggctcaaattggaaaagctagagcagatggaaatcgaggtgttctgcgtccctctgccgtcagccgaaggtttccgcaccgcattcctcaaggcaatggggatcaaggaacaatga

SEQ ID NO: 58529 - DNA, 2601 bp, Ralstonia solanacearum
atgagcttcgccgacctccaagcttggcttctccaggaaggcattcgggacgatctcgatgcgatcactcgacttacagtacgcaacgagctggataatctggcgccagatccttcggcaccgtccgccgccgcgattgactggcccaggttgctgctcgcaggcagcattctggcgcgatccgatcagagagccgatcaagaagcagcgcttcgaatcgcaaccgctgcaatttctctgacggacgatcaagcgctcaaagacgcgggcgctgtccttttgggaaagctctccaacttccgagcaatcgcgttagccatcgatcggaacctgctggcggtcggcctcgacgggcggttgggcgtcgcgttgcgcctcgaagctcagcgtcgcgagatggaccgttccattctggtgcagtcgagcggcgcctggctacaagtaaacgattttcagcaacgtttctggatcgacgcggccggggatcgctggctctctgcatcagcgcctaccgcctcgggtaagacgtttctcgtacttcagtggctgatcgaccaagtgattgcgggtgagacccgggtggcagtctacctcgccccgacccgcgcattggtatccgagatagagaccaatctcaagagtctcctcggtagtaccgaggcgatcgaggtttcgtcccttccgcttcctgataagtacatagctgctcgcgctggtggtgcgcgagtgattctcgtattcacacaggaacggttgcacctacttgcaaatgtgctcggtgatgtgttttcgatcgacctgctcatcgtggacgaggcacacaagatcggcgacagccagcgaggcgtgattttgcaggatgcaatagagcgggtcacccgcgctaacccaaggctgaaggctgtgttcatcagccccgcgactcagaacccggaagagttactcgcggacgcgcccgatggtgtgcagaccatcgccatcgatagcgacttttctaccgtccttcagaacctgatggtcgcgactcaggtgccacgaaaatctaagttatggacacttattcttcaacagcaggcttcgacgcttccggtaggaaccgttcagctcgccagcacgccggctggacttaagaagcgcctcgcgttcattgccgcagcagccggcgaaagaggcggcacactcgtctacacgaacggtgctggagaggcggaagaggtcgctgatctaatcagccagctcttacccaagctagagggcattgacccagagctctcacagctcgctgagcttgctcggaaaggcgtgcaccaggatttccggctggtgccgttagttgagcggggggtggcgttccactacggcaatatgccgtcactgcttcgactggagatagaacgactgttccgatcaggaaagattcgcttcctggtatgcacttcgactctgatcgagggagtgaacctgtcgtgtcgcacaatcgtcgtacgcgggccccgaaaggggaagggccatccgatggagccgcatgacttctggaacttggctggccgagcaggacgttggggggacgagttccaaggcaatatcatttgtatcgaccccaacgatacgcaggcttggccgactggcattcctagccgcgcgcgctatcccattaaacgtgaaagcgatgctgttctcgagcttggcgatggcatggcggactatctctccgagcgagggctatcgaatctgtccagcatcgagggcgcggacaaatttgagcaggttggcgcctatctgctcaccacctttatgcggctcggctccatatcaacggcaaatctagcgaagcgccatgatgctacgtcgcttgcaaagctcgaccaagttctcggttccttggcaacgcggatcgaaatcgacgttgatcttgcagctcggcatccaggggtaagcgcgattggtcttcaacgccttcttgacgctttccgctctcacactggcaatgtcgaaaacctgcttccggccgaggtggcgagcaatgacagctatgaccggttcgttacgattatgggacgggtcaacgatcacctgtttcccgccttcgcccccgagagtcgcattaggctatacgcgttgatcgtcttcaaatggctgaagggctactcgttggcaagaatcattcgcgatagtgttgagtggcaccaagacgctggtaggcctttcaaacttccggacctcatccgtagcacgatggaactggtggagcagatcgctaggttcagggcgccaaagtacctttctgcttatgtagacgtgctgcacctgcatcttcgggaaattggccgtgaagatctgatcgacgatggtttggatatcggaacgcaacttgagttcggcgtttcatcgacgacacttctttccctcatggaacttggcctttcccgcatgagcgccgtagctttgtacgagaagattgcccgcgatgaccttagcagagaggaatgcgtggcttggattgcagagcgagttggccaattccaagccatggatatcccggccatcatcgtccgcgaggtgcgcgaacgcctcacattgccaggcgacgtagccacgtaa

SEQ ID NO: 58530 - DNA, 1026 bp, Pseudomonas stutzeri DSM 10701
ttgacgcagcttcccgagcctcttccctcgctggaagacatcctagccaagctactagatgagtcggagcttgatagtgttctgaattgcgctgtagatgatcagtttggaacaacccccccacggttgtctctattgcacctgcgattcagcgaggacaaaccgaaccttcagaacctagcggactacctgtgctctgcggcgatgaactatgcgctcagtcgtaagcggcgagacgttttttttgctgaactgagtaagtcaaagaaaagcagcctttcgctaatcccgcggatcaataaagccgtcagagacgctttcatcgagttccgcgaagctcacccgaatcgcgcaagtgaagtgggtgaggtgctcgcattttgcatcgcgaaccactacctacaggcggcacaactcatcgcaaaaatgtctctcaagacttcgcccaacatgcctgtgcatggactcgatggcatccacgcggccgtcaagaatggatcgttaaccgtatactttttagagtccaagcttacaaaaactgcagctaagggcctcaaagactttgctgagtccatgaagacctttgacgaaaagcccaagcagtactctcgcgaatacgagctcgtctgtaaccttggtaatctcgatgttcttccggagaacgagcgggagcatttactccaatacctggatgtttactcacctgcgagctcgctgaagcgggagcgtgcggttggcgttgtgtgctactccgaagagaaacactacgccaattgtctgcccgtagatgacggcgatgtgctgaagcatgaacatcattttgcagggctactcgctgccgaccacggatatcaccagaagtatctactcactcagctgagcaaaaacgaagtcgctcccgaaaagtgctccgtctaccttgtcgctgtgccatgcatagccaccctgaggaaatctttctacgcagcattgggcattccaccgattatggatgaattggacgatacgaacgccaaggaggcttaa

SEQ ID NO: 58531 - DNA, 2658 bp, Pseudomonas stutzeri DSM 10701
atgacgacgtttgcccgccagctgtcagaacgcttcgtacagaaccccaacttcaccgccgcattggctgatctacagtcggccggtgccgtgagcacgctagcggaaggccttgagagtctcgagaatgcaccagattttgcagagctcactcgtctgctttattgcgcctcggtgtttgcacaagctgacaacgagtcattactttccttagctcagaacattgcattcaacgcgcttctcgtctcgaaggaccctggcatcctagagcgcagcgcgtacatcctggccgaaattggcaacttcccaggggtccggtatctcaaagaccgcttcggggcgccgagttcctcattgatgggtttggttcatgacaaggtcagccaagagctaaatacagtggacgtcggtgggcacaagattgctctgaccgactaccaaaagagagtttgggatcgtctagaacgaggtgatgacctggcaatctccgccccgacttcggccgggaagtcattcttagtaatcgaaaacttggcgcgcaagatggagcaagcagcgcgcagtgcctgcgtatacatcgccccaactcgggcactgctcgctgaggttctggcaaagataaagcggcgcttggagctatttcccgatattcgggtctcggagattcccactttcgaggcagtggagaaacaagtttttgtacttacgcaggagcgcttccagatgcttctggccgccacggctgaaggctttgacatgattattgtcgatgaggctcagaatctctccgatggatctagagggatcatcctgcaggaagccatcgagcaggcgatccagagaagagcgcagacccacgtggttatgctcgcccctggagccgatggtttcaaagaggccgtagagagctttggcctatccggtgttgatgagatcactacttccgtttcaccggtgttacaaaaccggatttcggtgagcggtgtaccagaatcgagtcgtctggactttcgcctacttgggcaggacaaaggacagtacattgggtcagttacacccgcaaaagctcagacgtccaacgaagcacggctggtgaccgtagctctgaattttggctcagagggcggctcattgctctatgcaaagtctcctagcgaagcagccaaactcgcgaaaaacttgcaccgagggctgaagagcaaacacggttctcgtcaactaaacaatgaacttgctgagttcatcagagaccacattcatcccgagtacaacctcataaccttggtggagcagggcgtcgcattccactacggccaaatgccggctttgcttcgtgacgctatagaagttgccttcaaaaaacagcatctcaaattcttggtctgcactaccaccttattccaaggcatcaatctgcccgcccgcaatgttttcatcagcacgcccaagcgcggtaggcatgagaagaccacgctcaagcccgcgctgctttggaacttcgctggtcgcgccggccggatgacagaggatatcgtcggcaacgtatttctaattgactatgaacagtgggacgagcggctgatggatgaggctgtccccttcaagatcgagccttcgctaggcaaaaccatcactgagcatgcgccgacgatattggatgttctccgtaaaaatccgccccccgggcttccccgagaggagctgcaccaacaggttcaatccgcagcgggtttgctaattaccaaagcgcggcagggacacctagacgattgggtttcaagagttgctccagacctggatggcctggatagcttcagcctgcgaaacgcggctcagcaggctgctgcaagtctggccatcccgactcccatcatgacagcaaactggtcgctggatctctttgcgctcaatgatctgctcgattgctttcaaaagcacataaccaaaggcacgatcgacaaatacatcccttccaacccgaccgaccttggcgccaaagcattcgcaagctatcgagacattttcaacctcatgttcaagcttttgaaagggttcgacggaaatttcggtgcgtacgtgagcccaattgcggtgcgatggatggagggaaccccatacccagtgatcctgaagcaggccatcacttttgaacaggagcgcctggctaagcgcttgagcaacgaggaggcgttacgtaagacgggggctcaaataaagcaatccagaaggcttaaggtcgataaaaatgcggtgattaacagaaccttcgagaccatcgaaaacatcgtcagattccagctcgtccagatgggcaaagcgtatgtggacatcttggctcatgcgctccgcaacgccggagacagcgagagggtcaatcgcatttttgacttcgccatggccttagagcttggcatatgctctacaacaggtcgtgcactgatggagctcggcctttctcggattgccgcaagtgagatgcaacgcattctgggtgaccagaacctgtccatgactaaggtgcgggacgcgcttgaaagtctccctttgcaggagatgaacctgaacccattcattttggaagagctacgcgccatacggttgcagctcaggtcaggtccagacatcagcggtgcgcaagagggagctacacatcaatga

SEQ ID NO: 58532 - DNA, 1632 bp, Pseudomonas syringae pv. syringae B64; identical to SEQ ID NO: 58522

SEQ ID NO: 58533 - DNA, 2142 bp, Pseudomonas syringae pv. syringae B64
atgaaatacgaaacgatcaagaacagcctagcgaaactcagtgatgagggcgtttcgacggtcgatgtgctgctcgccattaacgccatcgtcaaccgaagcaacgccgagtgggaaggacgggatctggtgatccgtgcgctcgacaagttcgcactcttcgacgcagtcgaacaatcgctcctgctcaatatggtgcgagccgtggggctatttccttacatcacgccacacctgagcaacatggccctgtctgatcgcttggcttacgaggctcacagagttgaaggtgtggaacctggcatggtgtttcatcacctccaggcacacgttttcagcttgatcatgcaggggcaaaacgtcgtcctgagcgcctccaccagcgtcggcaaaagcctggtcatcgacgcagtacttgcccagcgccggttcaagaaggtggtggtgatcgttcctaccattgcgctgattgacgaaacccgccgccgcttggtcaagcggttcagagacttcaacctgatcacccaccccagccaagaagcggtgcccgacgtcaccaacgtctacctcctgacgcaggagcgcgttattcagcgtcctgatctggatgatgtggaattcttcgtgctggacgaattttacaaaatcgatttggggagcaataaggatgagagctcgcgcgccgttgatctgagcttggcgttccacaagctcgcaaagaccggagcacagttctacatgctcgggccgcacattcagaagatctctgggttagacggttacgagtatcatttcatcccgtccgacttcagcaccgtcgcggtcgatatccagaatttcaatctgggcatgcgctcagaggagcgcacacagaagctcttggaactggtcaggacgctggagtcccctaccctgatctactgtcaggcgccggcaagcgcaaacagggtcgctgagtatcttatccaggatggtgggttgatcccggtgccagagacgcaggaaatcgctgcatggatctccaagcattaccacccagaatggaacgttgccagggcgatcgccctgggcatcgggatccaccatggcggggtgcctcgcgcgctgcagcagtacatggtcaagctgttcaacgagggcgtcatcaagcgaatcatctgtacatcaactatgattgagggcgtcaacacgtcggctgagaacgtgattatttacgatcgtcgcctcaagatgtcgacgctcgactacttcacttacaagaacatttctgggcgcgctggccgcatgaataaatacttcatcggcaaggtgttcatgctcgaagccccgcccattgagcagggactgacggtcgagtaccccatcggccatcaggatgaaacctcacctatcggccttttaatgcagctggaaaacgaatacctcacggatatctcgcgaggccgccttcaggacgcgtatgccaacccgttgctgtcacctgccaccctgatcgaaaaccgccacattcctatcgagcgtcaggtcgaagtggcgaaaactatcatcagtgaccttcctgatggtcaggagttgttaggctggaaaggcatccctgagccaaaccaactgaattacttatgcgagctggtctacatactagaaggtaagaacctgatggattacctgatctcgtccagttctcagttggcttggcacatcaatgaacttcgaaatcaaaaaaacctgccggcctatctgagcgaagcagtggagaatcggtgggagaatatctcggcgagtgaagccgttaacctgcgcctgagattcatcagaaacatgatgtgcttcagattacctcgggacatcatggcgattcacaaaattcaggtcgacgtgctggagcaacacgggtacgagcctggagactttagcttcttcgctgagcaactggaaaacatgttccttgacccactgctcaccgcactggacgaatacggaattcccactcagatctcaaccaagatcaagcacttgattttgccatcagagcacctgaacgatttgctggcaaaactacgatcgctttcccgtcgggtggagagccttcagctcaccgccttcgagaaaggcctaatgcaatgggcggtcgcggacatgtaa

SEQ ID NO: 58534 - DNA, 945 bp, Pseudomonas syringae pv. aptata
atgctggagctgcttgaggaatccgcattagataaagtggttaattgtgctgtacctgcgaaccacacgcccgacgctactcaccctcgaacgacattactacatgtgaagtttagtgaggataaacctcaagtcgatagaatggcaggtttcctttgggggcagtgcgtgaactatgctctgtctcgtagaagaagactcgcattcaaacaaaaacttctggactctaccggggcagatctttcagaaataccaaatctagtcgatgtagttaaaaatgtattcataaaattcagaaaagagtatccgtctagagcaagtgaagtcggcgaagtccttgcatattgcgtcgcaactcaacatctgaaagcggcccaaatggccgctaaagtttctttgaaaacttcatctaacatgcccgtgcatgggttagatggcattcatgcaagcgtggaaaatggtgttttaacaatatattttctagagtctaaactttcaggtagtgcgaactcgggtgctaaggagtatgccgagtccatcgctggttttctaaatgatgaaaaacaataccttcatgaatactcattagtaggcgatcttggaaatttagatactcttgaaggtgaggcgcgaactttggctttagcgcacttcgacgtgatgggtaatccggagattcaacgtcgtgaacgatctgtagctttgatctgctattcggagaaaaagcatttcaagaactcaattccaattgctgatggatcaccggatatacatgaaaagcacttttcagaaaactacgctaaagatttagaccatcatcaaaccgccgcctcgaagcacctgaagaataacggtgtagatccacgaaaatgccaagtgttttttgttgctgttccggacgtcaataaacttcgcgaaaaattttatgaggcgatgggcaaatga

SEQ ID NO: 58535 - DNA, 2607 bp, Pseudomonas syringae pv. aptata
atgaacagctttgcaaatgaactatcaaataagctttcctcacacgaaatattttgggggctctttgagatgttgcaaagcgcaggtgccgtttcgacactgcctgacggagtttacgaagagtttgactccttatccgagaatgatattgcgaaattattatattgtgctagggtatttgctcaatctgatcttgaaaaattcaagtcaatatcccagtcgattgctctaagttgcatgctcatttcccaagaacctttagttcttgaaaaatgctcacgaattttaactgagcttggaaactttcctggcctaggttatgcggagcagcattacggcattggatctgaatccctaatagggactttgcaacgtcgtctagcacaagaaattaatacagtacaggtcggagggcagcgtttacctcttaccgattatcaaaagaacgtttgggaccaattagctggaactggctcgctcgcaatttccgcgcctacatcagcagggaagtcatttcttgtaatcgagcatatgtgtcggcttgctagtgagaactcctcgttctgcgctgtatatattgcaccaactcgcgctttattgtctgaggtcttgcaaacagtgcaggttaggcttttagatatggaaaatatcagagtatcttctgtgcccagcctagacccggaaaatgataataagcaggttttcgtattaacacaggaaagactacaggttttacttgctatttctgacatgtcttttgacctcgtgattgtggacgaagcacagaacctctctgatggttcaagaggaatgatacttcaagagtgtctcgaacaagtcttacagcgcagcaaaattacaaaaatcatcatgctggcgccaggcgctgaaggtttttttgagactgcgaaggttataggtttgaacgatcttagatcgttgacaacatcagtgtcgcccgtacaacaaaatagaatagttgttcataaggtgcgtgggaagaatgaattaaagttagaattgcttactgggcggaggatattgccgctgggtcagcttgccactgaacgtggaatggacattcctgctacgaggcttgctgcagtcgcattggaattggggtctagtggtggttcacttgtatattcaactggcccaagtgatgcggaggacatagctctacaaatttccttggcccgaaaaaatgttgaagatattaggcttttagagttggccgactttatcgagaaacacattcatccggattataaacttgcgctgcaagtccgcaatggtgtagcttttcactatggccgaatgccttcattgctacgagagtctttggaggaaggattcaaatctggagctttaaagttcttggtgtgtaccaccacactttttcagggcgtaaatcttcctgctcgaaacgtattcatagatacacctacccggggtagagggacaagtcttgatccagctttgctttggaattttgctggacgagctggtcgcatgaggaaagatattgtcggaaatgtgtttctagtcgattacgatgaatggcctgaaaagccaatgtctgagtttgttaaatttaaaataaaacctgccattcaggaaacacttacgacctcacactttcaagtgcttgatgcactttctggcaatatgccaaagcggagcaggtttgatgagtcatcagggaaagttacagcttctgccggactgctcatagctcgtgcagctaaaggtgatgttggtgagtttattgctaggattcttccagatgtagagaaagaacgtgtcggctctttagttactgcggctatagctgccgcggaaagcttgcagctgccttcgatcattcttacttccaattggatggtagacccattcgggcaaaaaaggttgtatgacaagattgtcagcaaaataaatgcggatgaatgtgacgatttaattccaattaatccccatgaacctggcgcttccagtttatatggaggtatttttcatagaattctcaagtctgtctacggccaagaggggaatttcgggggctatgtttctagcctagctataccttggatgaagggtatgccttaccctgtgatactgaatacagcaataaaaaaagaagttaaaagaattgataaaaagacagcggaatattttgagaaaaaaattctggaccctaaaagtcgtgttaggcagcctaaagctcttgatagtagtcaggtgatcaggaagacatttgatctgattgaggatgttgttaggtttcaattcgttcagttgggcaaggtttacattgatcttctatctttggcgttatgtaacgaaggatatccagaattagtctctgatatttttgatttctcccttgctttggagttggggatttccactcaatccggtagatcgtatgttgaattagggctgtcaagaattgctgcttccgcactggatcagatttatccgaattctaaacttactatttctgaagcaagggcatggctttgggacttggatgtgcaaaatctgaaggttggaagagtaattcttgaagagattcaaaaactgggtcttattagatctgaagcttaa

SEQ ID NO: 58536 - DNA, 474 bp, Bradyrhizobium japonicum USDA 6
atgctgaagctttattggggcgaatctaaaatctacaaagatgcggccaccgccatcaaagactgtctggcctcggttgcgcctttcctgatcgagccggagcacgaagacgctggacgggagcgcgacctcattctcttgagcgacaaggctgatttgagcgatccggcgttgaccgaggcgctcaaacgctacttcgataagatgtcgccaatgtccaaacgcgttaaatattgcgctgtcgccctcgtgggctttgatgctgccttctatcctggcgacagagctcaagctattgcggacgaaatgaaagaagcggcgcggatcgaactcaagaaatggagctcaacgatcggaacgcgcctgaagaaagaaaaactggagcaggttgaagtcgagctattttgccttccgctgccgtccgccgaagacttccgggccgcgttcctaaaggcgatggggcagaccgtatga

SEQ ID NO: 58537 - DNA, 2517 bp, Bradyrhizobium japonicum USDA 6
atgagcctgaacgatttgcaaggctggctcgttgctgaaggtctgcgcgaggacctcgatcaattgaccctacatactgtcgtggctgaactggacaatattgtaccgcccaccgacaaggctgcctcattcgactggcctcggcttttgctggcaggaagcatactcgcgcagtcggatcaacggacctatcaagacgcagcgcttcgtatcgccactgcggcaatcacgctctccgacagtgaggccatcaaagattccggcgcggttctcttaggaaagttatcaaattttcgtgcggtttcgctcgcgaccgaacgcgggttgctcactgccgacgttgagggacggctagggatggcgttgcgtatcgaagcgcagcgccgccagatggatcagtcgattctagtccaatccagtgggcgatggattcaggtcaatgacttccaacagcgtttctggagccaggctgacaattaccaatggctttcggcatccgctccgacagcatccggtaagacgttcttggtcttacaatggctgatcgaccaaatccgatcgaccgagatgcatgtcgctgtctatttggcgccgacaagggcgctcgttgctgagatcgaagcaaatctggtctcactgctcggagcccgcagcggcatagaagtctcgtcgcttccgatacgggaaaagcacgacaaagcccacgaaggcggttcacgcgctatctttgtgctgacgcaggagcgcatgcacctgctggctaacgccattggcggcgccttcaaggtcgacctgctcgttgtcgacgaggcacataagatcggggacaatcaacgcggcgtcatccttcaggatgccatagagcgcgccagtcgctccaatcgcacgcttaagctcgtcttcatcagtcctgccacccaaaacccgcaggagcttcttgcagacgctccggaaggagctcacaccgcgtcgtttgaaagtgacgttccaactgtgcttcaaaatctcatcgtggccgagcaggtgccgcgtaagccaaaactatggaaattgtcggcacgcaaacacgcgtccttgttgccgcttggtgtggtccagctcggcagcagcccgggctcgctaaagaaaaggctggcattcatcgccgctgcagctggagagcgcggcgggacacttgtctacgcaaatcgcgcctccgattccgaagacatcgccgatctcatcagtcagctgataccggaagtgccatctgaccctgaattgcttgagcttgcagatttggcacgcaaaggcgttcacccacgctacaggctcgcgccgctggtcgagcgcggcgtagcctttcactacggcaatatgccgtcactcatccgctcggaggtcgagcggctgttccgctcaggcaagattcgattccttgtctgtacctcgacgctcatcgaaggcgtcaatctgtcttgccgaaccattgtgctgcgcggcccaagaaagggcgtcggacatccgatggaagcgcacgatttctggaaccttgccggccgtgctggccgatggggtgatgaattccagggaaacatcatctgcatcgatcctcaggacgcacaggcttggcctgatggcgttcccgagcgggctcggttccccatcaagcgcgaaagcgacgccgtgatcgagcaaggagagagccttgcggattatctggaccgccgagcaacaactgatttagccgagttcgaggatcccaaccaattcgagcaggtcgcttcatatctgctcgctacatttttacggcagggatcaatcgcacaatccagcctcgccaagcgccacaatccggcgatcatcgagcggcttgaagcgagccttgccaatatcgccgcgcagatcgcggtaggtccagatattgcggcccgacatccgggcgttagcgccttgggcatgcagcgcctcctcgaggcattccgcaattacaaaggtgatgtcgaaaatctattgccggccgccgtcgatagccaggatagctatgatcgcttcgtgacgatcatgcgtcggatcaaccagtatttgtttccggcgttcacgccagacgggatcattccacttcacgctctgatcgtcgtgcaatggctaaagggcttctctctgtctcgaatgatcgagcggaatatcgactaccaccgtaggaacggccggtcattcaagctgccggtcctgatccgcagcacgatggagatggtcgaacaaatcgcgcggtttcgggcgccgaagtatttgtccgcctatgtcgacgtactcaatatgcatctagctgcaataggacgggaagacctgatcgatggtgatgtcgatataggaacgcagctcgaattcggcgtttcttcacggaccttactgtcgctgatcgagctcggattgtctccattgtcttgcgacgcgattgattgtcttttcgattgtcccagtagctcaatcgcgacagatgcttccagattcgtcggcgtatcgccaacgatatag

SEQ ID NO: 58538 - DNA, 1035 bp, Bradyrhizobium japonicum USDA 6
atggactgcggaggtctaggtggttacaattatgggttgactcgtctgggggcagacgggcgtacgaacaagggggtaggccgtctgtcgaccatcaccgcgactgatctcacgtccgcgctgacagggaatccggaagcactcgacgttcacctcatgttggtggagcgcgacgtcctcatcgagggtcattcggtcaagatccactgtcattgcctcacagtggatggaaacggccgcgtccagccgcaccggctggcggagttcatgcggaacgccgtagtcgactatgcgataccgcgctcgaagctcgctgcagcgaaagcgcgcgacgccaagtacaatagcaccgaggcggtcgccgaactcgtcgagcgcgccaagcggtcgttcaccgatttggcgaagaccggagagggcggcgagatgctgctgttcttattggccgagcgcttcctcaagctgcctcagattctgtgcaagatggatctcaagacagacacgcgcctacactaccatggagccgatggggtgtacgctggcgtgatgccggaaggcatcccgaagctctactggggtgaatccaaaatctacaaggacgcgggagccgcgatccgcgactgcctcgcctcactcgctcccttcctcattgaaccagaacacgaggaaaccgacagggaacgcgatctggtgctcctgagcgacaaggccgacctcagtgatgcgacgctcaccgacgcgctgaagaagtattttgacaagtcgtcggtgatgtccaagcgggtccaatactgcggcgtggccctggtgggcttcgacgcgccgttctatccgaaagatgacgtaaaggcgatcgcggaggagatcgttgaggcctcacgcgcggaactggccgtttggagcaaaaggatcggcgagcggctcaagtcggagaagctcgaccagatggaaatcgagctgttttgcatcccgctgccgtcggccgacggcttccgcgccgcatttctcagagcgatggggattaagacggaatga

SEQ ID NO: 58539 - DNA, 999 bp, Bradyrhizobium japonicum USDA 6
ttggctgcaggtgaacgattttcagcaacgcttctggccaatgcgggcggaggaagttggctctcggcgtccgcccccactgcctccgggaagacgtttctcgtccttcagtggttgatcgaccaactaagcgcgggtgacacccgggtcgcagtctacctcgcccctacccgcgtgttagtttcggagatcgagaccactctccaaggtcttctcggcaagaccaagcgcatcgaggtgtcgtcccttcccctccgtgacaagtacgaagcggcgcgcgctggaggcgcgcaagtaattctagtctccacgcaggagcggctgcaccttctcgccaacgtgctcggcgacgcgttctcaattgacctgcttatcgtggacgaggcgcacaaaatcgaggacagccaacgcggcgtgatcttgcaggacgccgtagagcgggctagccgtgcgaactcgaagctgaaggtcgtattcatcagccccgcgacacagaacccggaggcattgctaacggacgcgcccgacggtgtgcagactgtcgccgtcgacagcgacgctcccaccgttctccagaacctgatcgtcgcgaaccaaaccccacgcaagccgaagctctggaacctgaccgtccgacagcagggttcgacacttccagtcggaacgctccagctcgcaagcacgccagcgggacttaggaagcgcctcgccttcatcgccgcagcggcgggccagagaggcggaacgctcgtctacacgaacggcgccggagagtcggaggatgtcgccgatctggttagccagctcctgcctcagcctggctcaatcgatccggagcttgcacagctcgccgacctcgcccggaagggcgtacgccccaacttccgccttgcaccgctcgttgaacgcggggtcgcgttccacttcggcaatatgccatcgacgcggcatcgtggcgcttcgagagactggccgccgaaatggacccgagccgcgtga

SEQ ID NO: 58540 - DNA, 873 bp, Bradyrhizobium japonicum SEMIA 5079
gtggagcgcgacgtcctcatcgagggtcattcggtcaagatccactgtcattgcctcacagtggatggaaacggccgcgtccagccgcaccggctggcggagttcatgcggaacgccgtagtcgactatgcgataccgcgctcgaagctcgctgcagcgaaagcgcgcgacgccaagtacaatagcaccgaggcggtcgccgaactcgtcgagcgcgccaagcggtcgttcaccgatttggcgaagaccggagagggcggcgagatgctgctgttcttattggccgagcgcttcctcaagctgcctcagattctgtgcaagatggatctcaagacagacacgcgcctacactaccatggagccgatggggtgtacgctggcgtgatgccggaaggcatcccgaagctctactggggtgaatccaaaatctacaaggacgcgggagccgcgatccgcgactgcctcgcctcactcgctcccttcctcattgaaccagaacacgaggaaaccgacagggaacgcgatctggtgctcctgagcgacaaggccgacctcagtgatgcgacgctcaccgacgcgctgaagaagtattttgacaagtcgtcggtgatgtccaagcgggtccaatactgcggcgtggccctggtgggcttcgacgcgccgttctatccgaaagatgacgtaaaggcgatcgcggaggagatcgttgaggcctcacgcgcggaactggccgtttggagcaaaaggatcggcgagcggctcaagtcggagaagctcgaccagatggaaatcgagctgttttgcatcccgctgccgtcggccgacggcttccgcgccgcatttctcagagcgatggggattaagacggaatga

SEQ ID NO: 58541 - DNA, 825 bp, Bradyrhizobium japonicum SEMIA 5079
gtgttagtttcggagatcgagaccactctccaaggtcttctcggcaagaccaagcgcatcgaggtgtcgtcccttcccctccgtgacaagtacgaagcggcgcgcgctggaggcgcgcaagtaattctagtctccacgcaggagcggctgcaccttctcgccaacgtgctcggcgacgcgttctcaattgacctgctgatcgtggacgaggcgcacaaaatcgaggacagccaacgcggcgtgatcttgcaggacgccgtagagcgggctagccgtgcgaactcgaagctgaaggtcgtattcatcagccccgcgacacagaacccggaggcattgctaacggacgcgcccgacggtgtgcagactgtcgccgtcgacagcgacgctcccaccgttctccagaacctgatcgtcgcgaaccaaaccccacgcaagccgaagctctggaacctgaccgtccgacagcagggttcgacacttccagtcggaacgctccagctcgcaagcacgccagcgggacttaggaagcgcctcgccttcatcgccgcagcggcgggccagagaggcggaacgctcgtctacacgaacggcgccggagagtcggaggatgtcgccgatctggttagccagctcctgcctcagcctggctcaatcgatccggagcttgcacagctcgccgacctcgcccggaagggcgtacgccccaacttccgccttgcaccgctcgttgaacgcggggtcgcgttccacttcggcaatatgccatcgacgcggcatcgtggcgcttcgagagactggccgccgaaatggacccgagccgcatga

SEQ ID NO: 58542 - DNA, 951 bp, Bradyrhizobium japonicum
ctgtcgaccatcaccgcgactgatctcacgtccgcgctgacagggaatccggaagcactcgacgttcacctcatgttggtggagcgcgacgtcctcatcgagggtcattcggtcaagatccactgtcattgcctcacagtggatggaaacggccgcgtccagccgcaccggctggcggagttcatgcggaacgccgtagtcgactatgcgataccgcgctcgaagctcgctgcagcgaaagcgcgcgacgccaagtacaatagcaccgaggcggtcgccgaactcgtcgagcgcgccaagcggtcgttcaccgatttggcgaagaccggagagggcggcgagatgctgctgttcttattggccgagcgcttcctcaagctgcctcagattctgtgcaagatggatctcaagacagacacgcgcctacactaccatggagccgatggggtgtacgctggcgtgatgccggaaggcatcccgaagctctactggggtgaatccaaaatctacaaggacgcgggagccgcgatccgcgactgcctcgcctcactcgctcccttcctcattgaaccagaacacgaggaaaccgacagggaacgcgatctggtgctcctgagcgacaaggccgacctcagtgatgcgacgctcaccgacgcgctgaagaagtattttgacaagtcgtcggtgatgtccaagcgggtccaatactgcggcgtggccctggtgggcttcgacgcgccgttctatccgaaagatgacgtaaaggcgatcgcggaggagatcgttgaggcctcacgcgcggaactggccgtttggagcaaaaggatcggcgagcggctcaagtcggagaagctcgaccagatggaaatcgagctgttttgcatcccgctgccgtcggccgacggcttccgcgccgcatttctcagagcgatggggattaagacggaatga

SEQ ID NO: 58543 - DNA, 999 bp, Bradyrhizobium japonicum
ttggctgcaggtgaacgattttcagcaacgcttctggccaatgcgggcggaggaagttggctctcggcgtccgcccccactgcctccgggaagacgtttctcgtccttcagtggttgatcgaccaactaagcgcgggtgacacccgggtcgcagtctacctcgcccctacccgcgtgttagtttcggagatcgagaccactctccaaggtcttctcggcaagaccaagcgcatcgaggtgtcgtcccttcccctccgtgacaagtacgaagcggcgcgcgctggaggcgcgcaagtaattctagtctccacgcaggagcggctgcaccttctcgccaacgtgctcggcgacgcgttctcaattgacctgcttatcgtggacgaggcgcacaaaatcgaggacagccaacgcggcgtgatcttgcaggacgccgtagagcgggctagccgtgcgaactcgaagctgaaggtcgtattcatcagccccgcgacacagaacccggaggcattgctaacggacgcgcccgacggtgtgcagactgtcgccgtcgacagcgacgctcccaccgttctccagaacctgatcgtcgcgaaccaaaccccacgcaagccgaagctctggaacctgaccgtccgacagcagggttcgacacttccagtcggaacgctccagctcgcaagcacgccagcgggacttaggaagcgcctcgccttcatcgccgcagcggcgggccagagaggcggaacgctcgtctacacgaacggcgccggagagtcggaggatgtcgccgatctggttagccagctcctgcctcagcctggctcaatcgatccggagcttgcacagctcgccgacctcgcccggaagggcgtacgccccaacttccgccttgcaccgctcgttgaacgcggggtcgcgttccacttcggcaatatgccatcgacgcggcatcgtggcgcttcgagagactggccgccgaaatggacccgagccgcatga

SEQ ID NO: 58544 - DNA, 951 bp, Bradyrhizobium japonicum; identical to SEQ ID NO: 58542

SEQ ID NO: 58545 - DNA, 999 bp, Bradyrhizobium japonicum; identical to SEQ ID NO: 58539

SEQ ID NO: 58546 - DNA, 951 bp, Bradyrhizobium japonicum; identical to SEQ ID NO: 58542

SEQ ID NO: 58547 - DNA, 999 bp, Bradyrhizobium japonicum; identical to SEQ ID NO: 58539

SEQ ID NO: 58548 - DNA, 951 bp, Bradyrhizobium japonicum; identical to SEQ ID NO: 58542

SEQ ID NO: 58549 - DNA, 999 bp, Bradyrhizobium japonicum; identical to SEQ ID NO: 58543

SEQ ID NO: 58550 - DNA, 1626 bp, Rhizobium leguminosarum bv. trifolii WSM1325
atgaacattacgcctctggtagatccatatgccgcgtccgacgccggaggtgtcaaagcccgccaaggctttacattccaggatcatgtcgcggcctcgttccttttggatatgctgtcggatccggcattgctgcaggtcgaatgcgagaccggcgacgatattgccttgagatggcttcgaaacggggcggatgtcacggaatatgtccaagtcaagatcacggatggggaaagcaattggaacctgacggagatttgcgagcgcagagcaaagcgggttggcacgtcgcttgtagagatatcgctgggaaccgataagttcccggtcgatgccctcttccgcttcattagcatacgcgacgtcaatcacacactccgaccactaaaaactcctcgtgaccgtcgttttcagccacatgttgtggatgcgcttaccaagcttggcacccagatctcgaacaaactaaggggggtgacgtctcccaatgggaaatcggtgcccgagtgggttcaagcttgcctttggcaagtccctggcgaaaaggaggccgtccagcaaaagaacatcaatcgaatacatcgcttattcgaaagcgagggcgaagcgatattcgcttccgcttccgcgaagatctatgaagggcttgtcacgattgcccgaaacgccggcgacgtatcgatggtggatcaccctgcgaagaaggcgatctcgaaacaggcgatgaagggatggtgggacgagaccattagggatgccagaagactgaatcgaacgttcatgaaggtctaccaagtccaaaccacaaacttcttcgccgcgcttcatgacgtccaagaatctacaattcgccgtagtctcgcctcttacgatgccgagttcgatggcggggaatggagaaatctggaactcgcgaaatacctcgctgggtggatccccgagttgattttgccgccccgaatgcttgcgcaatgtaaccacctccaagcgcgcgagctacttgcgaagacgtcccaggccctcaaggacaagaacattgactatgaggaccttctgtctcaagccatgctccacgcaatcctccgacatcactactccagtgaaccgacgctttgcaaattgcacagcgtgtcccccgaccaatcggattgtatgaatgggcacgtcgtcttcgatccagccggtgaccaactctggttgggtcacgccaggataaccgtctcagataactgggacgcggtgacgacgctcctttcttccgagctagacgctcttgtgcaccaagatttcctgcgaaaggaacgcgatctgattattcagttccgcgaaccgcagtatctaaaggagacgaccctaacgaaggtcttccaagaatttgccaaacttgacgacatcgtaagcatcttgaacatcccggttcttgtggcctacgacagctcggtgttagaggccggcttcgcagccgactacgtagagaaactgaaagccgaggtcgccgatagctaccaagagctaaagagcaagctctcatccaagttgaccgacatacgggtgcatgttttcctggtcccgatctacgactcggttcaactcgcagacaatttcaaacgtagtctggagaactga

SEQ ID NO: 58551 - DNA, 2142 bp, Rhizobium leguminosarum bv. trifolii WSM1325
ttgctgctcgaggacctaaggagttttctcactaccggctttgggcctgagcaagctgtgttggtcctcggtgccgtcaacacgctcgtcaattcgcaaaggacccatgaccttggtcgtgaaatggtcatccgatgcctggcaaaaaaggacttgtttccgcctggtctgctgccactcctcgagtccctcgtcgggtcggtcgggctcatcccatatctctcgaaagacgtttcgacgttcgaagagcagttgatgcttgaagcacatcgaacgcctgcgatcggcaaggtcgactttttccatacgctccaactccaaatctaccgggagctgaggtcaaaacgaaacgttgtattgagcgcgacgaccagcgtcggaaagagtgctatcgtggatgcaatcattgcttccggcgatcacaaacaccttacaattatcgtcccgacgattgccttgatcgacgagacgagacgtcgcattatcgagacattcggctcacgatacgcgatcgttacgcacccaacgcaggtctcgtctcgggataaagcgacagtgttcgtccttacccaggaacgcgctttgaatcgcgacgatctccaggacgtgtcgttctttgtgatagatgagttctacaagctcgacctacagatggagaagagtatcgagcgggccgtcgatctcaatctttgcttccacaagctctcgtccaacggggctcaattctacctgatcggtccccatgtagacggcatcaacggactggcgtcaaaacgggagtttctgttcctaccgtcgcatttctcgacgatcgcgctggatatcgtgcagtacggcctgccaagagacggtggtgaacgagaggagaagttgatcgaactctgcgaggaactcacctcgccgactttgattttttgccaatcgccaggttcagcaaagagagccgcggaaacgcttcttgaggcggaaggtttgcttcctgagacagatctgacctggccggccgtcgagtggctggagaaagaatatcctgaagaatggatcgtaacgcatgcgctgcgccgaggcgtgggcattcatcacggtagcatcccccgcgccctccaacagtacatggtcaaggcgttcgaaaccggggccattaaatttctcatttgcacatcgacgttgatcgaaggagtgaacaccgtcgccgagaatgtcattatctttgacaagcggatcaaaaacacgggcatcgattacttcacatttagaaacattgcggggagagccggtcggatgcgccggtatttcgtcgggagagtttacgttcttgaagagcaaccagagccagacacttgcgtgatcgaggttgccgtcggcactcaatccgaaacgacgccaatgtcactcttgctggacctcgaagatgatgacctaacgccagcctcaaaaactcgcgtggagtccgttacgcgcgagagcccattgtccctggaaaccctcagggcaaaccgcagagttcacatcgagaagcaatatgacatttatgatgcaatatggcgtgacacgtcactgcttggtaggccactggcctggcgaggggtgcctgactcgccgcagttgctggcggtatgcaacctgattgtcgattacttggactccgaaatcctcaaaggttaccagattttctccgggaaacagttgcaagcaaagctttattcggttgagaacagcaagagccttcgcgaagtaatcgacgacttcgttgaacatcgaaggcgtgacgcttcagttagcgatgcggtcgaacttgcattgcgctttctcagaaaatacgtcggatacaccttcccgcagagcctaatggcaatctcgcacatccaaggtgatgtcttgaggaaaatcggcgtcgaacccggaaactacgagttctacgccgccaaggccgaaagccttttcatggagcgcggcctcttcgcgctggacgagtatggcattccccccgagaccgcgatacggtttgctcccgtcgctcgcgagtatcccacgctggatagtgcgattgagctagtcaaacggatggacctccggggggtcgatcttacaaagttcgaacgcgatctgatcgatgaccttcgcgcgtcgctattgtcataa

SEQ ID NO: 58552 - DNA, 846 bp, Methylobacterium extorquens DSM 13060
atgccaatccagtaccccgacccgttcctagagatcaggattgatcatctcgatctcccattgcccctccgggggctctgtgcaggctatgaaggcgggcaatggcgcagttcgcagcttgctgatcatctctttaattggctgccatatgctgcgctcaatcaggaacatcagctttcttttggcccgtctaacttcgtcgaactgatcaaactggctgcggctcacatttatcatacgaaaaagacggcatcccggggggagattggagagttattattccacctcatctgcatcctccactacggaaccgtgccagtcatatgcaagcttttgctgaaaacttcatcgaacgacaccgttaagggctttgacggcatccatttggtgcctatgcaaaatggctttgagctttggctgggagagtccaaattttacttggacggaaaagacgcgattagagaagcggtcgcctctatcaaagaacatatcgcccctgctttcctaaaaacagaaaaggctatggttattggtcatgtcggcgaggacattccacaccgagatgaagtaataaagctattcaagtcccaaacttcctccgacaagctgatagaaaaatctgtttttccagttcttattgcctatgagagcaggactgtggccggatttgataacttatgccaagattatgttgacaaactgactaaagagctcgaagaactgagagcatatttctccgacaaggcttcagatataaaactccgcttccgtctggtctttgtccccatgaacaagaagaaagacgtaattgacagttttgaccagaaactggtgccattcctatga

SEQ ID NO: 58553 - DNA, 2124 bp, Methylobacterium extorquens DSM 13060
atgacttctctcgctacgctccggtctataggctcggatcgtcggttgacggccgacgacatttttgaggctgtttttgcagcgggttcgatcctgaatgaggatgaccgcgaagctagcgaagccctggagatcgcgatccgcctgttggaagctcgccgcaacggtcaaatcccagacgggtgcatggatgccgtcgagtacctagcggaagaatgcggcctgtacccatacgtcaacttgaacaatttcgggcacctcacccaatcggtgattgaggcacacgccatcaaactcgatgagaaagtttatctgcatgccaagcagatgaaggtgctgctttggctgctcgcgggcgacaacgtgatactgagcgccccgaccagcttcggcaaaagtttgctcgtggacgcgttcttggctcagaagcgaccacatgttgtggtgatgatcctgcctaccatagcattgatcgatgaggcacggcgtaggctggcaaagaatttccgagattcataccggatcatcacgacagtaacagaagtatacaatgaggcgcagcctacgattttcatccttactcaagaacgatttttacagcgtgaagacaatgtaagaattagccttctctttgtagatgaattttataagcttgatcctggtcgagacgacggcaggtatgaaacattgaacttggcagtctaccgcgctttgccaaaggcgcgtcaggtctttatggccggaccacatattaggaacatcgatctgggaccaaactggacgggcagcttccggttctcgcaaaccaattaccgaaccgtgacggtcaacgttgttgaccggtccgccaaaaaagagaaattgcagacgttcctggccgacttgcgtggggttggcgagcagaactctctcgttttcaccgccgtacccggcagcgctcagaacctgatgggcgacatcatcgaggcaggcataaactacccatcagagcttggtgcaaaactcggcgattggatcgccgaaaactatcatcgcgactggcagattggccgtggcgctgcgaacggcattgccgttcaccacgggcggttgccccggtcgcttggccagctgttcgtgcgcatgttcgatgacgggcatctgaaacttttgatttgtacttcgactctcatcgagggcgtcaacacgtccgcggctaatgttttcatctacgataagaaaatcaacaaaactgacttcgatttcttttcattcgcgaacatacgcgggcgcgttgggcggatgatgcgtcactttgttggtaacgcatacctctaccatgaaccgccagctgaaatcgaaacacgggttgatgtgccggttctgtctgatcccggcagctcaaccgattttattgtgatgaatgtcgatcgggcagaattatccgccgccggtaaggaacggcaagaccgacttccagcggagagtgggcttccccgagagattttgcaaaagcatggggttcttggcgtcgaacttctgagtgaggtctacagccggatcatagtcgagctgcgccagcgaccaaatgattacctctggactggctttccggatcgagaacagcgcaaggcacttgctagtttggtcctgcacattgcccatacgagacgagataccccaggccttcactccccaggtcagattggctgggcttggtcgcagctaggtgcgatccgaacgttctcaggttacctccgttggttcgcacgccactttggcaaagatggcgacccttcgtcaggcgtcgacacggctttccagtttcttcaagcgtgcgagtttatcttcccacgttccatcgctgcgatcgaagcgttggtagcgcacgcggtgcccgacgcaaaaatcgcctatggaccgttcattgtatcgctagaaaattggtacaggccggtttggatgaaacaaattgatgaggcaggtattccgatccccctggcggagcgcctccgcaaacacattggtgatgtggcggacaaggacgcagcgatcgctgcgatcagagcgctcgacttcgatgcgttgcctgaattcggggaaatcgaccggttcatcatcgaccaggctttgatggcggcttaa

SEQ ID NO: 58554 - DNA, 594 bp, Acetobacter pasteurianus NBRC 101655
atgttgatagaatgggttctgaaagcccctatcgtggcctgcaaaatgtatttgaagacgtctcagcaaatgccagttcatggtgtggacggcatccatttgggctatgaggccgacacgttaatcatgcattggggtgaatcgaaacttcaccaaacgctaccgtcggctcttgacgatatttctagttcgatcacggaatatctcaaagacccctcaaagtatgccaatgaagtcaggattatccgatccaatttgaacttgggcacgttggaggaagaggcgcgtcaggcgattaaaaactatttcaacccctataagcctgaaagtaacaagctgctcgaaagctacgcgtgtttggcgggattcgactcgaagctctatgagagtgtcgctcatctcgatcacgatgagtgcgagacggtcttccaagcagcctatgagaagcggatcgacagtgcatgtaagctgattgctgacaaggtgaaggccgcaggcctcaacaggtttcgtttttcgtattttcttctcccttttccttctgtgaacgaagcccgggccaagtttcaggcacgtctctgggggacaaaatga

SEQ ID NO: 58555 - DNA, 2580 bp, Acetobacter pasteurianus NBRC 101655
atgagcttagtgggagaactggccgccgagatctgggccgaaagcgagttccacgccgacctggcactcttgggggcggctaatatccgtgccgagttgcgcgacggcggcttaatcgaggcttcagagacctttgaggtcgagcgattgagacgtatgatgcaggcggcgttggtcttcgctgaatcaaacgagcatcgttaccaagatgccgctcaacgcatctcgacggccacgttgcgcttagctggtccagcggcgaaagatctcttcgcaatggtccaagcgcgcctacgaaactttccggccctgcgcacgagcgctgatctgcctatcccgccgctgcatgcgccaatgtccttgcagtatgaattcgtcgaacggcgccttaaacagaccattgtcgcgagcgatacatccgagcacgttttgacgccttttcagctcgagagctggaatttgctcgcgggcggcagttccggggcccttagtggcccgacatcagcgggcaagtcatacgttctcttgctttatcttatcgaacggtttcgcgctggcgagctacgaacggcggcctacgtggtgccgacgcgcgcgctgatcaaccaagtatccgatgatgcagcggcagccttggccggccgaggcgtgcgcgacgtcagcattactagcgtgccggtcgacctgtcctcgccggacgcaggcaaggtgctctatgtgcttactcaagagcggctcgatgccttgcttgtcgccaactcaagtcttcgcttggatctgattcttgtggacgaggctcagatgatctcagatggaagccgaggaatccttctcgagtcagtgctggatcgggtcgagaatggcgatgaccagccacagatcgtcttcagcggtcccttaatcaacaatccggactattttggcgatctattcagattcaaagcattcggcaccagtgtctccaagcgctcgccggtaacgcagaacatagtgtttctggactacgcagaagcccccgatccccaagtgtcggtgaaagtactggctgaggttgaaagcgtgccggtagccaccgtcaatctacctatccgccttcacaccgatcttgatcgcctaagttatatgagcgtgctgttcggtcgcgccggctctagtatcgtttacgctggggggaaggcagacgccgaaaagatcgcaatcaaaattggcttcaatcttccagaaaatcaagcacaggcaggcgaactagctgagctaattgggttcgtcaagaagcatgttcacaaggaatatgccttggtagataccttggagaaaggtgtaggtttccactacggccatatgcccagcctcctgcgcaagcagctcgaaaaccagtttcgtgaacggaaaatccactacctagtttgcacgagcacgttgctttatggtcttaacctgcctgctaggaacattttcctcgaaaagccctcgacgggacgcggtcatgccatttcaggtcccgatttttggaacctctctggccgcgcgggtcggatggggcaggaacttgagggcaatgttttcctgattgattacgagaagtgggagtcccagcctctcgcggaggcgcgcggcgtatcggtgagttcggcgttgaaggctgcggtggttgatcaggggagtgagttacttgcgttcttgaacgacccgtcgatctcctcggacaccaatttggccttcgaaattacgcttggaaagctggtgctagaccagcgcctaggaaggcttggccagactcttgatcgatacgcacgtttagcagacgccgagactctcgtcgcgatccataaacgcatcgagcagatctccgccatgacagatatacctacggaggtactcaacagcaacatcggcgtatcgatattccggcaaaatgacctgctaaattatatgataaagcggttgaaaaagctagcgcctgaggaactaattccggcccatccgcttggtgatttcaaagaggtcttggacaaccatcgtcgcgcctttagacgcatccatacatatcttctgaattatgctggcagggacggcagtcataattttttcgcccctctggcacttcgctggatgcggggagaccctttacccatactaatcgatagtgccatccgctatcatcgggataagaagagcggcaagagtgtcgctcggatcatccgtgaaaccatggaaaatgtagaacaagaactgcgttttcggtatgttaaatactttacatgttacaatgcgatcctgcgtgttgcactcgtacgcgtcgataaagctgactacgtcaagaacattccggagatacccctctttctggaggtcggcggatcttccggggtgatgattaacctaatggccctaggattgtcccgaacgtcagctgaatcgctagccgaatacatcactgacaaggaaataagcctgccggatctccgtgtatggcttcaacaacttagagtgaaaactctggacatctcgcctatttgtatgcgcgaaatacaggctattatagatgatagtgttgggcctgatattgctgaggaatag

SEQ ID NO: 58556 - DNA, 966 bp, Acetobacter pasteurianus NBRC 101655
ttgactgaaattagagcattagcgcctctgtctttggaagacttccagcaagcaatcgaggccaaacccgacaccctccagattcacctcgacttggttgaacgtaatgttgagattgctgggtgtaaggtccgcatccactgccattgcctgaaggtggacgccgacggtcgcgtgaacatgacacggctggctgaattcattcgtacagcggtgatcgattattctatcccgcatgatgcccgacaacgcgcaaaagagcgggataacagagaaggtggtttcgcggctgcaattgagctctatcatcgcgcaattggtaccttcaccgatctgaaaacgtctggcgaaggtggcgaactcctcctttacttgcttgccgagcgcttcctcggtttgccgcagattctttgcaagatgtcgctcaagactagtgcacaagtgcattatcatggtgcagacggcgtatatgctgatgtcgatgcggatggcatattgaacctatactggggcgaatcgaagattcactcgaatgctgctaaggcgatccgcgagtgtctaagttcgttgaagccttttcttgacgaggaagagggagaggcagccaagcgcgaacgtgatcttgtgctgctcagtgagcgagctgaccttggtaagcccgaactcaacgcttcactgcgccgattcttcgaccaaacggacccactcgtgacgagaaagcgttatcgcgcggttgctttagttggctttgatagtgactattaccccgccgctggcaaaaagtgtggcacgaatgacatcgttgacgcttcgaaggaagcgctcaaacagtggtcaaaaaatgttgggaaccgacttgttcttgagaaattgactgattgtcagatcgaatttctttgccttcctctccctgacgccgaggccttccgcgcggctgtcctaacatcgttggggttggccaaatga

SEQ ID NO: 58557 - DNA, 2640 bp, Acetobacter pasteurianus NBRC 101655
atgagcgaggaagagcttatcgattggttaatcgccgaaggcgtggccagtgatctaggcacactgtcacagatcaacgcactccaagaacttgaaaacgtagagccggtgaaggccatcggagaggccatgacggccattgactggaaccggcttttactcgcaggcagtatcctagcgcgttcccaaaagcggattccgcgagaggcagcactattgatcgcgacctcggcaatgacgttagccgagcacgggccaacgcgagataccgcggcgctgttgttcgagcaactgtcaaataagttggcagttgtactcgctcaacggaaaaataaggtcgcaataaatctcgacactcgtttgggtgttagtgctcggttggaattaacgcgaaaccgcctcaagaactctgtaatacttgaagccgacggtcgctttctggaggtgaacgctttccagcaatccttctggatcggtgcgcaagacgacggtagttggctatccgcctcagcacctacagcctgtggaaagacgtatctggtgctgttgtggctgctagatcaagtgcgatcaaagcgggctcgtatggtcgtgtatctcgctccgacccgtgcgcttgtgagcgaaatcgagacgaatctcaagagcatgttgacgagcgcaagcattggcacagaccaaatgcaggtcagttcactaccgctgacagaccattatctggctatgcgggatggtggtcctccgctgatcgcagtcttcacgcaggagcgattgcacctgtttgccaatgcgctttccgacaagatggaagtcgactttctgattatcgacgaggctcataaaattgcagacacgaaacgaggcgtgatactgcaggatgcagtcgagcgtgttgtgcgagccagtccgaaggttcgggcggtctttatcagtcccgcgacgcagaacccggagactttactcgaagatgcgccggcacctgtcgaacggcgagttgtcgagagcgatgcgccgacggtgctccagaatgtgctatttgcccggcaggtaaaacgtcaaactactaagtactcgctggcggttcgatgtcgcgacgcgtcagaggacatcggtattctgagcatatcagaccgtccaatgggtctccgaaagaagattgcgttcattgctgaagctctgacgggtcacagatcaggcacccttatctacgccaatggtcccgacgaggcggagaaaattgcttttttgttaaaccaaggttcgtttcaaggggccatcgaccctgagttggcagccctagcggatctttcgcgaaaaggggtacatcctgattacgtgctcgcaccgctcgttgaacgcggtgtcgcatttcactatggcaatatgccgtcgctactgcgctcggaaattgagcggctattcaaatccggaaaaattcgcttcttagtgtgcacatcgactctcatcgaaggggtcaatctttcttgccggatgatcgtgctacgtggacctaaaaagggtagcgggaagcatatgctagcgcacgatttttggaatttagcgggtcgtgccggtagatggggtgacgaatttcaggggaagattgtctgtattgatcctgacgataaagaggcatggccacaaggcgttcccaaacgcgctcgctacgagattaagcgcgaaacggacgcggtgatggagacaccgggagaaattctcagctttttaagtgcgcgcgcaagcatgccgatagaggaagtcggtcgtgcctccaaacttgaacaggtttcgtcctatctaatttcaacatttctgcgagttggctccattgctggtgcagctttcgccaaacgacacgatccggattttgtggctgagttggatgaagtgctggccaagctatgtaaggctaattcattgcctccaacattagtcgcgcggcatccaggcgtaagtgctatcgcaatgcaatctcttcttgagtatttttctcaatattcgggcgaactcgaggacttaattcctgcggccaccgaagacgaggaggcagtggagtccatgatgttcatcatgaagacgatcaacgaccatctctacccagcattcaaacctgatggactgctctatggccatgccgtgaccgttcaacgatggctccgcggctggtcgcttgctcgcatgatcaagacgcgcattaaaaatcttcaaaggagcggtaagacagtcagcatccccaagatctgccgacagacaatggagatagttgagcagaccgcaaggttcgccgctcctaaatacattgcggcctacatggatgttctaaaagtccacttaaaagctatcgggcgtgtcgatctggttcgagaggatttcgacataggactggctctcgagttcggcatctcaagccggacgctgctctcgctgatagagctaggtctatccagaatgagcgctgtcgcattatacgagattattgctatggatgacctcaaccaacgcgcgtgtcgagattggatgcgtgctcatgccgacacactagaaggtgcaggaattccattcattattatacgagagctgcgcgagaaactgctgaacgagacgttggtaatttcgccaccaccagcacaagacgcttag

SEQ ID NO: 58558 - DNA, 552 bp, Gluconobacter oxydans DSM 3504
atgtctttgaagacaaaccgcgaaatgcctgttcatggagcggatggcatccatgcaaaattctgccaagaatctgggaaaatatttttatattggggtgaatcaaaattatattcaaacataactgcagcgatttcttctgccgtagattccatatcagaatcgttagatccagaaaaaatgcagcacgaaattgatttagtacaaagaaatatcgatttctccggtctgaacggatcagctagggaagcattcctaagatatcttgatccatttgatgaatcttataatgatcgcgatgatatcacgacctgcctgattggttttgatttcaaagcttttgctgcaatcacaccggcagatgcgacaaaagcagaagaaaaattcataatattggcgcaaaaagagttaaaagaaatcgcaccaaaattagcacaaaagcttcatgaggccggcttaggcgggcgtccgatcgagatttttttctttcctgttccttctgtacaagaatttcgtgacttatttcaggccaagatcggctggaaaaaataa

SEQ ID NO: 58559 - DNA, 2538 bp, Gluconobacter oxydans DSM 3504
atgcaagagttaattgaaaaagtttgggaaaatcctcttttccataatgcatctcatcgcattcaattggcatggttacgtcaagagcttggcactgatgcagaacttctcgaccttgaagaggccaatcgcctcatgagagcggccgctatccttgcgtgctcaacgaaccaagaacaccgcaaaatcgcttttcgcgtagctacatgcacatatgaaattttcagaacaaagtctcttccgtttgaccaagcattaagagtcgttctagctcggttaggaaattttccatctatcatgacacggaaagatgtcgcatcttctgggaaaaatcttcctcttactttggcgacagaagaagctgcttctgcagaaagccgaagagtaatttttaataagaaaaatatttacctaacagattttcagcatactctatgggttaatttacttaacaaaaaacgcattgctttggcagcccctacttcagcgggaaagtcttttgttcttcaacactatatttcttcaatattctcaaataatacaaataattccgttatatacatcgtcccaacacgagcattaattgcacaggtagcggaagaccttgttgaacaattcagagattttgaggaagagaagcctgaaattataacaatccccattgataacgagaccccactcccaaaaaatgccatctacgtgatgacacaagagcgagtacaacttgccctcattgctcataaaaattttttcgctcatataataatcgttgatgaagcccattcaatttcagaaggcgctagaggagtactgttacaatgggtcattgatgacctacttcacagaaaaaataattctcaaatactttttgcaagtccgaccattagaaatctagacgtttttggaagactatttgatataaaagatgttgtggaattttcatctgtcgagccgactgtagctcaaaattttttaataacaaaaatagactcagcaactaaaggaaaaatttctatacaaactgtcggagatgggagaagcccgctctcacacgtggctgacttgacattgaatcaaaatatttccagtcgaattgacaaattggttcatatttcagcaacattaggacatggtcagtcaaacatcatttacgcgaacggcgcggctgaggccgaaaatattgctattttattaatggatctttttatagatcggccagacaaggagtctcttttggcactctcggaattagccaaagagaccgtacatccgaactacatattggtagaatgcgtaaagaaagggatcgcttttcattactcgaacataccaacccatctaagacgggcagttgaagatgcagtttctaatgggcaaattgattatctcatttgcacaagcacccttttacagggagttaacctacctgcaaaaaatatcttcctttgctctccggaacgaggacgtaggaaggcgatagaatcaacggatttttggaatttggcaggacgtgccggaagactgctgcgcgaattccaaggtaatatttttctaattgattacgataactggaagaaaaaaccattagatggtcctaaagattccataattgtccccgcaattgaaaacacaataaagaaccatgaagatatcctattaagtgtcatcaacgatgattcagtgggaaaaatcactgatactgaaaattttgaaacagtatttgttcgtctattttcggaccatatgaggggaaatttagatagaacattaactcgtctaggtatcactgaagacactatcgagtttaaaactatttttgatgcattaacattagcagaacaaaaaattactatacctccgtctattgtgagaaaaaacccaggcatctctgttcataaacaacaaagactacttgatatattaaacaattatatttctcatagctctgcctctgctaagattctcattcctaagcatccgcgcgaaagcgacgcatataaatcttatgaagctattttagagatatgttatcaatctctacttgatcacgatacatcgaaaataaaaatttatcggttccatgctcttattgcacgtaaatggatgcttgggacatcattatctcaaataattgatgaccaaatcaaacggtcaccacaaaaaattatccggacaactattcgagatactcttaaactgatcgaaaatgatattcggtttcaggcagttcgtcttttcggctgctataatacccttttaacttatgccctagataaggcaggattaatagacttggcatcaagcatcccgtccttgcctctatatttggagattggtgcatctgataaaactatgataagtttcatttctcttggcctatctcgcgttacagctatgaaattaaatgctttatcagcgcggaaggaccttgacgtcagtggtgcattacactggctacgaacgcgacctttagaatcttttggcctatccccgcttctactttcagaagtaagggcaatactattacttgcgcattaa

SEQ ID NO: 58560 - DNA, 945 bp, Acinetobacter baumannii Naval-72
atggatgatttaaaaacaatagactggttatctctaagaagtgctgagcatgagtgggttaatgaacatctaagagcacatccaatcattgaaaaagataagtttattactagattgcattccattgatttttcaggaacgcagcaagatttaactgcattagtagaagcagtggctgattcaattgaaaaatatgtttatgattcaaaacaaagagaaagattcgagaaaagaggtgtaaatgcttttaggaaagcagtttcattttttggggaaacgaatcctgatatggatggaaaatatggagagttactattatatatattggctgaagcaatacttggtatacccttagtttctcataaaataactttattaactaatgtaaatgatcaggttaagggaggagatggaattttttttggtaattatagaaatgaaatttctatcttaattggtgaatcaaaaattcatcaatctttttcgaatgctttagacagttcactttcctctttagatcgttttcatcaaaattactcaaccagtgctttagatcatgagttatttatagctcgatcaaatatttcacaaaactttaatctagaacagatggaaaagctatttgatgcctttacaccaggaagtcgtgaatataaagcatgcaataaggctcatcccgttctattagtatttgaaactaatgaaatatcaaatattgaaaaaagagcgaaaaatagagaagatgcatgttctttattttcagcatgggcacaaaaaagaattgaaagtgctgttaaattactagaggaaaaactaaataattactcagaattagaaaaaatttacttagatttctttttaataccacttaacaatgtatcgcattttaagcattctttatataaagctatacatggtgtggaatataattcacaggggaaatag

SEQ ID NO: 58561 - DNA, 2580 bp, Acinetobacter baumannii Naval-72
atggatacaacttatagcgatgcaatttcccaccctatatttattgaagtatttgataaacttttgataaatctatttttactgaatagacaacaggaggaagctcctgagatatctatcaataatataaaaaaagctacttggcttgcatcaattgctgcattaggtgagggagataaggaaaaaaatttagcttgttcatttggagcactattacatctatttgatacaggaaatgaggtttatacaaaggcatgttatattcttcaatcaagaacgggtaatattatatcaagttcacatctaccaaaaattttcaaaaataaaaaatatgatgaagattttggttcactattaaatatcgaattagctggaaatagggcagcattagaatataagttctcggatgatacagaggtttacttcactaaatttcaagctaagctatgggattcattagtaaatggtaataatatagctatttctgcacctacttctgctggcaaatcttttgttataaagaaatatatttcagaattaattacaaataaacaaaaagatataatttatgtagttccaacaaaagccttaattaatcaggtaagtaatgaattacattatcttttaaagagtaaagctaatgtttatacaacgtatcgagaaactgtaaaagataaatcttcaatatttgttcttaccccagagcgtactttgaagctattccaagataaaaatttcaaagatccagctttggtttttatagatgaagtacacaatattgaggatacttctagaggagctgtatttgaaaattctatttataaaatggttaataaatggtcggaaagtcaatttgtagtagcagggccatatatagataaactatcgcagtctattagtgatattgctaatatagaattagttaatcaccaaaccttttcttcaccagtatttcaattaaaagtatccttaaccttgcaacctaattgtaagaccgcaaattataaaattgctagtcctacagggaatattttaaagggtgaattagatttaaaacgttctctttattccaaagttaaatctaataagggagatgctatcgctgcgattatggagttatttgatccaagcgatcttaatataatttatgcccctagaagaaaagatgctgaaacttgggcacaaaagattgcaccagttgttggttctgctaatcctgatattgttaatggagctgatcaaaagataaaggatttgatagagtttttagccgaagaagttcaccctaaatattctttaatccgaacccttcgactaggtgtcgcatatcatcatgctggattgccagatatagcacgcttggaaatagaagagctttattcagaatcattaattaaaaatatagtctgcacatcaacccttgttcaaggcgttaacttgcctgctgatagattgattattattaatcctaaagtagataaggaagaaatgagtgattttgaattttttaatttaattggtcgagctggtcgtgttaacactaaactttatggcgaagtatattgcattgatattctagatgaacaatggggagagagtcgtttaactacagataaaactaaatctgtatcatctgcgacaattacatcaattaataataatagggataatttacctaatgttataagtttatctcgtgaagaaattgaagagtttgataaaaacggattatattctttagtctcatatttaagatcattgtataaggttgatgagaatcattttaagaaaatgattaactcatcggaattaagtagagaatcaaaagaagatataagttcacagttggaggagctatctcttaatttaaaaattccagatgagattattgcaaaaaatccatttatagaccctgttttacaaaatattttttatgaggatatacttaggaacggtgtagaatcatggctaattacaagaaaacctatagatactagtggattgcgttctaaagaagctcattttagtgaacaaagttattattatcagttctggtctgttttagctagactaaatgaaattttcaacttcgaaagtgaaataaataatagttatgatgattatattggtataggacttcttgtaaaagattgccatagctggatgcttggaaaaagccatcgtttctttattgaaaataaattgtcagaagttcacccagaagagagtaaagttgataaagctgctagatatgttactaagcatattagtaagaatattacatttataacagttaaatatttaatgttgtggtcagaagtggtttcaagttttcttactgaagagcaaaaagagttgaattcttacattttgaatttaccatctatgcttgaaatggggagctacgatcctgctgttttagaattaatgagtgtaggaattaaccgttcaattgctttaagaattaaaccattaataaggaaaaatgaaggtaattctatagaggaggttttaggtactcttgatagaaagaatatgtcgcctctatttaatagatatcttcaaagagcaggtttttaa

SEQ ID NO: 58562 - DNA, 945 bp, Acinetobacter baumannii 532279; identical to SEQ ID NO: 58560

SEQ ID NO: 58563 - DNA, 2580 bp, Acinetobacter baumannii 532279; identical to SEQ ID NO: 58561

SEQ ID NO: 58564 - DNA, 1449 bp, Acinetobacter baumannii 263903-1
atgagtgttattagtcttgatcattttaaattgaattctatatacgttatagaagctataaccgaatctggattaataaaaagaggaacatgcttttcaatttcaaaaaaaatattgttaactgctaatcatgttatagatataaatccaaaatatattagaatttatttatcaagtgatgattactcaaaaggtaattacatagagtctaaatgtatatattgtaataaagaactagatatagctataattgaaatattagattttgaattaaatcatcatataaatttatattctactaatgtaggtatagataatgaagtactttcatgtggttatcctgcagaaaaagatatattttatgagccaattaaggtaaaaatttccaatgatttaacaaatgtcacaacttctaattatagctttgaagttactcaagcaacaactgtaactaactatagtggtatgtcgggttcaccagtaatttataataatgactgtataggtattttagtgtaccagcaaggtaaaaatactttatatggaatttctattaaagatgtattaaaagatattaatattctaaatattataaatgaaaattttattaagtataaaattcaaaatggtattgattataatccaccaaagcatcctttatcaccatttaaatattgtgtaaattgtaatgcttcagatcctaatattaaggggattgatattgggtttgagtttggcgaatggaaaattaataattttagtgaaacagtctatgattggatcattgattacgctttgactctaaaagaacaaaagaactttaatggaagtgataggcagctatttaagtttgcaaaagataactttttattaaataacctggatgctttaggggatctttgtttacatattgcaataagagaaacatataaaactatcccagtaatgaataagttattcgatataaataacaaaacattttcatgtacacatgctgttttaaattttgatagtttagaattatggataggagcttcatcagttaatagaacacttgaagaagttattgaatctatagttaaaaatatcgaatatattgtagatattcgctcattaaaaaaccgtttatttgctttaactaatcaaattgatgattcttggccccataaagaaaaattagaaaggttatccgatgctaatttatcaattgatgaaagatttgataaaataataatacctatatttctgatgcatgatagtgatttaattaataattttgacaaagaaaattttataaaactttttgaagatcatgttttggaatgtcgtaatcttttgaaaagtaatataaacgatggattggtaaaacttgttgatctccgtgttttttgttttcccgtatctgatattcaaaaaattaatgatgaattgtataaggaattatcttga

SEQ ID NO: 58565 - DNA, 2166 bp, Acinetobacter baumannii 263903-1
atgtcagactggtataaagaagcaagagataaattagaaaaccctcatttttcagattgggataattttcttatttctcttataaatgaatttaatactcataaaaataaatctttaattcaagatatagtgataagaactcttgaaagaagaggagagattgaaagagattttattttagatcatttattaggtgagttaggactttttccttatttgaaaaataaggaattaacatcaaaagatactttcagaacgagtttttttactacgccgcaagataaagataaagtttttcatataagacaagctgaagtattttatagaataatgaatggcgagaatattattctcagtgctcctactagttttggaaaaagtttgattattgaagcattggtttcaagccatatgtttaataatcttgttattgttgtacctacaattgcactaatagatgaattaaaaaagaaattatataaatatagcgattactataaaattgttactcaagcaaaccaaacttcatctaaaaaaaatatatttatttttactcaagagagagtacttgaatctaagtcaatttcatcagtagatttttttattatcgatgaattttataaacttgctcctacctcaactaatgatgaaagatgtgatagtttgaacttagcttttaaatctctttataataaatgtaaacggttttatatgctgggacctagaattaatggtctatttgaaggcatagaagatgaattaagatgttcttttcttaaattcgatcactttgcaacagtagcgacaaatgaaatttattttgatataaatactaatggaagagatgctgatattgatatagaaagagataagtttttaatacctttattaaaatcaaaaggtcgtgatgagcaaacagtaatttactgtaaatcaccaaagagagctagtgctttattatctcgaatcttaaacaaaaatatcttagaaataaatgataataataatgaatttgcggattggttatcttatacatatcatcctcaatggtccttggttgaaggtctaaaacatggtatcgcttaccatcatgctcaaattccacgagcagttggctctacaattgtagatttatttaatgaatcaaaaattaatattcttatttgtacttcaactttaattgagggtgtaaataccaatgcgaaaaatattgtaatttatgatgattgtattacaagaaaaactaaattagatatgtttacttttaataatattgctggacgttctggaagaatgtttgagcattatgttggtaatgtttatatatttggaaggaaaccccaagctgaattaccatatattgatgttcctatcgttacacaaagtgaaaatatttccgattcattattattacatctaggcgatgaagttaatagttcgaataaagaaagagttaaaaaattttatgaacaggaagttttacctttatcaattttattgaaacatcaaggtattgatcctaataaaatgattaattttgctgaagatttggtttctaatttaactgattggaatccatatatgtgttgggatggtatctatcctaataaaaaagaattaaaacatatttcttttattttatttaattattttaatatttcatctatggccggtggatctgtaagaactgaagctcaattaaataaaaaaataattgatattattgataagaaagaagacagtactctaatcatcaatgattataattttagaagatcacgtgaacatgattatactatagatgatgcagttcaatctgtttttaattttaagaagaatctggttaactataatcttcctaaaatattatatgcaattagtgatattcaagaatatatttttaataagtatggtttaaaatatggtaattataagatttttgcttcaaatttagaaaatttcttttttccatcagcatttaatgcattagaagagtttggtataccgaaccaagtttctaagaaaatatttgatgaaataaatcttgaagatttagaaaatattgattctattttagattttttccgtggtaaaaatagtaatagatattcattcctttctgactttgaaaatgattttcttcaaagagttattggttatttataa

SEQ ID NO: 58566 - DNA, 945 bp, Acinetobacter baumannii; identical to SEQ ID NO: 58560

SEQ ID NO: 58567 - DNA, 2580 bp, Acinetobacter baumannii; identical to SEQ ID NO: 58561

SEQ ID NO: 58568 - DNA, 945 bp, Acinetobacter baumannii; identical to SEQ ID NO: 58560

SEQ ID NO: 58569 - DNA, 2580 bp, Acinetobacter baumannii; identical to SEQ ID NO: 58561

SEQ ID NO: 58570 - DNA, 1452 bp, Acinetobacter baumannii
atgattgctgaattatcaatagattataaaattgaatcggtatatctaattgaaacaatattaattgatggttcagtagaaagagggacctgtttctcaatttctaataatattttagttaccgctaatcatattattttaaatcccaaagaaattaaaatttttttatcaagtgatgattattataataataaatatattcagggcgtttatttatacggtaacgattctcttgatatcgcttttatacaactcattgatcatgaattaacacattctattgaattatacgcaacgagtgtaaatatagataaccaagtttttgcttgtggctaccctgctgaaaaagaacattatttctcccctattaaagttgcaattacaaataattttgatcacatgatttctaaagaatatagtttcgaagtctcacaatctataacaatttctaattataaaggaatgtcaggtgcaccaattttatatgaaggtacatgtataggtgtactagtagtccaacaaggtaataacactctttatgctatatcagtcaaagatttaataaaaaatgatcacataaaaaatataataacagaaaataatattaatataaaaattcaagaaggtattaattataaatctccagaacatccaatatctcctttcaaatattgcattaattgcaatattgatcacccaggaataaaaggaattgaaattggatttacttttaaaaattggaatataaataattttacagaatctgcttatgattggataatcgattactgtttatcatttaaagaacaagctaattttttaggtaaaaataaacgcagtttatttaaatttgctagaatgaaatatcctaaagatgatctagatgccttaggtgacttatgcctccatatcgcgattagagaatcctataaaacaattcccatcatgagcaaagtttttgatattaacaataagactttttcatgcacacatgtagttttaaattttgatagtattgagctttggatgggcgcctcttcagttaatacaaatattgaagatgcgattaaatctgccgttgccaatatagaatatattatggatattacgtctctaaagaatagattatttactctaacaaatgaaatcgatgaatcatggccccatcaagataaattaaaaagactagctaatcccagtttagatttagaagatcgttttgataaaattattattcctgtttttctaatgcatgatagtgatctaataaaaaattatgataaaaattcatttttaaatttatttaatcaacatatccaagagtgtaggtcttatcttaaaaatcatattaatagcgaaattataagtttactagatttacgtgttttttgttttcctgttttgaatagtatgactctgaatgaggctttattagcggagttaaattcatga

SEQ ID NO: 58571 - DNA, 2166 bp, Acinetobacter baumannii
atgaataattggtataatacttctctaagaaatttgaataatcaagagtttaataactgggatcaatttctagtatccttaattgaggagtttaatagtcatcaaaataattttttagttcaagatattgttattagagcactagaaagacggcaagagattcaaaataattttattttggatcatctattaggtgaacttggtttatttccgtatataaattatacaaattgttcttcaaaagataagctaaggaaggaaatttttactacacctcaagatgattctaaagtcttccatatccgacaagccgaagtttttcatcgtattatgagcggtgaaaatgttatccttagtgcacctacaagttttggtaaaagcttaattattgaagctattgtatcaagcttagaatttaataatattgtaattgttgtaccgacaattgccttaatggatgaattaaaaagaaaattatcaaaatataatgaatactataaaataattacccaaattaatcagcaatcaagtaataataatatttatatatttacccaagaaagagtactcgaatacaaagatttatttcctatagattttttcattattgatgagttttataagttagctcctacatctgagaatgatgaaagatgtgatagattaaatcttgcttttaagaaactttactctaaatgtaaaagattttatatgttaggtcctaaaataaatgggctggtatctggtataacagatgagttaagatgtacctttttaaaatttgattcttatataactgttgctacaaatgaatattactattctattccgacaaaagggaaagattcagaattagatttagtaagagataaaaacctcttctcaatattaaaatccataggtagaaatgaacaaactgtaatctattgtaaatcccctaaacgtgttagttcattacttttgagaattttaaattcaggtcttttaaaaaaagatgatattaacaatgatctcgctgaatggttagccagtaactttcataaagactggtcgcttgttaagggggttcaatatggtatagcttaccaccatgcacagctaccaagagcggttgcctctttaattgtcgatctttttaatagctctaaaattaatattcttatttgtacttcaactcttattgaaggcgtaaatactaatgcaaaaaatattgttatttatgatgactgcataactaaaagaacaaaattagatatgtttactttcaataatattgccggccgttcgggaagaatgtttgagcattttatcggtaatgtttatattttcggaagtaaaccacaggtggaattaccttacattgatgtacctgtagttactcaaagtgacaatgcttctgatgccctattattacatttaggagatgaagtaaccgaagataataaaaatcgaattaaaaaattttatgatcaaaagatattaccaatttcaattttaattaaacatcaaggagttaatccaaatactttaattgaattagcggaagccatcattaaaaatatcaaaaattggaataatttaatgtgctgggatggaatttatccaaacaagtatcaattacagcatcttagttatcttttatttcgtttttttaatattacatctatggctagcggttctgtacgtacagaacgtcaactttatagaaaactaattgatattattaaaaaagtggatgataaagaactaattaaacaagagtacaattattggaaaaaaaaggattctacctatactattgatgatgctattcaatctgttttcagtataaagaaaaacttgataagttacaatttaccaagactaatttatgctattaatgatattcaagaatttatctttaatctttataatttaaatcatggtgattataaagcttttgcagtctcacttgaaaacttctacttaccttcagcaattaactctttagaggaatttgggatacctcatcaaatttctagaaaaatattcgagcatcatttctttgatgatccagacaatatagacttagtattaaatcacttagataaagttaataatattacttattcatatctatcaccttttgaatatacttttgtacataaagctctttcgtatacttaa

SEQ ID NO: 58572 - DNA, 951 bp, Bordetella bronchiseptica 253
ttgtcgaccatcactgccactgatctcgaatctgccctaacgggaaatccagaagcactagaagttcatcttacgctagtggagcgagacgtccccattgagggacattcagtcaagattcactgtcactgtctttcggtggatgggaatggtcgtgttcaaccgcatcgactggcggagttcatgcggaacgccgtcgttgactatgcgatcccgcgctcgaaactcgccgatgcgaaggcgcgcgatcataggttcaatagcaccgaggcagtcgccgaactcgtcgagcgggccaaacgctcatttaccgatttagcgaacaccggcgagggtggcgagatgttgctgttcctactggcggagcgcttcctcaagttgccacaaattctttgcaagatggatctcaagacggacacgcgaatgcactatcacggcgcggatggagtgtatgccggggtgaccccagaaggagtattaaagctctactggggtgaatcaaaaatctacggtgatgcgagcgctgcgattcgtgcctgccttaattccctcgcccccttcctgatcgaactcgaacacgaggaggcagagcgggagcgcgacctgatgctcctgagcgacaaggccgaccttagtaacccagctctcaccgatgcgctcaagaactattttgacaagtcgtcggtcatgtcgaagcgggtccaatattgcggcgtggcccttgtaggcttcgacgcaccattctacccagaagccgatgcgaaggctgttgctgaggagatagtcaaggcatcccgcacggaacttactggttggagcaatagcattggggaacggctcaaattggagaatcttgaccagatggaaatcgagatgttctgtatccctctgccttcagccgaaggtttccgcgccgcattcctcaaggcgatggggttcaaggaacaatga

SEQ ID NO: 58573 - DNA, 2601 bp, Bordetella bronchiseptica 253
atgagcctcgctgacctccaatcctggcttctccaagaaggcgtccgagacgatctcgatgcaattacccgactcacagtacgcaacgaactagataatctggcgccagacccttcggcaccgtccgccacggcgattgattggcccagattgttgctcgctggcagcattctggcgcgatccgatcaaaggcgcgatcaagaagccgcgctccggatcgcaaccgctgcaatttctctgacggacggtcaagcactcaaagacgcaggtgccgtcctcttgggtaagctctccaacttccgggccatcgcgttagccacgaatcggggcctgctgacagctgaccttgacgggcggctgggcgtcgcgttgcgtctcgaagctcagcgccgcgagatggaccgttccatcttggtgcaatcgagtggtgcttggctacaagtaaatgattttcagcaacgcttctggagtaatgcgggaggggaacgctggctctcggcatccgcgcctaccgcctctggcaagacgtttctcgtgcttcagtggctgatcgaccaagtgattgcgcgtgaggcgcgggtggccgtctacctcgcgcccacccgcgcgctggtctccgagatagagaccagtctcaagagactcctaggtaataccgaggaaattgaggtgtcgtctcttccccttcccgataagtatagagctgctcgcgctggcggcgcgcgagtgattctcgtattcacacaggaacggttgcactttctcgccaacgtcctcagtgacgtgctttcgatcgatctgctcatcgtggacgaagcgcacaagatcggtgacaaccagcgcggcgtgattttgcaggatgcaatagagcgggccacccgtgctaacccaaagttgaaggctgtatttatcagtccggcgacccagaacccagaagagttactcacggatgcccccgatggtgtacagaccgtcgccgtcgatagcgacttctccaccgtccttcagaacctcatggtcgcgacccaggtaccgcgaaaatcgaagctctggacgcttactcttcgacaggagggagcaacacttccggtcgggactcttcagctcgcgagcacgccggatggactcaagaagcgccttgcgttcatcgccgcggctgtcggtgagaggggtggtacgctcgtctacacgaatggcgccggagaagcggaagaggtcgccgatctgatcagtcagctcctccccaagcttagacccgtcgattcggagctcttagaactcgctgaacttgctcggaagggcgtgcaccaggactttcggcttgcaccgttagttgagcgaggggtggcgtttcactacggcaacatgccatcgctgctccggctagagatagaacggttgttccgttcaggaaaaattcgcttccttgtatgtacttcaactctgatcgagggcgtgaacctgtcgtgtcgcacaatagttgtgcgtggaccgcgaaaagggaaaggccatccgatggagccgcacgacttctggaacctggctggccgcgcaggcagatggggagatgagttccaaggaaacatcatctgtatcgatccggaggatacgcaggcttggcccagtggtgtgcccagccgcgcgcgctaccccattaagcgcgaaagcgacgctgttctcgaccttggcgacggtatggcggactatctatccgagcgtggattatcggatatttccagcattgaggacacggataaattcgaacaggttggcgcctatctgctcaccacgttcatgcggcttggctctatatcagcagctagcctctcgaagcggcatgacgctgcgtcgattgcgaagctcgatcaggctctcggtgccttggcagcgcagatcgaaatcgacgttgatctggcggctcggcatccaggggttagcgcggttggccttcagcgccttcttgaagctttccgttcgtatggcggtgatgtcgaaaacctgctcctggccgaggtggcgagcaatgacagttacgaccggttcataacgattatgggaaggattaacaagcacatgtttctagccttcgcccccgaaagccgtattaggctatatgcgttgatcgtcttcaaatggttaaaggggtattcgttggctaagatcatccgagatagcatcgaatggcaccaaaacaccgcgagatctttcaagctcccggacttgatccgcggcacgatggaattggtggaacagatcgcccgcttcagggcgccaaagtacctttcagcctatatggatgtgctgcacctgcatctgcgtgagattggccgtgaagatttaatcgacgacggtttggatatcggaacgcagcttgagttcggcgtttcgtcgacgacacttctctcgctcatggagcttggcctttcccgcatgagcgctgttgttttgtacgaaaaaattgcccgcgacgacctcaacagagaggaatgcgtggcgtggattgccgagcgtgtgggtcaactccaaacaatggatgtcccagccatcatcatccgcgaggtgcgcgaacgtctcacgctgcctggcgacatagcctcgtaa

SEQ ID NO: 58574 - DNA, 1023 bp, Bordetella bronchiseptica 00-P-2796
atggaggtttattcggttacattttctttcgttgtccgtctgtgggagacgggtagacgatatggaggccgtttgtcgaccatcactgccactgatctcgaatctgccctaacgggaaatccagaagcactagaagttcatcttacgctagtggagcgagacgtccccattgagggacattcagtcaagattcactgtcactgtctttcggtggatgggaatggtcgtgttcaaccgcatcgactggcggagttcatgcggaacgccgtcgttgactatgcgatcccgcgctcgaaactcgccgatgcgaaggcgcgcgatcataggttcaatagcaccgaggcagtcgccgaactcgtcgagcgggccaaacgctcatttaccgatttagcgaacaccggcgagggtggcgagatgttgctgttcctactggcggagcgcttcctcaagttgccacaaattctttgcaagatggatctcaagacggacacgcgaatgcactatcacggcgcggatggagtgtatgccggggtgaccccagaaggagtattaaagctctactggggtgaatcaaaaatctacggtgatgcgagcgctgcgattcgtgcctgccttaattccctcgcccccttcctgatcgaactcgaacacgaggaggcagagcgggagcgcgacctgatgctcctgagcgacaaggccgaccttagtaacccagctctcaccgatgcgctcaagaactattttgacaagtcgtcggtcatgtcgaagcgggtccaatattgcggcgtggcccttgtaggcttcgacgcaccattctacccagaagccgatgcgaaggctgttgctgaggagatagtcaaggcatcccgcacggaacttactggttggagcaatagcattggggaacggctcaaattggagaatcttgaccagatggaaatcgagatgttctgtatccctctgccttcagccgaaggtttccgcgccgcattcctcaaggcgatggggttcaaggaacaatga

SEQ ID NO: 58575 - DNA, 2601 bp, Bordetella bronchiseptica 00-P-2796; identical to SEQ ID NO: 58573

SEQ ID NO: 58576 - DNA, 1023 bp, Bordetella bronchiseptica MBORD839; identical to SEQ ID NO: 58574

SEQ ID NO: 58577 - DNA, 2601 bp, Bordetella bronchiseptica MBORD839; identical to SEQ ID NO: 58573

SEQ ID NO: 58578 - DNA, 609 bp, Bordetella bronchiseptica E012
atgttgctgttcctactggcggagcgcttcctcaagttgccacaaattctttgcaagatggatctcaagacggacacgcgaatgcactatcacggcgcggatggagtgtatgccggggtgaccccagaaggagtattaaagctctactggggtgaatcaaaaatctacggtgatgcgagcgctgcgattcgtgcctgccttaattccctcgcccccttcctgatcgaactcgaacacgaggaggcagagcgggagcgcgacctgatgctcctgagcgacaaggccgaccttagtaacccagctctcaccgatgcgctcaagaactattttgacaagtcgtcggtcatgtcgaagcgggtccaatattgcggcgtggcccttgtaggcttcgacgcaccattctacccagaagccgatgcgaaggctgttgctgaggagatagtcaaggcatcccgcacggaacttactggttggagcaatagcattggggaacggctcaaattggagaatcttgaccagatggaaatcgagatgttctgtatccctctgccttcagccgaaggtttccgcgccgcattcctcaaggcgatggggttcaaggaacaatga

SEQ ID NO: 58579 - DNA, 2601 bp, Bordetella bronchiseptica E012; identical to SEQ ID NO: 58573

SEQ ID NO: 58580 - DNA, 609 bp, Bordetella bronchiseptica E013; identical to SEQ ID NO: 58578

SEQ ID NO: 58581 - DNA, 2601 bp, Bordetella bronchiseptica E013; identical to SEQ ID NO: 58573

SEQ ID NO: 58582 - DNA, 1023 bp, Bordetella bronchiseptica SO10328; identical to SEQ ID NO: 58574

SEQ ID NO: 58583 - DNA, 2601 bp, Bordetella bronchiseptica SO10328; identical to SEQ ID NO: 58573

SEQ ID NO: 58584 - DNA, 609 bp, Bordetella bronchiseptica D993; identical to SEQ ID NO: 58578

SEQ ID NO: 58585 - DNA, 2601 bp, Bordetella bronchiseptica D993; identical to SEQ ID NO: 58573

SEQ ID NO: 58586 - DNA, 609 bp, Bordetella bronchiseptica E010; identical to SEQ ID NO: 58578

SEQ ID NO: 58587 - DNA, 2601 bp, Bordetella bronchiseptica E010; identical to SEQ ID NO: 58573

SEQ ID NO: 58588 - DNA, 1023 bp, Bordetella bronchiseptica MBORD624; identical to SEQ ID NO: 58574

SEQ ID NO: 58589 - DNA, 2601 bp, Bordetella bronchiseptica MBORD624
atgagcctcgctgacctccaatcctggcttctccaagaaggcgtccgagacgatctcgatgcaattacccgactcacagtacgcaacgaactagataatctggcgccagacccttcggcaccgtccgccacggcgattgattggcccagattgttgctcgctggcagcattctggcgcgatccgatcaaaggcgcgatcaagaagccgcgctccggatcgcaaccgctgcaatttctctgacggacggtcaagcactcaaagacgcaggtgccgtcctcttgggtaagctctccaacttccgggccatcgcgttagccacgaatcggggcctgctgacagctgaccttgacgggcggctgggcgtcgcgttgcgtctcgaagctcagcgccgcgagatggaccgttccatcttggtgcaatcgagtggtgcttggctacaagtaaatgattttcagcaacgcttctggagtaatgcgggaggggaacgctggctctcggcatccgcgcctaccgcctctggcaagacgtttctcgtgcttcagtggctgatcgaccaagtgattgcgcgtgaggcgcgggtggccgtctacctcgcgcccacccgcgcgctggtctccgagatagagaccagtctcaagagactcctaggtaataccgaggaaattgaggtgtcgtctcttccccttcccgataagtatagagctgctcgcgctggcggcgcgcgagtgattctcgtattcacacaggaacggttgcactttctcgccaacgtcctcagtgacgtgctttcgatcgatctgctcatcgtggacgaagcgcacaagatcggtgacaaccagcgcggcgtgattttgcaggatgcaatagagcgggccacccgtgctaacccaaagttgaaggctgtatttatcagtccggcgacccagaacccagaagagttactcacggatgcccccgatggtgtacagaccgtcgccgtcgatagcgacttctccaccgtccttcagaacctcatggtcgcgacccaggtaccgcgaaaatcgaaactctggacgcttactcttcgacaggagggagcaacacttccggtcgggactcttcagctcgcgagcacgccggatggactcaagaagcgccttgcgttcatcgccgcggctgtcggtgagaggggtggtacgctcgtctacacgaatggcgccggagaagcggaagaggtcgccgatctgatcagtcagctcctccccaagcttagacccgtcgattcggagctcttagaactcgctgaacttgctcggaagggcgtgcaccaggactttcggcttgcaccgttagttgagcgaggggtggcgtttcactacggcaacatgccatcgctgctccggctagagatagaacggttgttccgttcaggaaaaattcgcttccttgtatgtacttcaactctgatcgagggcgtgaacctgtcgtgtcgcacaatagttgtgcgtggaccgcgaaaagggaaaggccatccgatggagccgcacgacttctggaacctggctggccgcgcaggcagatggggagatgagttccaaggaaacatcatctgtatcgatccggaggatacgcaggcttggcccagtggtgtgcccagccgcgcgcgctaccccattaagcgcgaaagcgacgctgttctcgaccttggcgacggtatggcggactatctatccgagcgtggattatcggatatttccagcattgaggacacggataaattcgaacaggttggcgcctatctgctcaccacgttcatgcggcttggctctatatcagcagctagcctctcgaagcggcatgacgctgcgtcgattgcgaagctcgatcaggctctcggtgccttggcagcgcagatcgaaatcgacgttgatctggcggctcggcatccaggggttagcgcggttggccttcagcgccttcttgaagctttccgttcgtatggcggtgatgtcgaaaacctgctcctggccgaggtggcgagcaatgacagttacgaccggttcataacgattatgggaaggattaacaagcacatgtttctagccttcgcccccgaaagccgtattaggctatatgcgttgatcgtcttcaaatggttaaaggggtattcgttggctaagatcatccgagatagcatcgaatggcaccaaaacaccgcgagatctttcaagctcccggacttgatccgcggcacgatggaattggtggaacagatcgcccgcttcagggcgccaaagtacctttcagcctatatggatgtgctgcacctgcatctgcgtgagattggccgtgaagatttaatcgacgacggtttggatatcggaacgcagcttgagttcggcgtttcgtcgacgacacttctctcgctcatggagcttggcctttcccgcatgagcgctgttgttttgtacgaaaaaattgcccgcgacgacctcaacagagaggaatgcgtggcgtggattgccgagcgtgtgggtcaactccaaacaatggatgtcccagccatcatcatccgcgaggtgcgcgaacgtctcacgctgcctggcgacatagcctcgtaa

SEQ ID NO: 58590 - DNA, 1632 bp, Bordetella bronchiseptica MO275
atggtacgtattactagcccatccaatgcaggagggcctgcggcaaggcaaggcttcaagtaccaagaccacgtcgccgtcagcttcattttcaagatgctccgcgatagcaactactcccaggtggagtgcgagacagcggacgatatcgtcgctgtattccactgttcgggcgagctcgtcaacgagtacatccaggtcaaaacgactgaaggtgacagcaaatggaatttgcaggaggttatcgcgctcgacggtatcaaggccgattcttctttgctgcataaatcactgaaatgcgacgtgcgcccaggccttgcacgtttccgaatcgtaaccaagcgcgacgtcgcgaaaattcttgaaggctttaaaacagagctggataagcgggttttgcctgacaccaccacaacccgaggcaaggcactggtaaaggcgtttaaaacgttcacctccccgcaaaatcgtgatttcgcctactgggcaaaaaacagtgtctggcaggtatacggtgatgtcgagtcgctggaagcggtcaatatcaaagtgctgtcccagctcgcagaagggcttggaaaccggcccaacttcacccagctgcaggcgatttatgacgaattcctagagatggccgacagggctgccacggccaacgtgaagacagctgccgcgtcaaagatcatcctccgcgatccggcgctagcacacctgaagaagctattggacgaggctgatgacaagtcaacggccaccttcaaaccctacaaaaaacgcccagatccattcttggtcgagtttcatgcaagcaccgaagaggaaccgctacattcattttctggctttgatgtgaagtattcgctgaaaaaatggcggcacgagaacttcgcaaagcacctcatcgagtggctgcccgagttttcactgaaagctagcgagatcgtcaatatccttgcgcataacgccgaagcgattctcgcccgatcaattagtaccttcagcgacagtgacctaccgcgcgacaggctcatcgcggaactgattcttcacgccatcctgcgcagccgccaaaacagcgagcccgttgcgtgcaaagtattctacaaatccgccggcaaactttcggagtttggcaacgcccatatcgttcaaattcctggccaggacgatcagttatggctaggcctttctcgcctgatcgaagcaagcgctatggatgcaacgctggagcagatctgcgaagtccttgacgagacgatatcggaaacggtgctgtcggcagaacgcgaaatcatcatttctctgcgcgaaccattgcaccaccagccaaaagcggatgccttcaaccaagccctacaccgcaattcaccagttgatgacatgctgaatgtactttgcttccccattctgttgacctatgacagtgacgcgctttcgtcaggctggctcgctgattacataaacaacctcaagaccgagatcgagaatcatttcaataatttcatcacgcagctaccggagaaaatcaaacaggtgaaggtgatggtctttctggtgccaatggaaagtattgaactgctgactaaggctttcaatgctcgctgcgaaaagctgcaagagttgcaggcatga

SEQ ID NO: 58591 - DNA, 2142 bp, Bordetella bronchiseptica MO275
atgaactacgaaaccaccaagaacgagctggcgaaacttgctgaggagggtacatcgacgattgatgtgctgcaggccatcagcaccatcgtcaacagaagcaattcagagtgggaaggccgcgacctggtgatcagagcactcgataagttcaagctattcgatgcagtcgaacagtcgctgctgctcaatatggtgcgagctgttgggctgttcccctatatcacgccccacctccgcaacttggcgccttctgaccgcctagcttacgaggctcacagagtcgatggtgtagagcagggtatggtgtttcatcatctgcaggctcacgttttcagcttgatcatgcaaggccgaaacgtggtgctcagtgcttctacgagcgtcgggaagagtctcgtcatcgacgctgtgctggcacagcgtaaattcaaaaatgtggttgtgatcgttccaaccattgcgctgatcgacgaaacccgtcgtcgcttggtcacgcgcttcaagggcttcaatttaatcacgcatcccagccaggaagcagtgcccgacacaaccaatgtctatcttctcacccaggagcgtgttctccagcgttctgaccttgcaaatgtcgagtttttcgtcttggacgagttctacaaaatcgatttgacgaatgacacagatgaaagcacccgagccattgatctaagcctggccttccacaagctcgccaaaactggtgctcagttttacatgcttgggccacatatccagaaaatctctggcttggatggttacgagtaccacttcatcccgtccgactacaacactgtcgcggtcgacatccagaatttcaatctgagcatgcgctctgaacagcgaaagggaaagctgctggagctggtcacaactttggactctcctactctaatctactgccaagcaccacccagtgcgaacagggtcgctgaatatttgatccaggaagctgggctaatcccagtgccggagacgcaagaaatcgctgcatggatttccaagcattaccacccggagtggaacgttgccaaggcaatctctctaggcatcggaattcaccatggtggtgtgccgcgtgcactgcagcagtacatcgtcaaactcttcaacgaaggtatcatcaagcgaatcatctgtacgtcgacaatgatcgaaggcgttaacacgtcggcagagaacgtgatcatttacgaccgtcgtctgaacacatcgacgttcgactacttcacatacaagaatatttccggtcgtgcaggtcgcatgaacaaatactttatcggcaaggtcttcatgctcgaagcaccgccacttgaacaaggactcaccgtcgagtaccccataggtcatcaggatgagagctctcctataggactcctcatgcacctagagaacgagtacctgaccgacacttcgcgtgatcggcttcaggaagcctacgccaaccccatactgtcaccgtctaccctcattgagaacaggcacattccgattgagcggcaagtcgaggtggcggagacgattattcgagacctacagaacagccgcaagctgttatgctggagaggtattcctgagcccaaccaactcaactacctgtgtgagttgatctacaacctggaaggcaagaacctgatggactatttgatatcgtcaagtgcacaattagcttggcacatcaatgaactccgaaaccagaaaaacttgcccacttatcttagagacgctgtggaaaatcggcgaagcgatgacactgctagcgaagccataaatctgcgtctgaaatttatcagaaacatggtgtgcttccgattgcctcgggacatcatggctgtcaacaagattcaagccgacgtgttcggcacaagaaatatcgaaccgggtgatttcagtttttttgcagagcagcttgaaaatatgttcctcgacccactactcactgcattggacgaatatggaattcccactcagatctcgacccagatcaagggcctcattttgccgtcggagcatctgaatgatctgctggcgaaacttaaggcattggcaccgagcgtagagcgtcttcaattgaccggctttgagaaaagcctaatgcgttgggcagtggccgagatgtag

SEQ ID NO: 58592 - DNA, 768 bp, Bordetella bronchiseptica
atgcggaacgccgtcgttgactatgcgatcccgcgctcgaaactcgccgatgcgaaggcgcgcgatcataggttcaatagcaccgaggcagtcgccgaactcgtcgagcgggccaaacgctcatttaccgatttagcgaacaccggcgagggtggcgagatgttgctgttcctactggcggagcgcttcctcaagttgccacaaattctttgcaagatggatctcaagacggacacgcgaatgcactatcacggcgcggatggagtgtatgccggggtgaccccagaaggagtattaaagctctactggggtgaatcaaaaatctacggtgatgcgagcgctgcgattcgtgcctgccttaattccctcgcccccttcctgatcgaactcgaacacgaggaggcagagcgggagcgcgacctgatgctcctgagcgacaaggccgaccttagtaacccagctctcaccgatgcgctcaagaactattttgacaagtcgtcggtcatgtcgaagcgggtccaatattgcggcgtggcccttgtaggcttcgacgcaccattctacccagaagccgatgcgaaggctgttgctgaggagatagtcaaggcatcccgcacggaacttactggttggagcaatagcattggggaacggctcaaattggagaatcttgaccagatggaaatcgagatgttctgtatccctctgccttcagccgaaggtttccgcgccgcattcctcaaggcgatggggttcaaggaacaatga

SEQ ID NO: 58593 - DNA, 1086 bp, Bordetella bronchiseptica
atggagccgcacgacttctggaacctggctggccgcgcaggcagatggggagatgagttccaaggaaacatcatctgtatcgatccggaggatacgcaggcttggcccagtggtgtgcccagccgcgcgcgctaccccattaagcgcgaaagcgacgctgttctcgaccttggcgacggtatggcggactatctatccgagcgtggattatcggatatttccagcattgaggacacggataaattcgaacaggttggcgcctatctgctcaccacgttcatgcggcttggctctatatcagcagctagcctctcgaagcggcatgacgctgcgtcgattgcgaagctcgatcaggctctcggtgccttggcagcgcagatcgaaatcgacgttgatctggcggctcggcatccaggggttagcgcggttggccttcagcgccttcttgaagctttccgttcgtatggcggtgatgtcgaaaacctgctcctggccgaggtggcgagcaatgacagttacgaccggttcataacgattatgggaaggattaacaagcacatgtttctagccttcgcccccgaaagccgtattaggctatatgcgttgatcgtcttcaaatggttaaaggggtattcgttggctaagatcatccgagatagcatcgaatggcaccaaaacaccgcgagatctttcaagctcccggacttgatccgcggcacgatggaattggtggaacagatcgcccgcttcagggcgccaaagtacctttcagcctatatggatgtgctgcacctgcatctgcgtgagattggccgtgaagatttaatcgacgacggtttggatatcggaacgcagcttgagttcggcgtttcgtcgacgacacttctctcgctcatggagcttggcctttcccgcatgagcgctgttgttttgtacgaaaaaattgcccgcgacgacctcaacagagaggaatgcgtggcgtggattgccgagcgtgtgggtcaactccaaacaatggatgtcccagccatcatcatccgcgaggtgcgcgaacgtctcacgctgcctggcgacatagcctcgtaa

SEQ ID NO: 58594 - DNA, 720 bp, Eikenella corrodens ATCC 23834
atggaatggctacctgagttttgccttaccgctagtgagttgaaaagcctcaagcctggaaacgcttttagcatgattaagaaagctgctagaatggtttatcaaacagagaaatataaatcacgtggggaatttggagagctgttcttgcatatgatattacggcaaatctataaatctattcccgccatcagtaaaatttattttaaagactccgtcaatcataccgttaagggatatgatgctgttcatatcgttcagatagatggaaaactggagttatggcttggtgaagttaaattttataacaacgccgctgatgcgatacgagatgttatagctgaaattcaagaacatacaaagcaggattatttaagaaatgaaaaaatgcttttagccaataaaattgatcctaattcatcattctatccgacattatcaaaattgcttgatcaaaatacatctcttgacgagttatttgattgcgcttgcatccctattcttatcacttatgatagcggcactttgaaaaaacacaacaaaacaacagatgactttaacaaagagctggaagaagaagttttagcaattagacagaaaattgaggaaaaaatgtccaaccttaatttaccagttaaaatccatctttttttgcttcctcttcaagaaaaatctgtgttaattcaaaaattagatgaacagttaaaaaggctgcaatga

SEQ ID NO: 58595 - DNA, 2133 bp, Eikenella corrodens ATCC 23834
atgatacttacaaaaaatgaagttgaaataaaactaaaagatagcagagaaataaatcctgacgatgctttcttagttctacagtctatgtgttttttagccaataaggatcctgaagataatgagatacagcaattgcttcttcgtgtattggatcgaaaagaagaatttagtccatttatagaagtagtaaatggattaattcgacattttggtctttatccttatttggatacgaatacaattactgtaaaagatgccatagcaagagaaattcatagaccatctttgttagcaaacgatgataacaaccaaaatatagaagatgaaggttttgtattccacagagtacaggctgaagtatttcaatatttgatggatggagaaaatatcatactaagtgccccaaccagttttggaaaaagtgccttaattgattctctaattgaaagtaaaaagtttgataatatcattatcattgtaccaactatcgccttaatcgacgaaacgagaagacgaatatccgtattaaaatgcgatcacaaaattatcacacatgcttcacaagagttacaatcaaaaaatatatttattctcacccaagaaagagctatcgactttcccgatttgcccaattttgatatttttattttagatgaattttataagctagatccaagggaggattctgaaagagcaatgactttgaatcatgccttgtataaattacataagaagtccaagcaattctatctgttaggaccaaatatacaaaatgtacctgaaggactgcctgatcgattgcagtgtaaatttattcgaaccaattattcaactgtcgttactgagcttatccgagttggatcaaataaagatccatttaatgatgaactactaagtttatgcaatagcattcagggctctaccttaatattctgttcatctccaaataaagcaagaaaaattactgaactacttgctaaccattgtactcaaattggtgaaggattaacggatgctgccgattgggttgcagaaaattatcatcctgattggacgttagtgaaaggtttgagaaaaggtattggaatgcaccacggtcaaattccaagagcgatagcgcatctttgtgtgaaaggttttaatgaagggaaattaccatttttagtctgcacatccaccctgattgagggtgtaaatacaaaagcaaaaaatgtgattatttttgataacaagattgcaaacaagaaatttgatttttttacttttaacaacataagaggacgttccggaagaatgtttcagcattttattggacgtgtctatttattcaatgatcctcctcaagagaaacttcctcttgttgaaatacccgtattttctcaagaagaaaatgccgaagaatctcttcttattcaacttgataaaacagatataacagaacggtcttggaaccgaatacagaaatattatgatcaggatattttagatattagtgttctacgcagcaattcaggaattaatccagatcttcaaatcaattttgccaattatttaatagtaaaccggatagagttatcaattttagcttggaaaagcactcctacatatgatcaattagaacatttgtgttgcctgatctggaagtattttcttaaaggtaaaaaatttcataaggtatcatctggccgccaattagcttttaaaataaatcaattaagaaataatgaaattaaggaaattatatcgaatgaaataactcaagagaaagaacctgatgaagctgtagaaaatacgctgagtttcattagacaatgggcacaatttcattttcctaggttggctatggctgtttgtagaatacaaaatgcagtcgctgaaagattaggagttgcccaggcagactattctttcttttgtgcgcaagtagaaagcttatttacagattcagccctagtggctcttgatgaatacgggttgcccctgcctttagcagaaaagttagagaatatgttaaattcaaatggatcactagatactgctcttaagaatctatctatattgaattttgataaattgagtttaactatatttgagaaagaaatgcttaatgatgtaaagaaatctatttaa

SEQ ID NO: 58596 - DNA, 894 bp, Enterobacter aerogenes
atgttgctgcccatacgagtcaacaagcgattcttgaatttatttaggacacttacattagacaaagcaccacggcaatctaccgtaaacttacatgttctaaacattgaaagtaacagttttgtttataataaattggttgaggaattaagagacttaatagtttgttacgtacattcaaatagaagaatagctgagtttgaaaaagattatccatcttttagtcccaaaccatatttagaagcaatacagaaatttcgcacttatacatcaaatgaaggtgagttaggtgagctactgttatacgcatttcttgaatcaggtttaaatgcacctaaattgttatccaaaatggagttaaagactgatgcaaatgattatatcaaaggctccgatggtatacatttattagagatcgataataattatcaactaatttttggtgagtccaaaatgtactcggacttactggagggggctcgtgaagcatttgactctattgctgactttaaagccaacggattaggatttgaacgaggcttaatagatactcatgtaataaatgaaatggttactgaagaaggatacgaaacaataaaatccatactattaccttcaggaaatgatgggccaaaccttgatctatcttttggcattttcctaggatttgagttgccggtcagtgatacacaattatctatgaaaaacaatgaatttcgagagtgggcatattcatttgtaaaaaataatgcgtctcgtgtaattgatacgatagaaaaaagaattataaagcataaactctttggtcacgactttcatatatacattgtccctttcacagacatagatatcactcgtaaaaaattaatccaagaaatgctaacaattggataa

SEQ ID NO: 58597 - DNA, 2589 bp, Enterobacter aerogenes
atgaacgaaaaagatgtagcaagaaaaattccattagcacagcgtctttcgatggacgcttatacaagtagctactttaaagagatctataattatatatcagttttatacgacaattttttgtttaataataaccacactcagaagcctgtatttgttgacacaacaaaaatagagaaagctttacgttttgctgatatcctatctcattcacctgttgaaactcatcgaacaaaatcatttgaaatcataagtaaaatagctgcatttcattcagatgatccttattttaaaatgataggctcagcggtcataaatcgtttgggtatatttgcagcagataatttaatatcacagggagtacatttaccgttagaccgagaaatagaatcatccataaaaaaatcattccaaaaaactagtatagatggattattttttacagacaaacaatatgaactttatcaatccctaattacctcaaacactctaagctttgccggccctacgtcaatgggaaaatcgttcgtcataaatgaatatataaaaaatattgtttttggtaatgctaaaaaaaatatagtgctcatagtcccaactagagcattaattagccaaagtacattaaaattaaaaaatgaactaagagatgaaattgatggcaatcagtataagatagtaacaacatcttacatgctcagaggaggtattgatcatagtaaagggtatattttcgtattgactccagagagattggttagtttaattagttcatctcctgatataattattgattatatttttgtcgatgaagcacaaaaacttactattaaaaatgatacacgaagtctcgtaacctattccgcgatcgaacaaacattaaatttaaattcaaacgcaaaactatttttctcatcaccaaatctatccaaccctgaaatatttaatgatttatttaatcgggaccatgctaaagtttatcgcagcattgaaggcgctacagctcagaacttgtactttattgacttattaaacaacaagtttagttatgttgataaaaacaaattaattgatatagataatgttaatcagacttatacatctgctaatgatcttatctttcagattaacaaagggaaaagtaagattatttacactggaggtatcgataacacattatctcgaacaagggatttcctacgttacataaagaaattacaaagtaaaaagaaacctcaaaattttgatctagcatctcaggtccgagaatttgtgcataacggctacgaacttgctgaagctatagagtatggagtagcatttcatttcggaaacctgccacaagcaataagagatcttattgaacaccactttaaaataggtaatatagattacttgttttgcacatcaactcttcttgagggggtaaatttacccgcacgttcagtatttattttgacatccaaaaagggtactagatattttgaacctgtggatttttggaatctcgcaggcagagcaggaagactagccatagagttagctggtgatatattttgcataaaagatgaaagtggaacttggaatgataaagcggtaaaaaaattaatcctatccaataaaaatgaaattgaactgactcccagcttttatcttaatgattctaaaaggattaaagaactagaacaaataataaaaactggttctactgaagggattcaaaatagcgaatttctcagaacactaagtgatatggtaaggattgataccctacgaactgacaaagccaataatttaccacttatcaattatttcagaaataatggaaataacgatatattacattatgccttgaaaagcatagataacattaacatacctacacatattttattagcaaatagccatattgcaattaactcacaacatagtgcatttaatagcatcagaaattattcaattgacgaactaaagttatcatggaatcctacaaatgatgaaataaaagaaaaattagctctcatattcaatatttatcaaatagataaatatagcaaaggattaaatcgtcttaattttaactcaatcccatattacgcagtcattttaactaagtggatgcatggtaatacattaagtgaaataatctctgacgcgattgtttattacatatcgaatagaaagaatatctatctttcagataagactcaagaactatttgatcaaaacaatcctattcatataacaaaattagtaaatgatacaattaaagatatagaattaaaaataggttatcaactacaaaattatatttcacattattgccaacttctttcacttgtttttgaaaataaccctggagcaaattggtcacaattcatagagtttggctcgaatgatccgattgtatggcaactgcaatttatgggattttccagacattgtgcaatatttttaaagaaaaatttccctaaacaccttaaatatgatcaagaaaacaatcagttatacatattaaacagagctgaaatcaagtcaaaggttaaacagaacaaattatattggcttgaaattcaggccctgctttaa

SEQ ID NO: 58598 - DNA, 894 bp, Enterobacter aerogenes; identical to SEQ ID NO: 58596

SEQ ID NO: 58599 - DNA, 2589 bp, Enterobacter aerogenes; identical to SEQ ID NO: 58597

SEQ ID NO: 58600 - DNA, 894 bp, Enterobacter aerogenes; identical to SEQ ID NO: 58596

SEQ ID NO: 58601 - DNA, 2589 bp, Enterobacter aerogenes; identical to SEQ ID NO: 58597

SEQ ID NO: 58602 - DNA, 894 bp, Enterobacter aerogenes; identical to SEQ ID NO: 58596

SEQ ID NO: 58603 - DNA, 2589 bp, Enterobacter aerogenes; identical to SEQ ID NO: 58597

SEQ ID NO: 58604 - DNA, 894 bp, Enterobacter aerogenes
atggaagaagatctctctaataattttaaagcactaattcagtctgattttatggagtgctttgttcgaatggaatgtgacttaaatttagacaaaaatcggattgttaacctttataggctttgtttagatggtaaaaaatataactatgttaagattggtgatcggttaattgattgtattccatcattttctctttcccgtaagcaattaatgaggtgtcgtgagagaaatgcatttggaaaagctacgctatccgcgatacgtaattttttgaaaatagaaaggaagactaaaatatccgaaatgttattacaaggatttcttgaatcgtacctgcatgcgcctaaactttattcatttgatgaaataaataatgcaggttttcatggcgcccatgttaaattcaataagaataggaatgttgagttaatccattcggctgcatttatatctaattcgttatcggatggcgtttcatatgcgatagatgttattcttaaagcatttcctgagttaagatcgttggatggtttgcttggtaatacatttttagaaacaaactttaccgaagatgagtgccaaatcctagccagtcttctcatcccgggagagtcttcgtactcgcagggttatgaagacagattggctatatttattggctataaccataagattgaagagtcactcatatatgagaatgcatctaggtttccgtctttgcttgaacaaaaaattattctcaatgttcagcaggcactagaatatcggaaagaggaaatcaataagttatcaatagttaatgcaactattgattgtttttttgttccattcgatgatgtgaataaatttaatgacgagttcattgagagtctgaaaaatgaagaagcttga

SEQ ID NO: 58605 - DNA, 2562 bp, Enterobacter aerogenes
atgaagaagcttgattctttcattatagaaaaaatatttaacagcgcatattttaaaaagctttataaaaaaataataaaagcatattctgcgttgactatagaatctgagaaccatttcaatatttccaatacagagttgagagacatatttagatttattgatttgttggtgaactcatctaatcaaaatgctaggatgtgtgcatatcactggattagtttgcttgaaccattttctgataaatgggggaaattctcacttatctcttctttagtctactctaaacttggtttatacgcattagattttaatgatcatgctcttccattttcgcagcgacttgagaatgaagcgaagaaatctgcccaaacatttagtaatgcatatatattcaccgatgcacagtttgatatttatacggatatgctgaaatcaccttactatagtttttcaggtccaacgtcattggggaaatcatttattctaaaacgctatattgaagagattattcaaaattctacatcaaacattgtcatcttagtcccaacaagagcattgataagtcagttttctttggagattaaaaatgaattacatgaacttattgaaaatttcaattataaaatagtgactcacggatcattagcaagtaaatcagatgctgtaatcattaagcatatttttatattgacgccggaacgattgcttaatttgttctcgcaaggcaagattgttagtatagattatttgtttgtagatgaagcacataaattatcaaataatgatgactcagatgtgcggagccttacagagtataatgctatcgatagtgcattattcaacaatccaaatatgaaaattgttttttcttccccaaatattgaaaatcctgaggtttttttaaatctttttgggcgtgaaaaaatttatgcaagtaggattattgaatcaccagtgtcacaaaatctttatcttattgattttcacagaaaagaaattaaatatttttctaattcagaatgcatcgatattgaaagtagttctttatatacactcaataaaaaaagtgatttcatttataacatagggagccgacatggatcaaatatgatatattgttctagtcgggctaaagctgttgattctgcacttgaattttatcaaataaggctctcagaaaatattgtgttatctcctttgttgattgattccataaaaaagataagtaattatattcatcctgagtattatttagctatgtttctaatgaagcgaattgcttatcatcatggacaattaccacaagcaataagaaatatagttgaagaattgtttcgaaatggagatattgattttatcttttgtacacctactttggttgaaggcgttaatatgccaactcggaatatatttatcaattgtgatgataaaattagattaatcgctgatgcgaaaaagaatcctaataaaacacttgccttttggaatctggctggccgggcaggtagatattgcaaggagttatctgggaatattttttgtttacaggatgaatcaaatcgatgggataatactgatatttttttagagaaaacagcgcatttaactacaactatagatgcccggatagaaagtaaatctgggttaagagaaatagagcgctatctttctgatgcggagactgatatttctaaaaggaaccaggcgatagagtatctcgctaatattatggctgtagacactattagatttaaaaataatctaaaagatagctttgtcctgcggaaattttatgatatacatcgagaagaattgttatctcttgctaaactaaaagcaaatgatattttagatattcctatagatattatcaattcctataaatctcttaattttaaaatacaacgaaaagtatttgattacgttagcgtatctcctgtaaacaaaaagctcccatcgctcgactatgcaaatattttgtcggtattggagttgttttatgatctttatagatggggtgaaacagaaactaaatatgtaaagtcaaaaggacaattgacttattttgctactttaatgaatcagtggacaaatgattattcaataaacagaattataaacgaaaatattgatataaaaagaaccattgtcattgaacggggacaacaaccaataccttttgacaggaatgatattaatcatgttaataaagtgatcgatgacattctttataacatagaaagaattttatcgttcttttttgaaaaatacttcaatcattactataaatgtctggctgcaattttaggggaggacaatgcgggacataattgggctacatttcttgagtatggttctaagaatccgttatgtattagcttacaaatattaggtgtttcaaggcatgctgcaaatataatttcctcttccaaagaactcaggaaatatttaaatttcaatgaggactcatatgagataattagtgttaacaagaaagggttgttgaattctttgcaaaaagattctgttgaatatggagaggttaaaatatttctttga

SEQ ID NO: 58606 - DNA, 573 bp, Enterobacter cloacae subsp. cloacae ENHKU01
atggaagctgtacttggtgcccctcaattagttgctaagatggagctaaaaacgaattctaatgacgaagttaaagggtcggatggtatacatgtaagatggaatgagcaggataaacttgttgatttgtattttggagaggctaaattatataaaaaagtatcaagtgcgttagatgaagctttaaaaagcatctcatcatttcacgagagcgaaatgtataagcatgagtttaatatagttactaaatttttcaaatatgcaaatgatgaaattaagaatgcaataagtgagcttattgtttcaggagagccggggccaaatattaggcttaatcacgcctgtctcatcggttacaattggcacaagtttaataaattaaaagctactaacgaacagtctttagagcagcatttcctaaaagaatttaagaatgattttccaagactaaaaaaattgttagaggataaatttatatcctttccacagaaacatcttaagtttgatgttttctttattccctttccttcagtcactgattttaggaatgaattcaatgccgctttggactaa

SEQ ID NO: 58607 - DNA, 1527 bp, Enterobacter cloacae subsp. cloacae ENHKU01
atgcatgttgatattggtgagtttgagattgatttttctttccgtggtggaaaggttcagcagaaatcatcttttgcaaagtttatttctgataatggaggggccgtgattgtttttgaaaatgatccttctgctgctgaagatgttgccctatctttgacagaaaaactgattattgaagacgctcggcctgactacttggaatttattgattttattaaggaagaaatgcatagcgactattctttagcgcattgcatggagcataaagtcgcttttcattatgggaatatgccatcaataattagaagtgggatagaatattttttcaaacgtggtgatatacaatatattgtttgcacgagcaccttgttgcaaggggttaaccttccagcaaaacatattatattagataaccctcatagtggttccaattcaatgtctcgtgctgactttttaaatttatccggcagggctggcagattacttcatgaatttcatgggaatgtttggtgtttgagacctgatgattgggatgcaaaagtttttgaaggtgaaaagctccaggttataaattctgctatgtctgatgtaatgttggatggtggtgggattatttgcaatgctatagatgggttgcttattgacccaattgaaaaggatcttgctgatgtagcctttgcaaaactctttcacgaaatcaggcgtgatgatttacaatcggagtatttcctcagaaatgataaaagtgaggagtatcatgaagtattagaatataactttaataaaatctccatgatgaaaattaatgttcccgatgagttgcttagaatgaatatcgggattagaccagattatatacaaagactgtatgatttatttaaagagtctgcaaatttagatgattattctctatactcaccttttaaaaaaggtggtaaacaaagaattgatgtggctattgaaatcataagggatatattctcttgggatattagccaccaacattctctatggataagtatgctggctcataaatggatgacaggcaaatcattgagcagtctcatctctttcgaagtcgacagagcattttctctcgaagagagaaataaaagcgaaaaggatatctcctttaaaaggagaaaagtttcgtcgactattcgtggtgttctcaaaggtctagagactcaagttagatataatttagtgagatatattaaagtttatcaggatgttttaaggtttgtcatggaagagcgcaatgaaggtgcaaaagcagtgctggtggaaaatatcagcgcctatctggaatttggctcttgtaatccggttgatttaaatcttatgtcattagggctttcacgtagcacagcattattagtcagaaagaaagtaaaacttcccccggaagggacccctgaggattacctttctttccttagaaaggtaaatttcgataagacttctataccgtcatattgcatgagggaaataaaggatgtattgggagatatgaaaatttaa

SEQ ID NO: 58608 - DNA, 948 bp, Enterobacter cloacae BIDMC 8
atggacagtgtagaaaagctcaaatcgataaactggaaagagttgattacgaacaatcacaaatggattgaatcaaggttggttaatcacccttgtgagagtcaagctaagatagtttcaaggatttttaccatcccattcagcggagttatacaagagcatcatcacttagttgagtctatggctgatgctattgaacactacgtttttgataaagaagctcttgctaaaatgaaagcggatggcgttaccccttttagaaaagctgcacagttttttggggatactaatccagtcaaggatggtaagtacggggagttgctcctttatatcctatctgaggctatacttaatacaccgatggtctcacataaaatcactaatttaactaacttaaacgatcaggttaagggtggtgatggtgttttcttcggtgtgtatagagaaaatctttcaattttaattggtgagtcgaaaatatataagagttttagtggcgcgctggaaagcgcatttgactctcttgacagatttacaaaaagttatactagtggtgcacttggtcatgaacttttcatggctagaactaatatatcaagtaattttgattttgaaactatggagttaatttataaagcatttactcctggtgatgatatttactctgagtgtgttaaaacacaccccgttctgcttatatttgaagatgcagaaattaagagcatagaggaaaaagcaataaacaaggcggaggccgaaagactgtttgatgcatggcttactaaaaaaaaggaagcgataaagtcagacatcgatgcaaagttaatcaaataccctaacgttaaaccttgcttcttagactttttcctaatacctatgacagatgttggtgagttcaaaaagtcgttgtatagagctatccacggaatagattacaaagaaaattaa

SEQ ID NO: 58609 - DNA, 2658 bp, Enterobacter cloacae BIDMC 8
atggctaaaagtactgctacaacagcattaaatcatcaagactttacaagcgtttttaatttattgattgagcatttgtttttgaaaaatagaggtaaggaagaaaaatataaaatatctgatgaaatgattaggagagcaacttggcttgcatcacttggatcatcaggcaacgaaaccgataaaaatattgcaagtgcattcggtacattgctctatttatacgacacaagtaatgatctatatctcaaagcttgttatattctgcaatctagggctggtaatatagtctctgctaagcatttagaaggtctttttagtcaagggaatattattaaacactttagttcatcattggattttgaactcacaagtcaaaagtttcttcttgaaaaaagagtttctgacaataattatatttattttactcattttcaaagaagtctgtgggacaaactagaacgcggtgaaaacgttgctgtatctgcaccaacatcggccggtaaatcatttgtaattaaaaggtatatttacgatagtgttatatctgcaaatgatggttacttcgtttacgttgtaccctcaaaggcgctgataaaccaagtcggcaatgaaatgtctagagagttaaaagacatagctacagtgatgacaacctataaggattcagaaaatgatgatttaaaaatagtatatgttctcacgcctgaaagatgtatgcgattgttaaatgagaatggtaaaaaagcacctaaaatagttttttttgatgaaatacaaaatttagaggataaaagtaggggtaatgtttttgagaacgttatctatagaatgacaagcttatggcagtcaactcaatttattatggctggcccatacataataaatttacatcattcactcaataaaattattgaccttaatctagttgagcaaacaacttctacaaccccggttttgcagttaaaagttgtgcttacagtacataaaaataagaaaaccgttaattataaattaataagcccggttggggatgcggtgttaggtgagtacgatataggtaaggcattgtatagtaaattatcttcatcaaagggtgcagcattaaagcatatcacttctattctagattctgatgaacaaaatataatatacgcacctaagaagaatttggctgagggatgggcgctggcaattgctcaaactaacaatgaagattcggagctagatgaagataatactgatttagtgtatgattcaagaatagatagtttgtgttcatttttagaaaatgagatacatcctctgtattctcttgttagatgccttaagaaaggggttgcatttcatcatggtggcttattggatgtggcaaggctcgaggtagaggatcttttcgctgatggtgcgattaggaatttggtgtgcacctcaactttactacagggcgtaaatcttcctgctgatagaatgattgtaatatccccaaagattggtgactatgagttatctcattttgattttttaaatcttattggccgtgcaggtaggattagtacatctttatatggtgagattttttgcattcagcttgttgatgaagagtgggctgaagataagattgagtcggatgaaacaaaggagatacaatcttcagttttaagaaagctcaatgaatatggtgagtcagttgtaagttacattgatgtctacactaaagatattgttgatactcaaggagagcttcatgctgtcaatcttgcctcctatctgcgaggccagtttttagtagatagagagcattatgagaaaataataagcaactccaatcttactcttaatcaaattagagtgatgacgaatagattggaagcgttggaagatattttaaatgtaccgaaggatataatatataaaaatcctttcatcgatcccctcttgattgatcagctttattttttggttgaaagcgaaggtgtcaataaatggatgattgataaatatcctagagttaaatctggagtggcagatcccaatgctgaatttcagcatatgaattattataaccaatataaaagcataattttacggctgaatgatatttttgagatagagaaagagattaattataaagaagatggtgtgtcaagaaaatcaagtcatttcgtttctatctttaagttagtaaacgactcacataagtggatgcaaggtagaaattataggttttttatagatgacatgattactaagaaattaataaataaaggcattccagttgattataagaaggttgacgggattaccaattttgtaactacacacatcaatactaatttgacattcattttggttaaatatctctcgctttgggctgacgtagtaagctcatttatgtctgaggaagaacgtacgttgaatgcatttttcctcaatctctcatctatgttagaaatgggtaattatgatcctcaggttttagaggtgatggcttatggaataaatagaagtactgcaattgaattattgaaaaaacaaaaaataaacaatgagcaaaccacttggcaatatttagtgcaatataatttggataagctttcaccattgcataggaaatatttgcaaagagcgggctttgggtcttcaaagcctgcataa

SEQ ID NO: 58610 - DNA, 903 bp, Enterobacter cloacae
atgttactaccaatacgagtacataaaagatttctggatttatttaaaactgtacatattgattcttctccacagcaatcaactctaaacttgcatattttgaacattgagagcaatcaatttatatatccaaaattagttgaggaattaagagaattaataataagctacgtacactctaacagacggattgaggagtttcatgaaaactattctcgatacagtcctaaacctttctttgaggcaatacaaaaatttcgcaattacagttcaaatgaaggtgaattaggagaacttcttttatatgcttttcttgaagcaggtttgaatgctcctaaattactttctaaaatggaactgaaaacagactctaacgactatatcaaaggttcggatggaatacatctattagaaacagatgatagtttccaattaatatttggagagtctaaactatacgcagatcttttagagggagccagggaggcatttgactcaattgttgattttaaagccaatggaatgggatatgaaagaggattgattgatacacatgttataaatgaaatggtttcggaagacggttatgaaaaaataaaatccatcctgcttccatcaggcaatgacggacctgaccttgatttatcatttggcattttcctcggattcgaattaccgattgatagctcgatactatcaatgaagaataaagaatttagagagtgggtaaatgagtcagttaaatatcatgcctcacgtgccgtgaagacaatacaaagaaaaattaaaaataacaatctgtttggacatgagtttcatatatatatagttccctttacaaatatagaaacaactcgtaagaagttaattagagatatgctaaccatcgagggaaatctatga

SEQ ID NO: 58611 - DNA, 2571 bp, Enterobacter cloacae
atgaatgaattacactcaagtaagaatgttcatttagcagctcgccttgcagaagatgcttttgaaagcccttacttcaaagaaacatacaaatacataagaactctgtacgacgagactttatttgactggctctcagaaagaaaattagagaaaacagacaatattaaaatcgcacatgctttacgcttcgcagatatattgtctcactcatctaaagaaacatatagaacatatgctttcgaaattataagcaaaatagccacattcaaaaaaaacgacccttattttaaatttgtaggcttggccgtaattaatagaattgggatatatgcggcagaaaaattaatatctgaaggagtaacattaccttttgacagggaaatagatacaatagttaagaagtcagtgcaaaaaatagatgaagatggcatatattttacagacaggcagtatgagttatatcaattattaaagagcagtagtacaattagctttgctggcccaacgtcaatgggaaaatcatttgttattaacgcatatataaaagaaataataacaagtagaactaataaaaacatagcgttaattgtccctaccagagcattaattagtcaaaatgctcttaagctaaaaactgaaattataaacacttcaagtattaattcttataaagttgttacgacatcatatatgttcgatagcaaaaaccctaaaggctatattttcattctaacacccgagaggttggtgagtcttataagcactataccagaactcaagatcgactatcttttcgtcgacgaagctcagaaattaacaactaaaaatgactccagaagtcttgtaacatattcagccatagagcaaactcttaatagcaatcctgatacaaaactatttttttcctctcctaatctatctaatcccgatatttttaactcattatttagacgaaaaaaatcaaaaacctatagaagtacagaaggtgctactgcacaaaatatgtacttcattgatttgattaaaaaggactttagctttgtcaatacacaggaaagaactttggagtcagtagaaagcgattttactcagtttaaaatcgctaacgatgtaatttacaaattaaatcatggaaaaagtaagataatatactgcggtggtatagaaaatactcttgagagaaccagagaatttattaaataccttaaaaaaaggaaaaatttcaaacgccaaaacaccgaaattgcagcacaaattagagagtttgtgcatgataattatgaacttgcagaggcaattaactatggtgttgcctttcactttggtaaccttccacaatcaattcgtgatctgattgaacatcatttcaagatgggtaatattgattatcttttttgtacatctacccttcttgagggtgttaatttacctgcgagatctgtttttattctaacacataagaaaggtataagtcctttagagtctgttgacttttggaatttggcaggaagggctggtcggttagcaatggaattatcaggggatattttctgcattaaagatgaagaaaaaacctgggataagaaagccattgacaacattctattatctgacaaaaacgatatttctttaataccaagtttttatatcgaagacaaaaaaagattaaatgaattacacacaataatttctactggagaaacggagaatattaaaaactctgagtttcttagaactttaggagatatgattcgaatagatacaatgagagaggaaaaacatcttcctttgatcgattatttcaggcgtagcgataaaccggaaataatattaagtgccaaaaaaagcactaaaaaaattaatatacctcttaatattctcttggcaaatagccatatagctattgattctcagcatcatgcttttaataaaataaaatcgatgactattaatgagttgaaattgccatggaaaccaacatatgaagaaataaaatcaaaactgaatctaatctttgaaatctatcagatagataagtttgcaacaggacaaaatcgtctctattctaaatcgatcccttactacgcggttatactttctcagtggatgtatggaaatagccttcaggaaataatttctggagcgataatatacaagaaaaataaatacatttatattaacaaaataaaagttccgtttgacagtagcaatccgtctcacataacagcattagttaacgaaacgattaaagacatcgagctacgtgtaggctatcaattacaaaactatatatcacattactgccaacttatgactcatcttctacatggaaatcccggtgcaaattggtcacaattcattgagtttgggtcaaacgaccctattgtatggcacttacaaatgatgggattttcaagggatagtgcagtatacattaagagaaatttttcaaaatttctaaaaattaatactgagtcaaataaactaacaatatcaaataaatcaatcattaaggattcaatcaaaaaaaatagactttacgctttagaagtccaatcgctgctgtaa

SEQ ID NO: 58612 - DNA, 948 bp, Enterobacter cloacae; identical to SEQ ID NO: 58608

SEQ ID NO: 58613 - DNA, 2658 bp, Enterobacter cloacae; identical to SEQ ID NO: 58609

SEQ ID NO: 58614 - DNA, 918 bp, Enterobacter cloacae
atggattttgatattcttatagaccaaagcctatcgacactctttaatgatagcattaatacaatcaataaaaataacaaacttatttctatgataaatgattttgaagacggcaagtggcgccatcaaaaattccaccgatttatatgggataatatattagaaaccgctctatcgaatcaggaaagggaagcatatataggtggccctagcacatctctagctaaagcagcacagaaccttagacttacagatagtgaaaaagatattagcaaaggaagcgagctcgctgagatttttttatatggcattatgaaacaccactttaaagcgctacctgttgtacctaaaatattttataaacagaacactcaagataatgccaagggtgcagacagcgtacatattgttatagaagatgacaacaactttacgttatggttcggtgaagcaaagttttacaatagtattgaagatgaccgattcgattcaataatcacatcagttaacaattccatttcaacagataaaataaagaaagaaaacagtataataacaaacactaaagatctagttagcttggtaaaaaatgatggactaagatctaaaataatgtattccttgtcatctaaaaactcaattgataatattaagccaatactcaatatccctattttcattttacatgaatgccctataacagaaaacgcctcgtctctttcccctgaatataagtcatcaattatagaactccataaagaaagagctaagtctttttttaaaaaacaccaaataaaaataaaaaacatccatgattatgacaagataaagtttcacctaatccttttccctattccaaagaaagaacaaataattaataagtttgttgaaacagttcgttttcacaaggaacagtaa

SEQ ID NO: 58615 - DNA, 2145 bp, Enterobacter cloacae
atgaacaatgagattaccagtgctactgacaatgatggcgaacatgtggcgcatgtattttcaaaatgcaaagaaataaacgaccttatcaactcagataaggaggatgaagccaggaatagtttaatccttcttttagattatcataaaaaacataaaatccattatacgcctttagttaatcatctcatcagatgcacagggttgtatccttacattcaggctgaaacagcagattggaatgaacgattaatctatgatttattcaaagttgacgttggtttaaacactccaatcactttacacagagagcaatccttaatattaaaaagattattaaatggtgaaagcttagctgtaagcgcaccaacaagttttgggaaaagcttcattattgatgcttttatatcattaaacaaaccgactaatgttctgattattgtccctacaatatctcttacagacgagacccgaagaaggttgcataaaaaatttgctgctgaatataaaataattacaactgctgacgttagcatttctcaaaagaatatatttatattcccacaagaaagagcaattagctacttagataaaattaatgagttagacttattaatcattgatgaattttataaagcaagtgagaatcatgacaaggaaagagcacctgctttattgaaagcaataatgaagttcacaaaaattgcaaagcaacgatattttttagctccaaacattagcacattgaaaagcaatcctttcacaaaaggaatggaatttttgaaattggatttcagcacagtatttttagaaaaacatgacctatcaaaacaaataaatgaggatcctcaaaaaaaatcctcatttcttttagatatccttgaaaacacagcaggaaaatctttaatttacgctggaacttattctaacatcaataaaatatcagcagcaattctcaacaatcataaaaaaagcgaggttaagttattgaaagaattctctgattggttgagattgaattattctcaaaaatggatgcttgcagatattattgaaaagggaacgggcattcataatggacaactacatcgttcaatcagccaaattcaaataaaactatttgaagaaaataacggattaaaaaacttaatatcaacttcttcaattgtcgagggagttaatacagcagcagaaaacgtaatcatatggcaatcaaaaaatggaaaccgcaatctgaaagacttcatgtataaaaatatcattggcagaagcggaagaatgttcaaacacttcgtaggcaagatatatttactgtctccgccaccaaaagaagaagataacgaattagatcttacaatacccaatgcacttgtcggcgatattgatgagacggagtttaaaaacgacctaactccagaacaaatttctgccatcatagcttataaagaagaaatgcaatcattattaggctttgaaacattcaatagattacaatcagaaggtgcattcaaatctaatgatccatttctaatcagagatattgctgtggatatatcaatgaatcctagcgattggttaagcatttcttaccttaattctgaaaaccctgaaagctgggattattttttatataaaataattaaattaaaaccggccggatggggagttgagtataataaatttgtttcttatgttaaaattgcaagttataactggaaattaaccatccctgaaatattaagaaaactctcaaaacacaacattacgataaatgaactctttgaattagaaagaaatcttacattcaaattatcttcattactgaatgatgtaaatgtattgcttaacgagctaatcccaaatagaaacacagacatatctccatttatctataaaacttcaaacgcatttctccctccaattgtttatcaattagaagaatatgggctaccgcgcatgattacaaaaaagattgatgatgctttaaatcttgacttagacaatgaagaactaactttacataccattctggaccaccttaaaactttaaactatgttttcggattatccgggttaatcggtgcaagcatgattgaagaatatataatgaacaacttctttgatggtgtaacgtatagtcaataa

SEQ ID NO: 58616 - DNA, 948 bp, Enterobacter cloacae; identical to SEQ ID NO: 58608

SEQ ID NO: 58617 - DNA, 2658 bp, Enterobacter cloacae; identical to SEQ ID NO: 58609

SEQ ID NO: 58618 - DNA, 948 bp, Enterobacter cloacae; identical to SEQ ID NO: 58608

SEQ ID NO: 58619 - DNA, 2658 bp, Enterobacter cloacae; identical to SEQ ID NO: 58609

SEQ ID NO: 58620 - DNA, 918 bp, Enterobacter cloacae; identical to SEQ ID NO: 58614

SEQ ID NO: 58621 - DNA, 2145 bp, Enterobacter cloacae; identical to SEQ ID NO: 58615

SEQ ID NO: 58622 - DNA, 918 bp, Enterobacter cloacae; identical to SEQ ID NO: 58614

SEQ ID NO: 58623 - DNA, 2145 bp, Enterobacter cloacae; identical to SEQ ID NO: 58615

SEQ ID NO: 58624 - DNA, 918 bp, Enterobacter cloacae; identical to SEQ ID NO: 58614

SEQ ID NO: 58625 - DNA, 2145 bp, Enterobacter cloacae; identical to SEQ ID NO: 58615

SEQ ID NO: 58626 - DNA, 1620 bp, Enterobacter cloacae
atggcaattacttctaccccatctaacaaaggtggccctgcagctaggcaaggttttaaatatcaggatcatgttgccgtcagctttatactaaaaatgctccaagatagttcttatctgcagatcgaatgtgagacagcagatgacatagttgcggtctctcgcccaaatacagaatgcatttacgagtatattcaggtcaaaacgacagagggagacacaaaatggaatctcactgaagcaacagctttggaaaagggcagacctgatagctcactttttcaaaaatctctgaaatgtgacacgcgactcggcatcgctcgtttccggattgtctctaagagagatatatcaaaaccactgcaatgtttcctcattgatatcggcaagcgagtgcttcctgatgattgtacggaacgtggggttaagctagttaaaaaattccctaagacgatatcagctcaaaagagagattttaaatattgggctgaaaactttgtttggcaagtctgtggtgagactgcatggcttgaagctatgaacgtccgtgtgttatcagaattagcagagcaatatggcgtagtgcctagtcatcggcagcagaaagaaatatacgaacacttccttaactgggcagatgacgctgctaccgccgatgttaaaacccaaagtcagatgaaaatcatagcgcgaaaagaagcccttgagtgctttagcaaattactcgatgcggttgaagcttcttcttcaataactgctaaaccttataaatctaaaccagagccctttttagtggagtttcatagcgtagctgaaaccgctcttctacgctctttagcgggatttgatgttgagtatgattttggtgaatggagatgtaaggaactagctgaacatttagtggagtggcttcctgagttctgtttacgtgctagtgagatagctaatttccaagtacatcatgcaaaaacaatcctagctaaatcaattagcactttcacacaagcaaaaatgccacgtgataaactcatcgccgaacttattttgcatacgattttgcgatgcagaaaagacagtgagccgatagcatgtaaggttttctatgagtcggaaggaaaactatcagaatttggtaatgcccatattgttcatcaggctggtaaagccgatgaattatggcttggcctttctaaaatgatccctactggaaagatggacgatacgctaaaagaaatttgtagtgtactagacactaccatttctaaagctgtattgagctccgagcgtgaaattataatcacgctgcgtgaacctcaccaccacttacctaccgcggagcaattcagtaaggcattaagtaagcattcgcctgctcaagaaatgctcaaaattatgtgtttccctatacttcttgcttacgatagtgatgtgcttggaagaggatatgcctccgattacattaatcatttaaagaatgagatcatggctcactatagcgagctaaaaagcagattacccccaaaagtcttacaagtgaaaatagctattttccttcttccaatagaaaacatccagagattagtcatcgagtttaactcgctttgtaggactggaatttga

SEQ ID NO: 58627 - DNA, 2145 bp, Enterobacter cloacae
atgaattacgaaattacaaaaaagaaaattcatttgatcgggagcaagggtatctccactactgaaattcttgtttcgataagtaaaattgtcaatagaggtattcccgagtgggaaggacgtgatttagtaatacgagctttggataaaattgatttttttgatgctgttgaaaagtcactattattaagcatggttcgttctgtagggttatatccatatatcaagccttatcttgatgaagtatcggatgatgaccgcttggcatatgaaatacatcgaatagataatgttgaaccaggaatggtatttcaccgcctccaagctcatgtatacaacttactgatgcaacgtaagaatgttgttcttagtgcatccactagtgtaggtaaaagcttagtcattgatgcgattttagctagtaaacagtacagtaaaatagtagttgttgtgcctaccatagcgttaatagatgagacccgacgcagaatggttaaacgattcagatcacattgcaatataatcacccatcctagccaagaggctactctttctttagcaaatgtttacttactgacacaagagcgtgtacttcaacgtggcgatttagatgatgtagatttctttgttattgatgagttctataagctggaccttgaaaatgattcagatgagaaaaaccgttcaattgacctaagtcttgcatttcacaggcttgctaagcagggggcgcaattttatttgcttggaccaaatatccaaaatattcatgggcttgaagcctacgaatataattttattccatcaagtttctcaacagtttcggttgatgtgtatcattacaatctttcgtcgaaaggagatgcacgtaaagaaaaactgcttgagctttgttcgcaactatcttcccctacgctaatctattgccaatctcctgctagtgcaaataaagtggctcaatttcttattaatgaggctaatcttccccgtgtggaaaatactcaggatgttgctgattggattggtaaacattatcaccctgattggaatatatcaaaggcaatatcgctaggtgtaggaattcaccatggtggggttccacgagcacttcagcagtactttgtgaagctgttcaacgaaggggctattaagttcatcgtttgcacctcgacaatgattgagggtgttaatacttctgctgaaaatgtcatcatttatgaccgaagggtcaacaatactccatttgatttctttaccttcaaaaatatatctggtcgagctgggcgtatgaaccgttacttcatcggaaaagtttatatgcttgaagctcctccattagagaaagacttaagcgttgaatatcctgtaggttctcagaacgaggattcacctatgggcttgcttctcaaattagaacctgagtttttatccgacctatcccgtcaacggttagagcaagcctattcaacgccacagatttcggctgtaacattgatcgaaaaccgccatgtaccaatagaggtgcaagtcaaaatcgcagaacagattttagaagatcaacatgaacataagcatcttctttgctggaaaggtaatcctgagcagaatcagcttgagtatctttgtagtctcgtttatgagcatcttcctcacaacctcatggaatacggcattttctcggggctccaactggcttggcatataaatgcgctaaggtcacagaagaacttcactgaatatcttcaacaagcgattgatgatgattggcataaccgcacacccagcgaggcaataggactgcggctaaaattaatccgtaatgttatcagctaccgtttgccaagggattttatgtctatcagtagaatccaggccgatgttttaggcaggcgaaatcttgagtttggagattatacctttatctcagaacaacttgaaaacctgtttcaagatcctttgattactgctctggatgaatacggcatccctatacagatatctactaaaataaaaggaatgatacttccatctgataacttaaatgaggtgctcgctaagctaaggaagctggttgtaaaaattgacaaaatgcaattaagtaaatttgaaaaaaacatcctacgttgggctatagccgaaatgtga

SEQ ID NO: 58628 - DNA, 918 bp, Enterobacter cloacae; identical to SEQ ID NO: 58614

SEQ ID NO: 58629 - DNA, 2145 bp, Enterobacter cloacae; identical to SEQ ID NO: 58615

SEQ ID NO: 58630 - DNA, 918 bp, Enterobacter cloacae; identical to SEQ ID NO: 58614

SEQ ID NO: 58631 - DNA, 2145 bp, Enterobacter cloacae; identical to SEQ ID NO: 58615

SEQ ID NO: 58632 - DNA, 918 bp, Enterobacter cloacae; identical to SEQ ID NO: 58614

SEQ ID NO: 58633 - DNA, 2145 bp, Enterobacter cloacae; identical to SEQ ID NO: 58615

SEQ ID NO: 58634 - DNA, 918 bp, Enterobacter cloacae; identical to SEQ ID NO: 58614

SEQ ID NO: 58635 - DNA, 2145 bp, Enterobacter cloacae; identical to SEQ ID NO: 58615

SEQ ID NO: 58636 - DNA, 1617 bp, Enterobacter cloacae
atggagtcgaacgattcaggcggggtagccgccaagcacggtttcttatttcaggactgcgtagccgcttaccatgtcacccgaatgcttcgtgacaagactatccgcagtgtacgctgcgaggtcacagacgatatcgacattgtatctgatagatacatcgacttcgttcaggtaaaaagcacgggcaaaacacgctggaacgtttcggacatcgttcagaattcaaaaggtgctgataaaaagacgatcccctgcagttcaattttgcacaaatcaatgcagtgtgagtctgacctgtcccttggacgtaggtactccatcgtcacagaggaaaaggtcaacaaaacccttgagtacctgacgatcaacccaaacgcccgactagataagccaagtagacaggaactcatcgatgatctcaacaaacgcacaaacaattatttaacagactcaggtataagcgtttcagattggatcgatgcggctacatgggaagtgttttcatccctgcgagaactggaacttctagggatcaaaaacatacgactggcctcccaagatctacatggggtcattcttagttccgaaaccgttgccgaagaaatttggtgccgaatccttgatactgtgacgcgcaagggcgagcattctcgacgcattcacagtgtggatgacaagtcctacttacgaccagaactacttgagtggttcaagcagcgtgtcgaagatgaccagtctcgatcaggtcgcaaaatctacgtcaaacgggacttaccccacatccttacaccatttagagcacctctggcttcggtctgtgctaagcgtaaaggccaggttctacatcagcagtactcgcttaagaaataccgctacaagtacatcgcggataacgtctgccaatggttggatgaggtatttctccgaccaaaagaaatgtctgatattcataaactgacactcattgaaaagcgagaacgactaaagaattcagtcttcaaatcgctcaatgacgtcagcgaattcttgggtcgagtgttgttgcatgcaacgatccggcagcaccaccaaagccagcctatcccttgcatgctatacgtggaaaaagcaggggccgaaaaaattcttgaaaacgtgcatatcgttcgccgcgatccagaaggcgatcagctttggattggcttcagcgagttggtgactgatattgacattgccgtcagactgccggagttacgggatcggttgtacgaggacatttcggattgcatcgacacagcacgcagaaagatcctcgacattaaagacgataattacctgcttcgccacgacattgacgaaattcttgatggcagccaacctttcgatgctcacctcgatcgtttcacgtttgttctgttcgtgggctacgactccaggctgctaactgagcctgaaacgccggggttcgagggtgacctggagaaggaaacgacggcgctattcgaaaaattcgcggctgaccttatcgaggattcgccgtttgcgaatctttgcatccacgtattcatttatccagccccgagtcttgagcggttaacccaattagttgatgagaaggtgagagaggtcgtatga

SEQ ID NO: 58637 - DNA, 2190 bp, Enterobacter cloacae
atgacagagatctatgaacaggcgaaacatagcctgcagggtgaggacttctcatcgttcaattatctgtttgcggttaacaagctgttgtctaaccctgtttcgtatgacttgggacgggacttgatcgtgcgagctctcgattcgcgcgagcggttttccgagcacaccacaattttgaaaaatatggtgagaaaatcaggtttgttcccgtatctcaaaaaggagttcaccagcctgacacctgatgacctgagggtgcttgagctataccggacgccattctcggatggttatgttttccactcaatgcagttccacatatttgatctgcttaagtccggtcaaaacgtggttctgagcgcacctacaagcatgggcaaaagcgcaatcgtcgattctttgctcggcatgggaacgttgaagcggctcgttctggttgttccgactgtggctcttgccgacgaaacccgtcgccgactacaagagcgattcggtgaccgatatcagatcatccaccacagttcccaagtgtgccattccgatcaggctgtctacgtgttaacgcaggagcgagtgaacgagcgtgacgacatcgtcgatattgacctcttcgtcattgacgagttttacaagttggcgttccggcaactgaaaagcggggacattgatcatcaagacgaacgagtcatcgagctcaacattgctttgagcaaactgctcaaggtctccaggcagttttacctgactggaccgttcgttaacagcattcgcggtctcgaaagacttggatatccgcatactttcgtttctaccgacttcaatacagtcgcgctagatgttaagacgttcggcatcaaagcgaacgacgacaaagccaagctcaacgcgctaggagaaatcgcgcacgtatgcgtcgacgcaacgatcatttattgcaagtcaccaactgttgcgggccaggtggcgcgcgagctgatcaggctgggccatggcactccgactgagagtcctcatgtcgactgggtcagcgaagagttcgatgccgactgggattacacagtcgcacttagaaacggtattggcttgcattttggcgcgctaccgagggcattgcagcaatacaccgccgaccaattcaatgctggaaaactgcgctttttactttgcacctccacgatcattgaaggagtcaatactatcgctaagaacgtcgtgatctacgacaaccgcgatggaactcgcagcattgacaaattcacccatggcaacatcaaagggcgcgccgggcgcatgggcgttcacttcgtcggcaaaatcttttgcctggaggaaatcccggaagacaacctcaatcaagaggtggatattccgctcggtattcaggacattgataccccaatcaacctcttggccagcgttcaaccagaccacttgtccgagttttcacaggatcgctttgatgaggttttcataaacgaccatgtttccatcgaccttgtgaagaagcattcgtacttccgtgtcgagcagttcgaaatgctgcaaagcatgttcgagatgatggacgacagcgaattttcctcgttggttttccactggacccccgcgacaaacttcctcaagacctttgcaaagatcattgccagactggttccccatactttcagtcgcaatggggtccctgttaagcctacggatgtgatgatcgccaaacttgccggctatttaagcgctgaaagttattcggaatatctgaagaatcaaatcgtttacgcacgacaacgggtctctgaaggggaaaagcgcactctttccgacgcacttaataatgatctgaaactcataaccaatactttcggttacacgttacctaaagtgctcagcttgatggaggatgttgtaaaatatcacgcgttgaagagaggtattcgcagcaaagtcgattacacgcatgtcaaaatgacgttcgagaattttcatcttccgccaggtgtaagtgccttggaggagattggcattcccattcagacgttacaccggctggtagatttgctggaattttccgaccaagctgatgtggatgggttgtgccagtatcttcgggatactcaggacgtttggagccaaacgattgggttcgtggatcagacgttcataaggcgcgcgctcggtattgaacaacattga

SEQ ID NO: 58638 - DNA, 918 bp, Enterobacter cloacae
atggattttgatattcttattgatcaaagcctttcatctttcgttaccggaggcgggccaagccaaatatcaaataacagtctcctctctattattaatgatttcgaagatggaagttggagatatcaaaaatttcacagattcatctgggataatattttacaaacagctctttcaaaccaagaaagagaagccttaattgatggcccattcacctcacttgctcttgcatcaaaaaaccttagacttactgatagcgaacaagacataagtaaaggaagcgaacttgcggaaatatttttgtatgggataatgcgacaccacttcaatgcattacctgtcgtacctaaaatattctataaacaaaacagccaagataatgcaaaaggtgctgatagtgtacatgttgtcattgtagataataataatttctcattatggtttggtgaagccaaattctacaacagtatcgaagatggtcgtttcgacactataataacctctgtaaaaaattcaattacaacagaaaaactaagaaaagagaacagtataatattaaatacccaagatctatatgaattagtacaagatgaaaaattaaaacttaaaatatcggacacattatcttctaataattcaatggataatattaaacctttactcaatataccaattttcattttgcatgagtgtcctataacagaaaactcacacagtttatctgaaagttataaatcctccataactgaaatgcataaagagcgagctcaagctttttttaaaaaacatcaagaaaagattaaagatatttatgactatgataaaattaaatttcatttaatactgttccctgtaccaaaaaaagaaataataattgataaatttgtaagtactgtacgatatcataaggagcaataa

SEQ ID NO: 58639 - DNA, 2160 bp, Enterobacter cloacae
atggataatgaattcaataaagattgcaatggagagtatcatgcagaacctacactacaggatgaatacatcttctcgcactgccaaagtataaacattctaattgagcaaagaaattataatgaggctagaaacaacctcatttcattattagactatcataaaaaaaataaccttcactacaatcctcttgtgaaccatcttattagagcattagggttatatccatatcttcaaacagacacctctgaatggcatgatagattggtctatgacctatttaaagttgatgtaggattagctaaccctataacactacatcgagagcaatcattaattttaaaaaggctattgagcggagaaaacctagcaattagtgccccaactagcttcgggaaaagctttattattgacgctttcatatcactaaaaaaacctaataatgtattaataattgtaccaacgatatccctcactgatgaaactcgtagaagattacataggaaattctcctcacaatataaaataatcactactgcagatgttgacctctccgaaaaaaacatctttgtatttcctcaagaaagggctataagctatcttgaaaaaattgaacatttagatcttttcattattgatgaattttataaagccagtgagaaacatgatagagacagagcaccggccttaataaaggcaataatgaaatttactaaaattgcaaagcaacgttattatttagcaccaaacattagtgagatcacaaataacccgtttactaaaggaatggagtttgtaaaaatagattttaatactgtttttttggaaaagtatgatctttccaaagaaataaaagaagatgacactaaaaaatctaaagcactgttagagatcctttcaaatactgacgggaagactttaatatatgcaggtacatataaaaacattgaaaaaatatcaaaccttattttaaaaactgaattctctcatgaaccgtatcttttgaaagaattttcaaattggttaaagattaattattctcaaaattggaaacttgccaaactaattgagaaaggaatgggtatacataatggacgattgcaccgttctatcagtcagttacaaatcaaactcttcgaggaaaagcacggaatcaaaaacattgtttcgacgtcctccattgtggagggagtaaatacatcagctgaaaatgttgtaatttggcaatgtaaaaatggaagtagtaaccttaaagattttacatacaagaatatcattggccgaagtgggcggatgttcaaacattttattggtaaagtgtatttactatcagcacctcctcaagaggaatacaacgaattggatttaaccattcctgagtctcttgtgggtggaattgacgagattgagtataaaaatgatttaacgccggagcaaatttccgctatcattgcgtacaaggaagaaatgagatctattttagggcatgatacctttaataaactgttaaatgaaggagctttcaaatctagtgattacttactaataagagatatagccattgatatagcaagcaaaccaaatgaatgggcaaatattgcataccttaattcaaataaccccgatgaatgggactactacttatataaaataattaatctacaacctgccggatggggtggtagatactctaaattcgtttcatatattaaggtcgcaagtttaaactggaaatatacaatcccacaaattttagatactctatctaatgacggaataacaatcgatgatttctttgaattcgagaaaaatctaacatttaagttaacctcacttttaaatgatgttaacgttttactatctgaattactgcctaataaaaaaacagacatatcgccatttatatttaaaacatcaaacgcgtttcttcccccaattgtttatcagttagaagaatatggtctacttcgcatgcttacaaaaaaaatatcgattacttacaaaataaacttcgaaagcgaatctttaactttgcataatattattgatcatttaaagggcatagaatcaattatagggttgtcaacgtcaatggatgcaagccctatggaggagtatatcttgaataatttccttgaaggtgtgacatataaccgataa

SEQ ID NO: 58640 - DNA, 918 bp, Enterobacter cloacae; identical to SEQ ID NO: 58614

SEQ ID NO: 58641 - DNA, 2145 bp, Enterobacter cloacae; identical to SEQ ID NO: 58615

SEQ ID NO: 58642 - DNA, 1620 bp, Enterobacter cloacae; identical to SEQ ID NO: 58626

SEQ ID NO: 58643 - DNA, 2145 bp, Enterobacter cloacae; identical to SEQ ID NO: 58627

SEQ ID NO: 58644 - DNA, 948 bp, Enterobacter cloacae; identical to SEQ ID NO: 58608

SEQ ID NO: 58645 - DNA, 2658 bp, Enterobacter cloacae; identical to SEQ ID NO: 58609

SEQ ID NO: 58646 - DNA, 1617 bp, Enterobacter cloacae
atggagtcgaacgattcaggcggagtagccgccaagcacggtttcttatttcaggactgcgtagccgcttaccatgtcacccgaatgcttcgtgacaagactatccgcagtgtgcgctgcgaggtcacagacgatatcgacattgtatctgatggatacatcgacttcgttcaggtaaaaagcaccggcaaaacacgttggaacatttcggacatcgttcagaattcaaaaggtgctgataaaaagacgatcccctgcagttcaattttgcacaaatcaatgcagtgtgagtctgacccggcccttggacggaggtactccatcgtaacagaggaaaaggtcaacaaaacccttgagtacttgacgatcagcccaaacgctcgactagataagccaggcagacaggaactcatcgacgatctcaataaacgtacaaacaattatttaacagactcaggtataagcgtttcagattggatcgatgcggctatatgggaagtgtttccatcccttcgagaaatagagcttttggggatcaagaatatacggctggcctcccaagatttgcatggggttattctcagctctgaaattatcgctgaagacatttggtgccgcatccttgataccgtgacgcgcaagggggagcattctcgacgcattcacagtgttgatgacaagtcctacttacgaccagacctacttaagtggttcaagcagcgtgtcgaagatgaccaatctcggtcaggccgcaaaatctacgtcaaacgggacttaccccacatccttacgccatttagagcgcctatggcttcggtctgcgctaagcgtaaaggcctggttctacatcagcagtactcacttaagaaataccgctacaagcacatcgcggaaaacgtctgccaatggttggatgaggtttttctccgaccaaaagaaatgtctgatattcataaactgacattcattgaaaagcgagaacggctaaaggattctgtcttcaaatcgctccatgacgtcagcgaatttttgggtcgagtactgttgcacgcaacgatccggcagcaccacgaaagccagcctattccttgcatgctatacgtggaaaaagcaggggccgaaaaaattcttgaaaacgtgcatatcgttcgccgcgatccagaaggtgatcagctttggattggcttcagcgagttggttactgatattgacattgccgtcagattgccggagatacgggatcggttgtacgaggacatttcggattgcatcgataccgcgcgcaaaaagatcctcgacattaaagacgataactacctgcttcgccacgacattgacgaaattcttgatggcagccaacctttcgatgctcacctcgatcgtttcacgtttgttctgttcgtgggctacgactctaacctactaaccgagcctgaaacgccggggttcgaggatgacctggagaaggaaacgacgatgctgttcgaaaaattcgcggctgacctcatcgaggattcgccgttcgcgaatctttgcatccacgtgttcatttatccagctccgagtcttgagcggttaacccaattggttgatgagaaggtgagagaggttgtatga

SEQ ID NO: 58647 - DNA, 2190 bp, Enterobacter cloacae
atgacagagctctatgaacaggcgaaaaatagtctgcagggtgaggacttctcatctttcaattacctgtttgcgattaacaagctgttgtccaatcctgtttcgtatgacttgggacgggatttgatcgtacgtgctctcgattcgcgcgagcgattttccgagcacaccacaattttgaaaaatatggtgagaaaatcaggtttgttcccgtaccttaaaaaagagttcactggcctgacaccggacgacctgagggtacttgatctataccggacgccattctcggatggttacgttttccactcaatgcagttccatatattcgatctgctcaagtccggtcaaaacgtggtactgagcgcgcctacaagcatgggcaaaagtgcaatcgtcgattcgttgctcggcatgggaacgttgaagcggctcgttctggttgttccgaccgtggctcttgccgacgaaacccgtcgccgactgcaagagcgattcggtgaccgatatcagattatccaccacagttcccaagtgtgcaattccgatcaggccgtctacgtgttaacgcaggagcgagtgaacgagcgtgacgacatcatcgacattgacctcttcgtcattgacgagttttacaagttggcgttccggcaactcaaaagcgggaaagttgatcatcaagacgagcgagttatcgagcttaacattgcgttgagcaaactgctcaaggtctccaggcagttttatctgactggaccattcgttaacagcattcgcggtctcgaaagacttgggtatccgcatacttttgtttccaccgacttcaacacggtggcactagatgttcagacgttcggcatcaaagcgagtgacgacgaagccaagctcaaagcgctggcgaaaatcgcgcacgcgtgcgtcggtgcaacaatcatctattgtaagtcaccaactgttgccggtcgagtggctcgcgagctgatcaggctcgggcatggcactctgactgagagtcctcatattgactgggtcagccaagagttcgatgccgactgggattacacggtggcactcagaaacggtatcggcttgcattttggcgcgctgccgagagcgctgcagcaatacaccgctgaccaattcaatgcaggaaaactgcgcttcttactttgtacctcaacgatcattgaaggcgtcaacactatcgccaaaaacgtcgtgatctacgataaccgcgatggacctcgcagcattgacaaattcacccatgggaacatcaaagggcgcgccgggcgcatgggcgttcacttcgtcggcaaaatcttttgcctagaggaaatcccggaagacagcctcaatcaagaggtggaaattccgcttggtattcaagatattgataccccaattagcctcttggccagcgttcaaccagaccacttgtccgagttttcacaggatcgctttgatgaagtcttcataaacgagcgtgtttctatcgaacttgtgaaaaagcactcatacttccgtgtcgagcaactcgaagtgctgcaaagcatgttcgagatgatggacgacaccgaatttgcctcgctggtgtttcactggactcctgcaacaaacttcctcaagacctttgcaaagataattgccagactggttccctctacgttcagtcgcaatggagtccctgttaatcctactgatgtcatggtcgccaaacttgcctgttattcaaacgctgcaagctattcggaatatctgaaaaaccagattgatcgcgcacggcagtgggtgtctgaagaggaaaaacgctctctttccatcgccattaacaatgatttgaagctcatcaccaatactttcggttacaccctacctaaggtgctcagcttaatggaggatgtagtcaaataccatgcattgaagcgaggtatccgcagcaaagtcgattacacgcatgtcaaaatgacgttcgagaattttcatcttccgccaggtgtaagtgccttggaggagattggcattcccattcagacgttacaccggcttgtagatttgctggaattttccgaccaagctgatgtggatgggttgtgccagtatcttcgggatactcaggacgtttggagtcgaacgattgggtttgtggatcagacgttcatcaggcgcgcgctcggtattgaacaacattga

SEQ ID NO: 58648 - DNA, 948 bp, Enterobacter cloacae; identical to SEQ ID NO: 58608

SEQ ID NO: 58649 - DNA, 1968 bp, Enterobacter cloacae
atggctaaaagtactgctacaacagcattaaatcatcaagactttacaagcgtttttaatttattgattgagcatttgtttttgaaaaatagaggtaaggaagaaaaatataaaatatctgatgaaatgattaggagagcaacttggcttgcatcacttggatcatcaggcaacgaaaccgataaaaatattgcaagtgcattcggtacattgctctatttatacgacacaagtaatgatctatatctcaaagcttgttatattctgcaatctagggctggtaatatagtctctgctaagcatttagaaggtctttttagtcaagggaatattattaaacactttagttcatcattggattttgaactcacaagtcaaaagtttcttcttgaaaaaagagtttctgacaataattatatttattttactcattttcaaagaagtctgtgggacaaactagaacgcggtgaaaacgttgctgtatctgcaccaacatcggccggtaaatcatttgtaattaaaaggtatatttacgatagtgttatatctgcaaatgatggttacttcgtttacgttgtaccctcaaaggcgctgataaaccaagtcggcaatgaaatgtctagagagttaaaagacatagctacagtgatgacaacctataaggattcagaaaatgatgatttaaaaatagtatatgttctcacgcctgaaagatgtatgcgattgttaaatgagaatggtaaaaaagcacctaaaatagttttttttgatgaaatacaaaatttagaggataaaagtaggggtaatgtttttgagaacgttatctatagaatgacaagcttatggcagtcaactcaatttattatggctggcccatacataataaatttacatcattcactcaataaaattattgaccttaatctagttgagcaaacaacttctacaaccccggttttgcagttaaaagttgtgcttacagtacataaaaataagaaaaccgttaattataaattaataagcccggttggggatgcggtgttaggtgagtacgatataggtaaggcattgtatagtaaattatcttcatcaaagggtgcagcattaaagcatatcacttctattctagattctgatgaacaaaatataatatacgcacctaagaagaatttggctgagggatgggcgctggcaattgctcaaactaacaatgaagattcggagctagatgaagataatactgatttagtgtatgattcaagaatagatagtttgtgttcatttttagaaaatgagatacatcctctgtattctcttgttagatgccttaagaaaggggttgcatttcatcatggtggcttattggatgtggcaaggctcgaggtagaggatcttttcgctgatggtgcgattaggaatttggtgtgcacctcaactttactacagggcgtaaatcttcctgctgatagaatgattgtaatatccccaaagattggtgactatgagttatctcattttgattttttaaatcttattggccgtgcaggtaggattagtacatctttatatggtgagattttttgcattcagcttgttgatgaagagtgggctgaagataagattgagtcggatgaaacaaaggagatacaatcttcagttttaagaaagctcaatgaatatggtgagtcagttgtaagttacattgatgtctacactaaagatattgttgatactcaaggagagcttcatgctgtcaatcttgcctcctatctgcgaggccagtttttagtagatagagagcattatgagaaaataataagcaactccaatcttactcttaatcaaattagagtgatgacgaatagattggaagcgttggaagatattttaaatgtaccgaaggatataatatataaaaatcctttcatcgatcccctcttgattgatcagctttatttttttggttga

SEQ ID NO: 58650 - DNA, 936 bp, Erwinia amylovora Ea644
atgacaccgtttaactcccaacaagtcatagaagaaagaataaaacaatctactttatgtagttatctcgtagggtttgatattaatgacagtggttcttcattttatcgaatagatcccttggtaatgaaaatactttcagccttacatgagtttgcttatgggtttcatgaaggtagcaatactgacaatactgacacattgaacaaaattatagatgctgcaaggtcagtttataaaattgatgagtatcaaaaggtaaaggatatatatcttaattctggctctatagatgatgatattgcagataaatatctaaaaaggggagagtttggggagttgattcttcatctaatattacgagactttcataatactattccactgctatctaaaatttattttaaagattcgattgggcatacagttcatggatttgatgcagtacatatcgatccagtgagtaagacattatggttaggtgaatctaagttatacttagatcctaaaaaaggaatttctgatttaataaatgacgttgaagagcattttaaaacggactatttaaatgcagaattcactttaatttctaagaaagtaaggcattcaacagaaacaccattattggaatattggttagatgtgctttcctctggtggaaaactgtccgataagctgaacaaaataaatatcccacttctgtgtacttatagttgcgaaacttttacaaagtttggtgatgaaaataccattgatttctgcgagtattatgaagaaaaaataaattctttaaaaaaatactttgatactaaatacaatcattccttaaagagtcatcttaatattattcttttgcttttccctgtgagcaataaaacagaactagtaaaaaaattacatcaaaaattgtctttaattcagcaactcggtgggtaa

SEQ ID NO: 58651 - DNA, 2193 bp, Erwinia amylovora Ea644
atgaataaccacaatgatgaagctcatggagtagatgaacttttcgaatgcacttttgaagagtataaaagatgttctcatttgatacattctaatgaggagataggaagggatcgtattatacaactgcttgaaaataggaaagattattcatctaagttggattttattttagcagatttagtcgaggctgtaggcttttatccctatttagaaaaagaaaatttaaatacatcttccactgcgcaacaaataagaattgaatccagtagatcaacaaaccttgggaataagttatttcatgaagaacagaaatatttgttagaacttatcgattctgataagaatgttattgcaagtgccccaactagctttggtaaaagtttattaatcgaagaaatagtttcctcgctaaaatataaaaacatactcataatacagcctagcttagctcttttagatgaaacaaggaaaaaactttcaaaatatctaaatagctacaaacttatagttcgtactagtcaggaatttgttaaagaaaataaagggaatattttccttttaacttccgaacgcgttaatgaataccacaacctcccaaaaatcgattttctcgtcattgatgaattctataagtttagttctaaaagagatgatgaaagacatcaatcattaaataatgcatttatcaaaatatttaaatcttctaaaccaaaattctattttctgggacccaacattgatggcatcacgcctggtttttccgaaaagtataatgctttattttataaaagtaattacactttggtgaggtgcaataacttcaatatatatgaaaatttcaatggattgtttggtaaattaggaaataaagcaaaattcaaagaaagaatcttgtttgaattgattttaaaaaggcagactgaacaaactattgtatattgctcctccccaaataaagccagaaatttatcaaaaaaactcactagttatttattgtctaaaagtgaatttaaattaaacgagtgtcattttcatttaacggaatggattgaaaagttcatttcgccagaatggtcattaataaaatctttaaatgtaggggtagcttttcatgatggtgctctcccgaggcatattacttcgtccctaattgattattttaattccggtttgattaaagttttattttgcacaactacaataattgaaggtgttaatacaagtgctaaaaatatcatctattttgatgaaacaaaaggtgatgtagatatcgactactttgattattcaaatattagagggcgagccgggaggttaatgcagcactattcggggaatatttttaactttaatccccctcctgttagggaggaaatttacattgatattcctttctttgaacaaaacccgttgcacgaagaaatattgattaacctagatgataaggatatcaaaaacaaagacacagaagagtataagtttataaactccctccatccagatgaaattgccttactatccaaaaatgcgataaacatccgagggcagaaaaaccttttagagcatctcttcaaatttattgtggtagattattcgatgctcaattggacttctactcctcaatataagcaattactgtactgcatggatttatgttggacatttttattaaaagatcatgagaaacccaaaattatgtctgctagtcgattgactaaagtaacgtatgattatggtttctctcaaaacattaatacactagtacaaagcagttatgaatacaaggtaaatctgttaaaaactattactgccgagaaaaaaaacaaggctctagatgatgcaatcagagattctttctatattttaagacattggtttcagtacaaaatacctaaattattattggttttaaatgaattgcaaagctatgtgtgcagatttttagaacttgaacctggcaactatcttttttactcatcattaatagagaatgatttcattccaactcatttaaatatacttattgaatatggaattccaaagtctgcaattcaaaagatatcaaagtacatacctaaggatttttcagaggagaaggtaatagattttataattaaaagaaaactttatgaaaatggaaatttgataccgtatgaaaaagaaattctattgaaaaacctgaaaaattaa

SEQ ID NO: 58652 - DNA, 726 bp, Pectobacterium carotovorum subsp. carotovorum PCC21
atgtacattcaaataggaggcttgaggaatttaaggagagctatccttcttacagccataaaccttttttttgaagcaatacaaaaatttcgcaattacacgtcaaacgaaggtgagttgggtgaactgcttttatatgcctttcttgaagcaggactaaatgctccgaaattactttctaaaatgcaattgaaaacagattctaatgattatattaagggttctgatggtgtacatctattagaattagatgatggttatcaattaatatttggcgaatcaaaaatttatgcggaccttttagaaggtgctcgagaagcgtttgattcgattttagattttaaaagtaatggaatggcatttgaaagagggctgatagatacacatgttataaatgaaatggtctcagaggaatgttatgagaaaataaaaaaaattcttcttccttctggcgatgatgggcctgatcttgatttatccttcggtatattccttggttttgaattgaaaatagatagctcgcagttatcaatgaaaaacaaagagtttagagagtgggttaatgactctgtgaaacaacatgctactcgcgtggtcaatacgatacaaagaaaaatcattaatcataaattatatggccatgagttccatatatatatagttccttttaccgatattgatgttacacgtaaaaaattaattcacgaaatgctaacaattaagtga

SEQ ID NO: 58653 - DNA, 2580 bp, Pectobacterium carotovorum subsp. carotovorum PCC21
atgaatgaattaaatttaagtaaaaaaattcatttggcagctcgccttgccgaggatgcttttgaaagtgatttttttaaagaaacctataaatttataagtggtttatacgataacagtttatttaactgcaattcggatgtaactctctccgagagtgataacaataaaatagcatatgctttgcgttatgcggatatattatcacattctttgaaggaaaatcataggtcatgtgcatttgagatcataagtagaatagctttattaaaaacacatgatccttattttaaatttataggttctgctgtaattaaccggcttggagtttatgctgcagaaaaactaatatcaaaaggggtcaagctacccttagacagggaagttgatgctattataaaaaaagaagttcagaaaacagatgaggatggagtatattttacagataaacaatatgagttgtataaactcttaaaaagtagtaagacaataagtttttctggtcctacttcgatgggtaaatcatttgttattaatgcatatattaaagaaataatcctgaaggaagaacttaaaaatatagcgttaattgttccaactcgtgcattaataagccagaatgcattgaagttaaaaattgatcttgcattgtacaaggatgaggttccttacaaaattgttactacatcctatatgattaatagtgatgaacgtaagagtaaaggttatatttttatacttaccccagaaagactggttagtctcataagcactattcctagtctaatgattgattatctttttgtagatgaagctcagaaattaacaacaaaaaatgattcgagaagtcttgtgacttattcggctatagagcaaacaattagtaaaaaccctgaggcaaggctattcttctcttcacctaatttatctaatcctgaaatatttaatgtcctatttgatagggaagatgcaagggtatatagaaatactgagggtgcgactgctcaaaatatgtatttcattgatttatttaatgacagttttaactatgttaataccgaggggatgaaacttgaaaaaatagatgacatttccaaaaaatacaaaaatgcaaatgatattatctataaattaaataatggtaaaagtaaaataatttattgtggaggtatcgatagtactcttgagagaactcgtagctttattaattatcttaaaattaataagaaaaaatccaatcccttaaatttagaaatatcttctgagataagaaactttgttcatgataactatgaacttgcagaagcaatcagctatggtgttgcttttcactttgggaacttgccgcaatccattcgagatttaatcgagcaccatttcaagataggaaatattaattatctattttgtacatcaaccctacttgagggggttaatttgcctgcaagatcagtatttattcttacgcataaaaaaggctccagccctttagattcggttgatttttggaatctggctggtagagctgggcgattatctatggaattgtcaggagatattttttgtattagggatgataataaattctggaataaaaaagctgttgataatattcttttgtctgataaaaataatatttcactaaaaccaagtttctatattgaagacgaaaaaatattaaatgatttacatcggataattgctactggtaaaatgggtgatattaagaatgctgaattccttagaactttaggcgatatgataagaatagaaactatgagagattctaaagaacctcctctcattagctatttccaacgtagtgggaaatcagaaattttgttaagtgcaggaaaaagcactaaaaatattacaataccaatgaatatgcttttagcaaatagccacattgcaattgattcgcagcatcatgctttcaaaaaaataaaagatctttctattagtgaactgaaattatcatggcagcctacatacgaagaaattaaagaaaaattaaatttgatattcgatatctatcaagttgataagtttgctacaggcagagatcgcctttattctaattcaatacgatactatgcagtattactttttcaatggattcgcggtaatagcctacaggaaattatttcgggggcgattgcttataaaaagaacaaaaatatatacgttaaaaatgtacctgttcttttcgacagcgaaaatccagctcatttaactgcattagttaatgaaactataaaagacattgagttacgtgtaggttatcagttgcaaaattatatttcacattactgtcagcttctgagtcatgtcttgcaaggaaatccaggggcaaactggtctcagttcattgagtttggttcaaatgagccagtagtctggcatctacaaatgatgggtttttcaagggatagtgctgtttttctcaaaaggaatttttcaaaataccttaaaattgataatgaactgaataaacttgtcatattggataaggagatgatcaagcgttcattcaaaaaagatggacttcattacttagaaatccaatcgttattataa

SEQ ID NO: 58654 - DNA, 1617 bp, Pectobacterium carotovorum subsp. brasiliense
atggagtcgaacgattcaggcggagtagccgccaagcacggtttcttatttcaggactgcgtagccgcttatcatgtcacccgaatgcttcgtgacaagactatccgcagtgttcgctgcgaggtcacagatgatatcgatattgtatctgatgggtacatcgatttcgttcaggtaaaaagtactgacaagtcacgttggaacatttcgcatatcgttcagaattctaaaggtgctggtaaaaagacgattccatatagctcaattttgcacaaatcgatgcagtgtgaatcagacgtgacatttagccgtaggtactcaatcgtcacagaggaaaaggtcaacaaaaccctagaatacttattaatcagtccaaacgcccggctaggtaagccaggcagacaggaactcatcgacgatctcaagaaacgcacaggtaattaccaaacagcctcaggtataagcgtttcagattggatcgatgcggctacatgggaagtgttttcatccctgcgagaactggagctcttggggatcaaaaacatacggcttgcctcccaagatctgcatggggtcattctcagttccgaaatcatcgccgaagacatttggtgccgcatccttgataccgtgacgcgcaagggcgagcattctcggcgcattcacagtgctgatgacaagtcctacttacgttcagacctacttgagtggttcaagctgcgtgtcgaagatgaccaatctcggtcaggccgcaaaatctacgtcaaacgggacttaccccacatccttacaccattcagagcgcctatggcttcagtctgcgctaaacgtaaaggccaggttctacatcagcagtactcgcttaagcaataccgctacaagcacatcgcggataacgtctgccaatggttggatgaggtctttctccgaccaaaagaaatgtctgatattcataaactgacattcattgaaaagcgagaacgactaaagaattccgtcttcaaatcgcttcatgacgtcagcgaattcttgggtcgagtgttgttgcatgcaacgatcaggcagtaccacgaaagccagcctatcccttgcatgctatacgtggaaaaagctggggccgaaaaaattcttgaaaacgtgcatatcgttcgccgcgatccagaaggtgatcagctttggattggcttcagcgagttggtgactgatattgacatttccgtcagattgccggagatacgggatcggttgtacgaggacatttcggattgcatagatacagcacgcagaaagatactcgacattaaagacgataactatctgcttcgccacgacattgacgaaattcttgatggcagccaacctttcgatgctcacctcgatcgtttcacgtttgttctgttcgtcggctacgactcgaatctgctaaccgatcctgaaacgccggggttcgaggatgacctagagaaggaaacgacggtgctgttcgaaaaattcgcggctgacctcatcgaggattcgccgttcgcgaatctttgcatccacgtgttcatttatccagctccgagtcttgagcggttaacccaattggttgatgagaaagtgagagaagtcgtatga

SEQ ID NO: 58655 - DNA, 2190 bp, Pectobacterium carotovorum subsp. brasiliense
atgacagaggtctatgaacaggcgaaatatagcctgcagggtgaggacttctcatctttcaattacctgcttgcggttaacaagctgttgtccaatcctgtttcgtatgacttgggacgggacttgatcgtacgagctctcgattcgcgcgagcggttttccgagcacaccacaattttgaaaaatatggtgagaaaatcaggcttgttcccgtatctcaaaaaagagttcactggcctgacaccggacgacttgagggtacttgatctataccggacgccattctcggatgattacgtttttcactcaatgcagttccacatattcgatctgctcaagtccggccaaaacgtagtgctgagcgcgcctacaagcatgggcaaaagcgcaatcgtcgattcgttgctcggcatgggaactttgaagcggctcgttctggttgttccgaccgtggcacttgccgacgaaacccgtcgtcgactgcaagagcgattcggtgaccgatatcagatcatccaccacagttcccaagcatgccattccgatcaagctgtctacgtgttaacgcaggagcgagtgaacgagcgtgacgacatcgtcgatattgatctcttcgtcattgacgagttttacaagttggcgttccggcaactgaaaagcggggatattgatcatcaagatgaacgagtcatcgagctcaacattgcgttgagcaaactgcttaaggtctccaggcagttttacctgactggaccgttcgttaacagtattctcggtctcgaaagacttggttatccgcatactttcgtttccaccgacttcaatacggtcgcgctcgatgttcagacgttcggcatcaaagcgaatgacgaaaaagccaagctcaacgcgctggcgaagatcgcgcacgcatgcgtcggtgcaacgatcatctattgcaagtcaccaactgttgccggtcgggtggctcgcgagctgattcggctcgggcatggcactctgactgagagtcctcatgttgactgggttagcgaagaatttgatgccgactgggattacacggtggcactcagaaacggtatcggcttacattttggcgcgctgccgagagcgctgcagcaatacaccgcagaccaattcaatgcaggaaaactgcgcttcttactttgtacctcaacgatcattgaaggcgtcaacactatcgccaaaaacgtcgtgatctatgataaccgcgatgggcctcgcagcattgacaaattcacccatgggaacatcaaggggcgcgccgggcgcatgggcgttcacttcgtcggcaaaatcttttgcctggaggaaatcccggaagacaacctcaatcaagaggtagagattccacttggtattcaagatattgataccccaattaacctcttggccagcgttcaaccagaccacttgtccgagttttcacaggatcgctttgatgaagttttcataaacgagcgtgtttctatcgaccttgtgaaacagcactcatacttccgtgtcgagcagctcgaagtgctgcaaagcatgttcgagatgatggatgacaccgaattcgcctcgctggtgtttcactggactcctgcaacaaacttcctcaagacctttgcaaagataattgccagactggttccctctacgttcagtcgcaatggagtccctgttaatcctactgatgtgatggttgccaaacttgccagttattcaaacgctgcaagctattcggaatatctgaaaagccagattgatcgcgcacggcagtgggtgtctgaagaggagaagcgctctctttcccgcgccattaacaatgatttgaagctcatcaccaatactttcggttacaccctacctaaggtgctcagcttaatggaggatgtagtcaaataccatgcattgaagagaggtatcctcagcaaagtcgattacacgcatgtcaaaatgacgttcgagaacttccatctaccgccaggtttaagtgccttggaggagattggcattcccattcagacgttacaccggctggtagacttgctggaattttccgaacaggctgatgtggatgagttgtgccagtatcttcgggatactcaggacgtttggagtcgatcgattgggtacgtggatcagtcgttcatcaggcgcgcgctcggcattgaacaacattga

SEQ ID NO: 58656 - DNA, 927 bp, Pectobacterium carotovorum subsp. brasiliense
atgacgatcataaatgaggtaaataaatatgtgtctgtcaacaagcaggattttgatgcttgtattgacgtggttgagcagtcattttgtatcaaatcgctctgtgcccaggtccgatttcatcatttaaaatttgacggtaatgggcgaccaatggtaaagactttagctgagaaactttatgaatatataatcgattactgtttttcaatgcaagatagagttgaacctctttctcctcaacagtggcttgctctggccaaacaagcgcgttcattatttaggcatcccaaggttacagataattctcctgataaaacaggcgaggcaggagaaactttattgtttttccttatggaagcaataattggtgctccacagttagttgcaaaaatggagctcaaaactaactctaatgatgaagtaaaaggttcagacggaatacacataaaatggaatgaaaaagataaacttgttgatttttattttggtgagtcaaagctgtatcagagaatatcatctgccatggattctgccctaaaaagcattgatgattttcatacaaatgaaatgtataaacatgaatttattatggcgactaaacattataaatatgcaaaagatgaagttagagaagcagtgaggaatctgtttatttctggggagccaggttcagatgtccgtgtaaatcatgcatgtttaattggttttgactggaacgggtttgataaatttgattatagttcctcaatccccataaatgaacaattccttaccgagttaactaatacaatgccgcaatgggttgatttattagatgagaaattcagtgagtttaatcggaagtatttaaggtttgatgttttctttattccattcccttcagtggttgatttcaggaatgaatttaataaggctctggattga

SEQ ID NO: 58657 - DNA, 2523 bp, Pectobacterium carotovorum subsp. brasiliense
ataaatgagttatactccaggcttgttaaggtcagtattaataagatgtttggagtggaaagtgattttaatattagccttagtgatatttatcagctgttatcatatagttctatattatctttgtcagacattgagtctgatgttaaaaaggcatacgatattgttagtcggattttagaggtaggtgccgagtataatgaaaatataatttcagcttgtgatctaattctatctaggattggtaatttcccaggtagagggctattaagagataagtataataaaggtgagtctccaacactaaacttatcactttctttagagcgtatagggcgtgagacagaaaacacatataatgatataactttaacaaattttcagtgtaaattacttaattcactaaagaataataattaccttagcgtttctgccccaacgtctgcagggaaatcttttgttctttcattagcggtgattgataaaattaaagcttatgaaaaagaatgcattgtttacgtagtaccgaccagagctttaattagtgaagtgtcaaataagttccgccatgaatgcaaacaagcaggtcttagtaaggttattataagaacagcccctgaaacaatagagactaatagcatagagcaaggcttgatatatgtgctaacacaagaaaggcttgtcagcttactttcaaactcttatgggaatagccattttcatatagatacattacttatagatgaagctcatgaaattcaaaaggggaaaagaggtatagttctacaaaatgctgttgaattagctcttgaaaaacatccttatatgcaggttatgttctctagtcctttaataagtaatccagagtattttttctctatattcaggtggcgaaaagatggtaaggcttttattgaaactatatcacctgtaactcagaatattttgcttattaatcaagtaagaaataacactaaggctattagtgtaaaattgaatgctgaagataagcctattgatcttgggatttatgaactggattttgtgttacgtgacaatcgtaaaattcagaaagcaaaacttgctgagtttatatctcgttctggtggggctgtaattgtatttgaagatacaccatccaacgcagaaggtgtcgctataaatattgcagagatttttggtgaagtgtctttgcaaaatgacttcgaagaattcatatcttctattgaagaagaaatgcatgaacaatatactttaattacatgcctacggtcgggagtagctttccattatggtaacatgccatctataataagaaatggcattgaatatttcttcaaacgaggggatgttaaatttatagtttgtactagcaccttgcttcaaggcgttaatttaccagctaaacaccttgttttagagaatccccatagtggcgacgaacctatggttagagctgattttttgaaccttgcaggtagagctggtcgtttaagatatgagtttcagggtaatgtatggtgtgtaagaagtgatatgtgggacaataaatcctttgagggagaaactcttcaaacaatatcatctgccatgtcaaaagtaatggaggatggcggtagtattatttcaaatgctattgataatgtattttcgccaaatgatgataaagaattggcagatgtagcatttgctcgtttttatcaggaggtacaacgggacggattccaattgccatatttttatgaattagaggggactgaatccaacgaaatgttggagtataactatgataaagttatccgaatgaaaataaatattcctgaagagttgttgaagctaaactcaggagcacggcctgattatattcagaggctttatgattttttcaatcagcaggatgacttagatgattacattctacatagtccttaccaaaaaggaggtaaggcgagaatggatcgtgccattgatattattattgacatattttcttggtcagtatcacctcagtatgctaagttgataagcgttatggctcatcaatggatgacgtcacattctcttaaatctatgattaattataaaattagaagttcacatgatttatcagatctgattaatcgtggtgaatctgttgataaaataaggaggaaaacatcctcacttattagagatgtacttaacacgcttgagaatcaagtaaggtataacttggttcgttatttgaagatatatagagaaacccttatttatgttttggtctcaaaaggagaaaaggataaggctgataaagtggaaaatattagcgcctatcttgaatttggttcctgtaaccctacagaattgagcctcatgtcattaggtctctcacgaagtacggctttgtttttaaagaataaatttaattttccgcgagactcttctcctgagggattaattgaatttttattaacgaggaatattaattctaaaaacactcctgaatttagaattagggagattaaagatgtgcttgggatataa

SEQ ID NO: 58658 - DNA, 1446 bp, Pectobacterium carotovorum subsp. brasiliense
atgagttttgaaaataaaaacgctagttactatataatagctcagtttgattctgaagggtttcttatttctcgagctacgtcatttaatttagataatgaaaatatcttaactgctagtcattttataaaagaatctccagggtgtgtttttagaatatttttgacgcctgatgactatggaaaatcaaatggaaaagtgattgagctaaaaaaaaatagacctgaactagatattgcaattttcacatgcccatggaattgtttatcgttaactccaagtctcggtggttatgcaattccagttggtgctgaagtttatgttaacggctatgctgctgagaaaggaaatatcccctctctgtttttctctgatattgttactgatctaagggctattgatacttcaatctactgctatgaaattacgcaatgtaaaaaaaataccatcacaaattattctggtgtatctggtgctccacttttatataaaggcaccataataggtattgttttatttcagcaaaaaaataacacactatattgtgtatcacttgagaaaataataccgataatatcattggatataggtaaggattattttcttatctcgggagaagaagttgattatttagcacctaaatgtcctaaagagccgtttaaccttgtctgtgagataaacacaaactcgccaattacaaaaggattaagtgtacagttttcctttaatcgatggaatttgagtgagttctcaaaagaattatctgaatggcttgttgattatgtgatatcaccaagtaaattaatagattacgagaatagaacgcgagccgcggttaaagttgctgaaaaacattttgttaaagttagtgaaaaggagtttttggatcttttattacatatagctatacgaaaaagtttcaagaccatacctgtaataaataagatatttacagttggtaatgaacttatacctagctgctctcatgcagtgataaatagtggtaggttagagttatggcttggtgtttctgggtatgagaaaaacatagcggatgccatatctaatgttaatgacacgatatcaaaactaataaccgctgacaatatttcagagaggtttaaattaataattaatgatgtcagtaaagaatggccgttatttgagaagttaaaaaaacttggtgacaactcattatcattagacaaacgtgtcgataaaatcatagtgcctgtttttatttgctatgaagctagtatcgtcaaagactataaagatgaagaaagtttcactgatgcttttaaaaaggaaattttagagcttcaaagtggtttcactgaaaaatataggcattcatttattgataaagtcgatataaggctcttctcattccctttggattcatttcaaaatatattagaaagttttattaaggaattatcatga

SEQ ID NO: 58659 - DNA, 1725 bp, Pectobacterium carotovorum subsp. brasiliense
attgatgaacttaaaaagaaatttcataagtacacagtcgatagtgatgagtttgtagtgaaatataaaattataacccaagttaatcaaactcatggaaagaataatatttttctctatactcaagaacgggtaattgaaaaggaagggtttcctgtaatagatttttttgtagtagatgagttttacaaattgatgccgcaaggtatggacgattacagaagtgaacgcctaaatattgcatttaaaaaattactatcattgtgtagtttcttttatatgcttggtcctaacattaaaaacattaatccattgacattatctaagttaggatgtagatacattgatgagtctgattttattactgtagcaacgaatgagtatacctttactatacctccaggaaatgatactgagcgagatattacgagaaatgaatatttaaagaaggtaatgaataatatttcaggagagcaaacgattatttattgtaaatctcctaaaagagccagtgttttggctaatttgttgagtgaaattattccactaaaaaaagagcatgatctcaattctctatcaaactggcttaaagagacgtttcatccagattggtctcagtctaagataatacaacatggcatttgtgctcatcatgctaaactacctcgttccattgcgagtctttttgttgatctttttaatgaaaaacgtattaatgtactagtttgcacttcaactttaattgaaggtgtaaatactaatgctaaaaatatcataatttatgacgattgcataactaaacgagttcagcttgattcttttacttataataacatagctggaagaagcggccggatgttcgaacattttgtaggaaatgtatttttcttcggtgaaaaaccaacagatggtttgaatcaaattgatataccaattatttcacattctgataatgtacccgactcgttgcttcttcactatgatgaaccttactctgaaaaaataaaggggcggcttaataaatattttgatcaggatattttgagtgttgatgtaattactaaaaattcaggggtacctccagagtcacaattagaattcgcaaatgatttaatggagaattttcagtcatggcataagttaatgtgttggaataacatgccgaacagtggtcaattgaatcatataaacaaaattgctgagaaatactttaatataaaaagctttgcttctggcgctgtaaaaagtgatgttcagttatctagaaagattgtatccatattaaaaaatgaaacgttaaaagatattattgatcaggattacgaatactttagtgaagatgatgatagtttcacaatagatgatgcagtgttaagaaactttgattttagacgaaaaatacttggacattactatcctgtgatcattaatgctattaataacattcaagaatatgtttttactaagtttggatataaagcaggaaattacaaagcctttatactacgtgttgaaagtttaaatgtcacgccttcacttatgacgttggaagagtatggtataccaatatctatatctcttaaagctaataaaatttggaaagttaaagattctgatagtttcgatgaggcgattgataaaataaaatcctgcagtttatctgatgattttaaattaagtgaattagaactgaaaattttagaaagaaatattatttttttataa

SEQ ID NO: 58660 - DNA, 927 bp, Pectobacterium carotovorum subsp. brasiliense
atgacgatcataaatgaggtaaataaatatgtgtctgtcaacaagcaggattttgatgcttgtattgacgtggttgagcagtcattttgtatcaaatcgctctgtgcccaggtccgatttcatcatttaaaatttgacggtaatgggcgaccaatggtaaaggctttagctgagaaactttatgaatatataatcgattactgtttttcaatgcaagatagagttgaacctctttctcctcaacagtggcttgctctggccaaacaagcgcgttcattatttaggcatcccaaggttacagataattctcctgataaaacaggcgaggcaggagaaactttattgtttttccttatggaagcaataattggtgctccacagttagttgcaaaaatggagctcaaaactaactctaatgatgaagtaaaaggttcagacggaatacacataaaatggaatgaaaaagataaacttgttgatttttattttggtgagtcaaagctgtatcagagaatatcatctgccatggattctgccctaaaaagcattgatgattttcatacaaatgaaatgtataaacatgaatttattatggcgactaaacattataaatatgcaaaagatgaagttagagaagcagtgaggaatctgtttatttctggggagccaggttcagatgtccgtgtaaatcatgcatgtttaattggttttgactggaacgggtttgataaatttgattatagttcctcaatccccataaatgaacaattccttaccgagttaactaatacaatgccgcaatgggttgatttattagatgagaaattcagtgagtttaatcggaagtatttaaggtttgatgttttctttattccattcccttcagtggttgatttcaggaatgaatttaataaggctctggattga

SEQ ID NO: 58661 - DNA, 2523 bp, Pectobacterium carotovorum subsp. brasiliense
ataaatgagttatactccaggcttgttaaggtcagtattaataagatgtttggagtggaaagtgattttaatattagccttagtgatatttatcagctgttatcatatagttctatattatctttgtcagacattgagtctgatgttaaaaaggcatacgatattgttagtcggattttagaggtaggtgccgagtataatgaaaatataatttcagcttgtgatctaattctatctaggattggtaatttcccaggtagagggctattaagagataagtataataaaggtgagtctccaacactaaacttatcactttctttagagcgtatagggcgtgagacagaaaacacatataatgatataactttaacaaattttcagtgtaaattacttaattcactaaagaataataattaccttagcgtttctgccccaacgtctgcagggaaatcttttgttctttcattagcggtgattgataaaattaaagcttatgaaaaagaatgcattgtttacgtagtaccgaccagagctttaattagtgaagtgtcaaataagttccgccatgaatgcaaacaagcaggtcttagtaaggttattataagaacagcccctgaaacaatagagactaatagcatagagcaaggcttgatatatgtgctaacacaagaaaggcttgtcagcttactttcaaactcttatgggaatagccattttcatatagatacattacttatagatgaagctcatgaaattcaaaaggggaaaagaggtatagttctacaaaatgctgttgaattagctcttgaaaaacatccttatatgcaggttatgttctctagtcctttaataagtaatccagagtattttttctctatattcaggtggcgaaaagatggtaaggcttttattgaaactatatcacctgtaactcagaatattttgcttattaatcaagtaagaaataacactaaggctattagtgtaaaattgaatgctgaagataagcctattgatcttgggatttatgaactggattttgtgttacgtgacaatcgtaaaattcagaaagcaaaacttgctgagtttatatctcgttctggtggggctgtaattgtatttgaagatacaccatccaacgcagaaggtgtcgctataaatattgcagagatttttggtgaagtgtctttgcaaaatgacttcgaagaattcatatcttctattgaagaagaaatgcatgaacaatatactttaattacatgcctacggtcgggagtagctttccattatggtaacatgccatctataataagaaatggcattgaatatttcttcaaacgaggggatattaaatttatagtttgtactagcaccttgcttcaaggcgttaatttaccagctaaacaccttgttttagagaatccccatagtggcgacgaacctatggttagagctgattttttgaaccttgcaggtagagctggtcgtttaagatatgagtttcagggtaatgtatggtgtgtaagaagtgatatgtgggacaataaatcctttgagggagaaactcttcaaacaatatcatctgccatgtcaaaagtaatggaggatggcggtagtattatttcaaatgctattgataatgtattttcgccaaatgatgataaagaattggcagatgtagcatttgctcgtttttatcaggaggtacaacgggacggattccaattgccatatttttatgaattagaggggactgaatccaacgaaatgttggagtataactatgataaagttatccgaatgaaaataaatattcctgaagagttgttgaagctaaactcaggagcacggcctgattatattcagaggctttatgattttttcaatcagcaggatgacttagatgattacattctacatagtccttaccaaaaaggaggtaaggcgagaatggatcgtgccattgatattattattgacatattttcttggtcagtatcacctcagtatgctaagttgataagcgttatggctcatcaatggatgacgtcacattctcttaaatctatgattaattataaaattagaagttcacatgatttatcagatctgattaatcgtggtgaatctgttgataaaataaggaggaaaacatcctcacttattagagatgtacttaacacgcttgagaatcaagtaaggtataacttggttcgttatttgaagatatatagagaaacccttatttatgttttggtctcaaaaggagaaaaggataaggctgataaagtggaaaatattagcgcctatcttgaatttggttcctgtaaccctacagaattgagcctcatgtcattaggtctctcacgaagtacggctttgtttttaaagaataaatttaattttccgcgagactcttctcctgagggattaattgaatttttattaacgaggaatattaattctaaaaacactcctgaatttagaattagggagattaaagatgtgcttgggatataa

SEQ ID NO: 58662 - DNA, 900 bp, Pectobacterium carotovorum subsp. carotovorum
atgacaatgaagcttgcccctcagttgaaaaatacgcatattataaaggatatgctaaaaaaagttaatgtttctatttttctttcagatggaagacgcgttgaaacattgttagtttacctgccttcagttaacggagtaataaaccatacggcattctttgacatgatagcaaatgagttgctccatcactttgctctgacttgtcaagatattgagaaaaaacttaaacggaatggtgcgcatgctgcggacattcttttcaaaaaatcgttaagtaaattaagtcaacaaacggcacatggtgaacttggtgaattaattctttttactttagttgatgtttacctagaagcacctaaattactgagcaaaatttccctaaaaaccagtcctcaaatgccagtcttcggagctgatggtgtacatatccagtacgtcaatgataaaattcgcgtatatttaggtgagtcaaaactctatacaacctttagtaatgctgctaccaaagctgcaagttcaatagaaaaagccaaaagtaaatatcttgatgagttcaatttaatcgatagttacatagaccttcctcaattagatgaaaatgcagaagaagagcttcttagcatactaaatccatttgaaaataaaaatattgatgatcatattcattcaccttgttttattgggtttgcagataaaaatttaattgagagctgccttaaaggtgaagatttccttcaatgttatataaacatggcgttcaatcatattgacgattactataaaaaacttgagaagagaagtgtaaatattgaatcatcaacattaatgatacttcccttcaccgatactgaggctttagtcaaggattttataactcacctagggatacaaaaatga

SEQ ID NO: 58663 - DNA, 2535 bp, Pectobacterium carotovorum subsp. carotovorum
atgagcgaattctacactaaattatctaatcgaataataaataatgaacagttcaaacttggtacatcagagctttttgcaagctatattaagatgcttatcggtgaaaaaggtactattagcaaagaactcgcaaagaatataaccacagcctctcagattctttacaaatctgaagatgaaagatacttaaaagaaggtgctaatcttctatcaatgttaattgattcttgtgggatagattatcccgagataattcctattgctacacatgtctttactagcactggagactttccaaatatagaattacttgaagagcggtttcctgaaatacagtttaaacataattttctatcagaggctacattttattttcgtcgttcattaaataatgtagaaactctaaatattatattgactgattttcagaaaaggctttgggacgatctacagagaggtgaggatgttattactgtcgctccaacctctgcgggaaaaacacatattatactaaattatttagttgatagtgtactcgatagcattgatggtgcatttgctgtcattgttgttcctactcgggcattaataacagaagtatcatctaagatttataatcttgctaaggagagaaaaagagaaaaggaaattgaaatatgcacaataccaagggatggtaatttttcagacaaaacattctttgttatgacgcaagaaaggttacatgaagtcctgctgagaggcgatattagcttcaactatttgtttatagacgaagctcataatatttctgatgaaagtaggggggttctacttcatctaacacttgaaaaggtcttggataatggtactcctcagatcattattggaatgccatcaccgcaatatcagaatagtttcacaagtatttttaatgatattacctttaaaaaggaaataactagccattctccggtttcaaaattagtaatgaacgtgaggccgaaaggtagaaatcttgaaattgatagattgcataccggagataaggtaataatccctaaaaattttaaagaaaaaaaacttgctgatatagtttatagattagggaaaaaccatagtaatattatttatcgaaatcaaactaactattgtgaatcaattgctcaagatatttcaaacagaatagagactatttctgataacgaagctttagttgaagcttctgaatatattaaacactttattcatgaagagtttactctggcttctaacctattgaaaggtgtagcatttcattatagcccattaccaacgtcagtaagaattatggttgaaaatttagctaaagaaggacatgtaaaatatatatgctgcacaagcactttagctgaaggagtaaatctcccagcaaaaaatttatttatacaaaatccattctttaaaaagaaataccaaagcccagaaagacttgaagatgttaaaataaataatattactggaagagctggtcgaatgctccaacatttttctggcaatgtttttcttattgaacaggataaatgggcttttgatgattattttattgaaagtgataaacttaaagaagaaaaaataccaacctattttaaattaataaatgataaaactgatgatgtaatgatggctttatcaggtcagtatcctagggaggatgaacaatataaattttactcagtagctaataagttaatcaaagcttatgataatggtagtcttgacaatactctatctgctccagaggtaaaacttgagagtgatattattcaccgattgaagagtaatgttgaacaggcatttttaaatttgaaagtatcatccctgatcttggagtctaatcctacgataggatatattcagcagaataaagtctatgagtttctaatgagtggacttgatttacatgaatggtcattaccacatcctaaatcggaagatttgtatgataaattattaaaagtttcaagtaaacttgttgagtatggcgtttttatcccatctggaaattatacggctaaatatatctgtcttatatcgaaaaagtggattcagggaaatagcttaaaagaaatgatatctgaacagattcattgggataatacctctccttcacaagatgttaattatgaggacgaaggtgtaaatgaggttaaagttaataagtcagttcgtaatgttataaatgtaattaatagcgatgttagatttaggctatcgaatgcaataaaatgttattatacactttttgtattggcggcaagaatgaaaagaagtgatgttcaaagtgtaaaattacattactttttggaaattggtgccagtgacgaaaggatgatggatttacttaaccttggattgtcacgagaagcatctaaagaaattgatgagaaagtgccttctggagtaccaataaaaaatcttgctgatttaattaggttattagactctgaaagcatttctcgaattcacattgttataaaaaaagaaatcgaacatttagttaatcgttcttga

SEQ ID NO: 58664 - DNA, 1617 bp, Escherichia coli str. K-12 substr. MG1655
atggagtcgaacgattcaggcggagtagccgccaagcacggtttcttatttcaggactgcgtagccgcttaccatgtcacccgaatgcttcgtgacaagactatccgcagtgtgcgctgcgaggtcacagacgatatcgacattgtatctgatggatacatcgacttcgttcaggtaaaaagcaccggcaaaacacgttggaacatttcggacatcgttcagaattcaaaaggtgctgataaaaagacgatcccctgcagttcaattttgcacaaatcaatgcagtgtgagtctgacctgtcccttggacgtaggtactccatcgtcacagaggaaaaggtcaacaaaacccttgagtacttgacgatcagcccaaacgcccgactagataagccaggtcgacaggaactcatcgatgacctcaacaaacgcacagacaattttttaacagactcaggtataagcgtttcagattggatcgatgcggctacatgggaagtgttttcatccctgcgcgaactggaacttctagggatcaagaacatacggctggcctcccaagatctacatggggtcattctcagttccgaaaccgtcgccgaagacatttggtgccgcatccttgatactgtgacgcgcaagggcgagcattctcgacgcattcacagtgctgatgacaagtcctacttacgaccagacctacttgagtggttcaagcagcgtgtcgaagatgaccaatctcggtcaggccgcaaaatctacgtcaaacgggacttaccccacatccttacgccatttagagcgcctatggcttcggtctgcgctaagcgtaaaggccaggttctacatcagcagtactcacttaagaaataccgctacaagcacatcgcggataacgtctgtcaatggttggatgaggtttttctccgaccaaaagaaatgtctgatattcataaactgacattcattgaaaagcgagaacgactaaagaattccgtcttcaaatcgctccatgacgtcagcgaatttttgggtcgagtgctgttgcacgcaacgatccggcagcaccacgaaagccagcctattccttgcatgctatacgtggaaaaagcaggggccgaaaaaattcttgaaaacgtgcatatcgttcgccgcgatccagaaggtgatcagctttggattggcttcagcgagttggtgactgatattaacattgccgtcagattgccggagatacgggatcagttgtacgaggacatttcggattgcatcgataccgcgcgcaaaaaaatcctcgacattaaagacgataactacctgcttcgccacgacattgacgaaattcttgatggcagccaacctttcgatgctcacctcgatcgtttcacgtttgttctgttcgtgggctacgactctaatctactaaccgagcctgaaacgccggggttcgaggatgacctggagaaagaaacagcggtgctgttcgaaaaattcgcggctgacctcatcgaggattcgccgtttgcgaatctttgcatccacgtattcatttatccagccccgagtcttgagcggttaacccaattagttgatgagaaggtgagagaggtcgtatga

SEQ ID NO: 58665 - DNA, 2190 bp, Escherichia coli str. K-12 substr. MG1655
atgacagagatctatgaacaggcgaaacatagcctgcagggtgaggacttctcatcgttcaattatctgtttgcggttaacaagctgttgtctaaccctgtttcgtatgacttgggacgggacttgatcgtgcgagctctcgattcgcgcgagcggttttccgagcacaccacaattttgaaaaatatggtgagaaaatcaggtttgttcccgtatctcaaaaaggagttcaccagcctgacaccggatgacctgagggtgcttgagctataccggacgccattctcggatggttatgttttccactcaatgcagttccacatattcgatctgctcaagtctggtcaaaacgtggtgctgagtgcacctacaagcatgggcaaaagtgcaatcgtcgattcattgctcggcatgggaactttgaaacggcttgttctggttgttccaaccgtggctcttgccgacgaaacccgtcgccgactgcaagagcgattcggtgaccgatatcagatcatccaccacagttcccaagtgtgccattccgatcaggctgtttatgtgttaactcaggagcgagtgaacgagcgtgacgacatcgtcgacattgacctcttcgtcattgacgagttttacaagttggcgttccgacaactgaaaagcggggacattgatcatcaagacgaacgagtcatcgagctcaacattgcgttaagcaaactgcttaaggtctccaggcagttttacctgacgggaccgttcgttaacagcattcgcggtctcgaaaaacttggatatccgcatactttcgtttctaccgacttcaatacagtcgcgctagatgttaagacgttcggcatcaaagcgaatgacgacaaagccaagctcaaagcgctgggggaaatcgcgcacgcatgtgtcgacgcaacgatcatttattgcaagtcaccaactgttgcgggcctggtggcgcgcgagctgatcaggcttgggcatggcactccgactgagaatccccatgtcgactgggtcagcgaagagttcgatgccgactgggattacacagtcgcccttagaaacggtattggcttgcattttggcgcgctaccgagggcactgcagcaatacactgccgaccaattcaatgctggaaaactgcgctttttgctctgcacctccacgatcattgaaggagtcaacactatcgctaagaacgttgtgatctacgacaaccgcgatggaactcgcagcattgacaaattcacccatgggaacatcaaaggtcgcgccgggcgcatgggcgttcacttcgtcggcaaaatcttttgcctggaggaaatcccggaagacaatctcaatcaagaggtggatattccgctcggtattcagggcattgataccccaatcaacctgttagccagcgttcaaccagaccacttgtccgagttttcacaggatcgctttgatgaggttttcataaacgaccgtgtttccatcgaccttgtgaagaagcattcgtacttccgtgtcgagcagttcgaaatgctgcaaagcatgttcgagatgatggacgataacgaattttcctcgttagtgtttcactggactcccgcgacaaacttcctcaagacctttgcaaagatcattgccagactggttccccatacgttcagtcgcaatggggtccctgttaagcctacggatgtcatgatcgcaaaacttgccggctatttaagtgctgaaagttattcggaatatctgaaaaatcagatcgattatgcacgacagtggatttctgaaggggagaaacgtactctttccattgccctcaacaatgatttgaagctcataaccaataccttcggctataccctacctaaggtgctcagcttgatggaggatgtagttaaacaccacgctgtaaagcgtggtatacgcagcaaagtcgattacacacatgtcaaattggcgttcgaaagtttccatctaccaccaggtgtcaatgccttagaagagattggcattcccattcagacgttacaccgactggtagacttgctggaattttccgacgaggctgatgtggatgagttgagccagtatcttcgggatactcaggacatttggagtagatcgattgggtacgttgatcagatgtttatcaggcgcgcgctcggtattagacgacattga

SEQ ID NO: 58666 - DNA, 1617 bp, Escherichia coli str. K-12 substr. W3110; identical to SEQ ID NO: 58664

SEQ ID NO: 58667 - DNA, 2190 bp, Escherichia coli str. K-12 substr. W3110; identical to SEQ ID NO: 58665

SEQ ID NO: 58668 - DNA, 1617 bp, Escherichia coli str. K-12 substr. DH10B; identical to SEQ ID NO: 58664

SEQ ID NO: 58669 - DNA, 2190 bp, Escherichia coli str. K-12 substr. DH10B; identical to SEQ ID NO: 58665

SEQ ID NO: 58670 - DNA, 1617 bp, Escherichia coli BW2952; identical to SEQ ID NO: 58664

SEQ ID NO: 58671 - DNA, 2190 bp, Escherichia coli BW2952; identical to SEQ ID NO: 58665

SEQ ID NO: 58672 - DNA, 1617 bp, Escherichia coli DH1; identical to SEQ ID NO: 58664

SEQ ID NO: 58673 - DNA, 2190 bp, Escherichia coli DH1; identical to SEQ ID NO: 58665

SEQ ID NO: 58674 - DNA, 903 bp, Escherichia coli E482
atgaatgctgaagatactaattcattacataaaatatacaatcctgtatatgggttgagtaatatcgtattacttgctaaagagtgtcagtctacagatccagtaaaagttaatcttctatgcctcggattcaaagaagatctacctaaagacaaagagcttgcggaaactctatttttagaattagttcattattgcattcctcatccagtgttagttaaacgaaaagagttagcacgaagtgagggaaaggatgaggcaagactttatagtgaacttgcaagggaagcacgcagcctttttatgaaatacaaattagaaagtgctgtaaaaataaaaaatggtgaaccccctgaaaagttcgaacaacgagtgaaaaatgctaacttacgttatggtgaagttggtgagctaatatcatattgtatagcaattcattttttaaaagcgtcacaattagtctcaaaaatggctcttaagacatcctctgaaatgcctgtctttggtcttgatggcattcatgcaaccatagacagtaaaggaacattgacggtattttacctagaatctaaaatgaccagggagtttgatagcggttctgaacaattttcaaaatcagttagtgggtttgaaagcgatagaaatagtcgtagaaatgaatacagaatactgcaggacttgagtaatttagagtctcttgaaggagaagaacgaaaaaaggcaatacaatactttgatccttactctaatgaatcatcaaatgtcagagagcgtttcgttagaataattgcctacaatgaagaaagctataaatctaaaatagctattgatgatgagtccccactttccattcatttagaccactttaaaaaaattacgtcagcacttttgaagaaaaaataa

SEQ ID NO: 58675 - DNA, 2181 bp, Escherichia coli E482
gtgaacactttagctgctgaaatcattagccaaataaaaaaacatttagagttcaaaaacgacctcagttttctttttgcacactcttttttgcaaaatcataaaagaacctcttttgctacaaaacaaagcaaaattggcgatgaaaacatagttatttataaaagattaattgaatctgcatatttgttttctcaatctgagtcagatgaagataagaatttagctcaaagcattgcataccatttaaatgtagtaaccggtgatgattatttgaaacaaatgtcagaaaatcttttaagagttttgggcaacttccctggagcaacttatcttcaacaagaaaatggatttataccagaaagtttttatgccttcttaaaaagatctttcatagaaaatgaaaataaaataaagatctccaacaaagaaataacattaacaaactttcagaaaagagtatgggagtcattgcactcgaatgtccctcaagctatatcagctccaacatcagccggaaaatcgttcttagttgtggaaatgctcgccaacggaataattagcggcgaattaaattccgccatttatatagcaccaacccgtgctttagtaaatgaaataacacaaaaatttataatcaagactttaccatatcaaaatgaggtcagagtaacatccataccaacaattaataacgaatataataagcagatatttgtcttaacacaggaaagacttcaagtattgcttgataattttgaagaaaaaatagacttggtagttattgacgaagcacaatcaatttctgacgaaattaggggaatgatattacaggactgccttgataaaattagcacacaaaaccctaatgcaaaatatgttttcctcgcgcctggtgctgaaggttttgatgatttagcagatattattggaatcgatgcaatccatattgaaaaaacaaatctatctcctgtagttcaaaacaaaattatcgtcaaagttgatccatcaaaagaaaacaacttacaattatcattattagacaattcagacatattaccgatcggagaaatagaatcgacaaggggtttcgccaatgaaaatacaagattggcggctgtcgcattagaattaggaaaaaatgaggggtctttagtttacggaaccggagctgaaaatgcagaagatgtagctaagcaaatatcttctggattacctcttttagaggatgacagtgaattacaagaactctcaaaatttataaaaaaacatgtccacgaggattactctcttgcaaacctcgtattgagaggggttggataccattatggtaaaatgccaagtttattaagagaaacattagaaaaaaatttcacgaataataaactgaagtttttagtttgcacaacaaccctttttcaaggggttaatctgcctgcaaagaatgtttttattgatacacctacacgaggaaacaggggagaaaaattagatccagcatcgctatggaatttcgcagggcgggcaggtagattaggttatgcattttcgggaaatgtttatcttattgactatgatgattgggtaaccaagcctttagattccaaaatagacttcaaaattacttcatctttaaagaaagtaattaatgaagattttgacacagtaatatcacggttagacaaaaataatcattcaggagtgacgccatatagtaatattgatgcagcggcaggtcttttaatctccagagccgcaaaaggagatttgcataattttcttaaaagatcatttcgaactttatctgataaatcaaaacttgaaactattgataatgccacttatatctcattagaatcacttaaaatacctcatgaggttttaactctgaactggacagttgatccatttggacaggaacgattgtacaatagatttatccagaaaataaaggaaggtaaagttgacgaacttatacctcgccatccttcaggtgatgtttacaaaaattatgttggtgtttttagcagaataaataaatacatccttaaccataacacatctaaattttctaactatctaacttcaattgctttgaattggatgaggggtaaatctctgccggagataatctctctctccataaataagaaaaaagaaaaaaatccactaggcctgtaa

SEQ ID NO: 58676 - DNA, 903 bp, Escherichia coli B41; identical to SEQ ID NO: 58674

SEQ ID NO: 58677 - DNA, 2181 bp, Escherichia coli B41; identical to SEQ ID NO: 58675

SEQ ID NO: 58678 - DNA, 1038 bp, Escherichia coli 5.0588
atgaaatctgaagacactaattcgttacataaaatatacaatccagtgtatggacttgataatatcgtattacttgcacaagagtgtcagtctacagatccagtaaaagttaatcttctttgcttaggattcaaagaagacttacccaaagacaaagagcttgctgaaactttatttttagaattagttcattattgcattccccatccagttatagcgaaaagaaaagccttaagtcaaactgaaggcaaagatgaggcaaggctttatagtgaacttgcaagagaagcacgtagtctttttatgaaatataaattagaaagtacgttaactataaaaaaaggtgaaactcaggagaagtttgaacaacgagtaaagaatgctaatttacgttatggtgaagtgggtgagttaatatcatattgtatagcaatccattttttaaaagcagcgcaattagtctcaaaaatggctctcaaaacatcatctgaaatgcctgtttttggactggatggaatacatgcaaccgtagatgacgagggaacattaacggttttttatctagaatctaaaatgacaagagagttcaccagtggctctgaacaattttctaaatcagtaagtggttttgaaaacgatagaaagagccgtagaaatgaatatagaatactacaagatttgagcaatttagagtccctagagggagaggagcgaaagaaagcagtacaatactttgatccttattcaagtgaatcatcaaatgtcagagagcgcttcgttggaattattgtctacaatgaagaagcttataaaaataaaatagcaattgacgatgaatccccactttccatccatttagatcactttaagaaaagttatatcggtagttataaagataaagtaaaaattataacagaagacctatcaaaagcgggagcgaccccgcaaaaatgtagggcgtacatctttgcattgcctgacgttgatgcttttaaattggattttgcaaaggagttatcaggtgaacactttagctaa

SEQ ID NO: 58679 - DNA, 2550 bp, Escherichia coli 5.0588
gtgaacactttagctaatgaagtcatcaaccaaataaaaagtcgtttagaatttaaaaatgatcttggctttttatttgcacactcttttttgcagaagcatacacaaacttctttctctgcacttcaaggcaaaatagaaagtgacagtgtcgttatatacaaaaggttaattgagtctgcatacttattttcccaatccgagtcagacgaggataaaaacttagctcaaagcattgcatatcatctaaatataattacaagtgataactatttaaaacaattatctgagaatttattaagggcacttggtaacttccctggagcaagttatttacaagaaaaaaatggatttataccagaaaccttttatgcttatttgaaaagatctttcattgaaaatgaaaataaagtaaaaatagccaacaaagagataatattaacgaactttcaaaagaaagtatgggaatcattacattcaaatgtcccacaagctatatctgctccaacctcagctggtaaatcgtttttagtcgtagagatgcttgccaataggataattagcggggaattaaactctgctatttatatagcgccaactcgagccttagtaaatgaaataacacaaaaatttattaacaagactttaccatatcaaaatgaagttagagtaacatccatacctacaattaacgatgaatattataaacagatatttgttttaacacaggaaaggctgcaggtccttcttgataattttaaaaataaaatagacatagtagttattgatgaggcccaatcaatttctgacgaaattagggggatgatattacaggattgcctagacaaaataagcatacaaaacccagatgcaaaatatgtttttcttgcgcctggtgccgaaggcttcaatgatttagctgatattattgggattgatacaatccacgtagaaaaaaccaatttatctccagtggtccaaaacaaaataattattaaagttgatcctgcgaaagaaaataacttacaactatcattattagataactcaaatatattatctataggtgaattaacttcaacaagaggatttgctaatgaaaatactagattagctgctgtagctttagaattaggaaaagatgagggttctcttgtttacggaaccggagctgctaatgcagaagacgttgctaagcaaatagcatctgggttgcctcttctagaaaatgatagcgatttgaaagaactttcaaagtttataaaaaaacatgtccataaggattactctcttgcaaatctggtattaagaggggtggggtatcattatggtaaaatgcctagcttattaagagaaactttagaaaaaaactttacaaataacaagcttaagtttttagtgtgtactacaactctattccaaggggttaatcttccagcaaaaaatgtttttattgatacacctactcgagggaacagaggagaagcattagatccagcatcgctttggaatttcgcagggcgggcaggtagactaggttatgctttctcggggaatgtatatcttattgattatgatgattgggaaacaaaacctttagattctaaaatagatttcaaaattacatcatcttttaagaaagtaatcaatgaagattttgacacagtaatatcccgtttagataaaaacaatcatttaggagtaagccaatatagtaatgttgatgcagcggcgggtcttttaatttccagagcagcaaaaggcgatttacacaattttcttgagagatcttttcgaacgattcctgataaatctaagcttgaaattattgaagatgctacatatagctcactagaatctcttaatatcccccataatatattgactttaaactggactgtcgatccatttgggcaggaaagattatacaatagatttattcagaagataaaagatggtaagattgacgaacttataccacgacatccttcaggcaatgtttacactaattacgttggtgtttttagcagaataaataaatacattctcaatcataatacatctaagttttctaactacctcacagccatggcattaaattggatgagaggaaaatcccttccagagatcatatctctttcgatagcaaagaaaaaagaaaaaaattctacccgaccagtgaatgtagaccgagctgtacgagaggtttttgatttcgttgaggacaacctgcgattcaaatacgttcaacttggtaaggcatatattgatttattgcgacaagctttaattgtaaataatcaagctgaaaaagcggaagaaatatatgacttccctttatcacttgaattaggtgtttcctcaatcgctggacaagtttttattgagctggggctatcaagaatatcagcatcctatcttgaaaatataatcccaaactctaatcctacgataagcacggcaaaagagtggctaagaaacaatgattatgattcattaaatttgccactcaccatttattcagaattagaagataagggattgttataa

SEQ ID NO: 58680 - DNA, 1617 bp, Escherichia coli XH001; identical to SEQ ID NO: 58664

SEQ ID NO: 58681 - DNA, 2190 bp, Escherichia coli XH001; identical to SEQ ID NO: 58665

SEQ ID NO: 58682 - DNA, 903 bp, Escherichia coli G58-1; identical to SEQ ID NO: 58674

SEQ ID NO: 58683 - DNA, 2190 bp, Escherichia coli G58-1
ttgcaaaggagttatctggtgaacactttagctgctgaaatcattagccaaataaaaaaacatttagagttcaaaaacgacctcagttttctttttgcacactcttttttgcaaaatcataaaagaacctcttttgctacaaaacaaagcaaaattggcgatgaaaacatagttatttataaaagattaattgaatctgcatatttgttttctcaatctgagtcagatgaagataagaatttagctcaaagcattgcataccatttaaatgtagtaaccggtgatgattatttgaaacaaatgtcagaaaatcttttaagagttttgggcaacttccctggagcaacttatcttcaacaagaaaatggatttataccagaaagtttttatgccttcttaaaaagatctttcatagaaaatgaaaataaaataaagatctccaacaaagaaataacattaacaaactttcagaaaagagtatgggagtcattgcactcgaatgtccctcaagctatatcagctccaacatcagccggaaaatcgttcttagttgtggaaatgctcgccaacggaataattagcggcgaattaaattccgccatttatatagcaccaacccgtgctttagtaaatgaaataacacaaaaatttataatcaagactttaccatatcaaaatgaggtcagagtaacatccataccaacaattaataacgaatataataagcagatatttgtcttaacacaggaaagacttcaagtattgcttgataattttgaagaaaaaatagacttggtagttattgacgaagcacaatcaatttctgacgaaattaggggaatgatattacaggactgccttgataaaattagcacacaaaaccctaatgcaaaatatgttttcctcgcgcctggtgctgaaggttttgatgatttagcagatattattggaatcgatgcaatccatattgaaaaaacaaatctatctcctgtagttcaaaacaaaattatcgtcaaagttgatccatcaaaagaaaacaacttacaattatcattattagacaattcagacatattaccgatcggagaaatagaatcgacaaggggtttcgccaatgaaaatacaagattggcggctgtcgcattagaattaggaaaaaatgaggggtctttagtttacggaaccggagctgaaaatgcagaagatgtagctaagcaaatatcttctggattacctcttttagaggatgacagtgaattacaagaactctcaaaatttataaaaaaacatgtccacgaggattactctcttgcaaacctcgtattgagaggggttggataccattatggtaaaatgccaagtttattaagagaaacattagaaaaaaatttcacgaataataaactgaagtttttagtttgcacaacaaccctttttcaaggggttaatctgcctgcaaagaatgtttttattgatacacctacacgaggaaacaggggagaaaaattagatccagcatcgctatggaatttcgcagggcgggcaggtagattaggttatgcattttcgggaaatgtttatcttattgactatgatgattgggtaaccaagcctttagattccaaaatagacttcaaaattacttcatctttaaagaaagtaattaatgaagattttgacacagtaatatcacggttagacaaaaataatcattcaggagtgacgccatatagtaatattgatgcagcggcaggtcttttaatctccagagccgcaaaaggagatttgcataattttcttaaaagatcatttcgaactttatctgataaatcaaaacttgaaactattgataatgccacttatatctcattagaatcacttaaaatacctcatgaggttttaactctgaactggacagttgatccatttggacaggaacgattgtacaatagatttatccagaaaataaaggaaggtaaagttgacgaacttatacctcgccatccttcaggtgatgtttacaaaaattatgttggtgtttttagcagaataaataaatacatccttaaccataacacatctaaattttctaactatctaacttcaattgctttgaattggatgaggggtaaatctctgccggagataatctctctctccataaataagaaaaaagaaaaaatccactag

SEQ ID NO: 58684 - DNA, 1617 bp, Escherichia coli XH140A; identical to SEQ ID NO: 58664

SEQ ID NO: 58685 - DNA, 2190 bp, Escherichia coli XH140A; identical to SEQ ID NO: 58665

SEQ ID NO: 58686 - DNA, 1617 bp, Escherichia coli J53; identical to SEQ ID NO: 58664

SEQ ID NO: 58687 - DNA, 2190 bp, Escherichia coli J53; identical to SEQ ID NO: 58665

SEQ ID NO: 58688 - DNA, 903 bp, Escherichia coli 75; identical to SEQ ID NO: 58674

SEQ ID NO: 58689 - DNA, 2181 bp, Escherichia coli 75
gtgaacactttagctgctgaaatcattagccaaataaaaaaacatttagagttcaaaaacgacctcagttttctttttgcacactcttttttgcaaaatcataaaagaacctcttttgctacaaaacaaagcaaaattggcgatgaaaacatagttatttataaaagattaattgaatctgcatatttgttttctcaatctgagtcagatgaagataagaatttagctcaaagcattgcataccatttaaatgtagtaaccggtgatgattatttgaaacaaatgtcagaaaatcttttaagagttttgggcaacttccctggagcaacttatcttcaacaagaaaatggatttataccagaaagtttttatgccttcttaaaaagatctttcatagaaaatgaaaataaaataaagatctccaacaaagaaataacattaacaaactttcagaaaagagtatgggagtcattgcactcgaatgcccctcaagctatatcagctccaacatcagccggaaaatcgttcttagttgtggaaatgctcgccaacggaataattagcggcgaattaaattccgccatttatatagcaccaacccgtgctttagtaaatgaaataacacaaaaatttataatcaagactttaccatatcaaaatgaggtcagagtaacatccataccaacaattaataacgaatataataagcagatatttgtcttaacacaggaaagacttcaagtattgcttgataattttgaagaaaaaatagacttggtagttattgacgaagcacaatcaatttctgacgaaattaggggaatgatattacaggactgccttgataaaattagcacacaaaaccctaatgcaaaatatgttttcctcgcgcctggtgctgaaggttttgatgatttagcagatattattggaatcgatgcaatccatattgaaaaaacaaatctatctcctgtagttcaaaacaaaattatcgtcaaagttgatccatcaaaagaaaacaacttacaattatcattattagacaattcagacatattaccgatcggagaaatagaatcgacaaggggtttcgccaatgaaaatacaagattggcggctgtcgcattagaattaggaaaaaatgaggggtctttagtttacggaaccggagctgaaaatgcagaagatgtagctaagcaaatatcttctggattacctcttttagaggatgacagtgaattacaagaactctcaaaatttataaaaaaacatgtccacgaggattactctcttgcaaacctcgtattgagaggggttggataccattatggtaaaatgccaagtttattaagagaaacattagaaaaaaatttcacgaataataaactgaagtttttagtttgcacaacaaccctttttcaaggggttaatctgcctgcaaagaatgtttttattgatacacctacacgaggaaacaggggagaaaaattagatccagcatcgctatggaatttcgcagggcgggcaggtagattaggttatgcattttcgggaaatgtttatcttattgactatgatgattgggtaaccaagcctttagattccaaaatagacttcaaaattacttcatctttaaagaaagtaattaatgaagattttgacacagtaatatcacggttagacaaaaataatcattcaggagtgacgccatatagtaatattgatgcagcggcaggtcttttaatctccagagccgcaaaaggagatttgcataattttcttaaaagatcatttcgaactttatctgataaatcaaaacttgaaactattgataatgccacttatatctcattagaatcacttaaaatacctcatgaggttttaactctgaactggacagttgatccatttggacaggaacgattgtacaatagatttatccagaaaataaaggaaggtaaagttgacgaacttatacctcgccatccttcaggtgatgtttacaaaaattatgttggtgtttttagcagaataaataaatacatccttaaccataacacatctaaattttctaactatctaacttcaattgctttgaattggatgaggggtaaatctctgccggagataatctctctctccataaataagaaaaaagaaaaaaatccactaggcctgtaa

SEQ ID NO: 58690 - DNA, 894 bp, Escherichia coli 541-1
atgttactaccaatacgagttcataaacgatttctaactttatttaagactttgcaaattgacgattgcccaccgcaatcaactttaaatattcatgtacttaatatcgaaagcaatgaatttatatactgtaaattagttgaagaattacgtgacataataattacttatgtacattcgaatagaaggcttgaggagtttaaggaaagttatccttcgtatagccctaaaccttttttcgaagcaatacaaaaatttcgcaattatacgtcaaacgaaggtgagttaggtgaactgcttttatacgcttttcttgaaacaggactaaatgctccgaaattactttccaaaatgcaattgaaaacagattctaatgattacattaagggttctgatggtgtacatctgttagaattagatgatggttatcaattaatatttggagaatcaaagctctatgccgatcttttagaaggtgctcgagaagcgtttgattctattttagattttaaaagtaatggaatggcatttgaaagagggctgatagatacacacgttataaatgaaatggtttcagaagaaggttatgagaaaataaaatcaattcttcttccttctggcgatgatgggccagatcttgatttatcctttggtatatttcttggttttgaattgaaaatagatagctcacagttatcattgaaaaacaaagagtttagagattgggttaatgagtccgtgaaacaacatgctactcgcgtggtcagtacgatacgaaggaaaattattaatcataaattatatggtcacgaattccacatatatatagttccttttaccgatattgatgttacacgaaaaaaattaattcatgaaatgctaacaattaagtga

SEQ ID NO: 58691 - DNA, 2580 bp, Escherichia coli 541-1
atgaatgaattaaattcaagtaaaaacattcatttggcagctcgtcttgcagatgatgcttttgaaagtgcttattttaaagaaatcaataagtttataagtggtttatacaattacagtttatttaactgcgattcagatgttagtctctccgagagtgataacaataaaatagcacacgctttgcgttttgcagatatattttcacattcttcaaaagaaaatcatagatcatgtgcatttgaaattataagtagaatagccttattaaaaaaacatgatccttattttaaatttataggtactgctgttattaatcggcttggggtttatgcagcagaaaaactcatatcaaaaggggtaaaattacccttagatagagaagttgattctattattaaaaaatcagttcagaaaacagatgaagatggagtatatttcactgataaacaacatgagttatacaaacttttaaaaagtagcaaaacaattagttttgctggtcccacttcgatgggaaagtcatttgttattaatgcatacattaaggaaataactcttaaaaaagagcttaaaaatatagctttaattgttcctacacgggctttaataagccaaaatgcacttaagttaaaaattgatattgcattgtataagaatgaaagcccttataaagttgttacgacatcctacatgattaatggtgatgaaagtaaaaataaaggctatatttttattctcaccccagaaaggttggttagtctcataagcactattcctggactaatgattgattatgtttttgtagatgaagctcaaaagttaacaacaaaaaatgattcgaggagtcttgttacttattcagctatagagcaaacaattagtaaaaatcctgaggcaagattattcttctcttcacctaatttatctaatcctgaaatatttaatattttgtttgatagaaaagacgcttcggtatatagaaatacagaaggtgcaactactcagaatatgtattttattgatcttttaaatagcagctttagctatgttaataccgagaaaaggacgcttgaaaaaatagatgagatctctaatacttacacgaatacaaatgatgttatctataaattaaataatggtaaaagtaaaataatttattgtggggggatagaaagcactcttgagagaacacgtagctttatcaattatctcaaaattaataagaaaaaaagaaagcatttaaatttagaaatatcttctgagataagaaactttgttcatgataactatgaacttgcagaagccatcaactatggtgttgctttccactttggaaacttgcctcaatcgattcgagatttaattgagcatcatttcaaaataggaaatattgactatctattctgtacatcaaccctacttgagggagtcaatttacctgcaagatccgtatttattcttacgcataaaaaaggccccagtccattagagtcggttgatttttggaatctggctgggagagctgggcgattatctatggaattgtcaggggatattttttgtattagggatgataataagctttggaataaaaaagctgttgataatatccttctgtctgacaaaaataacatttcattaaagccaagcttctatattgaagacgaaaaaagattgaacgatttacaccatataattacgactggtaaaacagggaatattaaaaatgctgagttccttagaactttaggagatatgataagaatagacactctgagggattctaaagaacttcctcttattagttatttccaaagcagtggaaaatcagaaattttgttaagtgcagaaaaaagcactgaaaatattaccatgccaatgaatatccttttggcaaatagtcatattgcgattgattcgcagtatcatgcttttaaaaaaataaaaagccttacagttaaggaactgaaattatcatggcagcctacatacgaagaaattaaagaaaaattgaatttgatattcgatatttaccaagttgaaaagtttgcaacaggtagagaacgtctttatttaaattcaattccatattatgcagtattactgtttcaatggattcgtggaaatagtctacaggaaattatctcgggggcaattgcttatagaaagaacaaaagtatatatattaaaaatacacctgttctttttgacagcgaaaacccagctcatttaactgcattagttaatgaaactataaaagacattgagttgcgtgtaggttaccagttacaaaattatttttcacattactgtcagcttctgaattatgtgttacaaggaaatccaggggcaaactggtctcagttcattgagtttggctctaatgagccaatagtatggcacctacaaatgatgggcttttcaagggatagtgcagtttttctcaagaagaatttttcaaaacatcttaaacttgataatgaaatgaataaactcatcataatggataaggaactgatcaagcgttctttcaaaaaagatggactacattacttagaaatccaatcgttattataa

SEQ ID NO: 58692 - DNA, 1617 bp, Escherichia coli DH1; identical to SEQ ID NO: 58664

SEQ ID NO: 58693 - DNA, 2190 bp, Escherichia coli DH1; identical to SEQ ID NO: 58665

SEQ ID NO: 58694 - DNA, 1623 bp, Escherichia coli KTE94
atgagtattactagcctatccgatgcaggtgggcctgcggcaaggcaaggcttcaaatatcaagatcacgtagctgtcagtttcattttcaagatgctccaggacagtaactactcccaagtggaatgtgagacagcggatgacatcgtggcggtattccaatgcgtgggccagatagtaaatgaatacattcaggtcaaaacaacggaaagtgatagcaaatggaacgtgaaagagataacagcgttagacggcaccaaggccaattcttcgctgctacacaaatcgctgaaatgtgatgttcgcccaggtattgcacgctttcgaatcgtgactaagcgcgacgtcgcaaagattcttgatggattcaagaaagagatagataagcgagtgctacctgacacaaccacaacacgaggtgtagcactgtgcaagcagtttaaaacatttgtatcacctcaaaaacatgacttcttatactgggctgaaaacgttgtctggcaggtatacggcgatgtcgaggcgctggaggctgtcaatattaaggctttgtcccagcttgcggaagggtttggaaatcgccccaacttcacgcagctaaaggcaatttacgaagaatttttagagattgctgacaaagcggccacatctagcgtgaagacagccgcagcatctaagatcatccttcgagctccggcgctggatcacctcaagaaattactagacgaggctgatgacatgtcgacggccacatccaaaccatataaaaagcgtccggacccgttcttagtcgagtttcacgccaacacaaaagagagcttgttgcactcattttctggatttgacgtgcgctattcgcttaagaaatggcggcatgaaaattacgcaaagcatctcatcgaatggctaccggagttttccctaaaggccagtgaaatcgtaaacattcttgcgcataacgccgaaacgatattggctaggtcaatcagtaccttcagcgacagtgagcttccgcgcgacaggctcattgcagaattaattctccattccatcctgcgcagccgacagcacagcgagcccgttgcgtgtaaagtcttctacaaatctgctggtaagctttccgaatttggcaatgctcacatcgttcaaatgcctgatgaagatgaccagttgtggctaggccttgcccgcatgatcaaagcgaatgacatggatacaactctagagcaaattcgagaaattcttgacgaaactatctcagaaaccgtcctgtcagcggagcgcgaaatcattatttctctacgcgaaccattacatcaccagccaaaagcagactccttcaatcaagctctgcatcgaaattctcctatcgatgacatgctgaatattctctgcttccccatcttgctgacttacgacagtgcagctctctcatcaggatggctcgtagattacgtagacaacctcaagaaagagatcgaaacccacttcagcacgttcacctctgaactgtcggagaacatcaaacaagttaaggtgctcatcttcttggtgcctatggaaagtattgaacttctgaccaaagctttcaacgctcgctgcgaaaagctggaagaattatag

SEQ ID NO: 58695 - DNA, 2142 bp, Escherichia coli KTE94
atgaactacgaaataatcaaaaatatcttggcgaaactcggtgaagagaatacaaaaacagtcgatgtgctgctcgccatcaataccatcgtcaacagaagcaattcagagtgggagggccgcgatttggtgatccgagcactcgacaaatttgagttttttgactctgtcgaacagtcactcctgctaaacttggtacgagctgtcggattattcccctatatcactcctcacctcagcagtatggcgatttctgaccgcttagcttacgaagcgcacagagtcgagggtgtagaacaaggcatggtatttcatcatctgcaggcccatgttttcagtttgatcatgcaaggccggaacgtagtactcagtgcttctaccagcgtcggaaaaagtctagttattgatgctgtactagcacagcgacggttcaaaaaggtggtagtgattgttccgaccattgcgctgatcgacgaaacccgccgtcgactcgtcaaacgttttaaggacttcaacctgatcacgcatccgagccaagaatccgtggttgagacaaccaacgtctacctgctcacccaagagcgtgtcattcagcgtcctgatcttgctgatgtggagttctttgtcttagacgagttctacaaaatcgacttggggaactcccctgacgaaagcacgcgcgctgttgacctgagcttagcattccacaagcttgcaaagactggtgctcagttctacatgctcgggcctcacattcagaagatctctggtttggatgattatgagtaccactttatcccatccgactacagcactgtcgcggtcgacattcagaatttcaatctggagatgcgttccgaagagcgaaaggaaaaattgcttgagttggtcacaactctagactcgcctactttaatctactgtcaggctcccccgagtgcgaacagggtcgccgagtatttaattcaggaagccgggttgaagccagtgccagaaacgaaggaaatagctgcatggatctccaggcactaccaccctgaatggaacgttgccaaggcaatatctctgggtatcgggattcaccatggaggagtgccacgtgcattgcaacaatacatcgttaagttgttcaatgatggcatcatcaagcgaattatctgtacatcaacgatgatagaaggcgtcaacacatcggcagagaacgtgatcatttacgaccgccgcctaaatacttcaaagttcgactacttcacttacaagaatatttccggtcgagctggccgtatgaataagtacttcattggtaaagtcttcatgctcgaagcacctccccttgagcagggtctcaccgttgaatatcccatcggccatcaggatgaaaactccccgataggactcatcatgcaactggagaacgaataccttactgatatttcacgtggtcggcttcaagatgcatatgccaacccgatactgtcgccggcaaccctaatagaaaatcggcacgttccgattgagcggcaagtcgaggtagcagaaacgatcattcgagacctaccggatggcagcaggcttctgggctggagaggcatccctgagacgaatcagctcaattacctatgtgaactggtctacagtctggaaggcggtaacctgatggactatgggatatcatctagcttgcaattaatgtggcacatcaatgagcttcgaactcagaaaaatctgcctgcttatctaagagacgcggtggagaatcgacgagaggaacacactcccagtgaagcgatcaatctacgcctgaaattcatcagaaatatggtgtgtttccgattgcctcgggacatcatggccgtgagtaacattcaggccgacgtgctggcgaaaatagggatcgagccgggcgattttagcttctttgctgagcagcttgaaaatatgttcctcgacccactactcaccgcgttggacgaatacggaattcccactcagatctcggctcagatcaagaacctcatcttgccatcggaacatctgaacgacctgctggcgaaacttcgggctctggctcccagagtagatagcctccaactgacaggctttgagaaaagcttaatgagctgggctgtgtccgaaatgtag

SEQ ID NO: 58696 - DNA, 1617 bp, Escherichia coli S17; identical to SEQ ID NO: 58664

SEQ ID NO: 58697 - DNA, 2190 bp, Escherichia coli S17; identical to SEQ ID NO: 58665

SEQ ID NO: 58698 - DNA, 894 bp, Escherichia coli KTE9; identical to SEQ ID NO: 58690

SEQ ID NO: 58699 - DNA, 2580 bp, Escherichia coli KTE9
atgaatgaattaaattcaagtaaaaacattcatttggcagctcgtcttgcagatgatgcttttgaaagtgcttattttaaagaaatcaataagtttataagtggtttatacaattacagtttatttaactgcgattcagatgttagtctctccgagagtgataacaataaaatagcacacgctttgcgttttgcagatatattttcacattcttcaaaagaaaatcatagatcatgtgcatttgaaattataagtagaatagccttattaaaaaaacatgatccttattttaaatttataggtactgctgttattaatcggcttggggtttatgcagcagaaaaactcatatcaaaaggggtaaaattacccttagatagagaagttgattctattattaaaaaatcagttcagaaaacagatgaagatggagtatatttcactgataaacaacatgagttatacaaacttttaaaaagtagcaaaacaattagttttgctggtcccacttcgatgggaaagtcatttgttattaatgcatacattaaggaaataactcttaaaaaagagcttaaaaatatagctttaattgttcctacacgggctttaataagccaaaatgcacttaagttaaaaattgatattgcattgtataagaatgaaagcccttataaagttgttacgacatcctacatgattaatggtgatgaaagtaaaaataaaggctatatttttattctcaccccagaaaggctggttagtctcataagcactattcctggactaatgattgattatgtttttgtagatgaagctcaaaagttaacaacaaaaaatgattcgaggagtcttgttacttattcagctatagagcaaacaattagtaaaaatcctgaggcaagattattcttctcttcacctaatttatctaatcctgaaatatttaatattttgtttgatagaaaagacgcttcggtatatagaaatacagaaggtgcaactactcagaatatgtattttattgatcttttaaatagcagctttagctatgttaataccgagaaaaggacgcttgaaaaaatagatgagatctctaatacttacacgaatacaaatgatgttatctataaattaaataatggtaaaagtaaaataatttattgtggggggatagaaagcactcttgagagaacacgtagctttatcaattatctcaaaattaataagaaaaaaagaaagcatttaaatttagaaatatcttctgagataagaaactttgttcatgataactatgaacttgcagaagccatcaactatggtgttgctttccactttggaaacttgcctcaatcgattcgagatttaattgagcatcatttcaaaataggaaatattgactatctattctgtacatcaaccctacttgagggagtcaatttacctgcaagatccgtatttattcttacgcataaaaaaggccccagtccattagagtcggttgatttttggaatctggctgggagagctgggcgattatctatggaattgtcaggggatattttttgtattagggatgataataagctttggaataaaaaagctgttgataatatccttctgtctgacaaaaataacatttcattaaagccaagcttctatattgaagacgaaaaaagattgaacgatttacaccatataattacgactggtaaaacagggaatattaaaaatgctgagttccttagaactttaggagatatgataagaatagacactctgagggattctaaagaacttcctcttattagttatttccaaagcagtggaaaatcagaaattttgttaagtgcagaaaaaagcactgaaaatattaccatgccaatgaatatccttttggcaaatagtcatattgcgattgattcgcagtatcatgcttttaaaaaaataaaaagccttacagttaaggaactgaaattatcatggcagcctacatacgaagaaattaaagaaaaattgaatttgatattcgatatttaccaagttgaaaagtttgcaacaggtagagaacgtctttatttaaattcaattccatattatgcagtattactgtttcaatggattcgtggaaatagtctacaggaaattatctcgggggcaattgcttatagaaagaacaaaagtatatatattaaaaatacacctgttctttttgacagcgaaaacccagctcatttaactgcattagttaatgaaactataaaagacattgagttgcgtgtaggttaccagttacaaaattatttttcacattactgtcagcttctgaattatgtgttacaaggaaatccaggggcaaactggtctcagttcattgagtttggctctaatgagccaatagtatggcacctacaaatgatgggcttttcaagggatagtgcagtttttctcaagaagaatttttcaaaacatcttaaacttgataatgaaatgaataaactcatcataatggataaggaactgatcaagcgttctttcaaaaaagatggactacattacttagaaatccaatcgttattataa

SEQ ID NO: 58700 - DNA, 903 bp, Escherichia coli KTE42; identical to SEQ ID NO: 58674

SEQ ID NO: 58701 - DNA, 2181 bp, Escherichia coli KTE42; identical to SEQ ID NO: 58675

SEQ ID NO: 58702 - DNA, 894 bp, Escherichia coli KTE78; identical to SEQ ID NO: 58690

SEQ ID NO: 58703 - DNA, 2580 bp, Escherichia coli KTE78
atgaatgaattaaattcaagtaaaaacattcatttggcagctcgtcttgcagatgatgcttttgaaagtgcttattttaaagaaatcaataagtttataagtggtttatacaattacagtttatttaactgcgattcagatgttagtctctccgagagtgataacaataaaatagcacacgctttgcgttttgcagatatattttcacattcttcaaaagaaaatcatagatcatgtgcatttgaaattataagtagaatagccttattaaaaaaacatgatccttattttaaatttataggtactgctgttattaatcggcttggggtttatgcagcagaaaaactcatatcaaaaggggtaaaattacccttagatagagaagttgattctattattaaaaaatcagttcagaaaacagatgaagatggagtatatttcactgataaacaacatgagttatacaaacttttaaaaagtagcaaaacaattagttttgctggtcccacttcgatgggaaagtcatttgttattaatgcatacattaaggaaataactcttaaaaaagagcttaaaaatatagctttaattgttcctacacgggctttaataagccaaaatgcacttaagttaaaaattgatattgcattgtataagaatgaaagcccttataaagttgttacgacatcctacatgattaatggtgatgaaagtaaaaataaaggctatatttttattctcaccccagaaaggctggttagtctcataagcactattcctggactaatgattgattatgtttttgtagatgaagctcaaaagttaacaacaaaaaatgattcgaggagtcttgttacttattcagctatagagcaaacaattagtaaaaatcctgaggcaagattattcttctcttcacctaatttatctaatcctgaaatatttaatattttgtttgatagaaaagacgcttcggtatatagaaatacagaaggtgcaactactcagaatatgtattttattgatcttttaaatagcagctttagctatgttaataccgagaaaaggacgcttgaaaaaatagatgagatctctaatacttacacgaatacaaatgatgttatctataaattaaataatggtaaaagtaaaataatttattgtggggggatagaaagcacgcttgagagaacacgtagctttatcaattatctcaaaattaataagaaaaaaagaaagcatttaaatttagaaatatcttctgagataagaaactttgttcatgataactatgaacttgcagaagccatcaactatggtgttgctttccactttggaaacttgcctcaatcgattcgagatttaattgagcatcatttcaaaataggaaatattgactatctattctgtacatcaaccctacttgagggagtcaatttacctgcaagatccgtatttattcttacgcataaaaaaggccccagtccattagagtcggttgatttttggaatctggctgggagagctgggcgattatctatggaattgtcaggggatattttttgtattagggatgataataagctttggaataaaaaagctgttgataatatccttctgtctgacaaaaataacatttcattaaagccaagcttctatattgaagacgaaaaaagattgaacgatttacaccatataattacgactggtaaaacagggaatattaaaaatgctgagttccttagaactttaggagatatgataagaatagacactctgagggattctaaagaacttcctcttattagttatttccaaagcagtggaaaatcagaaattttgttaagtgcagaaaaaagcactgaaaatattaccatgccaatgaatatccttttggcaaatagtcatattgcgattgattcgcagtatcatgcttttaaaaaaataaaaagccttacagttaaggaactgaaattatcatggcagcctacatacgaagaaattaaagaaaaattgaatttgatattcgatatttaccaagttgaaaagtttgcaacaggtagagaacgtctttatttaaattcaattccatattatgcagtattactgtttcaatggattcgtggaaatagtctacaggaaattatctcgggggcaattgcttatagaaagaacaaaagtatatatattaaaaatacacctgttctttttgacagcgaaaacccagctcatttaactgcattagttaatgaaactataaaagacattgagttgcgtgtaggttaccagttacaaaattatttttcacattactgtcagcttctgaattatgtgttacaaggaaatccaggggcaaactggtctcagttcattgagtttggctctaatgagccaatagtatggcacctacaaatgatgggcttttcaagggatagtgcagtttttctcaagaagaatttttcaaaacatcttaaacttgataatgaaatgaataaactcatcataatggataaggaactgatcaagcgttctttcaaaaaagatggactacattacttagaaatccaatcgttattataa

SEQ ID NO: 58704 - DNA, 894 bp, Escherichia coli KTE79; identical to SEQ ID NO: 58690

SEQ ID NO: 58705 - DNA, 2580 bp, Escherichia coli KTE79; identical to SEQ ID NO: 58703

SEQ ID NO: 58706 - DNA, 945 bp, Escherichia coli MP021561.2
atggatgctttacagaccgcgttagataagttattgagggatgatggcgatacaatttatagttacttccatgaaataaaatcagattatttgattgaaggaacttctgcatcctgccattttcattgtatcaatttagatggtaatggacgccctaaaatcaatgctctgattcaatttttagttgggaaagttattgactacgcaattccgcgtaaaaagataaatgaggcaatgcaatatcaacgtgatactggatcaacacttaaaattactaaattgttcatgcaagctatggggttgtttactagcctttcaaatagtggtgaaggtggggagttaatattgttcttgttcgcggaaaaatttttaaaactcccgcaaatcatttgtaaaatgaacttaaaaacaaaccctgaaatgcattaccatggtgctgacggcgtacatataggtgttgataatcacagtcaaaaattgtgtttatattggggggaatcgaagctatattctgatttaagtcaggcaatatataaatgcatgaaaagtatatcacctttgattactagttcattaggtactgggagtgcggaggaaagagatattcagttgctaagtgactttatgaatgtggatgaccctaaactagaaaatgcattaaagaaatttttggatcccgatgagcctgagtttaataaactagagtatcgtggtatttgtttggtcgggtttgatattgatgattatccaactgaaccaaataagttaaatattaatgacttggtgagttcttttaataacaagattgatgtatggagagatagtataaagaaaagaatagtcgaggaaaatatttatgggatatcattacatgtgtttttagtaccatttccatcagtggatagttttaggaaggcattgctttcctctttggcaggagagtaa

SEQ ID NO: 58707 - DNA, 2580 bp, Escherichia coli MP021561.2
atgagtatgaaagaactacctaactggttagtccacaataaaggttttataaaaaaaatagaaaaattaactatcgcatctgtagttgaccaatttccttcggttaaggcgtctcatgaaaaaaatatttctgattcggatattagttatctattaacttgtggaagtatcttgtcacaatcaaatgatgaactctgccaagacgctgccttgaggatttctcaatattgtttagttaactcttttagtgcgcagcggaaagacagtgccgcattgattttagatgctttggcaaataatgcgacagtagcattggcaatagaaaaaggttttcttagtgaggggtttgagaaaagactacctatagctggtcagcttgaaacaatgaagaggaaaattgaaaacacaatagaaattgggaatgataaatttatttatgcaaataaatttcaatctgaattttgggatagtgctcaacaaagcgaatggataagcatctcagctccaacatcagttggtaagtcttttattttagagtcttgggtagaggactatatctacaagagagaaaaaagtttaattatttatttggtgcctacgagagcattaataagtgaagtgtttgaatctattttgacacggcttgacccgaatagaactggtgtaattaatatacaaacattaccactcagaagtgcttatgataactcaaggacgaatgtttttatattcactcaagaaaggcttaacatattttataattctttaaatgaaaagcctgtagtggatcttttaataatagatgaggctcataaaattggtgattcactcagaggaatattcttacagtatgtgttggaaatgacatgtgctaggaataggaatattaaggttatttttgctagcccttttacttctaatcctgaactgttattgttagatgccccctataaagggaaaacaagtgttataaaaagtagctatgttactgttaaccaaaatttgatttgggttgagcaacgtccaaatactcctaaaaaatggcggatgtactttttttttaggggagaacgaaaatttattggggattttgaactagaaaatacgccctcttcagacagtaaacgattgtcttttattgcactgacgctgggaagacatgtatctggcaatgtggtttatgtaaacggtgctgctgatgcggagaaaacagctaaacaaattgcagatggtttggagcaatatactgaggatgaagatgttctaaatttaattgagttaagcgagaaagttattcatgaacgatttgctctcaatgttacattgaggaaaagagttgcatttcattatgggaatatgccattaataataaaaactgagatcgagagattatttagcaaaggaaaaataaaatatttgatttgtacttccactctagtagaaggtgtaaatttggcctgtaaaaatatttttattcgtgggcctaagaaaggtagtggtaaacctatgcaagaggatgatttttggaatttagctggtagagctgggcgatggggtaaagaatttcaagggaatgtgatttgtgttgatactaataatgaaagaatttggaatggtacgcctccagttagtaagaaaaacattaagataattcgtgcaacagactcattgcatgatgagattgattctatttatgaatacattgattcaccttatcattatggaatgacacgagcaaatcctagattacagggattgtttagttatttatgtatatcatattatcttcatgatgggctgatatttaatccctactttgaaaagtataatttagaaaacttagatgaattggatgctaaaattactaatgtattagatttgttgagttttcctcttgaagtggtagctcgtaatccgggtattagcccaatattaatgcaaaaactgtgggacaggttttgtgattgcgatagagaaaatttagaaaaactactcttagctgatccgtcaagcgatgatgctttatcttcatatgttgcagcctttagacgcatatctgatacgatgagtattgaattaggatataattcgaaaggcacatttgttttggctttgttggtaattaagtggatgagagggtacccattagcaagattgatatcagaaagaatagactattataaaaataaaaataaagaatataaagagccttctgtaataagaagtgttatggaggatgttgagagggttgctaggtatcaagctccgaaactactttcttgctataatgatttgttaagatatttttatatttctgaaggtcgtgccgaccttgttgaatacattgatgatataggggtttatttagaactgggtgtaagcataaaaacgcaaatatcactgattagcctaggcttttcacgaacttcagcggttatgatatctgaatatattacaagcgataatttagatgagttatcttgtatgcaatggattaatgaaaatagcagtttacttgatgatttacctgcattagtaaaaatggaaatttactcaattgttaatggaattgaactgtaa

SEQ ID NO: 58708 - DNA, 903 bp, Escherichia coli 2731150; identical to SEQ ID NO: 58674

SEQ ID NO: 58709 - DNA, 2181 bp, Escherichia coli 2731150
gtgaacactttagctgctgaaatcattagccaaataaaaaaacatttagagttcaaaaacgacctcagttttctttttgcacactcttttttgcaaaatcataaaagaacctcttttgctacaaaacaaagcaaaattggcgatgaaaacatagttatttataaaagattaattgaatctgcatatttgttttctcaatctgagtcagatgaagataagaatttagctcaaagcattgcataccatttaaatgtagtaaccggtgatgattatttgaaacaaatgtcagaaaatcttttaagagttttgggcaacttccctggagcaacttatcttcaacaagaaaatggatttataccagaaagtttttatgccttcttaaaaagatctttcatagaaaatgaaaataaaataaagatctccaacaaagaaataacattaacaaactttcagaaaagagtatgggagtcattgcactcgaatgtccctcaagctatatcagctccaacatcagccggaaaatcgttcttagttgtggaaatgctcgccaacggaataattagcggcgaattaaattccgccatttatatagcaccaacccgtgctttagtaaatgaaataacacaaaaatttataatcaagactttaccatatcaaaatgaggtcagagtaacatccataccaacaattaataacgaatataataagcagatatttgtcttaacacaggaaagacttcaagtattgcttgataattttgaagaaaaaatagacttggtagttattgacgaagcacaatcaatttctgacgaaattaggggaatgatattacaggactgccttgataaaattagcacacaaaaccctaatgcaaaatatgttttcctcgcgcctggtgctgaaggttttgatgatttagcagatattattggaatcgatgcaatccatattgaaaaaacaaatctatctcctgtagttcaaaacaaaattatcgtcaaagttgatccatcaaaagaaaacaacttacaattatcattattagacaattcagacatattaccgatcggagaaatagaatcgacaaggggtttcgccaatgaaaatacaagattggcggctgtcgcattagaattaggaaaaaatgaggggtctttagtttacggaaccggagctgaaaatgcagaagatgtagctaagcaaatatcttctggattacctcttttagaggatgacagtgaattacaagaactctcaaaatttataaaaaaacatgtccacgaggattactctcttgcaaacctcgtattgagaggggttggataccattatggtaaaatgccaagtttattaagagaaacattagaaaaaaatttcacgaataataaactgaagtttttagtttgcacaacaaccctttttcaaggggttaatctgcctgcaaagaatgtttttattgatacacctacacgaggaaacaggggagaaaaattagatccagcatcgctatggaatttcgcagggcgggcaggtagattaggttatgcattttcgggaaatgtttatcttattgactatgatgattgggtaaccaagcctttagattccaaaatagacttcaaaattacttcatctttaaagaaagtaattaatgaagattttgacacagtaatatcacggttagacaaaaataatcattcaggagtgacgccatatagtaatattgatgcagcggcaggtcttttaatctccagagccgcaaaaggagatttgcataattttcttaaaagatcatttcgaactttatctgataaatcaaaacttgaaactattgataatgccacttatatctcattagaatcacttaaaatacctcatgaggttttaactctgaactggacagttgatccatttggacaggaacgattgtacaatagatttatccagaaaataaaggaaggtaaagttgacgaacttatacctcgccatccttcaggtgatgtttacaaaaattatgttggtgtttttagcagaataaataaatacatccttaaccataacacatctaaattttctaactatctaacttcaattgctttgaattggatgaggggtaaatctctaccggagataatctctctctccataaataagaaaaaagaaaaaaatccactaggcctgtaa

SEQ ID NO: 58710 - DNA, 903 bp, Escherichia coli 2762100; identical to SEQ ID NO: 58674

SEQ ID NO: 58711 - DNA, 2181 bp, Escherichia coli 2762100; identical to SEQ ID NO: 58709

SEQ ID NO: 58712 - DNA, 1038 bp, Escherichia coli KTE35; identical to SEQ ID NO: 58678

SEQ ID NO: 58713 - DNA, 2550 bp, Escherichia coli KTE35
gtgaacactttagctaatgaagtcatcaaccaaataaaaagtcgtttagaatttaaaaatgatcttggctttttatttgcacactcttttttgcagaagcatacacaaacttctttctctgcacttcaaggcaaaatagaaagtgacagtgtcgttatatacaaaaggttaattgagtctgcatacttattttcccaatccgagtcagacgaggataaaaacttagctcaaagcattgcatatcatctaaatataattacaagtgataactatttaaaacaattatctgagaatttattaagggcacttggtaacttccctggagcaagttatttacaagaaaaaaatggatttataccagaaaccttttatgcttatttgaaaagatctttcattgaaaatgaaaataaagtaaaaatagccaacaaagagataatattaacgaactttcaaaagaaagtatgggaatcattacattcaaatgtcccacaagctatatctgctccaacctcagctggtaaatcgtttttagtcgtagagatgcttgccaataggataattagcggggaattaaactctgctatttatatagcgccaactcgagccttagtaaatgaaataacacaaaaatttattaaaaagactttaccatatcaaaatgaagttagagtaacatccatacctacaattaacgatgaatattataaacagatatttgttttaacacaggaaaggctgcaggtccttcttgataattttaaaaataaaatagacatagtagttattgatgaggcccaatcaatttctgacgaaattagggggatgatattacaggattgcctagacaaaataagcatacaaaacccagatgcaaaatatgtttttcttgcgcctggtgccgaaggcttcaatgatttagctgatattattgggattgatacaatccacgtagaaaaaaccaatttatctccagtggtccaaaacaaaataattattaaagttgatcctgcgaaagaaaataatttacaactatcattattagataactcaaatatattatctataggtgaattaacttcaacaagaggatttgctaatgaaaatactagattagctgctgtagctttagaattaggaaaagatgagggttctcttgtttacggaaccggagctgctaatgcagaagacgttgctaagcaaatagcatctgggttgcctcttctagaaaatgatagcgatttgaaagaactttcaaagtttataaaaaaacatgtccataaggattactctcttgcaaatctggtattaagaggggtggggtatcattatggtaaaatgcctagcttattaagagaaactttagaaaaaaactttacaaataacaagcttaagtttttagtgtgtactacaactctattccaaggggttaatcttccagcaaaaaatgtttttattgatacacctactcgagggaacagaggagaagcattagatccagcatcgctttggaatttcgcagggcgggcaggtagactaggttatgctttctcggggaatgtatatcttattgattatgatgattgggaaacaaaacctttagattctaaaatagatttcaaaattacatcatcttttaagaaagtaatcaatgaagattttgacacagtaatatcccgtttagataaaaacaatcatttaggagtaagccaatatagtaatgttgatgcagcggcgggtcttttaatttccagagcagcaaaaggcgatttacacaattttcttgagagatcttttcgaacgattcctgataaatctaagcttgaaattattgaagatgctacatatagctcactagaatctcttaatatcccccataatatattgactttaaactggactgtcgatccatttgggcaggaaagattatacaatagatttattcagaagataaaagatggtaagattgacgaacttataccacgacatccttcaggcaatgtttacactaattacgttggtgtttttagcagaataaataaatacattctcaatcataatacatctaagttttctaactacctcacagccatggcattaaattggatgagaggaaaatcccttccagagatcatatctctttcgatagcaaagaaaaaagaaaaaaattctacccgaccagtgaatgtagaccgagctgtacgagaggtttttgatttcgttgaggacaacctgcgattcaaatacgttcaacttggtaaggcatatattgatttattgcgacaagctttaattgtaaataatcaagctgaaaaagcggaagaaatatatgacttccctttatcacttgaattaggtgtttcctcaatcgctggacaagtttttattgagctggggctatcaagaatatcagcatcctatcttgaaaatataatcccaaactctaatcctacgataagcacggcaaaagagtggctaagaaacaatgattatgattcattaaatttgccactcaccatttattcagaattagaagataagggattgttataa

SEQ ID NO: 58714 - DNA, 1038 bp, Escherichia coli KTE34; identical to SEQ ID NO: 58678

SEQ ID NO: 58715 - DNA, 2550 bp, Escherichia coli KTE34; identical to SEQ ID NO: 58713

SEQ ID NO: 58716 - DNA, 1623 bp, Escherichia coli KTE185; identical to SEQ ID NO: 58694

SEQ ID NO: 58717 - DNA, 2142 bp, Escherichia coli KTE185; identical to SEQ ID NO: 58695

SEQ ID NO: 58718 - DNA, 1617 bp, Escherichia coli KTE108
atggagtcgaacgattcaggcggagtagccgccaagcacggtttcttatttcaggactgcgtagccgcttaccatgtcacccgaatgcttcgtgacaagactatccgcagtgtgcgctgcgaggtcacagacgatatcgacattgtatctgatggatacatcgacttcgttcaggtaaaaagcaccggcaaaacacgttggaacatttcggacatcgttcagaattcaaaaggtgctgataaaaagacgatcccctgcagttcaattttgcacaaatcaatgcagtgtgagtctgacctgtcccttggacgtaggtactccatcgtcacagaggaaaaggtcaacaaaacccttgagtacttgacgatcagcccaaacgcccgactagataagccaggtcgacaggaactcatcgatgacctcaacaaacgcacagacaattttttaacagactcaggtataagcgtttcagattggatcgatgcggctacatgggaagtgttttcatccctgcgcgaactggaacttctagggatcaagaacatacggctggcctcccaagatctacatggggtcattctcagttccgaaaccgtcgccgaagacatttggtgccgcatccttgatactgtgacgcgcaagggcgagcattctcgacgcattcacagtgctgatgacaagtcctacttacgaccagacctacttgagtggttcaagcagcgtgtcgaagatgaccaatctcggtcaggccgcaaaatctacgtcaaacgggacttaccccacatccttacgccatttagagcgcctatggcttcggtctgcgctaagcgtaaaggccaggttctacatcagcagtactcacttaagaaataccgctacaagcacatcgcggataacgtctgccaatggttggatgaggtttttctccgaccaaaagaaatgtctgatattcataaactgacattcattgaaaagcgagaacgactaaagaattccgtcttcaaatcgctccatgacgtcagcgaatttttgggtcgagtgctgttgcacgcaacgatccggcagcaccacgaaagccagcctattccttgcatgctatacgtggaaaaagcaggggccgaaaaaattcttgaaaacgtgcatatcgttcgccgcgatccagaaggtgatcagctttggattggcttcagcgagttggtgactgatattaacattgccgtcagattgccggagatacgggatcagttgtacgaggacatttcggattgcatcgataccgcgcgcaaaaaaatcctcgacattaaagacgataactacctgcttcgccacgacattgacgaaattcttgatggcagccaacctttcgatgctcacctcgatcgtttcacgtttgttctgttcgtgggctacgactctaatctactaaccgagcctgaaacgccggggttcgaggatgacctggagaaagaaacagcggtgctgttcgaaaaattcgcggctgacctcatcgaggattcgccgtttgcgaatctttgcatccacgtattcatttatccagccccgagtcttgagcggttaacccaattagttgatgagaaggtgagagaggtcgtatga

SEQ ID NO: 58719 - DNA, 2190 bp, Escherichia coli KTE108
atgacagagatctatgaacaggcgaaacatagcctgcagggtgaggacttctcatcgttcaattatctgtttgcggttaacaagctgttgtctaaccctgtttcgtatgacttgggacgggacttgatcgtgcgagctctcgattcgcgcgagcggttttccgagcacaccacaattttgaaaaatatggtgagaaaatcaggtttgttcccgtatctcaaaaaggagttcaccagcctgacaccggatgacctgagggtgcttgagctataccggacgccattctcggatggttatgttttccactcaatgcagttccacatattcgatctgctcaagtctggtcaaaacgtggtgctgagtgcacctacaagcatgggcaaaagtgcaatcgtcgattcattgctcggcatgggaactttgaaacggcttgttctggttgttccaactgtggctcttgccgacgaaacccgtcgccgactgcaagagcgattcggtgaccgatatcagatcatccaccacagttcccaagtgtgccattccgatcaggctgtttatgtgttaactcaggagcgagtgaacgagcgtgacgacatcgtcgacattgacctcttcgtcattgacgagttttacaagttggcgttccgacaactgaaaagcggggacattgatcatcaagacgaacgagtcatcgagctcaacattgcgttaagcaaactgcttaaggtctccaggcagttttacctgacgggaccgttcgttaacagcattcgcggtctcgaaaaacttggatatccgcatactttcgtttctaccgacttcaatacagtcgcgctagatgttaagacgttcggcatcaaagcgaatgacgacaaagccaagctcaaagcgctgggggaaatcgcgcacgcatgtgtcgacgcaacgatcatttattgcaagtcaccaactgttgcgggcctggtggcgcgcgagctgatcaggcttgggcatggcactccgactgagaatccccatgtcgactgggtcagcgaagagttcgatgccgactgggattacacagtcgcccttagaaacggtattggcttgcattttggcgcgctaccgagggcactgcagcaatacactgccgaccaattcaatgctggaaaactgcgctttttgctctgcacctccacgatcattgaaggagtcaacactatcgctaagaacgttgtgatctacgacaaccgcgatggaactcgcagcattgacaaattcacccatgggaacatcaaaggtcgcgccgggcgcatgggcgttcacttcgtcggcaaaatcttttgcctggaggaaatcccggaagacaatctcaatcaagaggtggatattccgctcggtattcaggacattgataccccaatcaacctgttagccagcgttcaaccagaccacttgtccgagttttcacaggatcgctttgatgaggttttcataaacgaccgtgtttccatcgaccttgtgaagaagcattcgtacttccgtgtcgagcagttcgaaatgctgcaaagcatgttcgagatgatggacgataacgaattttcctcgttagtgtttcactggactcccgcgacaaacttcctcaagacctttgcaaagatcattgccagactggttccccatacgttcagtcgcaatggggtccctgttaagcctacggatgtcatgatcgcaaaacttgccggctatttaagtgctgaaagttattcggaatatctgaaaaatcagatcgattatgcacgacagtggatttctgaaggggagaaacgtactctttccattgccctcaacaatgatttgaagctcataaccaataccttcggctataccctacctaaggtgctcagcttgatggaggatgtagttaaacaccacgctgtaaagcgtggtatacgcagcaaagtcgattacacacatgtcaaattggcgttcgaaagtttccatctaccaccaggtgtcaatgccttagaagagattggcattcccattcagacgttacaccgactggtagacttgctggaattttccgacgaggctgatgtggatgagttgagccagtatcttcgggatactcaggacatttggagtagatcgattgggtacgttgatcagatgtttatcaggcgcgcgctcggtattagacgacattga

SEQ ID NO: 58720 - DNA, 894 bp, Escherichia coli HVH 6 (3-8296502); identical to SEQ ID NO: 58690

SEQ ID NO: 58721 - DNA, 2580 bp, Escherichia coli HVH 6 (3-8296502); identical to SEQ ID NO: 58703

SEQ ID NO: 58722 - DNA, 942 bp, Escherichia coli HVH 82 (4-2209276)
atggatgcactgcatgtcgcgcttgaaaatctgattagagatgatggtcaaacactaaatagttattttagtgaagttaaagttaattcattgattgaaaatacaaatgcaacttgtcattttcattgccttaatcttgatggcaatggacgtcctcgggtagacgcgttaatccaattcttgaacgataaagtagttgattatgctattccaaggaaaaaaatcaatgaggcagtgcaatattttaatgaaacacaatcaacagcgaaaataacaaaattagcaaatcaagcaaaaaaattatttactaggcttgcaaatagtggcgaaggcggtgaatttattctttttttatttgcagagcaattccttagatttccacaaattatttgcaaaatgagcctgaaaacgagttctcaaatgcattaccatggtgcagatggaatacatataggcgtagataaagataataaaaaattatgtttatactggggcgagtctaaactctattccaatctgagcaaaggtatttctgagtgtatggatagtatagctccattacttcaaagttctatgggaatagaaggcgctgagacacgtgatatgcagttgctggagtcgcacttaaatgttgatgatatagaactagaacaagcgttgaaaagattcttagatcctgatagcccggattttaataaattggaatacagaggaatatgcttagttgggtttgatcttaaagattatccacaagggcccagttcaattgatatcagtgaactagttgctttgattaatactaaagtcgggaaatggtcaactagtgtgcaaggtggtatagttaataaaaaacttgatcgctttgctatgcatgtttttattcttccttttccttcagtaaaagcatttagggctagtttaattaaagcattggagagttga

SEQ ID NO: 58723 - DNA, 2583 bp, Escherichia coli HVH 82 (4-2209276)
atgtcgttgcgagatttatctgggtggttgattaagaatcaaggattcttaagaaaatatcaggcattagtcgctaactcgataaaagatcaatttccagagttaaaatcagatgtaatcccacagattagttctgaggatgtcggctatcttttaacatgtgctagttctttggctttctcaagtgatgagaaatgccaagatgcagccttaaggattgcacagtattgcttattgaatgaaaaaagtgaagcaagaaaagatagtgctgcattaattcttgattcattatctaataatccagcaatacaacttgctgaaaatagggggtatcttaaccctgatttcgaagaaagattacccttaaaggctcagttagaactaactaaaagaaaaattctatatacaattgaaatagatgctgataagcatatttatgctaataggtttcaatcagagttttgggatgcggtacaagaaaactcatgggttagtgtctctgctcctacctctgtaggaaaatcatttatcctggaatcttgggtggagcagtttgtaaaaagaaataagaattgcttagttatttatatcgtaccaacaagggcattgatttcagaagtatattctgagttgcaaaaacgtttggatcctaatttaacaaatatagttaatattcagacactaccattgagtaatgtataccagagcgaaaaatctaatgtcttcatatttacacaggaaagattaaatttattctacaatcatttctcacaaattccaaagatagacgtcttagttgttgatgaagcacacaagatcggtgatggtggaagaggtgttattcttcaacatgtaattgaactgacttgtctaaataaccctgattcaaaagttatctttgcaagtcctttcaccttaaatcctgaaatattgctcagtgatgctccaatattaaaaaacaaaagaactataaaaagtgactatgttacagttaatcaaaatttaatatgggtagaacaaaaaccacgcaagaccaaagattggttgatgtattattttgcaaacggtgaaaaacgcgagttaggaaacttttctttagaaaatgcaccatctcctgaaagtaaaagattgccttttgtagctctttgtttaggtaagggggcttctggtaacgtagtttacgtaaatggagccgctgaagcagaatctacttccaagctaatatctgcaagtatagaaaatgagactgaggatgaagaaattttagctctcgttgagcttagtgagacaattatacataaaaatttcgcattaaatcgcactctaaaaaagagagtcgcttttcattatggcaacatgcctttaataataaagggcgagattgaacgattgtttagtaaaggtaagattgattttttaatttgtacctcaactttagttgagggcgtaaacatggcttgtaaaaatatttttataagaggccctaaaaagggtaattcaaccccgatgcgagaagaggatttttggaatcttgctggcagagctggtcgttggggaaaagaattccaaggtaatgtcatctgcatcgatagcgacaatgaaaaaatttggaatggagagcctccaaaaaccaaaaaaaatatatttataactcgcgccacggatgctatttcccatgacatggataagttggtttcctatattttttcagagcatcattttggtatgtctgagcggaatcctaatctccagagtctatttagttatttatgttcatcattttatttttataatggcttggataataatccttacatggaaaagtacaatataaaaaatatcgatgttttaaatgaagcaatatttgatgtttttgattctttaacttttccacacgaattggttgtgcggcatcctggtataagcccgcttttaatgcaaaacctttgggatagattttcgcgggatacaaacaaacctgtagagagattactgctttctgaacctggtagtaatgatgcgttagattcatatgtatccgcattctctagaattagtgatactctgagtaagaagctaggttataattcaaaaggagcttacgtacaggccttgttagtttccaagtggatgaaaggttatcccctagcaagattgatctcggatagaataagatataacaaaaagaaaaatattgttttcaaagaagcgactttaatacgaggggttatgaaggatgttgaagagatcgctcgctatcaagctccaaggcttttaggatgttataatgatttattaaaaagcttttatctttcgatagatcgcacagacttagcaaaagatgttgaagatatcggtgtttatttagaactgggtgtaagtttaaaaactcagatttcactaatagggcttggcttttcaagaactgctgctgtaatgatttcagagcttattcctaatgatagtttagatgaggaagaatgcattaattggattaaggacaataaagttgacatggaagaactgccacaattagttcaaaacgaaatacataatatatttcgtaacttttgggtacaatag

SEQ ID NO: 58724 - DNA, 894 bp, Escherichia coli KOEGE 118 (317a); identical to SEQ ID NO: 58690

SEQ ID NO: 58725 - DNA, 2580 bp, Escherichia coli KOEGE 118 (317a); identical to SEQ ID NO: 58699

SEQ ID NO: 58726 - DNA, 942 bp, Escherichia coli KOEGE 131 (358a); identical to SEQ ID NO: 58722

SEQ ID NO: 58727 - DNA, 2583 bp, Escherichia coli KOEGE 131 (358a); identical to SEQ ID NO: 58723

SEQ ID NO: 58728 - DNA, 903 bp, Escherichia coli UMEA 3212-1
atgaatgctgaagatactaattcattacataaaatatacaatcctgtatatgggttgagtaatatcgtattacttgctaaagagtgtcagtctacagatccagtaaaagttaatcttctatgcctcggattcaaagaagatctacctaaagacaaagagcttgcggaaactctatttttagaattagttcattattgcattcctcatccagtgttagttaaacgaaaagagttagcacgaagtgagggaaaggatgaggcaagactttatagtgaacttgcaagggaagcacgcagcctttttatgaaatacaaattagaaagtgctgtaaaaataaaaaatggtgaaccccctgaaaagttcgaacaacgagtgaaaaatgctaacttacgttatggtgaagttggtgagctaatatcatattgtatagcaattcattttttaaaagcgtcacaattagtctcaaaaatggctcttaagacatcctctgaagtgcctgtctttggtcttgatggcattcatgcaaccatagacagtaaaggaacattgacggtattttacctagaatctaaaatgaccagggagtttgatagcggttctgaacaattttcaaaatcagttagtgggtttgaaagcgatagaaatagtcgtagaaatgaatacagaatactgcaggacttgagtaatttagagtctcttgaaggagaagaacgaaaaaaggcaatacaatactttgatccttactctaatgaatcatcaaatgtcagagagcgtttcgttagaataattgcctacaatgaagaaagctataaatctaaaatagctattgatgatgagtccccactttccattcatttagaccactttaaaaaaattacgtcagcacttttgaagaaaaaataa

SEQ ID NO: 58729 - DNA, 2181 bp, Escherichia coli UMEA 3212-1
gtgaacactttagctgctgaaatcattagccaaataaaaaaacatttagagttcaaaaacgacctcagttttctttttgcacactcttttttgcaaaatcataaaagaacctcttttgctacaaaacaaagcaaaattggcgatgaaaacatagttatttataaaagattaattgaatctgcatatttgttttctcaatctgagtcagatgaagataagaatttagctcaaagcattgcataccatttaaatgtagtaaccggtgatgattatttgaaacaaatgtcagaaaatcttttaagagttttgggcaacttccctggagcaacttatcttcaacaagaaaatggatttataccagaaagtttttatgccttcttaaaaagatctttcatagaaaatgaaaataaaataaagatctccaacaaagaaataacattaacaaactttcagaaaagagtatgggagtcattgcactcgaatgtccctcaagctatatcagctccaacatcagccggaaaatcgttcttagttgtggaaatgctcgccaacggaataattagcggcgaattaaattccgccatttatatagcaccaacccgtgctttagtaaatgaaataacacaaaaatttataatcaagactttaccatatcaaaatgaggtcagagtaacatccataccaacaattaataacgaatataataagcagatatttgtcttaacacaggaaagacttcaagtattgcttgataattttgaagaaaaaatagacttggtagttattgacgaagcacaatcaatttctgacgaaattaggggaatgatattacaggactgccttgataaaattagcacacaaaaccctaatgcaaaatatgttttcctcgcgcctggtgctgaaggttttgatgatttagcagatattattggaatcgatgcaatccatattgaaaaaacaaatctatctcctgtagttcaaaacaaaattatcgtcaaagttgatccatcaaaagaaaacaacttacaattatcattattagacaattcagacatattaccgatcggagaaatagaatcgacaaggggtttcgccaatgaaaatactagattggcggctgtcgcattagaattaggaaaaaatgaggggtctttagtttacggaaccggagctgaaaatgcagaagatgtagctaagcaaatatcttctggattacctcttttagaggatgacagtgaattacaagaactctcaaaatttataaaaaaacatgtccacgaggattactctcttgcaaacctcgtattgagaggggttggataccattatggtaaaatgccaagtttattaagagaaacattagaaaaaaatttcacgaataataaactgaagtttttagtttgcacaacaaccctttttcaaggggttaatctgcctgcaaagaatgtttttattgatacacctacacgaggaaacaggggagaaaaattagatccagcatcgctatggaatttcgcagggcgggcaggtagattaggttatgcattttcgggaaatgtttatcttattgactatgatgattgggtaaccaagcctttagattccaaaatagacttcaaaattacttcatctttaaagaaagtaattaatgaagattttgacacagtaatatcacggttagacaaaaataatcattcaggagtgacgccatatagtaatattgatgcagcggcaggtcttttaatctccagagccgcaaaaggagatttgcataattttcttaaaagatcatttcgaactttatctgataaatcaaaacttgaaactattgataatgccacttatatctcattagaatcacttaaaatacctcatgaggttttaactctgaactggacagttgatccatttggacaggaacgattgtacaatagatttatccagaaaataaaggaaggtaaagttgacgaacttatacctcgccatccttcaggtgatgtttacaaaaattatgttggtgtttttagcagaataaataaatacatccttaaccataacacatctaaattttctaactatctaacttcaattgctttgaattggatgaggggtaaatctctgccggagataatctctctctccataaataagaaaaaagaaaaaaatccactaggcctgtaa

SEQ ID NO: 58730 - DNA, 1617 bp, synthetic Escherichia coli C321.deltaA; identical to SEQ ID NO: 58664

SEQ ID NO: 58731 - DNA, 2190 bp, synthetic Escherichia coli C321.deltaA; identical to SEQ ID NO: 58665

SEQ ID NO: 58732 - DNA, 1041 bp, Escherichia coli 113302
atgaaatctgaagacactaattcgttacataaaatatacaatccagtgtatggacttgataatatcgtattacttgcacaagagtgtcagtctacagatccagtaaaagttaatcttctttgcttaggattcaaagaagacttacccaaagacaaagagcttgctgaaactttatttttagaattagttcattattgcattccccatccagttatagcgaaaagaaaagccttaagtcaaactgaaggcaaagatgaggcaaggctttatagtgaacttgcaagagaagcacgtagtctttttatgaaatataaattagaaagtacgttaactataaaaaaaggtgaaactcaggagaagtttgaacaacgagtaaagaatgctaatttacgttatggtgaagtgggtgagttaatatcatattgtatagcaatccattttttaaaagcagcgcaattagtctcaaaaatggctctcaaaacatcatctgaaatgcctgtttttggactggatggaatacatgcaaccgtagatgacgagggaacattaacggttttttatctagaatctaaaatgacaagagagttcaccagtggctctgaacaattttctaaatcagtaagtggttttgaaaacgatagaaagagccgtagaaatgaatatagaatactacaagatttgagcaatttagagtccctagagggagaggagcgaaagaaagcagtacaatactttgatccttattcaagtgaatcatcaaatgtcagagagcgcttcgttggaattattgtctacaatgaagaagcttataaaaataaaatagcaattgacgatgaatccccactttccatccatttagatcactttaagaaaagttatatcggtagttataaagataaagtaaaaattataacagaagacctatcaaaagcgggagcgaccccgcaaaaatgtagggcgtacatctttgcattgcctgacgttgatgcttttaaattggattttgcaaaggagttatcaggtgaacactttagctcatga

SEQ ID NO: 58733 - DNA, 2550 bp, Escherichia coli 113302
gtgaacactttagctcatgaagtcatcaaccaaataaaaagtcgtttagaatttaaaaatgatcttggctttttatttgcacactcttttttgcagaagcatacacaaacttctttctctgcacttcaaggcaaaatagaaagtgacagtgtcgttatatacaaaaggttaattgagtctgcatacttattttcccaatccgagtcagacgaggataaaaacttagctcaaagcattgcatatcatctaaatataattacaagtgataactatttaaaacaattatctgagaatttattaagggcacttggtaacttccctggagcaagttatttacaagaaaaaaatggatttataccagaaaccttttatgcttatttgaaaagatctttcattgaaaatgaaaataaagtaaaaatagccaacaaagagataatattaacgaactttcaaaagaaagtatgggaatcattacattcaaatgtcccacaagctatatctgctccaacctcagctggtaaatcgtttttagtcgtagagatgcttgccaataggataattagcggggaattaaactctgctatttatatagcgccaactcgagccttagtaaatgaaataacacaaaaatttattaacaagactttaccatatcaaaatgaagttagagtaacatccatacctacaattaacgatgaatattataaacagatatttgttttaacacaggaaaggctgcaggtccttcttgataattttaaaaataaaatagacatagtagttattgatgaggcccaatcaatttctgacgaaattagggggatgatattacaggattgcctagacaaaataagcatacaaaacccagatgcaaaatatgtttttcttgcgcctggtgccgaaggcttcaatgatttagctgatattattgggattgatacaatccacgtagaaaaaaccaatttatctccagtggtccaaaacaaaataattattaaagttgatcctgcgaaagaaaataacttacaactatcattattagataactcaaatatattatctataggtgaattaacttcaacaagaggatttgctaatgaaaatactagattagctgctgtagctttagaattaggaaaagatgagggttctcttgtttacggaaccggagctgctaatgcagaagacgttgctaagcaaatagcatctgggttgcctcttctagaaaatgatagcgatttgaaagaactttcaaagtttataaaaaaacatgtccataaggattactctcttgcaaatctggtattaagaggggtggggtatcattatggtaaaatgcctagcttattaagagaaactttagaaaaaaactttacaaataacaagcttaagtttttagtgtgtactacaactctattccaaggggttaatcttccagcaaaaaatgtttttattgatacacctactcgagggaacagaggagaagcattagatccagcatcgctttggaatttcgcagggcgggcaggtagactaggttatgctttctcggggaatgtatatcttattgattatgatgattgggaaacaaaacctttagattctaaaatagatttcaaaattacatcatcttttaagaaagtaatcaatgaagattttgacacagtaatatcccgtttagataaaaacaatcatttaggagtaagccaatatagtaatgttgatgcagcggcgggtcttttaatttccagagcagcaaaaggcgatttacacaattttcttgagagatcttttcgaacgattcctgataaatctaagcttgaaattattgaagatgctacatatagctcactagaatctcttaatatcccccataatatattgactttaaactggactgtcgatccatttgggcaggaaagattatacaatagatttattcagaagataaaagatggtaagattgacgaacttataccacgacatccttcaggcaatgtttacactaattacgttggtgtttttagcagaataaataaatacattctcaatcataatacatctaagttttctaactacctcacagccatggcattaaattggatgagaggaaaatcccttccagagatcatatctctttcgatagcaaagaaaaaagaaaaaaattctacccgaccagtgaatgtagaccgagctgtacgagaggtttttgatttcgttgaggacaacctgcgattcaaatacgttcaacttggtaaggcatatattgatttattgcgacaagctttaattgtaaataatcaagctgaaaaagcggaagaaatatatgacttccctttatcacttgaattaggtgtttcctcaatcgctggacaagtttttattgagctggggctatcaagaatatcagcatcctatcttgaaaatataatcccaaactctaatcctacgataagcacggcaaaagagtggctaagaaacaatgattatgattcattaaatttgccactcaccatttattcagaattagaagataagggattgttataa

SEQ ID NO: 58734 - DNA, 903 bp, Escherichia coli ECA-727; identical to SEQ ID NO: 58674

SEQ ID NO: 58735 - DNA, 1197 bp, Escherichia coli ECA-727
  modified_base (1185)..(1185): a, c, t, g, unknown or other
ttgttttctcaatctgagtcagatgaagataagaatttagctcaaagcattgcataccatttaaatgtagtaaccggtgatgattatttgaaacaaatgtcagaaaatcttttaagagttttgggcaacttccctggagcaacttatcttcaacaagaaaatggatttataccagaaagtttttatgccttcttaaaaagatctttcatagaaaatgaaaataaaataaagatctccaacaaagaaataacattaacaaactttcagaaaagagtatgggagtcattgcactcgaatgtccctcaagctatatcagctccaacatcagccggaaaatcgttcttagttgtggaaatgctcgccaacggaataattagcggcgaattaaattccgccatttatatagcaccaacccgtgctttagtaaatgaaataacacaaaaatttataatcaagactttaccatatcaaaatgaggtcagagtaacatccataccaacaattaataacgaatataataagcagatatttgtcttaacacaggaaagacttcaagtattgcttgataattttgaagaaaaaatagacttggtagttattgacgaagcacaatcaatttctgacgaaattaggggaatgatattacaggactgccttgataaaattagcacacaaaaccctaatgcaaaatatgttttcctcgcgcctggtgctgaaggttttgatgatttagcagatattattggaatcgatgcaatccatattgaaaaaacaaatctatctcctgtagttcaaaacaaaattatcgtcaaagttgatccatcaaaagaaaacaacttacaattatcattattagacaattcagacatattaccgatcggagaaatagaatcgacaaggggtttcgccaatgaaaatacaagattggcggctgtcgcattagaattaggaaaaaatgaggggtctttagtttacggaaccggagctgaaaatgcagaagatgtagctaagcaaatatcttctggattacctcttttagaggatgacagtgaattacaagaactctcaaaatttataaaaaaacatgtccacgaggattactctcttgcaaacctcgtattgagaggggttggataccattatggtaaaatgccaagtttattaagagaaacattagaaaaaaanttacacgaataa

SEQ ID NO: 58736 - DNA, 1617 bp, Escherichia coli str. K-12 substr. MC4100; identical to SEQ ID NO: 58664

SEQ ID NO: 58737 - DNA, 2190 bp, Escherichia coli str. K-12 substr. MC4100; identical to SEQ ID NO: 58665

SEQ ID NO: 58738 - DNA, 945 bp, Escherichia coli LAU-EC7; identical to SEQ ID NO: 58706

SEQ ID NO: 58739 - DNA, 2580 bp, Escherichia coli LAU-EC7; identical to SEQ ID NO: 58707

SEQ ID NO: 58740 - DNA, 942 bp, Escherichia coli
atggatgcactgcatgtcgcgcttgaaaatctgattagagatgatggtcaaacactaaatagttattttagtgaagttaaagttaattcattgattgaaaatacaaatgcaacttgtcattttcattgccttaatcttgatggcaatggacgtcctcgggtagacgcgttaatccaattcttgaacgataaagtagttgattatgctattccaaggaaaaaaatcaatgaggcagtgcaatattttaatgaaacacaatcaacagcgaaaataacaaaattagcaaataaagcaaaaaaattatttactaggcttgcaaatagtggcgaaggcggtgaatttattctttttttatttgcagagcaattccttagatttccacaaattatttgcaaaatgagcctgaaaacgagttctcaaatgcattaccatggtgcagatggaatacatataggcgtagataaagataataaaaaattatgtttatactggggcgagtctaaactctattccaatctgagcaaaggtatttctgagtgtatggatagtatagctccattacttcaaagttctatgggaatagaaggcgctgagacacgtgatatgcagttgctggagtcgcacttaaatgttgatgatatagaactagaacaagcgttgaaaagattcttagatcctgatagcccggattttaataaattggaatacagaggaatatgcttagttgggtttgatcttaaagattatccacaagggcccagttcaattgatatcagtgaactagttgctttgattaatactaaagtcgggaaatggtcaactagtgtgcaaggtggtatagttaataaaaaacttgatcgctttgctatgcatgtttttattcttccttttccttcagtaaaagcatttagggctagtttaattaaagcattggagagttga

SEQ ID NO: 58741 - DNA, 2583 bp, Escherichia coli; identical to SEQ ID NO: 58723

SEQ ID NO: 58742 - DNA, 903 bp, Escherichia coli O25:NM str. E2539C1; identical to SEQ ID NO: 58674

SEQ ID NO: 58743 - DNA, 2181 bp, Escherichia coli O25:NM str. E2539C1; identical to SEQ ID NO: 58709

SEQ ID NO: 58744 - DNA, 1038 bp, Escherichia coli 3-373-03_S3_C1; identical to SEQ ID NO: 58678

SEQ ID NO: 58745 - DNA, 2550 bp, Escherichia coli 3-373-03_S3_C1
gtgaacactttagctaatgaagtcatcaaccaaataaaaagtcgtttagaatttaaaaatgatcttggctttttatttgcacactcttttttgcagaagcatacacaaacttctttctctgcacttcaaggcaaaatagaaagtgacagtgtcgttatatacaaaaggttaattgagtctgcatacttattttcccaatccgagtcagacgaggataaaaacttagctcaaagcattgcatatcatctaaatataattacaagtgataactatttaaaacaattatctgagaatttattaagggcacttggtaacttccctggagcaagttatttacaagaaaaaaatggatttataccagaaaccttttatgcttatttgaaaagatctttcattgaaaatgaaaataaagtaaaaatagccaacaaagagataatattaacgaactttcaaaagaaagtatgggaatcattacattcaaatgtcccacaagctatatctgctccaacctcagctggtaaatcgtttttagtcgtagagatgcttgccaataggataattagcggggaattaaactctgctatttatatagcgccaactcgagccttagtaaatgaaataacacaaaaatttattaacaagactttaccatatcaaaatgaagttagagtaacatccatacctacaattaacgatgaatattataaacagatatttgttttaacacaggaaaggctgcaggtccttcttgataattttaaaaataaaatagacatagtagttattgatgaggcccaatcaatttctgacgaaattagggggatgatattacaggattgcctagacaaaataagcatacaaaacccagatgcaaaatatgtttttcttgcgcctggtgccgaaggcttcaatgatttagctgatattattgggattgatacaatccacgtagaaaaaaccaatttatctccagtggtccaaaacaaaataattattaaagttgatcctgcgaaagaaaataacttacaactatcattattagataactcaaatatattatctataggtgaattaacttcaacaagaggatttgctaatgaaaatactagattagctgctgtagctttagaattaggaaaagatgagggttctcttgtttacggaaccggagctgctaatgcagaagacgttgctaagcaaatagcatctgggttgcctcttctagaaaatgatagcgatttgaaagaactttcaaagtttataaaaaaacatgtccataaggattactctcttgcaaatctggtattaagaggggtggggtatcattatggtaaaatgcctagcttattaagagaaactttagaaaaaaactttacaaataacaagcttaagtttttagtgtgtactacaactctattccaaggggttaatcttccagcaaaaaatgtttttattgatacacctactcgagggaacagaggagaagcattagatccagcatcgctttggaatttcgcagggcgggcaggtagactaggttatgctttctcggggaatgtatatcttattgattatgatgattgggaaacaaaacctttagattctaaaatagatttcaaaattacatcatcttttaagaaagtaatcaatgaagattttgacacagtaatatcccgtttagataaaaacaatcatttaggagtaagccaatatagtaatgttgatgcagcggcggggcttttaatttccagagcagcaaaaggcgatttacacaattttcttgagagatcttttcgaacgattcctgataaatctaagcttgaaattattgaagatgctacatatagctcactagaatctcttaatatcccccataatatattgactttaaactggactgtcgatccatttgggcaggaaagattatacaatagatttattcagaagataaaagatggtaagattgacgaacttataccacgacatccttcaggcaatgtttacactaattacgttggtgtttttagcagaataaataaatacattctcaatcataatacatctaagttttctaactacctcacagccatggcattaaattggatgagaggaaaatcccttccagagatcatatctctttcgatagcaaagaaaaaagaaaaaaattctacccgaccagtgaatgtagaccgagctgtacgagaggtttttgatttcgttgaggacaacctgcgattcaaatacgttcaacttggtaaggcatatattgatttattgcgacaagctttaattgtaaataatcaagctgaaaaagcggaagaaatatatgacttccctttatcacttgaattaggtgtttcctcaatcgctggacaagtttttattgagctggggctatcaagaatatcagcatcctatcttgaaaatataatcccaaactctaatcctacgataagcacggcaaaagagtggctaagaaacaatgattatgattcattaaatttgccactcaccatttattcagaattagaagataagggattgttataa

SEQ ID NO: 58746 - DNA, 1038 bp, Escherichia coli 3-073-06_S4_C1; identical to SEQ ID NO: 58678

SEQ ID NO: 58747 - DNA, 2550 bp, Escherichia coli 3-073-06_S4_C1
gtgaacactttagctaatgaagtcatcaaccaaataaaaagtcgtttagaatttaaaaatgatcttggctttttatttgcacactcttttttgcagaagcatacacaaacttctttctctgcacttcaaggcaaaatagaaagtgacagtgtcgttatatacaaaaggttaattgagtctgcatacttattttcccaatccgagtcagacgaggataaaaacttagctcaaagcattgcatatcatctaaatataattacaagtgataactatttaaaacaattatctgagaatttattaagggcacttggtaacttccctggagcaagttatttacaagaaaaaaatggatttataccagaaaccttttatgcttatttgaaaagatctttcattgaaaatgaaaataaagtaaaaatagccaacaaagagataatattaacgaactttcaaaagaaagtatgggaatcattacattcaaatgtcccacaagctatatctgctccaacctcagctggtaaatcgtttttagtcgtagagatgcttgccaataggataattagcggggaattaaactctgctatttatatagcgccaactcgagccttagtaaatgaaataacacaaaaatttattaaaaagactttaccatatcaaaatgaagttagagtaacatccatacctacaattaacgatgaatattataaacagatatttgttttaacacaggaaaggctgcaggtccttcttgataattttaaaaataaaatagatatagtagttattgatgaggcccaatcaatttctgacgaaattagggggatgatattacaggattgcctagacaaaataagcatacaaaacccagatgcaaaatatgtttttcttgcgcctggtgccgaaggcttcaatgatttagctgatattattgggattgatacaatccacgtagaaaaaaccaatttatctccagtggtccaaaacaaaataattattaaagttgatcctgcgaaagaaaataatttacaactatcattattagataactcaaatatattatctataggtgaattaacttcaacaagaggatttgctaatgaaaatactagattagctgctgtagctttagaattaggaaaagatgagggttctcttgtttacggaaccggagctgctaatgcagaagacgttgctaagcaaatagcatctgggttgcctcttctagaaaatgatagcgatttgaaagaactttcaaagtttataaaaaaacatgtccataaggattactctcttgcaaatctggtattaagaggggtggggtatcattatggtaaaatgcctagcttattaagagaaactttagaaaaaaactttacaaataacaagcttaagtttttagtgtgtactacaactctattccaaggggttaatcttccagcaaaaaatgtttttattgatacacctactcgagggaacagaggagaagcattagatccagcatcgctttggaatttcgcagggcgggcaggtagactaggttatgctttctcggggaatgtatatcttattgattatgatgattgggaaacaaaacctttagattctaaaatagatttcaaaattacatcatcttttaagaaagtaatcaatgaagattttgacacagtaatatcccgtttagataaaaacaatcatttaggagtaagccaatatagtaatgttgatgcagcggcggggcttttaatttccagagcagcaaaaggcgatttacacaattttcttgagagatcttttcgaacgattcctgataaatctaagcttgaaattattgaagatgctacatatagctcactagaatctcttaatatcccccataatatattgactttaaactggactgtcgatccatttgggcaggaaagattatacaatagatttattcagaagataaaagatggtaagattgacgaacttataccacgacatccttcaggcaatgtttacactaattacgttggtgtttttagcagaataaataaatacattctcaatcataatacatctaagttttctaactacctcacagccatggcattaaattggatgagaggaaaatcccttccagagatcatatctctttcgatagcaaagaaaaaagaaaaaaattctacccgaccagtgaatgtagaccgagctgtacgagaggtttttgatttcgttgaggacaacctgcgattcaaatacgttcaacttggtaaggcatatattgatttattgcgacaagctttaattgtaaataatcaagctgaaaaagcggaagaaatatatgacttccctttatcacttgaattaggtgtttcctcaatcgctggacaagtttttattgagctggggctatcaagaatatcagcatcctatcttgaaaatataatcccaaactctaatcctacgataagcacggcaaaagagtggctaagaaacaatgattatgattcattaaatttgccactcaccatttattcagaattagaagataaggaattgttataa

SEQ ID NO: 58748 - DNA, 903 bp, Escherichia coli 2-210-07_S3_C1; identical to SEQ ID NO: 58674

SEQ ID NO: 58749 - DNA, 2181 bp, Escherichia coli 2-210-07_S3_C1
gtgaacactttagctgctgaaatcattagccaaataaaaaaacatttagagttcaaaaacgacctcagttttctttttgcacactcttttttgcaaaatcataaaagaacctcttttgctacaaaacaaagcaaaattggcgatgaaaacatagttatttataaaagattaattgaatctgcatatttgttttctcaatctgagtcagatgaagataagaatttagctcaaagcattgcataccatttaaatgtagtaaccggtgatgattatttgaaacaaatgtcagaaaatcttttaagagttttgggcaacttccctggagcaacttatcttcaacaagaaaatggatttataccagaaagtttttatgccttcttaaaaagatctttcatagaaaatgaaaataaaataaagatctccaacaaagaaataacattaacaaactttcagaaaagagtatgggagtcattgcactcgaatgtccctcaagctatatcagctccaacatcagccggaaaatcgttcttagttgtggaaatgctcgccaacggaataattagcggcgaattaaattccgccatttatatagcaccaacccgtgctttagtaaatgaaataacacaaaaatttataatcaagactttaccatatcaaaatgaggtcagagtaacatccataccaacaattaataacgaatataataagcagatatttgtcttaacacaggaaagacttcaagtattgcttgataattttgaagaaaaaatagacttggtagttattgacgaagcacaatcaatttctgacgaaattaggggaatgatattacaggactgccttgataaaattagcacacaaaaccctaatgcaaaatatgttttcctcgcgcctggtgctgaaggttttgatgatttagcagatattattggaatcgatgcaatccatattgaaaaaacaaatctatctcctgtagttcaaaacaaaattatcgtcaaagttgatccatcaaaagaaaaaaacttacaattatcattattagacaattcagacatattaccgatcggagaaatagaatcgacaaggggtttcgccaatgaaaatacaagattggcggctgtcgcattagaattaggaaaaaatgaggggtctttagtttacggaaccggagctgaaaatgcagaagatgtagctaagcaaatatcttctggattacctcttttagaggatgacagtgaattacaagaactctcaaaatttataaaaaaacatgtccacgaggattactctcttgcaaacctcgtattgagaggggttggataccattatggtaaaatgccaagtttattaagagaaacattagaaaaaaatttcacgaataataaactgaagtttttagtttgcacaacaaccctttttcaaggggttaatctgcctgcaaagaatgtttttattgatacacctacacgaggaaacaggggagaaaaattagatccagcatcgctatggaatttcgcagggcgggcaggtagattaggttatgcattttcgggaaatgtttatcttattgactatgatgattgggtaaccaagcctttagattccaaaatagacttcaaaattacttcatctttaaagaaagtaattaatgaagattttgacacagtaatatcacggttagacaaaaataatcattcaggagtgacgccatatagtaatattgatgcagcggcaggtcttttaatctccagagccgcaaaaggagatttgcataattttcttaaaagatcatttcgaactttatctgataaatcaaaacttgaaactattgataatgccacttatatctcattagaatcacttaaaatacctcatgaggttttaactctgaactggacagttgatccatttggacaggaacgattgtacaatagatttatccagaaaataaaggaaggtaaagttgacgaacttatacctcgccatccttcaggtgatgtttacaaaaattatgttggtgtttttagcagaataaataaatacatccttaaccataacacatctaaattttctaactatctaacttcaattgctttgaattggatgaggggtaaatctctgccggagataatctctctctccataaataagaaaaaagaaaaaaatccactaggcctgtaa

SEQ ID NO: 58750 - DNA, 903 bp, Escherichia coli 3-020-07_S1_C1
atgaatgctgaagatactaattcattacataaaatatacaatcctgtatatgggttgagtaatatcgtattacttgctaaagagtgtcagtctacagatccagtaaaagttaatcttctatgcctcggattcaaagaagatctacctaaagacaaagagcttgcggaaactctatttttagaattagttcattattgcattcctcatccagtgttagttaaacgaaaagagttagcacgaagtgagggaaaggatgaggcaagactttatagtgaacttgcaagggaagcacgcagcctttttatgaaatacaaattagaaagtgctgtaaaaataaaaaatggtgacccccctgaaaagttcgaacaacgagtgaaaaatgctaacttacgttatggtgaagttggtgagctaatatcatattgtatagcaattcattttttaaaagcgtcacaattagtctcaaaaatggctcttaagacatcctctgaaatgcctgtctttggtcttgatggcattcatgcaaccatagacagtaaaggaacattgacggtattttacctagaatctaaaatgaccagggagtttgatagcggttctgaacaattttcaaaatcagttagtgggtttgaaagcgatagaaatagtcgtagaaatgaatacagaatactgcaggacttgagtaatttagagtctcttgaaggagaagaacgaaaaaaggcaatacaatactttgatccttactctaatgaatcatcaaatgtcagagagcgtttcgttagaataattgcctacaatgaagaaagctataaatctaaaatagctattgatgatgagtccccactttccattcatttagaccactttaaaaaaattacgtcagcacttttgaagaaaaaataa

SEQ ID NO: 58751 - DNA, 2181 bp, Escherichia coli 3-020-07_S1_C1; identical to SEQ ID NO: 58675

SEQ ID NO: 58752 - DNA, 903 bp, Escherichia coli 3-020-07_S1_C2; identical to SEQ ID NO: 58750

SEQ ID NO: 58753 - DNA, 2181 bp, Escherichia coli 3-020-07_S1_C2; identical to SEQ ID NO: 58675

SEQ ID NO: 58754 - DNA, 903 bp, Escherichia coli 3-020-07_S1_C3; identical to SEQ ID NO: 58750

SEQ ID NO: 58755 - DNA, 2181 bp, Escherichia coli 3-020-07_S1_C3; identical to SEQ ID NO: 58675

SEQ ID NO: 58756 - DNA, 1038 bp, Escherichia coli 3-073-06_S4_C3; identical to SEQ ID NO: 58678

SEQ ID NO: 58757 - DNA, 2550 bp, Escherichia coli 3-073-06_S4_C3
gtgaacactttagctaatgaagtcatcaaccaaataaaaagtcgtttagaatttaaaaatgatcttggctttttatttgcacactcttttttgcagaagcatacacaaacttctttctctgcacttcaaggcaaaatagaaagtgacagtgtcgttatatacaaaaggttaattgagtctgcatacttattttcccaatccgagtcagacgaggataaaaacttagctcaaagcattgcatatcatctaaatataattacaagtgataactatttaaaacaattatctgagaatttattaagggcacttggtaacttccctggagcaagttatttacaagaaaaaaatggatttataccagaaaccttttatgcttatttgaaaagatctttcattgaaaatgaaaataaagtaaaaatagccaacaaagagataatattaacgaactttcaaaagaaagtatgggaatcattacattcaaatgtcccacaagctatatctgctccaacctcagctggtaaatcgtttttagtcgtagagatgcttgccaataggataattagcggggaattaaactctgctatttatatagcgccaactcgagccttagtaaatgaaataacacaaaaatttattaaaaagactttaccatatcaaaatgaagttagagtaacatccatacctacaattaacgatgaatattataaacagatatttgttttaacacaggaaaggctgcaggtccttcttgataattttaaaaataaaatagatatagtagttattgatgaggcccaatcaatttctgacgaaattagggggatgatattacaggattgcctagacaaaataagcatacaaaacccagatgcaaaatatgtttttcttgcgcctggtgccgaaggcttcaatgatttagctgatattattgggattgatacaatccacgtagaaaaaaccaatttatctccagtggtccaaaacaaaataattattaaagttgatcctgcgaaagaaaataatttacaactatcattattagataactcaaatatattatctataggtgaattaacttcaacaagaggatttgctaatgaaaatactagattagctgctgtagctttagaattaggaaaagatgagggttctcttgtttacggaaccggagctgctaatgcagaagacgttgctaagcaaatagcatctgggttgcctcttctagaaaatgatagcgatttgaaagaactttcaaagtttataaaaaaacatgtccataaggattactctcttgcaaatctggtattaagaggggtggggtatcattatggtaaaatgcctagcttattaagagaaactttagaaaaaaactttacaaataacaagcttaagtttttagtgtgtactacaactctattccaaggggttaatcttccagcaaaaaatgtttttattgatacacctactcgagggaacagaggagaagcattagatccagcatcgctttggaatttcgcagggcgggcaggtagactaggttatgctttctcggggaatgtatatcttattgattatgatgattgggaaacaaaacctttagattctaaaatagatttcaaaattacatcatcttttaagaaagtaatcaatgaagattttgacacagtaatatcccgtttagataaaaacaatcatttaggagtaagccaatatagtaatgttgatgcagcggcggggcttttaattttcagagcagcaaaaggcgatttacacaattttcttgagagatcttttcgaacgattcctgataaatctaagcttgaaattattgaagatgctacatatagctcactagaatctcttaatatcccccataatatattgactttaaactggactgtcgatccatttgggcaggaaagattatacaatagatttattcagaagataaaagatggtaagattgacgaacttataccacgacatccttcaggcaatgtttacactaattacgttggtgtttttagcagaataaataaatacattctcaatcataatacatctaagttttctaactacctcacagccatggcattaaattggatgagaggaaaatcccttccagagatcatatctctttcgatagcaaagaaaaaagaaaaaaattctacccgaccagtgaatgtagaccgagctgtacgagaggtttttgatttcgttgaggacaacctgcgattcaaatacgttcaacttggtaaggcatatattgatttattgcgacaagctttaattgtaaataatcaagctgaaaaagcggaagaaatatatgacttccctttatcacttgaattaggtgtttcctcaatcgctggacaagtttttattgagctggggctatcaagaatatcagcatcctatcttgaaaatataatcccaaactctaatcctacgataagcacggcaaaagagtggctaagaaacaatgattatgattcattaaatttgccactcaccatttattcagaattagaagataaggaattgttataa

SEQ ID NO: 58758 - DNA, 1641 bp, Escherichia coli 7-233-03_S1_C2
atgagtgcattggatactatggttcagagtgatagcggtggagttggggctaagaaaggatttttctatcaagacctcgcagcagcattctatttaacacaaatgctaattgataaaacacttaaatatgttaggtgtgaagtcaccgatgacattgatttggtttacgaagaacatatagaatatattcaggttaaaacaactgatagtgactcgaaatggactcttgccgagttatgtaaaacgaagaacactgctaaaaatgactcaataatccataaatcgctatcctgtgacaacaattcttcctatatagcaaaatttaaaatactctcaccaagggaagttaattcatatcttcaatacttaagaattcctttaaacaaaagagataataaagatggtcgcgttggattgttgaaatcattggtaccaaaggtaaaaagtaaaagcccgctaggaaatgacattgcttattggatagataatacttggtgggaagtgattccgtctaaaaatgagcttgagttgatgattctcaggaatattcgggtcgcggcacaagagaaagatatttttttaaaggataggcatgagagggcaattttacagtcaatagtatatgtgttgacagataaaagtgctctctcaagaaaaataaatgttagtgaagataaatcctacttaagaaaggactttatatcatggttttgggatgaggttgagtatgcatcaaaagatgatacacattccctaaaagtatacccacaaaaactagataaagttgattatatacttcaagaatataatcaatgttttgaagatgataattacaagaatctcattgggaagtttttttatcaagattacgaattatttcggtatcggtttggatatattgttgagggagtttataattggttgccagaagtattactttcacctgaggagcttagtaatatcaatggtacaaacttccaagagaaaattgatctactaaaaacaagaatggccttaaaggaaaaggaagtgccaagtttgcttccaagagttacgcttcattctatcattaggaaaaataatttaagtcaaccaatctattctgcaaatttatacgtagatagcaacaaggaccgtgttactatatatgataacgtgcacattgtaattaataatgatgaccccgatgaactatgggttggttttagtgagatattagatgacgataatttttcaacaacaatatcaaaattaaaatgtgattttatagacaatttcctgaataattttcagaatcataaaaaagtcatattggatgttaaaaaagataattttctgttcaaacatgacgttgatccatacttaaaaggaacatcctctatagataatttgtttaatatgattcattttgtggtttttatcggttataaaaccaaaaaccagcccttagagtatgatgaaagtgaagatgaagcatacgtacctcaattactagctgaagtaagagagcattttgaaatgttagcgtctgagatagtaactgaaaaaatatacaaaaagataaatttacatttttacttatatccaatcccatgtgttgaaactctagttaaagagtttgaaaagagaattaaccaatga

SEQ ID NO: 58759 - DNA, 2130 bp, Escherichia coli 7-233-03_S1_C2
atgaatgatcaaagtgaacgtttgtttttcgaatcagatttcaatccttttgaatttcttaagatagctaatgaaaaaatggataacaaactcaccgaagtcgatggtagggaaatggttattcgagccttgaatgacatggatatgtttgctaagtatagggatatattaaagaggcttgtcaggaaatctgggcttttaccatatcttcgaagtgagtttcatgatctcgactatgaagagagaatggctatcgatttgtttacgccagtaaaggatagtgatttcactcttcattcaatgcaattgaaaatatataatatattaattgaagggacaaatgttgtacttagcgctccgactagcatggggaaaagtgctgtagttgatactttaatcgaaagcggtaaatatgatgttatagtgataattgttccaacgattgcactaattgatgaaacaaggaaaagacttaatacaaaatttagatctgattatgatattattcatcacagtattcaaacggtaagaaaaagcaaaaatatatttgtattaacgcaagagcgatttaatgaaagaaatgacattgaatctgttgatttattcgttatggatgaattttataagttgtcatttaaaaaagacttagaggatgaaagagttatatcattgaatattgccttaagtaagttactttcaatatccaagcagttttatttgatcggcccattcatagaagatattagagggctatcagatgtggctcctgatttttattatgtaaatacgaatttcaacacagtcgcagtaaatatatatgagttcaatttagcagctaatgatgtcagtgctaaaggagataaaacgatagaaatattaaaaaaatatgatgggcaaactattatatattgtcgctctcctaactcggcatccgaaatcgttaaaagattaatttctgaagaagttacgagtgtattctccagtgaatatgtatcctgggtaaaggataacttcactcctgaatgggattatgcacaagcaattgaacatgggattggtattcatcatggcaatctaccgagggctttgcaacaaactacagtagatcttttcaataatgcatttatcaaaatactaatttgtacatcaacaattatagagggtgtgaatacatccgcagaaaatataattatttttgataatagaaatggtgttggatcaattgacagattcacacatagtaatattaaaggacgtgcaggtagaatgggcaaacatttcgtaggaaatgtattttgcttagaagccccacctttatcagattactcatcatctatagttgatattcctctaggaacgcaagaaaactctacgcctataaatttattggcaggggttcaagaagtgcacttaaaagacgaatcatataaaaggcttgatgattattataatagctgcaaggctcctattgatttactaaaagctcatcccgaatatagttttgataaaatccagtatttatatgaatttttgggtgagtgtcaatacgatgtattaaaagaattaagctttaaacatttaccgacttcaaaagcaatgtggttgctaagttctctttttttgtacatagagcagggtgctgttagaaatgctggttttaaaattgatgaggaagttatatcagctaaatttttctcatatgtaaatgctaatacttttcaggaatatctaaggagtgaaataacgtggataaaagaaaatagagatgatgtatctaaagcactaaattccgagttgaagtttattaaaaatatttacgggtactctttaccgaaatttttaaatcttgcacaggacattgtcaatacaataaattacgagaataaatatgattttagtgcagattatggcttcttagcatctcaaatagaaaactatcatctaaatccgagttttgcagtactcgaagagatgggcattccggttcaattactagaaagactaagttccgatattaaggaagcattggagttggaagatttgatcgaaaaggtaaaggtgttttatcgcgagggaacatatttttctgagctcgaatcttactttgtaaaaagggctttaattgattga

SEQ ID NO: 58760 - DNA, 1641 bp, Escherichia coli 7-233-03_S1_C3; identical to SEQ ID NO: 58758

SEQ ID NO: 58761 - DNA, 2130 bp, Escherichia coli 7-233-03_S1_C3; identical to SEQ ID NO: 58759

SEQ ID NO: 58762 - DNA, 1038 bp, Escherichia coli 7-233-03_S3_C2; identical to SEQ ID NO: 58678

SEQ ID NO: 58763 - DNA, 2550 bp, Escherichia coli 7-233-03_S3_C2
gtgaacactttagctaatgaagtcatcaaccaaataaaaagtcgtttagaatttaaaaatgatcttggctttttatttgcacactcttttttgcagaagcatacacaaacttctttctctgcacttcaaggcaaaatagaaagtgacagtgtcgttatatacaaaaggttaattgagtctgcatacttattttcccaatccgagtcagacgaggataaaaacttagctcaaagcattgcatatcatctaaatataattacaagtgataactatttaaaacaattatctgagaatttattaagggcacttggtaacttccctggagcaagttatttacaagaaaaaaatggatttataccagaaaccttttatgcttatttgaaaagatctttcattgaaaatgaaaataaagtaaaaatagccaacaaagagataatattaacgaactttcaaaagaaagtatgggaatcattacattcaaatgtcccacaagctatatctgctccaacctcagctggtaaatcgtttttagtcgtagagatgcttgccaataggataattagcggggaattaaactctgctatttatatagcgccaactcgagccttagtaaatgaaataacacaaaaatttattaaaaagactttaccatatcaaaatgaagttagagtaacatccatacctacaattaacgatgaatattataaacagatatttgttttaacacaggaaaggctgcaggtccttcttgataattttaaaaataaaatagatatagtagttattgatgaggcccaatcaatttctgacgaaattagggggatgatattacaggattgcctagacaaaataagcatacaaaacccagatgcaaaatatgtttttcttgcgcctggtgccgaaggcttcaatgatttagctgatattattgggattgatacaatccacgtagaaaaaaccaatttatctccagtggtccaaaacaaaataattattaaagttgatcctgcgaaagaaaataatttacaactatcattattagataactcaaatatattatctataggtgaattaacttcaacaagaggatttgctaatgaaaatactagattagctgctgtagctttagaattaggaaaagatgagggttctcttgtttacggaaccggagctgctaatgcagaagacgttgctaagcaaatagcatctgggttgcctcttctagaaaatgatagcgatttgaaagaactttcaaagtttataaaaaaacatgtccataaggattactctcttgcaaatctggtattaagaggggtggggtatcattatggtaaaatgcctagcttattaagagaaactttagaaaaaaactttacaaataacaagcttaagtttttagtgtgtactacaactctattccaaggggttaatcttccagcaaaaaatgtttttattgatacacctactcgagggaacagaggagaagcattagatccagcatcgctttggaatttcgcagggcgggcaggtagactaggttatgctttctcggggaatgtatatcttattgattatgatgattgggaaacaaaacctttagattctaaaatagatttcaaaattacatcatcttttaagaaagtaatcaatgaagattttgacacagtaatatcccgtttagataaaaacaatcatttaggagtaagccaatatagtaatgttgatgcagcggcgggtcttttaatttccagagcagcaaaaggcgatttacacaattttcttgagagatcttttcgaacgattcctgataaatctaagcttgaaattattgaagatgctacatatagctcactagaatctcttaatatcccccataatatattgactttaaactggactgtcgatccatttgggcaggaaagattatacaatagatttattcagaagataaaagatggtaagattgacgaacttataccacgacatccttcaggcaatgtttacactaattacgttggtgtttttagcagaataaataaatacattctcaatcataatacatctaagttttctaactacctcacagccatggcattaaattggatgagaggaaaatcccttccagagatcatatctctttcgatagcaaagaaaaaagaaaaaaattctacccgaccagtgaatgtagaccgagctgtacgagaggtttttgatttcgttgaggacaacctgcgattcaaatacgttcaacttggtaaggcatatattgatttattgcgacaagctttaattgtaaataatcaagctgaaaaagcggaagaaatatatgacttccctttatcacttgaattaggtgtttcctcaatcgctggacaagtttttattgagctggggctatcaagaatatcagcatcctatcttgaaaatataatcccaaactctaatcctacgataagcacggcaaaagagtggctaagaaacaatgattatgattcattaaatttgccactcaccatttattcagaattagaagataaggaattgttataa

SEQ ID NO: 58764 - DNA, 942 bp, Escherichia coli; identical to SEQ ID NO: 58740

SEQ ID NO: 58765 - DNA, 2583 bp, Escherichia coli; identical to SEQ ID NO: 58723

SEQ ID NO: 58766 - DNA, 1617 bp, Escherichia coli KLY; identical to SEQ ID NO: 58664

SEQ ID NO: 58767 - DNA, 2190 bp, Escherichia coli KLY; identical to SEQ ID NO: 58665

SEQ ID NO: 58768 - DNA, 1617 bp, Escherichia coli BW25113; identical to SEQ ID NO: 58664

SEQ ID NO: 58769 - DNA, 2190 bp, Escherichia coli BW25113; identical to SEQ ID NO: 58665

SEQ ID NO: 58770 - DNA, 1617 bp, Escherichia coli; identical to SEQ ID NO: 58664

SEQ ID NO: 58771 - DNA, 2190 bp, Escherichia coli; identical to SEQ ID NO: 58665

SEQ ID NO: 58772 - DNA, 1617 bp, Escherichia coli; identical to SEQ ID NO: 58664

SEQ ID NO: 58773 - DNA, 2190 bp, Escherichia coli; identical to SEQ ID NO: 58665

SEQ ID NO: 58774 - DNA, 1617 bp, Escherichia coli NCTC 50110; identical to SEQ ID NO: 58664

SEQ ID NO: 58775 - DNA, 2190 bp, Escherichia coli NCTC 50110; identical to SEQ ID NO: 58665

SEQ ID NO: 58776 - DNA, 942 bp, Escherichia coli; identical to SEQ ID NO: 58722

SEQ ID NO: 58777 - DNA, 2583 bp, Escherichia coli; identical to SEQ ID NO: 58723

SEQ ID NO: 58778 - DNA, 903 bp, Escherichia coli; identical to SEQ ID NO: 58674

SEQ ID NO: 58779 - DNA, 537 bp, Escherichia coli
gtgaacactttagctgctgaaatcattagccaaataaaaaaacatttagagttcaaaaacgacctcagttttctttttgcacactcttttttgcaaaatcataaaagaacctcttttgctacaaaacaaagcaaaattggcgatgaaaacatagttatttataaaagattaattgaatctgcatatttgttttctcaatctgagtcagatgaagataagaatttagctcaaagcattgcataccatttaaatgtagtaaccggtgatgattatttgaaacaaatgtcagaaaatcttttaagagttttgggcaacttccctggagcaacttatcttcaacaagaaaatggatttataccagaaagtttttatgccttcttaaaaagatctttcatagaaaatgaaaataaaataaagatctccaacaaagaaataacattaacaaactttcagaaaagagtatgggagtcattgcactcgaatgtccctcaagctatatcagctccaacatcagccggaaaatcgttcttagttgtg

SEQ ID NO: 58780 - DNA, 894 bp, Escherichia coli; identical to SEQ ID NO: 58690

SEQ ID NO: 58781 - DNA, 2580 bp, Escherichia coli; identical to SEQ ID NO: 58691

SEQ ID NO: 58782 - DNA, 1617 bp, Escherichia coli ER2796; identical to SEQ ID NO: 58664

SEQ ID NO: 58783 - DNA, 2190 bp, Escherichia coli ER2796; identical to SEQ ID NO: 58665

SEQ ID NO: 58784 - DNA, 1617 bp, Escherichia coli K-12; identical to SEQ ID NO: 58664

SEQ ID NO: 58785 - DNA, 2190 bp, Escherichia coli K-12; identical to SEQ ID NO: 58665

SEQ ID NO: 58786 - DNA, 882 bp, Escherichia coli
atggatgactcaataaaaataagaatcaacaaccaaatctttaagtacgaagttagactaccttcatctggtgttgatgataacacatttacactggatttttttgatggcaagtatcgtcaagatgacttggttggattgatccgagatgttgtcccttacttctccttaacagcagatgaaatgaaagagctagatccctctgagatcaataaacgcagctttactcgaatctctgatgccagacgacaggcaaagggagattatggagagttaatgctatttttaattctgagtattttctatgatgttccgaaattcgtaactaaagcaagattacgttctacaacgagagagcagataaagggatttgattgtgctcacttctctgtggataatggtaaaattactctttggctaggcgaggcaaaatttcaccaatccatcagcggagctatttcatcagcactaagttcattgtctgagcatcttaacgacaaaagcagaatagcaagtgaactgaaattattaggtggtgaaatagagataaataagacacttgataaaaatctttacctgcaattgaaaagctatgttgatggtggaaaaagtttagattcagtcgaaattgccgtccctgtattattgacttacgatagtaaatatatacttcagtgctgtggtaaaggtaaggttataattaatcaagaccctttcctctcagagctgggaactgaactgactaaacattttcaagatatatataaaaaaagctggccaaaagactccaacatcaaattagtgtttttcctttttccttttgaagatattgcaaagttgaaagaaaagattgagttagttgaacaggcgatgaagttttaa

SEQ ID NO: 58787 - DNA, 2235 bp, Escherichia coli
atgagtattgaaaattttgaaatggaattagataaaatcaaaaactcaaaaggcaagaaaatcaatctagttgaagattttctaatcgatatttaccgtcgccttgatcatactgagaattataattcgtgtattaaagctatatgccatattgcaaaccttcaattagaagatgctatggttcaacaacttttacacgattgcatcattaaatcgagaatatttttatatgatgatatgttagggaatagtgatatcggttataacccaaacatttctccacaagacatatttttaaaatctttctatacaagttcggtgtctgaaacaacgctaactaaaccgcaaaaagagatttttaatgagtttcagaagagtaggcgattgattgtaagtgctccaacttcatttgggaaaactagaataattagagagatcatttctcacaatgaatacaaaatggttgttatcattatgccgacagtatcattactttctgaagcatataatgatttcaagcatgaattctctgatagatatatagtgtcaaagtcatctaaaataaaaatagaggaaaaaaaagaatatatccttattcttacgccagaaagaatgagtgttttaatgcaagataatattaatttgagagtcgacttttttgtaatggatgagatttataaggctgactataaactaaatgatgatagatataaagtatttgctgatatattatatagactaacaaaaagcggtgcagacttatacttgattggtccatacattagcgcattcagtgaaaagttcagaagtaagtttaagatcaagatgctgaggtatgatattgaaatagtccaaaaagattattatgaacttgatgttgtttctcggagaggttcacaccttatcgagggggttgatattcgtgtcgttggagataaatataaaaatcttaaaaaaataacaggaaatgataaaattgatggtaaatatttgatatatagatatcaaaaacaatatgtggaaagtttagctgaaaaattcataaaagatttagatgataaagaatacaacagaagcctcgtcgactatctggagaataatatctctaagagttggtcattggttcagtgcttaaagaaaggtgttgcctttcatcatggtgcaatgccgaggcatatacaagatctacttatagatgagtttaataaaaataacgaagaaggcgttaagtatttgttttgcactacatcgctaactgaaggtgtaaactccactgccaaaaatgtcgttctttatgatctaaaaattggagatggaaatcaaataaaaagtctcgatagaagaaatatagaaggtcgggctggccgatttatgcaacactttcttggtagagttttttatttcgaccatgttgatagggatattaatgaggatactaatgtagaaatagagtttgtggatagtagcaatccagatatagaaacattggttcagttaagcgagagtgatataagtgaagattctcgaaataaatataaaagttttgttgagtatctaagtgggttaaatatcccactcaatcttttaaaggataataagttcgtcgatatcagcggtcagataacattgatagagcatttgagaaatgatgttaattttgctaattatcactattccactcaatatcctgtcattgaaaagctggaaagtattctgtcaattatctatgattgcttatttactaaaagcaatcgtggcaggaattttgatggtgatatagggaaaaaaatattattggatttgactaagtattatatttataagcaaccctcttttcccgttcttctaaactctggaactctaaaatatttaagggaaaaagaaaatgctcgtataaggctaacctttgatctaataacaaagtactttgaattcatttggccccggtatataaaagcttttgagagcctattcaattttgtagcaggagagaaagggacaaagaatataagtctggattacattgtttctcttctggagtatggtactaataataatcatgaaattatcctgcgtgatgcaggtataccaagagagataataataaaaatatcaactatattctttaattgtgaaagttatcaggatgttcaatcaacatacaaaaaaagaaggggcgaaataataaataagttgagcaatatagaattaagaattttagacaaatatatttga

SEQ ID NO: 58788 - DNA, 942 bp, Escherichia coli; identical to SEQ ID NO: 58722

SEQ ID NO: 58789 - DNA, 2583 bp, Escherichia coli; identical to SEQ ID NO: 58723

SEQ ID NO: 58790 - DNA, 1617 bp, Escherichia coli; identical to SEQ ID NO: 58664

SEQ ID NO: 58791 - DNA, 2190 bp, Escherichia coli; identical to SEQ ID NO: 58665

SEQ ID NO: 58792 - DNA, 1617 bp, Escherichia coli; identical to SEQ ID NO: 58664

SEQ ID NO: 58793 - DNA, 2190 bp, Escherichia coli; identical to SEQ ID NO: 58665

SEQ ID NO: 58794 - DNA, 1617 bp, Escherichia coli K-12; identical to SEQ ID NO: 58664

SEQ ID NO: 58795 - DNA, 2190 bp, Escherichia coli K-12; identical to SEQ ID NO: 58665

SEQ ID NO: 58796 - DNA, 1617 bp, Escherichia coli K-12; identical to SEQ ID NO: 58664

SEQ ID NO: 58797 - DNA, 2190 bp, Escherichia coli K-12; identical to SEQ ID NO: 58665

SEQ ID NO: 58798 - DNA, 1617 bp, Escherichia coli K-12; identical to SEQ ID NO: 58664

SEQ ID NO: 58799 - DNA, 2190 bp, Escherichia coli K-12; identical to SEQ ID NO: 58665

SEQ ID NO: 58800 - DNA, 1617 bp, Escherichia coli K-12; identical to SEQ ID NO: 58664

SEQ ID NO: 58801 - DNA, 2190 bp, Escherichia coli K-12; identical to SEQ ID NO: 58665

SEQ ID NO: 58802 - DNA, 1617 bp, Escherichia coli K-12; identical to SEQ ID NO: 58664

SEQ ID NO: 58803 - DNA, 2190 bp, Escherichia coli K-12; identical to SEQ ID NO: 58665

SEQ ID NO: 58804 - DNA, 1617 bp, Escherichia coli K-12; identical to SEQ ID NO: 58664

SEQ ID NO: 58805 - DNA, 2190 bp, Escherichia coli K-12; identical to SEQ ID NO: 58665

SEQ ID NO: 58806 - DNA, 1617 bp, Escherichia coli K-12; identical to SEQ ID NO: 58664

SEQ ID NO: 58807 - DNA, 2190 bp, Escherichia coli K-12; identical to SEQ ID NO: 58665

SEQ ID NO: 58808 - DNA, 1617 bp, Escherichia coli K-12; identical to SEQ ID NO: 58664

SEQ ID NO: 58809 - DNA, 2190 bp, Escherichia coli K-12; identical to SEQ ID NO: 58665

SEQ ID NO: 58810 - DNA, 1617 bp, Escherichia coli K-12; identical to SEQ ID NO: 58664

SEQ ID NO: 58811 - DNA, 2190 bp, Escherichia coli K-12; identical to SEQ ID NO: 58665

SEQ ID NO: 58812 - DNA, 1617 bp, Escherichia coli; identical to SEQ ID NO: 58664

SEQ ID NO: 58813 - DNA, 2190 bp, Escherichia coli; identical to SEQ ID NO: 58665

SEQ ID NO: 58814 - DNA, 1617 bp, Escherichia coli; identical to SEQ ID NO: 58664

SEQ ID NO: 58815 - DNA, 2190 bp, Escherichia coli; identical to SEQ ID NO: 58665

SEQ ID NO: 58816 - DNA, 1617 bp, Escherichia coli; identical to SEQ ID NO: 58664

SEQ ID NO: 58817 - DNA, 2190 bp, Escherichia coli; identical to SEQ ID NO: 58665

SEQ ID NO: 58818 - DNA, 1617 bp, Escherichia coli; identical to SEQ ID NO: 58664

SEQ ID NO: 58819 - DNA, 2190 bp, Escherichia coli; identical to SEQ ID NO: 58665

SEQ ID NO: 58820 - DNA, 1617 bp, Escherichia coli; identical to SEQ ID NO: 58664

SEQ ID NO: 58821 - DNA, 2190 bp, Escherichia coli; identical to SEQ ID NO: 58665

SEQ ID NO: 58822 - DNA, 1617 bp, Escherichia coli K-12; identical to SEQ ID NO: 58664

SEQ ID NO: 58823 - DNA, 2190 bp, Escherichia coli K-12; identical to SEQ ID NO: 58665

SEQ ID NO: 58824 - DNA, 903 bp, Escherichia coli; identical to SEQ ID NO: 58674

SEQ ID NO: 58825 - DNA, 2181 bp, Escherichia coli; identical to SEQ ID NO: 58675

SEQ ID NO: 58826 - DNA, 903 bp, Escherichia coli; identical to SEQ ID NO: 58674

SEQ ID NO: 58827 - DNA, 2181 bp, Escherichia coli; identical to SEQ ID NO: 58675

SEQ ID NO: 58828 - DNA, 1617 bp, Escherichia coli; identical to SEQ ID NO: 58664

SEQ ID NO: 58829 - DNA, 2190 bp, Escherichia coli; identical to SEQ ID NO: 58665

SEQ ID NO: 58830 - DNA, 933 bp, Escherichia coli
atgaggtgcaatgtgatgaacttccaaatattaatcgatgatacgtttattaatacttgtggggatgtgttatcaccttcgaataataaatctatcttaagtctggtcaatgattttgaagatgggaaatggcgatacaagaattttcatttgtttatatgggataatatagctgaaacatctctgtcttcaaaggaaagggcagctctaatagattgttcagcttcattaatcagtgcagccgctgaaaaccttcgtttggtcgataaggaaaatgatattagcaaaggtagtgagcttgcagaaataatgttatacggaataatgaagcatcattatggtgctcttccgattgtgccaaaaattttttataaacaaaactcacaagataatgctaaaggtgccgatagtgtacatttggtattgcatggtgatgatgattttactctatggtttggtgaggctaaattttataattctattgaggatgccagattgagtagtataataaattcagtcggtgatgcattaagaacggataaacttaggaaagaaaatagtataattacaaatattaacgacattgacttattgatttcaaatgttgatttaaggcgaagaataaaagaggcattgtctccgaaaaattctattgatttattgaaaccaaaaattcatgttccgattttcattcttcatgaatgccaattaactaaagtcgcgacatctatgtccagtgattacatagacgacatagtcgaatatcataagaatagggctatagcattcttcaaaaaacaagttgaattattaaaagatgtatacctttataatgatatttcattccacatcatactgtttcctgtgcctgacaaggccatgatagttgataaatttgtagaaaaagttgagttccataaaggggagttctga

SEQ ID NO: 58831 - DNA, 2115 bp, Escherichia coli
atggatgtatttcataaatgctttgaaattaatgagcttatcactaatggagatgaaacgggggcaaggaatgaaataataaaactccttgattactgtcaaaataaagaattaccgcttactccgctgataaataatttgataagacaagtcggtctttatccatatttacaaatagaaactagtgcttggcaagatcgttttatttatgaggcattcaaagtgaatgttggagaaaaaaaacaggtaacgttgcatagagagcaatctgcaattttaaaaaaactaataaacggtaaaaatctcgctgtaagtgccccaactagttttggtaaaagttttataattgacgcttttatagcaataaagaaacctaaaaatgtagtgatcattgttccaactatcgcgttaacagatgaaacaagaagacgattacataagaaatttagcgggaaatataaagttattacaacaacagagataatactggatgaatataatatatttatctttccgcaagagcgagctatacattatgtagataaattagatgaaattgatatgttgattgtggacgaattttacaaggctagctctgcttttgacaaagaacgttctcctgctttaataaacgcaataataaaattaggttcaaaggcaaagcagaagtattttttagcacctaatatatcaactttgaaagataattttttcacaaagggtatggactttgtaagcgttgatttcaatactgtatttttagaacaccataaactatatgaaaacatcaatggtgatgagttattaaaaagtgaagcactattgaaaatcttagacaataccaatgggaaaacactcatatatgcaggtacttttccaaacatatcgaatatatcaaatcttataattgatcaacaaccagttaaaaataaaaaattattagctgatttccatgcttggctatcaaaaaattatgatagcaactggcagctaaccaaattgattaaaagggggactggtttacataatggaagactacataggtcgttaagtcaaattcagattagattgttcgaagagcctgatggaataaaaaatttagtatctacatcttctattatagaaggggttaatacatctgcggaaaatgttgtcctttggagcaataaaagcggaagaggtagagcaaagattaatgacttcagttatagaaatattattggtcgtggtggaagaatgttccgacattttgtaggtaaaatctatattttggaaaaacctcccgaaaatgaagatatacagcttaatttgacatttccagatgagctcattggtagtatcgatcttgacgaattcaaaagtgaactaagtaaagagcagatctcaaaaattatagcttatagagaagaaatggatgaatttttaggtgatggtggttttgaaaaacttcagctagagggtaggctggaatcaagtaactcctttttgattcgagatatagctaaagaaatttattccaatcgtcagagttggagagggttaggatacttaaattccaaccatcctgatgattgggagggctatctttataaagttataaaactatcgccaggtgggtggggtgcagaatacaacaaaatagttgcttttgtaaaaataatctcaaagaattggatatgttcaattcccgagttgcttgaagaactaaaagactatgatattgggatagagcagttttttgaactggaaagaaatgtgacattcaaactagcatcacttttgaacgatgttaatattatacaggaaaaaattctaaaggaaggtatcgatatatctccctttataaaaaaagtttctaatgcgtttttacctcctcttgtttaccagcttgaagaatatggcttgccacgaatgttatccagggttatcaacaactctaacatcatcattcttgatgataaggaaaaggaacttcatgatatactcgcaaattttgttgatcttagtaaagataataataaattagattgtctttttgattcatttgataaatatatatttaagtattttatagatggaattctaacagatgaagataaccatgtcataacttaa

SEQ ID NO: 58832 - DNA, 1617 bp, Escherichia coli; identical to SEQ ID NO: 58664

SEQ ID NO: 58833 - DNA, 2190 bp, Escherichia coli; identical to SEQ ID NO: 58665

SEQ ID NO: 58834 - DNA, 1617 bp, Escherichia coli; identical to SEQ ID NO: 58664

SEQ ID NO: 58835 - DNA, 2190 bp, Escherichia coli; identical to SEQ ID NO: 58665

SEQ ID NO: 58836 - DNA, 1617 bp, Escherichia coli; identical to SEQ ID NO: 58664

SEQ ID NO: 58837 - DNA, 2190 bp, Escherichia coli; identical to SEQ ID NO: 58665

SEQ ID NO: 58838 - DNA, 1038 bp, Escherichia coli; identical to SEQ ID NO: 58678

SEQ ID NO: 58839 - DNA, 2550 bp, Escherichia coli; identical to SEQ ID NO: 58679

SEQ ID NO: 58840 - DNA, 1617 bp, Escherichia coli; identical to SEQ ID NO: 58664

SEQ ID NO: 58841 - DNA, 2190 bp, Escherichia coli; identical to SEQ ID NO: 58665

SEQ ID NO: 58842 - DNA, 906 bp, Escherichia coli
atgaaaatgaacaacaaactaaagccacaattaaaaaaccatgatgttatcaaaaaagttttgagaaaggttgaagtatctctacttctctctgataaaagaaaggttgagaccttattagtttacttaccaattgaaaacggcgaaagtaagcattcagttttttttgatcttattaaagatgagctgttacataattttgctcttacatgcaaagaaattgatagaaagttaaagagaccaagtaaaattgcgatagatcaactttttaaaaaggccttgagcaaactcagtcaacaaacagcacacggtgaattaggtgagttaattctctttacaatattagatgtttacctgcaagctcccagactgctcagcaaaatatcacttaaaaccagcgcaagaatgcctgtttatggcgctgatagtatccatgctcagtttattaagggcgggttgagattatatctaggagaatcaaagctttatacttctttttcaagtgctgcaacagcagctgttgaatctattaagtccgcaagtgataaatatatacaggaattcaatttaattgatagtcatttagatcttcctgagcttgatgaagattctcaagaggagctgataagaattttaaatccttttgagaatacaagtaaattggattttatacactcaccatgtttcattggttttgctgatggtaatttaataaaagatgcaacgagtgatgatgactttatccaaagatatatccatgttgcttttgagcatattgatgactactataaaaaaattgaattgcaaggtttagatataaattcaacaactttattcatattaccttttagtgatattaaaaagcttgttgatagctttattgctcatctggagatagaaaaatga

SEQ ID NO: 58843 - DNA, 2529 bp, Escherichia coli
atgagtgatttttatatagaattatcagaacgaattttatctagcaatgattttaaaaaatgctcattagaattgtttaaatgttatgcgaactatttggttggtgatacttataagttagatcgtcttttagtaaagaaaatggcaactgcttcacaagttttttataagacacaagaagaaaagtaccttaaacaaggttcgtcaattctttccatgttaattgatacatgcgctgaggattatcctgagattgttcctatttcagactttcttttttcatctgtaggtgatttccctaatgttaagttattagagaatagatttcctcaaatttcattcagacataatatatttactgattcaagtcaaagttataagaaagcactgaataatgttgaggagttaggtttggtactaactgattttcaacgtaatttatgggatgatcttcaagctggagaagatgtgattactgtcgcacctacttctgcaggtaagactcatattattctacattatttattgtcagaagtaattaacagtgatggtgcttttgctgcaattgtcgtgcccacgagagctctaattacagaagtgtcttcaaaaatattcgaaatggcaaaagaaagaggatatgaaaaagatatagaaatttgtactatccctaaagatgaagttttttctgatcgtactttttttgtcatgactcaagaacgtttacatgaaatccttcttcgcggtgatatatattttgattttcttttcattgatgaagctcataatatttcggatgagggccgaggtgtattactccatcttacccttgaacgaattctcgaagatagcagccctcaaattataatcggcatgccttctcctcaatatcaaaatagtttttcaagcatttttaaggaagtcaaatttactaaagcaattactgcacattctcctgtatctaaattgatctttgaggtaagagctaaagggactaatttagaaattagtaagcgtggttcagatgataaaattacattaccaaaaaaatttaaaaataaaaaactagctgatattgtgctaaggcttggtaaaaatgaaagtaacataatatatagaaatcaaacaaatcattgtgaacatattgctgacgaaatagcgaaaagaattactgattatgaggttaatgatactctaaatgaggcttctgaatatatacaacatttcatccatgatgatttcacgttagtagaaaacattaaaaagggtgttgcatttcattatagcccgctacccacttctgttagaattcttatcgaaaatcttgttaaagaaggcctcattaaattcatatcgtgtactagtacgctagctgagggtgtaaatcttccagcaaagaatctgtttatgttgaatcccacgtttaaaaatggcctttataataaaacagtaagaattgaggatgtaaaaataaacaatattactgggcgtgcaggtagaatgttgcatcatttttccgggaatatatttttggttgagccagacgattggacctttaaagattattttgatgaagacgataataaaaaagaagaaaagataccaacatattataaattgattaatgaaaatacaaatgaagtcctaaggactctgactggatttcaacctgatgatgaagaccattctaagttctattctgtagctaataaattaattaagtcatatggtaatggagatctggactcgacattctcttcaccagatattaaattagatgattatactattaatggattaaagcaagttattgaaacggcatatttaaatcttaaagttcctcctcttattttagaatctaatccaacaactggatatattcaacagaataaggtttttgagtttttaactagcgaaattgaccttaacgattggtctctaccatatccatggtctgacgaattttacgatagaatacttaaaatcgtatttaaattgattgagcttggtgtatttattcctagcggaaattacactgcggattatatttgttacattgctaaaaaatgggttcaaaataatagtttaaaggatatgattaattctcaaatcgaatgggataagaataatatagtaaagaaaaatagcagagatgatgaaaaggaagttaaaattaacagatctgttaaaaacataataaacgtaataaataatgatattagattcagactttcaaatgcagttaagtgttattttactttgtttgctttggcagcgagaatgaaaaaatcagatgctcaaagtattaagttacattactatcttgaaattggcgccagcgatgaaaggatgatgtctctgataaacttgggattatccagagaagcatctaaagagatttctgataatacatctaaatcgcgaatgtataatggcataagcgatttgattcagttactaaactcatcggaaattaatggtatacatagagttatcaaaaaagagatagagcatttactcagccgttcttga

SEQ ID NO: 58844 - DNA, 945 bp, Escherichia coli; identical to SEQ ID NO: 58706

SEQ ID NO: 58845 - DNA, 2580 bp, Escherichia coli; identical to SEQ ID NO: 58707

SEQ ID NO: 58846 - DNA, 1617 bp, Escherichia coli KRX; identical to SEQ ID NO: 58664

SEQ ID NO: 58847 - DNA, 2190 bp, Escherichia coli KRX; identical to SEQ ID NO: 58665

SEQ ID NO: 58848 - DNA, 1617 bp, Escherichia coli str. K-12 substr. MG1655; identical to SEQ ID NO: 58664

SEQ ID NO: 58849 - DNA, 2190 bp, Escherichia coli str. K-12 substr. MG1655; identical to SEQ ID NO: 58665

SEQ ID NO: 58850 - DNA, 1617 bp, Escherichia coli; identical to SEQ ID NO: 58664

SEQ ID NO: 58851 - DNA, 2190 bp, Escherichia coli; identical to SEQ ID NO: 58665

SEQ ID NO: 58852 - DNA, 1617 bp, Escherichia coli; identical to SEQ ID NO: 58664

SEQ ID NO: 58853 - DNA, 2190 bp, Escherichia coli; identical to SEQ ID NO: 58665

SEQ ID NO: 58854 - DNA, 1617 bp, Escherichia coli; identical to SEQ ID NO: 58664

SEQ ID NO: 58855 - DNA, 2190 bp, Escherichia coli; identical to SEQ ID NO: 58665

SEQ ID NO: 58856 - DNA, 1617 bp, Escherichia coli; identical to SEQ ID NO: 58664

SEQ ID NO: 58857 - DNA, 2190 bp, Escherichia coli; identical to SEQ ID NO: 58665

SEQ ID NO: 58858 - DNA, 945 bp, Escherichia coli; identical to SEQ ID NO: 58706

SEQ ID NO: 58859 - DNA, 2580 bp, Escherichia coli; identical to SEQ ID NO: 58707

SEQ ID NO: 58860 - DNA, 894 bp, Escherichia coli; identical to SEQ ID NO: 58690

SEQ ID NO: 58861 - DNA, 2580 bp, Escherichia coli; identical to SEQ ID NO: 58699

SEQ ID NO: 58862 - DNA, 1617 bp, Escherichia coli str. K-12 substr. MG1655; identical to SEQ ID NO: 58664

SEQ ID NO: 58863 - DNA, 2190 bp, Escherichia coli str. K-12 substr. MG1655; identical to SEQ ID NO: 58665

SEQ ID NO: 58864 - DNA, 1617 bp, Escherichia coli K-12; identical to SEQ ID NO: 58664

SEQ ID NO: 58865 - DNA, 2190 bp, Escherichia coli K-12; identical to SEQ ID NO: 58665

SEQ ID NO: 58866 - DNA, 1617 bp, Escherichia coli K-12; identical to SEQ ID NO: 58664

SEQ ID NO: 58867 - DNA, 2190 bp, Escherichia coli K-12; identical to SEQ ID NO: 58665

SEQ ID NO: 58868 - DNA, 1617 bp, Escherichia coli str. K-12 substr. MG1655; identical to SEQ ID NO: 58664

SEQ ID NO: 58869 - DNA, 2190 bp, Escherichia coli str. K-12 substr. MG1655; identical to SEQ ID NO: 58665

SEQ ID NO: 58870 - DNA, 1617 bp, Escherichia coli; identical to SEQ ID NO: 58664

SEQ ID NO: 58871 - DNA, 2190 bp, Escherichia coli; identical to SEQ ID NO: 58665

SEQ ID NO: 58872 - DNA, 1617 bp, Escherichia coli; identical to SEQ ID NO: 58664

SEQ ID NO: 58873 - DNA, 2190 bp, Escherichia coli; identical to SEQ ID NO: 58665

SEQ ID NO: 58874 - DNA, 1617 bp, Escherichia coli; identical to SEQ ID NO: 58664

SEQ ID NO: 58875 - DNA, 2190 bp, Escherichia coli; identical to SEQ ID NO: 58665

SEQ ID NO: 58876 - DNA, 903 bp, Escherichia coli; identical to SEQ ID NO: 58674

SEQ ID NO: 58877 - DNA, 2181 bp, Escherichia coli; identical to SEQ ID NO: 58675

SEQ ID NO: 58878 - DNA, 1617 bp, Escherichia coli; identical to SEQ ID NO: 58664

SEQ ID NO: 58879 - DNA, 2190 bp, Escherichia coli; identical to SEQ ID NO: 58665

SEQ ID NO: 58880 - DNA, 945 bp, Escherichia coli; identical to SEQ ID NO: 58706

SEQ ID NO: 58881 - DNA, 2580 bp, Escherichia coli; identical to SEQ ID NO: 58707

SEQ ID NO: 58882 - DNA, 894 bp, Klebsiella oxytoca E718
atgctgctgcccatacgagtcaacaagcggttcttgaatttatttagaacacttacattagacaaagcaccacggcaatctaccgtaaacttacatgttctaaacattgagagtaacagttttgtttataacaaattggttgaggaattaagagacttaatagtctgttacgtacattcgaatagaagaatagctgagtttgaaaaaaatcatccatcttttagtcccaaaccatatttagaggcaatacagaaatttcggacctatacatcaaatgaaggtgagttaggcgaactactattatatgcatttcttgaatcaggtctaaacgcacccaaattgctatccaaaatggagttaaagactgatgcaaatgattatatcaaaggttccgatggtatacatttattagagatcgacaataattatcaactaatctttggcgagtccaaaatgtatttggacttactggagggggctcgtgaagcgtttgactctattgctgactttaaagccaacggattaagatttgaacgaggcctaatagatactcatgtgataaatgaaatggttactgaagaaggatacgagacaataaaatctatactattaccttcaggaaatgatgggccaaaccttgatctatcttttggcgttttcctaggatttgagttacctgttaatgatacacaattatctatgaaaaacaacgaattccgggattgggcatattcatttgtaaaaaataatgcttctcgcgtaattgatacgatagaaaaaagaattataaagcataaactctttggtcacgattttcatatatacattgtccctttcacagacatagatatcactcgtaaaaaattaatccaagaaatgctaacaattggataa

SEQ ID NO: 58883 - DNA, 2601 bp, Klebsiella oxytoca E718
ttggataagaatatgaacgaaaaagatatagtaagaaaagttccattagcacagcgtctttcgatggacgcttatacaagtagctactttaaagagatctataattacatatcagctttatatgacaattgtttatttaataataacggcattcagaaacctatatttattgacacaacaaaaatagaaaaagctttacgttttgctgatattctgtctcattcacctgttgaaacccatcgaacaaaatcatttgaaattataagtaaaatagctgcatttcattcagatgatccttattttaaaatgataggttcggcggtcataaatcgtttaggtatatttgcagcagataatttaatatcacaggaagtacacttaccgttagaccgagaaatagaatcatccataaaaaaatcattccaaagaactagtatagatggattattttttacagacaaacaatatgaactttatcaatccctaattaactcaaacactctaagttttgccggccctacgtcaatggggaaatcgttcgtcataaatgaatatataaaacatattatttttggtaatgctaaaaaaaatatagtgctcatagtcccaactcgagcattaattagccaaagtacattaaaattaaaaaatgaactaagagataaaattgatggcaatcagtataagatagtaacaacatcttacatgctcagaggaggtattgatcatagtaaagggtatattttcgtattgactccagagagattagttagcttaattagttcatctcctgatataattattgattatatttttgtcgacgaagcacaaaaacttactattaaaaatgatacacgaagtctcgtgacctattccgcgatcgaacaaacattaaatttaaattcaagtgcaaaactatttttctcatcaccaaatttatccaaccctgaagtatttaatgatttatttaatcgggaccatgctaaagtttatcgcagcattgaaggcgctacagctcagaacttgtactttattgacttattaaacaacaagtttagttatgttgataaaaacaaattaattgatatagataatgttaatcagacttatacatctgctaatgatcttatctttcagattaacaaagggaaaagtaagattatttacactggaggtatcgataacacattatctcggacaaggggttttctacgttatataaagaaattacaaagtaaaaagaaacctcaaaattttgatctagcatctcaggtccgagaatttgtgcataatggctacgaacttgctgaagctatagagtatggagtagcatttcatttcggaaatctgccacaagcaataagagatcttattgaacatcactttaaaattggtaatatagattacttgttctgcacatcaactcttcttgagggggtaaatttacccgcacgttcagtatttattttgacatcaaaaaagggtactagatattttgaacctgtggatttttggaatctcgcaggcagagcgggaagactggccatagagttagctggtgatatattttgcgtaaaagatgaaagtggaacttggaatgataaggcggtaaaaaaattaatcctatccaataaaaatgaaattgaactgactcccagcttttatcttaatgattctaaaaggattaaagaactagaacaaataataaaaactggttctactgaagggattcaaaatagtgaatttctcagaacactaagtgatatggtaaggattgataccctacgaactgacaaagccaataatttaccgcttatcaattatttcagaaataatggaaataacgatatattacactatgccttgaaaagcataggtaatattaacatacctacacatattttacttgcaaatagccatattgctattaactcacaacacaatgcatttaatagcatcaaaaattattcaattgacgaactaaagttatcatggaatcctacaaatgatgaaataaaagaaaaattagctctcatattcaatatttatcaaatagataaatatagtaaaggattagatcgtcttaattttaattcaattccatattacgcagtcattttatctaagtggatgcatggtaatacattaagtgaaataatctctgacgcgattatttattacatatcgaataaaaagaatatctatctttcagataagactcaagagccatttaatcaaaataattctattcatataacaaaattagtaaatgatacaattaaagatatagaattaaaaataggttatcagctacaaaattatatttcacattattgtcaacttctttcacttatttttgaaaataaccctggagcaaattggtcacaattcatagagtttggctcgaatgatcctattgtatggcaattgcaatttatgggattttccagacattgtgcaatatttttaaagaaaaacttccctaaacaccttaaatatgatcaagaaaacaatcagttatacatattaaacagagccgaaatcaagtcaaaagttaaacagaacaaattatattggcttgaaattcaggccctgctttaa

SEQ ID NO: 58884 - DNA, 537 bp, Klebsiella oxytoca 09-7231
atgaaaacctatattatcaacgactcagaagtgtctaggttatccgtggcgattcaaatgcctgatcaggatgaccagttgtggctaggccttgcccgcatgatcaaagcggatgacatggatacaactctagagcaaattcgagaaattcttgacgaaactatctcagaaaccgtgctatcagcagagcgcgaaatcattatttctctacgcgaaccattacaccaccagccaaaagcagattccttcaatcaagctctgcatcgaaattctcctatcgatgacatgctgaatattctttgcttccccatcttgctgacttacgacagtgcagctctctcatcaggatggttcgtaaattacgtagacaacctcaagaaagagatcgaaacccacttcagcgcgttcacctctgaactgtcggagaacatcaaacaagttaaggtgctcatcttcttggtgcctatggaaagtattgaacttctgaccaaagcttttaacgctcgctgcgaaaagctggaagaattacaggcataa

SEQ ID NO: 58885 - DNA, 2142 bp, Klebsiella oxytoca 09-7231
atgaactacgaaataatcaagaatatcttggcgaaactcgctgaagagaatgccaagacagtcgatgtgctgctcgccatcaataccatcgtcaacagaagcaattcagagtgggagggccgcgatttggtaatccgagcactcgacaaatttgagttttttgactctgtcgaacagtcactcctgctaaacatggtacgagctgtcggattattcccttatatcactcctcacctcagcagcatggcgatttctgaccgcttagcttacgaagcacacagggtcgagggtgtagaacaaggcatggtatttcatcatctgcaggcccatgttttcagcttgatcatgcaaggccggaacgtagtgctcagtgcttctacaagcgtcggaaaaagtctagtcattgacgctgtactagcacagcgacggttcaaaaaggtggtagtgattgttccgaccattgcgcttatcgacgaaacccgccgtcgactagtcaaacgttttaaggacttcaacctgatcacgcatccgagccaagaatctgtggttgatacaaccaacgtctacctgctcacccaagagcgtgtcatccagcgtcctgaccttgctgatgtggagttctttgtcttagacgagttctacaaaatcgacttggggaactcacctgacgaaagcacgcgcgctgttgacttgagcttagcattccacaagcttgcaaagactggtgctcaattctacatgctcgggcctcacattcagaaaatctctggtttggatgactatgagtaccacttcatcccatccgactacagcactgtcgcagtcgacattcaaaatttcaatctggagatgcgttccgaagagcgaaaggaaaaattgcttgagttggtcacaactctagactctcctactttaatctactgtcaggccccccctagtgcgaacagggtcgccgagtatttaattcaagaagccgggttgaagccagtgccagaaacgcaggaaatagctgcatgggtctccaagcactaccaccctgaatggaacgttgccaaggcattatctctgggtatcgggattcaccatggaggagtgccacgtgcattgcaacagtacatcgttaagttgttcaatgatggcatcatcaagcgaattatctgtacatctacgatgatcgaaggcgtcaacacatcggcagagaacgtgatcatttacgaccgccgcctaaatacttcaaagttcgactacttcacttacaagaatatttccggtcgggcgggccgtatgaataagtacttcattggtaaagtcttcatgctcgaagcgcctccccttgagcagggtctcaccgttgaatatcccatcggccatcaggatgaaaactccccgataggactcatcatgcaactggagaacgaataccttactgatatttcacgtggtaggcttcaagatgcatacgccaacccgatactatcgccgtcaaccctgatagaaaatcgacacgttccgattgagcggcaagtcgaggtcgcagaaatgatcattcgtgacctaccggatggcagcaagcttcttgactggaaaggcatccctgagacgaatcagctcaattacctatgtgaactagtctacagtctggaaggcggtaatctgatggactatgggatatcatctagcttgcaattaatgtggcacatcaatgagctccgaactcagaaaaatctgcctgcttacctaagagacgcggtggagaatcgacgagaggaacacactcccagtgaagcgatcaatctacgcctgaaattcatcagaaatatggtgtgtttccgattgcctcgggacatcatggccgtaagtaacattcaggccgacgtgctggcgaaaatagggatcgagccgggtgattttagcttctttgctgagcagcttgaaaatatgttcctcgacccactactcaccgcgttggatgaatacggaattcccacacagatctcgactcagatcaagaacctcatcttgccatcggaacatctgaacgacctactggcgaaacttcgggctctggctcccagagtagagagcctccaactgacaggttttgagaaaagcttaatgagctgggctgtgtccgaaatgtag

SEQ ID NO: 58886 - DNA, 1623 bp, Klebsiella pneumoniae 342
atgagtattactagcctatctgatgcaggtgggcctgcggcaaggcaaggcttcaagtatcaggatcacgtagctgttagtttcatcttcaagatgctccgagacagcaactactctcaagtggaatgcgagacagcggatgatatcgtggctgtattccaatgcgagggccagattctaaatgaatacattcaggtcaaaacaaccgaaagtgatggcaaatggaacttgaaagagataacggcgttagatggcagcaaggctaattcttcgcttctgcataaatcgctgaaatgcgatgtacgtccaggtattgcccgtttccgaatcgtgaccaagcgcgacgtcgcaaaaattcttgaaggattcaagaaagagatagataagcgtgttctgcctgacataaccacgacccgaggtatggcactgtgcaagacgtttaaaacttttgtctcacctcaaaaaaggaactttttgtactgggcggaaaactttgtctggcaggtgtacggtgatgttgaggcgttggaggccgtcaatataaaggctttgtcccagcttgcggaggtgcttggaaatcgtcccaacttcacgcaactaaaggcaatttacgaagaatttttagagattgctgacaaagcggccacggctagcgtgaagacagctgcagcatctaagatcatccttcgagatccgacgctggcttacctcagaaaattattagacgaggctgatgacaagtcaacagccacatccaaaccatataaaaagcgtccggatccgttcttggtcgagtttcacgccaacactaaagagggcttattgcactcattttctggttttgacgtgcgctatgcacttaagaaatggcggcacgaaaattacgcaaagcatctcatcgaatggctacctgagttttccctaaaggccagtgaaatcgtaaacatcctcgcgcataacgccaaagcgatcctggctaggtcaatcagtaccttcagcgacagtgagcttccgcgcgataggctcattgcagaactaattctgcactccatcctgcgcagtcgccaagacagcgagcccgttgcgtgcaaagtattctacaaatctgctgacaagctttcagaatttggcaatgctcacatcgttcagatgcctgatcaggatgatcagttgtggctaggtcttgcccgcttgatcaaagcaaatgatatggatacaactctagagcaaattcgcgaaattcttgacgaaacgatctcagaaaccgtgctgtcggcagagcgagaaatcattatttctttacgcgaacctttacaccaccagccaaaagcagattccttcaaccaagctctgcatcgaaattctcctgtcgatgacatgctgaatattctctgcttccctatcttgttgacctacgatagtgctgcgctttcgtcaggctggctcactgattacgtagacaacctcaagatagagatcgaaacccacttcagaacgttcacctcggaactgccggagaacatcaaacaagtgaaggtgcacatctttttggtgcctatggaaagcattgaacatctgaccaaggctttcaactcttactgcgaaaagctggaagaattatag

SEQ ID NO: 58887 - DNA, 2199 bp, Klebsiella pneumoniae 342
atgaagatatcccgggcaggtcactctgccgcggatgtctcaaggaacaaagcggctatgaattacgaaaaaatcaagaacatcctggcgaaactgggtgaagaaagcgcatcgacggtcgatgtgcttctcgccatcaacaccattgtcaacagaagcaattcagagtgggagggccgcgatttggtgatccgagcactcgacaaatttaagttttttgactctgtcgaacagtcgctcctgctaaacatggtacgagctgtcggactattcccctatatcactcctcacctcagcagcatggcgatttctgatcgcttggcttatgaagctcacagggtcgagggagtagaacagggcatggtgtttcatcacctgcaggctcatgttttcagcttgatcatgcaaggccgaaacgttgtactcagtgcttctacaagcgtcggaaaaagtctagtaattgacgctgtgctggcacagagacgattcaaaaaggtggtggtgatcgttccgaccattgcgctgatcgacgaaacccgccgtcgtctggtcaaacgctttaaggacttcaacctgattacgcatccgagccaggaatctgtgagcgagacaaccaatgtctacttgctcacccaagagcgtgtcatccagcgtcctgatcttgctgatgtggagttcttcgtcttggacgagttttacaaaatcgatctggggaatgccacagacgaaagcacgcgcgctgttgacctgagcttggcctttcacaagctcgcaaagactggtgctcagttctacatgctcgggcctcacattcagaagatctctggtttggatgactatgagtaccacttcatcccatccgactacagcactgtcgcggtcgacatccagaatttcaatctggagatgcgatccgaagagcgaaaggaaaaattgctcgagttggtcacaaccctagactcgcctaccttaatatactgtcaggcaccacctagtgcgaacagggtcgcagagtatttgattcaggaagctgggctgacaccagtaccagagacgcaggaaatagcagcatggatctctaaacactaccaccctgaatggaacgttgctaaggcaatatctctgggtatcgggattcaccatggtggagtgccacgtgcattgcagcagtacatcgtcaagttgttcaacgagggcatcatcaagcgaatcatctgtacatctacgatgattgaaggtgtcaacacatcggcagagaacgtgatcatttacgaccgccgcctgaagaattcaacgttcgattacttcacctacaagaatatttccggtcgcgcaggccgcatgaataagtacttcattggaaaagtcttcatgctcgaagcgcctccccttgagcagggcctcacagtcgaataccccatcggccatcaggatgaaaactccccaatgggactcctcatgcaactggagaacgaataccttaccgatatttcacgtggccggctccaagatgcatacgccaacccggtattgtcgccgacaaccctgatagagaatcggcacgttccgattgagcggcaagtcgaggtagcagaagcgatcattcgtgacttactgctcagcagcaagcttctggactggaaaggcattcctgagccgaaccaactaaattacttatgtgagctggtttacattctggagggcggtaaccttatggattatggtatctcgtccagctcgcaattggtgtggcacatcaatgagctccgaactcagaaaaacctgcctgcttacctaagagacgcggtggagaatcgacgaccggaacacacatccagcgaagcgatcaatctgcgcctgaaattcattagaaacatggtgtgtttccgattgcctcgggacatcatggccgtaaataaaattcaggccgatgtgctggcgaaagaagggagcgagccgggagatttcagcttctttgctgagcagcttgaaaatatgttcctcgacccgctacttactgcgttggacgaatacggaattcccactcagatctcgactcagatcaagaacctcatcttgccatcggaacatctgaacgacctgctggcgaaacttcggaccctagcacccagagtagagcaccttcaactgactggctttgagaaaagcttaatgcgttgggctgtgtccgaaatgtag

SEQ ID NO: 58888 - DNA, 504 bp, Klebsiella pneumoniae subsp. pneumoniae B5055
atgatcgatttcgataatattcatatagtaattagagaaaacgatccagatgagatgtggttcggcctgagtttatggtgtgatggaaatatagaaaaaacagttagtttatttgcatctaaggttctttctttcgtagatgtaacatgtgacacacaaagaaaaataatattagacataaaatcagatgagtatttagttaaacatgatgttaattgtgtactggacccagcaacatcaataactgatcatttatctagaatatatttcgttgtttttattggatacattagtgaaacccagacattagaagttaaaaaagattatgaagaaaatctaaaggaagaagttttattaaagtttaaaagcatcatcgaagaactaattcataaccatgattccgttatagatttaaactttataatatatatgtatcccttgccttgtattgacagtttggtggactccttcaaaaataaaatggttggtgatataaatggataa

SEQ ID NO: 58889 - DNA, 613 bp, Klebsiella pneumoniae subsp. pneumoniae B5055
atgcaaatgactgtattccatttgttaatgaatggtgctaaccttgccctcagtgcaccaaccagcatgggcaagagtataattattgactcattagtttcatgtggaaaatataatacaatagtaattgttgtacctacaatagctctaattgatgaaacaagaagaagattacacaaaaaattctccaacatatatgagataatatatcactctgcacaagaaagaaaccatgagaaaacaatatatatattaactcaagagagagttaacgagcgtgaagacttgaatgaggtagacatctttgttattgatgaattttataaattatcattcaagaacaaaaccagtgaaaaatactatgatgagcgagtaatatcgttaaatgtcgcattaagtaagttacttactgtttcaaaacagttttatatgataggacctaatattgattttcttcgtggcctgaataacattaatgaagattttattttcctatcatcagattttaacaccgttgctttgaacatttttgaatataatatactgcctaataatgaatcattaaaacaatcaacaacacttagtattatagaaaaaaacaatggtcaattta

SEQ ID NO: 58890 - DNA, 1587 bp, Klebsiella pneumoniae UCICRE 7
atgagtattgatatagcagataagctgggagtaaaaataagctataacaataaaaatagtagtggttttatttgccatggtgatgattattcttatgtattaacagcaaagcattcaatatgtaaatccagtcctaacgattgtaaatttaaacataagaaatgtgatacctgtgtttttagtggtgtggcaaaaactaaagtaagcatttgcaaacctgatactgatacttttcccctatgcaaagtaaaggatgttttactttctccaaagaaagatgttgctattttggtcttaaataaaaaatcccatattgatttaaaaacaaaagaattaccaagtacaaaaatcattaatactgctaattataattcatcacataaatttgtttcttgcggttatcctgcaattaatgaacatcaatctgttcaacctttgcactataataattttagtttatttagaaatgaaaaaatttgccttcaaattattaatgatacattgactgcattagaagatcctaaaaatggtctttcaggaaactctggtgcagggatcattttaaattcatctagttgtgtgggattactagggctttataccgatactggtgattatggtatttgttatggtgatatagtcgatttttctataaatgaacttcttacatcttctggatacgtccctttagaaatggaagaggatctgtctaataattttaaagcactaattcagtctgattttatggagtgctttgttcgaatggaatgtgatttaaatttagacaaaaatcggattgttaacctttataggctctgtttagatggtaaaaaatataactatgttaagattggtgagcggttaattgattgtattccatcattttctctttcccgtaagcaattaatgaggtgtcgcgagagaaatgcatttggaaaagctacgctatccgcgatacgtaattttttgaaaatagaaaggaagactaagatatccgaaatgttattacaaggatttcttgaatcgtacctgcatgcgcctaaactttattcatttgatgaaataaataatgcaggttttcatggcgcccatgttaaattcaataagaataggaatgttgagttaatccattcggctgcatttatatctaattcgttatcggatggcgtttcatatgcgatagatgttattcttaaagcatttcctgagttaagatcgttggatggtttgcttggtaatacatttttagaaacaaactttactgaagatgagtgccaaatcctagccagtcttcttatcccgggagagtcttcgtactcgcagggttatgaagacagattggctatatttattggctataaccataagattgaagagtcactcatatatgagaatgcatctaggtttccgtctttgcttgaacaaaaaattattctcaatgttcagcaggcactagaatatcggaaagaggaaatcaataagttatcaatagttaatgcaactattgattgtttttttgttccgttcgatgatgtgaataaatttaatgacgagttcattgagagtctgaaaaatgaagaagattga

SEQ ID NO: 58891 - DNA, 2562 bp, Klebsiella pneumoniae UCICRE 7
atgaagaagattgattctttcattatagaaaaaatatttaacagcgcatattttaaaaagctttataaaaaaataataaaagcatattctgcgttgactatagaatctgagaaccatttcaatatttccaatacagaattgagagacatatttagatttattgatttgttggcgaactcatctaatcaaaatgctaggatgtgtgcatatcactggattagtttgcttgaaccattttctgataaatgggggaaattctcacttatctcttctttagtctactctaaacttggtttatacgcattagattttaatgatcatgctcttccattttcgcagcgacttgagaatgaagcgaagaaatctgcccaaacatttagtaatacatatatattcaccgatgcacagtttgatatttatacggatatgctgaaatcaccttactatagtttttcaggtccaacgtcattggggaaatcatttattctaaaacgctatattgaagagattattcaaaattctacatcaaacattgtcatcttagtcccaacaagagcattgataagccagttttctttggagattaaaaatgaattacatgaacttattgaaaatttcaattataaaatagtgactcacggatcattagcaagtaaatcagatgccgtaatcattaagcatatttttatattgacgccggaacgattgcttaatttgttctcgcaaggcaaggttgttagtatagattatttgtttgtagatgaagcacataaattatcaaataatgatgactcggatgtgcggagccttacagagtataatgctatcgatagtgcattattcaacaatccaaatatgaaaattgttttttcttccccaaatattgaaaatcctgaggtttttttaaatctttttgggcgtgaaaaaatttatgcaagtaggattattgaatcaccagtgtcacaaaatctttatcttattgattttcataaaaaagaaattaaatatttttctaattcagaatgcatcgatattgaaagtggttctttatatacactcaataaaaaaagtgatttcatttataatatagggagccgacatggatcaaatatgatatattgctctagtcgggctaaagctgttgattctgcacttgaattttatcaaataaggctctcggaaaatattgttttatctcctttgttgattgattccataaaaaagataagtaattatattcatcctgagtattatttagctatgtttctaatgaagcgaattgcttatcatcatggacaattaccacaagcaataagaaatatagttgaagaattattccgaaaaggagatattgattttatcttttgtacacctactttggttgaaggcgttaatatgccaactcggaatatatttatcaattgtgatgataaaattagattaatcgctgatgcgaaaaagaatcctaataagacacttgccttttggaatctggctggccgggcaggtagatattgcaaggagttatctgggaatattttttgtttacaggatgaatcaaatcgatgggataatactgatatttttttagagaaaacagcgcatttaactacaactatagatgcccggatagaaagtaaatctgggttaagagaaatagagcgctatctttctgatacggagactgatatttataaaaggaaccaggcgatagagtatctcgctaatattatggctgtagacactattagatttaaaaataatctaaaagatagctttgtcctgcggaaattttatgatatacatcgagaagaattgttatctcttgctaaactaaaagcaaatgatattttagatattcctatagatattatcaattcctataaatctcttaattttaaaatacaacgaaaagtatttgattacgttagcgtatctcctgtaaacaaaaaactcccatcgctcgactatgcaaatattttgtcggtattggagttgttttatgatctttatagatggggtgaaacagaaactaaatatgtaaagtccaaaggacaattgacttattttgctactttaatgaatcagtggaccaatgattattcaataaacagaattataaacgaaaatattgatataaaaagaaccattgtcattgaacgtggacaacaaccaataccttttgacaagaatgatattaatcatgttaataaagtgatcgatgacattctttataacatagaaagaattttatcgttcttttttgaaaaatacttcaatcattactataaatgtctggctgcaattttaggggaggacaatgcgggacataattgggctacatttcttgagtatggttctaagaatccgttatgtattagcttacaaacattaggtatttcaaggcatgctgcaaatataattgcctcttccaaagaactcaggaaatatttaaagttcaatgaggattcatatgagataattagtgttaacaagcaagggttgttgaattctttacaaaaagattctgttgaatatggagaggttaaaatatttctttga

SEQ ID NO: 58892 - DNA, 918 bp, Klebsiella pneumoniae BWH 30
atggagtttgatattcttattgatcaaagcctttcttctttcgtaactgaaagtggaaccagtaaaataacaaacaataatcttctttctattattaatgattttgaagatggatgttggcgctatcaaaagtttcaccgttttatatgggataacattttacaaacggctctttctaataaagagagagaagctctaataggtggtcctgggacatcacttgctcttgcatcaaaaaaccttagacttacggatagcgaaaaagacataagtaaaggaagtgaactcgcagaaattttcttatatggcataatgcgtcatcactttaaagcgctaccagttgtacctaaaatattctataagcaaaacagtcaagacaacgcaaaaggtgctgacagtgtgcatgttgttattattgacaatgataatttttcgttatggtttggagaagctaaattctataatagcattgaagatggacgtttcgatacgataatcacatctgtgaaaaattcaattacaactgaaaaattaagaaaagaaaatagcataatattaaatacacaagacctctatgatctagtgcaagacaatgcattaaaactcaaaattgcaaaagttttatcttctgataattcaatggacaatataaaaccattaattaacatacctattttcattttacatgagtgtcctataacagaaaattctaactgcttgtctgatgagtacaaatcttccattattaaattacataaagaacgctctgaagctttttttaaaaagcatcatgagaaaataaaaaacatttatggttatgaaaaaattaaatttcatttaatactattcccagtacctaagaaggacgtaataatagataagtttttaaatagcgtcagattttataaggaacaataa

SEQ ID NO: 58893 - DNA, 2160 bp, Klebsiella pneumoniae BWH 30
atggataatgaaattaatagagataatgaagaaggtcgtcgcattgaattttcctcacatgatgagtatattttttctcattgccaaaacataaataatctaattaacaaaaggaagtatgacgaggcgagaaataatttaattctacttttagatttccataaaaacaacagtcttcattataatgctcttgtaaatcatcttatcagagcgttagggttatatccttatattcagacagacactgctgattggcatgaccggttaatttatgatctgttcaaagttgatgtaggattaacaaatcctatcacactacatcgagaacaatcattaattttgaagagattattaagcggtgaagacttagctataagtgcccctacaagcttcggaaaaagctttatcattgatgcttttatagcattaaaaaaacccaacaatgtattaataattgtaccaacgatatcactcacagatgaaactcggagaaggttacatagaaaattctcttcagaatataaaattataactacagcagatgtggaactttcagaaaaaaatatttttattttccctcaagagagagccattagttatttggagaaaatccaaagcttagaccttttcattattgatgaattctataaggcaagtgaaaaacatgataaagatagagcaccagccttgatcaaagcaatgatgaaattcactaagttagcaaagcagagatactacctagcaccaaatattagtgagatcataaacaatccgttcacaaaaggcatggagtttgtcaaaatagattttaacactgtctttttagaaaaacatgatctttcagaagttatcagagaagatgaagacgaaaaatgtgcagcactgttagatattttatcgaagactcaagggaaaacattaatatatgctgggacatataaaaacattgaaaaaatttcaaaccttatattaaagacacaacctaataaccaatcatatatattaaaggaattttcaagctggttaaaacaaaactatgactcgaactggaagttagccaaattacttgaaaaaggaatgggtgtacataatggtagattacaccgctccatcagccagttacagataaagttatttgaagaaaaacatggaattaaaaatattgtttcaacttcttctataattgagggtgtaaatacatctgccgagaacgttgtaatttggcaatgtaaaaatggtaatagcaacctcaaagatttcgcatacaaaaatattatcggcagaagcggtaggatgttcaaacattttattggcaaagtatatttattatcagcacctccaaaagaagagaataatgagctagctttaaccattcctgaatctcttgttggtgaaattgacgaaattgaatataataacatcctaacacccgagcaaatctcagcaatcataagatataaagaagaaatgtactccatattagggcatgagacattcaacaaattattaaaagaaggagcgtttaaatcaaatgattattttttaattagagatattgcctttgatatagtgcaaaaaccgaaggaatgggaaaacataatatatttaaattcaaacaccccagatgaatgggaacacttcctatacaaaataattaacttacagcctgctggatggggcggaaagcattctagatttgtttcttacatcaagattgcgagtttaaactggaagctttcaatcccacaaatattagaaaaactttctaaactaggtatcactattgatgatttttttgagcttgaaaaaacgttaacatttaagttaacctctcttttaaatgacgttaacgttttattaaatgaattaatgccttataaaaacacagatatttcaccatttatttttaaaacctccaatgcattcctcccatcagttgtttatcaattagaagaatacggcctccctcgaatgctcacaaaaaaaatatcgactgcctttaatctaaacttcgagagtgaatcattaactctgcatgaaaccattgattacttaaaggtaattgacgatattattgacttatcagtcgcaatcgatgccagtcttatggaggagtatattttggataacttctttgaaggtgtaacgtataataaataa

SEQ ID NO: 58894 - DNA, 894 bp, Klebsiella pneumoniae UCI 26
atgctgctgcccatacgagtcaacaagcggttcttgaatttatttagaacacttacattagacaaagcaccacggcaatctaccgtaaacttacatgttctaaacattgagagtaacagttttgtttataacaaattggttgaggaattaagagacttaatagtctgttacgtacattcgaatagaagaatagctgagtttgaaaaaaatcatccatcttttagtcccaaaccatatttagaggcaatacagaaatttcgtacctatacatcaaatgaaggtgagttaggtgaactactattatacgcattccttgaatcaggtctcaacgcacctaaattactatccaaaatggagctaaagactgatgcaaatgattatatcaaaggttccgatggtatacatttattagagatcgacaataattatcaactaatctttggcgagtccaaaatgtactcggacttactggagggggctcgtgaagcgtttgactctattgctgactttaaagccaacggattaggatttgaacgaggtctaatagatactcatgtcataaatgaaatggttactgaagaaggatatgagacaataaaatctatactattaccttcaggaaataatgggccaaaccttgatctagcttttggcgttttcctaggatttgagttacctgttagtgatacacaattgtctatgagaaacaacgaattccgagattggacatattcattagtaaaaaataatgcttctcgtgtaattgatacgatagaaaaaagaattataaagcataaactctttggtcacgactttcatatatacattgtccctttcacagacatagatatcactcgtaaaaaattaatccaagaaatgctaacaattggataa

SEQ ID NO: 58895 - DNA, 2589 bp, Klebsiella pneumoniae UCI 26
atgaacgaaaaagatgtagcaagaaaaatcccattagcacaacgtctttcgatggacgcttatacaagtagctactttaaagagatctataaatatatatcaattttatacgataattgtttgtttaataataacggcactcataatctgctatttgttgacacaacaaaaatagagaaagctttacgttttgctgatattctatctcattcacatgttgaagctcatcgaacaaaatcatttgaaatcataagtaaaatagctgcatttcattcagatgatccttattttaaaatgataggttcagcggtcataaatcgtttaggtatatttgccgcagataatttaatctcacaaggagtacatttaccgttagaccgagaaatagaatcatccataaaaaaatcattccaaagaactactatagatggattattttttacagacaaacaatatgaactttatcaatccctaattacctcaaacactttaagctttgccggccctacgtcaatggggaaatcgtttgtcataaatgaatatataaaacatattgtttttggtaatgctaaaaaaaatatagtgctcatagtcccaactagagcattaattagccaaagtacattaaaattaaaaaatgaactaagagatgaaattgatggcaatcagtataagatagtaacaacatcttacatgctcagaggaggtattgatcatagtaaagggtatgttttcgtattgactccagagagattagttagtttaattagtacatgtcctgatataattattgattatatttttgtcgatgaagcacaaaaacttactattaaaaatgatacacgaagtctcgtaacctattccgcgatcgaacaaacattaaatttaaatccaaacgcaaaactatttttctcatcaccaaatttatccaaccctgaagtatttaatgatttatttaatcgggaccatgctaaagtttatcgcagcatagaaggcgctacagctcagaacttatactttattgatttattaaacaacaagtttagttatgttgataaaaacaaattaattgatatagataatgttaatcagacttatacatctgttaatgatcttatcttccagattaacaaagggaaaagtaagattatttacactggaggtatcgataatacattatctcgaacaagggatttcctacgttacataaagaaattacaaagtaacaagaaacctcaaaattttgatctagcatctcaggtccgagaatttgtgcataccggctacgaacttgctgaagctatagagtatggagtagcatttcatttcggaaacctgccacaagcaataagagatcttattgaatacaactttaaaataggtaatattgattacctgttttgcacatcaactcttcttgagggggtaaatttacccgcacgttcagtatttattttgacatcaaaaaagggtactagatattttgaacctgtggatttttggaatctcgcaggcagagctggaagactagccatagagttagctggtgatatattttgcgtaaaagatgaaagtgggacctggaatgataaagcggtaaaaaatttaattctatccaataaaaatgaaattgaactaactcccagcttttatcttaacgattctaaaaggattaaagagctagaacaaataataaaaactggttctactgaggggattcaaaatagcgaatttctcagaacactaagtgatatggtaaggattgataccctacgaactgacaaagccaataatttaccacttatcaattatttcagaaataatggaaataacgatatattacattatgccttgaaaagcataaataacattaacatacctacacatattttattagcaaatagccatattgctattaactcacaacataatgcatttaattgcatcagaaattattcaattgacgaactaaagttatcatggaatcctacaaatgaagaaataaaagaaaaattggccctcatattcaatatttatcaaatagataaatatagtaaaggattaaaccgtcttaattttaattcaattccatattacgcagtcattttaactaagtggatgcatggtaatacattaagtgaaattatctctgacgcgattgtttattacatatcgaatagaaagaatatctatctttcagataagactcaagagccatttgatcaaaataattctattcatataacaaaattagtaaatgatacaattaaagatatagaattaaaaataggttatcaactacaaaattatatttcacattattgccaacttctttcacttgtttttgaaaataacccgggagcaaattggtcacaattcatagagtttggctcgaatgatccgattgtatggcaactgcaatttatgggattttccagacattgtgcaatatttttaaagaaaaacttccctaaacaccttaaatatgatcaagaaaacaatcagttatacatattaaacagagctgaaatcaagtcaaaggttaaacagaacaaattatattggcttgaaattcaggccctgctttaa

SEQ ID NO: 58896 - DNA, 918 bp, Klebsiella pneumoniae BIDMC 52; identical to SEQ ID NO: 58892

SEQ ID NO: 58897 - DNA, 2160 bp, Klebsiella pneumoniae BIDMC 52
atggataatgaaattaatagagataatgaagaaggtcgtcgcattgaattttcctcacatgatgagtatattttttctcattgccaaaacataaataatctaattaacaaaaggaagtatgacgaggcgagaaataatttaattctacttttagatttccataaaaacaacagtcttcattataatgctcttgtaaatcatcttatcagagcgttagggttatatccttatattcagacagacactgctgattggcatgaccggttaatttatgatctgttcaaagttgatgtaggattaacaaatcctatcacactacatcgagaacaatcattaattttgaagagattattaagcggtgaagacttagctataagtgcccctacaagcttcggaaaaagctttatcattgatgcttttatagcattaaaaaaacccaacaatgtattaataattgtaccaacgatatcactcacagatgaaactcggagaaggttacatagaaaattctcttcagaatataaaattataactacagcagatgtggaactttcagaaaaaaatatttttattttccctcaagagagagccattagttatttggagaaaatccaaagcttagaccttttcattattgatgaattctataaggcaagtgaaaaacatgataaagatagagcaccagccttgatcaaagcaatgatgaaattcactaagttagcaaagcagagatactacctagcaccaaatattagtgagatcataaacaatccgttcacaaaaggcatggagtttgtcaaaatagattttaacactgtctttttagaaaaacatgatctttcagaagttatcagagaagatgaagacgaaaaatgtgcagcactgttagatattttatcgaagactcaagggaaaacattaatatatgctgggacatataaaaacattgaaaaaatttcaaaccttatattaaagacacaacctaataaccaatcatatatattaaaggaattttcaagctggttaaaacaaaactatgacccgaactggaagttagccaaattacttgaaaaaggaatgggtgtacataatggtagattacaccgctcaatcagccagttacagataaagttatttgaagaaaaacatggaattaaaaatattgtttcaacttcttctataattgagggtgtaaatacatctgccgagaacgttgtaatttggcaatgtaaaaatggtaatagcaacctcaaagatttcgcatacaaaaacattatcggcagaagcggtaggatgttcaaacattttattggcaaagtatatttattatcagcacctccaaaagaagagaataatgagctagctttaaccattcctgaatctcttgttggtgaaattgacgaaattgaatataataacatcctaacacccgagcaaatctcagcaatcataagatataaagaagaaatgtactccatattagggcatgagacattcaacaaattattaaaagaaggagcgtttaaatcaaatgattattttttaattagagatattgcctttgatatagtgcaaaaaccgaaggaatgggaaaacataatatatttaaattcaaacaccccagatgaatgggaacacttcctatacaaaataattaacttacagcctgctggatggggcggaaagcattctagatttgtttcttacatcaagattgcgagtttaaactggaagctttcaatcccacaaatattagaaaaactttctaaactaggtatcactattgatgatttttttgagcttgaaaaaacgttaacatttaagttaacctctcttttaaatgacgttaacgttttattaaatgaattaatgccttataaaaacacagatatttcaccatttatttttaaaacctccaatgcattcctcccatcagttgtttatcaattagaagaatacggcctccctcgaatgctcacaaaaaaaatatcgactgcctttaatctaaacttcgagagtgaatcattaaccttgcatgaaaccattgattacttaaaggtaattgacgatattattgacttatcagtcgcaatcgatgccagtcttatggaggagtatattttggataacttctttgaaggtgtaacgtataataaataa

SEQ ID NO: 58898 - DNA, 894 bp, Klebsiella pneumoniae BIDMC 52
atgctgctgcccatacgagtcaacaagcggttcttgaatttatttagaacacttacattagacaaagcaccacggcaatctaccgtaaacttacatgttctaaacattgagagtaacagttttgtttataacaaattggttgaggaattaagagacttaatagtctgttacgtacattcgaatagaagaatagctgagtttgaaaaaaatcatccatcttttagtcccaaaccatatttagaggcaatacagaaatttcgtacctatacatcaaatgaaggtgagttaggtgaactactattatacgcattccttgaatcaggtctcaacgcacctaaattactatccaaaatggagctaaagactgatgcaaatgattatatcaaaggttccgatggtatacatttattagagatcgacaataattatcaactaatctttggcgagtccaaaatgtactcggacttactggagggggctcgtgaagcgtttgactctcttgctgactttaaagccaacggattaggatttgaacgaggtctaatagatactcatgtcataaatgaaatggttactgaagaaggatatgagacaataaaatctatactattaccttcaggaaataatgggccaaaccttgatctagcttttggcgttttcctaggatttgagttacctgttagtgatacacaattgtctatgagaaacaacgaattccgagattggacatattcattagtaaaaaataatgcttctcgtgtaattgatacgatagaaaaaagaattataaagcataaactctttggtcacgactttcatatatacattgtccctttcacagacatagatatcactcgtaaaaaattaatccaagaaatgctaacaattggataa

SEQ ID NO: 58899 - DNA, 2589 bp, Klebsiella pneumoniae BIDMC 52; identical to SEQ ID NO: 58895

SEQ ID NO: 58900 - DNA, 1587 bp, Klebsiella pneumoniae BIDMC 35; identical to SEQ ID NO: 58890

SEQ ID NO: 58901 - DNA, 2562 bp, Klebsiella pneumoniae BIDMC 35; identical to SEQ ID NO: 58891

SEQ ID NO: 58902 - DNA, 945 bp, Klebsiella pneumoniae BWH 15
atggatgctttacaaaccgcacttgagaaattggtaagggatgatggtgatactatttatagttatttccaagaaattaaatctgattacttgatcgagggtacttctgctgcttgccactttcattgtataaatttagatggtaatgggcgacctaaagtcgatgcacttatacagtaccttgtggggaaaatcatcgactatgctattccccgtaagaagataaatgcagccataaagtatcaacaagaaacaggttcaactcttaaaatagctaagttattcacgcaggcaatgggattgtttaccagccttgcgaatagcggtgaaggaggagagttaattctatttctttttgcagagaaattcctaaagctccctcagattatctgcaagatgaatctaaaaaccaatcctgaaatgcattaccatggtgctgatggtgtacacatcggtgttgataagcaaagccaaaaactatgtttatattggggggagtcaaagctatattctaatttgacacaagcaatatataaatgtatgaagagtatatctccattaattactagctcatttggtgatggtagtgctgaggaaagagatatccagttactaagcgattttatgaatgtagatgatcctaacctagaagcggccttaaaaaaattcttggatcctgataatccggaatttaataagttagagtatcgtggtatttgtttagtaggttttgatattgatgattatccaactgagccaaataagttaaatattaatgggttgcttgagacctttagtgataagattgactcatggagggatagtattaaaaagagaataattgaggaaagtattcatggaatatcattgcatgtatttttaattccatttccttctgtagatagttttagacagaccttgattacctctttgaatggagattga

SEQ ID NO: 58903 - DNA, 2580 bp, Klebsiella pneumoniae BWH 15
atgagtatgaaagagcttcctagttggttggttaataatcaaggttttatcaataaactgaaaggattaactatatcctcagtagttaaccaatttccatcagtcagggcgtttaataatcaaagtgtttcggatcaagatataagttatttgcttacttgcggtagtgttttatctcaatcaaatgatgatctttgtcaagatgctgcgttgaggatatctcagtattgcttgattaacttgaatagtgagcaaaggaaagatagtgcagcattaattttagatgcgttagcaaataatgctacagtagagcttgctgtaaaaaaaggatttctaaaggaagggtttgagaaaaggctgcctatagctggtcagttagaaacaacaaaacgaaaaattgagcatacaattgaaattgggaacgataagcttatttatgctaataaatttcagtcagagttttgggatagagtgcaaaaaaatgaatgggttagtgtctcagctccaacatcagttggtaaatcttttattttagagtcttgggtggaagattatattaataaaaaagatagaggattaattgtttatttggtgccaactagagcattgataagtgaggtgtatgaatcgcttcttatacgtcttgattcaaatgggactggagttataaatatacagaccttaccgcttaaaacttcctacgataacacaagagtaaatatttttatttttactcaagaaaggttgaatatattttataattctttaaatgaaagacctatagtcgatctgttaataatagatgaagcacataaaattggtgactcacttcgtggtatatttttgcaatatgttttggaaatgacatgtgcaagaaatagacagattaaagtgattttcgccagtccttttacatctaatccagagctgttattatcagatgccccttataagggtaaaacaagtgtaataaaaagtagttatgttacagttaatcagaatcttatttgggtggagcaaaggcctaatacacctaaaaaatggaagatgtattttttctttcggggggagaaacaattcataggtgattttgatttagaaaatacaccatcatctgatagtaaaaggctttcatttattgcattgaccttgggaaaacatacatctgggaatgttgtttatgtgaatggtgctgctgatgcagaaaaaacagccaagcaaattgcagatagtttggatgaagttactgatgataaagatatattaaatttgattgagttaagcgaaaaagttattcatgaaaggtttgcacttaattttaccttaaggaagggggttgcatttcactacggtaatatgccattaatcataaaaactgaagtggaaagattatttggtaaaggcaagataaggtatttgatttgcacatccacattggtggaaggtgtaaatatggcctgtaagaacatatttatccgtgggccaagaaaaggtagtggaaaaccaatgaaagaggatgatttttggaacttggccggtagagctgggcgctgggggaaagagtttcaagggaatgttatttgtgtcgatactaataaccaaaggatttggaatggcacgccaccaattagtaagaaaaatataagaattattcgtgcaactgactcattacatgacgagatcgactcaatttatgaatatatcgattcacctcatcactatggcatgacacgatccaaccctaaattacaagggttatttagttatttatgtatttcacattatcttaacgacggattagaatacaatccttatattgaaaaatacaacttaaataatctagaagagttggattctaaaattacagaagttttagactctctgagttttccccttgagattatatctcgcaatccgggtatcagcccaatattaatgcaaaatctgtgggagaggtttgagaggtgtgataaagaaaatttagagaacttacttctagctgatccatcaagtgatgatgcgttgccctcatatatcaaagcatttacacgtatatcagatacgatgagcattgatttgggttataattctaaaggtgtatttgtacttgcgttattagttattaattggatgagggggtatccactagcaagattaatttcagaaaggatatctcatttaaagagaaaaaagaaagagtataaggagccttctgtcataagaaatgttatggaagatgtcgagcgtgtcgctagatatcaagcacctaaattactttcttgttacaatgatttattaagacatttttatatttctgaagggagggctgatcttatagaatatatcgatgatataggtgttttcttagagcttggagtaagtgtaaagacacagatctctctgattagcttgggtttttcacgaacttcagccgttatgatatctgagtacataactagcgataattttgatgagcagctatgtatagaatggattattaagaatagtaatttgcttgatgatttacctgcattggtaaagttagaaatttactctatcatcaatggaattgagatctaa

SEQ ID NO: 58904 - DNA, 1587 bp, Klebsiella pneumoniae UCI 64; identical to SEQ ID NO: 58890

SEQ ID NO: 58905 - DNA, 1024 bp, Klebsiella pneumoniae UCI 64
atgaagaagattgattctttcattatagaaaaaatatttaacagcgcatattttaaaaagctttataaaaaaataataaaagcatattctgcgttgactatagaatctgagaaccatttcaatatttccaatacagaattgagagacatatttagatttattgatttgttggcgaactcatctaatcaaaatgctaggatgtgtgcatatcactggattagtttgcttgaaccattttctgataaatgggggaaattctcacttatctcttctttagtctactctaaacttggtttatacgcattagattttaatgatcatgctcttccattttcgcagcgacttgagaatgaagcgaagaaatctgcccaaacatttagtaatacatatatattcaccgatgcacagtttgatatttatacggatatgctgaaatcaccttactatagtttttcaggtccaacgtcattggggaaatcatttattctaaaacgctatattgaagagattattcaaaattctacatcaaacattgtcatcttagtcccaacaagagcattgataagccagttttctttggagattaaaaatgaattacatgaacttattgaaaatttcaattataaaatagtgactcacggatcattagcaagtaaatcagatgccgtaatcattaagcatatttttatattgacgccggaacgattgcttaatttgttctcgcaaggcaaggttgttagtatagattatttgtttgtagatgaagcacataaattatcaaataatgatgactcggatgtgcggagccttacagagtataatgctatcgatagtgcattattcaacaatccaaatatgaaaattgttttttcttccccaaatattgaaaatcctgaggtttttttaaatctttttgggcgtgaaaaaatttatgcaagtaggattattgaatcaccagtgtcacaaaatctttatcttattgattttcataaaaaagaaattaaatatttttctaattcagaat

SEQ ID NO: 58906 - DNA, 1308 bp, Klebsiella pneumoniae BIDMC 61
atgagtattactagcctatctgatgcaggtgggcctgcggcaaggcaaggcttcaagtatcaggatcacgtagctgttagtttcatcttcaagatgctccgagacagcaactactctcaagtggaatgcgagacagcggatgatatcgtggctgtattccaatgcgagggccagattctaaatgaatacattcaggtcaaaacaaccgaaagtgatggcaaatggaacttgaaagagataacggcgttagatggcagcaaggctaattcttcgcttctgcataaatcgctgaaatgcgatgtacgtccaggtattgcccgtttccgaatcgtgaccaagcgcgacgtcgcaaaaattcttgaaggattcaagaaagagatagataagcgtgttctgcctgacataaccacgacccgaggtatggcactgtgcaagacgtttaaaacttttgtctcacctcaaaaaaggaactttttgtactgggcggaaaactttgtctggcaggtgtacggtgatgttgaggcgttggaggccgtcaatataaaggctttgtcccagcttgcggaggtgcttggaaatcgtcccaacttcacgcaactaaaggcaatttacgaagaatttttagagattgctgacaaagcggccacggctagcgtgaagacagctgcagcatctaagatcatccttcgagatccgacgctggcttacctcagaaaattattagacgaggctgatgacaagtcaacagccacatccaaaccatataaaaagcgtccggatccgttcttggtcgagtttcacgccaacactaaagagggcttattgcactcattttctggttttgacgtgcgctatgcacttaagaaatggcggcacgaaaattacgcaaagcatctcatcgaatggctacctgagttttccctaaaggccagtgaaatcgtaaacatcctcgcgcataacgccaaagcgatcctggctaggtcaatcagtaccttcagcgacagtgagcttccgcgcgataggctcattgcagaactaattctgcactccatcctgcgcagtcgccaagacagcgagcccgttgcgtgcaaagtattctacaaatctgctgacaagctttcagaatttggcaatgctcacatcgttcagatgcctgatcaggatgatcagttgtggctaggtcttgcccgcttgatcaaagcaaatgatatggatacaaccctagagcaaattcgcgaaattcttgacgaaacgatctcagaaaccgtgctgtcggcagagcgagaaatcattatttctttacgctaa

SEQ ID NO: 58907 - DNA, 2142 bp, Klebsiella pneumoniae BIDMC 61
atgaattacgaaaaaatcaagaacatcctggcgaaactgggtgaagaaagcgcatcgacggtcgatgtgcttctcgccatcaacaccattgtcaacagaagcaattcagagtgggagggccgcgatttggtgatccgagcactcgacaaatttaagctttttgactctgtcgaacagtcgctcctgctaaacatggtacgagctgtcggactattcccctatatcactcctcacctcagcagcatggcgatttctgatcgcttggcttatgaagctcacagggtcgagggagtagaacagggcatggtgtttcatcacctgcaggctcatgttttcagcttgatcatgcaaggccgaaacgttgtactcagtgcttctacaagcgtcggaaaaagtctagtaattgacgctgtgctggcacagagacgattcaaaaaggtggtggtgatcgttccgaccattgcgctgatcgacgaaacccgccgtcgtctggtcaaacgctttaaggacttcaacctgattacgcatccgagccaggaatctgtgagcgagacaaccaatgtctacttgctcacccaagagcgtgtcatccagcgtcctgatcttgctgatgtggagttcttcgtcttggacgagttctacaaaatcgatctggggaatgccacagacgaaagcacgcgcgctgttgacctgagcttggcctttcacaagctcgcaaagactggtgctcagttctacatgctcgggcctcacattcagaagatctctggtttggatgactatgagtaccacttcatcccatccgactacagcactgtcgcggtcgacatccagaatttcaatctggagatgcgatccgaagagcgaaaggaaaaattgctcgagttggtcacaaccctagactcgcctaccttaatatactgtcaggcaccacctagtgcgaacagggtcgcagagtatttgattcaggaagctgggctgacaccagtaccagagacgcaggaaatagcagcatggatctctaaacactaccaccctgaatggaacgttgctaaggcaatatctctgggtatcgggattcaccatggcggagtgccacgtgcattgcagcagtacatcgtcaagttgttcaacgagggcatcatcaagcgaatcatctgtacatctacgatgattgaaggtgtcaacacatcggcagagaacgtgatcatttacgaccgccgcctgaagaattcaacgttcgattacttcacctacaagaatatttccggtcgcgcaggccgcatgaataagtacttcattggaaaagtcttcatgctcgaagcgcctccccttgagcagggcctcacagtcgaataccccatcggccatcaggatgaaaactccccaatgggactcctcatgcaactggagaacgaataccttaccgatatttcacgtggccggctgcaagatgcatacgccaacccggtattgtcgccgacaaccctgatagagaatcggcacgttccgattgagcggcaaatcgaggtagcagaagcgatcattcgtgacttactgctcagcagcaagcttctggactggaaaggcattcctgagccgaaccaactaaattacttatgtgagctggtttacattctggagggcggtaaccttatggattatggtatctcgtccagctcgcaattggtgtggcacatcaatgagctccgaactcagaaaaacctgcctgcttacctaagagacgcggtggagaatcgacgaccggaacacacatccagcgaagcgatcaatctgcgcctgaaattcattagaaacatggtgtgtttccgattgcctcgggacatcatggccgtaaataaaattcaggccgatgtgctggcgaaagaagggagcgagccgggagatttcagcttctttgctgagcagcttgaaaatatgttcctcgacccgctacttactgcgttggacgaatacggaattcccactcagatctcgactcagatcaagaacctcatcttgccatcggaacatctgaacgatctgctggcgaaacttcggaccctagcacccagagtagagcaccttcaactgactggctttgagaaaagcttaatgcgttgggctgtgtccgaaatatag

SEQ ID NO: 58908 - DNA, 1587 bp, Klebsiella pneumoniae BWH 48; identical to SEQ ID NO: 58890

SEQ ID NO: 58909 - DNA, 2562 bp, Klebsiella pneumoniae BWH 48; identical to SEQ ID NO: 58891

SEQ ID NO: 58910 - DNA, 1587 bp, Klebsiella pneumoniae MGH 60; identical to SEQ ID NO: 58890

SEQ ID NO: 58911 - DNA, 2562 bp, Klebsiella pneumoniae MGH 60
atgaagaagattgattctttcattatagaaaaaatatttaacagcgcatattttaaaaagctttataaaaaaataataaaagcatattctgcgttgactatagaatctgagaaccatttcaatatttccaatacagaattgagagacatatttagatttattgatctgttggcgaactcatctaatcaaaatgctaggatgtgtgcatatcactggattagtttgcttgaaccattttctgataaatgggggaaattctcacttatctcttctttagtctactctaaacttggtttatacgcattagattttaatgatcatgctcttccattttcgcagcgacttgagaatgaagcgaagaaatctgcccaaacatttagtaatacatatatattcaccgatgcacagtttgatatttatacggatatgctgaaatcaccttactatagtttttcaggtccaacgtcattggggaaatcatttattctaaaacgctatattgaagagattattcaaaattctacatcaaacattgtcatcttagtcccaacaagagcattgataagccagttttctttggagattaaaaatgaattacatgaacttattgaaaatttcaattataaaatagtgactcacggatcattagcaagtaaatcagatgccgtaatcattaagcatatttttatattgacgccggaacgattgcttaatttgttctcgcaaggcaaggttgttagtatagattatttgtttgtagatgaagcacataaattatcaaataatgatgactcggatgtgcggagccttacagagtataatgctatcgatagtgcattattcaacaatccaaatatgaaaattgttttttcttccccaaatattgaaaatcctgaggtttttttaaatctttttgggcgtgaaaaaatttatgcaagtaggattattgaatcaccagtgtcacaaaatctttatcttattgattttcataaaaaagaaattaaatatttttctaattcagaatgcatcgatattgaaagtggttctttatatacactcaataaaaaaagtgatttcatttataatatagggagccgacatggatcaaatatgatatattgctctagtcgggctaaagctgttgattctgcacttgaattttatcaaataaggctctcggaaaatattgttttatctcctttgttgattgattccataaaaaagataagtaattatattcatcctgagtattatttagctatgtttctaatgaagcgaattgcttatcatcatggacaattaccacaagcaataagaaatatagttgaagaattattccgaaaaggagatattgattttatcttttgtacacctactttggttgaaggcgttaatatgccaactcggaatatatttatcaattgtgatgataaaattagattaatcgctgatgcgaaaaagaatcctaataagacacttgccttttggaatctggctggccgggcaggtagatattgcaaggagttatctgggaatattttttgtttacaggatgaatcaaatcgatgggataatactgatatttttttagagaaaacagcgcatttaactacaactatagatgcccggatagaaagtaaatctgggttaagagaaatagagcgctatctttctgatacggagactgatatttataaaaggaaccaggcgatagagtatctcgctaatattatggctgtagacactattagatttaaaaataatctaaaagatagctttgtcctgcggaaattttatgatatacatcgagaagaattgttatctcttgctaaactaaaagcaaatgatattttagatattcctatagatattatcaattcctataaatctcttaattttaaaatacaacgaaaagtatttgattacgttagcgtatctcctgtaaacaaaaaactcccatcgctcgactatgcaaatattttgtcggtattggagttgttttatgatctttatagatggggtgaaacagaaactaaatatgtaaagtccaaaggacaattgacttattttgctactttaatgaatcagtggaccaatgattattcaataaacagaattataaacgaaaatattgatataaaaagaaccattgtcattgaacgtggacaacaaccaataccttttgacaagaatgatattaatcatgttaataaagtgatcgatgacattctttataacatagaaagaattttatcgttcttttttgaaaaatacttcaatcattactataaatgtctggctgcaattttaggggaggacaatgcgggacataattgggctacatttcttgagtatggttctaagaatccgttatgtattagcttacaaacattaggtatttcaaggcatgctgcaaatataattgcctcttccaaagaactcaggaaatatttaaagttcaatgaggattcatatgagataattagtgttaacaagcaagggttgttgaattctttacaaaaagattctgttgaatatggagaggttaaaatatttctttga

SEQ ID NO: 58912 - DNA, 894 bp, Klebsiella pneumoniae
atggaagaggatctgtctaataattttaaagcactaattcagtctgattttatggagtgctttgttcgaatggaatgtgatttaaatttagacaaaaatcggattgttaacctttataggctctgtttagatggtaaaaaatataactatgttaagattggtgagcggttaattgattgtattccatcattttctctttcccgtaagcaattaatgaggtgtcgcgagagaaatgcatttggaaaagctacgctatccgcgatacgtaattttttgaaaatagaaaggaagactaagatatccgaaatgttattacaaggatttcttgaatcgtacctgcatgcgcctaaactttattcatttgatgaaataaataatgcaggttttcatggcgcccatgttaaattcaataagaataggaatgttgagttaatccattcggctgcatttatatctaattcgttatcggatggcgtttcatatgcgatagatgttattcttaaagcatttcctgagttaagatcgttggatggtttgcttggtaatacatttttagaaacaaactttactgaagatgagtgccaaatcctagccagtcttcttatcccgggagagtcttcgtactcgcagggttatgaagacagattggctatatttattggctataaccataagattgaagagtcactcatatatgagaatgcatctaggtttccgtctttgcttgaacaaaaaattattctcaatgttcagcaggcactagaatatcggaaagaggaaatcaataagttatcaatagttaatgcaactattgattgtttttttgttccgttcgatgatgtgaataaatttaatgacgagttcattgagagtctgaaaaatgaagaagattga

SEQ ID NO: 58913 - DNA, 2562 bp, Klebsiella pneumoniae; identical to SEQ ID NO: 58891

SEQ ID NO: 58914 - DNA, 1632 bp, Klebsiella pneumoniae
atggaccatagtaattctggcggcgttggggcaaaaaaagggtttttatttcaggattatgtcgctgccttatatgtaaccgaaatgcttcgcgataaacgaattaaaggtgtatgttgtgaagttaaagacgatgtagatataatttatgaaaatcatgtgcgttttattcaaataaaaacaactgatggtgataaaaaatggagcactaaagaactctgccagcgtaccaaaaagaaagattccaatcgttataatcaagattcaattgttcacaaatcattaaattgtgattcgtcagataaatttaaggcaatatttggaataatcagcactagagatgttgattcgacactgctttatttaaagattgaacatgacaaaagatttgataaaacatcccagagagataaattaattaactcaattacaagacaaataaaagaatttagatcaaataataataacgacattgcatattgggtggataattgtgaatggaatacatttcataacagtgaccacattaaattattatgtttaagtaatataatgaaatgtgctagtgaaaatggattttatcttgatccaaatcatgatgatgaaattatattaaactctattttggctaaagtaaataaactaagcacattatctaaaaaagaatttttaagtaaagacaaaacatattttagagtggatctgattacatggtttcaagctgaaatagaacgtattagcgaagaaaaaccgcataaagtgtacaaaacaaaatctaataacttaccaacaatattgaatgaattaaataaattaaaagattccacgattgatactattagcggcacaagctattatcagtcttataatagattgagctatcgatttgatttcatttctacaaatttagtacagtggcttccagagttactacttagaccagaagagttatctacaatcactccaacaaatatgatttccagagtgcgagatgtttataaaaccatcagcgaaaacaatcatgatattaaaaatataatttctcgagttttactacattctttagttcggcaccattgttcaagccaaccaattcctgctcatctttatactgaaaaaaaaggggatatgatcgatttcgataatattcatatagtaattagagaaaacgatccagatgagatgtggttcggcctgagtttatggtgtgatggaaatatagaaaaaacagttagtttatttgcatctaaggttctttctttcgtagatgtaacatgtgacacacaaagaaaaataatattagacataaaatcagatgagtatttagttaaacatgatgttaattgtgtactggacccagcaacatcaataactgatcatttatctagaatatatttcgttgtttttattggatacattagtgaaacccagacattagaagttaaaaaagattatgaagaaaatctaaaggaagaagttttattaaagtttaaaagcatcatcgaagaactaattcataaccatgattccgttatagatttaaactttataatatatatgtatcccttgccttgtattgacagtttggtggactccttcaaaaataaaatggttggtgatataaatggataa

SEQ ID NO: 58915 - DNA, 2169 bp, Klebsiella pneumoniae
atggataatttatatgagatagcgaaaaacaatttatctgctgataatgaacatttcgatgcctttgaatatataaaaacaataaatacattattagataatccagtccaaaagacacaaggtcgtgatcttacgattcgagcattaaatgaaaaaagtaaattttctcatcatataaaacaactaagagcaatgatcagaaaatctggtttatacccatatttatacagtgaatttgacgatttagactcagatgaaaaattagccactgaaatatatcgctcaccaaatagtgatgattttatttttcattcaatgcaaatgactgtattccatttgttaatgaatggtgctaaccttgccctcagtgcaccaaccagcatgggcaagagtataattattgactcattagtttcatgtggaaaatataatacaatagtaattgttgtacctacaatagctctaattgatgaaacaagaagaagattacacaaaaaattctccaacatatatgagataatatatcactctgcacaagaaagaaaccatgagaaaacaatatatatattaactcaagagagagttaacgagcgtgaagacttgaatgaggtagacatctttgttattgatgaattttataaattatcattcaagaacaaaaccagtgaaaaatactatgatgagcgagtaatatcgttaaatgtcgcattaagtaagttacttactgtttcaaaacagttttatatgataggacctaatattgattttcttcgtggcctgaataacattaatgaagattttattttcctatcatcagattttaacaccgttgctttgaacatttttgaatataatatactgcctaataatgaatcattaaaacaatcaacaacacttagtattatagaaaaaaacaatggtcaatttataatatactgtaaatctccaaaggttgcagaatctattgcttcttttttaataaaatcaggggtatcatcagatactaatgaagaggaatactcactttggttggaaaaatattattctcaattttgggtttatacaaaggcaatcagacatggtataggtctacattatggaactctgcctagagcaattcaacaatatacaattgacttgtttaataataaaaaggttaatatattaatttgtacctctacaataattgaaggagttaataccaatgctcaacatgtgattatttatgataacagagatgggaacaatagtattgataaatttacacataataatataaaaggacgagcaggacgtatgaaacaacatttcattggaaatgttcattgtcttgaagaatctcctgagggaaaaatagaagacagtatagttgaaataccaataggactacaagacaacacaacacctctaaatctcatagctggcatgcaagacgaacacgtatctagcctttctgaagatagactggaagaatatttatcagcaaataggctccctaaagaaataataaaaaaacatgcttcatatgaaatcaataaagttttagagttattcaatgaaattgactggttaaaagacagtgaaatttcagatttgtgcttccagagatatcctgataaaaaagcaatgaaccagatcagcaaaaatttactgattacatcccgacaaacatttacaagaaattcggtatctactgagatcgaacatataagcggaatgttattttcatatataaacgcagaaacacatcaaacatattttgactctcaattaagtagaatcataaatagccaaatctcagagccagaaatttcggaacttataaatagagagttaaaaataatcaggaatgtattttcttattcaatacctaaatctttggctttgcaacaagatataatcaatttcatatgccaaaaacgaaaattgaacttaactgctgattatagttttattattaatatttttgaaaaatttcacttaccgggtaacatatccgcacttgaagaaatgggagtcccacttcagatcttacaaaaaatcaattttcctgatgacgccattgtagatataaataaatgcatcggatatataaagaatgtttattttttaaataaaacactaagtaggttagaacggaaatttattgagagagcattaattatttaa

SEQ ID NO: 58916 - DNA, 1629 bp, Klebsiella pneumoniae MRSN 2404
atgagtattactagcctatccgatgcaggtgggcctgcggcaaggcagggcttcaagtatcaagatcacgtagctgtcagtttcattttcaagatgctccaggacagtaactactcccaagtggaatgtgagacagcggatgacatcgtggcggtattccaatgctcgggccagatagtaaatgaatacattcaggtcaaaacaactgaaagtgatagcaaatggaacttgaatgagataacggcgttagacggcaccaaggccaattcttcgctactacataaatcgctgaaatgtgatgttcgtccaggtattgcacgctttcgaatcgtgaccaagcgcgacgttgcaaaaattcttgatggattcaagaaagagatagataagcgagtgctacctgacacaaccacagcacgaggtgtggcactgtgcaagaagtttaaaacatttgtatcacctcaaaaacgtgacttcttgtactgggctgaaaactttgtctggcaggtatacggtgatgtcgaggcccttgaggctgtcaatataaaggctttgtcccagcttgcggaggggcttggaaatcgccccaacttcacgcagctaaaggcaatttacgaagaatttttagagattgctgacaaagcggcaacatctagcgtgaagacagccgcagcatctaagatcatccttcgagctccgacgctggatcacctcaagaaattactagaagaggctgatgacatgtcaacggccacatccaaaccatataaaaagcatccggacccgttcttagtcgagtttcacaccaacgcaaaagagagcttgttgcactcattttctggatttgacgtgcgctattcgcttaggaaatggcggcatgaaaattacgcaaagcatctcgtcgaatggctaccggagttttccctaaaggccagtgaaatcgtaaacatccttgcgcataacgccgaaacgatattggccaggtcaattagtacattcagcgacagtgagcttccgcgcgacaggctcattgcagaactaattctccattccatcctgcgcagccggcaacacagcgagcccgttgcgtgtaaagtcttctacaagtctgctggtaagctttccgaatttggcaatgctcacatcgttcaaatgcctgatcaggatgaccagttgtggctaggccttgcccgcatgatcaaagcggatgacatggatacaactctagagcaaattcgagaaattcttgacgaaactatctcagaaaccgtgctatcagcagagcgcgaaatcattatttctctacgcgaaccattacaccaccagccaaaagcagattccttcaatcaagctctgcatcgaaattctcctatcgatgacatgctgaatattctttgcttccccatcttgctgacttacgacagtgcagctctctcatcaggatggttcgtaaattacgtagacaacctcaagaaagagatcgaaacccacttcagcgcgttcacctctgaactgtcggagaacatcaaacaagttaaggtgctcatcttcttggtgcctatggaaagtattgaacttctgaccaaagcttttaacgctcgctgcgaaaagctggaagaattacaggcataa

SEQ ID NO: 58917 - DNA, 2142 bp, Klebsiella pneumoniae MRSN 2404
atgaactacgaaatgatcaagaatatcttggcgaaactcgctgaagagaatgccaagacagtcgatgtgctgctcgccatcaataccatcgtcaacagaagcaattcagagtgggagggccgcgatttggtaatccgagcactcgacaaatttgagttttttgactctgtcgaacagtcactcctgctaaacatggtacgagctgtcggattattcccttatatcactcctcacctcagcagcatggcgatttctgaccgcttagcttacgaagcacacagggtcgagggtgtagaacaaggcatggtatttcatcatctgcaggcccatgttttcagcttgatcatgcaaggccggaacgtagtgctcagtgcttctacaagcgtcggaaaaagtctagtcattgacgctgtactagcacagcgacggttcaaaaaggtggtagtgattgttccgaccattgcgcttatcgacgaaacccgccgtcgactagtcaaacgttttaaggacttcaacctgatcacgcatccgagccaagaatctgtggttgatacaaccaacgtctacctgctcacccaagagcgtgtcatccagcgtcctgaccttgctgatgtggagttctttgtcttagacgagttctacaaaatcgacttggggaactcacctgacgaaagcacgcgcgctgttgacttgagcttagcattccacaagcttgcaaagactggtgctcaattctacatgctcgggcctcacattcagaaaatctctggtttggatgactatgagtaccacttcatcccatccgactacagcactgtcgcagtcgacattcaaaatttcaatctggagatgcgttccgaagagcgaaaggaaaaattgcttgagttggtcacaactctagactctcctactttaatctactgtcaggccccccctagtgcgaacagggtcgccgagtatttaattcaagaagccgggttgaagccagtgccagaaacgcaggaaatagctgcatgggtctccaagcactaccaccctgaatggaacgttgccaaggcattatctctgggtatcgggattcaccatggaggagtgccgcgtgcattgcaacagtacatcgttaagttgttcaatgatggcatcatcaagcgaattatctgtacatctacgatgatcgaaggcgtcaacacatcggcagagaacgtgatcatttacgaccgccgcctaaatacttcaaagttcgactacttcacttacaagaatatttccggtcgggcgggccgtatgaataagtacttcattggtaaagtcttcatgctcgaagcacctccccttgagcagggtctcaccgttgaatatcccatcggccatcaggatgaaaactccccgataggactcatcatgcaactggagaacgaataccttactgatatttcacgtggtaggcttcaagatgcatacgccaacccgatactatcgccgtcaaccctgatagaaaatcgacacgttccgattgagcggcaagtcgaggtcgcagaaatgatcattcgtgacctaccggatggcagcaagcttcttgactggaaaggcatccctgagacgaatcagctcaattacctatgtgaactagtctacagtctggaaggcggtaatctgatggactatgggatatcatctagcttgcaattaatgtggcacatcaatgagctccgaactcagaaaaatctgcctgcttacctaagagacgcggtggagaatcgacgagaggaacacactcccagtgaagcgatcaatctacgcctgaaattcatcagaaatatggtgtgtttccgattgcctcgggacatcatggccgtaagtaacattcaggccgacgtgctggcgaaaatagggatcgagccgggtgattttagcttctttgctgagcagcttgaaaatatgttcctcgacccactactcaccgcgttggatgaatacggaattcccacacagatctcgactcagatcaagaacctcatcttgccatcggaacatctgaacgacctactggcgaaacttcgggctctggctcccagagtagagagcctccaactgacaggttttgagaaaagcttaatgagctgggctgtgtccgaaatgtag

SEQ ID NO: 58918 - DNA, 1629 bp, Klebsiella pneumoniae HE12; identical to SEQ ID NO: 58916

SEQ ID NO: 58919 - DNA, 2142 bp, Klebsiella pneumoniae HE12; identical to SEQ ID NO: 58917

SEQ ID NO: 58920 - DNA, 1629 bp, Klebsiella pneumoniae MRSN 3562; identical to SEQ ID NO: 58916

SEQ ID NO: 58921 - DNA, 2142 bp, Klebsiella pneumoniae MRSN 3562; identical to SEQ ID NO: 58917

SEQ ID NO: 58922 - DNA, 1629 bp, Klebsiella pneumoniae
atgagtattactagcctatccgatgcaggtgggcctgcggcaaggcagggcttcaagtatcaagatcacgtagctgtcagtttcattttcaagatgctccaggacagtaactactcccaagtggaatgtgagacagcggatgacattgtggcggtattccaatgctcgggccagatagtaaatgaatacattcaggtcaaaacaactgaaagtgatagcaaatggaacttgaatgagataacggcgttagacggcaccaaggccaattcttcgctactacataaatcgctgaaatgtgatgttcgtccaggtattgcacgctttcgaatcgtgaccaagcgcgacgttgcaaaaattcttgatggattcaagaaagagatagataagcgagtgctacctgacacaaccacagcacgaggtgtggcactgtgcaagaagtttaaaacatttgtatcacctcaaaaacgtgacttcttgtactgggctgaaaactttgtctggcaggtatacggtgatgtcgaggcccttgaggctgtcaatataaaggctttgtcccagcttgcggaggggcttggaaatcgccccaacttcacgcagctaaaggcaatttacgaagaatttttagagattgctgacaaagcggcaacatctagcgtgaagacagccgcagcatctaagatcatccttcgagctccgacgctggatcacctcaagaaattactagaagaggctgatgacatgtcaacggccacatccaaaccatataaaaagcatccggacccgttcttagtcgagtttcacaccaacgcaaaagagagcttgttgcactcattttctggatttgacgtgcgctattcgcttaggaaatggcggcatgaaaattacgcaaagcatctcgtcgaatggctaccggagttttccctaaaggccagtgaaatcgtaaacatccttgcgcataacgccgaaacgatattggccaggtcaattagtacattcagcgacagtgagcttccgcgcgacaggctcattgcagaactaattctccattccatcctgcgcagccggcaacacagcgagcccgttgcgtgtaaagtcttctacaagtctgctggtaagctttccgaatttggcaatgctcacatcgttcaaatgcctgatcaggatgaccagttgtggctaggccttgcccgcatgatcaaagcggatgacatggatacaactctagagcaaattcgagaaattcttgacgaaactatctcagaaaccgtgctatcagcagagcgcgaaatcattatttctctacgcgaaccattacaccaccagccaaaagcagattccttcaatcaagctctgcatcgaaattctcctatcgatgacatgctgaatattctttgcttccccatcttgctgacttacgacagtgcagctctctcatcaggatggttcgtaaattacgtagacaacctcaagaaagagatcgaaacccacttcagcgcgttcacctctgaactgtcggagaacatcaaacaagttaaggtgctcatcttcttggtgcctatggaaagtattgaacttctgaccaaagcttttaacgctcgctgcgaaaagctggaagaattacaggcataa

SEQ ID NO: 58923 - DNA, 2142 bp, Klebsiella pneumoniae
atgaactacgaaataatcaagaatatcttggcgaaactcgctgaagagaatgccaagacagtcgatgtgctgctcgccatcaataccatcgttaacagaagcaattcagagtgggagggccgcgatttggtaatccgagcactcgacaaatttgagttttttgactctgtcgaacagtcactcctgctaaacatggtacgagctgtcggattattcccttatatcactcctcacctcagcagcatggcgatttctgaccgcttagcttacgaagcacacagggtcgagggtgtagaacaaggcatggtatttcatcatctgcaggcccatgttttcagcttgatcatgcaaggccggaacgtagtgctcagtgcttctacaagcgtcggaaaaagtctagtcattgacgctgtactagcacagcgacggttcaaaaaggtggtagtgattgttccgaccattgcgcttatcgacgaaacccgccgtcgactagtcaaacgttttaaggacttcaacctgatcacgcatccgagccaagaatctgtggttgatacaaccaacgtctacctgctcacccaagagcgtgtcatccagcgtcctgaccttgctgatgtggagttctttgtcttagacgagttctacaaaatcgacttggggaactcacctgacgaaagcacgcgcgctgttgacttgagcttagcattccacaagcttgcaaagactggtgctcaattctacatgctcgggcctcacattcagaaaatctctggtttggatgactatgagtaccacttcatcccatccgactacagcactgtcgcagtcgacattcaaaatttcaatctggagatgcgttccgaagagcgaaaggaaaaattgcttgagttggtcacaactctagactctcctactttaatctactgtcaggccccccctagtgcgaacagggtcgccgagtatttaattcaagaagccgggttgaagccagtgccagaaacgcaggaaatagctgcatgggtctccaagcactaccaccctgaatggaacgttgccaaggcattatctctgggtatcgggattcaccatggaggagtgccacgtgcattgcaacagtacatcgttaagttgttcaatgatggcatcatcaagcgaattatctgtacatctacgatgatcgaaggcgtcaacacatcggcagagaacgtgatcatttacgaccgccgcctaaatacttcaaagttcgactacttcacttacaagaatatttccggtcgggcgggccgtatgaataagtacttcattggtaaagtcttcatgctcgaagcgcctccccttgagcagggtctcaccgttgaatatcccatcggccatcaggatgaaaactccccgataggactcatcatgcaactggagaacgaataccttactgatatttcacgtggtaggcttcaagatgcatacgccaacccgatactatcgccgtcgaccctgatagaaaatcgacacgttccgattgagcggcaagtcgaggtcgcagaaatgatcattcgtgacctaccggatggcagcaagcttcttgactggaaaggcatccctgagacgaatcagctcaattacctatgtgaactagtctacagtctggaaggcggtaatctgatggactatgggatatcatctagcttgcaattaatgtggcacatcaatgagctccgaactcagaaaaatctgcctgcttacctaagagacgcggtggagaatcgacgagaggaacacactcccagtgaagcgatcaatctacgcctgaaattcatcagaaatatggtgtgtttccgattgcctcgggacatcatggccgtaagtaacattcaggccgacgtgctggcgaaaatagggatcgagccgggtgattttagcttctttgctgagcagcttgaaaatatgttcctcgacccactactcaccgcgttggatgaatacggaattcccacacagatctcgactcagatcaagaacctcatcttgccatcggaacatctgaacgacctactggcgaaacttcgggctctggctcccagagtagagagcctccaactgacaggttttgagaaaagcttaatgagctgggctgtgtccgaaatgtag

SEQ ID NO: 58924 - DNA, 1620 bp, Klebsiella pneumoniae
atggcaattacttctaccccatctaacaaaggtggccctgcagctaggcaaggttttaaatatcaggatcatgttgccgtcagctttatactaaaaatgctccaagatagttcttatctgcagatcgaatgtgagacagcagatgacatagttgcggtctctcgcccaaatacagaattcatttacgagtatattcaggtcaaaacgacagagggagacacaaaatggaatctcactgaagcaacagctttggaaaaaggcagacctgatagctcactttttcaaaaatctctgaaatgtgacacgcgactcggcatcgctcgtttccggattgtctctaagagagatatatcaaaaccactgcaatgtttcctcattgatatcggcaagcgagtgtttcctgatgattgtacggaacgtggggttaagctagttaaaaaattccctaagacgatatcagctcaaaagagagattttaaatattgggctgaaaactttgtttggcaagtctgtggtgagactgcatggcttgaagctatgaacgtccgtgtgttatcagaattagcagagcaatatggcgtagtgcctagtcatcggcagcagaaagaaatatacgaacacttccttaactgggcagatgacgctgctaccgctgatgttaaaacccaaagtcagatgaaaatcatagcgcgaaaagaagcccttgagtgctttagcaaattactcgatacggttgaagcttcttcttcaataactgctaaaccttataaatctaaaccagagccctttttagtggagtttcatagcgtagctgaaaccgctcttctacgctctttagcgggatttgatgttgagtatgattttggtgaatggagatgtaaggaactagctgaacatttagtggagtggcttcctgagttctgtttacgtgctagtgagatagctaatttccaagtacatcatgcaaaaacaatcttagctaaatcaattagcactttcacacaagcaaaaatgccacgtgataaactcatcgccgaacttattttgcatacgattttgcgatgcagaaaagacagtgagccgatagcatgtaaggttttctatgagtcggaaggaaaactatcagaatttggtaatgcccatattgttcatcaggctggtaaagccgatgaattatggcttggcctttctaaaatgatccctactggaaagatggacgatacgcttaaagaaatttgtagtgtactagacactaccatttctaaagctgtattgagctccgagcgtgaaattataatcacgctgcgtgaacctcaccaccacttacctaccgcggagcaattcagtaaggcattaagtaagcattcgcctgctcaagaaatgctcaaaattatgtgtttccctatacttcttgcttacgatagtgatgtacttggaagaggatatgcctccgattacattaatcatttaaagaatgagatcatggctcactatagcgagctaaaaagcagattacccccaaaagtcttacaagtgaaaatagctattttccttcttccaatagaaaacatccagagattagtcatcgagtttaactcgctttgtaggactggaatttga

SEQ ID NO: 58925 - DNA, 2145 bp, Klebsiella pneumoniae
atgaattacgaaattacaaaaaagaaaattcatttgatcgggagcaaggatatctccacaactgaaattcttgtttcgataagtaaaattgtcaatagaggtattcccgagtgggaaggacgtgatttagtaatacgagctttggataaaattgatttttttgatgctgttgaaaagtcactattattaagcatggttcgttctgtagggttatatccatatatcaagccttatcttgatgaagtatcggatgatgaccgcttggcatatgaaatacatcgaatagataatgttgaaccaggaatggtatttcaccgcctccaagctcatgtatacaacttactgatgcaacgtaagaatgttgttcttagtgcatccactagtgtaggtaaaagcttagtcattgatgcgattttagctagtaaacagtacagtaaaatagtagttgttgtgcctaccatagcgttaatagatgagacccgacgcagaatggttaaacgattcagatcatattgcaatataatcacccatcctagccaagaggctactctttctttagcaaatgtttacttactgacacaagagcgtgtacttcaacgtggcgatttagatgatgtggatttctttgttattgatgagttctataagctggaccttgaaaatgattcagatgagaaaaaccgttcaattgacctaagtcttgcatttcacaggcttgctaagcagggggcgcaattttatttgcttggaccaaatatccaaaatattcatgggcttgaagcctacgaatataattttattccatcaagtttctcaacagtttcggttgatgtgtatcactacaatctttcgtcgaaaggagatgcacgtaaagaaaaactgcttgagctttgttcgcaactatcttcccctacgctaatctattgccaatctcctgctagtgcaaataaagtggctcaatttcttattaatgaggctaatcttccccgtgtggaaaatactcaggatgttgccgattggattggtaaacattatcaccctgattggaatatatcaaaggcaatatcgctaggtgtaggaattcaccatggtggggttccacgagcacttcagcagtactttgtgaagctgttcaacgaaggggctattaagttcatcgtttgcacctcgacaatgattgagggtgttaatacttctgctgaaaatgtcatcatttatgaccgaagggtcaacaatactccatttgatttctttaccttcaaaaatatatctggtcgagctgggcgtatgaaccgttacttcatcggaaaagtttatatgcttgaagctcctccattagagaaagacttaagcgttgaatatcctgtaggttctcagaacgaggattcacctatgggcttgcttctcaaattagaacctgagtttttatctgacctatcccgtcaacggttagagcaagcctattcaacgccacagatttcggctgtaacattgatcgaaaaccgccatgtaccaatagaggtgcaagtcaaaatcgcagaacagattttagaagatcaacatgaacataagcatcttctttgctggaaaggtaatcctgagcagaatcagcttgagtatctttgtagtctcgtttatgagcatcttcctcacaatctcatggaatacggcattttctcggggctccaactggcttggcatataaatgcgctaaggtcacagaagaacttcactgaatatcttcaacaagcgattgatgatgattggcataaccgcacacccagcgaggcaataggactgcggctaaaattaatccgtaatgttatcagctaccgtttgccaagggattttatgtctatcagtagaatccaggccgatgttttaggcaggcgaaatcttgagtttggagattatacctttatctcagagcaacttgaaaacctgtttcaagatcctttgattactgctctggatgaatacggcatccctatacagatatctactaaaataaaagggatgatacttccatctgataacttaaatgaggtgctcgctaagctaaggaagctggttgtaaaaattgatggaatgcaattaagtaaatttgaaaaaaacatcctacgttgggctatagccgaaatgtga

SEQ ID NO: 58926 - DNA, 1620 bp, Klebsiella pneumoniae; identical to SEQ ID NO: 58924

SEQ ID NO: 58927 - DNA, 2145 bp, Klebsiella pneumoniae; identical to SEQ ID NO: 58925

SEQ ID NO: 58928 - DNA, 1587 bp, Klebsiella pneumoniae; identical to SEQ ID NO: 58890

SEQ ID NO: 58929 - DNA, 2562 bp, Klebsiella pneumoniae; identical to SEQ ID NO: 58891

SEQ ID NO: 58930 - DNA, 894 bp, Klebsiella pneumoniae
atgctgctgcccatacgagtcaacaagcggttcttgaatttatttagaacacttacattagacaaagcaccacggcaatctaccgtaaacttacatgttctaaacattgagagtaacagttttgtttataacaaattggttgaggaattaagagacttaatagtctgttacgtacattcgaatagaagaatagctgagtttgaaaaaaatcatccatcttttagtcccaaaccatatttagaggcaatacagaaatttcgtacctatacatcaaatgaaggtgagttaggtgaactactattatacgcattccttgaatcaggtctcaacgcacctaaattactatccaaaatggagctaaagactgatgcaaatgattatatcaaaggttccgatggtatacatttattagagatcgacaataattatcaactagtctttggcgagtccaaaatgtactcggacttactggagggggctcgtgaagcgtttgactctattgctgactttaaagccaacggattaggatttgaacgaggtctaatagatactcatgtcataaatgaaatggttactgaagaaggatatgagacaataaaatctatactattaccttcaggaaataatgggccaaaccttgatctagcttttggcgttttcctaggatttgagttacctgttagtgatacacaattgtctatgagaaacaacgaattccgagattggacatattcattagtaaaaaataatgcttctcgtgtaattgatacgatagaaaaaagaattataaagcataaactctttggtcacgactttcatatatacattgtccctttcacagacatagatatcactcgtaaaaaattaatccaagaaatgctaacaattggataa

SEQ ID NO: 58931 - DNA, 2589 bp, Klebsiella pneumoniae
atgaacgaaaaagatgtagcaagaaaaattccattagcacaacgtctttcgatggacgcttatacaagtagctattttaaagagatctataaatatatatcaattttatacgataattgtttgtttaataataatggcactcataatctgccatttgttgacacaacaaaaatagagaaagctttacgttttgctgatattctatctcattcacttgttgaagctcatcgaacaaaatcatttgaaatcataagtaaaatagctgcatttcattcagatgatccttcttttaaaatgataggttcagcggtcataaatcgtttaggtatatttgccgcagataatttaatctcacaaggagtacatttaccgttagaccgagaaatagaatcatccataaaaaaatcattccaaagaactactatagatggattattttttacagacaaacaatatgaactttatcaatccctaattacctcaaacactttaagctttgccggccctacgtcaatggggaaatcgtttgtcataaatgaatatataaaacatattgtttttggtaatgctaaaaaaaatatagtgctcatagtcccaactagagcattaattagccaaagtacattaaaattaaaaaatgaactaagagatgaaattgatggcaatcagtataagatagtaacaacatcttacatgctcagaggaggtattgatcatagtaaagggtatgttttcgtattgactccagagagattagttagtttaattagtacatgtcctgatataattattgattatatttttgtcgatgaagcacaaaaacttactattaaaaatgatacacgaagtctcgtaacctattccgcgatcgaacaaacattaaatttaaatccaaacgcaaaactatttttctcatcaccaaatttatccaaccctgaagtatttaatgatttatttaatcgggaccatgctaaagtttatcgcagcatagaaggcgctacagctcagaacttatactttattgatttattaaacaacaagtttagttatgttgataaaaacaaattaattgatatagataatgttaatcagacttatacatctgttaatgatcttatcttccagattaacaaagggaaaagtaagattatttacactggaggtatcgataatacattatctcgaacaagggatttcctacgttacataaagaaattacaaagtaacaagaaacctcaaaattttgatctagcatctcaggtccgagaatttgtgcataccggctacgaacttgctgaagctatagagtatggagtagcatttcatttcggaaacctgccacaagcaataagagatcttattgaatacaactttaaaataggtaatattgattacctgttttgcacatcaactcttcttgagggggtaaatttacccgcacgttcagtatttattttgacatcaaaaaagggtactagatattttgaacctgtggatttttggaatctcgcaggcagagctggaagactagccatagagttagctggtgatatattttgcgtaaaagatgaaagtgggacctggaatgataaagcggtaaaaaatttaattctatccaataaaaatgaaattgaactaactcccagcttttatcttaacgattctaaaaggattaaagagctagaacaaataataaaaactggttctactgaggggattcaaaatagcgaatttctcagaacactaagtgatatggtaaggattgataccctacgaactgacaaagccaataatttaccacttatcaattatttcagaaataatggaaataacgatatattacattatgccttgaaaagcatagataacattaacatacctacacatattttattagcaaatagccatattgctattaactcacaacataatgcatttaattgcatcaggaattattcaattgacgaactaaagttatcatggaatcctacaaatgaagaaataaaagaaaaattggccctcatattcaatatttatcaaatagataaatatagtaaaggattaaaccgtcttaattttaattcaattccatattacgcagtcattttaactaagtggatgcatggcaatacattaagtgaaattatctctgacgcgattgtttattacatatcgaatagaaagaatatctatctttcagataagactcaagagccatttgatcaaaataattctattcatataacaaaattagtaaatgatacaattaaagatatagaattaaaaataggttatcaactacaaaattatatttcacattattgccaacttctttcacttgtttttgaaaataacccgggagcaaattggtcacaattcatagagtttggctcgaatgatccgattgtatggcaactgcaatttatgggattttccagacattgtgcaatatttttaaagaaaaacttccctaaacaccttaaatatgatcaagaaaacaatcagttatacatattaaacagagctgaaatcaagtcaaaggttaaacagaacaaattatattggcttgaaattcaggccctgctttaa

SEQ ID NO: 58932 - DNA, 894 bp, Klebsiella pneumoniae
atgaagctttctcctcaattgaaaaatacgcacgttataaaggatatgctaaaaaaagttaatgtttctatttttctttcagatggaagacgtgttgaaacattgttagtttacctgccttcaaccaatggagtaataaaccatacggcatttttcgacttgatagcaaatgagttgctccatcactttgctctcacttgtcaagatattgagaaaaaacttaagcgaaatggtgctcaagctgcggacattcttttcaaaaaagcgttaagtaaactaagtcaacaaacggcacatggtgaacttggtgaattaatcctatttactttagttgatgtttacctagaagctcctaagttacttagtaaaatctccctcaaaaccagtccgcaaatgccagtctttggcgctgatggcgtacatatccagtacgtcaataataaaatacgtgtatatttaggtgagtcaaagctttatactacctttagtaatgctgcaactaatgctgcaagctcaatagaaaaagctaaaagtagatatcttgatgagttcaatttaatcgatagttacatagacctccctcaattagatgaagatgcagaagaacaacttcttggaatactaaacccatttgaaaataaaaatattgatgatcatattcattcgccttgttttattggttttgccgataaaaatttaattgagagctgtctcaaaggtgaagattttgttcaatgctatataaatatggcattcaatcatattgacgattattataaaaagctcgagaaaagaagtgtgagcattgaatcgtcaacattaatgattctgccttttaccgatactgaggctttagtcaaggattttataacccatcttgggatacaaaaatga

SEQ ID NO: 58933 - DNA, 2535 bp, Klebsiella pneumoniae
atgagcgaattctacaccaaattatctaatcggataataaataatgaaaaattcaaaattggcacatcagagttattttcaggctatattaagatgcttattggtgaaaaagaaaccatttgtaaggaactcgcaaaaaatataactacagcctctcagattttttataaatctgaagatgaaaaatatttgaaagaaggtgctaaccttctatcaatgttaatcgattcttgtggaacagattatcctgaaataattcctattgctgcacatgtttttaccagcaacggagactttccaaatatagaattacttgaaaaacgctttccggaaatacatttcaaacataatttactctcagaagctacacttaattttcgtcgttcattaaataatgtagaaactttaaatattatattgactgattttcaaaaaaggctttgggatgatctacagagaggtgatgatgttattaccgttgcaccgacctctgcggggaaaacacatattatactaaattatttagttgatagtgtactcgatagccttgatggcgcatttgctgtaattgtagttcctacccgagcattaattacagaagtatcatctaaaatttataatcttgctaaggaaaggggaagagaaaaggaaattgaaatttgtactataccaagagatggtaatttttcagacaaaacattctttgttatgacgcaagaacggttacatgaggttctgctaagaggcgatatcaactttaactatctttttatagacgaagctcataatatttctgatgaaagtagaggggttctacttcatctaacacttgaaaaagtcttggataatggtactcctcagatcattattggaatgccatcaccacaatatcagaatagtttcacaagtgtatttaatgatattgcctttaaaaaggagataaccaaccattctccggtttcaaaattaataatgaatgtaaggccgaaaggaagaaatcttgaaattgatagattgtattccgcagacaaggtggtaatccctaaaaactttaaagaaaaaaaacttgctgatatagtttatagattagggaaaaatcatagcaatattatttatagaaaccaaactaactattgtgaatcaattgctcaagatatttcaaacagaatagagactgttgctgataacgaagcacttatcgaagcttctgaatatattaaacactttattcatgaagagtttactttggcttctaatcttctgaaaggtgttgcatttcattacagcccattgccgacatcagttagaattatggttgaaaatttagctaaagaagggcatgtaaaatatatatgttgcacaagtactttagcagaaggggtaaaccttcctgcaaaaaatttatttattcaaaatccattctttaaacagaaattccaaagcccagaaagacttgaggatgtaaaaataaataacatcactggaagggcaggtcgaatgcttcagcacttttctggtaatgttttccttattgagcaggataaatgggcctttgatgattattttactgaaagtgatgaacttaaagaagaaaaaataccgacctattttaaattaatcaatgataaaactgatgatgtgataatggctctatcaggtcagtaccctagggaggatgagcaatataaattttactcagtagctaataagttaattaaagcttttgataatggtagccttgataatacacttactgctccagaagtaaaacttgatagccatatgattcgcagattgaagaataatgttgagcaggcatttttaaatttgaaagtatcatccctgattttagagtctaaccccacgataggatatattcagcaaaataaagtctatgagtttctaatgagcgaggttgatttacatgaatggtcattaccacaccctaaatcggaagatttgtatgagagattattaaaaatttcaagtaagcttattgaatatggcgtttttatcccatctggaaactatacagctaaatatatctgtcttatatctaaaaaatggattcaaggaaatagcttaaaagaaatgatatcggaacagatttattgggataatgcttctccttcgcaagacgccaatgatgaagatgaaggtataaatgaggttaaagttaataagtcagttcgtaatgttataaatgtaattaatagcgatgttagatttaggctatcaaatgcaataaaatgttattatacactttttgtattggcagtcagaatgaaaagaagtaatgttcaaagtgtaaaattacattactttttggaaattggtgctagtgacgagaggatgatggatttattaaaccttggattgtcacgagaagcatctaaagaaattgatgagaaagtgccttctggagtgccaattaaaaatcttgctgatttaattagattattagactcagaaagcatttctcgaatacacgttgttataaaaaaagaaatagaacatttagttaatcgttcttga

SEQ ID NO: 58934 - DNA, 894 bp, Klebsiella pneumoniae; identical to SEQ ID NO: 58894

SEQ ID NO: 58935 - DNA, 2589 bp, Klebsiella pneumoniae
atgaacgaaaaagatgtagcaagaaaaatcccattagcacaacgtctttcgatggacgcttatacaagcagctactttaaagagatctataaatatatatcaattttatacgataattgtttgtttaataataacggcactcataatctgctatttgttgacacaacaaaaatagagaaagctttacgttttgctgatattctatctcattcacatgttgaagctcatcgaacaaaatcatttgaaatcataagtaaaatagctgcatttcattcagatgatccttattttaaaatgataggttcagcggtcataaatcgtttaggtatatttgccgcagataatttaatctcacaaggagtacatttaccgttagaccgagaaatagaatcatccataaaaaaatcattccaaagaactactatagatggattattttttacagacaaacaatatgaactttatcaatccctaattacctcaaacactttaagctttgccggccctacgtcaatggggaaatcgtttgtcataaatgaatatataaaacatattgtttttggtaatgctaaaaaaaatatagtgctcatagtcccaactagagcattaattagccaaagtacattaaaattaaaaaatgaactaagagatgaaattgatggcaatcagtataagatagtaacaacatcttacatgctcagaggaggtattgatcatagtaaagggtatgttttcgtattgactccagagagattagttagtttaattagtacatgtcctgatataattattgattatatttttgtcgatgaagcacaaaaacttactattaaaaatgatacacgaagtctcgtaacctattccgcgatcgaacaaacattaaatttaaatccaaacgcaaaactatttttctcatcaccaaatttatccaaccctgaagtatttaatgatttatttaatcgggaccatgctaaagtttatcgcagcatagaaggcgctacagctcagaacttatactttattgatttattaaacaacaagtttagttatgttgataaaaacaaattaattgatatagataatgttaatcagacttatacatctgttaatgatcttatcttccagattaacaaagggaaaagtaagattatttacactggaggtatcgataatacattatctcgaacaagggatttcctacgttacataaagaaattacaaagtaacaagaaacctcaaaattttgatctagcatctcaggtccgagaatttgtgcataccggctacgaacttgctgaagctatagagtatggagtagcatttcatttcggaaacctgccacaagcaataagagatcttattgaatacaactttaaaataggtaatattgattacctgttttgcacatcaactcttcttgagggggtaaatttacccgcacgttcagtatttattttgacatcaaaaaagggtactagatattttgaacctgtggatttttggaatctcgcaggcagagctggaagactagccatagagttagctggtgatatattttgcgtaaaagatgaaagtgggacctggaatgataaagcggtaaaaaatttaattctatccaataaaaatgaaattgaactaactcccagcttttatcttaacgattctaaaaggattaaagagctagaacaaataataaaaactagttctactgaggggattcaaaatagcgaatttctcagaacactaagtgatatggtaaggattgataccctacgaactgacaaagccaataatttaccacttatcaattatttcagaaataatggaaataacgatatattacattatgccttgaaaagcataaataacattaacatacctacacatattttattagcaaatagccatattgctattaactcacaacataatgcatttaattgcatcagaaattattcaattgacgaactaaagttatcatggaatcctacaaatgaagaaataaaagaaaaattggccctcatattcaatatttatcaaatagataaatatagtaaaggattaaaccgtcttaactttaattcaattccatattacgcagtcattttaactaagtggatgcatggtaatacattaagtgaaattatctctgacgcgattgtttattacatatcgaatagaaagaatatctatctttcagataagactcaagagccatttgatcaaaataattctattcatataacaaaattagtaaatgatacaattaaagatatagaattaaaaataggttatcaactacaaaattatatttcacattattgccaacttctttcacttgtttttgaaaataacccgggagcaaattggtcacaattcatagagtttggctcgaatgatccgattgtatggcaactgcaatttatgggattttccagacattgtgcaatatttttaaagaaaaacttccctaaacaccttaaatatgatcaagaaaacaatcagttatacatattaaacagagctgaaatcaagtcaaaggttaaacagaacaaattatattggcttgaaattcaggccctgctttaa

SEQ ID NO: 58936 - DNA, 894 bp, Klebsiella pneumoniae
atggaagaggatctgtctaataattttaaagcactaattcagtctgattttatggagtgctttgttcgaatggaatgtgatttaaatttagacaaaaatcggattgttaacctttataggctctgtttagatggtaaaaaatataactatgttaagattggtgagcggttaattgattgtattccatcattttctctttcccgtaagcaattaatgaggtgtcgcgagagaaatgcatttggaaaagctacgctatccgcgatacggaattttttgaaaatagaaaggaagactaagatatccgaaatgttattacaaggatttcttgaatcgtacctgcatgcgcctaaactttattcatttgatgaaataaataatgcaggttttcatggcgcccatgttaaattcaataagaataggaatgttgagttaatccattcggctgcatttatatctaattcgttatcggatggcgtttcatatgcgatagatgttattcttaaagcatttcctgagttaagatcgttggatggtttgcttggtaatacatttttagaaacaaactttactgaagatgagtgccaaatcctagccagtcttcttatcccgggagagtcttcgtactcgcagggttatgaagacagattggctatatttattggctataaccataagattgaagagtcactcatatatgagaatgcatctaggtttccgtctttgcttgaacaaaaaattattctcaatgttcagcaggcactagaatatcggaaagaggaaatcaataagttatcaatagttaatgcaactattgattgtttttttgttccgttcgatgatgtgaataaatttaatgacgagttcattgagagtctgaaaaatgaagaagattga

SEQ ID NO: 58937 - DNA, 2562 bp, Klebsiella pneumoniae
atgaagaagattgattctttcattatagaaaaaatatttaacagcgcatattttaaaaagctttataaaaaaataataaaagcatattctgcgttgactatagaatctgagaaccatttcaatatttccaatacagaattgagagacatatttagatttattgatttgttggcgaactcatctaatcaaaatgctaggatgtgtgcatatcactggattagtttgcttgaaccattttctgataaatgggggaaattctcacttatctcttctttagtctactctaaacttggtttatacgcattagattttaatgatcatgctcttccattttcgcagcgacttgagaatgaagcgaagaaatctgcccaaacatttagtaatacatatatattcaccgatgcacagtttgatatttatacggatatgctgaaatcaccttactatagtttttcaggtccaacgtcattggggaaatcatttattctaaaacgctatattgaagagattattcaaaattctacatcaaacattgtcatcttagtcccaacaagagcattgataagccagttttctttggagattaaaaatgaattacatgaacttattgaaaatttcaattataaaatagtgactcacggatcattagcaagtaaatcagatgccgtaatcattaagcatatttttatattgacgccggaacgattgcttaatttgttctcgcaaggcaaggttgttagtatagattatttgtttgtagatgaagcacataaattatcaaataatgatgactcggatgtgcggagccttacagagtataatgctatcgatagtgcattattcaacaatccaaatatgaaaattgttttttcttccccaaatattgaaaatcctgaggtttttttaaatctttttgggcgtgaaaaaatttatgcaagtaggattattgaatcaccagtgtcacaaaatctttatcttattgattttcataaaaaagaaattaaatatttttctaattcagaatgcatcgatattgaaagtggttctttatatacactcaataaaaaaagtgatttcatttataatatagggagccgacatggatcaaatatgatatattgctctagtcgggctaaagctgttgattctgcacttgaattttatcaaataaggctctcggaaaatattgttttatctcctttgttgattgattccataaaaaagataagtaattatattcatcctgagtattatttagctatgtttctaatgaagcgaattgcttatcatcatggacaattaccacaagcaataagaaatatagttgaagaattattccgaaaaggagatattgattttatcttttgtacacctactttggttgaaggcgttaatatgccaactcggaatatatttatcaattgtgatgataaaattagattaatcgctgatgcgaaaaagaatcctaataagacacttgccttttggaatctggctggccgggcaggtagatattgcaaggagttatctgggaatattttttgtttacaggatgaatcaaatcgatgggataatactgatatttttttagagaaaacagcgcatttaactacaactatagatgcccggatagaaagtaaatctgggttaagagaaatagagcgctatctttctgatacggagactgatatttataaaaggaaccaggcgatagagtatctcgctaatattatggctgtagacactattagatttaaaaataatctaaaagatagctttgtcctgcggaaattttatgatatacatcgagaagaattgttatctcttgctaaactaaaagcaaatgatattttagatattcctatagatattatcaattcctataaatctcttaattttaaaatacaacgaaaagtatttgattacgttagcgtatctcctgtaaacaaaaaactcccatcgctcgactatgcaaatattttgtcggtattggagttgttttatgatctttatagatggggtgaaacagaaactaaatatgtaaagtccaaaggacaattgacttattttgctactttaatgaatcagtggaccaatgattattcaataaacagaattataaacgaaaatattgatataaaaagaaccattgtcattgaacggggacaacaaccaataccttttgacaagaatgatattaatcatgttaataaagtgatcgatgacattctttataacatagaaagaattttatcgttcttttttgaaaaatacttcaatcattactataaatgtctggctgcaattttaggggaggacaatgcgggacataattgggctacatttcttgagtatggttctaagaatccgttatgtattagcttacaaacattaggtatttcaaggcatgctgcaaatataattgcctcttccaaagaactcaggaaatatttaaagttcaatgaggattcatatgagataattagtgttaacaagcaagggttgttgaattctttacaaaaagattctgttgaatatggagaggttaaaatatttctttga

SEQ ID NO: 58938 - DNA, 894 bp, Klebsiella pneumoniae; identical to SEQ ID NO: 58912

SEQ ID NO: 58939 - DNA, 2562 bp, Klebsiella pneumoniae
atgaagaagattgattctttcattatagaaaaaatatttaacagcgcatattttaaaaagctttataaaaaaataataaaagcatattctgcgttgactatagaatctgagaaccatttcaatatttccaatacagaattgagagacatatttagatttattgatttgttggcgaactcatctaatcaaaatgctaggatgtgtgcatatcactggattagtttgcttgaaccattttctgataaatgggggaaattctcacttatctcttctttagtctactctaaacttggtttatacgcattagattttaatgatcatgctcttccattttcgcagcgacttgagaatgaagcgaagaaatctgcccaaacatttagtaatacatatatattcaccgatgcacagtttgatatttatacggatatgctgaaatcaccttactatagtttttcaggtccaacgtcattggggaaatcatttattctaaaacgctatattgaagagattattcaaaattctacatcaaacattgtcatcttagtcccaacaagagcattgataagccagttttctttggagattaaaaatgaattacatgaacttattgaaaatttcaattataaaatagtgactcacggatcattagcaagtaaatcagatgccgtaatcattaagcatatttttatattgacgccggaacgattgcttaatttgttctcgcaaggcaaggttgttagtatagattatttgtttgtagatgaagcacataaattatcaaataatgatgactcggatgtgcggagccttacagagtataatgctatcgatagtgcattattcaacaatccaaatatgaaaattgttttttcttccccaaatattgaaaatcctgaggtttttttaaatctttttgggcgtgaaaaaatttatgcaagtaggattattgaatcaccagtgtcacaaaatctttatcttattgattttcataaaaaagaaattaaatatttttctaattcagaatgcatcgatattgaaagtggttctttatatacactcaataaaaaaagtgatttcatttataatatagggagccgacatggatcaaatatgatatattgctctagtcgggctaaagctgttgattctgcacttgaattttatcaaataaggctctcggaaaatattgttttatctcctttgttgattgattccataaaaaagataagtaattatattcatcctgagtattatttagctatgtttctaatgaagcgaattgcttatcatcatggacaattaccacaagcaataagaaatatagttgaagaattattccgaaaaggagatattgattttatcttttgtacacctactttggttgaaggcgttaatatgccaactcggaatatatttatcaattgtgatgataaaattagattaatcgctgatgcgaaaaagaatcctaataagacacttgccttttggaatctggctggccgggcaggtagatattgcaaggagttatctgggaatattttttgtttacaggatgaatcaaatcgatgggataatactgatatttttttagagaaaacagcgcatttaactacaactatagatgcccggatagaaagtaaatctgggttaagagaaatagagcgctatctttctgatacggagactgatatttataaaaggaaccaggcgatagagtatctcgctaatattatggctgtagacactattagatttaaaaataatctaaaagatagctttgtcctgcggaaattttgtgatatacatcgagaagaattgttatctcttgctaaactaaaagcaaatgatattttagatattcctatagatattatcaattcctataaatctcttaattttaaaatacaacgaaaagtatttgattacgttagcgtatctcctgtaaacaaaaaactcccatcgctcgactatgcaaatattttgtcggtattggagttgttttatgatctttatagatggggtgaaacagaaactaaatatgtaaagtccaaaggacaattgacttattttgctactttaatgaatcagtggaccaatgattattcaataaacagaattataaacgaaaatattgatataaaaagaaccattgtcattgaacgtggacaacaaccaataccttttgacaagaatgatattaatcatgttaataaagtgatcgatgacattctttataacatagaaagaattttatcgttcttttttgaaaaatacttcaatcattactataaatgtctggctgcaattttaggggaggacaatgcgggacataattgggctacatttcttgagtatggttctaagaatccgttatgtattagcttacaaacattaggtatttcaaggcatgctgcaaatataattgcctcttccaaagaactcaggaaatatttaaagttcaatgaggattcatatgagataattagtgttaacaagcaagggttgttgaattctttacaaaaagattctgttgaatatggagaggttaaaatatttctttga

SEQ ID NO: 58940 - DNA, 894 bp, Klebsiella pneumoniae; identical to SEQ ID NO: 58912

SEQ ID NO: 58941 - DNA, 2562 bp, Klebsiella pneumoniae; identical to SEQ ID NO: 58891

SEQ ID NO: 58942 - DNA, 927 bp, Klebsiella pneumoniae
atgggtaagtttgataatctaaatgattatgtcgcagtaaggcaaaaagattttgaaagttgcataaatgttgtagagcatgaacttcatattgactgtgtatcaactaatctaagatttcatcatatcaaatttaatggaaatggaattcctatggtgaaagcgttagcttgtaagttgtatgaatatattattgattattgcctttctgctcgtgagcgttctgatactcttacgccgcaacaatcaatgatattatcgaaacaagccagagacttgtttcggcaccctaaaatcactgataactcaccagacaagacaggtgaagcaggtgagactttactattttttttaatggaagctgtacttggtgcccctcaactagttgctaagatggagctcaaaacgaattctaatgatgaagttaaggggtctgacggtatacatgtaagatggaatgaacaggataaacttgtcgatttatattttggagaggctaagatatataagagagtttcaagtgcgttagatgaagctttaaaaagcatctcatcatttcacgagagtgaaatgtataaacatgagtttaatatagttactaaatttttcaaatatgcaaataatgaaattaaaaatgcaataagcgatcttattatttcaggggagcctggaccaaatatcaggcttaatcacgcctgcctcatcggttacaattggcataaattcaaaaaattaaaagctactgatgaacagtctttagaacagcattttctaaaagaatttaaaaatgacttcccaaggctaaaaaaattgttagaggataagtttaactcttttcctcagaaacatcttaagtttgatgttttctttatcccctttccttcagttactgattttcgaaatgaatttaatgcggctttggactaa

SEQ ID NO: 58943 - DNA, 1527 bp, Klebsiella pneumoniae
atgcatgtagatattggtgaatttgaaattaatttctcctttcgtggtggaaaggttcaacagaaatcatcttttgcaaaatttatttctgatagtggtggggccgtgattgttttcgaaaatgatccttctgcggctgaagatgttgctctatctttgacagaaaaactgactattgaaaacgctcttcctgattactccgaatttattggttttattaaggaggaaatgcatagtgattattctttggcgcattgcatggagcgaagagttgctttccattatgggaatatgccatccataattagaaacgggatagaatattttttcaaacgtggagatattcaatatattgtttgcacgagcaccttgttgcaaggggttaaccttccagcaaaacatattatattagataaccctcatagtggttccaattccatgtctcgcgctgactttttaaatttatctggtagagctggtagattgcttcatgaatttcatgggaatgtttggtgtttgagacctaatgattgggatgcgaaagttttcgaaggagagaatcttcaggttataaatactgctatgtccgatgttatgttggatggtggtgggattatttgcaacgctatagacgggttgctcattgacccaattgaaaaggatcttgctgatgttgcctttgcaaagctatttcacgaaatcagacgtgatgatttacaatctgagtatttcctcaggagtgataagagtgaggattatcatgagatcttagaatataactttaataaaatctctatgatgagaattaatgttcccgacgaactgcttagaatgaatattgggattagacctgattatatacaaaggctgtatgatttatttaaagagtctgcaaatttagatgattactcgctatactcacctttcaaaaaaggtggtaagcaaagaattgatgtggctattgagattataagagatatattctcgtggaatattagccatcaacattctttatggataagcatgctggctcataaatggatgacaggtaattcattgagcagcctcatttcttacgaagttgacagagcgttttctcccgaagatagaaagaaaagcgaaaaagatacttcttttaaaaggaaaaaagtttcatcgactattcgtggtgttctcaaagggctagagactcaagtcagatataatttagtacgatatattaaggtttatcaggatgttttaaggttcgtcatggaagagcgcaatgaaggtacaaaagcagtcctagtggaaaacattagtgcctatctagaatttggttcttgcaatccgattgatttaaatcttatgtcattaggactttcacgtagcacagcattgttagtcagaaagaaagtaaaacttcccccggaaggtacccctgaggattacctgtctttccttagaaaggtaatttttgataagaaatcaataccgtcatattgtatgagggaaataaaggaagtattgggagagatgaaaaattaa

SEQ ID NO: 58944 - DNA, 900 bp, Raoultella planticola ATCC 33531
atgaacaacaaactaaagccacaattaaaaaaccatgatgttatcaaaaaagttttgagaaaggttgaagtatctctacttctctctgataaaagaaaggttgagaccttattagtttacttaccaattgaaaacggcgaaagtaagcactcagttttttttgaacttattaaagatgagctgttacataattttgctcttacatgcaaagaaattgatagaaagttaaagagaccaagtaaaattgcgatagatcaactttttaaaaaggccttgagcaaactcagtcaacaaacagcacacggtgaattaggtgagttaattctctttacaatattagatgtttacctgcaagctcccagactgctcagcaaaatatcacttaaaaccagcgcaagaatgcctgtttatggcgctgatagtatccatgctcagtttattaagggcgggttgagattatatctaggagagtcaaagctttatacttctttttcaagtgctgcaacagcagctgttgaatctattaagtccgcaagtgataaatatatacaggaattcaatttaattgatagtcatttagatcttcctgagcttgatgaagattctcaagaggagctgataagaattttaaatccttttgagaatacaagtaaattggattttatacactcaccatgtttcattggttttgctgatggtaatttaataaaagatgcaacgagtgacgatgactttatccaaagatatatccatgttgcttttgagcatattgatgactactataaaaaaattgaattgcaaggtttagatataaattcaacaactttattcatattaccttttagtgatattaaaaagcttgttgatagctttattgctcatctggagatagcaaaatga

SEQ ID NO: 58945 - DNA, 2529 bp, Raoultella planticola ATCC 33531
atgagtgatttttatatagaattatcagaacgaattttatctagcaatgattttaaaaaatgctcattagaattgtttaaatgttatgcgaactatttggttggtgatacttataagttagatcgtcttttagtaaagaaaatggcaactgcttcacaagttttttataagacacaagaagaaaagtaccttaaacaaggttcgtcaatactttccatgttaattgatacatgcgctgaggattatcctgagattgttcctatttcagactttcttttttcatctgtaggtgatttccctaatgttaagttattagagaatagatttcctcaaatttcattcagacataatatatttactgattcaagtcaaagttataagaaagcactgaataatgttgaggagttaggtttggtacttactgattttcaacgtaatttatgggatgatcttcaagctggagaagatgtgattactgtcgcacctacttctgcaggtaagactcatattattctacattatttattgtcagaagtaattaacagtgatggtgcttttgctgcaattgtcgtgcccacgagagctctaattacagaagtgtcttcaaaaatattcgaaatggcaaaagaaagaggatatgaaaaagatatagaaatttgtactatccctaaagatgaagttttttctgatcgtaccttttttgtcatgactcaagaacgtttacatgaaatccttcttcgcggtgatatatattttgattttcttttcattgatgaagctcataatatttcggatgagggccgaggtgtattactccatcttacccttgaacgaattctcgaagatagcagccctcaaattataatcggcatgccttctcctcaatatcaaaatagtttttcaagcatttttaaggaagtcaaatttactaaagcaattactgcacattctcctgtatctaaattgatctttgaggtaagagctaaagggactaatttagaaattagtaagcgtggttcagatgataaaattacattaccaaaaaaatttaaaaataaaaaactagctgatattgtgctaaggcttggtaaaaacgaaagtaacataatatatagaaatcaaacaaatcattgtgaacatattgctgatgaaatagcgaaaagaattactgattatgaggttaatgatactctaaatgaggcttctgaatatatacaacatttcatccatgatgatttcactttagtagaaaacattaaaaagggtgttgcatttcattatagtccgctacccacttctgttagaattcttatcgaaaatcttgttaaagaaggcctcattaaattcatatcatgtactagtacgctagctgagggtgtaaatcttccagcaaagaatctgtttatgttgaatcctacgtttaaaaatggcctttataataaaacagtaagaattgaggatgtaaaaataaacaatattactgggcgtgcaggtagaatgttgcatcatttttccgggaatatatttttggttgagccggacgattggacctttaaagattattttgatgaagacgataataaaaaagaagaaaagataccaacatattataaattgattaatgaaaatacaaatgaagtcctaaggactctgactggatttcaacctgatgatgaagaccattctaagttctattctgtagctaataaattaattaagtcatatggtaatggagatctggactcgacattctcttcaccagatattaaattagatgattatactattaatggattaaagcaagttattgaaacggcatatttaaatcttaaagttcctcctcttattttagaatctaatccaacaactggatatattcaacaaaataaggtttttgagtttttaactagcgaaattgaccttaacgattggtctctaccatatccatggtctgacgaattttacgatagaatacttaaaatcgcatttaaattgattgagcttggtgtgtttattcctagcggaaattacactgcggattatatttgttacattgctaaaaaatgggttcaaaataatagtttaaaagatatgattaattctcaaatcgaatgggataagaataatatagtaaagaaaaatagcagagatgatgaaaaggaagttaaaattaacagatctgttaaaaacataataaacgtaataaataatgatattagattcagactttcaaatgcagttaagtgttattttactttgtttgctttggcagcgagaatgaaaaaatcagatgctcaaagtattaagttacattactatcttgaaattggcgccagcgatgaaaggatgatgtctctgataaacttgggattatccagagaagcatctaaagagatttctgataatacatctaaatcgcgaatgtataatggcataagcgatttgattcagttactaaactcatcggaaattaatggtatacatagagttatcaaaaaagagatagagcatttactcagccgttcttga

SEQ ID NO: 58946 - DNA, 894 bp, Serratia liquefaciens
atgttgctaccaatacgagtcaacaaacgatttcttaatttatttagaacattacagttagatcggtcacctcagcaatcaacagtaaatttacatgtgcttaatattgaaagtaatagttttatatatcaaaaattagttgatgaactacgagaattaattgttggctatgttcattctaatcgaaggttagcagagttcgataaagatcatccaacatttagtcctaaaccatatttagaggcaattcggaaatttcgtacttatacatctaatgaaggtgagcttggtgaattgctattatatgcatttcttgagtcaggtttaaatgcacctaaattgttgtctaaaatggagttaaaaactgatgcgaatgactatattaaagggtctgatggtatacatcttttagaagtaggtaacgattatcaattgatttttggtgagtctaaaatgtatgcagacttactggatggtgctcgcgaagcatttgactctattgcagagtttaaacttaatggtttagggtttgaacgaggtttaattgacactcatgtaataaatgaaatggttacagaagaaggatatgaaacaatcaagtctattttactcccctcaggagataatggtccaaatctcgatttgtcttttggtatttttcttggttttgaactatctattgatgatgctcaattatccatgaaaaatagtgaatttagagaatggatatactccgttgtgcaaaaagatgcatccagagtaattgatacaattcaaaagagaatcataaaacataaactatttggccatgattttcatatttacatagttccatttacggatatagatattacccgaaagaaattaattcaagaaatgctaacggttgggtga

SEQ ID NO: 58947 - DNA, 2589 bp, Serratia liquefaciens
atgaatgaagaaagtattataaaaaacataccactagcagagcgtttgtcaatagatgcttatgagagtgattacttcaaagaaatttacacctatatatccatggtatatgatgattatttgtttaacaataatgagcagggtataatagatgtagttgacatgtcaaaaattgaacatgctttgcgttttgcggacatattatcacactctctatcagaaaaacatcgatctagttcatttgaaataataagtaaaatagctacattccaatcaaataacccttatttcaaaatggtcggttcagccgtaatcaaccgcttaggcgtattcgctgcggacaatttaatatcgcaaggtgtccaattacctttagatcgtgaggttgagtctgcggtaaaaaaaaccatccaaaagactagtatcgatggtttatattttacagacaggcaatatgaactttatcaatcattggttagctcaaagaatttaagctttgcaggtcctacatcaatggggaaatcatttgttatcaatgaatacataaaaaatattgtcattaatgaagattgtaaaaaaattgtgcttatggtccctacgagagcactaattagtcagaatgcattaaagctaaagaacgaacttaggaatgagattaataaaaatcgttatagattaattactacttcctatatgttaaggggtggtattgataatggggaggggtatgttttcgtactaacccctgaacgattagtaagtttaattagttcatctcctgaaatgaaaattgattatatttttgtagatgaagcccagaagcttacaaccaaaaatgacacgagaagtcttgttacatattcagctattgaacagactttaaatttaaacattaatgcaaaattatttttttcatcaccaaatttatccaatcccgaggtatttaacaaactcttcgatagagaaaatgctgcaacatatagaagcattgaaggtgctacggcacaaaatttatattatatagatttgctagagcagaattttagttatgtaggtggaaatagtttaacaaaaataaaaaatataaatgaaagatacgtttctgctaatgaccttatatataaaatcaataaggggaaaagtaaaataatttattctggaggtatagataatacactgtcacggacaagagagtttttgaattatattaaaaaaacaaagcaagcaaagagaagctataattctgatcttgcctcgcaaattagagagtttgtacacaatggatatgaattggccgaagccatagaatatggtattgcatttcattttggtaacttaccgcaagcaattcgtgaccttattgaacatcactttagaaaagggaatatagaatatctattctgtacatcaacattgctggaaggagtaaatttaccggcacgttcaatattcattcttacatctaagaaaggaagcagccactttgaatctgttgatttttggaaccttgcaggtagagctggaaggttagcaatggagttggcaggagatattttctgcgtaaaagatgaaagtaaaacatggtcagataatgcaataaaaaaattaattctatcagacaaaaacaatatagagttaattccaagtttctatataaatgataagaaaagtattgactcattaaagcagataattacaactggttctacagatggcattaagaatagtgagtttctaagaaccctaggggacatggttagaatagataccttaaggactgatggggttaataatcttccacttattaactactttagagataatggtaatagtgatattttacatcatgctttaaagagtactaatgatatcaatatccctctgaatattttactggcaaatagccatatcgctattaactctcaatataatgcttttaataatataaaaaattattctattgatgaacttaagttatcatggaatcctacgcatgatgatataaaaggaaaattagagctaatatttgatctttatcaaatagacaaatatagtaaggggttaaatcgccttaactctaaatcaataacctactatgctgttattttatctaaatggatgcatggtaactccttgagtgaaattatagctgatacaatatattattataaatctaatgggagagaattgtatttttctaatggagttcgtgagttatttgattccagtaaccctacgcatataaccaagttagtaaatgatactataaaagacattgagttgaaggtcggttatcaactccaaaattatatttcacattactgccagcttctatcgctaatgtttgagaacaatcctggggctaattggtcccagttcattgagtttggatcgaatgatccagtagtttggcaattacaatttatggggttctcaagacattgtgcggtattcttgaaaaagaatttctctcgtcatttaaaatatgatcctgaaagctcacaattaaacattactaacagagaggaaattaaatcaaaagtgatgcaaaaccaattgtattggcttgagattcaggcattactttaa

SEQ ID NO: 58948 - DNA, 1629 bp, Serratia marcescens subsp. marcescens Db11; identical to SEQ ID NO: 58916

SEQ ID NO: 58949 - DNA, 2142 bp, Serratia marcescens subsp. marcescens Db11
atgaactacgaaataatcaagaatatcttggcgaaactcgctgaagagaatgccaagacagtcgatgtgctgctcgccatcaataccatcgtcaacagaagcaattcagagtgggagggccgcgatttggtaatccgagcactcgacaaatttgagttttttgactctgtcgaacaatcactcctgctaaacatggtacgagctgtcggattattcccttatatcactcctcacctcagcagcatggcgatttctgaccgcttagcttacgaagcacacagggtcgagggtgtagaacaaggcatggtatttcatcatctgcaggcccatgttttcagcttgatcatgcaaggccggaacgtagtgctcagtgcttctacaagcgtcggaaaaagtctagtcattgacgctgtactagcacagcgacggttcaaaaaggtggtagtgattgttccgaccattgcgcttatcgacgaaacccgccgtcgactagtcaaacgttttaaggacttcaacctgatcacgcatccgagccaagaatctgtggttgatacaaccaacgtctacctgctcacccaagagcgtgtcatccagcgtcctgaccttgctgatgtggagttctttgtcttagacgagttctacaaaatcgacttggggaactcccctgacgaaagcacgcgcgctgttgacttgagcttagcattccacaagcttgcaaagactggtgctcaattctacatgctcgggcctcacattcagaaaatctctggtttggatgactatgagtaccacttcatcccatccgactacagcactgtcgcggtcgacattcaaaatttcaatctggagatgcgttctgaagagcgaaaggaaaaattgcttgagttggtcacaactctagactctcctactttaatctactgtcaggccccccctagtgcgaacagggtcgccgagtatttaattcaagaagccgggttgaagccagtgccagaaacgcaggaaatagctgcatgggtctccaagcactaccaccctgaatggaacgttgccaaggcattatctctgggtatcgggattcaccatggaggagtgccacgtgcattgcaacagtacatcgttaagttgttcaatgatggcatcatcaagcgaattatctgtacatctacgatgatcgaaggcgtcaacacatcggcagagaacgtgatcatttacgaccgccgcctaaatacttcaaagttcgactacttcacttacaagaatatttccggtcgggcgggccgtatgaataagtacttcattggtaaagtcttcatgctcgaagcgcctccccttgagcagggtctcaccgttgaatatcccatcggccatcaggatgaaaactccccgataggactcataatgcaactggagaacgaataccttactgatatttcacgtggtaggcttcaagatgcatacgccaacccgatactatcgccgtcaatcctgatagaaaatcgacacgttccgattgagcggcaagtcgaggtcgcagaaatgatcattcgtgacctaccggatggcagcaagcttcttgactggaaaggcatccctgagacgaatcagctcaattacctatgtgaactagtctacagtctggaaggcggtaatctgatggactatgggatatcatctagcttgcaattaatgtggcacatcaatgagctccgaactcagaaaaatctgcctgcttacctaagagacgcggtggagaatcgacgagaggaacacactcccagtgaagcgatcaatctacgcctgaaattcatcagaaatatggtgtgtttccgattgcctcgggacatcatggccgtaagtaacattcaggccgacgtgctggcgaaaatagggatcgagccgggtgattttagcttctttgctgagcagcttgaaaatatgttcctcgacccactactcaccgcgttggacgaatacggaattcccacacagatctcgactcagatcaagaacctcatcttgccatcggaacatctgaacgacctactggcgaaacttcgggctctggctcccagagtagagagcctccaactgacaggttttgagaaaagcttaatgagctgggctgtgtccgaaatgtag

SEQ ID NO: 58950 - DNA, 1629 bp, Serratia marcescens
atgagtattaatagcttatccgatgcaggtgggcctgcggcaaggcaaggcttcaagtatcaagatcacgtagctgtcagtttcatcttcaagatgctccgggacagcaactactcccaagtggaatgcgagactgcggatgatatcgtggcggtattcaagtgcgcgggcgagataataaatgaatatattcaggtcaaaacaaccgaaaatgatggcaaatggaacctgaaagaggtaacggccttagacggcaacaaagccaactcttcgctactgcataaatcgctgaaatgcgacgtccgcccaggtctagcccgcttccgaatcgtgacaaagcgcgacgtagcaaaagttcttgagggtttcaagaaagagttagataagcgtgttcttcctgatgtaactacaacacgcggcgtggcactgcgcaagaagtttaaagcagctgtctcccctcaaaatcgggattttttgtactgggcggaaaacattgtttggcaggtgtacggtgatgtcgaggcgctggaggccgtcaatataaaggcgttgttccagcttgcggaagggcttggaaatcgccccaatttcacgcaactaaaggcaatttacgaagagtttttagagatggctgacaaggcggccacggccagcttgaagacagccgccgcatctaagatcattcttcgagatccaacgctgatccatctcaaaaaattattagacgaggctgatgacaagtcaacggcgacatccaagccctataaaaaacgcccggatccgttcttagtcgagtttcacaccaacagcaacgagggattgctgcactcattttctggttttgacgtgcgctatgcgcttaagaaatggcgacatgaaaattacgcgaagcatctcatagaatggcttcccgagttttccttaaaggccagtgaaatcgtaaacattcttgcacataacgccgaagcgatcctggctaggtcaatcagcaccttcagcgacagtgaacttccacgcgacaggctcattgcagaactaattctgcattccatcctccgcagccgccaaaacagcgagcctgtggcgtgcaaagtcttctacaaatctgctgacaagctttccgagtttggcaacgctcacatcgtccaaatacccgatcaggatgaccagctgtggctaggtctttcacgcttgatcaaagcgggcgacatggatacaacgctagagaaaattcgccaaattcttgacgaaacgatctcagaaaccgtgctgtcggcggaacgcgaaatcattatttctctacgcgaacctttacatcaccagccaaaagcagatgcctttaaccaagctctgcatcgaaattctcctgtcgatgaaatgctgaatgttctctgtttccccatattgttgacctacgacagcgctgcgctgtcgtcaggctggctatctaattacgtagataacctcaaagcggagatcgaaactcacttcagcacgttcacctcaaaacttccggaaaacatcaaacaagtgaaagttgtcttcttcttggtgccgatggagagcattgaacatctgactaatgctttcaacgctcgctgcaaaaagctagaagagttacaggcataa

SEQ ID NO: 58951 - DNA, 2142 bp, Serratia marcescens
atgaactacgaaacgatcaagaacatcctggcaaaactcggtgaagaggatgcatcgacggtcgatgtgctgcttgccatcaacactatcgtcaacaagagcaattcagagtgggagggccgtgacttggtgatccgagcactcgacaaatttaagctctttgatgctgtcgagcagtcgctcctactaaacatggtgcgagctgtcggactattcccctacatcactcctcacctcaaaagcatggcgatttctgaccgcttggcttatgaggctcacagggtcgagggagtagaacaagacatggtttttcatcatctacaagctcatgttttcagcttaatcatgcaaagccgaaacgtggtgctcagtgcctctacaagcgtcggaaaaagcctcgtcattgacgctgtgctggcacagcggcgattcaaaaaggtggtggtgatcgttccgactattgcgctgatcgacgaaacccgtcgtcgcttggtcaaacgctttaaggacttcaacctgatcacccatccgagccaggaatctgtgatcgagacaaccaacgtctaccttctcacccaggaacgtgtcattcagcgacctgatctcactgatgtggagttcttcgtcttggacgagttctacaaaatcgacctagggaacgccacagatgaaagcacgcgcgctgttgacttgagcttggcctttcacaagctcgcaaagactggtgctcagttctacatgcttgggcctcacatccagaagatatctggtttggatgactatgagtaccacttcatcccatccgactacagcactgtggcggtcgacatccagaatttcaatctggagatgcgatccgaagagagaaaggcaaaattgctagagttggtcacaactctagactcgcctacattaatctactgtcaggcgccacctagtgcgaacagggtcgccgagtacttgattcaggaagctgaactaacgccagtaccagagacacaggaaatagccgcatggatctctaaacactaccaccctgaatggaacgttgccaaggcaatctcgctgggtatcgggattcaccacggaggagtgccacgtgcattgcagcagtacatcgtcaagttattcaacgaaggcatcatcaagcgaatcatctgtacatctacgatgattgaaggcgtcaacacatcggcggaaaacgtgatcatttacgaccgtcgcctgaagagctcaacgttcgactacttcacttacaagaatatttccggtcgtgcaggtcgcatgaataagtatttcatcggaaaagtcttcatgctcgaagcacctcctcttgagcaggggctcacggtggaataccccatcggcaatcaggatgaaaactccccaatgggactcctcatgcaactggagaacgaatatcttactgatacttcacgtgctcggctccaagatgcatacgccaacccggtactgtcgccgacaaccctaatcgagaaccgacacgttcctattgagcggcaagtcgaggtcgcagaaacgatcattcgcgacctgcctcccagcagcgaacttctgggctggaaaggcattcctgagccagaccagctcaattacctatgtaatctagtctacagcctggaaggtggtaacctgatggattatgggatatcctccagctcgcaactggcgtggcatatcaatgaacttcgaactcagaagaacttgccagcctacctaagagatgcggtagaaaatcggcgtcaggaacacacaccgagcgaagcgatcaacctacgtctgagattcatcagaaatatggtgtgcttccggttgcctcgggacatcatggccgcaaataagattcaggccgatatattagagaaagaagggattgaaccgggcgatttcagcttttttgctgagcagcttgaaaatatgtttctcgacccgctactcacggcgctggatgaatacggaattcctactcagatatcaacccagatcaaaaatctcatcttgccatcagaacatctgaacgacctgctggcgaagcttcgggccctagctcccaggttagagcgtcttcaactgagtggtttcgagaaaagcttaatgcgttgggctgtgtccgaaatgtag

SEQ ID NO: 58952 - DNA, 1440 bp, Yersinia enterocolitica subsp. enterocolitica 8081
atgaaaatggatgattaccctaaaggtaaaatatatatattcaaatctcaaaaagacgcatcaattcgaagaggtacgtgttttagcattagcaatcgtgtggttttgactgctaaacatacagttgaaacagatggcgagtatagcttgtttttatcaccggatgactttatgtctggagtaggagttaagttaaaattgcttgctggatataataatgcacaagctgattttgtcctgctagaatgtgttgattatgaatttccatcatatatacaagctggagtagtggatctggaagtagatgaaaaaatacatgtttttggatttccggtagaaaaagatcaaattccagctgcttttacatcgactgttagctgcataaccggaaatataactacagctaaacacagttttgaaatcgctcaagtttcaacagtatctaattataaaggaatgtcgggttctcctgtgctttttaatggatatgtggtaggaatgctgattgtgcaacatggtagtacaacattgcatgtattatctatttctgacatatatagtaaacttggagtttcattccatcattttcgtttacaagcgtcagtacgtgaagaaattgagtatatgccgcctgaacatcctgatacaccatttgaaatatgcattgattgcaataaaaccgttccaaatgttaaagggattgatattggatttgaatataatgaatggagaaaaagtgacctcattgagtatactaaagattggttaattgactattctttaactgcgcaacataagaaagccatcggcaatcggcctgcaaaacaacttgcagaggccattaaaaaatatccaattgataaccaaaatgcattaggtgatctttttctacatatggcaattagacaaaataacaaaactattcccgtaatcaatggcgtatatcatatcaatggtgaactattattttcttgctcgcatatagtgattaatggcggacaaattgaattatggcttggtgcttcgtcaataaaagattctatggatgaagcaatattgtctgttattgaaaatattaataatctgatcagtgtcaatgagattaaaacaaggcttctagtcattacatctgaaatagatgaagattggcctttcaaagaaaaattacgtaagcttgctgataatcagcttccaatagagaatcgggtagacaaaataatccttccaatattcattgtaaattctagcgaaataataaaaaactatagtaaaaatgatttcttattaaagtttagagaagagattgatacttgtcgaacattgttatcttcagggtatactaataaaattgttcaactaatagatgttagggtttttctttaccctgtggacgatatcgtgtcattgtatgatgattttaaaaaggaagtttcaaaatga

SEQ ID NO: 58953 - DNA, 1764 bp, Yersinia enterocolitica subsp. enterocolitica 8081
atggatgagcttaagaaaaagtttcataaacataaatcaagattcaaaataataactcagtccaatcaaaatgttgctgaaagaaacattttcatctatacgcaagagagggtaatcgaacgtgatttcgaaaatgtaaaggttgatttttttattatagatgaattttataaacttgcacctaacagcgatacagattatcgatgcgatagattaaatattgcatttcataagttgtatcataaatgcaaaagattttatatgcttggtccaaacattgatggaattatggatggcctagaagatgatcttaattgttcatttgtgaagtttgacaaatataagacggtagccgctgatgagttttattataaattagaatcagacggcaaagatgagttggtagatatagaaagggataaacatttaataaaaatattaaatactattaataaagaagaacaaacagtaatttattgtaagtctcctaaacgagctaatggtttgatgtcaaagatactgtcaatgggacttactaatagatgcatagataacgaatcatttactaaatggttgagagataattaccaccctgaatggaatttagcgaatgctatagactatggtatagcatgtcatcatgcaaaacttcctagagcaattggttcatttcttgttgattctttcaataaaaaaagaatttccatattagtttgtacatcaaccctgattgaaggggtaaatactaatgctaagaatgttataatttatgatgattgtattactggcagaacaaaactagactcctttacttttaataacatttcagggaggagtggcagaatgttcgagcacttcgttggtaaaattcacattataggtaatagaccaaaccaacaattgccattaattgacatacctatcattactcagagtgataatgcctctgattctatgcttctccaaatacaaagtgacttatcagaaactagtttatcaaaaatatttaaatatacacatcagcaaattttaccaattgaagtgattaataagcatcagggtgttccacctgaaagattattaacatttgcagaagcattgatggaacactgtggcaagtggcaagtggcaagtggcaagtggcaagtggcaagtggcaagtggcataaggatatggtgtgggattcgctatatccaaccaaaaatcagcttaatcatttatgtgaaattttatttaaatatttttctttatcaagaatggggaatggagctgtaaaatcagcctcacaacttcacacaagactgagatctgtcatgaatcatgaaagtgatctaaaattgattgatgatgaatattcttattgggtaaaacgtaattcaaactatactgcagatgatgctgtccaagtcatttttgatttcaaaagaaacttagtaagttataatcttcctaagataattctcgcgatcaatgatgttcagaagttaattttttcaaggtttaattacacttttggtgattatactagttttagtcatgccttagaagctcactttgaaatccctacgctggtgacacttgaagagtttggtattccaatgcaaatatctaaaaaaatcacaaaattagctaacgttactgttgatgatgacattgatgaagccttagagaaaataaataaattttcagaagaaaagagaatttctaatttgttggatgattttgaaatttcacttttagaaaatgtagtatattttatatga

SEQ ID NO: 58954 - DNA, 1440 bp, Yersinia enterocolitica
atgaaaatggatgattaccctaaaggtaaaatatatatattcaaatctcaaaaagacgcatcaattcgaagaggtacgtgttttagcattagcaatcgtgtggttttgactgctaaacatacagttgaaacagatggcgagtatagcttgtttttatcaccggatgactttatgtctggagtaggagttaagttaaaattgcttgctggatataataatgcacaagctgattttgtcctgctagaatgtgttgattatgaatttccatcatatatacaagctggagtagtggatctggaagtagatgaaaaaatacatgtttttggatttccggtagaaaaagatcaaattccagctgcttttacatcgactgttagctgcataaccggaaatataactacagctaaacacagttttgaaatcgctcaagtttcaacagtatctaattataaaggaatgtcgggttctcctgtgctttttaatggatatgtggtaggaatgctgattgtgcaacatggtagtacaacattgcatgtattatctatttctgacatatatagtaaacttggagtttcattccatcattttcgtttacaagcgtcagtacgtgaagaaattgagtatatgccgcctgaacatcctgatacaccatttgaaatatgcattgattgcaataaaaccgttccaaatgttaaagggattgatattggatttgaatataatgaatggagaaaaagtgacctcattgagtatactaaagattggttaattgactattctttaactgcgcaacataagaaagccatcgacaatcggcctgcaaaacaacttgcagaggccattaaaaaatatccaattgataaccaaaatgcattaggtgatctttttctacatatggcaattagacaaaatcacaaaactattcccgtaatcaatggcgtatatcatatcaatggtgaactattattttcttgctcgcgtatagtgattaatggcggacaaattgaattatggcttggtgcttcgtcaataaaagattctatggatgaagcaatattgtctgttattgaaaatattaataatctgatcagtgtcaatgagattaaaacaaggcttctagtcattacatctgaaatagatgaagattggcctttcaaagaaaaattacgtaaacttgctgataatcagcttccaatagagaatcgggtagacaaaataatccttccaatattcattgtaaattctagcgaaataataaaaaactatagtaaaaatgatttcttattaaagtttagagaagagattgatacttgtcgaacattgttatcttcagggtatactaataaaattgttcaactaatagatgttagggtttttctttaccctgtggacgatatcgtgtcattgtatgatgattttaaaaaggaagtttcaaaatga

SEQ ID NO: 58955 - DNA, 1248 bp, Yersinia enterocolitica
atggatgagcttaagaaaaagtttcataaacataaatcaagattcaaaataataactcagtccaatcaaaatgttgctgaaagaaacattttcatctatacgcaagagagggtaatcgaacgtgatttcgaaaatgtaaaggttgatttttttattatagatgaattttataaacttgcacctaacagcgatacagattatcgatgcgatagattaaatattgcatttcataagttgtatcataaatgcaaaagattttatatgcttggtccaaacattgatggaattatggatggcctagaagatgatcttaattgttcatttgtgaagtttgacaaatataagacggtagccgctgatgagttttattataaattagaatcagacggcaaagatgagttggtagatatagaaagggataaacatttaataaaaatattaaatactattaataaagaagaacaaacagtaatttattgtaagtctcctaaacgagctaatggtttgatgtcaaagatactgtcaatgggacttactaatagatgcatagataacgaatcatttactaaatggttgagagataattaccaccctgaatggaatttagcgaatgctatagactatggtatagcatgtcatcatgcaaaacttcctagagcaattggttcatttcttgttgattctttcaataaaaaaagaatttccatattagtttgtacatcaaccctgattgaaggggtaaatactaatgctaagaatgttataatttatgatgattgtattactggcagaacaaaactagactcctttacttttaataacatttcagggaggagtggcagaatgttcgagcacttcgttggtaaaattcacattataggtaatagaccaaaccaacaattgccattaattgacatacctatcattactcagagtgataatgcctctgattctatgcttctccaaatacaaagtgacttatcagaaactagtttatcaaaaatatttaaatatacacatcagcaaattttaccaattgaagtgattaataagcatcagggtgttccacctgaaagattattaacatttgcagaagcattgatggaacactgtggcaagtggcaagtggcaagtggcataaggatatggtgtgggattcgctatatccaaccaaaaatcagcttaatcatttatgtgaaattttatttaaatatttttctttatcaagaatggggaatggagctgtaa

SEQ ID NO: 58956 - DNA, 1440 bp, Yersinia enterocolitica
atgaaaatggatgattaccctaaaggtaaaatatatatattcaaatctcaaaaagacgcatcaattcgaagaggtacgtgttttagcattagcaatcgtgtggttttgactgctaaacatacagttgaaacagatggcgagtatagcttgtttttatcaccggatgactttatgtctggagtaggagttaagttaaaattgcttgctggatataataatgcacaagctgattttgtcctgctagaatgtgttgattatgaatttccatcatatatacaagctggagtagtggatctggaagtagatgaaaaaatacatgtttttggatttccggtagaaaaagatcaaattccagctgcttttacatcgactgttagctgcataaccggaaatataactacagctaaacacagttttgaaatcgctcaagtttcaacagtatctaattataaaggaatgtcgggttctcctgtgctttttaatggatatgtggtaggaatgctgattgtgcaacatggtagtacaacattgcatgtattatctatttctgacatatatagtaaacttggagtttcattccatcattttcgtttacaagcgtcagtacgtgaagaaattgagtatatgccgcctgaacatcctgatacaccatttgaaatatgcattgattgcaataaaaccgttccaaatgttaaagggattgatattggatttgaatataatgaatggagaaaaagtgacctcattgagtatactaaagattggttaattgactattctttaactgcgcaacataagaaagccatcgacaatcggcctgcaaaacaacttgcagaggccattaaaaaatatccaattgataaccaaaatgcattaggtgatctttttctacatatggcaattagacaaaatcacaaaactattcccgtaatcaatggcgtatatcatatcaatggtgaactattattttcttgctcgcatatagtgattaatggcggacaaattgaattatggcttggtgcttcgtcaataaaagattctatggatgaagcaatattgtctgttattgaaaatattaataatctgatcagtgtcaatgagattaaaacaaggcttctagtcattacatctgaaatagatgaagattggcctttcaaagaaaaattacgtaagcttgctgataatcagcttccaatagagaatcgggtagacaaaataatccttccaatattcattgtaaattctagcgaaataataaaaaactatagtaaaaatgatttcttattaaagtttagagaagagattgatacttgtcgaacattgttatcttcagggtatactaataaaattgttcaactaatagatgttagggtttttctttaccctgtggacgatatcgtgtcattgtatgatgattttaaaaaggaagtttcaaaatga

SEQ ID NO: 58957 - DNA, 1155 bp, Yersinia enterocolitica
atggatgagcttaagaaaaagtttcataaacataaatcaagattcaaaataataactcagtccaatcaaaatgttgctgaaagaaacattttcatctatacgcaagagagggtaatcgaacgtgatttcgaaaatgtaaaggttgatttttttattatagatgaattttataaacttgcacctaacagcgatacagattatcgatgcgatagattaaatattgcatttcataagttgtatcataaatgcaaaagattttatatgcttggtccaaacattgatggaattatggatggcctagaagatgatcttaattgttcatttgtgaagtttgacaaatataagacggtagccgctgatgagttttattataaattagaatcagacggcaaagatgagttggtagatatagaaagggataaacatttaataaaaatattaaatactattaataaagaagaacaaacagtaatttattgtaagtctcctaaacgagctaatggtttgatgtcaaagatactgtcaatgggacttactaatagatgcatagataacgaatcatttactaaatggttgagagataattaccaccctgaatggaatttagcgaatgctatagactatggtatagcatgtcatcatgcaaaacttcctagagcaattggttcatttcttgttgattctttcaataaaaaaagaatttccatattagtttgtacattaaccctgattgaaggggtaaatactaatgctaagaatgttataatttatgatgattgtattactggcagaacaaaactagactcctttacttttaataacatttcagggaggagtggcagaatgttcgagcactttgttggtataattcacattataggtaatagaccaaaccaacaattgccattaattgacatacctatcattactcagagtgataatgcctctgattctatgcttctccaaatacaaagtgacttatcagaaactagtttatcaaaaatatttaaatatacacatcagcaaattttaccaattgaagtgattaataagcatcagggtgttccacctgaaagattattaacatttgcagaagcattgatggaacactgtggcaagtggcaagtggcaagtggcaagtggcaagtggcataa

SEQ ID NO: 58958 - DNA, 1440 bp, Yersinia enterocolitica; identical to SEQ ID NO: 58952

SEQ ID NO: 58959 - DNA, 1764 bp, Yersinia enterocolitica; identical to SEQ ID NO: 58953

SEQ ID NO: 58960 - DNA, 1440 bp, Yersinia enterocolitica; identical to SEQ ID NO: 58956

SEQ ID NO: 58961 - DNA, 1155 bp, Yersinia enterocolitica; identical to SEQ ID NO: 58957

SEQ ID NO: 58962 - DNA, 1440 bp, Yersinia enterocolitica; identical to SEQ ID NO: 58954

SEQ ID NO: 58963 - DNA, 1743 bp, Yersinia enterocolitica
atggatgagcttaagaaaaagtttcataaacataaatcaagattcaaaataataactcagtccaatcaaaatgttgctgaaagaaacattttcatctatacgcaagagagggtaatcgaacgtgatttcgaaaatgtaaaggttgatttttttattatagatgaattttataaacttgcacctaacagcgatacagattatcgatgcgatagattaaatattgcatttcataagttgtatcataaatgcaaaagattttatatgcttggtccaaacattgatggaattatggatggcctagaagatgatcttaattgttcatttgtgaagtttgacaaatataagacggtagccgctgatgagttttattataaattagaatcagacggcaaagatgagttggtagatatagaaagggataaacatttaataaaaatattaaatactattaataaagaagaacaaacagtaatttattgtaagtctcctaaacgagctaatggtttgatgtcaaagatactgtcaatgggacttactaatagatgcatagataacgaatcatttactaaatggttgagagataattaccaccctgaatggaatttagcgaatgctatagactatggtatagcatgtcatcatgcaaaacttcctagagcaattggttcatttcttgttgattctttcaataaaaaaagaatttccatattagtttgtacatcaaccctgattgaaggggtaaatactaatgctaagaatgttataatttatgatgattgtattactggcagaacaaaactagactcctttacttttaataacatttcagggaggagtggcagaatgttcgagcacttcgttggtaaaattcacattataggtaatagaccaaaccaacaattgccattaattgacatacctatcattactcagagtgataatgcctctgattctatgcttctccaaatacaaagtgacttatcagaaactagtttatcaaaaatatttaaatatacacatcagcaaattttaccaattgaagtgattaataagcatcagggtgttccacctgaaagattattaacatttgcagaagcattgatggaacactgtggcaagtggcaagtggcaagtggcaagtggcataaggatatggtgtgggattcgctatatccaaccaaaaatcagcttaatcatttatgtgaaattttatttaaatatttttctttatcaagaatggggaatggagctgtaaaatcagcctcacaacttcacacaagactgagatctgtcatgaatcatgaaagtgatctaaaattgattgatgatgaatattcttattgggtaaaacgtaattcaaactatactgcagatgatgctgtccaagtcatttttgatttcaaaagaaacttagtaagttataatcttcctaagataattctcgcgatcaatgatgttcagaagttaattttttcaaggtttaattacacttttggtgattatactagttttagtcatgccttagaagctcactttgaaatccctacgctggtgacacttgaagagtttggtattccaatgcaaatatctaaaaaaatcacaaaattagctaacgttactgttgatgatgacattgatgaagccttagagaaaataaagaaattttcagaagaaaagagaatttctaatttgttggatgattttgaaatttcacttttaaaaaatgtagtatattttatatga

SEQ ID NO: 58964 - DNA, 1440 bp, Yersinia enterocolitica
atgaaaatggatgattaccctaaaggtaaaatatatatattcaaatctcaaaaagacgcatcaattcgaagaggtacgtgttttagcattagcaatcgtgtggttttgactgctaaacatacagttgaaacagatggcgagtatagcttgtttttatcaccggatgactttatgtctggagtaggagttaagttaaaattgcttgctggatataataatgcacaagctgattttgtcctgctagaatgtgttgattatgaatttccatcatatatacaagctggagtagtggatctggaagtagatgaaaaaatacatgtttttggatttccggtagaaaaagatcaaattccagctgcttttacatcgactgttagctgcataaccggaaatataactacagctaaacacagttttgaaatcgctcaagtttcaacagtatctaattataaaggaatgtcgggttctcctgtgctttttaatggatatgtggtaggaatgctgattgtgcaacatggtagtacaacattgcatgtattatctatttctgacatatatagtaaacttggagtttcattccatcattttcgtttacaagcgtcagtacgtgaagaaattgagtatatgccacctgaacatcctgatacaccatttgaaatatgcattgattgcaataaaaccgttccaaatgttaaagggattgatattggatttgaatataatgaatggagaaaaagtgacctcattgagtatactaaagattggttaattgactattctttaactgcgcaacataagaaagccatcggcaatcggcctgcaaaacaacttgcagaggccattaaaaaatatccaattgataaccaaaatgcattaggtgatctttttctacatatggcaattagacaaaatcacaaaactattcccgtaatcaatggcgtatatcatatcaatggtgaactattattttcttgctcgcatatagtgattaatggcggacaaattgaattatggcttggtgcttcgtcaataaaagattctatggatgaagcaatattgtctgttattgaaaatattaataatctgatcagtgtcaatgagattaaaacaaggcttctagtcattacatctgaaatagatgaggattggcctttcaaagaaaaattacgtaagcttgctgataatcagcttccaatagagaatcgggtagacaaaataatccttccaatattcattgtaaattctagcgaaataataaaaaactatagtaaaaatgatttcttattaaagtttagagaagagattgatacttgtcgaacattgttatcttcagggtatactaataaaattgttcaactaatagatgttagggtttttctttaccctgtggacgatatcgtgtcattgtatgatgattttaaaaaggaagtttcaaaatga

SEQ ID NO: 58965 - DNA, 1155 bp, Yersinia enterocolitica
atggatgagcttaagaaaaagtttcataaacataaatcaagattcaaaataataactcagtccaatcaaaatgttgctgaaagaaacattttcatctatacgcaagagagggtaatcgaacgtgatttcgaaaatgtaaaggttgatttttttattatagatgaattttataaacttgcacctaacagcgatacagattatcgatgcgatagattaaatattgcatttcataagttgtatcataaatgcaaaagattttatatgcttggtccaaacattgatggaattatggatggcctagaagatgatcttaattgttcatttgtgaagtttgacaaatataagacggtagccgctgatgagttttattataaattagaatcagacggcaaagatgagttggtagatataaaaagggataaacatttaataaaaatattaaatactattaataaagaagaacaaacagtaatttattgtaagtctcctaaacgagctaatggtttgatgtcaaagatactgtcaatgggacttactaatagatgcatagataacgaatcatttactaaatggttgagagataattaccaccctgaatggaatttagcgaatgctatagactatggtatagcatgtcatcatgcaaaacttcctagagcaattggttcatttcttgttgattctttcaataaaaaaagaatttccatattagtttgtacatcaaccctgattgaaggggtaaatactaatgctaagaatgttataatttatgatgattgtattactggcagaacaaaactagactcctttacttttaataacatttcagggaggagtggcagaatgttcgagcacttcgttggtaaaattcacattataggtaatagaccaaaccaacaattgccattaattgacatacctatcattactcagagtgataatgcctctgattctatgcttctccaaatacaaagtgacttatcagaaactagtttatcaaaaatatttaaatatacacatcagcaaattttaccaattgaagtgattaataagcatcagggtgttccacctgaaagattattaacatttgcagaagcattgatggaacactgtggcaagtggcaagtggcaagtggcaagtggcaagtggcataa

SEQ ID NO: 58966 - DNA, 1440 bp, Yersinia enterocolitica; identical to SEQ ID NO: 58954

SEQ ID NO: 58967 - DNA, 1155 bp, Yersinia enterocolitica
atggatgagcttaagaaaaagtttcataaacataaatcaagattcaaaataataactcagtccaatcaaaatgttgctgaaagaaacattttcatctatacgcaagagagggtaatcgaacgtgatttcgaaaatgtaaaggttgatttttttattatagatgaattttataaacttgcacctaacagcgatacagattatcgatgcgatagattaaatattgcatttcataagttgtatcataaatgcaaaagattttatatgcttggtccaaacattgatggaattatggatggcctagaagatgatcttaattgttcatttgtgaagtttgacaaatataagacggtagccgctgatgagttttattataaattagaatcagacggcaaagatgagttggtagatatagaaagggataaacatttaataaaaatattaaatactattaataaagaagaacaaacagtaatttattgtaagtctcctaaacgagctaatggtttgatgtcaaagatactgtcaatgggacttactaatagatgcatagataacgaatcatttactaaatggttgagagataattaccaccctgaatggaatttagcgaatgctatagactatggtatagcatgtcatcatgcaaaacttcctagagcaattggttcatttcttgttgattctttcaataaaaaaagaatttccatattagtttgtacatcaaccctgattgaaggggtaaatactaatgctaagaatgttataatttatgatgattgtattactggcagaacaaaactagactcctttacttttaataacatttcagggaggagtggcagaatgttcgagcacttcgttggtaaaattcacattataggtaatagaccaaaccaacaattgccattaattgacatacctatcattactcagagtgataatgcctctgattctatgcttctccaaatacaaagtgacttatcagaaactagtttatcaaaaatatttaaatatacacatcagcaaattttaccaattgaagtgattaataagcatcagggtgttccacctgaaagattattaacatttgcagaagcattgatggaacactgtggcaagtggcaagtggcaagtggcaagtggcaagtggcataa

SEQ ID NO: 58968 - DNA, 1440 bp, Yersinia enterocolitica; identical to SEQ ID NO: 58954

SEQ ID NO: 58969 - DNA, 1743 bp, Yersinia enterocolitica; identical to SEQ ID NO: 58963

SEQ ID NO: 58970 - DNA, 1440 bp, Yersinia enterocolitica
atgaaaatggatgattaccctaaaggtaaaatatatatattcaaatctcaaaaagacgcatcaattcgaagaggtacgtgttttagcattagcaatcgtgtggttttgactgctaaacatacagttgaaacagatggcgagtatagcttgtttttatcaccggatgactttatgtctggagtaggagttaagttaaaattgcttgctggatataataatgcacaagctgattttgtcctgctagaatgtgttgattatgaatttccatcatatatacaagctggagtagtggatctggaagtagatgaaaaaatacatgtttttggatttccggtagaaaaagatcaaattccagctgcttttacatcgactgttagctgcataaccggaaatataactacagctaaacacagttttgaaatcgctcaagtttcaacagtatctaattataaaggaatgtcgggttctcctgtgctttttaatggatatgtggtaggaatgctgattgtgcaacatggtagtacaacattgcatgtattatctatttctgacatatatagtaaacttggagtttcattccatcattttcgtttacaagcgtcagtacgtgaagaaattgagtatatgccgcctgaacatcctgatacaccatttgaaatatgcattgattgcaataaaaccgttccaaatgttaaagggattgatattggatttgaatataatgaatggagaaaaagtgacctcattgagtatactaaagattggttaattgactattctttaactgcgcaacataagaaagccatcggcaatcggcctgcaaaacaacttgcagaggccattaaaaaatatccaattgataaccaaaatgcattaggtgatctttttctacatatggcaattagacaaaatcacaaaactattcccgtaatcaatggcgtatatcatatcaatggtgaactattattttcttactcgcatatagtgattaatggcggacaaattgaattatggcttggtgcttcgtcaataaaagattctatggatgaagcaatattgtctgttattgaaaatattaataatctgatcagtgtcaatgagattaaaacaaggcttctagtcattacatctgaaatagatgaagattggcctttcaaagaaaaattacgtaagcttgctgataatcagcttccaatagagaatcgggtagacaaaataatccttccaatattcattgtaaattctagcgaaataataaaaaactatagtaaaaatgatttcttattaaagtttagagaagagattgatacttgtcgaacattgttatcttcagggtatactaataaaattgttcaactaatagatgttagggtttttctttaccctgtggacgatatcgtgtcattgtatgatgattttaaaaaggaagtttcaaaatga

SEQ ID NO: 58971 - DNA, 1290 bp, Yersinia enterocolitica
atggatgagcttaagaaaaagtttcataaacataaatcaagattcaaaataataactcagtccaatcaaaatgttgctgaaagaaacattttcatctatacgcaagagagggtaatcgaacgtgatttcgaaaatgtaaaggttgatttttttattatagatgaattttataaacttgcacctaacagcgatacagattatcgatgcgatagattaaatattgcatttcataagttgtatcataaatgcaaaagattttatatgcttggtccaaacattgatggaattatggatggcctagaagatgatcttaattgttcatttgtgaagtttgacaaatataagacggtagccgctgatgagttttattataaattagaatcagacggcaaagatgagttggtagatatagaaagggataaacatttaataaaaatattaaatactattaataaagaagaacaaacagtaatttattgtaagtctcctaaacgagctaatggtttgatgtcaaagatactgtcaatgggacttactaatagatgcatagataacgaatcatttactaaatggttgagagataattaccaccctgaatggaatttagcgaatgctatagactatggtatagcatgtcatcatgcaaaacttcctagagcaattggttcatttcttgttgattctttcaataaaaaaagaatttccatattagtttgtacattaaccctgattgaaggggtaaatactaatgctaagaatgttataatttatgatgattgtattactggcagaacaaaactagactcctttacttttaataacatttcagggaggagtggcagaatgttcgagcactttgttggtataattcacattataggtaatagaccaaaccaacaattgccattaattgacatacctatcattactcagagtgataatgcctctgattctatgcttctccaaatacaaagtgacttatcagaaactagtttatcaaaaatatttaaatatacacatcagcaaattttaccaattgaagtgattaataagcatcagggtgttccacctgaaagattattaacatttgcagaagcattgatggaacactgtggcaagtggcaagtggcaagtggcaagtggcaagtggcaagtggcaagtggcaagtggcaagtggcataaggatatggtgtgggattcgctatatccaaccaaaaatcagcttaatcatttatgtgaaattttatttaaatatttttctttatcaagaatggggaatggagctgtaa

SEQ ID NO: 58972 - DNA, 1440 bp, Yersinia enterocolitica; identical to SEQ ID NO: 58952

SEQ ID NO: 58973 - DNA, 1269 bp, Yersinia enterocolitica
atggatgagcttaagaaaaagtttcataaacataaatcaagattcaaaataataactcagtccaatcaaaatgttgctgaaagaaacattttcatctatacgcaagagagggtaatcgaacgtaatttcgaaaatgtaaaggttgatttttttattatagatgaattttataaacttgcacctaacagcgatacagattatcgatgcgatagattaaatattgcatttcataagttgtatcataaatgcaaaagattttatatgcttggtccaaacattgatggaattatggatggcctagaagatgatcttaattgttcatttgtgaagtttgacaaatataagacggtagccgctgatgagttttattataaattagaatcagacggcaaagatgagttggtagatatagaaagggataaacatttaataaaaatattaaatactattaataaagaagaacaaacagtaatttattgtaagtctcctaaacgagctaatggtttgatgtcaaagatactgtcaatgggacttactaatagatgcatagataacgaatcatttactaaatggttgagagataattaccaccctgaatggaatttagcgaatgctatagactatggtatagcatgtcatcatgcaaaacttcctagagcaattggttcatttcttgttgattctttcaataaaaaaagaatttccatattagtttgtacatcaaccctgattgaaggggtaaatactaatgctaagaatgttataatttatgatgattgtattactggcagaacaaaactagactcctttacttttaataacatttcagggaggagtggcagaatgttcgagcacttcgttggtaaaattcacattataggtaatagaccaaaccaacaattgccattaattgacatacctatcattactcagagtgataatgcctctgattctatgcttctccaaatacaaagtgacttatcagaaactagtttatcaaaaatatttaaatatacacatcagcaaattttaccaattgaagtgattaataagcatcagggtgttccacctgaaagattattaacatttgcagaagcattgatggaacactgtggcaagtggcaagtggcaagtggcaagtggcaagtggcaagtggcataaggatatggtgtgggattcgctatatccaaccaaaaatcagcttaatcatttatgtgaaattttatttaaatatttttctttatcaagaatggggaatggagctgtaa

SEQ ID NO: 58974 - DNA, 1617 bp, Yersinia enterocolitica
atggagtcgaatgattcaggcggagtagccgccaagcacggtttcttttttcaggactgcgtagccgcttaccatgtcacccgaatgcttcgtgacaagtctatccgtagtgttcgctgcgaggtcacagacgatatcgatattgtatctgatggatacatcgacttcgttcaggtaaaaagcaccggcaaaacacgttggaacatttcggacatcgttcagaattcaaaaggtgctgataaaaagccgatcccctgcagttcaattttgcacaaatcaatgcaatgtgagtctgacctgttccttggacgtaggtactccatcgtcacagaggaaaaggtcaacaaaaccttggagtacttgacgatcagcccaaccgcccgactagataagccaggccgacaggaactcatcgatgatctcaacaaacgtacaaacaattatttaacagactcaggtataagcgtttcaaattggatcgatgcggctacatgggaagtgttttcatctctgcgagaactggaacttctagggatcaaaaacatacggctggcctcccacgatctacatggggtcattctcagttccgaaaccgtcgcagaagacatttggtgccgcatccttgataccgtgacgcgcaagggggaacattctcgacgcattcacagtgtgaatgacaagtcctgcttacgaccagacctacttgagtggttcaagcagcgtgtcgaagatgaccagtctcggtcaggccgcaaaatctacgtcaaacgggacttaccccacatccttacgccatttagagcgcctatggcttcggtctgtgctaagcgtaaaggcttggttctacatcagcagtactcgcttaagaaatatcgctacaagcacatcgcggataacgtctgccaatggttggatgaggtctttctccgaccaaaagaattgtctgatattcataaactgacactcattgaaaagcgagaacgattaaagaattcagtcttcaaatcgctccatgatgtcagcgaatttttggggcgagttctgttgcatgcaacgatccggcagcaccacgaaagccagcctatcccttgcatgttatacgtggaaaaagcaggggccgaaaaaattcttgaaaatgtgcacatcgttcgccgcgatccagaaggtgatcagctctggattggcttcagtgagttggtgactaatattgacattgccgtcagattgccggagatacgggatcagttatacgaggacatatcggattgcatcgatacagcacgcagaaagatcctcgacattaaagatgataactacctgcttcgccacgacattgacgaaattcttgatggcagcagacctttcgatgctcaccttgatcgtttcacgtttgttctgttcgtgggctacgactccaggctgctaactgagcctgaaacgccgggattcgagggtggcttggagaaggaaacgacggcgctattcgaaaaattcgcggctgacctgatcgaggattcgccgtttgcgaatctttgcatccacgtattcatttatccagccccgagtcttgaacggttaacccaattagttgatgagaaggtgagagaggtcgtatga

SEQ ID NO: 58975 - DNA, 2190 bp, Yersinia enterocolitica
atgacagaggtctatgaacaggcgaaacatagcctgcagggtgaggacttctcatctttcaattatctgtttgcggttaacaagctgttgtctaatcctgtttcgtatgacttaggacgggacttgatcgtgcgagctctcgattcgcgcgagcggttttccgagcacaccacgatattgaaaaatatggtgagaaaatcaggtttgttcccgtatctcaaaaaggagttcaccagccttacaccggatgacctgagggtgcttgagctataccggacgccattctcggatggttttgttttccactcaatgcagttccacatatttgatctgcttaagtccggtcaaaacgtggttctgagcgcacctacaagcatgggcaaaagcgcaatcgtcgattcgttgctcggcatgggaacgttgaagcggctcgttctggttgttccgactgtggctcttgccgacgaaacccgtcgccgactacaagagcgattcggtgaccgatatcagatcatccaccacagttcccaagtgtgccattccgatcaggctgtctacgtgttaacgcaggagcgagtgaacgagcgtgacgacatcgtcgatattgacctcttcgtcattgacgagttttataagttggcgttccggcaactgaaaagtggggacattgatcatcaagacgaacgcgtcatcgagctcaacattgctttgagcaaactgctcaaggtctccaggcagttttacctgactggaccgttcgttaacagcattcgcggtctcgaaagacttggatatccgcatactttcgtttctaccgacttcaatacagtcgcgctagatgttaagacgttcggcatcaaagcgaacgacgacaaagccaagctcaacgcgctaggagaaatcgcgcacgcatgcgtcgacgcaacgatcatttattgcaagtcaccaactgttgcgggccaagtggcgcgcgagctgatcaggctggggcatagcactccgactgagagtcctcatgtcgactgggtcagcgaagagttcgatgccgactgggattacacagtcgcacttagaaacggtattggcttgcattttggcgcgctaccgagggcattgcagcaatacaccgccgaccaattcaatgctggaaaactgcgctttttactttgcacctccacgatcattgaaggagtcaatactatcgctaagaacgtcgtgatctacgacaaccgcgatggaactcgcagcattgacaaattcacccatggcaacatcaaagggcgtgccgggcgcatgggcgttcacttcgtcggcaaaatcttttgcctggaggacatcccggaagacaacctcaatcaagaggtggatattccgctcggtattcaggacattgataccccaatcaacctcttggccagcgttcaaccagatcacttgtccgagttttcacaggatcgctttgatgaaattttcataaacgaccatgtttccatcgaccttgtgaagaagcattcgtacttccgtgtcgagcagttcgaaatgctgcaaagcatgttcgagatgatggacgacagcgaattttcctcgttggtatttcactggacccccgcgacaaacttcctcaagacctttgcaaagatcattgccagactggttccccatacgttcagtcgcaatggggtccctgttaagcctacggatgtgatgatcgccaaacttgccggctatttaagcgctgaaagttattcggaatatctgaagaatcaaatcgtttacgcacgacaacgggtctatgaaggggaaaagcgcactctttccgacgcacttaacaatgatctgaaactaataaccaatactttcggttacacgttacctaaagtgctcagcttgatggaggatgttgtaaaatatcacgcgttgaagagaggtattcgcagcaaagtcgattacacgcatgtcaaaatgacgttcgagaattttcatcttccgccaggtgtcaatgccttggaggagattggcattcccattcagacgttacaccggctggtagatttgctggaattttccgaccaaactgatgtggatgggttgtgccagtatcttcgggatactcaggacgtttggagtcgaacaattgggttcgtggatcagacgttcataaggcgcgcgctcggtattgaacaacattga

SEQ ID NO: 58976 - DNA, 1440 bp, Yersinia enterocolitica; identical to SEQ ID NO: 58954

SEQ ID NO: 58977 - DNA, 1155 bp, Yersinia enterocolitica; identical to SEQ ID NO: 58967

SEQ ID NO: 58978 - DNA, 1629 bp, Yersinia intermedia
atgagtattactagcctatccgatgcaggtgggcctgcggcaaggcaaggcttcaagtatcaagatcacgtagctgtcagtttcatcttcaagatgctccgggacagcaactactcccaagtggaatgcgagacagcggatgacatcgtggcggtattccaatgcgcgggccagatactaaatgaatacattcaggtcaaaacaaccgaaagtgatggcaaatggaacttgaaagagataacagcgttagacggcaccaaggctaattcttcgctgctacataaatcgctgaaatgcgacgtacgcccaggtattgcccgcttccgaatcgtgaccaagcgcgacgtcgcaaaaattcttgaaggattcaagaaagagatagataagcgggtgctgcctgacataaccacgacccgaggtgtggcactgcgcaagaagtttaaaacggttgtatcacctcaaaaacgggacttcttgtactgggcggaaaactttgtctggcaggtatacggtgatgtcgaggcgctggaggccgtcaatataaaggctttgtcccagcttgcggaggggcttggaaatcgccccaacttcacgcaactaaaggcaatttacgaagaatttttagagattgctgacaaagcggccacagctagcgtgaagacagccgcagcatctaagatcatccttcgagctccgacgctggcttacctcaggaaattattagacgaggctgatgacaagtcaacggccacatccaaaccatataaaaagcgtccggatccgttcttggtcgagtttcacgccaacacaaaagagggcttgttgcactcattttctggttttgacgtgcgctatgcgcttaagaaatggcggcatgaaaattacgcaaagcatctcatcgaatggctacccgagttttccctaaaggccagtgaaatcgtaaacatccttgcgcataacgccgaaacgatactggctaggtcaatcagtaccttcagcgacagtgagctttcgcgcgacaggctcattgcagaattaattctccattccatcctgcgcagccgccaaaacagcgagcccgttgcgtgtaaagtcttctacaaatctgctggcaagctttcagaatttggcaatgctcacatcgttcagatgcctgatcaggatgaccagttgtggctaggtcttgcccgcttgagcaaagcaaatgacatggatacaacgctagagcaaattcgagaaattcttgacgaaactatctcagaaaccgtgctgtcggcagagcgcgaaatcattatttctctacgcgaacctttacatcaccagccaaaagcagattccttcaatcaagctctgcatcggaattctcctgtcgatgacatgctgaatattctctgcttccccatcttgttgacctacgacagtgcagctctttcgtcaggctggctcgctgattacgtagacaacctcaagatagagatcgaaacccacttcagcacgttcacctcggaactgccggagaacatcaaacaagtgaaggtgctcatcttcttggtgcctatggaaagcattgaacatctgaccaaggctttcaacgctcgctgcgaaaagctggaagaattgcaggcataa

SEQ ID NO: 58979 - DNA, 2142 bp, Yersinia intermedia
atgaactacgaaaaaatcaagaacatcttggcgaaactcggtgaagagaacgcaacgacggtcgatgtgctgctcgccatcaacaccatcgtcaacagaagcaattccgagtgggagggccgcgatttggtgatccgagcactcgacaaatttaagctttttgactctgtcgaacagtcgctcctgctaaacatggtacgagctgtcggactattcccctatatcactcctcacctcagcagcatggcgatttctgaccgcttagcttacgaagctcacagggtcgagggagtagaacaaggcatggtgtttcatcatctgcaggcccatgttttcagcttgatcatgcaaggccgaaacgtagtactcagtgcttctacaagcgtcggaaaaagtctagtcattgacgctgtactggcacagcgacggttcaaaaaggtggtggtgatcgttccgaccattgcgctgatcgacgaaacccgccgtcgcctggtcaaacgttttaaggacttcaacctgatcacgcatccgagccaagaatccgtgatcgagacaaccaacgtctacctgctcacccaagagcgtgtcatccagcgtcctgatcttgctgatgtggagttctttgtcttggacgagttctacaaaatcgacttggggaactccacagacgaaagcacacgcgctgttgacctgagcttggcctttcacaagctcgcaaagacaggtgctcagttctacatgctcgggcctcacattcagaagatctctggtttggatgactatgagtaccacttcatcccatccgactacagcacggtcgcggtcgacatccagaatttcaatctggagatgcgatccgaagagcgaaaggaaaaattgctagagttggtcacaactctagactcgcctaccttaatctactgtcaggccccccctagtgcgaacagggtcgccgagtatttgattcaggaagctgggctgacgccagtaccagagacgcaggaaatagccgagtggatctctaaacactaccaccctgaatggaacgttgccaaggcaatatctctgggtatcgggattcaccatggaggagtgccacgtgcattgcagcagtacatcgtcaagttgttcaacgatggcatcatcaagagaattatctgtacatctacgatgatcgaaggcgtcaacacatcggcagagaacgtgatcatttatgaccggcgcctgaagaattcaacattcgactacttcacctacaagaatatttccggtcgcgcaggtcgtatgaataagtacttcattggaaaagtcttcatgctcgaagcgcctccccttgagcagggcctcacagtcgaataccccatcggtcatcaggatgaaaactccccgatgggactcctcatgcaactggagaacgaataccttactgatatttcacgtggtcggctccaagatgcatacgccaacccggtactgtcgccgacaaccctgatagagaaccggcacgtcccgattgagcggcaagtcgaggtagcagaaacgatcattcgtgacctactgcccagcagcaaacttctggactggaaaggtattcctgagccgaaccagctcaattacctatgtgaactggtttacagtctggagggcggtaacctgatggactatgggatatcgtccagcttgcaattggtgtggcacatcaatgagctccgaactcagaaaaacctgccagcttacctaagagacgcggtggagaatcgacggcaggaacatacgcccagcgaagcgatcaacctacgcctgaaattcatcagaaatatggtgtgtttccgattgcctcgggacatcatggccgtgaataacattcaggccgacgtgctggcgaaaaaagggatcgagccgggagatttcagcttctttgctgagcagcttgaaaatatgttcctcgacccgctgctcaccgcgttggatgaatacggaattcccactcagatctcggcccagctcaagaacctcatcttgccatcggaacatctgaacgacctgctggagaaacttcggaccttggctcccagaatagagcaccttcaactgactggctttgagaaaagcttaatgtgttgggctgtgtccgaaatgtag

SEQ ID NO: 58980 - DNA, 945 bp, Yersinia intermedia
atggatgcgttacaaacggctttagagaaactgattagagatgatggagacacgatctatagctactttcacgaactgaagtcagactgtttagtagatggaacttcagcagcatgccattttcactgcattaatcttgatggaaacggacggccgaaggtagatgccttagttcaatatttagttggtaaagttattgactatgcaataccaagaaaaaagataaatgaagcaataagatatcaacaggaaactggttcgacactaaaaatagttaagttattcacgcaagcaatgggattgttcacaagactttcaaatagcggagaaggtggagaattgatcttgtttttatttgctgagaagtttttaaagcttccacagattatctgtaaaatgaatttaaaaacaagttcccagatgcattatcatggtgccgatggtgtccatattggagttgataaagataataagaagttatgtctgtattggggggagtctaaactttattctgatttaactcaggctatttataaatgtatgaaaagtattacacctctcatcactagcaccatgggtagcggtagtgcagatgagagagatatacaattacttagtgactttatgaatattgacgaccctgttctagaaatagcactaaagaaatttttggatcctgatcaaccagagtttaataagctagaatatcgtgggatatgcttggttggttttgatattgatgattacccgaaagaccctaactctttaaccataagtggattggctgaaaaatttaatgaaaaattagatggttggaaaaatggtgttaaaaaaaggattatcgaagaaagcattcatggcttttctttgcatgtttttctagtgccattcccttccgtagaagagtttagaaaaactttgttagcttcacttggaggtgagtga

SEQ ID NO: 58981 - DNA, 2580 bp, Yersinia intermedia
atgtcaatgaaggaactgcctaattggttggtaaacaattcagggtttataaataagctgaagaatcttacgataagatctgttattgatcaattccctagtgttaggcatattgaaaaagagaatggtagagttgatagtttggggtatttattaacgtgtggcagtattttatctcattcggaagatgctatctgccaagatgcggctttaagaatttcacaatattgccttttaaatgaaacgagtaaacaaagaaaagatagcgctgcattaatattagatgctcttacaaacaatgctacagttgaacttgcaatcagaaaaggattattagataaaggttttgaagagaggcttccagtcgctggccagctagaaactacaaaaagaaaaatacagcatactattgaagttggtgataataaatatatatatgcaaataagtttcaatctgaattttgggattcagcaacaaataatggatgggtcagcatatcagcacccacttcagtaggaaagtcatttatattagaatcgtgggtagaggattttatacacagaaaagataagactttagtcgtatatcttgttccaacgcgagcacttattagtgaggtttatgagtcactcgtgagtaagctagacccttatagaacaggggaggttaacatacaaactttacctctaaagtcttcatatgatagttcaaggtcaaatgtttttatttttacacaagagcgattgaatatattttacaactctttgaataaaaccccagttgtagatctactgattatcgacgaggctcataaaataggggattctttaagaggtatttttctccaatatgttttggaaatgacttgtgcaaaaaataaagacctcgatgttatatttgcgagtccatttacttccaatcctgaattactgctcttagatgcaccatataatggcaggaaaagtgtagttaaaagtagttatgttacagttaatcaaaacttaatctggttagaacagaagcctaacacgccaaaagagtggtccatgtttctattcttcagaggagaaaaaaataaaatcggcgatttgaccttgcaaaatacaccgtcgccagaaagtaaaaggctttcttttattgcgctaagtttggggagacatacctcaggtaatataatttatgttaatggcgccgctgatgctgaaaaaacagctaaacaggttgctgatgggctcgaagaaatcagtgaagaccaagaaattcacgatctgattgaattaagtagaaaagttatacatgaaagatttgctctcaatttcactttaaataagggggttgcttttcattatggaaatatgccattgattataaaaggtgaagtggaacgactttttactaaaggtaagataaggtatttagtctgtacttcaacccttgttgaaggggtgaacatggcttgcaagaacatcttcatcaggggacccaaaaaaggcagtgggataccaatgaaagaggatgacttctggaatttagctggtagggccggtcgttggggtaaagaattccaaggtaatgttatatgtattgatactaataatgagcggctttggaatggcgttccaccgatcagtaagaaaaatataaaaataacacgagccactgacagcttaaacaatgaaatagataatatatttgattatattgattcaagaaatcattatgggatgactagaagcaatcctaacttgcaaggcttatttagttacttatgtgtttcttattaccttcatgacgggttggtaaataatccatacattgagaagtatgctctcgataggattgaagaaatagatgaaaaaatttcagatgttataaatttattagatttcccgctagaggtgatcgtaagaaatcctggtataagtcctatattgatgcaggatttatggggtctattttcaaactatgacctcaatgctatagaaaaattactgttagctgacccatctagtgacaatgctctcgattcatatattgcagcttttactagaatatgtcacacgatgagtatcgagttaggttacaattccaaaggagcctttgtcgtagcattgttggtagttaattggatgagaggatacccgctggcaaggttgatttcagaaagaattggttattataaacgaaagaaaaaagagtataaggaaccatcagtaataagaaatgtaatggaggatgttgagcgaattgcaaggtatcaagccccgaaattactatcttgttataatgatctactaaagcattactatattagtaaagacagattagatcttgtcgaaaaaattgaagacattggggtttatctggagcttggtgtaagtattaaaactcaaatctcattaataagcatcggcttctccagaacatccgcagttatgatttctgagtatataacaaatgataattatgacgaaataagttgcataaaatggatagaggagaactccaaatatttagaggacttgcctgctttagttaaactcgaaatttactctattgttaatggtattctattataa

SEQ ID NO: 58982 - DNA, 1449 bp, Yersinia pseudotuberculosis
atgataaacggaaatttagaagagtttaatcttgaatgtatatatttactcagtgccttattacccaatgcttcaataaggcgaggaacatgtttttctatagcaaaggatctattgctaacggcgaatcatgttgtaaatggtgcttcatcaatacaaatatttctctcaagtgatttattttctcttggacaagggattgatgccgaatgcatttatagcaatgaaaatttagatatagctatattagctgtacctgaaggaacgacaaataacgcaatgccgctttattcaaccgctgttaatttggatagtgatgttaaatcttgcggctatcctgtagagaaagagcattaccatgcacctatcagggttaaagtaacaaacacattttcacatatgagtagccgtgaatatagttttgaagtttcccaatctaatacagttactaaatacagtggtatgtccggttcaccaataatgcatgagaaatattgcatagggattttgctagttcaacaagggggaaatacactatatgcattatctgtaaaggattttcttattgatactgttttgcaagatataatgaataaatacgatgtaaagataacagtgcaagatggaattgaatacaaatctcctgattacccttcctcaccatttaagtattgtataaattgcaatgcggatcatccaaatatcaaaggtattgatattggttttacaatgaaacaatggaatattagcgagtttgctgaatctgtatatgactggattatagattattctttgtcacataaagaaaaaaccaacttcaatggaagtgataggagtctattcaaatatgctagatctaattatcctgttgatgatttaaatgctttaggtgacctttgtttacatatagcgctccgagagtcttactctacaatcccaataatgaataaagtgttcgatataaataataaaactttctcatgtactcatgccgtacttaattttgatgggattgaactttggattggcgcgtccgcggttactcaaaatattgaggaagcaactctgtctgcgattgaaagaataaaatatataatggatgttaagtcgctaaaaaatagattgattatgcttacgtctgaaatagatgcttcatggcctcatagagaaaaattaaaacgactagctgactctaacttagagttagaggaaagattcgataaaataataattccagtatttataatgcatgatagcgagttaattaaaaattataacaaagataatttcttactcctgttcaatgaaaaagttgctagttgtagagaactattaaaaaaagatatagagggaagtatcattaacttaattgatcttagagttttttatttcccagtttcggatattaatgaagttaatggtgctttgcagaaggaactaaactcatga

SEQ ID NO: 58983 - DNA, 2163 bp, Yersinia pseudotuberculosis
atgagccagtggtaccaagaggctaagaatcaattaaataatccaatgttctcacaatgggatgattttttattatctttagtaaacgaattcaacggccatgtcaatgagtcattagtgcaggatattgttattagggccatggaacgtaaaagtgaaatgaccaatggtttcattttggaccatattctcggggaattagggcttttcccttacattgataataataataatacatcgaaagatgaatttaggaaggcaattttcactactccgcaggatgaaacaaagattttccacattcgtcaggctgaagtttttcacagaatcatgaccggtgaaaatgtaatattgagtgcgccaacaagctttggtaaaagcctcattattgaagctttaattgctagcaacgaattcaacaatgttgtaatagtagttccaacaatagctttgatagatgagttaaagaaaaaactttataaatataaagataattacaagatcatcactcaagtgtcacaacaaccgagtgaacgaaatgttttcattcttacacaagaaagagttttagaatatagcataagctcagtcgacttctttattatcgacgaattttacaagcttgcaccatcaagtaaaaatgacgagcgttgtgatcgtctcaatcttgcctttaaggaattatattcaaaatgcaagagattttacatgctaggtccaagaataaatggtcttttttcaggaattgagcaggaattaagatgtatttttcttaggtttgattcatataccacagtagcaactaatgagttttaccataagttaaaaaccactggtactgatgcaaaagttgatgttgaaagagatgaaatcctaaaagatattttatcaaatgtcggcaggaatgaacaaacagtgatttattgtaaatcacccaaaagagttagttcgctgatgtgccgcttgcttgcggctaatatacttagtcctgatagcgcaaatgatgatcttgctagttggctttctgtaaatttccatgataagtggtcattgatcgacggcgtacggcatgggattgcatatcatcatgcacaactcccaagggcagtaggttcattaattgtggatttgtttaatgaatcaaaaataaacattctgatttgcacgtcgactttaatcgaaggtgtaaacactaatgccaaaaatattatcatctacgatgactgtattaccagaagaactaagttagatatgtttactttcaataatatatcgggtcgttctggacgaatgtttgagcattatgttggaaatgtttttatttttggtgaaaaaccacaaattgaacttccatatatagatattcctgtagtaactcagagtgaaaatgcgtcagagtcattactactacatttaggtcaagatgttaatgatgagaataaaaatagagtgagaaagttttatgagcaagatgttctccctgtgcaaattttacttaaacatcaaggtattgatccaaacaaacttataaattttgcagagaaattaatctcaaaatgtaatgcatggaatccattaatgcgttgggatagcatttatcctacatctaatgaattgctgcatctctcaagtatattatttgataactttaatgtatcttcgatgggggggggtacagttagaagtgctttacagcttcataaaaaactttgtgatgttataaataaagtggacgataaaactctgattctagatgatttcaatttctggagagggagagataatacatatagcatagatgatgctgtgcaatctgtattcaattttaagaaaagccttgttaattataatttacctatactaatttacgctgttagtgatattcaggaggtaatattcaagaggtttgggtataagtatggagattataaaccttttgcatctacattagagaatttttattaccctgcagcggttaactctctcgaggaattcggtgtgccaaatcaaattgcaaaaaaaataatcaacaataatcattttgataatgccgatgatatcgactcagttattagttctttggttttaaaaggtaaagactcttatccatacttaactgattttgagattggttttataaaaaaagctctgtcttacatgtag

SEQ ID NO: 58984 - DNA, 915 bp, Aeromonas hydrophila
atggattttgatattttaattgatgagcactttgtaggattatgtcaaaggggagatttatcccctattgacaacaaatatgttctgagcattattaacgattatgaagatgaacaatggagatataaaaagtttcaaaatttcatatgggacaatatagcagaaacagctttatcccattcagaaaggcaatgtctcatcaatcagtctcattctattcttactgccgcagctcaaaacctaaggctaacagataaagaaggggatattggaaaaggtagcgagctagctgaaattgttttatatgggattatgaagcaccattacaatgcgctaccggttgtgccaaagatcttttataaacaaaatgctcaggataatgcaaaaggtgctgactgtgttcatataaccattcaggatggtgacttcgcactatggtttggcgaggcaaaattttataactccatagaagactctagactatctagtataatcagctctgttggtaactcactaaatacagagaagttaaaaaaagaaaacgccattatcactaatatttctgatcttcacggattgattgatgaccctatgctaaagaaagaaattcaatctgcactctcaaacagaaatagcattgataacttaaaacacaaaatccatataccaatactcatattacatgagtgtgagattactcgtagaagcatccaactggatgatgaatataaggcttccattataaaatatcatactgaacgagcacattcatattttgaaaagcaaatatctgcgattggaaaaatatcaaaatatggagatgtgaaatttcatgtcattttatttccagtccctcacaaaagctttattgtagataagttcattcaaaatgttgagcactataaggaacaataa

SEQ ID NO: 58985 - DNA, 2085 bp, Aeromonas hydrophila
atcttggacatttttactagttgccacaaaattaatgatcttattacttcaggctctgaaaataatgccagagaagagctaataaaactgcttgactatcatgagagggaaggtatttcatattcccccctactaaacagtctaattcgccaagtaggtttatatccttaccttcaaactgagacatcaagttggcaagatcagtttgtatatgagtcatttaaaactaatgtaggacccgataccaagctaacacttcatcgcgagcaatcatctgtgctcaaaaggttattagaaggccaaaacttggcagtaagtgctccaactagctttggaaagagtttcattatagatgcatttatatcaataaaacgccccaaaaatgttgtaataatagtacccacgatagccttaactgatgaaacccgcagaagactacagaaaaaattctctaatgaatacaaaataatcaccacttcagatgtagaaatttccgaaaaaaatatttttatattcccccaagaaagatccattaactatcttgaaaaaattgatgaaatagatattttggttgttgatgagttttataaggcaagccaaaaatttgataaagagagagcttcatcattaacaaaggcaattataaagctcagtactaaagcaagacaaaaatatttcttagcccccaacatctcatcacttaatgacaatatactaacaaaagacatggtgttcttacccattgactttaatactgtttttttagaaatgaacgagttatataaagaaataaaaaaagatgagaacttaaagagcgagacccttctaaatattctaaattccacaaaaggaaaaactttaatatacgcagggacttacccaaacataaataaggttgcaacattattaatcggcaacaagtttccgattcctggagaaaagcttaaggcatttgaaaagtggcttactattaattatgaaagaaattggaatctaactagtcttgttaaaagaggatgtggtattcataatggtcaaatgcatcgttcattaagtcagatacaaattaggctattcgaagaagaagatgggcttaaaaatattatatcaacctcatcaattattgagggggtaaatacttccgctgaaaacgttgtaatatgggctaacaaaaatggtcagtcacggctaaatgattttacatatagaaatatcataggtcgtggcggaagaatgtttaaacactttatagggaaaatatatatattagaggagccaccagtatcagaggacgtagaactaaatttaaacttgccagacaatattcttagtagtattgatagcgaggagattcgtcaagatctaactccagagcaaatatcaaaaataattgcgtatgaaaatgagatgtctgaccttctaggcgatgaaacatttacaatgatgaaaggaaatagcatcttcgactcgagtgatggctatctaatccgtgatatagcaagagacatatcatcaaataaagatgagtggaatggtctaggtttcctaaattcggcttttcctgatgactgggataggtttttatataaggcaataaactttcatccaggtggatggggtattgaatactggaaatttgtagagtttatcaaagtaatttcaaacaattggaataaatcaattcctgagcttctggaagagctcgagcaatatgacataggaatagatgacttttttaaacttgaaagaaatataaccttcaagctttccgcaacattcaatgatataaatattctacagaaaaaaatgcttgagaaaccgactgacatatctcctttcatatcaaaactttctcacgcatttttaccacctcttgtttatcaactggaagagtatgggcttccaagaatgataacaaagaaaatccatcaagctaatattataaatttcgaacatcctgagattgagttgcatatcgttttgaatatattcaaaacgataccgttcgatatcttgacaaccctcgttcctgacctagatgtttttgataaatatatactttcatatttttacgatggtatatga

SEQ ID NO: 58986 - DNA, 900 bp, Aeromonas salmonicida
atggacgcttaccttcaaccacaattaaaaaaccatcaagaaataaaaaatattttaaaacaagtaaatgtaacgcatgttctgagtgatgggcgaaaagttaaaacactattagtctacctaccaattaaaaatggtgttagtagccatgacgagttttttgaaaaaataaaaaatggcatattatataattttgttttttcttgtcgtgaaatagagaagaagcttggtcttgaggacacaaatagcgcaaagcgattatttgatcgtgcgataagaaaaataagccagaaaacagcaaaaggtgaattaggagagctaatcctgtttactcttttggatgtttactttaaagcaccaaagatactaagtaagatatccttaaaaacaaatcctagaatgccagttttcggtgctgatgccgtacatggccagtatataaatggcgaattcagattatatctaggtgagtcaaagctttataaaagttttaaaagtgcagcatcagaggcagctaaatctataaagactgccaaagataaatatagtgatgaatttgacttattggaaagttacatggactttcctaatatagactctgaactagaagaaaagcttctaaatctgctagatccgttctctgaaaatgacatttcagaacttattcactccccctgcttcattggatttgctgagccggagatcattggtcaagcggttacagaggatgattttgttataaaatatagtgagctggctcttgcctatattggtgatttttatcatcaagttgagcatcatggctctaacatagaagaggttgcattaatcatgctgccattttcttgtgtcgatgtattggtcgatgattttaaagcatatctcgggataaaaaaatga

SEQ ID NO: 58987 - DNA, 2502 bp, Aeromonas salmonicida
atgagtgacttctctactaagcttgcagctaaaataaaaggaagtaatggatatatagaggcaagcaatagtttgttcggatcatatgttttatggttaacaggaactaccgaactcgtagaaagagaggaagtaaaaaaacttataacatcagctcaagtattctataagtctagtgacgaaaaaataagaaatgaaggtgcaattatactttcaattttattagatatttgtgccgaccagtatccagacttagtccccatcgcacgaaatatgttcactaacgctggggattttccgaatatcaagctcttgagtaaaaggcatcctcgtgttaatttttcatacaacttttattcagaggctcaaatggatttcagagagcgtttgaatactgtcgacgacctcgattttcctttaactgactatcagcgctctttatggattaatctatcttcagatgaagatattataactgttgcaccaacatctgctggtaagactcatattattctgagctatctattaaagaggctcgctgagtctgatggtgcatttgcagctatagtcgtaccgactagggcattgatttcggaagttgctgggaaactttataaattagcccaagataacaatgtagagaacgatattgaaatctgttccgtacctaaagaaggtgactttgggagcaagactttttttgtcatgactcaagaaaggctatatgagcttctacagcgtggtgatatatatttcaactatctatttatagacgaagcacacaatatctcagataaaagcaggggggtactacttcaccttgcgatagagaggttgcttgaagatagcttccctcaagtaatcatcagcatgccagctgaaaactatcaagatgcattttctacaatatttggagagattgaattcaaaaaagaaataacaaagcactcaccagtgtcgaagattttaatatcggttatgccaaaggggaagtctttagttatatctagacacaattcaaataatgttaaaacaatacccaaaggattcaaggataaaaacttggcggatattgtatttaagttggggtatggacatagcaatataatatacagaagcagaactgctgattgtgagaaaattgcagatgacattgccaaactgattcctcaaaaccttgataatgaattgttgagtgaggctgctgactacgtagaaaactttattcatagtgacttttcacttgctaataatctaaggaagggggttgcgtttcactatggcccattacctagctccattcgaattatggtagagaacctagctaaagatgatcatataaaatatatagcatgtacgagtacccttgctgagggtgttaatctgccagctaaaaatcttttcatgaagaatccaatacagccaataatgcatcagccatcagagcgagttgaagatgtaaagattaacaatatcacgggccgagcaggaagaatgctgcaacacttttctggcaatgtatttatggttgagcctgacgattggcagtttgacgattattttgatgatgagcaaggcaaagaggaaaagattccaacatattttaaaaccctaaacgaagacttgcataatgtcattagcgctcttcagggtaggtatcctcatgatgaagagaaccaatatcgttactacatgatatctaataaactaatcaaagagtatgctcgggatgagttggataaaacattcagtgctaatgaacttcagttaagtcggcaagatttatcccttcttgagagggagatcaagatggcgtatggtaagttacgaatcactccatttacacttgaggctagccctactgttggctatattcaacaaaataagctatttgattatctaaacgcattgtcgtcttatgatgactggattttaccgcatccaaaatcagcagagttatatgacacattacttagggttagcagtaagctacagcagtttggtatctacatcccaactgaaaactatccactcgattatatatgcctaataacaaagaagtggattaagggaaaaacattaaaggatattataacagaacaaatcaattggaatagagccaataaagagcaagcaacgagcgtgaacacatcagttagaaatgtaataaaggttatcaataacgacataacctttcgtctttcaaacgcactacgctgctatcaagtattgctttcaacagtattgttgaataaaggggtagacttatcaagcgtaaaacttcactcattcatagaggtcggcgccagtgatgacagaataataagtctaattaactttggtttatctagagaggcggcaattgaaattcatcaagtgcttccaagagatattgagttacattcaacaaatgctcttctagagctttatcatactaaccagatgtcaaccattcatccaataataaagaaggaattacttaagttgctagcttctgaatga

SEQ ID NO: 58988 - DNA, 1617 bp, Aeromonas allosaccharophila
atggaatcaaacgattcaggcggtgtagccgccaagcatggtttcctatttcaggactgcgtagccgcttaccatgtcacccgaatgcttcgtgacaagaatatccgaagcgtccgctgtgaggtcacagacgatatcgacattgtatctgacgatcacatcaacttcgttcaagtaaaaagcaccgataaatcgctttggagtacagcgcaaattacaaaggactcaaagggtgtcaaaaacaagacaatcccctgcagctcgattttgcacaaatcgatgcagtgtgagtccggcgtggccttgggtcgcaggcactccatcgttacagaggaaaaggtcaacaaaactcttgagtatctgatgatcagcccaaacgcccggccaggtaagccaggcaggcagcaactgattgacgagctcaataaacgcacaggcaattaccagaccgcctcaggtataagcgttgcagattgggtcgatgcggccacttgggaggtttatcacaccctgcgcgagttggagctcctggggatcagaaatatacggatggcttctgaagatttgcatggagtcattctcagctctgaaaccgttgctgaagagatatggtgccgtatccttgataccgtaacgcgcaagggcgagcattctcgacgcatccatagtgctgatgacaagtcctattcccgaccagacctgcttgggtggttcaagttgcgtgtcgaggatgaccaggctcggtcaggccgcaaaatctacgtcaaacgggacttgcctcatatcctcactcgattcagagcacctatggcttcggcctgcgctaagcgtaaagggcaggttatgcatcagcagtattcgcttaagcaataccgctacaaacacatcgcggacaacgtctgccaatggttggatgaggtctttctcaggccaaaagaaatgtccgatattcataagctgacgctcgttgaaaagcgagagcggctaaagacgtccgtcttcaaatcgctccatgacgtcagtgaattcttggggcgagtgctgttgcacacaacgatccggcaacaccacgaaagccaacccataccctgcatgctgtacgtggaaaggcctggatccgagaaaattcttgaaaacgtgcacatcgttcgccgcgatccagaaggtgatcagctctggattggcttcagcgagttggtgactgatgtcgacattgccgtcagattgccggagatacgagatcggctgtacgaggacatttcggagtgcattgatacagcgcgcagaaagatcctcgacgttaaagacgatgactacctgcttcgccacgatatcgacgaaatcctcgatggcagccggcctttcgatgctcaccgcgatcgcttcacgttcgtcctattcgtgggctatgactcgcgtctgcttaccgatcctgaaacgccggggcacgaggatgatctggaaaaagaaactgcagcgctgttcgagaaattcgctgccgacctcattgaggactcgccgttcgcggatctttgcgtccacgtattcatctatcccgctccgagtcttgagcgattaacccaattggtcgaggacaaggtgagggaggtggtatga

SEQ ID NO: 58989 - DNA, 2184 bp, Aeromonas allosaccharophila
atgacgagggtctatgaacaggctaaacacagcctgctggaggatgacttctcatccttcaaatacctgtccgcgatcaacaggctattgtccaatcctgtctcgcatgaccagggacgagacttgatcgtgcgcgctctcgatgcgcgcgagcggttttccgaccacaccaccattctgaaaaacatggtgagaaaatcaggtctgtttccttacttgaaaaaggaattcgccaacctgacgcctgatgacctcagggtgcttgatctgtaccggacgccgttctcggacagcttcgttttccattcgatgcagttccgcatattcgatctgctcaaggccggtaaaaatgtggttctgagtgccccaacgagcatgggcaaaagcgcaatcgtagactcgctgcttggtcaaggcactttgaagcggctcgtcctggttgttccgaccgtagcacttgccgacgaaactcgtcgccgattgcaagagcggttcggtgaccgataccaaatcattcaccacagttcccaagagtgccattccgacctggcggtctacgtgctaacgcaggagcgggtgaacgagcgaggcgacatcgtcgacatcgacctcttcgtcattgacgagttttataagctggcattccgggagctcaaaaatggcaccgtggattatcaggacgagcgagtcatcgagctcaacatcgcgctaagcaaactgcttaaagtatctaagcagttctacctgtctggaccgttcgtcaacagcattcgcggtctcgaaagactcggatacccacatacgttcgtttccaccgacttcaacacggtcgcgctggatgtccagacgtacaacattaaagcgaatgacgatgaggctaagatcaacgcgctggcagagatcgcacgtgcatgtgtaggcgcaacgatcatttactgcaagtcgccaactgttgcgggcttagtggctcgtgagctggtaaggctcgggcatgggactccgactgcgagtcctcatatcgattggatcagcgaagaattcgatgccgattgggattacacggttgctctcaagaacggaattggcttgcattttggtgcactgccgagggcactgcagcaatataccgttgaccagttcaatgctggaaaactgcgtttcctgctctgtacctctacgatcattgaaggtgtcaatacggttgccaagaacgtcgtgatatatgataaccgcgatggcattcgcagcatcgacaagttcacccatgggaatatcaaggggcgcgctgggcgtatgggcgttcacttcgttggcagaatattttgcttggaagaaatacctgaagacaacctcaatcaagaggtggagattccgctcggtattcaggacatcgataccccgctcaatctcttggccagtgttcagccagaccatttgtccgagttttcacaggatcgctttaatgaggtcttcgcaagcgaccgcatttccatagaccttgtgaagaagcactcatacttccgtgtcgagcaattcgaggagctacaacgcatggtggagatgatggacgacatcgaattttcctcgctggtgtttcactggacccccgcgccaaacttcctcaagactttcgcaaaaatcattgccagactggttccccatacattcagtcgcaatggcgtccctgttaagcctacggatgtcatggtagccaaacttgctggctattataacgctgcaagcttttcggactatctgaaaaatcagatcgttcacgcacggcagtgggtatctgaaggggagaagcgcacgctttcctactccatcaacaatgatttgaagatcatcacgaataccttcggttacaccctgcctaaggtgctcagcttgatggaggatgtcgtcaaacaccatgcgttaaagcaaggtatccacagcaagatcgattacacacacgtcaaattagtgttcgagagccaccatctaccaccaggtgttaattctctagaggagattggcattcccattcagacgttacaccgactggtagacttgctggaatttcccgaccaggctgatgtggatgagttgggccagtatcttcgggatactcaggacgtttggagtcgatcgataggatacgtggatcagacgttcatcaggcgcgcgatcggtactggatga

SEQ ID NO: 58990 - DNA, 900 bp, Aeromonas allosaccharophila
atggacgcttaccttcaaccacaattaaaaaaccatcaagaaataaaaaatattttaaaacaagtaaatgtaacgcatgttctgagtgatgggcgaaaagttaaaacgctattagtctacctgccaattaaaaatggtgttagtagccatgacgagttttttgaaaaaataaaaaatggcatattatataattttgttttttcttgtcgtgaaattgagaagaagcttggtattgaggacacaaatagcgcaaagcgattatttgatcgtgcgataagaaaaataagccagaaaacagcaaaaggtgaattaggagagctaatcctgtttactcttttggatgtttactttaaagcaccaaagatactaagtaagatatccttaaaaacaaatcctagaatgccagttttcggtgctgatgccgtacatggtcagtatataaatggcgaattcagattatatttaggtgagtcaaagctttataaaagttttaaaagtgcagcatcagaggcagctaaatctataaagactgccaaagataaatatagtgatgaatttgacttgttggaaagttacatggactttcctaatatagattctgaactagaagaaaagcttctaaatctgctagatccgttctctgaaaatgacatttcagaacttattcactccccctgcttcattggatttgctgagccggagatcattggtcaagcggttacagaggatgattttgttgtaaaatatagtgagctggctcttgcctatattggtgatttttatcatcaagttgagcatcatggctcgaacatagaagaggtagcattaatcatgcttccattttcttgtgtcgatgtattggtcgatgattttaaagcatatctcgggataaaaaaatga

SEQ ID NO: 58991 - DNA, 2502 bp, Aeromonas allosaccharophila
atgagtgacttctctactaagcttgcagctaaaataaaaggaagtaatggatatatagaggcaagcaatagtttgttcggatcatatgttttatggttaacaggaactaccgaactcgtagaaagagaggaagtaaaaaaacttataacatcagctcaagtattctataagtctagtgacgaaaaaataagaaatgaaggtgcaattatactttcaattttattagatatttgtgccaaccagtatccagacttagtccccatcgcacgaaatatgttcactaatgctggggattttccgaatatcaagctcttgagtaaaagatatcctagtgttaatttttcatacaacttttattcagaggctcaaatggatttcagagagcgtttgaatactgtcgacgacctcgattttcctttaactgactatcagcgctctttatgggttaatctatcttcagatgaagatattataactgttgcaccaacatctgctggtaagactcatattattctgagctatctattaaagaggctcgctgagtctgatggcgcatttgcagctatagtcgtaccgactagggcattgatttcggaagttgctgggaaactttataaattagcccaagataacaatgtagagaacgatattgaaatctgttccgtacctaaagaaggtgattttgggagcaagactttctttgtcatgactcaagaaaggctatatgagcttctacagcgtggtgatatatatttcaactatctatttatagatgaagcacacaatatctcagataaaagcaggggggtactactccaccttgcgatagagaggttgcttgaagatagcttcccccaagtaatcatcagcatgccagctgaaaactaccaagatgcattttctacaatatttggagagattgaattcaaaaaagaaataacaaaccactcaccagtgtcgaagattttaatatcggttatgccaaaggggaagtctttagttatatctaggcataattcaaataatgttaaaacaatacccaaaggattcaaggataaaaacttggcggatattgtatttaagttggggcatggacatagcaatataatatacagaagcagaactgctgattgtgagaaaattgcagatgacattgccaaactgattcctcaaaatcttgataatgaattgttgagtgaggctgctgactacgtagaaaagtttattcatagtgacttttcacttgctaataatctaaggaagggggttgcgtttcactatggcccattacctagctctattcgaattatggtagagaacctagctaaagatgatcatataaaatatatagcatgtacgagtacccttgctgagggtgttaatctgccagctaaaaatcttttcatgaagaatccaatacagccaataatgaatcagaaatcagagcgagttgaagatgtaaaaattaacaatatcacgggccgagcaggaagaatgctgcaacacttttctggcaatgtatttatggttcagcctgacgtttggcagtttgacgattattttgatgatgagcaaggcaaagaggaaaagataccaacatattttaaaactctaaacgaagacttatctaatgtcattagcgctcttcagggtaggtatcctcatgatgaagaaaaccaatatcgttactacatgatatctaataaactaatcaaagagtatgctcgggatgaattggataaaacattcagtgctaatgaacttcagttaagtcggcaagatttatcccttcttgagcgagagatcaggatggcgtatggtaagttacgaatcactccatttacgcttgaggctagccctactgttggctatattcaacaaaataagctatttgattatctaaacgcattgtcgtcttatgatgactggattttaccgcatccaaaatcagcagagttatatgaaacattacttagggttagcagtaaactacagcagtttggcatctacatcccaactgaaaactatccactcgattatatatgcctaataacaaagaagtggattaagggaaaaagattaaaggatattataacagaacaaatcaattggaatagagccaatatagagcaagcaacgagcgttaacacatcagttagaaatgtaataagggttatcaataacgacataacctttcgtctttcaaatgcactacgctgctatcaagtattgctttcaacagtattgttgaagaaaggggtagacttatcaagcgtaaaacttcactcattcatagaggtcggtgccagtgatgacagaataataagtctaattaactttggtttatctagagaggcggcaattgaaattcatcaagtgcttccaagagatattgagttacattcaacgaatgctcttctagagctttatcatactaaccagatgtcaaccattcatccaataataaagaaggaattacttaagttgctagcttctgaatga

SEQ ID NO: 58992 - DNA, 1566 bp, Vibrio alginolyticus
atgagtcttgatttaagtcgtctcctttcagttaaagtaattaactctgatacgggctcaggaagtggcgttatatacaagcgatctggttttgcttatgtgataacagcgaagcattgtatttgcccgaattccactcgtgtttgcaaacaaaaaaatagagaatgtagtaattgtcttctaacaaatagttacgctttcaagaaaacgaaaatatcaattgaaactcctgataagacaccttcaatatcactcaaacctaaagatatcttagcacctaagaacaaggacatcgcaattgttgtcgttaaagatcaggatttggatcagctagaagatttacccgagttatcgattgctgacaatagatatcttttagacgaaggtttatatgtttcttatggttacccatcagctacaagtagcattgaatcaattccggtgatatttgatttttgctcggcagtcggaacggagttgtatttcaagatcagttctaacactatcgctaacctagaaagtgcaaagtataatatggatgccgcttcaggaatgggagttttgtgtaataagacttctaagttagctggtatatatgtaaaaacagatgattatagtggttcatactctgagtatatagatgaaagcataaataccttattgtcagagaaaggatataatgtccttgatattaataatgaacatgaaaagctgaaatcacttataaccaatgagttcttgtcctgttttgaaaaaatagatcataacttaactcttggcttggaaagaaatttagacttatatactataaagtttaatggaaaatctattgactacaacaatctcattgaaagaatatatgaatgcctccaccttttctgtattccaagaaaagtgatacatgatttaaaattggctaagaaagagcgtcagttacataaaagtgcggataaggaatttatcgctttaaaaagcgatagtaaggtttttgatctaatgcttcaaggctttttagagtccgagtatggtatgcctaaattattcacgtcaatggtcggaaataaagatactaaaagtattcatgtcaatatcaataatagaagcaaacatgagttggtacatggcgtaagtcattttggtgatcatataaacgatgtgtttattgaagctgtcgataaactatatgactgtgcatgtaaaactgaaagtcctacggaattaattagctcaaatatatttgatagtacttttaacgaggaagataaactgtttcttacttcaattttgatgcctaaagaagaaaaaaaggctgtagaatccattgatagctatgcagttttaattgggtttaacgtgaacttttcttgtgtcaatggattggtagggcatgaaagttacaagaagcaagtgatagatttaattataaaaacagtatctgataatattagctcgctagctcaatctcttagtaaagttgatgctatagatacagagattaagattttctttattccatttgaaaatgtaagcagctttaaagatgatgttgttgagggtttacaatga

SEQ ID NO: 58993 - DNA, 2553 bp, Vibrio alginolyticus
atgagtagtaggtttggcgactttttagcggagagagtgatatccgacaattactttaataagctatttttaaaattagtggagtctcatgccaagtctactattgaaaaccagttttatctttcattggacagaagcttactgaaagatttatttagatttacacatattatttgcaattcaaaccgctccaaagatagaaccttagcatatcatattgtcgcattacttgagccattctgtaaggataatgcagagtaccgagttttgtataatacggttttatataagttagggctttttgcactagagattgatggccaaagcttgaatgatgataattatatagaactgtcagttaaaaagaaaataaataacattagtggtactaagtatgttttgacagatgctcaaaatgaaatatttaaaaaaatgagtcattcaaatgtctttagtttttctggtcctacatctttaggaaaatcattcataattgataggatggtcgagaaatctataagtaataatcgtaacgttgcgatcattgtacctagtagagcgcttataaaccaagttacaaatgagataagaaattcgctaaaagaattgcttaataagaatgaatactctgtgctaaataatatatccggtgaagaaaaagaagataggaattatatttttattttaacacctgaaaggctgcttaatttacatactaaagagaactcccttgaacttgatgatctatttgttgatgaagcgcataaattagcttcaagtggaagtgattcggagcgcagtttaacagaatataacgcaatcgagatgacgctggcaaagtacaaaaatataaaagtgtatttttcgtctcctaatatatcaaaccctagcgtttttctagagttgtttggtaaaaacccactctattcttatcatactgatgaagcgcctgtttctcagaatattttcttgatagatgttagaagtagctctttaagagtccttgccaatggtgattttattaatatcaactcagatctagttgattcgattagtaataatgatgattttataatcaatgttggaaagaaaaaacattcgaatatgatttattgctctcgtggagaaaccgcagtaaatcatgctaaagagtttttatctaagctagatgacattgaaatatctgatgaggtaaacaatgccattaaggcaatatctgaccttgtacacgaagactattaccttgttaagtgtctaaagaaaagagtagcttaccatcatggtaagttacctcattctgttagggggattgtcgaagagttatttagaaagggagagattaattatattttttgtacgccgaccctagctgaaggggtaaatatgcctacaaagaatatattcataatttgtgaagataaaatcagatacactaaaaataaagactcaaatagagttaagagcctaaatttttggaatttggcaggaagagcaggtcgttatcgctctgagctttctggaaatgttttttgtttatcatcagatactaaatcttgggataatgatctgtcgatattcaaggataagtccgttaacctagaaagcacaattaaaaaaaatattaagagccaagccaaactagttaaacttgagcggttactttcttctgataagttgagttctcaagatgtcgactccactattaggtatttagcaaatataatttgtatcgatacgttaagatttccaaaagagcttcacaaaagtaacactataaatatttttattaaggctaatcttcataggattgttgaactagctaaagctaaagcaaatgatattaaaaatgttcctttggaattgcttaactcatacaagtcgctagattttgctacccataaagatatctacgaaatagctagattccataaaaatagtgcagttttaccaccatttaattatgaaaactgttcttcagtgttaaataaatttcatagcatctacaactgggagaaaacagaaagtattaagaaacctcaaatatcctattacaataaacttatgtatgattggattagtggaaggtcagtcaatcaaatgattgttggatcaattagatatcacaaagaaaataataaaaaattatttatacgaaagggtaacgaagtaataacccctacctttgacggaagtctagagcatgtaaatatattgattgaagatttatttactgatcttgaagatgtcttgaggtttaagtttgaaagatattttaatcattacttcaaagcgcttgttagcgttaatggagaaggtgattctggaacaaactgggcgacattcttagaatatggctctacgaatccatttgaaatagagttacaaaatgcagggatatcaaggtttactgcaatcaatatctatagaaatgagagccttagaaagtatgtatataagagcaacgatgagttggttatagactacaaaaagttactcaaagcttttccagtcaactctttcgagtatcgagaattgaaggctatgtcactttag

SEQ ID NO: 58994 - DNA, 1566 bp, Vibrio alginolyticus; identical to SEQ ID NO: 58992

SEQ ID NO: 58995 - DNA, 2553 bp, Vibrio alginolyticus; identical to SEQ ID NO: 58993

SEQ ID NO: 58996 - DNA, 864 bp, Vibrio cholerae
gtgaagaatttatacaaaaggtttagcaaattaatatttaggtttgatgatgctgaaaaccttgaaggtgtggacaagcacccatatcacttaaattatgaaagaggtcaatatagagagagtgatcttgtaaaaattataaggggcgctctacctaaatttgctttaactcctgaagaatacaaaaaattagttgatgatgatgacctagatgaaatatatcgcttagcattctctagaatttctcaagctaagaagaatatgaaaggtgattatggtgaacttttactttttctaattttaaagtcattttatggggctgataagttggtaactaaagtaaagctaagaagttctgtaaaagatcagattaaaggctttgactgtgctcactttggaattgacgagttagggaatgttagcctgtggcttggcgaagttaagttttacaaatcattctcaaatgctgttacagatatcgttgaagaaattcatcagcacgtcacagatgattacctcaaaaatgaattttcaattctatgtccaaatattgaatataataacaatgtcgaaattcccgaagagattatagattaccttgacggtacagttacattagatgatgtaaaaatagtgatcccagcattggtaacatatgaaagtgcgttacttaaaaaacacagcgaagtagatgaagactttaaagaagcgattaagaaacaatttgaagataaattcagaataataaacgcaaaagaaataaaaatccccaaaaatgtagaggttttctttattcttctcccccttaatgatgtaacaagtataaaaacaaaacttgagacgtttgaggaagtatataaatga

SEQ ID NO: 58997 - DNA, 2229 bp, Vibrio cholerae
atgaaaataactgatgtattagcagagaaggcatacgatcgcattaaggagcatggatcaccaacaccctccctttggaaaaattataccacttcgaactacttaaaagacatatataaacttcttcagtcagagaaatattattctgagggtgtgaaaaatctttgttttgcttgtgatttagcgcctgtaggaaattttaacttgtctttgttgaagcaatgcattcaatcagcaagagtttttctctatcaagatatgcttaaatcaaatggtctagagtttgatgaggatacgattttcgatagctcacaaaaagcattctactctcttaaaagtgattttattttaaccaaagagcaaaaggatttgtttgacttattttcccaaaaaaggcgtttagttgttagtgctccgacgtcctttgggaaatctcgtgttatgcgagagattattacccataatcaatataaacaaattgtagttattgtacctactaatgcattattgagtgaaacttactttacatttagaatggatgagcgcctttcgaggtataacttaattttctcaacgcatattgagccgtccgacgataattcaatttatatatttacgcctgaaaagtttgatgtatatacagatgaatatgatattaactttgacttctttgtttttgatgaagtgtataaagttgatagtaaggatagtcgctcttctgttttttcaaattgtctatataaggcttataaaaaacaatgtgattactatttgataggtccatattttaataagtttagcgaatcatttattaaaaaaacgaacggttatttcaagagatatgatactgatatagtccaaaagatcatgaccaattatctctatgactctgaagctaaagtgtcaggtgtcagcttgaaaaagcttaaaggtaaagatactcgacttaagcaaataataaataatataccaggtcaaaccattgtatacgtaggccgaaaggatacagccgaaactagagcaagaaaaatagcagagttaacagataaagaggttagtaatagtgaacttaatgatttaatcaaatacattgaaaaaaacatttcaaaggagtggaggctaattaattgcctgttgaggggggttgctttccatcattctggcattcctaaatatattcaaaccgagattgttgaattatttaactctggagttataaatacaattgtttgtaccccgacattaactgaaggtgtcaatactacagctaaaaatgtagtattttacgatactacaaaggcggatatagatcttacaggttttgaggttaaaaatattgtgggtcgctctggtcgctctggtcgctctggtcgctctggtcgctctggtcgctctggtcggtttggtcaacactttgttggaagagctatatttttagaagagcatgttgatcagaataatattgatgagattaattatcccatttttgattacgaaaaaattccagatgaagattacattcaaattgataccgaagatttaggagttgagggtcgtaatcataaagagcgtattctacgccaagttgacgaactcaacataccgctatcattattaaagaaaaacaaatatataccttttgaaaaccaactggagttaattcagcactttaggtctaataaagatcttaagtctagacttcagataaaaagtggtttgcccgaaaagcaacaagtagatgtgataataaaactagtacatgaagttttattttcttcatctgatcgaaaggaggcatggactacagcgaacctttctagactggttaaataccaaatttatttcaacccatctattaaagatttgattttagagcatgatgcagttagagaagatacaagaataagaaatgttctggagttggtatataaatacttcgagtttttatttccgaaatatttaaatgcatttgaaaatatatttaattttgtttattccgatactttatccttagcattgatgtcaactcatcttcaatatggtaatgatgagaaatataatattttattgacagacgctggtgtgcctcgctctatcatatctcatctatcaaagtaccttgaggggcatgatacgatctcaagtataagaaatgtgattgaaagtaatccatcaatattaacaggattaactaatattgagttaaaaatgctctctaaacgtatttaa

SEQ ID NO: 58998 - DNA, 1452 bp, Vibrio cholerae
gtgagtacagaaatagttgaagagttcaaacttgattcgatttacatcattcaagctctactacccaatggcaacaccagaagaggtacttgcttctcaatttctgatgatttgatcctaactgcaaatcacgtagtgacggatgctacttcgctaaaagtgtatttatctagtgatgcttatgctgggggagaggcgattgacgcaacttgcatatacagtaacgctaaaattgatgtagcaatattgaaagttgaggaaggaaaaacaagtagctcaattgagctgtataggacagtggtaaatctagacagcaaggttaagtcatgtggttatccaatagagaaagggcattatcatgcgccgatcacggtagaggttacaaatacatttacacacatgacttcgaaagattggagttttgaggtttcacagtcaaatactgttagccagtataaaggaatgtctggctctcccgtactctatgatggaagatgtattggcatactactagttcaacaaggaaacaatactttatattcagcatcagctgatgatttgctgaaagatcaatcgatccatgaaattcttgacgctgctggaattcaaattgttgctcaacaagggattgagtacaaatctcccccacaccctgaatctccatttaactattgcattcattgcaccagtgatgttccaagtattaaaggtatcgatattggctttacctttgaacaatggaatatgactaattttactgaaacagtatataactggattattgattacagtctttcacatagagacagagcaaattttaacggaaatccacgaagcttatttaagtatgcaagagataactatccagcttctgatttgaatgttctaggtgacctttgcttgcatatcgctattagagagtcatattccactataccgataatgaatcgtgtatttgatcagaataacaagacattttcttgtactcatgccattttaaacttcgataacatagagctttggatcggagcatcttctgttagcaccaatattcaagatgctgtaaataaagcaattgataacataaactacattgcaagtttacaatctctgaaaactcgcttgtatgctcttacatcagagattgattcatcttggcctcataaaaacaaattagaaaggcttgctgactccagtctttctctagataaaagattcgacaaaatcgttataccaatattcatcatgcacgatagtgatcttataaccgattacgataaggaaaacttcttgagtgcctttgaagaaaaaatccatgaatgccgaggattgattcaaagtgggagtatcaatcaaggattcattagcttaatagacctaaaagtattttatttccctgtgtcgagtatcgaacaattgaatgaggcgttaatcaaggagttgtactcatga

SEQ ID NO: 58999 - DNA, 1713 bp, Vibrio cholerae
attgatgaacttaagaaaaagctattcaagtacaatcaacaatacaaagttataacccaagttactcaacaaccaagtaatagaaatatcttcatttttactcaagaaagggtattagagtataaacagttttctacaatagatttctttattattgatgaattttacaaactagctccaactagtaagaacgatgaaagatgtgatagattaaatcttgcattcagaaccttgtatgggaagtgtcaacgcttctatatgttaggccctaagattaatggattggtttctgggattacagaagaattgaggtgtacttttctgaagttcgattcatacgctacagtagcgacaaatgagtatttctatcctttagaaacaaaaggcaaggatgctgatgtagatattgaaagagatgagaaattatttgaaattttgaaagatattggtagagatgagcagactgttatttactgtaaatcccccaaaagggctagctcattgatgactcgtttgttaggctctgggctattaattcctgataatagaaataatgagttatctgaatggttatctgatagtttccacagcagatggtcacttgttgaaggagtaaaacatggtgttgcctatcaccatgctcagttacctagagcggttggtgctttgattgttgatctgtttaatgattctaaaatcaatattctaatttgtacttcgaccttaattgaaggcgtaaacacaaatgctaaaaatatcgtgatatacgatgattgcattaccagaaagacaaagttagatatgtttacttttaacaatatatcaggtcgttctggacgtatgtttgagcacttcgtcggcaacgtgtttattttcggtgagaggccacaaatagaattaccatacattgatgttccagtaataactcaaagtgataatgcatcggagtctctgttacttcacttgggagaagaagtgaacgatgagaatctgaacaaagtaagaaagttctatgatcaagatgttctcccagttcagcttcttcttaagcaccaaggggttgatcccaacaagctaattcggtttgcggaagatttaatcacaaagtgcggtgcttggaacaaaaaaatggtttgggaaggcatccatccaaatgctgaacaattacggcatttgtcaaaggttctattcaactactttaatgtgagttcaatgggggggggtactgttaggactgatgcacaactgtacagaaaattaatcgatattattaacaaagttgatgataaaacgctgattgttcaagattataatttttggagagatggtaatatagagtacactgttgatgatgcagttcaatccgtgtttaatttcaagaaaaatcttgtgaattacaatcttcctaaaatcatatatgcaataagtgatattcaagaagttattttcaaaaggttcgaatactcttacggagattacacaccattcgctgcatcactagaaaacttctatttacctgctgcgattaactctctagaggaattcggaattccgaaccaggtagctaagaaaattatagaacgtgctgagtttgaggatatcgataacatcgactccgtgattaaagagttatctagatcacgagatgcatcattctcttacttaactaattttgaaaaaacttttgtgataaaagcactttcgtatatgtaa

SEQ ID NO: 59000 - DNA, 1452 bp, Vibrio cholerae; identical to SEQ ID NO: 58998

SEQ ID NO: 59001 - DNA, 1713 bp, Vibrio cholerae; identical to SEQ ID NO: 58999

SEQ ID NO: 59002 - DNA, 1452 bp, Vibrio cholerae; identical to SEQ ID NO: 58998

SEQ ID NO: 59003 - DNA, 1713 bp, Vibrio cholerae; identical to SEQ ID NO: 58999

SEQ ID NO: 59004 - DNA, 930 bp, Vibrio cholerae O16 str. 877-163
atgaactttgacgtcttggttgaagatgactttctaaatatatgcactgatcaaagtctagaaccagtagaaaacaaatctatattatcattagctaacgactaccaagaaggaaaatggcggcacagtaaattccataattttgtctgggacaacattgcagaaacatctttatcattttcagaaagagagagcttaatagatcaatcccatagtaagttagttgcagctgcacaaagcctaagattaaccgattcagataaagatattggaaagggaagtgagttagctgagatcattctatatgggataatgaggcatcactttggtgcattacctgttgtgcctaaaatattttataaacagaactcacaggacaatgctaaaggtgctgatagtgtgcacattgtccttgatggtgaaagtgattttacaatttggcttggagaagctaagtttttcaatgatatttcagatagtagactaagtgatattgttaaatccgtaggtaattcactagtaactgataaactaaaacgtgaaaattcaataatcacgaatgtacgtgatattgaccatttaatctctgatgggaatttgcttgaagatataaaaaaagttcttagccaaagagagtcgatagataaaataaaaccaaaacttcatatacctatattgattgttcatgagtgtgaaattacagcaagtaacaatagatttactgatgaatataaaaagaaaattattgaattacataaagatagagcagttgcatattttaagaaacaaataaaatcactgtcagaaattgacatgtatgaaagcattacatttcatttaatattaatgcctgttccaaataagaaacaaatcgttgatcgatttgtaagtaaggttaagattttcaaagaggacgcagctgatgaataa

SEQ ID NO: 59005 - DNA, 2103 bp, Vibrio cholerae O16 str. 877-163
atgaataatgtttttgaaaatcttcatgatattaatgatttaattaaagctaatgaaattgattttgccagaaatgaagtgattaaattgttggcaaaaattgaaaaagataaacttgagtttccagaaccactcaatcattttatccgtgaagttgggttgtacccatatttaaatttggagaaagcaagctggcaggaaaagtttatacacgagtctttcaaggtaaattccggtgatgttgatgtaacattacataaagagcaatcagcgctactaaaaaaactccttgaaggtaaggatatagcaataagtgcgccaaccagctttggaaaaagctttgttatagattcgtttatagcaataaataaacctaaaaatattgttattattgttccaacgattgcactaacggatgagacgagaagacgactacaaataaagttttccaatagatataagataataacaacaacagatgtagaattgggtgaaaaaaatatatttatctttccgcaagagcgagctataaactacatcggaattttagattcaattgatattcttattgttgatgagttttataaagcaagtagaaaattcgataaagaacgttcaccatctttgctacgagcaattctaaagctaagtaagattgcaaagcaaagatactttttggctcccaatataaatcatattaatggcagtatttttactgttggtatggagactataagtttaaactacaacactgtttttctggaaaagaaagaagtttataaacaaataaataaagatgtttacactaaaagtgatgcattgatcgatatattgaaaaaggagaatggcaaaacactcatatatgcaggaacatactcaagtattaatgaggtttcaaatctacttattgatgaaatgcctcaaactgaaagtgaattgttagttggtttttctcactggttaataaagaactatgaccgaaattgggtgcttacaagccttgttaagcgaggctgcggtgttcataatggtcgcttgcaccgttcattgagtcaaatacaagtcaagctctttgaagaaaaaaatggcttgaatagattgttatctacctcatcaatcattgaaggtgtaaatacatcagctgagaatgtcattctttggagaaataagaatggtacatctaaccttaatgacttcacatataggaatatcattggtcgtggtggcagaatgttcaagcacttcattggcaatattttcttgctagaagagcctccgaagcaagaagaaaatcaaatagacttggaatttagtgatgaactagctgctagtatcgatgaaaaacaattttctcaagaattaacaaaagagcaaattacaaagataattgcatataaagaagaaatgtcagaaatattaggaaaggaatcttttgagcgtctgcaagaaaaacatgcattcgatgatactgatacatctgtaatcttgcgaatatcaagggcactcgatgaatcaccaaacaacttcaaaggacttggataccttaattctagcgatcctgaacaatgggaatactcacttttaaaagtccttgaagttataccaggctatattggtgcaccatacagaaaatttattgagtttattaaagttatctctcaaaactggagtatgaactttcaccaactattgaatcggttagatcagtaccatattggtatagatgaattttttgaacttgagagaaaagctacttttaaactttcatcgctattaaatgaaataaatataatacagcaagaactttacccagaacgatcaattgatatatcttcatttgcttctaaagtttcacatgcatttcttccaccaaatgtatatactctcgaagagtacgggcttcctagaatgatttcaaagaaaattaatgagtcaaaaataattgatttagaaagtgatgaatttagcattcatgatattttagatttatttaataaacttggatatgatcaaatggtccaaagagttgtggatttggattatttcgataaatatatcttaaaacatttttatgaaggcatttacaccccagggaaatattaa

SEQ ID NO: 59006 - DNA, 1410 bp, Vibrio parahaemolyticus 50
atgggccaaacggctatggatcaatctgatagtggcggtgtcgctgcgcttaaaggttttacttatcagaacttagcagctgcttattatgttctcaacatgcttcgagataaatcactaatatccgtacgctgcgaagttgtagatgatattgacttggtgtacgacaacaaaatcgaatacgtccaagtcaaaacaactgacggtgattctaaatggtgtatcaaagattttgctgaagctactactaaaaccgttcctcctacggggcgtcaaagggtcaatcagactatcagtcaagaagactcaattctgcataaatccatccaatgcgataaagataaattaccaggcttctttaggatgttgacccctagagaggtcaccgattctcttcgataccttaaggtcccattaggtgatcgaggtgagaaaatccaagaaagaggaccgctgttaaaaagactgacagctgccgtcaatcgccatcgcaaaaaactttcgccgttttcctctccgaacggaaatgacactgaatactggctagatcatgcagagtggaccgttattccaaatcaagaacaccttgagctactttgcacaaagctcatcctacaatcagcccaccagaagggtatttacttaagtgcgaatgaagaccctgagcgtattcttgcttcgttgctaaaaaacgtaacggataaaggagcaacttcgagggtacttaagaccatagcgaataagtcttaccacagaaaggatttcatcccatggtttaatgctgaaattgagcattatgcaaacctcagtagtagccatgtaaaagtgtatgcaaccagtcgtgctgagctaaaggctattctttcatcgtttttccatgataaagagatgtatgagcttgtgggtgacaaatcatgtactggccttcatgggcagtatcatcagagaaaatacagctataacatcattgctaagaacctgcaccaatggctacctgaagttctgttactgccaggggaaattgcagacaataccccagaaaaccttacgagaaagttttcgacctttacaaagaggtacagtaaaaacgcccattttatcagcaatctagtttcgaaggctttattacattctacgatcagaactgagtataaatcgcaaccaatagcagcagtgttacacatcgatgatgcccaaaagacctgctttgataatgtacatattgttttagaagaccatactccagataagctaataatggggtttagcgagcttattggtactgatattgaagagtcactagctgaaattgtcactaactttaatgacctaatcgaatcggaagctttttcaagccagaaagaaaaaatactatctgcaaaaatagctacctacttgaacacgatatag

SEQ ID NO: 59007 - DNA, 2157 bp, Vibrio parahaemolyticus 50
atggactctaacctaaaccctctactctgccttaacgatgttcaaaacgaacagttaagtgctttctcttatctaaaaaaagctagcgactgtttatcatctccacagttgaatgcgctgggtcgagagtttttaattcgagcattagatcagttgccactgtttgaaggccagagtgtattactacaaaatttacttcgaaaggccgggttgttcccatacatcaaaaaatactttcctactctatcacccgaaaaagaacttgtacttgatatatacagaagcaactatgacgacaatttcattttccactcaatgcaagctaaagtatttaggctactaacatctggacaaaacgttgtattgagcgctccaacaagtatgggtaaaagtgccatcgttgatgctctgattgcagagcggaagttcagcacaattgtcatcgtagttccaacaatcgctcttatcgatgaaactaggcgccggattcagaaaaaatttggccacgaatttcaaatcatccatcatggttctcagctaaaacgtaaagataaagtcatttatatactgacccaagaacgggtcaatgagagagatgacttgcgcaatatagacctattcattattgatgagttctataagttagcatacagcaacgatgagccatcgcgggttattgccctaaacatagcactaagtaaactgctcactatctccaaacaattctatatgatcgggccatatatcgatgctattcgaggaatggagaacttaaggtgtgactacacattcatcccttccgagtttaataccgtagctctaaacgttcacaaatatgacattgctgcaaatgacatcgaaagcaagaatgaacagctgactaagattgtagaaaagcaccaagaacaaactatcatttactgcaaatctgcgacttcaatagcacaggttgctcaattccttggcaccttagaaagcgtgaaagacagaaaacttgggccacttaggaaatatcataaatggttagtcaataactatggtcaggattggacctgctccaaggcattaaccaacggcattggcattcatcatggcgccctccctcgtgctattcagcaaaagtctatcgatttgtttaattcaaagcagataaagtatttgctttgtacctcaacaatgattgaaggggtaaatacagcggcaaaaaatattgtgatttatgacaatcgcaaaggttcaccatcaatcgatagcttcacacacaaaaacatctcaggtcgtgcagggcgaatgaaccaataccttgttggtaatgttttctgccttgaatcaattccggacaaagaggctcaagtagtagagcttcccttaggtcagcggaacgataactcaccaattaacttgttggcaggaattcagccagatcatctatctgaccaaagcaacctaagtcttaatcaatttgtgaaattgtccgatgtacctatagagatcatccgtaatcattcgtcttataaggtagaagtcatttccgacgcatacgaactaataacagaactatccgtttctgatatggaactactcgctacaatgactaagccaagaaagtatcatctaggattgctttcccgctttatcaaaacagttgagagtggcgcactcagtaaagttagcctccacttctacgacaatgatgaccttcaaaaccgattgagttggtatatttatgctgacaaccatagctcatatataaaagaccggattcgctatatctacagatcacgagaggatgagaagtcacgatctgaaactaccgataaagaactgaaaattgcgagaaacatttttaaacacgctgttactagagcattactcctcttagaagaactcctcaactatgaaatgatgaacttagacattccacataaagcagatctaggttatctagttcatttgtttgaaaacagccacttaccaccgtcattctcagcattagaagaaatggggattcctatagagactttagaaaagctcactactgagcgatcaagcgaagcaagcattgatgttctcactaggtatttacggatgtaccataaacatttcactaagctaagctcgatagatcatagctttatcaagcaagccgtttattag

SEQ ID NO: 59008 - DNA, 1410 bp, Vibrio parahaemolyticus VP2007-007; identical to SEQ ID NO: 59006

SEQ ID NO: 59009 - DNA, 2157 bp, Vibrio parahaemolyticus VP2007-007; identical to SEQ ID NO: 59007

SEQ ID NO: 59010 - DNA, 897 bp, Vibrio parahaemolyticus UCM-V493
atggagcccgtattaaaacctcaactatccaatgcggatgaaataaagagtattctaaaagagttaccaacaactttttgtctagaagatggccgtcaggtgaacacgttacttgtttaccttccttgtcacgaagatggaaaagctagcttgtctgagttttttgaatgtatcaaaaatggcatcctacaaaactatgtttttacatgtaccgaaattgaaagaaagcttggtaaaagcagtgagactgcgatggacgaactctttaacaaagctttaagaaaaataagtaaacatacagcccaaggagagcttggtgagctaattttgttcacattacttgacgtttacttatcagctccaaagatactcagtaaggtatcgatgaaagatagagcaactatgcctgtatttggggcagacgccgttcacgctcaaatggttgatgggagctttagagtttacttaggtgaatcgaaactttaccaaaagttcaaggctgcggcagcaagtgcagcctcctcaatcgaaagtgcaaaagaaaagtttggggatgagtttgacctcattgaaagccatatggacttccctaatttagacgatgaacttgaggaaagaatactagatgctcttaacccttatacatcatccgatagtattcagcatattcactctccttgcttcatcggctttactcagccagacattatttttcaaaacgattccgactacattggttcatatgagaaagtagctaatgagtacatcaacgacttttttggaaaagtacagaataagggccttgatgttaatgaagttacactattaatgttgccatttacttgtgtaagcaagctggtcgaagaatttattgcttacacaggaatatataaatga

SEQ ID NO: 59011 - DNA, 2499 bp, Vibrio parahaemolyticus UCM-V493
atgaatacgttagcagataaggtaaacataaagatttcttcacaccctgagtttagtaaggataaagaaaccctattcaatgtttacgtgggttatcttttaggaaacgaaatagagcttgataggaacttcgtaaaaagaatagtttctgtgattcaatactttgggaagtctaccgaacaagaaacaagaagagaggcagctatttttctggctatgctacttgatgtatcgggagagctgtaccctgagttagtacccattgctaaaagcatgtttattgattcaggggattttccgaatatttctcttctagagcaccgttatccagatgtaaagatggatttagggttttataacaacgctaggtttgagtttaagaaaaatctcaactcggttaaagaacttgacttcccattgaccgattttcaaagaatgttgtgggagaatctagagtctgacgaggatgtcctcactatcgctcctacttcagccggtaagactcatataatattgacatacttagttagagaggtatctgaaagctccaacggtgctttcgctgcaattgtagtcccaactcgggcactcatttctgaagtgtctggaaaagtttacgaaatagctaaaggttttggacaacacgaaaatatcgaaatttgcacagttccacgagatgacaaagaatttagcgataaaacgatctttgttatgacacaagaacgactctacgagctaatccagcgaggagacctaagcttcaactatttattcatagatgaagctcataacatttcagataaaagccgaggtgtacttctccatttgaccttagagaaactgcttgaagacagttttcctcaaatcattattagtatgccttcggaaagctacaagaacgcctttagttcagtgtttagcgatattgagttccacaaggagataacaaggcactcgcctgtcgcaaagataataatgtcagtaaaattggttggtagaaacatagagatatcgagtaaaaacctaaaccatactgtaactataccaaaggcttttacaggggttaagctagccgacatagtcttaaggcttggtaaaggacaaagtaatataatctacagaaataaaactaattactgtgaagatactgcaagggacatagctgagcgcatcgatgaatttaatgttacagataacctcgaagaagcggccgattatattgaaaagttcatccatgaagaatttagtctggcaaataacctaagaaagggagtagctttccattacggccctctaccaagctctgttagagtaatgatagagaatttagcgaaagatggagaagttaactttattgcatgtactagtacgttagccgagggcgtaaacctaccagctaaaaacttattcttacaaaacccaatacagaccgttgttggaaaaccatctgaacgcttagaagatgtaaagctcaacaacatcacaggccgtgcaggtcgaatgctggaacacttctcaggaaatatctttctcattgatcctgaaagctggacattcaaagattactttgaagacgatgaagacgaagaaaacaaactacctacatattataaaacccttaacacagagcttactggagtattacatgctctgtctggtacatatccccacgatgagtctgatcaatataggttttataccattgcaaacaagctcattagagagttctctaatgatggactagaaagcaccttaggctcgaaagaattatctttacaagatgatgatgttgagttgctattgaaatcagtaaataaagcttacaggtcgctaagagtagcaccgtttacattagaagctaatccaactgtcggttatatccaacaaaataaattgtttagcttcttagatagtattgaagacttcaatgattggatactaccacatcccaagtctcctgatttatatgaagtactacttagagtagcttttaaactaaatgaacttggtgtgtatattaatagtgatgaatatacaatcaattatatttgtgtcatttcatctaaatgggtttcaggaaaaagccttaaagaaattataacagaacagattgcatgggataaagataataccgattctagcaatgttaacaagtctgtaaggaacgttattaaggttataaataatgatataaggtttaggcttagaaatgctttaagctgctatcatttgctactcactaataaaatgaatcagaaaggtattgacaagacaagtgtaaaattacatacctatctggagatcggtgcttgtgatgagaacatggttaaccttatcaatatggggctctcaagagaagcggcaaacgagatagaagagttgttaggaaacacctcaaggatagaaacaatataccagttattagagatgctcgattctaaacctcttaatagcctccatccagtaactaagagagagataagaatgctagctggctag

SEQ ID NO: 59012 - DNA, 1563 bp, Vibrio parahaemolyticus
atgagtgttaattttgcagatcagttatctgtcagagtaatttttcgagataacaagcgaagtagtggttttgtttatcctacaagaagtcatacatatgtttttacggcaaagcatgcaatttgtggtgatgaacctgacgattgcaagttcaaggggcgtatgtgcgacacatgcttggtaaagtcggtaccaaaaaccaaaattaaaatagacaaaccagatttccctggtttcaaaacaaagcgtgtcgaaaaagttcttcaatcgaacaataaagatctagctgtgttggttttaaaggataaggaccatggaacctttggtgctttgccaaccgtaaaagtttatccgttcaacgaggttcgagagaccgatagattcatatcatgtggttatccatcaattggttccaatgagtcaatacaaccaatttactattcagactttagtacttttagaggcagcaaactttgctttaaaattacaaatgatgttacttcgaatttagagtgctccaaagagaatttatcaggaaattctggttctggtttgattaaatatgataattccaatgcattacttttaggaatatatacagacacctcgaacatggctgtttgttatggagagattattgatcatactgttaacgaactaataactagcaacggatatcctagtctagaaatagacaatgtgaacaaggcgtttaaaaccctaataaaatcagagtttactaagtgcttttcaaaaatagatcataacataaacatgcccgataatagggaaataaatttgtttcgactttctttagatggcaaagaatacaactatgaaaaaataaaaagccgcctgattgattgtgttccattatttacgttaacaagaaagcaaataacaaaatgtcgtgagaacaatgagtttggcagctcaacactaagaagcgtgaaagagtttttacaaatagagggtaacaataaagtccctgagttgttgcttcaagggtttctagaagcctacttacacgctcctaagctttattctgcgcatcagaatgaagctgcgacgttccaaggtgctcatatcaacttttcggactcaaactctttagagatcatacattgcttagctatggtatcaccttcgctcgaaagttcgtttaaaactgctatgaaacagatactagaaaactttcctaaacttaagccttttggtggtttgatagataatggtttactagatagccattttagcgatcaagaaaatgaagtattaaagaaaattttaatcccttctaaagaaagtgaatctttagagtacgaggatagattagctatatttattggttatgatcgccaaattgaaaaagatttggtttatatgcaacttggagagtttgccaatgagttggatgagagaatagtgagtgatgtaaggaattcaatagagtctctaaaatcagagttagaagagattaatgtagtaaatgcagtgatcgattgttttttcgtaccattgaaagtacggagaaattcaataatgaatttattaagagtttaa

SEQ ID NO: 59013 - DNA, 648 bp, Vibrio parahaemolyticus
atgaaaagtttaggtctatatctctatgaagaaataatgtcaaacggctattttaaaagtatatttgaacgtctttctaaatcatattctttactactaatagatggagtttataattatcctttgacagaaaaagaagaaaaagatctgtttagatttgttgatcttttagctagtacggaagagcagtccgctaggatgaaagcatatcatgttattagcttactagatgcatttataggtgatagtgaaagatttgaatatattgcatcatcagtctactcaaagcttggattatttgctcttgactttgacgaaaatatacttccatttgatagaaggtttgaggttgctactaagaagtcctcacagaagtttgatgaaaggtttatttttacagactcacagtatgaaatatattcaaaaatggttaaagcaccacattatagttttagtggtccaacttctttaggtaaatcttttataattaagagatatattgaagagataataaaggtgtcaaggtcaaatattgttattttggtgccgagtaaagctctcattaatcagttttctttagaaataaagagtgagttaaaaagtgttttacatgaaaaaaagtattgtgttttaactatggtaatttag

SEQ ID NO: 59014 - DNA, 897 bp, Vibrio parahaemolyticus
atggagcccgtattaaaacctcaactatccaatgcggatgaaataaagagtattctaaaagagttaccaacaactttttgtctagaagatggccgtcaggtgaacacgttacttgtttaccttccttgtcacgaagatggaaaagctagcttgtctgagttttttgaatgtatcaaaaatggcatcctacaaaactatgtttttacatgtaccgaaattgaaagaaagcttggtaaaagcagtgagactgcgatggacgaactctttaacaaagctttaagaaaaataagtaaacatacagcccaaggagagcttggtgagctaattttgttcacattacttgacgtttacttatcagctccaaagatactcagtaaggtatcgatgaaagatagagcaactatgcctgtatttggggcagacgccgttcacgctcaaatggttgatgggagctttagagtttacttaggtgaatcgaaactttaccaaaagttcaaggctgcggcagcaagtgcagcctcctcaatcgaaagtgcaaaagaaaagtttggggatgagtttgacctcattgaaagccatatagacttccctaatttagacgatgaacttgaggaaagaatactagatgctcttaacccttatacatcatccgatagtattcagcatattcactctccttgcttcatcggctttactcagccagacattatttttcaaaacgattccgactacattggttcatatgagaaagtagctaatgagtacatcaacgacttttttggaaaagtacagaataagggccttgatgttaatgaagttacactattaatgttgccatttacttgtgtaagcaagctggtcgaagaatttattgcttacacaggaatatataaatga

SEQ ID NO: 59015 - DNA, 2499 bp, Vibrio parahaemolyticus
atgaatacgttagcagataaggtaaacataaagatttcttcacaccctgagtttagtaaggataaagaaaccctattcaatgtttacgtgggttatcttttaggaaacgaaatagagcttgataggaacttcgtaaaaagaatagtttctgtgattcaatactttgggaagtctaccgaacaagaaacaagaagagaggcagctatttttctggctatgctacttgatgtatcgggagagctgtaccctgagttagtacccattgctaaaagcatgtttattgattcaggggattttccgaatatttctcttctagagcaccgttatccagatgtaaagatggatttagggttttataacaacgctaggtttgagtttaagaaaaatctcaactcggttaaagaacttgacttcccattgaccgattttcaaagaatgttgtgggagaatctagagtctgacgaggatgtcctcactatcgctcctacttcagccggtaagactcatataatattgacatacttagttagagaggtatctgaaagctccaacggtgctttcgctgcaattgtagtcccaactcgggcactcatttctgaagtgtctggaaaagtttacgaaatagctaaaggttttggacaacacgaaaatatcgaaatttgcacagttccacgagatgacaaagaatttagcgataaaacgatctttgttatgacacaagaacgactctacgagctaatccagcgaggagacctaagcttcaactatttattcatagatgaagctcataacatttcagataaaagccgaggtgtacttctccatttgaccttagagaaactgcttgaagacagttttcctcaaatcattattagtatgccttcggaaagctacaagaacgcctttagttcagtgtttagcgatattgagttccacaaggagataacaaggcactcgcctgtcgcaaagataataatgtcagtaaaattggttggtagaaacatagagatatcgagtaaaaacctaaaccatactgtaactataccaaaggcttttacaggggttaagctagccgacatagtcttaaggcttggtaaaggacaaagtaatataatctacagaaataaaactaattactgtgaagatactgcaagggacatagctgagcgcatcgatgaatttaatgttacagataacctcgaagaagcggccgattatattgaaaagttcatccatgaagaatttagtctggcaaataacctaagaaagggagtagctttccattacggccctctaccaagctctgttagagtaatgatagagaatttagcgaaagatggagaagttaactttattacatgtactagtacgttagccgagggcgtaaacctaccagctaaaaacttattcttacaaaacccaatacagaccgttgttggaaaaccatctgaacgcttagaagatgtaaagctcaacaacatcacaggccgtgcaggtcgaatgctggaacacttctcaggaaatatctttctcattgatcctgaaagctggacattcaaagattactttgaagacgatgaagacgaagaaaacaaactacctacatattataaaacccttaacacagagctcactggagtattacatgctctgtctggtacatatccccacgatgagtctgatcaatataggttttataccattgcaaacaagctcattagagagttctctaatgatggactagaaagcaccttaggctcgaaagaattatctttacaagatgatgatgttgagttgctattgaaatcagtaaataaagcttacaggtcgctaagagtagcaccgtttacattagaagctaatccaactgtcggttatatccaacaaaataaattgtttagcttcttagatagtattgaagacttcaatgattggatactaccacatcccaagtctcctgatttatatgaagtactacttagagtagcttttaaactaaatgaacttggtgtgtatattaatagtgatgaatatacaatcaattatatttgtgtcatttcatctaaatgggtttcaggaaaaagccttaaagaaattataacagaacagattgcatgggataaagataataccgattctagcaatgttaacaagtctgtaaggaacgttattaaggttataaataatgatataaggtttaggcttagaaatgctttaagctgctatcatttgctactcactaataaaatgaatcagaaaggtattgacaagacaagtgtaaaattacatacctatctggagatcggtgcttgtgatgagaacatggttaaccttatcaatatggggctctcaagagaagcggcaaacgagatagaagagttgttaggaaacacctcaaggatagaaacaatataccagttattagagatgctcgattctaaacctcttaatagcctccatccagtaactaagagagagataagaatgctagctggctag

SEQ ID NO: 59016 - DNA, 1569 bp, Vibrio parahaemolyticus
atgagtgttaatttagcagaccagttatctgtgagagttacttttcgagatagcgaacggagtagtggttttgtttatcctacaaacagccatacatatgtttttactgccaaacatgcgatttgtggtgctgaacctgatgattgtaagttaaaaggacagacttgtgatacatgtatcgttaaatcggtaccaaaaactaaaattaaaatagataaacctgacctccctggttttaaagtaaaacgcgttgaacaagttctgcaatcagataataaagatctcgttgtattagtcttaaaaagcaaagaccatggtacgtttggtgctttgcctacagtgaaaatctatccatttaacgagatccaagagagtgatagtttcatctcttgtggttatccagcgatttcctctaatgagtttatacaaccaatccgatattcaggctttagtacttttagaggcggtaaactctgcttccagattacgaatgatgtcacatcaaacttagaatgctctaaagaaaacttatctggaaactctggatctggattgattaagtatgacaacacagacgcattgctgttgggaatatatacagataccgcgaatatggctatttgctatggggaaattattgatcatactgttaatgagctgataactagtaatggataccctagcttagaaatagaaaatgtaaataaggcgtttaaaactctgataaaagatgagttcacaaaatgtttttcaaaaattgagcacgatattgagttacctgataatagggaagtaaacttatatcgattatcgttagacggcaaagggtatgactatgagaaagtaaaaagccgcctgattgattgtgttccacttttcacgctaacaagaaagcaaataacaaagtgcagggaagacaatgcgtttggaagctcaacgctaagaagtgttaaagagttcttacaaatagagagtaataataaagtcccagagttattgctgcaaggttttttagaagcgtacttaaaggctcctaaactttattctgcacatcaaaatgaaacagcaacattccagggagctcatataaactttgcgagctctaactccttagaaatcattcattgcttagcgatgatatcgccatcgtttgaaagctctttccagaaagcaatgaaaaatatattggaagactttcctaaacttaaaccttttggtggtttgatcgataatggtttacttgatagtcactttagtaaacaagaaaatgaagtgctaaagaaggttctaattccatctaaggacaacgatactgtagattataaagatagattagctatattcatcggatatgatcgccaaattgaaaagcaactagctttcatgcaacccaatgaattcgcttctgagctggacaagagaatagttagcgatgtaagagattcaattgactctctaaaagttgagctagaagagcttaatattgttagtgcggtagtagattgttttttcgtaccctttgaaagtactgagacattcaataaagaatttattgagagtttaaaatga

SEQ ID NO: 59017 - DNA, 2556 bp, Vibrio parahaemolyticus
atgaaaaatctaggtttatatctttatgatgaaataacatctaatgattattttaaaactatatttgagcaactatctaagtcatatacatcacagctagttgatggcttatatgattacaacttgacagaaaaagaagaaaaagacctttttagatttgttgatctattagctagtatggaagagcaatctgctcgaatgaaggcatatcacattataagtttgttagacgtatttataggggaaactgctaaattcagatatatagcgtcttcagtgtactcaaagcttggcttatttgctcttgattttgacgacagtgaacttccttttgatagaaggtttgaggtagctactaagaaattttcacaaaagtttgatgagaggtatgtgttcacagactctcagtatgaaatttattccaaaatggttaaagcaccgcattatagctttagtggccccacttcgttaggtaagtcattcattattaagagatatattgaagagattgtacaagcgtcgaggtcaaatatcgttattttggtacctagtaaagcactcataaaccagttttctttggagataaagagtgagttaaaaaccatactacatgaaaaaaattactctgttttgactcatggcaatttagttacagaagacgatgatgagaagtatatattcattcttactccagaacgtctcttgagtctttactctcaaaaagttgatataacaatcgatttcttatttgttgatgaagcacataaactgtctaatagtactgatagcgatacaaggagcttaacagcttatagtgcaatagaaaacactattaataactatcaaaatgtcaaagtcgttttttcatctcctaacatttctaaccctgaagtttttcttgaactttttggtaaggactctaaccacacaactaaagtatctgagtctccagtagctcaaaacctgtatttggttgactttaaatttaacgaacttacattatttactagcactgaaaaatataaagtagaaaccaacatattcaatacttcacgtcaagcaaatgattttatttatcgagttggaagtaaacaaaaatctaatatggtgtactgttcaagtcgcgataagtcaattagctcagcgctcagtttttgtaaggacttcataaagcataaggtagttctatctgagaaacttaaagatgcaattgaaaaagtatcagcttatatacataaagagtattacctagcctattttttggaaaagagaattgcatatcaccatggtcaactccctccagtgataagaaatataatcgaagaattgtttagagatggtgaggttgattttattttttgcacaccaacgcttgtcgaaggtgtcaatatgcctacgagaaatatatttattaattgtgatagcaaaataaggttggttcaagaaaaaaacaagaacgctaataagtcaattgcattttggaacttggctggacgagctggtagatactgtaaagagttgtctggtaatatattttgcattcaaaatagtgagggagatcgttgggaagatacaagtatttttgaaaataaaaacacagagatatcaacaacaatcgatacgaaactttcgagcccaaaaagtcttaaagaaattgaaaaggctctttctgatgaaaattataactcaaaagaagtgagtaagcttgtagaatacttggcgaacttgatttccattgatacgattcgttttaataaaaatttgaatgatagctttctactcaggaagttcgtagcccttaaaaaagatgaaattcttgaacttgctaagcaaaagtctaaaaagattgaggatataccaatcgatgttattaatacttataaggctttgaattttgatgtgcaaagtacagtttactcatatataagtgacaatccagaaagaaaaaagttacctaaacttgattatgaaaatattttgtcgacattaaaggtttttaataatatatataattgggaagcgactgaaaaggacgatataaaaagtgaagctcaattgtcatactacgcaaccttaatgaataactggataaatggtaaaccgattaacgcaataatcaatgatagtttagccaatacttctattatccaactagagagaggcggcgctatcgtcgactttgagagagataatcctgaccatgtaaatcgtgttattgataaaaccttatataccatagagcgagtgttaacattcatctttgagaagtattttaatcactatcataaatgtttgtgctcggtactgggagaagagcaagctggtagcaattggtctacttttcttgagtacggttcaaaaataccaatggagataggcttgcaaaacttagggttatctagacacacagcacacaacattgcttctaggagtgagctccagaattttattcaaatgtcaccaactggtgaagtgttgggcattgagaagtcaagtttgctacagcggttaagccgaacttctattgagtataacgaaatcgttacttttgtttga

SEQ ID NO: 59018 - DNA, 1569 bp, Vibrio parahaemolyticus; identical to SEQ ID NO: 59016

SEQ ID NO: 59019 - DNA, 2556 bp, Vibrio parahaemolyticus; identical to SEQ ID NO: 59017

SEQ ID NO: 59020 - DNA, 1569 bp, Vibrio parahaemolyticus
atgagtgttaattttgcagatcagttatctgtcagagtaatttttcgagataacaagcgaagtagtggttttgtttatcctacaagaagtcatacatatgtttttacggcaaagcatgcaatttgtggtgatgaacctgacgattgcaagttcaaggggcgtatgtgcgacacatgcttggtaaagtcggtaccaaaaaccaaaataaaaatagacaaaccagatttccctggtttcaaaacaaagcgtgtcgaaaaagttcttcaatcgaacaataaagatctagctgtgttggttttaaaggataaggaccatggaacctttggtgctttgccaaccgtaaaagtttatccgttcaacgaggttcgagagaccgatagattcatatcatgtggttatccatcaattggttccaatgagtcaatacaaccaatttactattcagactttagtacttttagaggcagcaaactttgctttaaaattacaaatgatgttacttcgaatttagagtgctccaaagagaatttatcaggaaattctggttctggtttgattaaatatgataattccaatgcattacttttaggaatatatacagacacctcgaacatggctgtttgttatggagagattattgatcatactgttaacgaactaataactagcaacggatatcctagtctagaaatagacaatgtgaacaaggcgtttaaaaccctaataaaatcagagtttactaagtgcttttcaaaaatagatcataacataaacatgcccgataatagggaaataaatttgtttcgactttctttagatggcaaagaatacaactatgaaaaaataaaaagccgcctgattgattgtgttccattatttacgttaacaagaaagcaaataacaaaatgtcgtgagaacaatgagtttggcagctcaacactaagaagcgtgaaagagtttttacaaatagagggtaacaataaagtccctgagttgttgcttcaagggtttctagaagcctacttacacgctcctaagctttattctgcgcatcagaatgaagctgcgacgttccaaggtgctcatatcaacttttcggactcaaactctttagagatcatacattgcttagctatggtatcaccttcgctcgaaagttcgtttaaaactgctatgaaacagatactagaaaactttcctaaacttaagccttttggtggtttgatagataatggtttactagatagccattttagcgatcaagaaaatgaagtattaaagaaaattttaatcccttctaaagaaagtgaatctttagagtacgaggatagattagctatatttattggttatgatcgccaaattgaaaaagatttggtttatatgcaacttggagagtttgccaatgagttggatgagagaatagtgagtgatgtaaggaattcaatagagtctctaaaatcagagttagaagagattaatgtagtaaatgcagtgatcgattgttttttcgtaccatttgaaagtacggagaaattcaataatgaatttattaagagtttaaaatga

SEQ ID NO: 59021 - DNA, 2553 bp, Vibrio parahaemolyticus
atgaaaagtttaggtctatatctctatgaagaaataatgtcaaacggctattttaaaagtatatttgaacgtctttctaaatcatattctttactactaatagatggagtttataattatcctttgacagaaaaagaagaaaaagatctgtttagatttgttgatcttttagctagtacggaagagcagtccgctaggatgaaagcatatcatgttattagcttactagatgcatttataggtgatagtgaaagatttgaatatattgcatcatcagtctactcaaagcttggattatttgctcttgactttgacgaaaatatacttccatttgatagaaggtttgaggttgctactaagaagtcctcacagaagtttgatgaaaggtttatttttacagactcacagtatgaaatatattcaaaaatggttaaagcaccacattatagttttagtggtccaacttctttaggtaaatcttttataattaagagatatattgaagagataataaaggtgtcaaggtcaaatattgttatcttggtgccgagtaaagctctcattaatcagttttctttagaaataaagagtgagttaaaaagtgttttacatgaaaaaaagtattgtgttttaactcatggtaatttagttactgacgataatgagaaatacatatttattcttacgccagagcgtctcttgagcctttattctcaaaaggttgatattagcatcgatttcctctttgttgatgaagcacataaactatctaacagtactgattctgatacaagaagcttaactgcatatagcgcaattgaaaatacaattaagaactataaaaatgttaaagtggttttttcatctcctaatatttcgaatcctgaagtgttcctagagttatttggtaaggattctaagcatacaactaaagtttctgagtctcctgtcgcacaaaatttgtatttagtcgatttcaagtttaaccaaataacgttatttaatagtgatgatagatataaaatagacacagatgtatttaatacatcacgtcaggcaaatgattttatatatagagtcggaagtaaacaaaagtcaaatatgatttattgttcaagtcgtgagaagtcaattaactcagcacttaatttctgcaaggatttcatagtacgtgatctaactctatctaataagcttaaagatgctattgaaaagatttcaacttatatacataatgaatattatttagcttattttttggaaaaaagaattgcatatcatcacggtcaacttccaccagtaattagaaatataatcgaagaattgtttagagataatgaaattgactttatattctgtacaccgacgcttgttgaaggtgtcaatatgcctactcggaatatatttataaactgtgatagtaaaataagactagttcaagagaaaagtaaaaacgctaataagtcaatagcattttggaatttagctggcagggcgggtcgatattgtaaagagctttctggtaatattttttgtattcagaatagtgaaggagagcgttgggaagatacgagtattttcgaaaataaaaatactgaaatttcaacaacaatagatgctaaactttcaagcgaaaaaagtcttaatgaaattgaaaaagcactttcagatgaaaattataattctaaagaggttagtaaaattattgagtatttagctaacttaattgctattgatactattcgctttaataaaaacttaaatgaaagctttctactcagaaagttcgtcgcactcaaaaaagatgagattcttgaactagcaagacaaaagtctaaaaagatagagaatatacctatagatgttgtcaacacttataaatccttagactttaatgttcagaacatcgtttatgcttatatcaatgaaaatccagaaagtagaaagcttccaaagcttgactatgaaaatattcttgcgacattaaaggttttttatcgtatctataattgggaagtgaccgaaaaggatgatataaaaagtgaagcacagttatcatactatgctactttaatgaataattggatcaatggaaaatcaattaacggtataatcaacgacagtctggttaatacttcgagtattcaattaaggaaaggtgatcctgtagttgtttttcaaagggataacccagaccatgtaaactgtattattgatagaaccttatatacaatagagagagtactaacattcatctttgaaaagtacttcaatcactatcataaatgcttatgttcgatacttggagaggagaaagctgggagcaattggtctactttcctcgagtatggttcaaaaatacctatggagataggtttacaaaacttaggattatccagacatacagcgcataatatagcttctaaaagtgaactccaaaggtttgttcaaatatcatcaactggtgaagttctatccattgataagtcaaaattactacagcgattaaaccaaacttcaatcgagtataatgaaatcactacttttttgtga

SEQ ID NO: 59022 - DNA, 1449 bp, Vibrio parahaemolyticus
atgacagttggggcattggaagagtttaagctcgattctatatatattcttcagacttcattcgctgatggtgggacaaagcgcgggacgtgtttttctatcgaacaggatttactgcttacagcgcatcatgtagtaaaggatgcaacgtcagtacgagtgtttttgacgagtgacacttttgcggaagggcatcatattgaagctgaatgtatttacagtaatgtagctctcgacgttgcagtcctgaaagtgccgggtggtactacaataagttctttaggcttgtatgcaacgagtgtgaacttagacagtgaagtgaagtcttgcggttacccaatagaaaaagagcattaccccactccaatcaaagtcaaagtgacgaattcgtttgagcacatgatgagtcgcgaatacagctttgaggtttcacaatccgacacagttagtaagtacagcggtatgtctggttcgccagtgatgcatgatgaccgttgtttagggattttgttggttcagcagggcagtaacactctgtatgcagtttcagtgaaggactttctaggtgacgcgtcactaaaggaaattatggatgcccatggtgtaaacataacggttcaagatggcattggttataaagctcctgactttcctgcatctccatttaagtactgcattaactgcaatgcaggccttcccaacattaaaggtattgatatcggttttacgatgaagcagtggaatatcagtgagttcacggagactgtttacgattggattattgactactgcttatcgcataaacaaaaggccaattttaccggaggtagaagaagcctattcaagtacgcgaggtctcactatccagctgatgacttaaatgcactaggtgatctctgtttgcatatcgcgatccgtgagtcttactcgacaatcccagtgatgaacaaggttttcgatgtgaataatacgaccttttcatgtactcacgccgtacttaactttgacagtattgagctatggatcggagcatctgccgtcactactagtattgaagaagccgttaagtcagctattgaaagtgttgaatatattatggacataaagtcactaaaaaacagattgttcacgcttacctctgaaatagatgactcatggccgcataaagagaaactaaaaagactagcaaactcaagtttggatttggatgaaaggtttgacaagatcattattcctattttcattatgcacgatagcaaactgataacaaattacgataaaagcaatttcttggacttgttcaacaagaaagttgcaaattgtagagggttattgcaagcaggtgttaatgaaagcgtaattaacttgattgacttaagagtattctattttccggtgtcagatgttaatgacgtaaacggtgcattacttgaggagctaaattcatga

SEQ ID NO: 59023 - DNA, 1719 bp, Vibrio parahaemolyticus
attgatgagctaaagaagaaactatttaagtataaaggccaatataaaatagttactcaggtatcgcagaagcctagtgaaaggaatgtttttattcttacccaagaacgggttttggaatatggtagtttagattcggttgatttttttataattgatgaattctacaaacttgctccgataagtaaaaacgatgaaaggtgtgaccgtttaaacttggcatttagagaactatatgaaaaatgtaagcgattctatatgctgggtccaaatattaacggcttagtttctggaattgaagatgaattaagatgtacgtttcttaaatttgactcatatgctacggtcgcaacaaatgaattttactatcctctcaaaactacaggtaaagatgctctggtcgatgaggagagagatgagatattgaagtccatattgacttcgataggaagaaaagaacaaacagtagtttactgcaagtcaccaaaacgagttagttctttgatgtatcgccttttgagcgcagacttactgacgccagatgatgctaatgacgatcttgctgactggttggctgagaactttcacagtgattggtccttagttgatggagtaaaacatggtattgcatatcatcatgcccaactgccaagagctgtaggagctttaatagttgatctgtttaatgaatcaaaaatcaatattcttatttgtacttccactctaatagaaggggtgaatactaacgcaaagaacattgttatatatgatgactgtatcacaaaaaaaacaaaattagatatgtttactttcaacaacatatccggacgctcgggtagaatgtttgagcactttgttgggaatgtttatatatttggtgataaaccacaagttgagcttccttttattgatgttcctgttgtgactcaaagtgaaaatgcatcagagtctttgttacttcacttaggtgccgatgttagtgaagaaaatgaaggaagagttaagaagttctatgatcaaaaagttcttccaatgtcattattgctcaagcaccaaggtattgatcctaataagttgataaagttagcagaagatcttattacaaactgtaattcttggaatagattgatgtgttgggatagtatttatccaacgtctggggagttgcgacacttgtcaaatattttgtttaagcatttcaatatatcttctatgggtggtggtacagttcgttctgcgagtcaactgcatagaaaactattggatattataaacagagttgatgatagagaattaattatacagaactacgattattggaaggggcgggacaaatcttatagtgtagatgattctgtacaagctgtatttaattttaagaaaaacttagtcaactataatcttcctaaaataatttatgctgtaagtgatattcaggaggtcatatttaagaggtttgaatattcttatggtgactataagcctttcgcatcttcacttgaaaacttctattttccagcagcgataaactcgttggaagagtttgggataccaaatcaagttgctaagaaatttgtagagaataataaaaacaaaattgctgatatagatagtatagattcagtgattgaatttctgattgcttcagatgagaactcatattcatacttatccgaatatgaattgggctttgttaagaaagcactatcttatatatag

SEQ ID NO: 59024 - DNA, 894 bp, Vibrio vulnificus
atgggaagttcattgcaagctcaattgcaaaatccagataaaataaaagatgtccttaaaaaagtaccagtttcgttcaccttgtctgatggtagaaaagtcgagacgctgttggtttacttaccttgtatcgaggatacaaagacatcaaacgatgcgcttttggagtgtatcaaagacggtattcttcaaaactttgttttctcctataaagaaatacaaaaaaaattaggtagatcctctgatactgcgatggatgacctatttgataaagcaattaaaaaactaagtaagcacactgccaaaggggaactcggagagttgattttgtttaccctgttagatgtgtacatccaagcccctaaattgctcagcaagatctcgatgaaaaccaatcctaagatgcctgtttttggtgctgatgcggtgcatgggcagtttctagatgaggagtttagagtgtacttgggagagtccaagctacataaaaactttaaatcagcagcgacagatgcaacaagctctattgttaccacaaagggcaagtttgaagatgaatttttcttattagacagttacctcgactttccaaacttgaccgacgaacttgaagaaacaattttgacctatcttgatccatatggtgcagatttagaggatcgaattcactccccttgcttcattggttttactcagcctgacattatttttgaggatgaggcttcatttttgaaacactacaaagagcttgcttgccagtatgttggggattttttcagcaaggtggaaaaacaaaaactcaaaatagaggaagtgactttgttgatgctacctttcggatgtgttgacaagctagttgatgagtttatctcgtacatgggaatcacaaaatga

SEQ ID NO: 59025 - DNA, 2496 bp, Vibrio vulnificus
atgagtacgattgcgttaaagttggggaaaaatatcctctctcatcaaggttttgagcaagatagaaataatgttttcgcgcagtatgtagagcaacttgcgggtaataagccacacttagataggagcttagtcaaacgtctttcaacttctattcaagtatttcataagagtgaagatgaaaagttaaagaaagaagcgaccgctctgcttgccatgcttctagacattgctggtgatgactatcctgatttgattccaattgcgaagaacatttttattaactctggagattttccaaatgtctcattgctagataagagacatcctaatgtatatatggactatggcttcaacacttctacgaagtttgaattaaaggcagaaatgaactctgtagaggagctttcttttcctttgactgattttcagaggatgctatggagtgatcttgattcagataacgatgtaataactattgcgccgacatctgcgggcaaaactcatattattcttacgtatttagtaaataaaattgtgaagtcgaatggagcatttgcagccatcgttgtgccaactcgagcattgatatctgaagtctcaagtaaggtttttgaaatagcaaaaggaatagatgctgaaaatgagctagagatatgttctgtccctaaagatgaagagttcagtacaaagaccgtttttgttatgacccaagagcgtttatatgaacttattcagcgaggggatttgagctttgactatctatttattgatgaagcccacaatatctctgacgatgggagaggtgttttactacatttaactttagaaaaaattcttgacgatagttctccccaaattatcgttagtatgccttctgatagctatcaaaatgccttttctgctgtttttagtggcgttgaatttcagaaagaaatcactaggcactcaccagtagccaagctgttattagctgttgagttaaaagggaaaaatattgaagttcaaaggtataatacttctgataaagcaatcatacccaaaaactttacaggtagaaaaactgccgatgttgtccttcgactaggtcaaggtcaaagcaatattatttaccgaaaccaaaccaatcaatgtgagaatactgctaaagatatagctgatttaattctcgagtatgatacgccccccgctttagaagaagctgctgactacattgagcaatttatccataatgactttacactggcttccagccttaggaaaggtgttgcctttcattatggccctttgcctagctccgtaagagtgatggttgaaaacttggtcaaagctggcgatataaaattcatagtgtgcacgagcactcttgctgaaggggtcaatcttcccgcaaagaacctatttttaactaatccgtttagaccgattagagctcaacaacctgaaaagttagaagaggttaaaattaacaatataacgggaagagcaggtaggatggttgagcatttttctggaaacgtgttcttgttaaatcatgattcatggaaatatcaagattactttgaagagaacgatgtaaaggaagagaaaattcccacttattacaagacattaaatgaagaattgtcgttagttgtctctgctctgcaaggtaattaccctcatgataaagaaggtcaatatcgtttttatactattgccaataagctcattcgagagcttgagaatggtagtttagatgagcggttagatgcagaagagcttcagctaagttcttttgaaagggattatttagtaaaacatgttgaaattgctcgtaatgcattgaggatagcgccatttatattagaggctaaccctaccattggttacattcagcagaataatttgtctctgttttttgattctctcgacaattatgacgattgggtgttgcctcatcctaaatcgaaagacttatattcctcgatagttcgtgttacccaaaaactctatgaacttggggtatacacaaatggtgatggatattcaattgggcacgtttctgttgttgcaacaaagtgggtggcaggaaaaagtctgaaagaaatcatttcagagcaaattgcatgggataggaaagtatcagcaacagcaaatgtaaatcaatctgtacgtaatgtaattaagattataaataatgacattacgtttagattgaggaatgcacttagttgttatcatgttcttctaactaatagtatgaaactaaaaggaattgataaagcttctgtgaagcttcatacctatcttgagttaggggcttgtgacgataggatgataaaccttataaatttcggactatcaagagaggcagcaaaggaaattcaggagtccattcccaaaagtattgaagtgaagtcaatctatgacttactcactctgctcgagcgaggtttattatccaatacccacccagtaacacagaaagaggttaaattcttacttagtcagtag

SEQ ID NO: 59026 - DNA, 858 bp, Haemophilus parasuis 12939
atggactatcctaaaccaccagaaccatttttagaagttaaagtacatgatttaactgcgaatccaccagtagcagcactatgtgcaggttatgaaggtggaaaatggcgggcaactcaacttgctgcgcatgtaatggaatggcttcctgaattttgccttaatgcacaagaagtcagaaatttaaattcaagtaatgccttaaaaatgcttagaaaagcggctcgtcaagtatatcaaactgagaaacataaaaatcgcggcgagtttggtgagatttttttacatattgctttacgtcaaatttataactctattccagctattagtaagatttattacaaagactctgtaaatggtacagttaaaggttttgatgctgtccatgttataaaaaatgattcaaagttagaattatggctaggtgaagttaagttttatcctgaatataatagagccataaatgatgtagtaaaagagctggtagagcatacaaaagatgattatttacgtaatgaaaatatgtttatattaaataaaatagacgataaattttcattttatccagagctatctaaattgcttgatacaaatacatcattagatgatatttttgattgtgtttgtatccctatactaattacctatgatagtgaaacattaaaaaacaataataaaaggactgataaatttaatgaagaattaaaggttgaagttatgagaattaaccaaaaaatgtatgataaactttcgcagattaaattaccacctgtaagaattcatctatttttactcccgcttcaagataagtctatcttaattaatgcactggataaagaattaaaggacttacaatga

SEQ ID NO: 59027 - DNA, 2133 bp, Haemophilus parasuis 12939
atgatgcttaatattagtgaaattgaaaatagattaaaatcaaaagatactctatctcaaggtgattcatttcttattttgcaatcaatttgttcattatctaatgctgctagtgaagatgatagtaatagaattcaacaactgcttttaagagtgttggatcgaaaagatgagtttgctaatttggcagaagttattaatgatcttgtccgccattttggactttatccatatttagatatgaatttactaacaataaaagatgctattgctagagaattacataaaccagcattattgaataataatgcagaattgaatgatgaaggtattgttttccatagattacaagctgaagtctatcaatatttaatgaatggagagaatgttattctaagtgcaccaacaagttttggtaaaagtgctttgattgattctctagttgaaagccataaatttaataatatagttattgttgttcctactattgcattgatagatgagacaagaagacgattattttcacttcattctaaatacaagattattactcatgcttcacaagagttacaagacaaaaatatattcatattgactcaggagcgagctgtagagtttcctaatttaccaagatttgatctctttattctagatgagttttataagttagaccctagagatgattcagatagatcaatgatacttaatcatgctttttataaattatataagcagtctaaacaattctatttgttaggccctaatattcaaaatattcctgaagggctgcctgaacgttttaattgcaaattcataaaaacagattattcaactgttgttacggatcttattcgtgtaaattcacaaaatgataattatcaggagttaatagaattatgtaataaaattcaaggttcaacattgattttttgttcatcaccaaataaagcaagaaaaatcacacaattattagctgataattatatccaacaaggtgttggtttaccggaagctgctaagtggatagctgaaaaatatcatccagaatggactttagtaaaaggattaaaaaatggtattggtatgcaccatggaagaatacctagagcgatcgctcatatctgtgttaaaggatttaatgaagaaaaactaccgtttctagtttgtacttccactttgattgaaggagtaaatactaaagcaaaaaatataatcatatttgataataagatagctagaaaaaaatatgatttttttaccttcaataatattcgtggtcgttcaggtagaatgtttcagcattttatcggacatgtctatttattcaacgagccaccacaagaaatgttacctattgtcgatattcctgtgttttctcaagatgaaaatactaaggaatctcttttaattcagttagataaaagtgatataaatccagattcttggcaaagagtacaaaagtatcatgaacaggatattataagccttgatactctacgtaataattcaggaattgaaccgaaaaaacaattagatttagcaaggtacctatcagataatcctattgtcttagaagaaatatcatggaatagttatcctgaatatcaacaactgctaactttatgtaatttaatatggaacttctttattgaaggaaattcattctatggaattactactggaaaacaattaacatttaaaattaatcagttaagaaataattctattgaaaaaattatagaaagcgaaattaataataaaaatcctaagactcccgatgatgcagtcgaagatactttaaattttgtgagacagtgggctcaatttcattttccacggttagcaatggcagtttgcagaatacaaaatgctgttgctgatagattgggtatagataaagccgactattcttttttctgcggtcaagttgaaaacctatttttagatcccgcattggttgcacttgatgaatatgggttgccgttagctcttgctcaaaagctagaagataaaattaatagtaaaggttcattagatttagcaataaagaatttatctaatttaaatatcgaagatttagaactttcctcttttgaaaaagaaattcttgatgatgtgatgaaatcaatctaa

SEQ ID NO: 59028 - DNA, 936 bp, Chlamydia trachomatis
atgacagcaacaatcaccccaacactggcaggggcagattttgatgccatcttcactgaatgctcgcactcgtcatccctgcaactcgtgaaccctagccagttacgcctgttctacttggacaccattaacggtttgtttgattatgcagggctagaagaattcatccttgattgtctcggtgattatgttttttcacgtgccgaaatagaagactatatacagcgaggtaaaaccagaaatattggtttgtatgcgctacgcaggttaaggcagcagcaaaccgcaggacagattggttcagggtctgacttaggtgaaatcttgctgtacgtgttcctcgagaaaatacttggggcaccgaaaatcctgagcaagatagaactgagtcggacaggaggaacccagccaagtcgttgcgacgcgatccatcttcggccaccgaacccatcagagaacctgccatataacacgattgttttcggtacttctgaaatcgttgatgatatcgaagacgctattgatgatgcattcgagcgaattaaccacattcaaaccaatcagcgcaatgaagtgctgatggcagagaatatggtttttgagaaagtctttgatgatagaaccacccactacatcaaagacctcctgattccggcgaaaggcagaggaactaaacgcgatattggatatggtattttccttggctacaagctcggcctcaaccctttcgcgtattcttctggtggctttgatgcacaattggttgccaaaatgcggctcgatatcgcccagcacgctgacctgattatgcgcaaaatcaacgaactgaaccttgctaactattcgttctacatctacgtactgcctttaaatcttccctcgacagatcgcatagaaatcatgaaccatgtcctcgaccaagggggacagccatga

SEQ ID NO: 59029 - DNA, 2631 bp, Chlamydia trachomatis
atgaacaccctcggggatgccattttcagcgatatcaacgacaacgagtttctgaacgagctctacgacgatctgctctacaattacgggatattaaaattcccaaccaggcgagagcctaggccggtggatttagaagcagcgctacgctttgccgaccttctatccaaatcgaaccatccatacgagaaagagcatcatcgcacgtgggcgcaagaaattatcatcttgtgtgacaagctctatcctgacaacccgctggtgcgtatctacgccagctctgtatttacggctgtaggtaactatcaaggattgaaacttatcggaggtggcaacgtacccttaagcatttttgagcgcgctttttccggtttccaagaagactatttgcgtgtacccggcactgaagatcagatgttcttcgcgccgcaaaaacgcatctacgaccgcttgaaagatccagagttcagctactcggcaccgacttctttgggtaaatcgttcgtcatgcgaaccttcatcatcaaccaaatcaagcaaggagccacagccagctatgccatcttggttcccactaaagccctcatcaacgagacgcgctctaaaatcatcaacgacctgaaagagaccttggcagagagaaactaccgggtcatctccgcagctggcgatatcgccctggaaggcgaacacaacttcatatatgtgctcaccccagaacgtctgctctacctactcgtcgccaagccacacctcaaacttgactatctcttcatcgatgaagcgcacaaactctcaggcaagaacagtcgcgcaccgttctattaccaggtcgtcagtatgcttcacgaccggccaaaaccaccacgcttcatattcgcctcacccaacatcccaaatccgcaaacctacctccagctcgtggatgcagccatcgacggagacgaatcagctatcgccaccacctattcgcccgtcactcaattcaaattcatcatggacgcatccaagcaggaaatcctcgtctacaacgaccacgcgcaccacagcaccacaattgcaccgtatcaaggggcagatccactcaacaatctccttgccacgctacaactagccagtgccgaggatagagcagcccagaccgtcgtgtatttcccctcgaaagaaaaagccataaaagccgcgaaaaactgggcactaaaacagccgatattagctgatgatgaattagatgcactcgccgaagatattagtcgtgacgtccacgaccagtactacctcgttgaattagtacgcaaaggcctcgcataccacatcggctatctaccgccggcaatacgccagcgaatcgaggatctattccgtcaaagaaaaatcaaaaccatattctgcaccagcacgctcctggaaggagtgaatctaccagccgataacctcatcatcacctcaaagaaaaacggccgagcctccatgagcgcagtggatttcaataacctgatcggcagagtagggcgcattgaatacaacctttatggtgacgtcatcatgctcgtcttacccaaagaaaccagccgagaagatttcacacagttccttgatgaagagatcccgccgcaaaaactgtccatcgaaactgacactggcctattcagaagaatcgataaacagcgggtcgtagaaactttaatgcaagggaaaatcgcgcttccagaaaagaagcaaaatgagagtgaagacaagcgtgagatgattcgtcgctacgaactcatattgcttcgcgacatcatggaagaccgttcaagcctcgtgcgccgagaattcactgaacacctcgataaagaaaaagaagccacgattagacaacagttcgcaaagcgagaggtcgcccaggacgttgacctcaatatttccgtagatcaagtagaaaacctcacccacgcaatcagaaacggcctcacatatcctgaacgtgtcgaaggcagctctttcgattatcgtcaagtgctagagtttctcgaaaaactcgccagcattttccactgggacatttacgaaagttcaaaacttgggtaccgaaatcccaagactcaagagcacacaaaactacgttggtatgccgtcatactttgccgctggatggaaggtagaggacttaaattcattatgaatcaagccatccagtatcaaatgaaacatccagaccgtttcttcgtgacggactacctagtggagcgctacaccgatagtaaagagcaccgtaacatcgtcatggccaatacgttgaagacaatcgaagagcagatcctgttcagcctctcgaactacttcctacgcttctcaaacgagtacaagaaaatccacaacgtcgagagctttccaaacaactggtacgaatatgtcgaatacggcagcaccaacgagaaagccatcgccctgcaacgttctggcttttctcgagaatcagctacctatatcctgaaaaataacccagactatttgcgaatcgatgaacgaggaagcctccatctcgacttcgggctcacatcatcaccgaatatcaacgttaaaaacgaagcgagcgaaatcttctacaacctacccgaggtttttgacagtcttccgcccttctag

SEQ ID NO: 59030 - DNA, 942 bp, Bacteroides fragilis str. J-143-4
atgagcaataaaatttggaattttgatatattagttgatgattgttttgttaattttaatacaaaaaagcaagaaataaatccagatcataatgacaggttattatcagtcgctaatggctttgaagatggcagttggagatatcgtcaattcaaagaatttgttttcagtaatattgcagaaacagctttgtctgcacaagaacgagagaaattaatagataatgattacggtaggcttattgaggctgccaaacatttacgacttgttgacaaagagcagaatggaaagggaagtgaaatagcggaaattattctatatggcataatgaagaaccattataaagccttatctgcaatacctaaaattttttataaacagaatgataatgataatgcaaagggctctgattctgtacacattgtaattgacccaaatggaggctttcaactttggttaggagaagctaaattttataattctcttgaggatgcgcgattatacgaaccaataaattcagttgaacaaatgttgcgcaaacctattatgaaaaaggaatgcggaataatgaccaatctcaatgaacttgataaacaaattgaaaaccaaacattacttaaaaagataaaagaatgtttcgatgagaatacttccattgacgaaataaaacccaaactacatatacctattcttttattacatgaatgccagataacagcaagtactactgaaatgagtgatgagtataaaaatagtattatttcttttcatagagatcgtgctcattcgttttttaagaagcagatcaacaagcttagttctgttcataaatattcggaaataaactttcatttgattctttttcctgttcctgataaaacaaaaatagtaaactggtttatttcacaagcaaaaaatctcaaaaatgatgcagacgaatga

SEQ ID NO: 59031 - DNA, 2112 bp, Bacteroides fragilis str. J-143-4
atgcagacgaatgatatatataatacatgtttagatataagtaatgttctaaatgctggtgatataagtaatgcaagatccaaagtaattacattacttcatgagattaatggtactaacaataatccatatatggaattagtcaaccatcttattcgtgaagtggggcttttaccgtatattgatacatatactgcatcttgggaagatcggtttgtatgtgaagtttttaaagttaatattggagaaagaaaaccttgtgtcttacatactgctcaatcacaggtattaaagaatttattagaagggaaaagcgttgcggtaagtgctcctacaagttttggtaaaagttttgttattgatgcatttattgcgattaaacaaccaattaatgttgtaatattagtacctacggttgctcttgcagatgaaacaagaagacgaatttgccgaaaattctctcatcaatataaaataattacaacaacagatgtagaacttgcggagaaaaacatattggtatttccgcaagaaagagcttttgcctatatagataaacttccttcaattgatattctaatcgttgatgagttttataaggcaagtacaaattttgatcttgaaagaagctccactttactcagttcaatggtagaactcggaaagaaagctaaacaaagatattatcttgccccaaatatccatgaaatagaagaaaatgtattcactgaagggatgacatttctgcgtatggattttaagaccgttgtaacgcatgcatggcggttatataaaagcagaccaaagaatgaagataaacagagttttaagacacgtaaacttattgaattaataaatacaggtataggtaaagctttgatatataccggcacatataagggaattgaagaagtaacaataattcttaacagaaatttatataataaagactctgaactgcttgctaatttttctgattggctggaatacaattatggagaaaagtatattcttaaagatttagtcaaacatggtattggtattcataatggtcagctacatcgttctcttagtcaaattcaaataaaactatttgaagaacagaatgggttagattatttggtatcgacctcgtctataattgaaggagtaaatactcaagcagagagtgtcgttttatggtcaaataagaacggggctcataagattgattattttacctttcgcaacatcattggacgcgcaggcagaatgtttcgttattttgtaggtcgtgtctatatgcttgaagagccaccaagtcaagaaaatactaaattgagattagagtttcctgatgatgtagtaaaaaaacttgatggaaatgatcccggtataaaattgaataatgaacaatatgtaaaaattcaacgatatcaagatgaaatgatagaacttcttggaatggatatttggcatagaattgaaagaataccacaaatcagaagttgcaaaccatcaatgttaaagataattgcggaaaaattgaaaaatgattccaattggccaacaaattgcgatgctttacaaaacaataatacatgggaatggagggatgctttaggagatatcatagaaattttggaatatcatcgaaaaggacatttacggtattatgcatgtgcatgtagtaatggatggaaaatgactataaaagagctatataacacagtaaaagattatggtattacatatgaggatatatttacatttgaaagatatgtatcctttaatctctcatctattattgcggtaattaatattatacgtcaagaactttatcctaattcctcaaatatcgccaattttgtatataaagcatcaaatgcctttttacctaaaattgtattccaacttgaagaatacggattaccgaggatgattagtaaaaagatacaaaatgcaggtcttataaatcttgaagacgattctaaagagattacaatcgttatacaggagtttaacacgataggaattgaataccttgaacaaaaaatacctaatctccattcatttgacaaatatatattaaaacattttatgaacggaatccgttgcataacgacaaattaa

SEQ ID NO: 59032 - DNA, 942 bp, Bacteroides fragilis str. 1007-1-F #4
atgagcaataaaatttggaattttgatatattagttgatgattgttttgttaattttaatacaaaaaagcaagaaataaatccagatcataatgacaggttattatcagttgctaatggctttgaagatggcagttggagatatcgtcaattcaaagaatttgttttcagtaatattgcagaaacagctttgtctgcacaagaacgagagaaattaatagataatgattacggtaggcttattgaggctgccaaacatttacgacttgttgacaaagagcagaatggaaagggaagtgaaatagcggaaattattctatatggcataatgaagaaccattataaagccttatctgcaatacctaaaattttttataaacagaatgataatgataatgcaaagggctctgattctgtacacattgtaattgacccaaatggaggctttcaactttggttaggagaagctaaattttataattctcttgaggatgcgcgattatacgaaccaataaattctgttgaacaaatgttgcgcaaacctattatgaaaaaggaatgcggaataatgaccaatctcaatgaacttgataaacaaattgaaaaccaaacattacttaaaaagataaaagaatgtttcgatgagaatacttccattgacgaaataaaacccaaactacatatacctattcttttattacatgaatgccagataacagcaagtactactgaaatgagtgatgagtataaaaatagtattatttcttttcatagagatcgtgctcattcgttttttaagaagcagatcaacaagcttagttctgttcataagtattcggaaataaactttcatttgattctttttcctgttcctgataaaacaaaaatagtaaactggtttatttcacaagcaaaaaatctcaaaaatgatgcagacgaatga

SEQ ID NO: 59033 - DNA, 2124 bp, Bacteroides fragilis str. 1007-1-F #4
atgatgcagacgaatgatatatataatacatgtttagatataagtaatgttctaaatgctggtgatataagtaatgcaagatccaaagtaattacattacttcatgagattaatggtactaacaataattcatatatggaattagtcaaccatcttattcgtgaagtggggcttttaccgtatattgatacatatactgcatcttgggaagatcggtttgtatgtgaagtttttaaagttaatattggagaaagaaaaccttgtgtcttacatactgctcaatcacaggtattaaagaagttattagaagggaaaagcgttgcggtgagtgctcctacaagttttggtaaaagttttgttattgatgcatttattgcgattaaacaaccaattaatgttgtaatattagtacctacggttgctcttgcagatgaaacaagaagacgaatttgccgaaaattctctcatcaatataaaataattacaacaacagatgtagaacttgcggagaaaaacatattggtatttccgcaagaaagagcttttgcctatatagataaacttccttcaattgatattctaatcgttgatgagttttataaggcaagtacaaattttgatcttgaaagaagctccactttactcagttcaatggtagaactcggaaagaaagctaaacaaagatattatcttgccccaaatatccatgaaatagaagaaaatgtattcactgaagggatgacatttctgcgtatggattttaagaccgttgtaacgcatgcatggcggttatataaaagcagaccaaagaatgaagataaacagagttttaagacacgtaaacttattgaattaataaatacaggtataggtaaagctttgatatataccggcacatataagggaattgaagaagtaacaacaattcttaacagaaatttatataataaagactctgaactgcttgctaatttttctgattggctggaatgcaattatggagaaaagtatattcttaaagatttagtcaaacatggtattggtattcataatggtcagctacatcgttctcttagtcaaattcaaataaaactatttgaagaacagaatgggttagattatttggtatcgacctcgtctataattgaaggagtaaatactcaagcagagagtgtcgttttatggtcaaataagaacggggctcataagattgattattttacctttcgcaacatcattggacgcgcaggcagaatgtttcgttattttgtaggtcgtgtctatatgcttgaagagccaccaagtcaagaaaatactaaattgagattagagtttcctgatgatgtagtaaaaaaacttgatggaaatgaccccggtataaaattgaataatgaacaatatgtaaaaattcaacgatatcaagatgaaatgatagaacttcttggaacggatatttggcatagaattgaaagaataccacaaatcagaagttgtaaaccatcaatgttaaagataattgcggaaaaattgaaaactgattccaattggccaacaaattgcgatgctttacaaaacaataatacatgggaatggagggatgctttaggagatatcatagaaattttggaatatcatcgaaaaggacatttacggtattatgcatgtgcatgtagtaatggatggaaaatgactataaaagagctatataacacagtaaaagattatggtattacatatgaggatatatttacatttgaaagatatgtatcctttaatctctcatctattattgcggtaattaatattatacgtcaagaactttatcctaattcctcaaatatcgccaattttgtatataaagcatcaaatgcctttttacctaaaattgtatttcaacttgaagaatacggattaccgaggatgattagtaaaaagatacaaaatgcaggtcttataaatcttgaagacgattctaaagagattacaatcgttatacaggaatttaacacgataggaattgaataccttgaacaaaaaatacctaatctccattcatttgacaaatatatattaaaacattttatgaacggaattcgttgcataacgacaaatcaaaagaattaa

SEQ ID NO: 59034 - DNA, 942 bp, Bacteroides fragilis str. 3725 D9(v); identical to SEQ ID NO: 59032

SEQ ID NO: 59035 - DNA, 2121 bp, Bacteroides fragilis str. 3725 D9(v)
atgcagacgaatgatatatataatacatgtttagatataagtaatgttctaaatgctggtgatataagtaatgcaagatccaaagtaattacattacttcatgagattaatggtactaacaataattcatatatggaattagtcaaccatcttattcgtgaagtggggcttttaccgtatattgatacatatactgcatcttgggaagatcggtttgtatgtgaagtttttaaagttaatattggagaaagaaaaccttgtgtcttacatactgctcaatcacaggtattaaagaagttattagaagggaaaagcgttgcggtgagtgctcctacaagttttggtaaaagttttgttattgatgcatttattgcgattaaacaaccaattaatgttgtaatattagtacctacggttgctcttgcagatgaaacaagaagacgaatttgccgaaaattctctcatcaatataaaataattacaacaacagatgtagaacttgcggagaaaaacatattggtatttccgcaagaaagagcttttgcctatatagataaacttccttcaattgatattctaatcgttgatgagttttataaggcaagtacaaattttgatcttgaaagaagctccactttactcagttcaatggtagaactcggaaagaaagctaaacaaagatattatcttgccccaaatatccatgaaatagaagaaaatgtattcactgaagggatgacatttctgcgtatggattttaagaccgttgtaacgcatgcatggcggttatataaaagcagaccaaagaatgaagataaacagagttttaagacacgtaaacttattgaattaataaatacaggtataggtaaagctttgatatataccggcacatataagggaattgaagaagtaacaacaattcttaacagaaatttatataataaagactctgaactgcttgctaatttttctgattggctggaatgcaattatggagaaaagtatattcttaaagatttagtcaaacatggtattggtattcataatggtcagctacatcgttctcttagtcaaattcaaataaaactatttgaagaacagaatgggttagattatttggtatcgacctcgtctataattgaaggagtaaatactcaagcagagagtgtcgttttatggtcaaataagaacggggctcataagattgattattttacctttcgcaacatcattggacgcgcaggcagaatgtttcgttattttgtaggtcgtgtctatatgcttgaagagccaccaagtcaagaaaatactaaattgagattagagtttcctgatgatgtagtaaaaaaacttgatggaaatgaccccggtataaaattgaataatgaacaatatgtaaaaattcaacgatatcaagatgaaatgatagaacttcttggaacggatatttggcatagaattgaaagaataccacaaatcagaagttgtaaaccatcaatgttaaagataattgcggaaaaattgaaaactgattccagttggccaacaaattgcgatgctttacaaaacaataatacatgggaatggagggatgctttaggagatatcatagaaattttggaatatcatcgaaaaggacatttacggtattatgcatgtgcatgtagtaatggatggaaaatgactataaaagagctatataacacagtaaaagattatggtattacatatgaggatatatttacatttgaaagatatgtatcctttaatctctcatctattattgcggtaattaatattatacgtcaagaactttatcctaattcctcaaatatcgccaattttgtatataaagcatcaaatgcctttttacctaaaattgtatttcaacttgaagaatacggattaccgaggatgattagtaaaaagatacaaaatgcaggtcttataaatcttgaagacgattctaaagagattacaatcgttatacaggaatttaacacgataggaattgaataccttgaacaaaaaatacctaatctccattcatttgacaaatatatattaaaacattttatgaacggaattcgttgcataacgacaaatcaaaagaattaa

SEQ ID NO: 59036 - DNA, 942 bp, Bacteroides fragilis str. B1 (UDC16-1); identical to SEQ ID NO: 59032

SEQ ID NO: 59037 - DNA, 1989 bp, Bacteroides fragilis str. B1 (UDC16-1)
atggaattagtcaaccatcttattcgtgaagtggggcttttaccgtatattgatacatatactgcatcttgggaagatcggtttgtatgtgaagtttttaaagttaatattggagaaagaaaaccttgtgtcttacatactgctcaatcacaggtattaaagaagttattagaagggaaaagcgttgcggtgagtgctcctacaagttttggtaaaagttttgttattgatgcatttattgcgattaaacaaccaattaatgttgtaatattagtacctacggttgctcttgcagatgaaacaagaagacgaatttgccgaaaattctctcatcaatataaaataattacaacaacagatgtagaacttgcggagaaaaacatattggtatttccgcaagaaagagcttttgcctatatagataaacttccttcaattgatattctaatcgttgatgagttttataaggcaagtacaaattttgatcttgaaagaagctccactttactcagttcaatggtagaactcggaaagaaagctaaacaaagatattatcttgccccaaatatccatgaaatagaagaaaatgtattcactgaagggatgacatttctgcgtatggattttaagaccgttgtaacgcatgcatggcggttatataaaagcagaccaaagaatgaagataaacagagttttaagacacgtaaacttattgaattaataaatacaggtataggtaaagctttgatatataccggcacatataagggaattgaagaagtaacaacaattcttaacagaaatttatataataaagactctgaactgcttgctaatttttctgattggctggaatgcaattatggagaaaagtatattcttaaagatttagtcaaacatggtattggtattcataatggtcagctacatcgttctcttagtcaaattcaaataaaactatttgaagaacagaatgggttagattatttggtatcgacctcgtctataattgaaggagtaaatactcaagcagagagtgtcgttttatggtcaaataagaacggggctcataagattgattattttacctttcgcaacatcattggacgcgcaggcagaatgtttcgttattttgtaggtcgtgtctatatgcttgaagagccaccaagtcaagaaaatactaaattgagattagagtttcctgatgatgtagtaaaaaaacttgatggaaatgaccccggtataaaattgaataatgaacaatatgtaaaaattcaacgatatcaagatgaaatgatagaacttcttggaacggatatttggcatagaattgaaagaataccacaaatcagaagttgtaaaccatcaatgttaaagataattgcggaaaaattgaaaactgattccaattggccaacaaattgcgatgctttacaaaacaataatacatgggaatggagggatgctttaggagatatcatagaaattttggaatatcatcgaaaaggacatttacggtattatgcatgtgcatgtagtaatggatggaaaatgactataaaagagctatataacacagtaaaagattatggtattacatatgaggatatatttacatttgaaagatatgtatcctttaatctctcatctattattgcggtaattaatattatacgtcaagaactttatcctaattcctcaaatatcgccaattttgtatataaagcatcaaatgcctttttacctaaaattgtatttcaacttgaagaatacggattaccgaggatgattagtaaaaagatacaaaatgcaggtcttataaatcttgaagacgattctaaagagattacaatcgttatacaggaatttaacacgataggaattgaataccttgaacaaaaaatacctaatctccattcatttgacaaatatatattaaaacattttatgaacggaattcgttgcataacgacaaatcaaaagaattaa

SEQ ID NO: 59038 - DNA, 942 bp, Bacteroides fragilis str. 1007-1-F #10; identical to SEQ ID NO: 59032

SEQ ID NO: 59039 - DNA, 2124 bp, Bacteroides fragilis str. 1007-1-F #10; identical to SEQ ID NO: 59033

SEQ ID NO: 59040 - DNA, 942 bp, Bacteroides fragilis str. 3719 T6; identical to SEQ ID NO: 59032

SEQ ID NO: 59041 - DNA, 2121 bp, Bacteroides fragilis str. 3719 T6
atgcagacgaatgatatatataatacatgtttagatataagtaatgttctaaatgctggtgatataagtaatgcaagatccaaagtaattacattacttcatgagattaatggtactaacaataattcatatatggaattagtcaaccatcttattcgtgaagtggggcttttaccgtatattgatacatatactgcatcttgggaagatcggtttgtatgtgaagtttttaaagttaatattggagaaagaaaaccttgtgtcttacatactgctcaatcacaggtattaaagaagttattagaagggaaaagcgttgcggtgagtgctcctacaagttttggtaaaagttttgttattgatgcatttattgcgattaaacaaccaattaatgttgtaatattagtacctacggttgctcttgcagatgaaacaagaagacgaatttgccgaaaattctctcatcaatataaaataattacaacaacagatgtagaacttgcggagaaaaacatattggtatttccgcaagaaagagcttttgcctatatagataaacttccttcaattgatattctaatcgttgatgagttttataaggcaagtacaaattttgatcttgaaagaagctccactttactcagttcaatggtagaactcggaaagaaagctaaacaaagatattatcttgccccaaatatccatgaaatagaagaaaatgtattcactgaagggatgacatttctgcgtatggattttaagaccgttgtaacgcatgcatggcggttatataaaagcagaccaaagaatgaagataaacagagttttaagacacgtaaacttattgaattaataaatacaggtataggtaaagctttgatatataccggcacatataagggaattgaagaagtaacaacaattcttaacagaaatttatataataaagactctgaactgcttgctaatttttctgattggctggaatgcaattatggagaaaagtatattcttaaagatttagtcaaacatggtattggtattcataatggtcagctacatcgttctcttagtcaaattcaaataaaactatttgaagaacagaatgggttagattatttggtatcgacctcgtctataattgaaggagtaaatactcaagcagagagtgtcgttttatggtcaaataagaacggggctcataagattgattattttacctttcgcaacatcattggacgcgcaggcagaatgtttcgttattttgtaggtcgtgtctatatgcttgaagagccaccaagtcaagaaaatactaaattgagattagagtttcctgatgatgtagtaaaaaaacttgatggaaatgaccccggtataaaattgaataatgaacaatatgtaaaaattcaacgatatcaagatgaaatgatagaacttcttggaacggatatttggcatagaattgaaagaataccacaaatcagaagttgtaaaccatcaatgttaaagataattgcggaaaaattgaaaactgattccaattggccaacaaattgcgatgctttacaaaacaataatacatgggaatggagggatgctttaggagatatcatagaaattttggaatatcatcgaaaaggacatttacggtattatgcatgtgcatgtagtaatggatggaaaatgactataaaagagctatataacacagtaaaagattatggtattacatatgaggatatatttacatttgaaagatatgtatcctttaatctctcatctattattgcggtaattaatattatacgtcaagaactttatcctaattcctcaaatatcgccaattttgtatataaagcatcaaatgcctttttacctaaaattgtatttcaacttgaagaatacggattaccgaggatgattagtaaaaagatacaaaatgcaggtcttataaatcttgaagacgattctaaagagattacaatcgttatacaggaatttaacacgataggaattgaataccttgaacaaaaaatacctaatctccattcatttgacaaatatatattaaaacattttatgaacggaattcgttgcataacgacaaatcaaaagaattaa

SEQ ID NO: 59042 - DNA, 942 bp, Bacteroides fragilis str. 1007-1-F #9; identical to SEQ ID NO: 59032

SEQ ID NO: 59043 - DNA, 2121 bp, Bacteroides fragilis str. 1007-1-F #9; identical to SEQ ID NO: 59041

SEQ ID NO: 59044 - DNA, 942 bp, Bacteroides fragilis str. 1007-1-F #7; identical to SEQ ID NO: 59032

SEQ ID NO: 59045 - DNA, 2124 bp, Bacteroides fragilis str. 1007-1-F #7; identical to SEQ ID NO: 59033

SEQ ID NO: 59046 - DNA, 942 bp, Bacteroides fragilis str. 1007-1-F #3; identical to SEQ ID NO: 59032

SEQ ID NO: 59047 - DNA, 2124 bp, Bacteroides fragilis str. 1007-1-F #3; identical to SEQ ID NO: 59033

SEQ ID NO: 59048 - DNA, 942 bp, Bacteroides fragilis str. 1007-1-F #5; identical to SEQ ID NO: 59032

SEQ ID NO: 59049 - DNA, 2124 bp, Bacteroides fragilis str. 1007-1-F #5; identical to SEQ ID NO: 59033

SEQ ID NO: 59050 - DNA, 942 bp, Bacteroides fragilis str. 1007-1-F #6; identical to SEQ ID NO: 59032

SEQ ID NO: 59051 - DNA, 2124 bp, Bacteroides fragilis str. 1007-1-F #6; identical to SEQ ID NO: 59033

SEQ ID NO: 59052 - DNA, 942 bp, Bacteroides fragilis; identical to SEQ ID NO: 59032

SEQ ID NO: 59053 - DNA, 2124 bp, Bacteroides fragilis; identical to SEQ ID NO: 59033

SEQ ID NO: 59054 - DNA, 942 bp, Bacteroides vulgatus str. 3775 SL(B) 10 (iv)
atggataaaataaagaacttcgatatagttgtaaatacctgcctggcagatatcgaatcaaggtcaaagaagtctgactttgacaaaaatgattttttgctgtctgtggttaatggctttgaagatgggaagtggcgtgaagatctttttcgccagtttgtcatgaacaatatagcacaaacaggtttatctgcagatgaaagagaaaatatttgtacaattgatccatacacgcagataactcgctcaataatgaatctcagattggttgattgtgagaatggccaaggcagtgaaattgccgaaatagtactctatgggataatgcgctatcattacaatgcattacctgtggtacctaaaatattctataagcaaaattctaatgataacgcaaaaggagccgatagcgtacatattgttattgatgaagataaaatggattttacgttgtggcttggtgaagccaaattctttaatgatatcatagatgaaaggttatatgaccctatcaattcagtgtttgaagcgctcggcacggaaaagataaagaaggaaaactcaataataacaaatattaaggatttagagtatgtaattaataacccagacataagaaaaaaagtaaaagaagtacttcgtcatgatgtatcgatagacgaggtaaaaaaaaggctacatgttcctattatgttgttacatgaatgtagtataactaaaggagctagagaattatcacctgaatatcttgaagaaataaaacattatcatctaaatagagctgagagattttttatgtcgcataataataagcagaagaaagaaggtgtatatggttttgaaaaaataatgtttcatctcatactgtttcctgtgcctaataaagagaatattgtaaactggtttgttaaacgcgctaatcaaataaaacaagatgcttga

SEQ ID NO: 59055 - DNA, 2040 bp, Bacteroides vulgatus str. 3775 SL(B) 10 (iv)
atggatacagctcgtacagaggtaataaaattgcttgatagactgaatcgtgaaggcaaagaatactctcctatggtcaaccattttataagagaagttggtctgttcccttatattgataaaaatacagcatcatggcaagaacaagctgtatttgaggcttataaaacagatcttggcggtggcgaacaaaagacgcttcacagtgctcagtcgagagttttaaaacgattgttggcaggtgataatattgcacttagtgctcctactagttttggtaaaagtttcatcattgatgcttttatttctattcgtaagcctgataatgtggttattattgtccctacaatagctttagcagatgaaactcgtagaaggattgagcataagttttcaggaatgtataaaattattactaccactgacgcgacccttagagaacgtaatatattaatactaccacaggagcgtagttttgcatatgtaggtaagtttgaaagtattgatatgctcattgtggatgaattttacaaggcaagttcttcatttgatgattcgcgtagcacttctctactaagcgcaatgattgaacttggcaagatagcgaaacaaaagtattatctcgctcctaatatccataatatcaaagaaaatgtgttcactaagggtatgcagtttatgcgttttacagattttaaaactgtaataactatggctagcaaagtctatgagaagatggggattgatgaaaacaaaaacgactttaaagcaacaaaattgctagacattttaagaaaacataaaactaaaactttagtatatgcaggaagctatgataatataaatactatttctaaactgctcaccaacaatatgccaaacaaagaaaatgatttattgaacaacttttacgattggcttagaataaattatggcgaatctttttctttgtgcaatttgagtagaattggtgttggtgttcataatggtagaatgcataggtcattgagccagattcaagtaaaactgtttgaacttagaaatggcattgacactatagtttcaacttcttctataatagagggtgttaatacccaagcagaacaagttgtagtgtggtcaaataaaaatggtaatcgcaaatttgactattttacatatcgtaatatcataggcagagcaggccgtatgttgaaatactttgtaggtaaagtatatttgctagaagaacctccagctcaagagaatactattttagatattgaattcccagaagatgtagtagaaatgcttgattctgaaaatcctggagtggaaattaatgatgaacaaaataatcagataaaagaatatgaatcatatatgtcagaaacacttggtaaagatgttttcaataagataaggaataattcattgataaagttatgtaagccgagtcaactgcgttttttagttggcaaaattaaagaaaatcgcaattggcctaatggatttgaatcattggcatctacgaattcatactattggcgtaatcctatttctgatgtagcagatatgcttggagataatatgaaaggattgatgaaaattgctatatggaaatttcctcaaaactggcaaaaatctatggctgaaatacatggagagttagtgaaagatggttatgaatttagtcaggaagatttatttcatgcagaacgttatatgtcattcaatctttgttctattctgaatgttattagcatacttaaaagattaatctatccagatactcataatatatctttgtttctcgctaaagcagcaaatgctttccttcctaagcttgtatatcaattagaggagtatggactgcctagaactttaagtagaaaaattcaaaattcaggtttaatagatcttgaaaacgatgagatggaggtttctgatataatagaggaatttaagaaaattggctacgacaaattgacagaaagtatacaagatattcaccaatttgaaaagtttattcttaagtatttttattctggtattagttag

SEQ ID NO: 59056 - DNA, 942 bp, Bacteroides vulgatus str. 3775 SR(B) 19; identical to SEQ ID NO: 59054

SEQ ID NO: 59057 - DNA, 1860 bp, Bacteroides vulgatus str. 3775 SR(B) 19
atgcttgaaagtgaagtttttgatatctgttataatatcaacgaactgatcctaaacagtcaaatggatacagctcgtacagaggtaataaaattgcttgatagactgaatcgtgaaggcaaagaatactctcctatggtcaaccattttataagagaagttggtctgttcccttatattgataaaaatacagcatcatggcaagaacaagctgtatttgaggcttataaaacagatcttggcggtggcgaacaaaagacgcttcacagtgctcagtcgagagttttaaaacgattgttggcaggtgataatattgcacttagtgctcctactagttttggtaaaagtttcatcattgatgcttttatttctattcgtaagcctgataatgtggttattattgtccctacaatagctttagcagatgaaactcgtagaaggattgagcataagttttcaggaatgtataaaattattactaccactgacgcgacccttagagaacgtaatatattaatactaccacaggagcgtagttttgcatatgtaggtaagtttgaaagtattgatatgctcattgtggatgaattttacaaggcaagttcttcatttgatgattcgcgtagcacttctctactaagcgcaatgattgaacttggcaagatagcgaaacaaaagtattatctcgctcctaatatccataatatcaaagaaaatgtgttcactaagggtatgcagtttatgcgttttacagattttaaaactgtaataactatggctagcaaagtctatgagaagatggggattgatgaaaacaaaaacgactttaaagcaacaaaattgctagacattttaagaaaacataaaactaaaactttagtatatgcaggaagctatgataatataaatactatttctaaactgctcaccaacaatatgccaaacaaagaaaatgatttattgaacaacttttacgattggcttagaataaattatggcgaatctttttctttgtgcaatttgagtagaattggtgttggtgttcataatggtagaatgcataggtcattgagccagattcaagtaaaactgtttgaacttagaaatggcattgacactatagtttcaacttcttctataatagagggtgttaatacccaagcagaacaagttgtagtgtggtcaaataaaaatggtaatcgcaaatttgactattttacatatcgtaatatcataggcagagcaggccgtatgttgaaatactttgtaggtaaagtatatttgctagaagaacctccagctcaagagaatactattttagatattgaattcccagaagatgtagtagaaatgcttgattctgaaaatcctggagtggaaattaatgatgaacaaaataatcagataaaagaatatgaatcatatatgtcagaaacacttggtaaagatgttttcaataagataaggaataattcattgataaagttatgtaagccgagtcaactgcgttttttagttggcaaaattaaagaaaatcgcaattggcctaatggatttgaatcattggcatctacgaattcatactattggcgtaatcctatttctgatgtagcagatatgcttggagataatatgaaaggattgatgaaaattgctatatggaaatttcctcaaaactggcaaaaatctatggctgaaatacatggagagttagtgaaagatggttatgaatttagtcaggaagatttatttcatgcagaacgttatatgtcattcaatctttgttctattctgaatgttattagcatacttaaaagattaatctatccagatactcctgatgtatttagaacgccataa

SEQ ID NO: 59058 - DNA, 924 bp, Campylobacter gracilis RM3268
ttgaaatatctaacaagtaagtatgagtatgaaagcattaaaacgtattgctttcatatcgtttttgatataaacgatgaaggacgggtatatcaaaaaatagatgagtggaatgaggaaatttttaatgaaattccattctttgcactcggtaaaaaaagagctttaaagatttcatcggaatctagtcctagaaaagctactagggacggcatggagttgctttataaagttaaagagattaaagaagctaacgaatatttcatatcggcagatgaggatgcagaagataaatatttaaagcgtggcgaatttggagagcttatactatattatttactggaaagacaatttaataaaccacaacttatatccaaaatatattttaaagatagtccaagcggaatggttcatggttttgatgcggttcattatgacaaagagaagaatgaactctggataggtgagagtaaattttataaaagcctatcaaatgcattacaggatctggctaatgatttatttgggcattttaatgttaatttttttgattctgaatttgcaatcatcaataatagattaagcgattattatgacgataaagaagtgagtgatgaaataaggaaattaattaaatctagtacttttatacaaagactatcaaatataaatgcttgcttttttgcactatttgatagtaaaattttagacaattttaaatttaacgattcaggaaatacgcataacgattttaaagatatattggagaaatttgcaaaagatactagaaaaaaatttgatcaaaaaattaaagattttggcaataaatatagacttaaaataaatttatttttgtttccggtagaaagtaaatttaagctagtaaagcagctacacgaaaaattaaaaaaagagcaaaattaa

SEQ ID NO: 59059 - DNA, 2070 bp, Campylobacter gracilis RM3268
atgtttgaaattttagatttgtcagatttaaataagagttttaaaatagccaaagaaatttcggccaatgaagatatggatagcctgatcttggtcttagaaaactggaagtacgttaatgaaaatataagacctgtttttattgatttaattgaaagttttggtttttatccatatttaaaagataaaaatgaattgcttaatactgctgcattagttaggtgcgagtaccacaaatctaaatttataaacgattttgaaaataatagagtagcgtttcactactggcagaaggtattagaggaaaaaatctcaaatagacaaaatttacttatctccgcacctactagttttggtaaaagcttactaatacaagaatttgtagcaagaaaaaaatatagcaatatattaattattcagccgacattggcactaattgatgaaactagaaaaaagctccaaaattatcaagatttttataatatcgtggttaatacaagccaggatataaatgaaacaaacaacttgtttattttaaccagtgagcgagttttagatattttacccaaaattaacaatatagatttatttatagttgatgaattttataaaatatcaaaccataaacacgacgatagagtcagccaattaaacattgcattttacaaagtaatgtttagaaatccgcaattaatattattgactccatcggtagatagcgttgataatgattttattaaaaaatatagtctaaatttctttaaaacggagtattcattagtaagacaagaattggaaaaaataagctgtagttccaaggaagaaaggaaaatgaagctgtttgggctattaaatagtttaagtgagcctactatagtttatgttaaatcccctgctcaagcagaagaattgtcaaatgaatttattagagataataaaaaaggcacagaaaatactttcccaatttttgaatggattgatgaaaacgtttccgtaaaatggaatttaaaaaaatacttacaaaaaggtataggtttacataacggtcaatatcctaggcatattgttaatgctcaactcgactattttaataacaataaaataaatatattatttgcaactacctcattaatagagggtgtaaacactgtcgcaaaaaatattatcatatatgatatgcgcaaaggcacaagcaagctgacttattttgattttaataatatcaaggggcgtgctggaagaatgatgaaatactatactggaaaagtatattgttttgatgatcctccaaggcaagagatggaaaatatagatgttcccatagttactcaagatgatagtctgcagagtgaaattttaattaatctaaataatgaagatataaaagaccaaaagagaagaatatatgaagaattaattaaagatttacctgcagatttattgcaaatttttaaatcgaactattatagtattgaaaagcaaaagcacctttataattgcttaaagggtagaaaaaagatattgaatcaattgagctgggatgcaccaattcctacttataaaacattatctcgtacattatgtatagtagatcatttattggaaggcaataaaggagatagttataaattcttagctcaaaaatgccatcaaataatccggggtggaaatttgcactctattataagtaatgagattaagtatcagcatacgctagatgccaatcgaggtaagaatgaagagagtatcattaacttatctgtttcaaaagtatttggttttatcagaaatcaagccaaattcgaaatacctaaaaggcttagtgtattagaaagcattgtaaattatctcaatggcaaacaagctgctaattattctgcatttatttctattctggaacatgaaggagtggataataagttaagtatacttttagattttggagttcccgcctccgcgttaaaaaagtttaaagatatgcccaataacaatattattgaatatgtgaaaaagaattttgaaaaaattgatttaagtacatatgaggttgacatattaaagaaattatga

SEQ ID NO: 59060 - DNA, 924 bp, Campylobacter gracilis; identical to SEQ ID NO: 59058

SEQ ID NO: 59061 - DNA, 2070 bp, Campylobacter gracilis; identical to SEQ ID NO: 59059

SEQ ID NO: 59062 - DNA, 933 bp, Porphyromonas gingivalis F0568
atgagtaactttgcaggaaaaagttatatgccaatgttactaaggacggatgtgcaaaatggttttttgaatttattttctaaaataatggaaaacgaaccgttatggaatgggaacaaactaaatctctttgctctcaaaataaccaacaactgcttttcttacgaaactcttacagaagaattggggaatattcttacgacgtatgctctttctcgtagtacatatgatgagttgtgttcccaaaagaaatatgcctcattagtcaagaaagcaaaagaaaaattaagaaaagtagaaaacaatgatggggagcttggcgaaatcttgttgtattgtatgttggaatcacatttaaatgcacctaagctattaacgaaattagaactaaagacggctgcaaataattatgtaaatggagcagatggagtacatcttctgaaaatagatgattcaacatatcaatttgtttttggtgaatcgaagttgaattccgacctacgaacaggaatctatgaggcgtttaaatcaattaataccttattagagaatggtttaaacaaactacggtatgaaatcagtttggtaaatagtaatatattaaaagaaactgcaaccgaagaatctgttattctaaagaagttgttaattcctacagaaaatgacgaagacctaaacatagaccattctttcggcatttttcttgggtttgacattccaatctcggaagaggaacggaaaatgaaaaactccgattttcgaactttaatgaatggtaagatagaaaaggctgtcaggggcgtattaacaacgctcaatgaacaaatcaaaaaaagagagtttgttggctatagcttttacatctatattattcctttttcggaattaggtattaccagaaagaaaatcatagaaaatcttaaaacaatgtga

SEQ ID NO: 59063 - DNA, 2550 bp, Porphyromonas gingivalis F0568
atgatattagctgatgaaatcgcattagagatattatcaaaccagtatttccttaaactctttagggtttgtattgaacgctctatttgtcatacattaagtattgataatcaagatttatattcggaaaaagagtttaaggatttacttcgttttgcagatctattgtcaatctcctcagtatcagaagcgaggaactatgcgtacagaataataacatatctcaatccatatttccagcaagacccgtactactgcactatatctaaagcggtctattacaatctaggaaatttcccggcagtctcttatttggaaaaagagaacaataatcaatcggagttaccatttgatagatcagttgaattagaagcaaaaaagatcattcaagaagttcctgaatcggaaggtatattttttacagatacgcagtataaactattttccgaattaagttgtgctcgcgaatttagtttttcgggaccaacgtctatgggaaaatcatttattatcaaagcctttatccgcaaaattatacaaaacaaaccgccggaaaatttggtggttcttgtgcctacaagagctctaatcaatcaatttgctttggagctgaaaaaaaacttgggaacattacttgaacaatacaaatatagaattgccgccaactctaacatatctgaattctccatagaagaaaccatcaattatatattggtgttaacgcctgaaaggttaattagctatatctctcaggaaaatcctcctattggatttctttttgttgatgaagcccacaagattgctcaaaatgaggattcacgaagtatcacaacttatacatccatagagaaaacacttaaaaagcatccgaatataaagttgtatttttcttctccgaatgtttctaatccagaagtgtttcttaaaatattccgcaatactcaaggaaaaaaccatttcaaaacagatgaaactcctgttgctcaaaatttatattttgctgacttagaaaatggggagttttcttatttctctaataacgaacttgttaaaataaaaaatcccttacctaagaatgcaaaaacaattaatgacattttagcacatcttggaaaacggagtaatcttgtttactgcaataccagatcaagaaccattgattatgcaaaatcttttgctgatacaataaatttagaaaaggggaataaatccttgaacaaagcctctcgaattatcagagaatatattcaccccgattattatttagctgagattataaaaaaaggtgttgcctatcattttggcaatatgccgcaattaataagaaatatcgttgagaatttgtatcaagaagggaatattaggtttgtcttttgtacatcgaccttgttagaaggggtaaatatgcctactcaaaatctttttattcttaacaacaagaagtctacaaaaacattaaagccgattgatttttggaatttggcgggcagagctgggcgactatctaaagagctgcaaggaaacgtattttgtgtgaagcattcggattgctcttgggatgatacttctttttttgacaagaaagaaattgagcttgttccatctgttttttctcgtatcaatcataatctaaggaaaattgaaactttaatcaatgggggtgaagttaaatctggttcagaagaagaaaaaaacattttgagatatatagctaatataatatgtattgatactttagaacccaaaacaggataccatagtccaatcattaacgagttaattagaaaaaacaagagtagcattatagagttggcgaagtctaaagcatcaaaattagaaacaccatattcgatactaaactctaatgaatcaatcggattggatgctcaagatgctgcctataaacggttgaaatatttacatgcccaaaagacttctataactctgcctaaactggttaattacgaatcttgcaaaaacaccttgttgtcactccataaactttataactgggaactgacaaacaagcatttgtctgacaaaaatagtttgaaatactatgcaatgttaatgaataaatggattaatgacgaaagcctaaatcaaattatctcaggatcagttgattattattcagaaagtcagaaagctttaaaggtatcgtataacaattatgaggcgtttaataaatcaaataaaatgcatgtaaacattctgataggcaatatcatcaatgatatagagcacatcctcagatttcaatttgagaaatatttcaatcattattatttaatggtgaaaaatttgttaggggaagaaaaagcaggagaaaactgggctactttgttagaatacgggacacaaaaccgaataatgattgctatacaaaatatgggattatccagacataccaccaataagataaataaggaaggaaaaggagcattgacaatagagaatggaaaacttaaaggtataaataaagcctttttattggcaaaatttactcccggaacgttagaatatgatgaggtgaaaaatttactgtaa

SEQ ID NO: 59064 - DNA, 915 bp, Porphyromonas gingivalis
atggcaatgcgagttagtcttaagaaattgatccaagattctatcgttgtgcaatatcatttaccttatgatgttgtagataagcatattccttgttcatgtatttcaacagaaaaggattattgcttacttcaaaatgggaccgatattgatgtagcaaacataatctataatggaatagttgattatgcttatagcgataatgaaatagatttaactcaacttgacaagctccaaataagggcactattaagcaaactaaaatttgatccaaatgcgtcagaaagtattcagctggggtatggctttcagggagaagttatgcttcatcttcttctgagtcatttttttcatgctgaaaaggcacttgctagaggatatttatattctgctttagaaaatgctgagactaaaggttatgattcatatttgatgatagagaacaatgaaacaatatttcttctttttggagaagcaaaattttacttggatggatataaaaggtcattagactctatctttaataatattgacaaagctctttctgattcttactttaatcggaattttattgcgatggaaaatcactatgagcatatcgaaccgaaaagtagaattcgtgagattattgatcaatggcgaactgatccgttgataaatatggcagaagaagccaaacagcacaatatgaacctagtatatccgatgctagttatttttgatgataaaatgacagaatacgataatctcataatggatataatatcttatattcaaaccaaatataatgctgtacagcctacacttacaatcccatatacaatcttttttttgttttttcatgtggataatagtcgtattattaagacacaagttttgcaatggataaatcaaaagcagcagttgatgccgtaa

SEQ ID NO: 59065 - DNA, 2313 bp, Porphyromonas gingivalis
atggataaatcaaaagcagcagttgatgccgtaaagcttatcaaccaagccaaagagaatttaagtttgcagcctttaatgattaaggctgtttgttctttttttgactttatgaaaggtaaagagttatctcaagcagatagactcttcttgcattatctcgcgaatcgagcaggtctacctcagtactattatccgatgctaaatattggagaagacgttgatgaagaagtctctttgcagaccttttcaaattatatcaatgaaagcagtttgatagttggagaaggtattatgttgcatcgctaccagaaggaacttttagaaagattcaagagaggacagagaaatcgtatttttctgagtgcttcaacatctttcggaaaaacatttttgatttacgagatcgtaaggaagatggagtatactaatgtagcatttatttttcctaccctttctcttctttctgagaacttgtttaagattcatttattgcctgaatataaatgggtaaaggataactatgtgattcatacactcagtgataaagaggaaataagcggacggaatcttttcatttttaccccagaacgattcttgtcttttttggataagaacaaagaaattcaattggattttgtatttgtagatgagatatataagcttgataatggttttatcatagacgaggtggctcaagagaatgagcgagatgtggcttacaggatagctttgcacgaattgctaaagaatccacatatagattctttacttgcaggtccatatatagcacttccaaccgaagataaaaaagacacacaattttcatttaaaactttccttgactattatgattttgttattgttaactacaatcactacgaaatagtgaataaggtggaagtctttgtcaaaacagcatcaaacattaagattgataacacgtttcacttgacatttacaaataagacaaagagtgatcgtgttgtccaacttgttacacaacttttgaatcgaggagaaaatgccatagtctattgcagtacaaaagcttcaacggaaaaatatgctaaatttttaattagtgaaaataaatatatcaaagatattgattctgaaaaggtaattaggcttacaaatcatatagatagtttatttgtgaatgggaagggggcgcaatggattgtttcaaaagcattaaaaaaaggaattggcatacatcacggttcagttcccaagtatatacagcaggaaattatctcgctgtttaatcagaatattttaaaggtcctaatatgtactactactattactgagggggtaaataccacagctaaaaacgtgatagtgctttctggaaaaaaaggaacgaaagatttaaaaaagtttgatgcacagaatatagaggggcgagctggtagatttatgcagcattatcaagggcgggtttttattctagataaaaaatttgcggatcgaatgaacgaagaggacgaattgttgcaacataaattttttgacaagaatattgataaaaaagatgtggacattgttctctcagattccaattatctcacaaccgagcaagaaaatagaaaaaagcagttagaggctatcaaagaaagtggaataatgcctaaagcatgttttgaggagtttagaacaatatcatatgatgacaagatttatttgtacaatacgattgctcgcttttcaacaacagatcatgaaaagataacagagttaataagacgttacgttggtcaaaggaagtcttatcttccaggccttgaacttatatgtcaaactatccgtccaattatcaaaaatgacaatttacgttattatgtagagaacggaaatgatcagcctggtaactgttatcttgttggtatgatttctgcatttatttctaaaggattttcaggctcggtaaattattatattaaaaaagaagaggacgtggataagggagttagaaaggctgctaactttgtttttaatatgctccgttaccaagtagtaaaatatttcggtttatttaatttgctctacaaacaatttgaatcaattcgcaagggtgtaaatgttgatgaagttaatggcattgaagcgttattactcaggcttgaatatagtgcagatacaagattaggcagacaggttagtgacattggtgcatcttttaatgtagtgaaatattatgatataaaagagaaaaattcagataatagcgagattgtaggagaatattataaccagctggatgactatgagaaatacaatatcacaaaaataaatcagatattataa

SEQ ID NO: 59066 - DNA, 975 bp, Nitrobacter hamburgensis X14
ttggaatttgacgctctggcgaccgcactggcgataataaagaaggactggtcagtcctgtcgtcgcgtatccatacggcagagcacgatatcgtcaccaatcacaaacatctcaacctgcgtctgcactatcctgcactccgggacgcccaggctacggtcgaagagctcgttagaacaattgctctctatctgacgcatttcagccttccacgaaagcaggtcgaggcgatttatgcgacgcaagagacgatgaagacagcgttcgaacggcatcaagcgatctcacgcttggagcaagaggcacgctcgctgtttatcagagcgagaaaatcatcacagcgcactggagaagccggcgagctgctactgtatcttcttacagagtggttactggacgcaccgcaaatcattgccaagatgtcactcaagaccaacgctcaaatgcccgtctatggcttcgacggcatacatgtccgtttcgacgcaaaaactaatcgccttgttctcttctctggagaagccaaactccacagcgatattaccaaagcaatcgcgtctgcggtcacgtctatcaaaactggcttaagccgcgaaaagatgcagcatgagatcgaactcgtccaacggcacattgacttttccggcctcgatgagacggcgcggacggcactccttcgctaccttgaccccttcgacgaggcttacaataatcggctcgaggtggtgacctgtctgatcggcttcgatttcactggttacgccaggctgtcgccagacgagctagaagacttggatacaaatttcaaaacatcagcgactgccaaacttcgtgaggtcggaccgatttttgcgaaggctttaacggatgctggcctcgccaatcagagggtagaactcttcttgtttcctgtaccctcggtgtcggtactgcgcgacctcttccagaatcagatcggctggacgcgcgattag

SEQ ID NO: 59067 - DNA, 2577 bp, Nitrobacter hamburgensis X14
atgcagccactcgctgacaaggtttgggctaatccccacttccatgccgcagcgagacgtctgcaacgggcatggctctcacacgacatcggtgttggtcgtgatgatcgccccggccttgaagaaatcgttcgcatcgtccgggcttcggccattctcgcgtgttcgaaaaccgctgaccatcgcgaccaagcctatcgaacgatgacgtccgctttcgatctctatggtgcatcggaactacctcttgaccaagccacgcgcgtcgttttggcccgcttgggtaacttccctgccctagctacgcgtccctctatccgcgacgccatgccctccctgccagccagccttatcactgaggaactcatcgtttcggatcgccgaaccattacacgtcgcgatcgttcagttctgctcacccactaccagttcggcctctggcgtcgcttggttgctggagaacgagtggcggtcgcagcaccgacctccgcgggcaagtcatttgtactgcagaatttcattgccgcgcgcttggaggggtcaagtccccagacgatcgtctatatcgttccgactcgtgccctgatcgcgcaggtctccgctgacgttcgcaaactcctcatcatcgatgacgggacttccggcgacgtcgatgtgatcaccgttcccgtagaggcagggcagcccctacccaggcgcgccatctacgttcttacccaagaacggcttagaatgatgctgagcgcccatcccaccttccatgcacagattatcatagtcgatgaagcccattcggtcggcgatggcgcgcggggcgtacttctgcaatggacagtagacgacctattgcagcgtctaccgacgacccaactcctgtttgccagtcctggcattcggaacctcgacgtctttggacggatgttcgacgttgatgacataacgatcatgcccagcggcgacccgacggtcgcccagaattttctggtcgcggcgtttgatgacgcggaagcaggagacctgactgtccgctacgttgagcccgcacgtacattgactgagattggccgattggccttggggcgtcgctcggtcacccgtgtcgagaaacaggtgaatctcgccatcagtttaggtcagggcgcgtccaacattgtctacgcgaatggcgcaggcgacgccgagcatatcgcgcttgaaatcgctggccgactcgatcgcccgcctacggcacgaagacaggcactcgcccagctggcggcggagaccgtccattggtcatatgcgttggtgacatgcgcgaagaagggagtcgcgttccattattcgaacatgccgacgcaaattcgcacggccgtcgaagaagcggtcatacggggcgacattgactatctcgtctgcaccacgaccctgctccaaggcgttaaccttcccgctaaaaacctctttctctgccgtcctgaaaagggcgaccgggtcccgctggaatcggtcgacttctggaacttagccggccgcgcagggcggctcatgaaagaattccaaggcaacatcttcctcatcgactacgatcactggcgcaagaagccgcttgaccaccctcgcgacgcgaccgtcattccagccgtcgaggcgggcctccttcagaaaggcgccgaccttttacgcgtcatcgagcggccagagacccagcgccgtgagattgaccacgtcgacgctatattcggtcggctactacatgagcatttctccggcacactctcgaagatgttaagccgtatcccttcgtacggcgacgcgacaccaggttctctagcgcttcaaaaggcaattgccgaagcagccgttgacatcaccctacctaccagtgtgctacgcattagccctaacatctcgccccacaagcaacaggccctttatcaaatgctgcgcttgcgggccgaaagtacaccagcgagtgccatggccctcatccctaaacatccgagtgaccgtgatgcctaccaatcctacgccgacattctcgaaatctgccataagatcatcgagggccgacccgatacctcgcgactacatcgcttccttgcactcatcgcggtgttctggatgcgcggacggcccctaccacagatcgttcaaaatcaactgcgtcgaaaccctgatcgtgatcgccgcgaaatcattcgtgatacgctcgaacttgttgagaagcgggtacgataccaatgcgtccggctgttcagctgctacggcgcagtacttgccgaagtactccaagacgttaatcttccggatgctgtcaaaacgttgccatcaattcccctatttctggagcttggcgcatcggacaaaacaacgctcagcctaatgtcgaacggactgtcccgtgccaccgcgacacgtttgacgcctcgtgctccgtcacgtgacttggaaacagaagacgccatggattggcttcgccaagccccggtggagacctatcgccttccggcccttttgcttgaagagatcctagagattcgaggtgacaaagctgcggtgacaccagacgacgccgaacgtcatcgtgaagagtaa

SEQ ID NO: 59068 - DNA, 972 bp, Herbaspirillum seropedicae SmR1
atgacagtgcatgttgatgagcatcaacctggtagacattttgataacttattggggcgtcggaatgttgatgcaaggataaaaaattgtagtgttcacgaggagggcctgcctctggtttcggcccatttcttgtatccggcgttcaagggcgggaagccatcggttgctgagttggtgaaaatgctcatgagagaaattaccggtttttgcgccaccaagctgcagcgtcgtagagcaaaagagaaagatcggctgagtacatatgacgctcgcgaaacagaagaccttgccgactgggcgaaggctctgttcatcaaaacaaaggagtccagtagtcggtcaggtgaaggtggggaactactgctttacgttttcattgagcattatctgaaagcaccgctcgtgctgtcgaagatgcgcttgaagacatcgccttcaatgccaatacatggggccgacggcgttcatgcaatgtgggatgagcatggcgagcggctgacgatgttcttcggcgagtcaaaaatgcacgagtcctttgccagcgcgatgtcagacgctgccgaatctataagctggcttgctaagaatgcagatgggcggatggacaatgagcttcagcttaccagtgggaatatagatttagacggcttccccgaagagctgcaggagtaccttcttcgttttcttcatccttacgatacagatgaaggtaaccgtcgtagcgacagatttgcaattctgattggctatgactacgccgcctataacaaattggctaaaaagggtgtggaggaagcggaagagtatttcaaagagctctatcggaaaagtctaagccagaagctacgcactgcccaatctcacttagaaaggcacgagatttcgctggccgccgttgatttatttttccttcccctgcccgatgtgcagtcgttccgggatgaattcaatagggaacttcatgggtaa

SEQ ID NO: 59069 - DNA, 2574 bp, Herbaspirillum seropedicae SmR1
atgggtaacttcaatttacagttggctcagcgcgtagctagcagccagaaatttcagattgcctatgagacgctgcaaaaggaaagcctagcgtccctctcgggaagaactcccagcatcgatataggtgagcgaaataagctgttgcggtcggccctcatactggcacagtctggaagcaagcaatattcgacattgtctcaagatatcgtatacgccctcgcaacactccccttggagaccagccagcgagctgtatgcgagcacatcttggcaatgttggggaattttccggctagcgactttctaaaagggaacaatcttgcgcatgggaggttaccctggaatcttaagctcagtgaggaggtgcggcgagacgagaattatgtttcggttctcggcaaagaaatcttgctgactgacttccaggccgatgtatgggatgagctaaaaacgcagcaattccttagcatcgctgcgcccacatctgctggcaagtcgttcttgattcaactctatctgaagtcgcttctcggtaattcggaccgcctgttagacatagcttatgttgttccaacgcgttcgctaattcatgaggtgcatgcatccttaatcaaggcgttcacgggcttcgagaatcctccagtaatcagcagtattccacgtgcagacgaaagattggcagcgacccagtcgcgcattttcgtctttacccaagagcggcttagaactgcaatggatgaagccgacctggcattagattgcttgatagttgacgaggcacagcaaatcgccgatggctcgcgtggaatgctcctgttatcgtgtctcgaggatgtaaatgaacgagcaccccaagcgcagattttattcataacacccggctcacgaagtggtgcttctattggctcgcttatgggattaggtgagttgccatctgtagagactactctgcgtccagtgcggcaaaatttaatctatgtgaacttcaaaagcgcgaagaaaaagcagcatctacagctaacgcttcatcgcgaaaaccagaagccattagcactagagaatgtggacttggaaggagagccggtttcaaatgccggagcacgcttcctgaccgctgtgatgacccttggagacgaagggcaaaatctcgtctacgcatcaggaaaagctgctgccgaaaaaatggcggaggcaatagcagccgccttaggcggtaaagacaattttgttaagcagacagaagctctccttgagctttcagaatttgttaagaaacacgtccatcctcaatatgcacttgtcgattctattaagtcaggtgttgcctatcactacggcagtatgccgaccaccctcacgaaggctattgaagaatactttgccaatggcgcccttaaatatctggtttgtacatcgactttgctacagggagtaaatcttcctgctcgaaatatcttcatccgcaatccaaagaaggggatgggaaagccaatggggccagatgatttctggaatttggctggccgagcaggaaggttgtctaaggacacacacggcaacgtgttcctgattgaatataaaaaatgggataggcagccagttgaagaggtgaggcaaaaggaggtcacgccttcgttgagtaaagccttcaccacttcgcatacagaagtgatggatttcatacgtgacgagaaccatgtttcaggtgccaaggatacgaatttcgctgagagtgtttttgcacgactattcatcgacgcaaaagagggcgtcatggaacagacgattgagcgtgcgacgagggggattgcaatggaaagcgccgtttccataagtgatgcaatccgagaacatctggacaaggtcatgctccccccggaactattgaagcgcaattcctctgtatcacccctacgacagcaggcaatgtttgacgtcctcttagctgtggtgaaaaggggaggaacggcacagcttgtgccccatcatccgctgcagtctggtcaagtcaaagaacgtctcgagtccatcatggatttgattcaccgccatttagaagggaaagagaccaatcagcaatattactttggctggttcgccttaagttggatgcgggggagttccttgagggacatgatagaacaccaaattcaatatgagcgtagaaaggccgaggtgaatggtgacgaggagccggaaccagggaaaaccattatcaaggtgctagatgatgtggagaataagctgaggtttcattacgtgcgatacatcggttgctacattgatctattgaagcatgccgtcggcgtggtatctcctgaccgagagctcgatgttccgcctattcccttatttttggagctaggcgcatgcagtggaacgatgattggatgcatggagctagggctatccagaattgcagcaagagaattgacagacctgctagggaaaagtgacttagacgctgtcgctatcaaacgtaggctaataaatctaaagggtgcgagtcttaagttgtctcccattatcgttagcgagataaagcgaattggcttagaaacttcggcctaa

SEQ ID NO: 59070 - DNA, 972 bp, Herbaspirillum seropedicae; identical to SEQ ID NO: 59068

SEQ ID NO: 59071 - DNA, 2574 bp, Herbaspirillum seropedicae; identical to SEQ ID NO: 59069

SEQ ID NO: 59072 - DNA, 933 bp, Flavobacterium hydatis
atgagtttaaaaactgatattagaaaagattttctcgatttgttctactcggatataaaggatcaggagctagaaaatttaaataaattaaatttatttactctgcgggttactaataatcaatttgtatacaatgaactgattgaattattagccgaccagctgcattattttgctttgtcccgaacagaagtaaggaaattagttgatgaaggaaaatttaggacgcttactgataaagcaagaggccttctaagaaatcatttagaaatcaaaaaaaatacttcatctacaactaaagagactgaaggaggtgaacttggggaaatattactttattgcctattagaatctcatttaaatgctccaaaaattctaacaaaactagaacttaaaacatcaaatcaaatgtttgttaatggtgcagacggagttcatttgctgaaattaaacgataaggattatcaattgatttttggagaatcaaagctacattctgatttgcagcaaggcatttataaagcatttgaatccattggtaaattactttcccaaaaaggagtaaaaaaagactttgaaattgaattagtaagcagccagctggtaaaggaagcttacgatgagaatagctatgatctcttaaaaaaaattatcataccaagtgcaagcacagacgaaacaaatattgaccattcatttggaatctttttaggatttaatattgatattgatcccgacgaaaaaaagttgcccaatcatgaatttcgtgaaaatatcagaactaaaattactgctcaggttaattcattattaaactcaataaattaccaaataaagaaagccgaattcactggttataatttttatatatacgttattccattttctgatttagaggagactagaaaggacataatagaggaactgttatga

SEQ ID NO: 59073 - DNA, 2580 bp, Flavobacterium hydatis
atgagccaactaaaaatcatagataaattaaccgaggacatactgcgtgatgaatatttcaaaattttattcgataaatgttctttgataaatgctgaacaagctataaataaagagataaaaagcattctttcaaataaagaattgaaggattcattgagatttgcagatattctttcaaattcattagattcagcagcaagaaacagatcttaccagattgttacatttcttaattataattattgtgataatgaaatatatagaacgatgtcaaaagctatatattcaaaattgggtaattttcccgcagtaagatatctggaaaatttaaattcaaatcattctttaatcccatttgatcggatgattgaagtggaagcaaaaaagataatccagcatgttccagactccgaggatcaggtttttacggattctcaatatttattgtttaagaatttaagttcaagcttgagatatagcttttctggtcctacttcaatgggaaaatcatttataataaaagcttttattagaaaagttataaaaaatattcctcctgaaaatttagttgtattagttcctacaagagctctaattaatcagtttacaatagatttaaaaggagaattacaaagcatacttgaacgctataattataaaattgcaacaaattccaatattagcgatctactgacagaggaagttcataactatattctcattttaacaccagaaagattaatcagttatttgtcgcaaaaaaacaatcctcctataggttttttattcgtagacgaggctcataaactcgcacaggaaaaggattcaagaagcataaccacttattctgctattgagcgaacgttgagcaaatatggtaaaaacgttaagttgtatttctcctcgcccaatgtttcaaatccggaggtttttttgaatttgtttgacagtcagactagcgataattattttcaaacagatgaatcgccagtttcgcaaaatttatacttcatagacatattaagtgaaagagtagaattaattgagaaaaatgatttcaaaaaaattgagacagaaaattttaatgaaaaattttccacgatcagtaaagtgatagattatctgggggagaattcgaataatctaatttataataacagcaaaccaaaaactataaatggagcggttgattatgtaaaaaacagagagaataaaaaaatagagatcacaactgccattgcgaacgcctcaaaacaaattagggattacatccataaagattattttttggctgacttaatagaaaatggagttgcttaccaccatggaaaacttccgcaattattgagaaatcttgttgaagatttatataagagcgaggaaatcaggaatgtattctgtacatcgacattattagagggggtcaatatgccgactaaaaacttatttatcctaaataataaaaatggtttaggaaaattggaagaaattgatttttggaatcttactggccgggcagggaggttaaataaagaattatttggaaatatatactgcatcaaacatgagtattgtacatgggaaaataagagtactattttgctcaaaaagcccataactttaaagcctacaattttgaccaaaattgacaagaatcttcagaaaatagaaaaaattttattaaacaaaaatatcagtggtacggaaactgaaaaagaaattttagattacatagcaaacataatatgtatcgatactttagaaatcaggtcttcatacaaaagccctgttattgaaaaacttatccagaaaaataaacaaaatataattgaaattgccaaaagcattacaaaggatataactgtacccagagaaattcttaataccaaccagtcgataaatattagtaaacagcaaaaaatttttaatgttttaaaaggaagacatttaaaaaagcaggatttaagacttccaaatacagatatttcgtatgctgtttgtttgcagattttggaaagtatgtatgatttatatgagtgggataaagctgaaaaaaagctttcaaataagaatagtatgaaatactatgctgttataatgaaccaatggatgaatggaataactttaaatcaaatcatagttcagtctcttaactggcatgatgaaaaatctttgcagttacaagttgattataatgaatttgcagtatttgagaaaaataatttaaatcatgttaacatcgttattgaaaaaattattgatgatattgaatatgtcttaagatttttgtttgaaaaatattttaatcattactatcaaatagtaataaacctattgggtgaagagaattcgggagaaaattgggcaactcttttagagtatggtactcaaaatagaattgttattgcattacagaatatgggattatcaagacatactgcaatgactatttacaataaatgcagatatgcgcttaatattcaggactcaaagctagtatccattaacaaaagtgaaatacttaaaaaatataatgagtcatctattgagtatcatgaaataaataaaatgctgtag

SEQ ID NO: 59074 - DNA, 897 bp, Capnocytophaga sputigena ATCC 33612
ttgatagatgagaacttttcagtatttaatacaaatactacacttactccaacaaacaacaaaaaaatattaagtttaattaatgattttgaaggtggtgattggcgatatgaaaagtttcaaaattttatttgggataatatagtagaaacagctttgtctgcaaaggaaagagagaaattaattgaacagcctttctctagtttaaaagaagctgcaaggaatctacgtttaattaatcgccctgataaaggagaaggaagtgaaattgcggaaatactcctatatggaataatgaaacatcattatggtgctttaccagttgtacctaaaatatttcacaagcaaaatcctaatgataacgcaaaaggagtggatagtgttcatattgttatagaaaataatgatttttcaatttggtttggagaggccaaattttatagtgatataaaagacgcaagtttaaataaaattattaaatctatagaaaattcattaagagaaaatagtttaaagaaagaaaatgctatcattactaatcttcctgatattgatgttgttatagaagaagaggaactaagaaaacgtattaaatctttattaagtaatggtacttctatagataaattaaaacctaagttacatattccaattctattactctatgaatgtgctataacaaaaagatacaatgatttgacgcaagactataaacgagaagttgaaaaatatcataaagatagggctcaatcgtatttttctaaacaaatatctaaaataggtagtatatggaaatattcagaaattaattttcatttaattatttttcctgtaccaaataagaataaaatagtagataattttaaatctaatgctgaacactatagaaatcaatag

SEQ ID NO: 59075 - DNA, 1986 bp, Capnocytophaga sputigena ATCC 33612
atgaaatataatgagattgtaaatcatttgataagggaagtagggctatatccatatattaaaacagatacagctaattgggaagatagatttgtttgtgaagcatttaaagttgatacaggaggagagagcagagtattacatagggaacaatcattccttcttaaaaaattattagaaaataaagatattgcagtaagtgctccaacaagttttgggaaaagttttgtgatagatgcctttattgcgttgaaaaatcctaataatgttgtaattatagtgccaacaatagctttaacagatgaaacacggagaagaatttataagaagtttgccgataaatataaaattattactactcctgaaatagaattaggagagaggaatatttttatatttccacaagaaagagccattaattatgaagcaaaaattaagaatatagatatcctaattatagatgaattctacaaagcagatattgaatatgataaagagagagctcctattttattaaaagcaattttaggtcttcaaaagaaagcaaagcaaaaatattttttagctccaaatatttcagatatagaagataaccctattacaaaagagatgctttttcttccacttgatttttccacagtgtattctgatatttataaatgctatgatgaagttgataaaataaatgatagttttaaaacttctaaaatattagaaattttaaaagaggagaaaacaaaaacactgatatatgcaggtacttatagtaacatcgattttatttctaatgttttaaaagataatattcaagaagtacagaatctgattttatctcaattttctgagtggcttaaaattaattatgcaccttattatatattagcagatttggtaaaaaagacagtaggaatacataatggtaaaatgcataggtcattaagtcaaatacaaataaaattatttgaggaacttgagggattatataatattatttcaacctcttctataatagaaggagttaacacctctgcagagaaaattattatttggtctaataagaatggtagggttaaactcaataatttcacatataaaaacataataggtagaggtggtagaatgtttagacattttataggaaaaatttatttattagaaagtcctccacaaaatactccttctcaattaaaattagaattttcagacgatttaataaattctttagatattgagaatttgaaagaaaatttgacgaaggagcaagaaaaaaaagtaatagctttcagaaatgagatggatggtattttaggagaaggagcttatagtcaaatggttaaaagtaatcaaatacaaagcttagctccaaatagattaaaaaatattgctattttgatgaaagaaaatcctgacgaatggaaaggattatcatatctaaattctaataatccaaatgattgggaaaaatccttgtatttaatattgaagcaaatagggaatataggagctacttataaggatatggttgcttttataaaagtaatctcacaaaattggacaatgacaattccaagaatgctttctctcttacaaggaaatggagttacagtagaaaaattttttgagatggaaagaaatatggcttttaaaatatcatcagtgttaaatgatgtgaacttgttatataatcatatttttgatgaaaaaatagatattagttcatttatagcaaaaacatcttatgcttttttaccaagaatagtgtatgaattagaagagtatggcttgccaagaatgattagtaggaaaattcaaaattcaggtatattaaacttggaagatatagaaatacctattcattctataatagcacaattcaatgaaataggattagaaaatattaaattaaagataccaaccttacatccttttgaattatatatcttaggatatttttatgatggtattagaatcaataacttaaattaa

SEQ ID NO: 59076 - DNA, 1626 bp, Afipia clevelandensis ATCC 49720
atgagcgtgaccgatctcaccggcactatcgatacgcccgcctccgatgcgggcggcgtcgcggcgcgtcgggggttcaaatatcaggatcatgtcgccgcattcttcctcttggccatgatcgacgatccgcgtctcgccaaagtcgaatgcgagaccgccgacgacatcttcctcttctggcagaccggtgagaccgaatatccggaatacgtccaggtcaaaacgaccgagggtgatcgcaaatggacgaaggacgaggtcaccacacgcagtccacccaagaaaccaacctccttggtcgagaaatcgctcttatgcgatcgttatgggcccaacgcgcgctttcggatcgtatcgcgccgcgacgtgaacaaatcgctcgcttgcctgaagcttgaacgcggcgcgcgcttccgtcgcgagcccgtagccgagttgggcaagaagcttaccaagcaactcaagacagtttcgccgcttggaaacgaccttgtctattgggccgagcagaccgtctggcaagtgaccggtgacgtcaccgcattgatcgccttgaaccacaaaaaaatcagcgttcttgcggaacgctttggcggaaatcccaccgcttcgcatgtagaccaaatctatcaggacctcttgcgcatcgttgacgacgctgcgaccgcctcgcgcgtcagtgacccggagaagaaggtgcttactcggagtaccaccatcgcttggtggacggagcaccttgccaacactgaagccgcgcagcagcgcacctcgaaaccctatcgcgccaagaccgacgcgttctttgcagatcttcaccacatgtctgaagactcactgcgtcgcgcgctctcaagctacgacgtgcgctttgaaaacgagcgctggcgttcgcagcagttggccgatcatctcgtcgattggctcccggagatagccttgaaggcgagcgaccttgcatccgtacagcatctccaactgcggcgaaagactcgggacgccgtcagcgccatcaagcgccaacgagctgtctccgatcagcaactcgtcggcgaaacactgctccatgtcgtcatccgccagagctttggcagcgaacccatcgcttgcaaacttttctatcaatctgcaacgggcatgcgcagtttcggctccgcccatatcgtccatgctctgaggggcgacgaactctggcttgggcgcgccaccatcgcgaccgccgatagtcatgaggcgattctcaaagccacgctagcggatctcgaacacgtgctagatcctgatttcctgaaggaggagcgggaaaccattcttgccttgcgcgagcccttgcatctgatgccgaccagcctggaagccgcgctcgcgcgcaacgcgccgatcgacgacctagtggaggccttatgcattccgattttgatcgcctatgacagcacggttttgggcgggggctacgccagggactatcgcacgcgtctggtcgccgaggtgcaggcgtcctacgccgcgctgaagccgcgcctgccatccaccctccaaaacgtgaaggtgcacatcttcttagtgccgatcgaatgcgtggtcaccttgaccgggcaattcacagccctgatgggcggctag

SEQ ID NO: 59077 - DNA, 2175 bp, Afipia clevelandensis ATCC 49720
atggattacggcgaactccgcaacgcacttcaggagcccatcccaccggaccagcgtgttggtatcttgcgagggatcgcgcagcacgtgaacaatacgcatacccaccatgaaggccgcgatctcgtcatccgcgcactggccgtccttgaccgtttcgataaatcccagcgtgtggtcctgatgagcctggtgaggaatgtcggcctcttcccgtatctctctgaaactatcgcggcggcggatgtcgccgaccaactcgccttcgagctgcaccggccggacaatgctgacagcgcgattgtttttcacagccttcaggcgcgcatctaccatcagctcttgcgcggcgccaatgtcgtgctcagcgcctcgaccagttccggcaagagcctcgtcatcgacgagatcgtggcttccgagaaattccgcaaaattgtcattgtcgtgccaaccctggccctcatcgacgaaacccgccgccgcctgttgcgccggtttggggagcgctgcgccatcatcacgcatcccagccaaaacgcgcgggccgaccggattacggtctatgtgctgacgcaagaacgggtcctcagccgcgaggacctagcggacacgcagttcttcgtcatcgacgaattctacaagatgaaccttgcgactgaaaaaaagtccgaccgcgccgtcgacctcaaccttgcctttcacaagctcgccaagaccggcgcgcagttttatctgctcgggcccaacatccaggcgattaaaggcctcgaccgctacgagcaccacttcatcccgtccgagttctcgaccgtggcggtcgatgtcgtcaatcttaacttgcccacgcacggcgacgcgcgcgatgttggcctgcttgagctttgcaagatgctcgacggacccacgatcatttactgccagtctcccggcagcgcgagccaggtcgccaaactgctgatcgaacggggcgggctcgcgccccatgacgcggcggcggccgcggttcactggatcgccgagaaatatgatccggactggatcgttgcgcacgcgctccagcatggcatcggcatccatcacggcggcgtgccccgcgccttgcagcaatatttcattcgtctgtttaacaaccgaaaaattccttttctcgtgtgtacctcgaccatcatcgaaggcgtgaacacggtcgccaaaaacgtcattgtgtatgatcgccgaaaaagccgcgacgtgttagagcattttacgtacaagaatatcgaaggccgcgccggccggatgaacgagtatttcgtggggcgcgtcttcgtgctcgaagcaccgccggacgatcagtctttcaccgtggagtttccgcttggagtgcaaagcgccgacacgcccatgagtctgctcctggatttgccggccgacgacctccaaccgctctcgaaacaccgggtcgaggatcttttcgcgaggagttcgctaagcccggtcacgctgcgcgccaatcgccacgtcccatgggaagtgcaggaggcaattgccagcgaaatccgcgcacggctgccggagattcaacccctgctcggctggacccaaccgccgaccggcccccagctcgaaaccgcatgcgatctcatcttccgctttctcaataagcgcgcgcttcaggaataccgcatcaattcgggcgcgcagctcgcatggcatctcaacgcgctccggatgggcgacgatctcagcgcctacgtcaagacctgtgtggcacgccggtaccccggcgactcgccaagcgatgcggtcgaaaccgccttgcgtctcgtgcgcaatgtgatttgccagcgctttccgcgcgatctcatggcgatcgacgcgcttcagcgcgatgtgctgggcggcgcaaggttgcatacaggcaactacgcctttttcgccgagcaggctgaaaatttattcatgccttcgatcctctttgcgctcgacgaatacggaattccactacaaaccgcgcagcggcttcaggggtttttgctgcctgcatcgtcgctcgacgaggtcctgcaccgtcttgggcggatcgaactgcagaacgccgaattgtcgccattcgagaacgatattcttcacgacgtccggcaaacgctctacccgcaggcacgcccgggcgggccggtgtcggcgggctaa

SEQ ID NO: 59078 - DNA, 888 bp, Rhodobacter sphaeroides ATCC 17029
ttggtgaagcacattggtgtcatggaccagcagttgaggctctctgtgcgcggaatacctagtcgatttcttgaagtgcgttgttcgagctgcgaggaggacaccaacgctttggcgctttgcgctggctatgaaggtgagctgtggcgtgccaagaagctcgccgcccatttattcgcctggttgcctcaagtcgctctggaccaagcccgaagagatacgtttgatgtgtccaactgggaggaactggtagagctcgctgcagcacatgtctaccgaaccaagaagactgcacgtcgaggagagatcggcgagatattgctccatattgcgtgcgtgcaggaattcggcacattgccgatattatgcaaattggttctcaagacaagccacaacgacaccgtaaaggggttcgatgcggtgcacgttgtccattccggggatgattttgaactctggctcggggagtctaaattctactcggatcctaaggagggtattgatgacgcagtaaggtcaatccgcgatcaccttcttcctgcctttttagacactgagaaggctatgctgtatggccacgtcccagatcatgttccgaaagcggaagagattcgtaatcttctccacaagaacacatctagcgatgaactcctgaataaatcagtcttccccgtactggttgcatatcaaagcctttcagtggctagccataaaagattaacgcccgactatgtctcggacctgcagcgcgagtgcggtaatctgttgacgcacctaaggcaaaaatcggcgggcataccggtgaggatccaagtaatttttgttccggtgcatgtcaagaaagatctgattgctcatttcgacaagaagctggaggctttccaatga

SEQ ID NO: 59079 - DNA, 2136 bp, Rhodobacter sphaeroides ATCC 17029
atgagcttgttaggaactctccgtggcatctccgaaacgacgcctctttcggctgacgatgtttttgaagctatactcgaagcaagcagaatttcgaactcagcgcgttacgaagacccggaagcgctggagatcgcgatccgtcttcttgatgcgagcgaaagaggtttggtgcccttcggttctcacacggccattgagcatctcgccgaagaatgtgggctatttccgtatctcgacatagacaccctcaccccatttcgcgcaacattagtcgaagctttttctgtcaatttgaaccaacataagttctacctccacgcaaagcaggtggaggttttagttcacctcttaaagggcgagaacgtcgcactaagtgcgccaacaagtttcggtaaaagtctactactagacgcctttattgaaagggccaatccctcaaccgttgtcgtcatcgttccaactatagctcttatcgatgagactcggaggcgccttcaaggaaactttgggagtcgatatcaggtgatatcaaaagcatcggatgtgcgaagagaagggcgggtgatctatgtccttacccaagagcgcttcttaaaccgggacgacatcaagatcattgattttctatttgttgatgaattttacaagctcgatcccggtcgcgacgacgcaaggttcaggacacttaacgtggctttttatcgcggccaacgcattgctcgtcagttttttttggcggggcctaatgttgccagcttgagcgttggcccggcatggaaagaccgtattacatttatgagatccaactaccagacggttaccgtgaatgcgattgatagaacaagaagccttaagaggttctctacctttcttagtgatttgcggtccgtcggcgaggaacaatcgctgatctactcaagatctcccccggcatctcgacgtcttttggaagaactgcttggaggaggttatgcccaggagtgtgagataggcacggaactaggcttgtggatcgctgagaattaccatcctcaatgggttttggtggatgctgttggaaaaggtattgcgttgcaccatgggaagataccgcgggcgcttgcgcagttattcgttcagctgttcaacgaggggcgggtgccagttatgatctgcacctcgacgctgatcgagggggtgaacacgtccgccgaaaatgtttttgtttatgacaaagagatcggcactcgtccatttgatttcttctcgttttctaatattcggggccgcgtaggccgaatgatgcgacattttgttggaagggtttttctttatcacgctccgcctcaagcagatgagctagtagtcgagatcccggcgctttccgatcccagtgaagcggacgactatatcctcatgaactacgagaaggacgatcttgatggctccgcgctaagaaagcaatccgccctccctcttgaatacaacttgagctttgaaacgctcaaagagtttggtcattttggaggcgaagctctacacaacaccaaggacaccgttaggaggatgataggcgataagcctaaacattttaactggtctgggcatcctgattataatcagagagtagcgctggcgaaagctattcggccactacttacaagcaagaaagacaaatccaccagactgaccgcaaaacaaatggcttgggcgtgggatatgttatctaagctcaagtcgctcccggagttccttcactggtttcaaattacgttctcggcggacgaagtgcaggaaggtatcgagagagctttcgaatttctggggtcatgtgagttcaaccacgcaacggcaacagcggcggtgaatcgactcgtccttgagcttcggccggatatgaatgccgactattctctatattcgtttcagttggaatcgtggtttcgcccgccttggctgaaggagctggatgaggtgggtatcccactcccactgtcggagcggttgcttcgctttgtcgggcgccaggatgattataaagctgtgcttcggcttctaaaggggcttccggcgcaggtgatggatacactttcgccgatagatataatgttgatttccagagcgactgaagctgaaagaacgcagctcttttag

SEQ ID NO: 59080 - DNA, 942 bp, Rhodobacter sphaeroides ATCC 17029
atggcagagatcactgatgcacagctcgccgggattttatcaggcgatccagacgagttaggtgttcacttacatcttgtcgaacgcgacatcgtgatcaacggccacaagacgacagtgtattgccattgtttgacgatcgatggaaacggaaaaattaagataaagcgtctagctgaattcatgcgccacgctgctgctgattatgcaattccccgtactcgcattgaagaagcgaagcagcgggatgccaagttccgatccacatcagccgtcgcagctctccacgaaaaagcaagagctgtgttcaccgacctcgccaacaccggggaaggcggggaaatgcttctcttccttctggcggaacgctttttgggcatcccacatgttctctgtaagatggaccttaagaccgacagtcgcatgcattatcacggtgcagatggtgtctacgcatcggtttccgacgacggaaagctgaagcttttctggggagaatccaaagtctacaaggatccaactgatgcgatccgggagtgcctcagctcgctggcgccatttcttattgaagaagatcatctcgactcatcacgggagcgagatttaatgcttctgagcgacaaggcagatcttggcgatccggaattgtcagcagccttccgtcgcttcttcgacgcaagctcgcccatgtccaacagggtagagtattgcggcgtagcgttggtcggcttcgatgccgaaatctatcctgccgacgatggacagggtgtgctggacgatctggtgactgccgcgaaaaaggagctcgggagatggtccgcatcggtcggtcgaaggctgaccgaggagaagcttcagcattttgatatccacttcctctgtctaccgcttccatccgtcgataagttcagagaagcgtttcttgaagcgatggggcgttaa

SEQ ID NO: 59081 - DNA, 2607 bp, Rhodobacter sphaeroides ATCC 17029
atgtctcaaacagaactccaagattggctttacgacacgtcattgcggggcgagttgcagcagctcggcatggttaccacacttttagaactagacaacgttgccccggaacccacgttggcggatgtcaagttcgattggccccgtcttatcttaggtgcgagcatccttgcacgttcaaagaagcgcctgcatcgcgaggcaagtctgcgcatagccaccagcgcgatgctgctatcgacgtcagacccggtccgcgatgcagccgcggtgcttttcgacaagctttcaaaccgccgctcggtggcactcgccgaaaagcgagggcggttgaagcccaatctggaagcgcgactgggcgtcgcgcttcgaatcgaggatcagcgcaaccaactcgaaaattccatccttctggaagcgacgggtgagcgcttgccagtcaacgagtttcagctcgaattttggcgcgctgctggtcaggatagggcttggctgtccgcctctgctcccactgcatccggcaagaccttcctcgtattgaaatggcttgtagattgtatcgcgacagaaaagattcagcgggcagtctatctcgcaccgacacgcgccctcgtttcggagattgaagcgtcgctgacagaggttgccgcacaggccgggctcgacgtcgagatctcgtcgttgccttccgcacagaaatatgcctcggcaaagaaatccggtaggcgatccgtatttgtcttcactcaagagcgattacatcttctggttaaccttttacacgaacgcatcgatattgatctcgtcgtcgtggatgaggcgcacaagattggtgatccgcagcgcggcgtcattcttcaggacgccatcgagcggcttctccgatcaagccccaatatgcgtgtcacatttgtaagcccggccacacaaaatcctgaagtgctgctcgacgacgcgccggagaccacgccgaccataccgatcgacagtgatgtggcgaccgtgttgcaaaatatcgtggtcgcgcatcaggtcccagcaaagcctctcaaatgggcactgaaatttcggcacaatgaggaatgtctgcctctcgggaccctgacaatagcgagtaagccgggctcacttgcgaaaagactcgccttcatcgcagcagcgataggtcagcggggcggcacactggtttacaccaatggagcggcggaggctgaacatgtcgccgagctcataagtcaactactgccgaaagcaaaagagatcgatcaagaactagccgacctttcggacttggcccggaaatgcgtgcatagaagctatagcctgggtccattggtcgaggccggggtcgcgttccattatggaaacatgccttccctgatccgtctagaagttgagcgcctgttcaagaccggaaagctgaaattcttggtttgtacttccacactcattgagggtgttaacctctcttgcagaacgatcgtggttcgcggaccccgcaagggaaagaagacacctatggagccgcaggacttttggaaccttgccggcagagcgggcagatggggtgatgaatttcagggcaacatcatctgcatcgacgcgtcagacaaaaaagcttggccgtctggcgttccccaacgcacccggtatcctatccagagagaaaccgatactgcgctgtcgaagctcgacgaactggcttcctatatagaacagcgccctttgggcgttgacatcgatcgtcatcaggcccgagcatttgaacaggtaagcgcttatcttacgaccgcctatgtccgcgaccggtctctgacagccgcaccatgggcaaaacgccagtcttctgcaaccttgcaacggctggagcaggcactcgcgaaagcgaccgatggcctcgacctcgctgccgatatcggcgctcggaatcccggcgtcagcttgatcgggctgcaaagcctgctagcgtatttccgaacttacggtggatcgccagaagatctgctggctgcaccttcggaaagcgacgacgcgtatcagcgtttctcaaacatgatggaacggatcaacgacaatgtcttgaccgtatttgtgccgaagaccctgattccgcttcatgctctgacggtgcttcaatggctcaagggattctccctgccgacgattatccgtaagcgactagagtatctccaacggcgcgacggcgaggtcgatacggccagcgttattcgtagcacgcttgagatgatcgaagggactgcccgctttcttgccccgcgttatttttcggcctatgtcgacgtactgaaccagcacttgaggactataggccgggaagacctgatcgaccaagacctcgatatcggcgttgcactagaatttggcgtcagcaccatgaccctgcgctccttaatggatcttggcatgtcacgcataggcgccgtagctctatatgaaattgtcgcactggatcaactggatgaggcagcctgcattcaatgggtcgttgagcgacgcgaacggctggatgccatcggtctcccgtccattgtggtccgcgaaatccgtgaaaaattgcttgcaagagcggtattgaaggaggagtag

SEQ ID NO: 59082 - DNA, 963 bp, Rhodospirillum rubrum ATCC 11170
gtgggggcccttctgtcgaagattactgcaactgatctagcgtcgacgctgactggagacccggaagccctccatgtccacctcacattggttgcgcgcgatgtctccatcaagggccataccgttaagatccattgtcactgcctgacagtggatggcaatggacgagtccagccgcatcgacttgccgaattcatgcgcaacgctgttgtcgactatgcgatcccccggtcgaaagtagccgacgccaaggctcgggatctgaaatataacagcaccgaggctacaacagagttggtcgaaagggccaaacgctccttcaccgacctcgcaaataccggagaagggggcgaaatgctgctcttcctgttagcagagcgcttcctcaagctaccccaaatactgtgcaaaatggacctcaagactgacacccgcatgcattatcatggtgccgatggagtctatgcgggggtcaccccaagcggcacgctcaagctctattggggcgagtccaagatatacaaaaaggtgggtgacgcgatccgcgactgccttgcatcgctggcgccattcctgatcgagccggaacatgaggatgccgaacgcgagcgcgatctgatccttctgagtgacaaggccgatctcacaaattcggaactgaccggcgcgctcaagcgctatttcgaccgctcctcagagatgtcgacgcgtgtccaatattgcggggtggccctcgtcgggttcgacgcgcctttctacccagccagcgatgtaaaggtactcgccgaccagattgtagatggctcccgccgggcgctttccgactggagtgacaagattggagcacggctcgctgcggaaaagctcagcgacatggaaatccagctcttttgcatccctcttccatctgcggacgggttccgagctgcctttctcaaggccatggggatcaagggcggatga

SEQ ID NO: 59083 - DNA, 2610 bp, Rhodospirillum rubrum ATCC 11170
atgagcctcgccgacctgcagtcctggctgcgcgaagagggcatccgcgaggatctggatgcgatcacacgtatgacagtccgcaccgagatcgacaatcttcagccggatccgatccaccttgagatcgactggtcgcgcctgctgctggcaggcagcatattggcgcgttccgatcaacggaccgaccaggaggctgcacttcggatcgcgacaggggcgatcgcgctaacagacaaacaggccatcagggatgccggcgccgtcctcctcggcaagctatccaattttcgcgccgtcgcgctagccagcaagcgccacctgcttgcagaagatctcgaaggccgattgggcgtgacattgcgcctagaagcgcagcgtcgcgagatggagcgctcgatcctagtggagtcgagcggcacttggcttcaggtcaatgatttccagcagcgcttctggaccaatgccaacatgccaaattggctttcggcctccgccccgaccgcttcggggaagaccttccttgtcctccaatggctggtcgaccaaatggtagtgggcgcggcgaccattgccgtgtacctcgcaccaacacgcgcccttgtctcggagattgaagctaatcttcaggcgctactcggcaaaggtggaccgatcgaaatctcctgccttcccctgcgcgaaaaatatgacgcggcacgagccggtagccgtcggctggttctagtattcacccaggagcgcctgcaccttcttgccaatgtgctcggcaaggattttttaattgatctgctcatcgtcgacgaggctcacaagatcggtgacaatcagcgcggcgtgatcctccaagacgctatcgagcgagcgacccgagctaatcagaagctcaaaatcgtcttcatcagccctggtacgcaaaatcccgaagagctcttgtcggatgcgcctgaaggtgtggaaaccgtcgctgtcaacagcgacgccccgaccgtcctccaaaatctgatcgtggcagaccaagtgccacgcaaaccgaagctctggaacttagctgtccggcaacaagatgtactgctcccgatcggcacgctcgagctttcgagtacaccagaggggtcgcgcaagcggctcgccttcatcgcggcagccgcaggacagaggggcggaacgctagtatatgccaatactgcgggagaatcggaaaaagttgctgatctgatcagccagttgctgccggcacccgacgagattgataccgaactagctgcgttggccgacctcgcccgcaagggcgtgcatcccaatttccggctggcaccgctcgtcgagcgcggcgttgcctttcactttggcaatatgccctcgctgatccgcatcgagatcgaaaggctcttccgatcgggcaagatccgcttcctcgtatgcacctccaccctgattgagggtgtgaacctctcatgtcgcactatcgtgctgcgtggcccccgcaaaggaatcggccgtccgatggagccgcatgacttctggaacctagccggccgcgcggggcgctggggcgatgagtttcagggtaatatcatctgcatcaatccacatgacaagaccgcttggccgaccggggtcccccaacgtgcacgataccccatcaagcgcgaaagcgatgcagttctcgaactcggtgacgagttggctgactatctctccggacgcgatagccatgacctgtcggcactcggcccatccgataagttcgagccggtgggagcatatctgctcaccacctatatgcgccttggtacgattacggccgcaaacctagccaaacgccatgacgacgcatcgctcgtaaagctcgacaaggcgcttgagcgtctggccacacagatcgacattgatgtcgaccttgccgcacgccatcccggcgtgagcgcgatggggctacagcgtctcctcgaaacgttccgcgcttattcaggtgacgtggagaatttgttgccggccgaggtagcaagcatggatagctacgatcggtttgtcgccatcatggggagaatcaacacacatctcttccctgcttttggtcctgaaaattttaaccggctctacgcgctcgtggtcgtgaactggcttcaaggcctctcgctggcgaccatgatccgcagaaacatcgaatggcatcagaaggttggcaaagagtttcggcttcccgcattgatacgcgatacgatggatctcgttgagcagatcgcaagattcaaggcgccgaaatatatctcagcctatatggacgtcctctatatgcatctgcgtcagatcaagcgtgatgacctgattgatcatgatcttgatatcggaactcagctcgagttcggcgtttcgtcccgaaccttactgtcgctcatggaactcggcctgtcccgtatgagcgccgtcgctttgtatgagaggatcgcgaaagacaatctaagcaaagaaacgtgcatcgagtgggtagctgagcgccgtgatcgcctagaagagatggatataccgacgatcatcgtccgcgagttgcgcgagcgccttctgccaccagatgatcaagacatccccgtacaaagccgagaatga

SEQ ID NO: 59084 - DNA, 963 bp, Rhodospirillum rubrum F11; identical to SEQ ID NO: 59082

SEQ ID NO: 59085 - DNA, 2610 bp, Rhodospirillum rubrum F11; identical to SEQ ID NO: 59083

SEQ ID NO: 59086 - DNA, 741 bp, Staphylococcus aureus O11
ttgaacaacaatactagtatagtaagaattagtagagagacttttaaaaaaatttatagcatacctgaaattaaagaagctagtgattactatttaaataataatgaagtagaagataagtatttaaaaaaaggtgaatttggtgagcttattctatatcattttctaaatcattattttcaagccgaatcgctaatttcaaaaatatactttaaagatagtaataatttagcagctcacggatttgatgctgtacatgtaaatgtatctaatagagaactatggttgggtgaatcaaaattatatcaagatggtaaatcagcaattagagaattagtaaaggatctaaatactcattttaacagagattttttcaattcagaatttacaattattaataatagagtacaagatgatgatgctgagctggatgatttcatgaaaacattaatttcccctgagacactttgcttagataaattagcaaatataaaaattgcattattcgcggggtttacaagtaaatatataagtaatagaaatgaatttgaagataaaaatacattcgataaagaattgagtaaggaatctgttgatttattaaactcacttaataaaaaaaaggattcgcatgcatgggttaattatttagatatatacctatttttattcccattaaatgacaaaaaagagttggtcaaggatttgcatattaaattaaaaggggcacaacaaatataa

SEQ ID NO: 59087 - DNA, 846 bp, Staphylococcus aureus O11
atggaaaataataatattaaatatcaaaatttttcagatatgtttgaactagctaaatatgtatctagtaaaattgatcaagaagaaggaagaaatattgtaattagagtattagaaaattgggatagtgtttgtaaagagtcaaaagaaatttgggtgaatttaattgagagagcaggattttatccatatatatcaaatcttgaccatgagaaattgagcttacaaggtagtttgagaaggaattggttcaaatcagaaaatttagaagatgtatattttcatgtgaaacagaaagaaatagaaatagctttaaataaaaatgagaatattgtagttagtgctccaactagttttggtaaaagtttaattattgaagaagtaatcgctagtaagaaatatgataacttgctcataatacagccgactctggcacttatagatgaaacaagaagaaaattaaataagtataacgactataatatagtagtaaattcaaaacaagaaatgaaagacaaaaatatttttattttaacagctgaacgtgttctagaaatgaaaagtcttcctcaaattaatttcttagttgttgatgaattttacaaaataagtaacagaattaatgatgagcgtatagacgttctaaatattgcaatagctagaataatgtatatgaatcctcaaatactatttttaacacctaatattgatgaaatttcaaaatcatttttagaaaaatataatattaattttttaaatacaacattttcaatggtcacaaatgaaatgattaatatagaatataacagctcaaaagataaaaaaagaaattatttgatatattga

SEQ ID NO: 59088 - DNA, 651 bp, Staphylococcus aureus O46
ttgaacaacaatactagtatagtaagaattagtagagaggcttttaaaaaaatttatagcatacctgaaattaaagaagctagtgattactatttaaataataatgaagtagaagataagtatttaaaaaaaggtgaatttggtgagcttattctatatcattttctaaatcattattttcaagccgaatcgctaatttcaaaaatatactttaaagatagtaataatttagcagctcacggatttgatgctgtacatgtaaatgtatctaatagagaactatggttgggtgaatcaaaattatatcaagatggtaaatcagcaattagagaattagtaaaggatctaaatactcattttaacagagattttttcaattcagaatttacaattattaataatagagtacaagatgatgatgctgagctggatgatttcatgaaaacattaatttcccctgagacactttgcttagataaattagcaaatataaaaattgcattattcgcggggtttacaagtaaatatataagtaatagaaatgaatttgaagataaaaatacattcgataaagaattgagtaaggaatctgttgatttattaaactcacttaataaaaaaaggattcgcatgcatgggttaattatttag

SEQ ID NO: 59089 - DNA, 846 bp, Staphylococcus aureus O46
atggaaaataataatattaaatatcaaaatttttcagatatgtttgaactagctaaatatgtatctagtaaaattgatcaagaagaaggaagaaatattgtaattagagtattagaaaattgggatagtgtttgtaaagagtcaaaagaaatttgggtgaatttaattgagagagcaggattttatccatatatatcaaatcttgaccatgagaaattgagcttacaaggtagtttgagaaggaattggttcaaatcagaaaatttagaagatgtatattttcatgtgaaacagaaagaaatagaaatagctttaaataaaaatgagaatattgtagttattgctccaactagttttggtaaaagtttaattattgaagaagtaatcgctagtaagaaatatgataacttgctcataatacagccgactctggcacttatagatgaaacaagaagaaaattaaataagtataacgactataatatagtagtaaattcaaaacaagaaatgaaagacaaaaatatttttattttaacagctgaacgtgttctagaaatgaaaagtcttcctcaaattaatttcttagttgttgatgaattttacaaaataagtaacagaattaatgatgagcgtatagacgttctaaatattgcaatagctagaataatgtatatgaatcctcaaatactatttttaacacctaatattgatgaaatttcaaaatcatttttagaaaaatataatattaattttttaaatacaacattttcaatggtcacaaatgaaataattaatatagaatataacagctcaaaagataaaaaaagaaattatttgatatattga

SEQ ID NO: 59090 - DNA, 915 bp, Staphylococcus aureus
atggcaaatcaaattgtatttaatgcagataatcaaaaaaaattacacacattctatatagactttgatttaagtgatactggtgagttagagcaagttaaagaagaattttacaacacattatttgaagatatacctgaatttgcttttggtaagagacaagttgaaaaaagattgaacaacaatactagtatagtaagaattagtagagaggcttttaaaaaaatttatagcatacctgaaattaaagaagctagtgattactatttaaataataatgaagtagaagataagtatttaaaaaaaggtgaatttggtgagcttattctatatcattttctaaatcattattttcaagccgaatcgctaatttcaaaaatatactttaaagatagtaataatttagcagctcacggatttgatgctgtacatgtaaatgtatctaatagagaactatggttgggtgaatcaaaattatatcaagatggtaaatcagcaattagagaattagtaaaggatctaaatactcattttaacagagattttttcaattcagaatttacaattattaataatagagtacaagatgatgatgctgagctggatgatttcatgaaaacattaatttcccctgagacactttgcttagataaattagcaaatataaaaattgcattattcgcggggtttacaagtaaatatataagtaatagaaatgaatttgaagataaaaatacattcgataaagaattgagtaaggaatctgttgatttattaaactcacttaataaaaaaaaggattcgcatgcatgggttaattatttagatatatacctatttttattcccattaaatgacaaaaaagagttggtcaaggatttgcatattaaattaaaaggggcacaacaaatataa

SEQ ID NO: 59091 - DNA, 846 bp, Staphylococcus aureus
atggaaaataataatattaaatatcaaaatttttcagatatgtttgaactagctaaatatgtatctagtaaaattgatcaagaagaaggaagaaatattgtaattagagtattagaaaattgggatagtgtttgtaaagagtcaaaagaaatttgggtgaatttaattgagagagcaggattttatccatatatatcaaatcttgaccatgagaaattgagcttacaaggtagtttgagaaggaattggttcaaatcagaaaatttagaagatgtatattttcatgtgaaacagaaagaaatagaaatagctttaaataaaaatgagaatattgtagttagtgctccaactagttttggtaaaagtttaattattgaagaagtaatcgctagtaagaaatatgataacttgctcataatacagccgactctggcacttatagatgaaacaagaagaaaattaaataagtataacgactataatatagtagtaaattcaaaacaagaaatgaaagacaaaaatatttttattttaacagctgaacgtgttctagaaatgaaaagtcttcctcaaattaatttcttagttgttgatgaattttacaaaataagtaacagaattaatgatgagcgtatagacgttctaaatattgcaatagctagaataatgtatatgaatcctcaaatactatttttaacacctaatattgatgaaatttcaaaatcatttttagaaaaatataatattaattttttaaatacaacattttcaatggtcacaaatgaaataattaatatagaatataacagctcaaaagataaaaaaagaaattatttgatatattga

SEQ ID NO: 59092 - DNA, 915 bp, Staphylococcus aureus; identical to SEQ ID NO: 59090

SEQ ID NO: 59093 - DNA, 846 bp, Staphylococcus aureus; identical to SEQ ID NO: 59091

SEQ ID NO: 59094 - DNA, 915 bp, Staphylococcus aureus; identical to SEQ ID NO: 59090

SEQ ID NO: 59095 - DNA, 846 bp, Staphylococcus aureus; identical to SEQ ID NO: 59091

SEQ ID NO: 59096 - DNA, 915 bp, Staphylococcus aureus; identical to SEQ ID NO: 59090

SEQ ID NO: 59097 - DNA, 846 bp, Staphylococcus aureus; identical to SEQ ID NO: 59091

SEQ ID NO: 59098 - DNA, 915 bp, Staphylococcus aureus; identical to SEQ ID NO: 59090

SEQ ID NO: 59099 - DNA, 846 bp, Staphylococcus aureus; identical to SEQ ID NO: 59091

SEQ ID NO: 59100 - DNA, 915 bp, Staphylococcus aureus; identical to SEQ ID NO: 59090

SEQ ID NO: 59101 - DNA, 846 bp, Staphylococcus aureus; identical to SEQ ID NO: 59091

SEQ ID NO: 59102 - DNA, 915 bp, Staphylococcus aureus; identical to SEQ ID NO: 59090

SEQ ID NO: 59103 - DNA, 846 bp, Staphylococcus aureus; identical to SEQ ID NO: 59091

SEQ ID NO: 59104 - DNA, 900 bp, Streptococcus oralis SK304
ttggaagttaataataattcaataaaaattaaagaagtaacaactcatcttgggacatttgatattttatcaaatactaagttggaagttttttcgtttataataaatgccaatgagtttgactatagaaatgctatagaatatttgttagaatcagtcgcggagtttgctttatctaggaagataaataaagaatacaaagatagcccactgcatttatcaaaaaaagctagagaaaaatttagagattatacaaagaatacaggggaattaggggaattttttttatattgctttttagaaggtcatcttggagcaccaaaaattctatcaaaattagagttaaagacagcaaagaatatgtatgtgaatggtgctgatggtttacattatttaaaattagatgatgggaattatcatttgatttttggagaatcaaaggtcgagaaaaaattaactgatggcttgaggagtgcttttgaatcaatcagtgattttaaagaaggtaaaaataaaaaaggtgataataaaagtggaataatgtttgaaaaaggcttattaaattcaaatcttagtagagaaattgaagatgaagatgagaagatgtttttgaaaagcattatttatccatcctctaagtcagatttttatgtagatgatgcttttggaatttttgttggatttgagtataattattccgaattgcaaaaattatctaatattgaatttagaaaagctattaaagaaaaaattttagaagcaacaaaaaagcaaattaagaatatcaatagatatgtgcaagtgaataaattgtttggtcacactttttatatatatgttttgccatttgcggatatcgaaattgataggaaaatgattttaaaggagttattgagttaa

SEQ ID NO: 59105 - DNA, 2556 bp, Streptococcus oralis SK304
atgaactttatagaagaactaacagaagaagctcttcgtgatgaatatttaacttcgttagttactaaaattgaaaagagttatggacgttttcttttcaatggtaattatataagattggataataaagaattttatgatttaatgcgcttcacagatatcttatctagaagtaataatacgaaagcgaaaaatttagtattgaaaattttagcactttgtagtgagcatcctaatataaaagaaaatcaggattttaaaatttttgcttcaagtgctttggtaaaaatgggaaacttcccatctctaaatattgttaatccagacggcgaattaaattctgaaattgttattgataaagtagtaaaggaagtttttcaagagtcacctaaagaaggttatttctttacagatgctcaatataagttgtttgaaaatctgaaagatagtaatcatttcagtttttctggttcaacttcttttgggaaatcatttgtaattgagtcgttcattaaatatattatagatacaaaaaattccagtgaaaatattgctatcatagttccaactaaagcattaattaatcaaaatgttttgaaattaaaagatgaattgaataatgataagtatgaggttgttgcttatcctaaaataccgttactttataagttaaaaaataagcgttttatatttgtttttaccccagaaaggttaatttcatattttgctgaaaattctaatccctcaataggttacttatttgttgatgaagcacaaaaattgttaaatgatgatacacgagcgcccctattgtaccattctattgctcaagctaaaaggaaaagtgtcaatatttattttgcgtcacccaacatcccgaatgtagaagattttttaaaactttttggtagtagtagagaagaaagtatggcaatttatgaaaagtcggtcacacaaaataagtttttagtggattcgtttaataaaaaatctgctatgatattggagaatgaaattgagtatccgttgggaggattaaattattttgaaacagaagatgaaaatataagagaaattcttacaaagttaggaagaggatgtcaaaatatagtatattgtaacacagtgaagtatactttaaatttttcagtaaattttgctataaatttacctgatataaaaaatgagaaattagagaaattaattaaaagagtatcttctactattcataaagactattatttgattgattgtttacggaagggagttgcttatcattttggaaatttaccacaggttgttcgagaaggaatcgaagaattgttcaaagaaggtgttataaaatacttgttttgtacatcaacacttttagaaggagtgaacctaccggcaaagaatatttttattttttctgaaaaaataggtttacaaaaaatggatgatattgatttctggaatttatccggtagagcgggtagactaacaaaagaattaagtggcaatatcttttgttgttatataattgacaaaaaaggatattggaaagacagtgattttgctattttaaagaagaaaaaaattgaacaaaagattcctgtcttgttaagaaaaaggaatcaaaatttctatcaaaatataaataatttgttaaataatgcaccattaactaataaaaaattacctgaacctaaaaagaaaattttagaaatgtattcaaacatacttctataccaagattttgttgaaggatcttctattttgaaagataaatttttagaaaaaataggtgatagtggtaggaaaacattgaaaaaaaagcgattagaattagtagttccagaaaaaattattgaacaaagcattaatattaatttagactcacaaaataaaatattgacaggtatagctactccttttccaaataaatttgactatgatgcttgcttggaaatattaaaaatattatgccaaaaatacaactggcttattttagagagcggtggtaatcatccgttgttaaaaaaagaaagtcaacttaaatatttagcaacattgatgttaaattggattagtggcagacccttaaatcaaattattaattatatgattaattattaccataataaaggaaatcctcgagattttgagatagataataatttttatattccttttgacaaatttaatagagatcatgtaaatgcattaattaatcaaattattagagacataaatacgaagattcaatttaaaattaaaaattatatttctaattatgtcctgttacttattgaaaaaggtatcgaaattgatagtgagtgggctagttatttagaatatgggactactgagaaacaagtagtagaattgcaaaatttaggtttttcaagaacaacttccttatttctaaacaaaaattttattgaacagtttatctttaatgagatgggagaaattatagagataaaagaggaagagttgcaaaaaaaattggacgtggcagaattctctgaggaatttcatgaaattagcgaaatattgagatgggagaaatga

SEQ ID NO: 59106 - DNA, 918 bp, Streptococcus suis
atgagtcataattatacgaaaaacttttgttttagtgaaaatgttcatgttttttatattgattttgatttggaagattcaggggcagtgactcaaaaggataccaaaaagcaattttataatgagttattcaacgatattacctcatttgcattcggtaccaaagaggtaatgaaaagagtaaaaacccctcaagatatgacagagattcaaagggaagcactggaaaaaatgtatcaaataaaagagttgagagatgctagggagtactatctgacttcgaatgtagtagaagataagtatttaaagcgaggtgaatttggtgaattaatactctatcatctgttaaatgaatactttaattccgattccctcatttcaaaaatttactttaaagatagtgctggtttaccagcacatggatttgatgctgtgcatattgatgtggaaaatcacaaactatggataggagagtctaagttgtatgaaaaatctacatcggctattgatgagttgattaaagacttacatgaacattttaatcgcgatttttttcattccgaatttgtaactatacagaatagagcaattaatgatctaggactagagttagatgattttactaagatgatcattgaccctaaaactaaagttttagatagaatagctggcattaatgttgctttatttgcaggttttacaagtcaaaatataaatcaaaaattcaaaagtcatgaagagttggtggaaaggcttaatagtgaaattgaaattctaaaaacaagagctgataataaagttgttgagcacccatggaatcaacaattaaacattttcttgttcctgttcccattagacagtaaaaaagattttgtaaaagatttacatttgaaattaaaaggggcgcgacaattatga

SEQ ID NO: 59107 - DNA, 2136 bp, Streptococcus suis
atgatttcacttgatgagtttttaaaacaggaagtatttaatgactttaatgataattttgagttaataaaggaagtttcaaatatagttgatactgatattgctaggaaagcactgattcatgtattagatatatgggaaaatgtgaatgaaaatgctaaagaaatttggctagatttaattgaaggagcgggattctatccctactttgtatctcatattaaagatgtatctggcgatgatatttcgttaaaaactcaaatacgaactgctttttataaatcaaataatttagaaggagtgtattttcatgaagaacaaaaagagattgaatatgctctaactaagggagataatattgctgtaagtgcccctacaagttttggaaagagtatgttgatagaagaaattgttgcaaggaagcaattttctaatatcttaattatccaaccaacattagctttaattgatgaaactagaagaaaattacaaaaatataatgatttttatacagtagtcattaatactaaacagagtattggcgagaataatatttttattttgactgctgaacgagtgctagaatttcctaatttaccacaaattaatttttttgtaattgacgaattctacaaaattagcaatcgaagaaatgatggtaggattgatgcgttaaatgtagccctgatgaaagtaatggaacatagaccgcaaagtttgttcttaactccaacagttgattctttgtcagaaaggtttagagagaagtacaatattgaattttataggacagattatagcttggttaatactaacattatagaagttaggactccaagaaccaataaattttatagtactactgctaagaaaaagagactttttgaattattattgagtcaatcagaaccaagcattgtttatgtaaaatctccaggcgaagcatataagttggctaatgaatactttgaatttttgaaggaaaaacagattgaattagagacattaggtaataatgatttattagagtggatagatgaaaatatttctcctcaatgggaactgagaaatttgctgtatcataagataggtacgcataatggttccttaccaagacatatggtaacttccgaaatagaactatttaataataaggagttaaaagtattatttgctacaacatcactgatagaaggtgttaatacagctgccaaaaatatgttcatttatagttcctataagggacagaggacaaaaattgatttttttgattttgctaacattagaggtagagctggtagaatgaatcaatactttacagggaatgtatatgtcttttttgaagaaccttcccaagaaaactttgtgattgatgttcctagtattgatcaagaagaggtatctgatgaaatcatagttaatataccagatgaagatttacgagataaaactagaaaagaagaactattttctgatctggatgaggacttgcaagaaatcataaaaaagaatttagtatcggttaaaggtcaaatcaatctttataaatttataagtagccataaggaatatctagttgacttggtatggagtgttagcccaaatttagaccaacttcgtttagttttaggattaggatataaatatttatataataatgataaagagagatttattaatcgacaggcgggctcagccatggctattgctaataatccattaaaaactgtcatacttaatcaggaaaatttttttagagaccaaggtgaagaatatcctttgaaaaaagcaatcgattatgtattggaatttcaaagaaaagaggcaggttttgcgattcctaaaattttagcagtagttgattcgatacaaaaatatgtctttgaaaaagcaggtatggaatttggtgattattcaatttttgcatcaatgctagaaagtgagcaggttccagaaaatctacaatttctaatagattatggagttcccagctcggcattgaaaaaacttcgattggtaatttctagtgatttaactgataatcaagttattaagactttaagggaacaatcccagtttttattaaagcgacttctgccgtatgaacaaaagctattaatgagagcaattagttaa

SEQ ID NO: 59108 - DNA, 918 bp, Streptococcus suis; identical to SEQ ID NO: 59106

SEQ ID NO: 59109 - DNA, 2136 bp, Streptococcus suis; identical to SEQ ID NO: 59107

SEQ ID NO: 59110 - DNA, 906 bp, Streptococcus mutans NLML8
atgagccataaccactcagagcatatagaaaataaagagaatgttcatacattttatataggatttgatttggataattctgggaatatgtcacaagtaaaatctaaattctatgatgaactatttgacgatattactgcctttgcatttgggacaaaaaatgtaatggagagaataaaaacaacacaggatatttcaaaagttcaaagagaggcgcttagaaagatgtataagattcccgaacttcaagaagcaagtaagtattatcttgagtctgataatgtagaagataaatatctaaaacgaggggagtttggggaattacttttatatcatttactacatgaatattttaatgcagatgctttaatttctaagatatattttaaagatagtctagggttgccagcacatggatttgatgccgttcatgttgattcagaaaatcgtattttgtggttaggagaatcaaagctatattcatcatctaattctgcaattgatgctttgatgaaagatttagaagaacattttaacacggacttttttgaatctgagtttgctattattgataatcgagttcatgatagtggcattgaacttgatgatttcatgaaaactctgataaatccgcaaacaaaagtattgagaaagctagctaatataaatattgctcttttcgctggttttgatagtaaagcacttcgagagtatagtgatgatcaaacctttaaagaaaatttagagagtgagattgaattattgagagaaagagcaattagtaaagttgcgaatcattcgtggaacgagcacttaagtatttttttattcttatttcctgttgataataagcgtgaatttgtaaaagatttacatttgaaactgaaaggagctcagcaaggatga

SEQ ID NO: 59111 - DNA, 2127 bp, Streptococcus mutans NLML8
atgatagatgttgattattttttgcagtgttcagaattaaatgattttgatcaaaatttcactttaattaaatatgtttccagtaaaattgatgagccagaagctcgaaaaatcattattcatatcttagatatttgggataatgtaaacaaagacgttaaagaaatatggattgatttgattggtcgcgcaggtttttatccttattttgtggataaagttaagtcacgagaaacttttaacctatctgttcaaactcaaataaaaacagaattttttaaatccgattatctcccaaatgtttacttccatgaacaacagaaagaaatagaacaagctctatcagatggagaaaatgtagctgttagtgctccaacgagttttggaaaaagtttattaattgaagagattgtggcgagacgacaatttgataatattttaattattcaacctacccttgccttaattgatgaaacgagaaagaagttatcaaaatacaaagatttctacaatttgataattaatacatgccagaaagtagataggaagaacatttttatccttacggcagagcgcgtactggaatttctaaatttacctcagattgattttttcgttattgatgaattctataagattagcaatcgtttaaatgatagtagaattgatgccttgaacgttgctttgcttaaaattatgaatcaaaaacctcaagctatgtttttgactcctacagtagactcattgtctaaagcttttagggaaaaatatcaaattaacttttttaaaacggactatgcattggtaaatacaaacatcattgaagtaaggaatagaaacaataacccttttactgaggattctaaaaagaataagttatttgaaatgctatccgaacaagatgaatcaagtattgtatatgttaaatctcctaatgaagcgtataaattagctggagaatatatagattatttggatagattgaattatgaagttagaaacaataatttagaaatatttgaatggattgacaagaacatatccccaaattggcaattaaagaaattactaaaatatggcatcggtgcgcacaatggagcattaccacgacatgttgttactacagaaattgatctttttaacgaaagaaaattacaagttctttttgcgaccgtttctctaattgaaggagtaaacactgttgctaagaatatgtttatttatagccaacataaagggactaataaaatagatttctttgactttgcaaatatacgtgggcgtgcaggacgcatgaatcatcattttactggcaatgtatatctatttatagataaaatagaaggggaggaatttgtcatagacgttccaagcattgaccaaactccagtatctgatgaaattttaattaatattccagatgatgaagcaaaagaaattgaaagaaaacatgaattggaaaaagatttagatgccgaaattcaagatattatcagaaataatcttatttccgttaaaggtcaaaagtctctatataaatatatcgaggaagagaagaaaaatcttacttatttagagtgggaaggtgtgcctgattatgatgaactttggcaaacattgcatttgggatataaatttttaaagggaaaagaagcgaaaggtttttctcagaataaggcagttacggcattaaaatttgtaaatcagtcgctgaggaagaccattaacgatcaattcgaatattttgaaaatcagggtaaaaaggattccctaaacaaagcgattgattatatactaaaattccaaagaaatgaagctagttttgaaatccccaaaatattagctgttgtagattctatacagaagtatgttttcgataaatcggatatgaaaaccggtgattacaccatgtttgcttcgcttttggaaaacgaacaggttgatgaaagactacaatttttaattgattatggtgttccaagttcagcggttaaaaaaatcaaaaatctgccagatgaattggttgaagactcacaaattatccagtatttaaaaaataattttgtgaatgtaagtgctaatatgataacttatgaagaaaatttactgtggcaggctattcaatag

SEQ ID NO: 59112 - DNA, 897 bp, Streptococcus anginosus SK52 = DSM 20563
atggtgcagccatctaaaaaagcaactgaagcagtaaaaaaatttcagtttattgacagtatagaattatttgctggtcagggaaacagtacaactatgcagttatttatgcctcaaatcaatagtcgagaatttgatgttttaagtattcaagaaactctgatggaagtactgattgacttttctttgactcgtataaccattgaaaagtatgaaaaaaataggcagtgggcacgactatcaaaagaagcaagacaaaaatttagagattattcaactaacaagggtgaactgggtgagttattcttatatacttttcttgaaggaagtcttggcgctcctcaaattttatcaaagatgtcactaaaaacaacatcaggagactatacaaaaaaatctgatgggattcattatttgaaagttcctaatactgatagatatcatcttatttttggagaggctaaaatgtatcaagatgtaatttcgggatttagagatgcttttgaatcaatatctactcacaagtcgggaaaagagtttgagaaaagcttaattagttctcaaatcgaaaacgaattcagcgattctgaagatagagaattgataaatattattttatatccacatgaagctgattctgtgattaaagtatcggatgcctttggaatttttattggttttgagatagatgacacagctggaaaaactaaaactgaagatgagtatgaagaatgggttaaaaggcttgttacggatatagttaaatcaaaaatttctacaatagaagggcatataacttcgaaaggacttgttgggaataatttttatgtttatcttatgccatttgttgatttggataatacaagactagtgataacaaaggggataacagaatga

SEQ ID NO: 59113 - DNA, 1341 bp, Streptococcus anginosus SK52 = DSM 20563
atgacaaaacaaacaataattcatgaacttaatgagaaagctatatccgatggttatttatataaacttttggaaaaaattcaatataaatatggggtggaattgctcagtgaaactgctgtttctttgacagatagagaatttttaaatgtattgagatttgcagatatcctgtcaaggtcaaagttagcgttaaataagaacatcgcccttaaaattgtatctacgctatatgatttttataaggagaatgaggtttatcaattgtttgcccagaatgtaatggtcaaactcggcaattttccttctcttacgttattagagaaaaatggacttcaatttgataatagagaaattgaagttgatcgtatgataaagcaaatttttcaaagaacctctgtagagaacaaattttttacagatacacaatatgaggcttttcatgagataattgactctaaccactatagcttttcggctggaacatcttttgggaagtcgtttctattttcagagtttgttaattggataattgaggaaaaaaatgggagtgaaaatattgcatttcttgttcctactagggcactcataacacaagtcgttgaggatataaggaaaactttacgtaatgaagaatataaaattgttagtaatcctgatattccagctctttttaggcacaataaatttatttttgtttttacgccagaacgcttagtatcatactttgcaggaaacactaacccaattatttctacaatgattgtagatgaggcacacaatacaatttctgatgatgagcgtagtccgatattttatcatgcaataacattagcagagcagaaaagtgttaaactttattttgcatcgccgaatgtgcctaatccagagatatttcttgaattggttgggaactctcaggaggaatccaaacaaattacagaggttaatgttgttcaaaataaattttatgtggattttgaagcaaataaagtccaattttactatgattttttaccgactaaaaaatttgatgaatttgattctaaatttgatagtttagaaaagttaataattaatatgactcaagaatcacaatcaataatatattgtaattcagttcacaatactgtttcaagagctcaatttttttcgaagaatatttctaaaagtagtaataaaacacttattgaattgtctaactatatacgagaaactattcacggagattattatttagctgatttagttgagaaaggaatagcctatcattttggtgcgttgccacaagaaattagaaaacgcattgaagaaacatttaaacaagggataataaaattt

SEQ ID NO: 59114 - DNA, 897 bp, Streptococcus anginosus SK52 = DSM 20563; identical to SEQ ID NO: 59112

SEQ ID NO: 59115 - DNA, 2319 bp, Streptococcus anginosus SK52 = DSM 20563
atgacaaaacaaacaataattcatgaacttaatgagaaagctatatccgatggttatttatataaacttttggaaaaaattcaatataaatatggggtggaattgctcagtgaaactgctgtttctttgacagatagagaatttttaaatgtattgagatttgcagatatcctgtcaaggtcaaagttagcgttaaataagaacatcgcccttaaaattgtatctacgctatatgatttttataaggagaatgaggtttatcaattgtttgcccagaatgtaatggtcaaactcggcaattttccttctcttacgttattagagaaaaatggacttcaatttgataatagagaaattgaagttgatcgtatgataaagcaaatttttcaaagaacctctgtagagaacaaattttttacagatacacaatatgaggcttttcatgagataattgactctaaccactatagcttttcggctggaacatcttttgggaagtcgtttctattttcagagtttgttaattggataattgaggaaaaaaatgggagtgaaaatattgcatttcttgttcctactagggcactcataacacaagtcgttgaggatataaggaaaactttacgtaatgaagaatataaaattgttagtaatcctgatattccagctctttttaggcacaataaatttatttttgtttttacgccagaacgcttagtatcatactttgcaggaaacactaacccaattatttctacaatgattgtagatgaggcacacaatacaatttctgatgatgagcgtagtccgatattttatcatgcaataacattagcagagcagaaaagtgttaaactttattttgcatcgccgaatgtgcctaatccagagatatttcttgaattggttgggaactctcaggaggaatccaaacaaattacagaggttaatgttgttcaaaataaattttatgtggattttgaagcaaataaagtccaattttactatgattttttaccgactaaaaaatttgatgaatttgattctaaatttgatagtttagaaaagttaataattaatatgactcaagaatcacaatcaataatatattgtaattcagttcacaatactgtttcaagagctcaatttttttcgaagaatatttctaaaagtagtaataaaacacttattgaattgtctaactatatacgagaaactattcacggagattattatttagctgatttagttgagaaaggaatagcctatcattttggtgcgttgccacaagaaattagaaaacgcattgaagaaacatttaaacaagggataataaaatttcttttcacaacttctaccctattacaaggggtcaatctccctgcgaagaatctttttattttaagtgataaaatcggcaaggctaatttaaaagagcttgatttttggaacttagctggcagggcgggaagattatcaaaggagctttatggtaatttattcgttatacgagttgatgggacattaacttcacatagattattggagtttgatgagttgcctaaaattgagagtaaggtattatcgggtaaagcaaatttctatagaaatattggtaatatacttgagaataaagagatgacgaataaaagtatgtcagctaaaaataaacgagaagttgctgaatatgcaacaattcttgcttaccaacgtaaaaaaaatatttcttcgcaattagttgataaatttattcaaaaaaataatgaatcaagcaaaattttcaagaaaatatcggagattgatgtacctaaagatattttgatggtttcaactacaattaaacctaaataccaagaatatatttatcaagaacaagaaaagcttatttttcaagcaaaatatgatgccaatacttgtcgggaaatacttgagatgctgtcaaaaaaatataattggactgaagaggaagataaacgatatcttggaaataaaaaaagattaggatattattcggttattatgtctgagtggattcagtctaaacctctcaacttaatgattcgcagtactattagatatcatgaaaaaaataaagtgcctattccgattaataataatccctctaacttagagccgttctcaatatataaagccaatcatataaatcatgttattaatgagttgcttaaagatgttgagaatattttaaggtttaaggtaaaaaactatgtgatgaattatctaaaacttactggacaagatgaaggagagtggcaaaactatttagaatatggaacaaatgataatattgttatttag

SEQ ID NO: 59116 - DNA, 930 bp, Streptococcus equi subsp. zooepidemicus MGCS10565
atggtagcatacaacacagagtattttctagaagaaacagatgataagacgcactgtttttatatttcattcgacttgggtgatgatggagaaatttatcaaaaaatcgatgactggtcggaagagatttttgacgacattgcaaattttgcactcggaaaatcaaaagtattagaactttcaaaagattcccctcgaaaagcacatagagaggggagaagattactctataatattgatgaaataaaaaatgcgaacgaatactacttaggtcagcaatattcaaaggaagatgataaatatatgaaaagaggtgaatttggtgagttaattctgtatcatttactggatagaaaactgaacaagcctcaattgatatctaaattatatttcaaagactcctttaatgcggtagttcacggatttgacgctgtacactatgatacacagaacaatgacctctggttgggtgagagtaagttttataaagataaaaattctgctttaagagagctttcaaaagatttgcacaaccattttaatattgatttttttaatcaagaattcgcaataataagtaataggctcagtgatttaagcattgataatgatgctataaagcagttaattgaccccaatacaaaatttctttcaaaattaattaagataaatgcgtgtttttttgcattatttgacagcaacattttgaaatcttttgagttcgaagaagattcggataaagtttcgggaaaatttgaggaaaaattaaaagagtcaatgaagcagacgcgtagttattttgataaacagatatctaactttcagaataaaaaacgactaaaaattcatttactactatttccagttacaagcaaaaatgagttagttcggaagttgcattataaacttaagaaagaaagtgaggcttaa

SEQ ID NO: 59117 - DNA, 2061 bp, Streptococcus equi subsp. zooepidemicus MGCS10565
ttggataaacaactacaagactttaacctaggctttttaatagcaagagatatttcagaaagtcaagattatcacaaactgattgaagttcttgaaagatgggattctgtccatgatacattaaaacctgtttttgtagatttaatcgagtcatttggattttatccatacttaaatgacgaaaagttatctagtttgaatttatcagctaagtacaggaatgaatttcataaatcaaatatttcgataggcggagatgaaaaaatacgattccactccgaacagaaaagaatcgaagagattatatctaaaaagcagaatatcattctttcagctccgactagttttggaaaaagtttattaattgaagaatttatttctcgaaaaatttataaaaatatcattattattcagccgacattagctttaattgatgagacgcgaaaaaaattaagaaaatatactgcttacaatatagttgtaaatacgaaacaggagttgagtgataataatatttttatcttaacgagcgaaagagtgttagaactttttccaaagatttctgaaattaagatagaccttttcgtgatagatgaattttacaaaatatcgaattcgaaatcggatgaacgcgttagtcagctaaatattgcattctataagataatgcagataaactctccgcaattattactactcacaccaaatgtagacgacataagtagtgactttttgaacaaatacaatataaaatttatttctacagaatatagtctggtaaatcaaaacattactcatattgaatactctggcaaagattcagataagaaagagaaactatttgagttattaaaatcaataccagatcagaccatagtttatgtgcgttctccgaaacgagcagaggaactgtctctagaatatataacacgtatcacaaagataggggtggagttgcctataattcaatggattgatgagaatatttcagaagagtggaacttgaaaataatattaaatcatggtataggaatgcataatggacaatttcccagacatattgttaattctcaactggattactttaaccaaggaaagcttaacgttatttttgcgacaacatcattaattgagggggttaatactgcagctaagaatatagttatatttgatatgaaaaaatcgaataaaccgttgtcttattttgattttaataatatcaagggtcgtgcaggacgtatgatgcaacattattctggaaatattttttattttgacactcctcctttaaagactttggaaaaagtggatattccacttattgaacaaaaggacaatttacagagcgaagtattaattaatctagaaagcacggacgtaaaagataatcttaaagagagatacgatacaataaaatcgagtgtttcggaagaactgtggactatttttagggaaaattattatgatgtggagtctcaaaaacaactatataattatcttattcaaaaccctaatttattaactgacttatcgtggaataaccactctccatcttatgatactttattgcaaacgatgaaagctatttcgcatggtttagataatgttagcaataatagctataagcatatcgcacttaaggctaataaaatttcgaaagggaatattaaagatgtaattgatagtgaagtacagtaccaattagataaagccgataatgaagacttacataaagtatataataaagcaatttttgacatatttaagtttgtcagaactgaggcgaaatttaaaattcctaagaaaatgtcagttttacagagtatagtaaattatattctggaagataaaaaagctgattactcgtcatttatagccaagctagaaaacgaaggagtcggtggctcaaaaagcattctattagattatggagttccgtctaccgcaatcaaaaaaattcgcacaaatttaggttcgactgaaataattgattatataaaaaataatttagatagcttgaattttactaattatgaaagagagatagttgagaaactataa

SEQ ID NO: 59118 - DNA, 906 bp, Streptococcus intermedius B196
atgagtcataatcattcagaacatttagaaattaaagagaatgttcatacgttttatataggatttgatttggataattttgggaagatatcacaagtaaaatcaagattctatgatgagttatttgatgatattactgcctttgcgtttggcacaaagaatgtgatggaaagaataaaaacaccacaagatatttctgttgtacaaagagaagcgtttagaaaaatgtataatattccagagttacaagaagcgagtaagtattatctcgagtctaataatgtggaagataaatatttgaaacgtggagaatttggagaattactcttataccatctgttgcatgaatattttaatgctgatgctctaatttcaaaaatatatttcaaagatagtatgggtttacctgctcacggatttgatgctgttcatgttgattcaaaaaatcatatactatggctaggggaatcgaaattatattcagcagctaattctgcgattgatgctttgatgagagatttggaggagcattttaatacgaatttttttgattctgagtttgctattattgataaccgagttcatgatagtggtattgaacttgatgatttcatgaaaactctgatagatccacaaacgaaagtattgaacaggttagctaatattaatattgctcttttcgcaggttttgatagcaagtcacttcaagattatagtgacgaccaaaccttcaaagaaaatttagagagtgaaattaacttattaagagaaagagcaaataaaaaaattgtgaaccatccatggaacgaacatttaaatcttttcttattcttatttcccattgataataaacgtgaatttgttaaagatttacacttgaaactgaaaggagctcagcaaggatga

SEQ ID NO: 59119 - DNA, 2127 bp, Streptococcus intermedius B196
atgatagatatggatgatttttttaaatgttctgagttaagagattttgatgataatttttctttaattaagtatgtttccagtaaaattgatgagtcagaagctcgaaaaatcattattcacatcttagatatttgggataatgtaaacaaagaggcaaaaaaaatatggattgatttaattggtcgagctggtttttatccttattttatggataaagtaaaatcacaagaaagggttcatttatctgttcaaacccaaataaaaacagaattttttaaatctgattatcttccaaatgtttattttcatgagcagcaaaaggaaatagaacaggctctatcaaacggtgagaatgttgctgttagtgcaccaacgagttttggaaaaagtttattgattgaagaaattgttgctagacgaaaattcaataatattttaattatccaacccactttagctctaattgatgaaacaaggaaaaagctatctcactataaagatttttataatttgataattaatacacgccaaaaagtaaaagagagaaatatttttatattaactgctgaacgtgtattggaatttcccgatttaccccacattgatttttttgttattgatgaattttataagattagtaaccgtttgaatgacagtagaattgatgctttgaatgttgcgttgcttaaaattatgaattataaacctcaagctatgtttttaacaccaacagttgactcattgtctgaaacttttagagaaaaatatcaaattaacttttttaagacggattatgcattggtaaatacaaatgttattgaagtaagaaacaaaaataataatactttaacaggaaattctaaaaagaataaattatttaagatgttgtccgaacaagacaattctagtattgtgtatgtcaaatcacctaaagaagcttacaagttggctggagaatatatagaatatttaaaacagtcagattatgaaattagaaataatgacttagaaatatttgattggattgatgaaaatatatcaccagattggcagttaaaaaatttattaaaatatggcattggtgctcataatggagcattgccacgacatgttgttactacggaaatcgatcttttcaatgaaagaaagttacaagtcctttttgctactgtttccctaattgaaggggtaaatactgttgctaagaatatgtttatttttagtcaaaataaaggaactaataaaatagatttctttgattttgcgaatataagaggacgtgcaggccgaatgaaccagcattttactggcaatgtatatctatttatagacaaaatagaaggtgaagaatttgttattgatgttccaagtattgaccagtctccagtgtcagatgagattttagttaatattccagatgatgaagcgaaagaaattgaaagaaagcatgagctggaaaaagatttggatgcagaaattcaagatattatcagaaataatcttatttccattaaagggcaaaagtcgttatataaatatatcgaagaagaaaaagaaaaactcaccttcttaaagtgggatggggtacccgcttatgatgaactttggcaaacattatatttaggttataaatttttgaaagaaaacgaaaatgaaggtttcgttaagaataaagcagtcacagcgttaaaatttgtaaatcaaccgctgaaaaaaactattaacgaacaatgcgaatattttgaaagcgaaggcaagagagattccttaaataaagcaatcgatcatgtactaaaatttcaaaggaatgaagcaagttttgagattccaaagattttagctgttgtggattctattcaaaggtatgtgttcaataaagcatatatgaaggctggagattacacaacatttgcctctcttttagaaaacgaacaagttgacgaaaggctacaatttctaattgattatggtgtgccgagttcagcagtaaagaaagtaaaaaaattacctaaaaatcttgaggaagacttacaaataatacagtatttaaagaataattttaaagattttaatgataacctcattgcttatgaaaaaaaattattatggcaggccattgaataa

SEQ ID NO: 59120 - DNA, 789 bp, Streptococcus intermedius SK54
atgcctcaaatcaatagtcgagaatttgatgttttaagtattcaagaaactctgatggaagtactgattgacttttctttgactcgtataaccattgaaaagtatgaaaaaaataggcagtgggcacgactatcaaaagaagcaagacaaaaatttagagattattcaactaacaagggtgaactgggtgagttattcttatatacttttcttgaaggaagtcttggcgctcctcaaattttatcaaagatgtcactaaaaacaacatcaggagactatacaaaaaaatctgatgggattcattatttgaaagttcctaatactgatagatatcatcttatttttggagaggctaaaatgtatcaagatgtaatttcgggatttagagatgcttttgaatcaatatctactcacaagtcgggaaaagagtttgagaaaagcttaattagttctcaaatcgaaaacgaattcagcgattctgaagatagagaattgataaatattattttatatccacatgaagctgattctgtgattaaagtatcggatgcctttggaatttttattggttttgagatagatgacacagctggaaaaactaaaactgaagatgagtatgaagaatgggttaaaaggcttgttacggatatagttaaatcaaaaatttctacaatagaagggcatataacttcgaaaggacttgttgggaataatttttatgtttatcttatgccatttgttgatttggataatacaagactagtgataacaaaggggataacagaatga

SEQ ID NO: 59121 - DNA, 2001 bp, Streptococcus intermedius SK54
atgacaaaacaaacaataattcatgaacttaatgagaaagctatatccgatggttatttatataaacttttggaaaaaattcaatataaatatggggtggaattgctcagtgaaactgctgtttctttgacagatagagaatttttaaatgtattgagatttgcagatatcctgtcaaggtcaaagttagcgttaaataagaacatcgcccttaaaattgtatctacgctatatgatttttataaggagaatgaggtttatcaattgtttgcccagaatgtaatggtcaaactcggcaattttccttctcttacgttattagagaaaaatggacttcaatttgataatagagaaattgaagttgatcgtatgataaagcaaatttttcaaagaacctctgtagagaacaaattttttacagatacacaatatgaggcttttcatgagataattgactctaaccactatagcttttcggctggaacatcttttgggaagtcgtttctattttcagagtttgttaattggataattgaggaaaaaaatgggagtgaaaatattgcatttcttgttcctactagggcactcataacacaagtcgttgaggatataaggaaaactttacgtaatgaagaatataaaattgttagtaatcctgatattccagctctttttaggcacaataaatttatttttgtttttacgccagaacgcttagtatcatactttgcaggaaacactaacccaattatttctacaatgattgtagatgaggcacacaatacaatttctgatgatgagcgtagtccgatattttatcatgcaataacattagcagagcagaaaagtgttaaactttattttgcatcgccgaatgtgcctaatccagagatatttcttgaattggttgggaactctcaggaggaatccaaacaaattacagaggttaatgttgttcaaaataaattttatgtggattttgaagcaaataaagtccaattttactatgattttttaccgactaaaaaatttgatgaatttgattctaaatttgatagtttagaaaagttaataattaatatgactcaagaatcacaatcaataatatattgtaattcagttcacaatactgtttcaagagctcaatttttttcgaagaatatttctaaaagtagtaataaaacacttattgaattgtctaactatatacgagaaactattcacggagattattatttagctgatttagttgagaaaggaatagcctatcattttggtgcgttgccacaagaaattagaaaacgcattgaagaaacatttaaacaagggataataaaatttcttttcacaacttctaccctattacaaggggtcaatctccctgcgaagaatctttttattttaagtgataaaatcggcaaggctaatttaaaagagcttgatttttggaacttagctggcagggcgggaagattatcaaaggagctttatggtaatttattcgttatacgagttgatgggacattaacttcacatagattattggagtttgatgagttgcctaaaattgagagtaaggtattatcgggtaaagcaaatttctatagaaatattggtaatatacttgagaataaagagatgacgaataaaagtatgtcagctaaaaataaacgagaagttgctgaatatgcaacaattcttgcttaccaacgtaaaaaaaatatttcttcgcaattagttgataaatttattcaaaaaaataatgaatcaagcaaaattttcaagaaaatatcggagattgatgtacctaaagatattttgatggtttcaactacaattaaacctaaataccaagaatatatttatcaagaacaagaaaagcttatttttcaagcaaaatatgatgccaatacttgtcgggaaatacttgagatgctgtcaaaaaaatataattggactgaagaggaagataaacgatatcttggaaataaaaaagattag

SEQ ID NO: 59122 - DNA, 963 bp, Enterococcus faecalis TX0860
atgtctagatcaattgaaataaaaaaagtattaaagtgtaaaatatctgaatctaatttatattcttattttatagattttgatttagattctgaaggaaatctaggtcaaagacttgcagaatttgtacatttactcactcaagaaataccaaatttcgcattgggattctatgagggagacagtattcctcaagaaaaacttttagatactttaattgatgctgctaactctatctataaaattgattgctatcaaaaagtttcacagatttatgaaactggtgaatgtctagaagataatatatctgataagtatcttagacgtggagaatttggagaactaattttacattcggtattaaaatactattttgaaacatttccattaatagcaaaaatatattttaaagattcctacggacatgctgtacacggctttgattctattcatattcagccaaaaactaatacgctctggttaggtgaatcaaaattgtatacgaatggaaaaagcggtgtagatgcattagtagaagatttatatgaacattttaatatagattactttcatagtgaatttaatgtaatatcaaaaagattgaaagactcaaaaactattatagataaccacggtcatgatacagaatactgggtctcactattaaatcagtatacaagcatatcggaaaaactggataatataactattccactattttgtgcatatgaaacagatttttttgatagctttgagaatgattttgatacctttgaaacaaagtacatggaagaaattagtatgttacatgagcgatttctaaataaaagctcccaccacccttggagcaaaaaaatgaatattatagtaatactaatgccattggagagcaaaaaaaaattagtatcaatgttacacaaaaaactcaaaaccatacaaagcttaggtgtaggaaggatttga

SEQ ID NO: 59123 - DNA, 2163 bp, Enterococcus faecalis TX0860
atggattggaataaagtagacatttactctgtaaaagaattaagttttgaagatagtttttctctagctaaatttacatctaacttgtctttaagtaacaaaaaggacattgcaagaaaaattataattcatatattagagatttgggaaaacatcgattcttccaccaaagaaatatggatggacattgtagagtcagccggattttatccatatctaattagtaactcaactatggatacgacttctgaaattagaaaagctttccattcttcaaattatttagataatgtagtatttcataaggaacaaaaatatctttctactttaattgagaaaaaagaaaatattgtagtaagcgctcccaccagttttggaaaaagtttattaatacaagaaattgtggctagcagaaaatttaaaaatatcctcattattcaacccactctggcattaattaatgaaacaagaataaaacttaaaccttatcaggagtacaattacaatatagtcgtgaatacttcacagaaaatggaagaaaaaaatatatttattttgacagccgaacgtattttagaatatcctaacttccctattgtggattactgcattttagacgaattttacaaagttagttcctcgcgagatgatgaacgatctgatgttttaaatatagcgcttaaaaaaatactggataacaataaaactattttctattttttaggtccaaatatagatgaaatatctcaaggcttcgaaaatcactacaatgccaaatttataaaaactgattacactctagttgatactaaagtggaaatgataaatatagattttcaaactgataaaccaagatctatggaaaaagaaaggaaactcaaacttttcaaaatgctttcagaaaaagaaaaggaacaatctatagtatatctttcatctccagatagagcgctaaaagtggctaaagaatacttagagtatttaagcactaataatcttttagcaaaagaacagcaattacccattaatgaatggatacaagaaaacataaactctaattggagttttaataaactaatccaacaaaaaattggtgttcattctggaacaataccaaaacatttgactcattcaataatagattactttaataaaggtttattacaagtactattttgtacatctacaattattgaaggagtaaatacaagtgcaaaaaatgtctttatttttgatgaaaagaaggggccaaatagaatagactactttgatttctcaaatattcgtggaagagccggtagactattagagcactttacaggctatgtatatgtcttccatccaattccggaaaaagagaaaatggagttagatattcctttctttgatcaagaaaaaatttctgatgaaatattaatcaactttgaaaaaaaagaagttaaaagtgaacatatttctagatttgaagaattgatgaattatgatgatgatttactcaaagtgatcaaaaagaatgctgtgtctgtatctggtcaaaagaagataatcgagaatattaaaataactttgaaagaaaaaccagaattagtattatggagtggcattccaaaatacgaagcactagcttatattcttaacatttgttgggacaatttgttaaaagacactgaaactacaagacctatgactagaaataaacttcctgtagtagcttataatagcctaataagtaaatccacatcagaatctttaaataatgagttcaaatatttaaaagataataatcccaaatggactaatcaaagagttttagatcaggctgtcactaattattttcgtgaacaaagacactggatttcttataaagtaccgaaatggataggtgttgtagacagtctacaaaaagaagtgtgcaaacaaatgggagtaattaacgttggtgattatacttatgctgcttctcaactagaaaacgaaggaatgaatagtactttatctatcttactagacatgggaataccttctagtgctattaacaaattgaagtatgcagtggatggaattacggacttcagggatttagtaaagcacgtaaagagaatagctgattctaatcaatattctttaatagaatatgaaaaaaacaaaatatatgacctttaa

SEQ ID NO: 59124 - DNA, 963 bp, Enterococcus faecalis T2; identical to SEQ ID NO: 59122

SEQ ID NO: 59125 - DNA, 2163 bp, Enterococcus faecalis T2; identical to SEQ ID NO: 59123

SEQ ID NO: 59126 - DNA, 963 bp, Enterococcus faecalis EnGen0061; identical to SEQ ID NO: 59122

SEQ ID NO: 59127 - DNA, 2163 bp, Enterococcus faecalis EnGen0061; identical to SEQ ID NO: 59123

SEQ ID NO: 59128 - DNA, 954 bp, Enterococcus faecalis EnGen0351
atgaacaaaaaaaataagattcagaaaatattatcttgtaaaatatcagaagctaatttctattcctatcatattgattttgatatttgtggaaaagatatcttgcaacaaaggattgatgattttgtacaaatcatgtgtgaagaaataccaagttttgcttttggcttccatagaggtgaaaatgttcctcaagatgagattttaaatactttagttgaggcagcaaagtcaatatataagataactgaatacagagaagtagcagaaatgtataaaaaaggtgagtctattgatgataaaattgataataagtatttaagaagaggtgaatttggagaattatttcttcattcaattttaaaatatttatttaacactaatcctttgatagctaaaatccattttaaggattcattcggacatgctgtccacggcttcgattctatacatattaatactgaaagtatgactctttggcttggggagtctaagatatacacaagtggaataaatggggttgatgcactagtacaagatctttttgaacattttaatacggactattttaatagtgaatttaatataatatccaaaagaataacagattcatatgaaatgctggattctatgggatttgattctgaacattggattgaattgttaaatagatatacaagtctctccgagcaactaaataatatagtaattccgatgttttgtgcatacgaaacattgacactggattcatatgaattagatttcgaaaaattttctaaagagtttgaagatgaagtgtataaactgaaaaaaagatttgatgaaaaaagtaaggagcatcctcttataaataaactaaatattatagtgatattgatgcctttaaaaagtaaaaaagaaattatatcaaagttacattcaaaattaactctgattcaagcattaggaggttaa

SEQ ID NO: 59129 - DNA, 1758 bp, Enterococcus faecalis EnGen0351
gtgaattgggatatagtaaatatttatgaagtaaataaactagattttaatgagagtttttctcttgcaaaatatgtatcgaatttgtctttgtcaaatagaaatagttatgctagaaagataataattcatatatacgaaatttgggataatgttgatgataatacaaagggaatatggagtgatttagctgaaagtcagggtttttatccttacattagagaaagaatggataacacatctgaaattagacgttcttttcatcggtccgagtatattgataatatagtttttcataaagaacagaaaacgttatcatatttgataaaaaagaagcaaaatctaatagttagtgcaccgactagttttggtaaaagtttactgattgaggagatagtcgcttgtgataaacacaataatatattaattattcaacctacactagctttgattaatgaaactaggttgaaattaaaaaaatataaaaattataacatgatagttaatacttctcagcaagttgaagagaagaatattttcattttaactgctgaaagagtaatagaatttcctaatcttcctaagattgattattgtgttcttgatgagttttataaaataagctcctatagagatgatgaacgatctgatgtcttaaatattgctataaaaaaaattttggctagacaagatacagccttttattttattgggccaaatattgataaaatttctagtggttttgagaaaaaatacaatgctaaatttattaagacaaattattctcttgtagacgcacaagtcgaattagtaaacatcaattacaaaaatgatgggaagcgcaaacaagaaatggaaagagaggaaaaactttttgaacttttatactgtaaaaaaaatgaacaatccattgtatatacatcgtcacctgatagagcatttaggttggctataaagtactatgaatttttaaaactaaataactatctggaagaagaagagttactaccaataaatgaatggatttctgaaaatatcaatagtaattggagttacaataggctgttattacaaaaaataggtgtgcattctggaactattcccaagcacttaacacactccgtaattcaatattttaattataagaagctaaatgtattattctgcacctctactattatagaaggcgtaaatacttcagcaaaaaatgtatttatttttgataaaaagaaaggtccgaatgaaattgattacttcgacttctctaatataaagggtagagcaggtagattactagagcactatacagggaaagtttatgtttttcataaaattcctccaaagactgaaatagagttagatatgccattctatgatcaagaaaaaatatctgatgaaatattaataaattttgataaagaagaattacttcccaaaaatataaagaggtatgaagaactaatagagtatgataaggaatttttaccaataataaagaaaaacgctgtttctgtagaaggtcaaaagaaaattattaatgatttatatgaaaagatacagacacaaccagagttagttttatggactggaaagccttctttcaaggctattaaatatatattgggtatttgttgggataatttattaaaagaaactgagactacaagaccaatgactcggaataaattgccagttgttgcgtttaaatatctcattagttcttcatttaacgaaatattacggcaagaatatatataa

SEQ ID NO: 59130 - DNA, 912 bp, Enterococcus faecalis EnGen0357
ttgagcaacaagtcaacaattcacactcccaatcatgaacaaagtcttcatatttttcatattgactatgatatagatgattctggtagtatgaaccaaatggaaaataagttttataacgaactttttaacgatatccctaattttgcttttggaaagtatcaagtggagaaacgactaaaagatggagatagtataatccctatagtcagagaagctatggagaaaatctatagtatacctgaaatccgagaagctagagaatattatacaggtaatcttgatgtagaggataaatacataaaaagaggagaatttggagaattaatattatatcacctactccatgaatattttaacgcagatgctttaatatcaaaaatttattttaaagatagcttaagcctagctcctcacggatttgatgcagtacatgtggattctgaaaaaagaagcctctggcttggggaatctaaactctataaagatggtaataaagcaatatatgagttaatcaaagacctcgaaggtcattttcaaacaaatttttttcattctgaatttacaattatttctaatcgagttcaagatgacgatggagaagatgatgaattcataaaagaactaatatcacctgaaacaaagtgcttggataaacttgcaaatattaaaatcgcattatttgctggctactctagtgattgtataaatcaagttaatccatcagaagacacatttctagagaaattaaaaattgaaggacaaaaaatgatggatattctaaatactgggaaagaaaaacatccttggaaaaatcatttagatgtttatctatttttattgccaataaagaataaaactgaatttgtaaaatctttgcacttaaaattattaggaggacaacagatatag

SEQ ID NO: 59131 - DNA, 2166 bp, Enterococcus faecalis EnGen0357
atggaaattgaagttcaaaaaattttgaaaattaaaaagctagaatccattgaggatagtttcaaattagcaaaatatgtatcttctagagtagatgatgaagaagctcgaagaatcattattcatgtccttgaaatatgggataatgtcaatgctcaaagtaaatcgatttggatggatttaattgagcgtgctggcttttatccctatcttaatgataaagatgagacctcacttggtatacaggcaaaaatacggaaacagtggtataaatctgagcacctagaaggagtattctttcatgctaaacaaaaaattattgagcaaaaaatatatcaagggaaaaatgtagctgttagtgctcccacaagtttcggaaaaagtctattgattgaggaaatagttgctaggaataaatttaataatatactaattatccaaccaacacttgctttaatagacgagacaagaagaaaaatgagtaaatacaataattacaaccttgtagtaaatacattacaagagccaagagaacgaaatatatttattctaaccgcagaacgagttcttgaatatgaaagtctgcctgtagtcgatttcttcatagttgatgaattctataaagtaagtaacaggcgaggcgatgaacgaattgacgttctaaatattgcgatacacaacgtactttctaatggacctcaagccttgttcttaaccccttcaattgatgcactttcagatgattttataaataagtacgacattgattttttaagaacagactattcactggttaatacaaatgttcaagaggtaagatttaaaaatagtaaagagaagaaaaatatactatttcaaatgcttgctgaaaggaaagaaccgtcactcgtctacatgtcctcaccgtataaagcatattctttagcaaacgagtataaagaattcctttgcaaaaataacttcgtaagaaaacaagttgatctccctctcacagagtggattgataaaaacatctctgaggactgggatttgaaaaggcttctcaactttagaataggagttcacaatggtgaacttccaaggcatgtagtcacaagtcaattagcatattttgaagaaaagattttagatgtactatttgtaacaacttcactaatagaaggggtcaacacttctgctaaaacaatgtttatttttgaaacaaagaaagcaaaaacaaaaattgacttttttgattactctaacattaaaggtcgagcaggaagaatgaataaattttttactggggatgtatttattttcggtgatattccgactgaagaagattttaaaatagatgtaccttttgtagaacaaaaagaaatttcagatgaagttttagtaaatctagacgatgatataaaagaagagcacaataatcgagtagataatataaaaaaaaatattcctgaagatttaatggaattgattaagaagaatgttatcaatatagctggtcaaaaaaaattatatagatatattgaagacaattatcaaagtttgatgccaacactgatttggagtggtattccagactatttgcaattgtcaaaatcattatatttagtatatagatttttagagtcggaaaatataaatgtaaaatacacaaatatgttagctagcagatctctaagtatggtaaattctgtatcattaaaaaaagtaattaatgagcatggaaattatttgtttagcgaagaaagaaagaaaaaaaatataacttcagataatatttctacaatagaaaaaaatgctaaagaaaaagcaatcagagaaatactacgtttcgctagaaaagatgccggatataagattcctaaattacttaatgttcttagaacgattcaagaatatgtttatagtaagcatcagctaccttttggggattattcttatttttctgctagacttgaaaatgaacaggttgatgagaggctcagaatgttcatagatttttgcgttccaacgagtgctatcaggagtatttcaaaagtgatcccagggcaccttgaaagtgaaacggatataattaattatataaaaataaattttcaaagtatatctcagaacctaattgagtatgagaagaaattactttttcaagctattaataatggagtatag

SEQ ID NO: 59132 - DNA, 963 bp, Enterococcus faecalis EnGen0287; identical to SEQ ID NO: 59122

SEQ ID NO: 59133 - DNA, 2163 bp, Enterococcus faecalis EnGen0287; identical to SEQ ID NO: 59123

SEQ ID NO: 59134 - DNA, 963 bp, Enterococcus faecalis EnGen0300; identical to SEQ ID NO: 59122

SEQ ID NO: 59135 - DNA, 2163 bp, Enterococcus faecalis EnGen0300; identical to SEQ ID NO: 59123

SEQ ID NO: 59136 - DNA, 918 bp, Enterococcus faecalis 02-MB-P-10
atgaaattgagcaacaagtcaacaattcacactcccaatcatgaacaaagtcttcatatttttcatattgactatgatatagatgattctggtagtatgaaccaaatggaaaataagttttataacgaactttttaacgatatccctaattttgcttttggaaagtatcaagtggagaaacgactaaaagatggagatagtataatccctatagtcagagaagctatggagaaaatctatagtatacctgaaatccgagaagctagagaatattatacaggtaatcttgatgtagaggataaatacataaaaagaggagaatttggagaattaatattatatcacctactccatgaatattttaacgcagatgctttaatatcaaaaatttattttaaagatagcttaagcctagctcctcacggatttgatgcagtacatgtggattctgaaaaaagaagcctctggcttggggaatctaaactctataaagatggtaataaagcaatatatgagttaatcaaagacctcgaaggtcattttcaaacaaatttttttcattctgaatttacaattatttctaatcgagttcaagatgacgatggagaagatgatgaattcataaaagaactaatatcacctgaaacaaagtgcttggataaacttgcaaatattaaaatcgcattatttgctggctactctagtgattgtataaatcaagttaatccatcagaagacacatttctagagaaattaaaaattgaaggacaaaaaatgatggatattctaaatactgggaaagaaaaacatccttggaaaaatcatttagatgtttatctatttttattgccaataaagaataaaactgaatttgtaaaatctttgcacttaaaattattaggaggacaacagatatag

SEQ ID NO: 59137 - DNA, 2166 bp, Enterococcus faecalis 02-MB-P-10; identical to SEQ ID NO: 59131

SEQ ID NO: 59138 - DNA, 906 bp, Enterococcus faecalis 06-MB-DW-09
atggatgttagtaatgaatctaatgatattaccaaggtaactaaccacgtgcacacagttgaaattcctgtagctagtaaattagagattttcacatttctgattaatgcgaatgaattcaattatacaaatgcttgtgaatatctgttaggctctatttgtaactttgccttatctagagaaattagagttaaatatcgagatagacctgctgttttggctaagaaagctcgaaacaaattcattgaatggaaaagaaacacaggagaacttggagagtttcttcttttttgttttcttgaagggcatttaaatgccccaaagattttatctaaattagaattgaaaacctctagtgaaatgtatgttcatggagctgatggccttcattatctgagattacctagtggaaattaccaacttctttttggtgaatctaagctaaacttagatcttacaacaggtcttagagaagcttttatctctattaaaaactttaaagagggcattaatgataaaggaaatgaaaaaagtggtatatcttttgagaaaggtttattaactagtaatttagaaaaagaagtaactcttgcagaagaaaaagattttcttgaaaaattaatttatcccactagtgaagaagatgctccaattgtggacgatgcttttggtatttttgtaggatacgaaatgaattatgaccaacaaagaaaaacgctaactaatgatcaatttagagattatattaatactacagtcaaggctgaggttgaaagtaaaaaggaaaatattgaaaaatatatcaatacctataatttacatgggcattcattttatatttatgttcttcctttctccaagttagatgattctaggaaaatgatgattaaggagttgattacctaa

SEQ ID NO: 59139 - DNA, 2595 bp, Enterococcus faecalis 06-MB-DW-09
atgaattttattgaagagatgtcaaaaaaagctctcaatgattcttatttaaaaagacttattcataagtctgaaaaggtttatggagaagctgtttttaagaatgaagtcggagaaaatttaaccgaaaaagaatatagggattctctaagatttgcggatattttgtctcgatctagagatgagaatgctagaaacatatcattaaaaataattagtttacttcatgaaaattgcaaatataaaaatgaagattactttaaacttttttctacaagcgtattgacaaaattaggtaattttccttctttagaggtatctgaaaataacctagaatttgatgaagaagaaattcaaagagaaaaaattattaaagagattatgcaacaagctcctgaatcagataaaatcttcactgatgctcaatataaaatatttgagaaattgaagaatagtaatcactatagtttttctggatcaacatcctttggtaaatcttttgtatttgaggcttttatgaaatatataattagcgaaagaaatgcctcagacaatatagcgatattagttccaacaagagctctaataaatcaagtttcgctaaaattaaaaaccgaaattaaaaatgaaaactataaaataatttctcatccaaaagttcctttactgtataagagtgaagaaaggaaatatatatttgttttcacagctgagagattgatatcttattttgcagacagtgataatccaacaataaattatctttttgttgatgaagcacacaaactattaaatgatgattcaagaacgcctcttctatatcatgcgctcacgcaggctaaaaggaaaagtataaaaatgtatttcgcttcccctaatattccaaatgtagaggtttttttgcaattatttaataatagtacagaagagagtacggcgattactgaatctcctgttactcaaaatcgattttttgttgattgcttaaatgagaagtcaataatgttttctgactttggtaagtcaattactcttaaaggattacaattctccagaaaaattgatgaacaagaaagagaaatagagaacctacgagaagttttaataaagctaggtaaatcaaatcaaaatatagtttattgtaatactataaattatactattaaccatgctcgttatttttctgagtcattagaagatatagagaatagcgagattttagatttaataaccgacataagatcttcaattcacgaacaatattttcttataaattgcttgaaaaaaggtgttgcatttcattttggcggaatgcctcaacaaattagagaacgagttgagcgtctttttaaggaagggcatataaaatatttattttgtacatcgacattattggaaggagtaaacctaccagcaaaaaatatttttattattagttccaaaattggtatacgaaaaatgaatagcatagacttttggaatcttgccggacgagcaggaaggctggctcaggacttaagtggaaatatattttgttgtcatataatagataaagatggttattggaaaaactcaagggatatcgaagttctacaaactaaaaaaattgaaagccttaaaccagctataatgcgtgaaaatgatcaaaacctgtataaaaatattcaaaattttcttgcccaaaagccttatacgacagagaatttaagaacaggtaaagacttcgaaaaaagaaagtcgattgagagttatgggaatatattaacttatcataattcattaaaaagtgattctttattaaggaatgtttttttagaaaaaaatccagatggaagagaaactcttaaagaaatagatagtaaaataaaaataccggaagaaatattagcgcaaagcacaacaataagagttgatgttcaaaatgaaattttcaattctgataatcttcaagaattgccgagtcaaactgattatagatcatgtttaaagctcttagaaatactgtatgatcgctatcattggaatgatgatgagagcggtggaaaaaaaccattagtcaacaaaggtagtaagagtaaattggaatattatgcagttctgatgcaccattgggttaattcaaaaccgttaaattacattattaaacaaacgatagagtattatgatgacaaaggaataagcagaaatttccaattaagccaaaatgaatatgtgagatttgaaaaaaataatccaaatcatattaatgtattaataaataatcttatgtctgatatcgaaaacaccattcgctttaaaattaaaagttatgtaaataactacattcttttaatgagtgcaaaaaatataactccaaaaaacatttggtcggagtatctagaatatggtacaacagatagtttgatacttgaaatccaaaactttggttttcctagacatattgcgacttttttaaaaaataattatgaagactgttttaagtacgattacaatggagaaattattgaatttaatgaaaaaaaaataaaaaatgaaattgatgcctctaaatatagaatggaatttgtagagttatctgaaatactagaatggtaa

SEQ ID NO: 59140 - DNA, 912 bp, Enterococcus faecalis KS19
ttgagcaacaagtcaacaattcacactcccaatcatgaacaaagtcttcatatttttcatattgactatgatatagatgattctggtagtatgaaccaaatggaaaataagttttataacgaactttttaacgatatccctaattttgcttttggaaagtatcaagtggagaaacgactaaaagatggagatagtataatccctatagtcagagaagctatggagaaaatctatagtatacctgaaatccgagaagctagagaatattatacaggtaatcttgatgtagaggataaatacataaaaagaggagaatttggagaattaatattatatcacctactccatgaatattttaacgcagatgctttaatatcaaaaatttattttaaagatagcttaagcctagctcctcacggatttgatgcagtacatgtggattctgaaaaaagaagcctctggcttggggaatctaaactctataaagatggtaataaagcaatatatgagttaatcaaagacctcgaaggtcattttcaaacagatttttttcattctgaatttacaattatttctaatcgagttcaagatgacgatggagaagatgatgaattcataaaagaactaatatcacctgaaacaaagtgcttggataaacttgcaaatattaaaatcgcattatttgctggctactctagtgattgtataaatcaagttaatccatcagaagacacatttctagagaaattaaaaattgaaggacaaaaaatgatggatattctaaatactgggaaagaaaaacatccttggaaaaatcatttagatgtttatctatttttattgccaataaagaataaaactgaatttgtaaaatctttgcacttaaaattattaggaggacaacagatatag

SEQ ID NO: 59141 - DNA, 2166 bp, Enterococcus faecalis KS19
atggaaattgaagttcaaaaaattttgaaaattaaaaagctagaatccattgaggatagtttcaaattagcaaaatatgtatcttctagagtagatgatgaagaagctcgaagaatcattattcatgtccttgaaatatgggataatgtcaatgctcaaagtaaatcgatttggatggatttaattgagcgtgctggcttttatccctatcttaatgataaagatgagacctcacttggtatacaggcaaaaatacggaaacagtggtataaatctgagcacctagaaggagtattctttcatgctaaacaaaaaattattgagcaaaaaatatatcaagggaaaaatgtagctgttagtgctcccacaagtttcggaaaaagtctattgattgaggaaatagttgctaggaataaatttaataatatactaattatccaaccaacacttgctttaatagacgagacaagaagaaaaatgagtaaatacaataattacaaccttgtagtaaatacattacaagagccaagagaacgaaatatatttattctaaccgcagaacgagttcttgaatatgaaagtctgcctgtagtcgatttcttcatagttgatgaattctataaagtaagtaacaggcgaggcgatgaacgaattgacgttctaaatattgcgatacacaacatactttctaatggacctcaagccttgttcttaaccccttcaattgatgcactttcagatgattttataaataagtacgacattgattttttaagaacagactattcactggttaatacaaatgttcaagaggtaagatttaaaaatagtaaagagaagaaaaatatactatttcaaatgcttgctgaaaggaaagaaccgtcactcgtctacatgtcctcaccgtataaagcatattctttagcaaacgagtataaagaattcctttgcaaaaataacttcgtaagaaaacaagttgatctccctctcacagagtggattgataaaaacatctctgaggactgggatttgaaaaggcttctcaactttagaataggagttcacaatggtgaacttccaaggcatgtagtcacaagtcaattagcatattttgaagaaaagattttagatgtactatttgtaacaacttcactaatagaaggggtcaacacttctgctaaaacaatgtttatttttgaaacaaagaaagcaaaaacaaaaattgacttttttgattactctaacattaaaggtcgagcaggaagaatgaataaattttttactggggatgtatttattttcggtgatattccgactgaagaagattttaaaatagatgtaccttttgtagaacaaaaagaaatttcagatgaagttttagtaaatctagacgatgatataaaagaagagcacaataatcgagtagataatataaaaaaaaatattcctgaagatttaatggaattgattaagaagaatgttatcaatatagctggtcaaaaaaatttatatagatatattgaagacaattatcaaattttgatgccaacactgatttggagtggtattccagactatttgcaattgtcaaaatcattatatttagtatatagatttttagagtcggaaaatataaatgtaaaatacacaaatatgttagctagcagatctctaagtatggtaaattctgtatcattaaaaaaagtaattaatgagcatggaaattatttgtttagcgaagaaagaaagaaaaaaaatataacttcagataatatttctacaatagaaaaaaatgctaaagaaaaagcaatcagagaaatactacgtttcgctagaaaagatgccggatataagattcctaaattacttaatgttcttagaacgattcaagaatatgtttatagtaagcatcagctaccttttggggattattcttatttttctgctagacttgaaaatgaacaggttgatgagaggctcagaatgttcatagattttggcgttccaacgagtgctatcaggagtatttcaaaagtgatcccagggcaccttgaaagtgaaacggatataattaattatataaaaataaattttcaaagtatatctcagaacctaattgagtatgagaagaaattactttttcaagctattaataatggagtatag

SEQ ID NO: 59142 - DNA, 921 bp, Atopobium minutum
atgagtccaattctcaacttctcaaatcaagggaataaccttagctctatatttactgaagtaaaacatagcgaaagcttaggacttgtaaatccggaacagcttcgcctctttcaccttaatgtaagtagcaatctgtttaattttgcaagtttaagcaactatctaataaatattgtaagcgaatatgtattttctagagcacaagtagaaaaattaagccaatcatccaacccacgctcaattggaatacaggctctaagggtaatgaagaaaaacggagctgctgatgttagaggaacaggaaatgagctaggagaaattttactctatgcttttttggaagatatcctcggagcaccaaagttattcagtaaagtagagctgaacgcttcttctacttcgtttggcaaatcaagtgatgcagtacacctactaacactagaaaacacaccattcccttgttatcaaacagtattcggttcttctgacattactggggacatacgttctgctattgacaatgcttttactactatcaacaaggtagagcatgatataaaaagagttgattctatacttatagatagcaacatttttgaagagtcatttgatgctgaaactgcggaaaaaataaaggatatcatggttccatcagccaatactaagatggctaacgacatagcatatggcgtatttcttgggtattccttgggattaaatcctcaaagcagatctaatttggattttcttaaagctatggacgcaaaaatgcaaaccgatattaaacagcatgcatcttacattgcaaataaaataaagcaatttaatcttggcacacactccttttacttttatatcgtcccatttaacgatgctgaaaaagataaaaaagaaataatagaagatttgctaatgtaa

SEQ ID NO: 59143 - DNA, 2652 bp, Atopobium minutum
atgagcgatgataaagttaaattaggtgaagcaatatttaattcaattagtgaaaacgaatatctaaataagttatatgaaaaagcattgctttcttacgcacaaaaaacgctaagtatgcccattgataacaactcactaaatagcaccgaactacatgaccttttacgatttgctgatttactctcaaaatcaaatcatgcaacaaaatatgaagaacataaaatgtgggcacaagagattatcgtgctgctaaatttcttatttcctgataataaaaacattaaagcgtttggtggctcagtattttcaaatactgacaatacacgtggcattagcattttgaacactgattttgaggatccttttattctaagtagactattccaagaatacaaaaagtcgtatctacgcattccttcccaagaaaatatgcactttttctctgctcaaaaacaagcttatgaccatcttaatgataaatattttagctattccgcgccgacatccatgggtaagtcatttctgatgagaatgtttataaaggaacagataactaacgaaaaacatcaaaattttgccatcattgtgccaactaaggcattaattaacgaggtgtctcaaaaaataatacgagaagatttgaatgatctgttaagtaagaaaaactataaagtaataactgcctccacagatattgccttagaaggaaaacatgattttgtttatgtattaacgcctgagcgtctcttatatatgctcatcgctcatccaaaccttaaaattgattatctatttatagacgaagcacataagctttctgctaaaaatggcagagctcctttttattataaagtagtcgatatgcttaggaaacgtaaatgcccaccaaagtttatctttgcatcccctaatatacctaatccagaagtatatttacgccttttaaccgatataagtgaaggagatgtatcggcattaaaaacatcattttctcctgtaactcagattaagtttttgcttgatcttaaaaacaagaaaatgtctgtttataaccagcattccaagaatcttatcgaagtggcggatgtcaaatcaggaaatatacaacttgcagatttcctacaaatagttgaatcccaaaatcgatccagtgatattcctaatcatcatcaaactatcgtttatttcaactctaaaagtaaagctgttaatactgctaaaaattttgctgatagattaaatgacttaaacgataaagatctcaatgctttatctaatgacattgctacatcagtacacaaagattattatctagctgacatcatcaaaaaaggtattgcctatcatattggctatttgccttcttcaattcgtatgagaattgaagatctatttcgtgctggtaaaattacgaccctattctgtaccagtacacttctcgaaggcgtaaatcttccagctgataacctattcataactactaaaaaagtatttactcgtaaaatgacacctgtagactttaaaaatcttataggccgagtaggaagaattgaatataatctttatggcaacgtcatatttgttacagaatccgacgacaaaagcgaatcatcggaatacgtagatatgttaaaaactgacgttccgacacaattgttatcaatagaagctggggctggtgttcttacaaaaccagaaagaaaatatatcgttaatacgcttaaatctggaagcgttgtaatcgaaaaaagaaagaataatcaaagtgaagagtcatatgagctaactagaaagtttggtctgattctagcaaaagacatcgttacaaataacaatagtttcgtgcgtcagtcattttccgacttattaactcctacagacgaaaaaaatataaaatctaaactgaacgaaaatggttttgtaccagatgacgatattaatatttcttctgatcagacagctgctctttctaaagcaataatagatggtctacaatatccacaacgaagtgatggtcactttcattacactgatataatggagttccttgaaaaattatgtactatctttaagtgggaacaatatgaattttctacattaggaaaagtaactaacggacagcataaaaaattaagctggtatggcgttctcctaatgcagtggatttctggattaggactaaacaatatcataaatgaaggcattgattatcatcgagagcacccagataacttttggattagtaaaactcaaatagttacataccaagatacgatagaatttcgcaatattctttttgctgacacccttgaagtaatcgataatattatactttttcgtctatcgaactacttcttaaagttttctaatgaatataaaagaatacataaagtaacttctttctctaacggctggtacgaatatgttgagtatggaacaactaacgctgaaactattatgctgcagagaatcggatttagtcgcgaaacagcaacttatctcaagcgccacaaagaatatttaataaatgcggaaaatggtcagtgtaaactaaaaagaactcttttagagtgccctaatattagtgtcagaaacgaagctcaaaatatgattttgaatatgccagaagtatttgcccacaagatataa

SEQ ID NO: 59144 - DNA, 978 bp, Bacillus cereus ATCC 10987
atggaaatcttaaaagaagaatatgcatcaggggatctactagacttaattattggaaatttgcagagagaaaagggaagtgagctgaatgctttcttaaccaatgtaacattcaataagaagttgacaggtgttcaatcgaatattcattgttatatgattggttttaatgggaatgatcaacctagagtaaaagatttggcaagagcagttgcagcaagattaattgattatgcaattcctagaagtgaaattatggaggctcaagaaaaagatcagaaatcgaatactactgtaaacacagttgagttgaagatgaaagcgaagcagctttttaccagtctgaagaagtctggtgaaggtggtgaaatgctgttatatatgttagttcaagccttcttaggactgccacagcttttatgtaaaatgcctttgaaaacaagttctgaaatgcattaccacggagccgatggtattcatatagggtatgacagaaatactaaaaagcttgccttgtactggggagaatctaagttgtataaatcatttgatagtgcactaaagaattgtttagatagtttaaagccatttttatttgatgatggtggtacacaagcttcacaaaatagagatttacaattgataacagataatctagatttatgtaacgaggaattagaagatgcaatattagattttcttaatccaaatagtccttcctttaaaaaaatgcaatatagaggtgtttgtctgattgggtttgataatggtgcttatccactagtgccaaactctaaggatgaagatagtgttttaaatgaaattaaagatgagttaggaagatgggagaagaaattagaaaaacaaataaaaaacagaacgcctctagattcttttattttagaagtgtttttagttccattcccatgtgtaaaaacatttagagatagtttcttaggagagcttgctaatgtctaa

SEQ ID NO: 59145 - DNA, 2592 bp, Bacillus cereus ATCC 10987
atgtctaaaaaaaggttagttcataaattatataatttagatggatttcaagaaagtcttttgcctgtggtagtgcaatctgttacattacaatttataaatatcaatacggaaaataatgagtttatgaaaaaggtaattgactgggaatatatgcttttatgtgggagtattcttgctaaatcagataatggtgaacatttagatgtagcttatagaattgctcaatattgtttaaattctttggagacaaacgagcatcaaaaattagctgcaacaatcattttagattctatgacaaatgcttcaactatccagttagctatggagaaagaattaatacctgctacttacaaagagaatgtaccattaacttttcaactagagatgattaagagggggatacaatactctgtacttgatcaaggaacaaataatttattatatgttaatcgatttcaattggatgcctataaaggagctatggaaaatgattggacaagtatttccgcccccacctctgcaggtaagtcatttataattttacaaatgctaattcagtatttaaaaaagcaaaacaatcaagtaatagtatatattgtgccgacaagagctttaatacaacaagtggaatacgatttacataaagctttatctgtaaataaattaggaaaggtttatgttacttcagttccaatctttccaaaagatatggaaaatgaaagtgtagtctttgtattaactcaagaaaggctacaatggatgctgttggataatcatgagataaagcctagcatgattattgtagatgaggcacaaaagattggagacggttctaggggtatattattacaacaggttatagaagaaattattcgtcgaactagtgaagcgaaatttattttttctagtccgatgacatctaatccagaaatatttttaaataaagcaacgagcggttctttaacaaaatcaattgttactgaacaagttactgtaaatcaaaatcttctatgggtttctcaagttcctaggaaacccacacaatggaacatagaactatgcttaaaagatagtaggatatatttaggaaagtttgcaatgagaaatcgtccaactcaagttagcaagaggttaccatttattgcttttgaattaggaaataaggaaggtggaaatttaatttatgctaatgcacctgcggaggcagagaaatgtgccaaaattttatgggatttacagggagatgaggcagatacaactgataaagaaatacatgatttgattaagctgataaaaaaggtaattaataaagattatgtattagcagaaatattaacaagaggtatagcctttcattatggaaatttgcctttaattataaaaaatgagatagaacggttatttaaaaatgggaaaattaaatatttagtatgtacatccactcttattgaaggaatgaacttgcctgcaaaatctatatttattagaggacctaaaaaagggataggtacaccaatgaatgaaattgacttttggaacttagctggacgagctggcagacaagggaaggaatttcaaggtaatgttatatgtgtagatgtaaccgattcaaagctttggaatggagaaccaccaagtatcaagaaaaaatatgtgatagagccaagtgttgatatggttgtccaaaatatcgatcaacttatagacttcatagaggctgggacaccgagaaaagaggcaagtagtaatccagaattagagtatggatttggttattttttgggagaacatattagaaatgatgggctgaataattctccttttttagactcatacgagaaagaaaccgtaaagattgttgaaaaaacaatcacagaatctttacaagacatagagattcctaaagagataatactgaaaaattccgctgtcagtccaattgctcagcaaaaattattacagtttttcaaagagtgtgatgaagaaatcgaacaatatgttcctttgctacctgagagtgatgaggcattggatcaatattgtagaatagttgagaagataagtggatttttgtcgggagatccagcagcaataacatatccgcatgcattactagttgtggaatggatgagaggttatagtctatctaggataattaatcgaaactggaagtattggaaagagaaaaataaaaatctccaaactgttatcagagatactatgagggatatcgaagagtatgcaagatttaaatttgttaaatattcttcatgttatattgatattttaaaatatttcttagagtgtaatggttacgaggaaatagtaaaagatattccagagctaagcttgtggttagaatttggtgtatctcaggagactcaaatttctttgatgagcttaggattaactagaacatcagcgattgctgtttcagaatacattgtagctacagatttaacccctaaacagtgtatagggtggttaaaagagcataatttagagtcactcgatttatcacctattgtagtaatggaaatttataatgttttaagtgtacatacaaaagttgatttattgaacaattag

SEQ ID NO: 59146 - DNA, 978 bp, Bacillus cereus AH820; identical to SEQ ID NO: 59144

SEQ ID NO: 59147 - DNA, 2592 bp, Bacillus cereus AH820; identical to SEQ ID NO: 59145

SEQ ID NO: 59148 - DNA, 867 bp, Bacillus cereus biovar anthracis str. CI
atgaaagctttaactagacggataaaaaatttaatttttaaatttaatgtaagtcccgaaaagatatctactgaaaagcatccttttaccttgaactacgaggatggaaaatatagacagttagagttggttagaatcattaaagattctgttatacattttgctttgacagcagatgagataaagaatttaaagaaaacggatgattttggtgaaatggaacgtaaggcctggagtcgtatttctaaggcgcataaaaatagtaaaggggattatggagagttattgctattcttaatgttgaccgttttcttcccaacgaaaaaatttgttacaaaggttcgattaagaagttcaactaaagatcaaattaaaggtttcgattgtgctcattttacagttgatgatgatgatatttcactttggctaggcgaggctaagtttcataataatttttctaatgcaataaatggagctatgggttctatagaggaacattgtggatttgattatttaaatgatgaaattagtattttgagttcgaatattgagatgaatgaaaatttccctcattatgaagttttggataacctccttaatgggggaatctctttagatacaataaaaataaaaattcctgtattacttacatttgatagtgctttattaaaaaaacatagtgatttgaaggatctcgattttgtgaaaaatatggaaaaagaatttctgcgtaaatttaaagccattgatgaaaaaaaacgtgtgctaaagccgaatattgaggttctttttttaataataccttttcaatcggtaaaagaaataaaagatcgattagaaatgttggaagaggtgctactaagataa

SEQ ID NO: 59149 - DNA, 2220 bp, Bacillus cereus biovar anthracis str. CI
atggttattacagaaagaaatctggagattattaatggtttgaaagataagttgaaaactgataagagtttaaattttaaagaatataaaactttattagaaaaagcgtatcaacttttttcctccaacgatcccaaattatacaatttaggattatcagttatttgttacgttgcagaagcacagcctgttgataagtttatacaacaattactttacgactgtatggttgcttccagagtatttctgtatactgacatgtatgaaagaacggatgggaactttttgcaaaatgtagaaacttcgtttctggatttgattagtaaagaatattatacgttagatactgatacagtattaacaaaagatcagaaaagcttatttgatgattttcaaaaatatagaaggttagttgttagtgctccaacttcttttggaaagtccagaatcatatctgaaataattgctcataatgtatacaaaaatatcgcgattattctacctactattgctttattaaacgaaacatatcaaacgtttaaaaaaaataaagagctatctaaatacaatttagttaattcgttagctcaaccaattgccgaacaaaataatatcctaatactaacacctgagaagatggatttaatgttggatcaaaatcccagtctaacaattgacttttttacaatggatgaagtttataaaattcaggatgataaggaaagaagcaatatatttactcactgtctatatagattgactaaaatgagatcggatttttatttgataggcccttactttgaaggttttagtcaagaatttttaaatagaaccggtgcagtttttaggaaatacagtgcagaaattgttcagaaggatacttatgatttaagtcggatcgaatatcaaacagaatataaaattgaagatgttacctataaaaaattaaaagacaaagataagaatttaataaatgttctaaatgcaattaaggggcagtctttagtttatcttggacaaagagggagaactgaagctaaggctaagaagatagctagtaaacgagaacaaaaatataataatgaaccaattgattacattaaagaaaacatccatagtgaatggtcattggcaacgtatttagaaagaggagtggcttttcatcatagtgcaatgccaaagcatattcaatcggaaattgtagactcttttaataaagaattagtagatgtacttatctgtacttcaactttaactgaaggtgttaacacgacagcaaaaaatgtcataatatatgataattttaaaggtaaaagtgatttctatttaaatggattcgatgtgaaaaatattaaggggagagccggaaggtttctatctcattttttgggaaaggttatagtcttagaagagattcaccaggaagaagagaaaggtataattgaatttagttattatgatgatgaaaatttaaatatagaagaaactattcaagttgatagagatgacttgtcgggaaaaaatttgcaaagaagactcgctgcggaagaggaattgaatatgcgaagaattccactctcagttattaaaatgaataaatttatacccgttcatcaacaaattaacttaatcaattttttaaggaaaaattcaaaggttttaaggtaccttacattccaatcaagtataccgaataaatggcagttagtagaaatattagagctttgtcatcagtatttatttaatcaacgtgataaagaggataaaaattttcatatttctaacctaataaggttaactaatttttatatttataaaagtccattaattagagaccttataaacaatcagaacgggaaacatattgatacaaaagtacgtagcactttttatttaattagtcactactttgaattcacattgccacgttatcttacaattttcgagaatctctttaattttgtatataaagagagatataacaaatcagatgctataagtttaaagacacttattacaaaattggaatttggttatataaataagcacgaagttgctcttagggaggctggggtccctgtaaatattataaataaaattggtgagaaatttaaggattgtgaagatcttgaagaaattagaattaaaattaaattggatccgttcttacttgaagagcttacttcgtttgaacaaaatctcttacttaaatatttatag

SEQ ID NO: 59150 - DNA, 840 bp, Bacillus cereus Rock1-3
atgcttaaagaatttgtaacacttttaactgaagaggtacctagttttgctttaggatatcatcaaggagtgatggttgcacaagagaatatattacgtgtattgatagaggctgcaaattcgatttataaaattgatgcatatgaaaaggcggcaacaacatatttaaataatgaatgttggagtgatgacctacaggataaatatttaaaaagaggtgaatttggagaattaatacttcattttatcttaaaatatttttttaatacattacctctcgttgcaaagatttattttaaagattcatatggacatgctgtacatggatttgactcagttcatatcgatcctacagaaaatactttatggctaggcgaatctaaaatatatactgatggtggacgaggaatagatgctttagtcgaagacttatttgagcattttaatagtgactattttgaaagcgaatttactattatatctaaaagaataaaagatacaaagcaaaatttagttgatgcaggaacagatcccgaacattgggttaatctattaaacaaatatactagattagcagagaaattaaataacataatagtacctatgttttgtgcatatgaaactaaagttttttctaagtatggtgaccctacagagtttgaaagtgaatatataaaagaaatatctaaattaaataaacgatttatgaaaaaaaaagggagtcacccgtggaatgcccatttgaatattgtagttattttagttcctttggaaagcaagaaaaaattaattgctgcattgcatcgtaaattaaaaaatctgcaaatgttgggagattga

SEQ ID NO: 59151 - DNA, 2163 bp, Bacillus cereus Rock1-3
gtggattggaatcaagtagatatatctaatatagaaagtttaaattttgaggaaagtttttctttggcgaaatatatatcgcaaaaagatgtagtcacagaagaaatcgctaataatattattataaaagtattagatatatgggagaatgttgacgattcgacaaaagatttatgggtagatttaatagaaagtgcaggtttttatccatacctacttagaataattgaagccaataatcagctagatactacatctgaaatccgctcagcataccattcttctaaaaaattagagaatattacttttcacaaagaacaaaaaattttagcgaatttaattgcagaagaaaagaatttaatagtaagcgctccaaccagttttggaaagagtttattgatacaagaaatcatatctttgaataagtataaaaatatactgataatacagcctacgctagctttaattaatgaaactagggtaagcttaagaaagtttagtaataattataatattattgtaaacacttctcaggaaatggagtctaaaaatatttttatattaactgcggagagggttttagagtatgaaggtcttccggagatagattattgtattttagacgaattttataaattgagttcctttagagatgatgaaagatcggatgtattaaatattgccttaagaaaagttttgaaatctgatcctattttttactttataggtcctaatattgataatatacctgaaggatttaaagaaaggtataatgcaatattttttaaaactcaatattcattggttaatactgaaattgttaaagtagatttagaatatcaaactacaggagtacgaaggcaagcaaaagaaaaagaacaaaagttgtttgaattattgtatacgcagcggcatgagcaatctattgtatatgtttcttcaccgcaaagagcatataatttagccgtgaaatattatgattatctaaatgaaaatggacttgtgaaagaagagcaatgtttgcccgtaagtgaatggattcaagaaaacttaagtgaggattgggggtttaataaccttataaagaattatattggtgttcattcgggaattataccgaaacatttagtacattctatgattgaatattttaatgaaggaaagctggatgtgttattttgtacttctacgattatagagggagtaaatacttctgccaaaaatgtatttatttttgataataaaaaaggacctaatctactggacttctttgatttttcgaacattaagggtagagcgggaagaatgttaaaacattacactgggaaggtatacatatttaatagtgttcctcaaagagaagatattaatttagatataccttatcatgatcaaaaatatattaatgatgaaatattagttaatttagacagggatgaagtccatacatcacatttagaaagatatgatgaattacatgactacaacgaagaactgttaaaagttattaaaaagaatgcagtttcagtagcgggacaaaaagaaatcattaaacaactaagacaaaagttaaaaagtaatccagagttaattgtgtgggataaatttcctaataaatatcaacttaattttttaatttctttgtcttggaattatcttctaaagccaactgagacaacaaggccaatgactataaataagttgcctgtaaccattagaaagcacatttcaaacagtttatacgtcttaattatggaagagcaaaaatatctaaaacaacaaaatccaaaatggacagaaaaaagagttattgatactgcgattgaaaatgtttttcgagaaaaacgtcattggatttcatataaagttccaaaatggttaaatgtagttaatttactacaaaaggtgctttgtaagaacgaaggattagctacaagtggggattattccttttttgcttcatacttagaaaatgaaggtgtggaagaaaggttttcattattaattgatatgggtattccttcatcggtaattaataaaatagatcatcttattcctgatgatttaaaggggcaagaattaatttattttattaagaatttgaagagagatgatgtatcttctttaatggcatatgaaattgataaaatcggacagctgtaa

SEQ ID NO: 59152 - DNA, 1530 bp, Bacillus cereus Rock3-28
atgagtgaaattttatatcatatcactgcaaagttgttttgtaaaaagcaagctactgcatttttaattaacgagaatacagctattacagcaagacatgcagttacagataatattaaaaatcaaacacctattagattggagttttatggattatctgaaggtcaggaaacaaaggaggtctttgcatcaattattggagatagtaaaagatatgatgtggctattttgagtttagagaaatcagtaagatcattagaatcttggccgaatttaagtagtcagaaagtaaaccttgaagataattgggaatgtgtaggttttcctgtaggatgggattctggagaaggaggaagtagattttgttatataaaaggaggtatttatcaagattcaagctttgaacaagtggttaaatatgatttgcatctagatggtaaatatataaatgatggttgggatgagagtctagaaggattatcgggttcccccgtcatgattaatggtgaaattaaagcaattgttgtagtggaagaatatagtttaataaagtctccaattaaatcaatcagtattaatagaatagtgaattttcttgaagaaaatgggattaaatttaatagctcgtttggacctaagaataacttaattaatagtcggcttgatgctcaaaaaaataaatgtgaggaactttttaagaaggttgattattatggaaataaaccagatattgatttattaattagtgcatattatttgaaatatagtaaagatggtacttctcaaatgaaacaattttcagagtaccttgcagattcaatttcagattacgcatgtactcttgctgatttagaaaaattagaaaaacgtattattaaaccgctttctatagttaaaaagacaaataaggtaataggacaaattaaaggtcaggaaaagttgggttctataattctttggatgttggtcgaagggatactaggtgcacctaaagggttaaagcggataagtattgatgacgaacatgatgtcttcaatgaattacatattggaatgaacacggattataaattagttttatacttgggtgagggtaagttaaagagtgatttaaaaacggcagttcaggaatctattcaatcattaggtaaaattatgaatataaatgatgatattttttatcctgatgattatatttatgatcaaattgagtctagtgaaattaaaaagttacttagtgattttaaaaagtttgatagaagatgggatgatattgtactagaacttactgtttttacaggatatgattcagacttactaaagaaaattgagcaaagaggattgcctaaagaacatatggaagcttttattgggcaaaaatatatagaagaatgtacaaaaaacgagcaaattatatatgaaatgttaacggaaaattcgcctattaaaaacataaatattaattggtttatcattccgtttaacacaattgaagtttttgaaaatctagttattactgaaattacctaa

SEQ ID NO: 59153 - DNA, 2556 bp, Bacillus cereus Rock3-28
gtgaatgggatgaattctgaaaaattaatgaatcaatcggacagggaaacgctattaatattattagagaggttaaagaaaatacaagttcaacaagatttattttccaacgtgacagagcatttttcaaaattagaaataaaaatattggcggaagctggaaacacactagcgagttcgatagataatcaagataagatgaatgctctagagattgctatttcattgcctcaagtgatgccaagtaaaggcatttttctatgttcgttcttaatattaagaaaactagggaattttccagcaataaaattacttgaaactacaactggaataagtgaatataaagatctcttaaatggcatgactgctttggaagaatatatttttgagagttttaatgaaaaaacctttattgataaacagtaccttttaactaactttcaaaaaaaggtgtccgagattataaatggtcatcaaggaataagtatatctgctccaacttctgctggtaaatcatatattgttttaaaatatattttagatttaatttaccagaataggaataatattacagttgtttatgttgttccgacacgagcacttattaagcaagttatgaatgattttattgaacatattaatgaattaggtttgaaaaacatttatgtagggtgttcatcagaggttgaaaatataacgagtaacttaggaaaatcaaatattttagtgttgactcaagaaagattatatcaactttgtacaagagctgatgtaactaaactaaatatagctatgattgtggttgatgaggcacataatattcagagtgatgggagaggtgttttattagaaggggctttaaagtttgtacaagcactgtttcctaatgcaaaaacattgtttgctagtcctttggttagtaatccagaaaagttacttactacatttaatattatagacggcgaaaaagaaaaggattacttcccgttagtaattcaaaatataattaaagttaaaaaattggctaaacgtataaagataaatgttatttatcaagatgaagaaatagaggttagtgagataccttatgaagataaaggtaagtctagagcaagtattcttgcaaatgttgcaatgaaattatggaatgagcaaacttcaataatttattcgaatgaaccaatgttatctactgatgtagcaagaatattatatgaaagtgataacttcccagttttaaatgatgaacgtctagaagactttgcagattttatagaagaatatatttcgcctaattatgaattagctcaatttattcgatgtggaattgcatttcattttggctcattaccgacaataattagagctggaatagaagaattgtttaaatctggtgcattgaaaattgtaagttgcacatctacgctactagaaggtttgaatatgcccgctaaaaatatatttatttataaaccagaaaaaggtagacataatcctatggataaacttaatttctggaatttagctggtagagcagggagaatgggaaatgacttttcaggaaatataatttgtatagatcctgagagttggaaggaaaatcttttattaggtgaaaggtcatttcctataattccatcttctgaatataaattgaaaaatcaagtaaatgattttaaagaatatatttttgatagaaaaaatccatctggcatggatgattataatgaacaattagtttccatggtagttcgagatagagtagtaggtaaaaaattaattgactctcaatataaggatgaaaataacgaaaaggatttaatagaaattgatgaagttactgaaataattattaatgaatttaaaccacctttaagtttattaagtaatacaccaggaataatgccggacagaattaatgatttgtgggagtattttgaaaaaaataaagagaaatataaagaatttatgcctatctttcccacttatatgtatgataaaggttataatagatttaaagtaattgtaaaattaattaacaaattctttatgaatagagtgcaatggagtgaggaccatattaaaaggttatctataaatagttataagtggatgctcggtttttctctctctgatataatattttatgataaatcatcaaatatctatacaaataaaaaattaactggttatgtgaaaggccaaattgattttttaaataatagaattcgttatgaaatggtaaagtatacccaggtatatatagaagttttaagagtgtttttggaatcaattaatcaaaaagaagatgccgaaaaattagtaaagctgtcttcgtatttagaatatggagcttgttcaaccccagctctggaatttatagctataggacttcctagagaagcggcaattaggttagataaagaatttgggaaaaatcataaggtagaagatccaaactattatttagagtggttaaaaactttagatgttaatactctagagatgccaaattatttaaaacagcaaatagttcaggttcaaaagattttttaa

SEQ ID NO: 59154 - DNA, 906 bp, Bacillus cereus H3081.97
atggaattaagcttggcttcaactgattttttaaaagtgttcaaacatctcgattcttatgaatttggtgatactggaaacaaaatcaatttatttttatgccctataaacgccaataagttcgattatagtagaataataaatgaacttatggaaccagtagcagactttgccatttcaagaagagtgaaaagttcttatgccaataaacctatgactctatccaaagtagctagagaaaaatttgttgagtataaaaaaaacactggtgaattaggagaatttttattgtattgctttttagaaggacatttgaacgctccaaaaatattttcaaaattggaaatgaagacttcaactagtatgtacgtcaatggttcagacggtgtgcatttcttaaaattacctgatggaaattaccaattagtgtttggagaatcaaaaactatcaaaaaattaagcaatgcaatatatgacgcattcaaatcaatagaccaatttataaatgaggttaacgataaaggaaatgcaaaaagtggcatcaattttgaaaaaagattaattagtgacaatttagatcgtgaaagctgggataacaccgaaaaagaattcctaacaaaactaatctatcccactactgatgagacttttgatgtagacgatgcctttggtatttttgttggattccaaataactcccacagatgcacaaaaaaaagcaagcaattcagcgtataaaaaagcaattgaaaccgatgttaaagcccaattatcaaaagaattgaaacatatccaagatttaatcgagaaatatgagctatttggatatactttttatatatacgctttgccatttactgaacttgacaaaaccagagaggacataatgaaaggactaacgacatga

SEQ ID NO: 59155 - DNA, 2565 bp, Bacillus cereus H3081.97
atgagttttcttaaagaactagcccacaaagcacttagtgatgaatatttagaaactttaatatataaattagaaaaacaatatggttaccactttgcaggtagtcatataaatagccccttaactagtaaggaatataatgatttgttaaggttctcagatatactttgtaggtccgatataatacaagctcgaaatctagcatataaaatcattagtttattatacaatttttatcatgaagataatttttttaaaatgcaagctgcaactgtactcgtaaagctaggtaacttcccttctcttaaactagccattaataatgaggaacttactctagatgaagtgaaattagaatcaatcattaaagaaacttatcaaatcgctcctgattcaaaaaccatttttactgatgctcaatacaaagtttatgagaaattaaaagacagtaaccactttagcttttcaggtccaacgtcttttggaaaatcattcattattgaatcatttattaaatacctaatcaaagaaaaaaatgcctctgataatattgttattcttgtgccaacaagggcattaatcaaccaagttacaaacaaattaaaaaaagagatttccgaacccaaatacaaaatactatcacacccaacagtacccttgctttataaaaataaagggaataaatatatttttgtatttaccccagaaaggttaatctcgtatttatcaaatgataatcctgcaatcaactatatttttgtcgatgaggcccaaaaattaatagctcaagatgattctcgcgctccacttttttatcatgctttgatgttagcaaaaaggaaaagtgtaaacctttatttttcctctcctaacattactaatagtgggatttttttacaattatttgggaacagtacagaagaaacactaagtgtcactgaaacctccgtggcccaaaatagattttttattgattgtattgaaaaaaaggcacttatgtttactgaaaacggaaaagaaattaaacttccttatgataacttttccacaaacgaacacaaaaatttaagaaacgctattactatattagggaaaaatgttcagaacataatttattgtaacactgttgatgatacaataaattatgctttgcagtttgcaaaaaaccttaatgaaaacaaacatcctaatttaacttccttaattgagctagttgaaacaactatgcatgaagaatattatttgatagattgtctaaaaaaaggaattgcgtttcactttggaggattaccccaaagaattagagaaaaaatcgaattattatttcgttataaaataattactcatattttttgcacctctactttacttgaaggagttaatttacccgcaaaaaacatatttattttaagcaacgccatcggacttaaaaagttctctgatgtagatttttggaacttagcgggacgcgccggaagattaactaaagacctaagtggaaatattatttgcctaagaatagtagataagaaaaatagatgggataaacctaaaaaagatttaaaaatagtaaaagaaaaaaaaataaaagaagttagctctattttaattacaaataaaaagaatttttatacaaatatagggaattcgattgaagaaaaaccattcactcgaaaaagtatacctaataatgaaaagaaaatgcttgattcctatggtaatatcttagcttatcatggtttatctaaaacagattcaattttaagaagtatgtttattaataaaaattctgagggggcatcaattcttaataagcttgactcgaaaaacagggttccaaacaatattctagaacaaagcatgactatcaaactaaaatatcaaaacaatattttaactaaagaaaagtttttatccgaaataccaactgaagtgaattatacaaattgcttagagctcttaaataccctttatgattattacaattgggaagaagaggaatctggaggaaataaacctttagccaaaaataaaaatattctaacctattatgctgtgctaatgaactcttggataaattccaaacctttaaatttaattatcaaagaggtaataaaagattatatcacacataaaaaagatatctttctaagtaacaaccaacccgaaccatttaatgtgaaaaatcgtattcatattaataaggtggttaataatgtagtatctgatatagaaaatgtattgcgatttaaagtgaaaaattatgtttctaattacaccctactagttaataatataagtgaagagaaagacctcccgcaaagtaacgattggtcagaatacttggaatatggaaccacagaaaatcttataatcgaattacaaaatttaggattcccaaggcatttagcaacattccttaaaaataattatatacaactctttattattgaagacaataatataattgattttttagaagatgaattaaaaaataccattgataaagaaaaattttccgaagagtataccgagttatccgaaatacttgattgggaaatttaa

SEQ ID NO: 59156 - DNA, 951 bp, Bacillus cereus BAG1O-2
ttgagtagagccgtagaagttagaagtgtattaacttgtaaaattaatgatactaatttacattcgtattttatagattttgacattaatgatgatgggaatcttgagcaaatgcttaaagaatttgtaacacttttaactgaagaggtacctagttttgctttaggatatcatcaaggagtgatggttgcacaagagaatatattacgtgtattgatagaggctgcaaattcgatttataaaattgatgcatatgaaaaggcggcaacaacatatttaaataatgaatgttggagtgatgacctacaggataaatatttaaaaagaggtgaatttggagaattaatacttcattttatcttaaaatatttttttaatacattacctctcgttgcaaagatttattttaaagattcatatggacatgctgtacatggatttgactcagttcatatcgatcctacagaaaatactttatggctaggcgaatctaaaatatatactgatggtggacgaggaatagatgctttagtcgaagacttatttgagcattttaatagtgactattttgaaagcgaatttactattatatctaaaagaataaaagatacaaagcaaaatttagttgatgcaggaacagatcccgaacattgggttaatctattaaacaaatatactagattagcagagaaattaaataacataatagtacctatgttttgtgcatatgaaactaaagttttttctaagtatggtgaccctacagagtttgaaagtgaatatataaaagaaatatctaaattaaataaacgatttatgaaaaaaaaagggagtcacccgtggaatgcccatttgaatattgtagttattttagttcctttggaaagcaagaaaaaattaattgctgcattgcatcgtaaattaaaaaatctgcaaatgttgggagattga

SEQ ID NO: 59157 - DNA, 2163 bp, Bacillus cereus BAG1O-2; identical to SEQ ID NO: 59151

SEQ ID NO: 59158 - DNA, 951 bp, Bacillus cereus VD133
ttgagtagagccgtagaagttagaagtgtattaacttgtaaaattaatgatactaatttacattcgtattttatagattttgacattaatgatgatgggaatcttgagcaaatgcttaaagaatttgtaacactgttaactgaagagatacctagttttgctttaggatatcatcaaggagtaatggttgcacaagagaatatattacgtgtattgatagaggctgcaaattcgatttataaaattgatgcatatgaaaaggcggcaacaacatatttaaataatgaatgttggggtgatgatctacaggataaatatttaaaaagaggtgaatttggagaattaatacttcattttatcttaaaatatttttttaatacattacccctcgttgcaaagatttattttaaagattcatatggacatgctgtacatggatttgactcagttcatatcgatcctacagaaaatactttatggctaggcgaatctaaaatatatactgatggtggacgaggaatagatgctttagtcgaagacttatttgagcattttaatagtgactattttgaaagcgaatttactattatatctaaaagaataaaagatacaaagcaaaatttagtcgatgcaggaacagatcccgaacattggattaatctattaaataaatatactagattggcagagaaattaaataacataatagtacctatgttttgtgcatatgaaactaaagttttttctaagtatggtgaccctacagagtttgaaagtgaatatataaaagaaatatctaaattaaataaacgatttatgaaaaaaaaagggagtcacccgtggaatgcccgtttgaatattgtagttattttagttcctttggaaagcaagaaaaaattaattgctgcattgcatcgtaaattaaaaaatctgcaaatgttgggagattga

SEQ ID NO: 59159 - DNA, 2163 bp, Bacillus cereus VD133
gtggattggaatcaagtagatatatctaatatagaaagtttaaattttgaggaaagtttttctttggcgaaatatatatcgcaaaaagatgtagtcacagaagaaatcgctaataaaattattataaaagtattagatatatgggagaacgttgacgattcgacaaaagatttatgggtagatttaatagaaagtgcaggtttttatccatacctacttagaataattgaagccaataatcagctagatactacatctgaaatccgctcagcataccattcttctaaaaaattagagaatattacttttcacaaagaacaaaaaattttagcgaatttaattgcagaagaaaagaatttaatagtaagcgctccaactagttttggaaagagtttattgatacaagaaatcatatctttgaataagtataaaaatatactgataatacagcctacgctagctttaattaatgaaactagggtaagcttaagaaagtttagtaataattataatattattgtaaacacttctcaggaaatggagtctaaaaatatttttatattaactgcggagagggttttagagtatgaaggtcttccggagatagattattgtattttagacgaattttataaattgagttcctttagagatgatgaaagatcggatgtattaaatattgccttaagaaaagttttgaaatctgatcctattttttactttataggtccaaatattgacaatatacctgaaggatttaaagaaaggtataatgcaatattttttaaaactcaatattcattggttaatactgaaattgttaaagtagatttagaatatcaaactacaggggtacgaaggcaagcgaaagaaaaagaacaaaagttgtttgaattattgtatacgcagcggcatgagcaatctattgtatatgtttcttcaccgcaaagagcatataatttagccgtgaaatattatgattatctaaatgaaaatggacttgtgaaagaagagcaatgtttgcctgtaagtgaatggattcaagaaaacttaagtgaggattggggttttaataaccttataaagaattatattggtgttcattcgggaattataccgaaacatttagtacattctatgattgaatattttaatgaaggaaagctagatgtgttattttgtacttctacgattatagagggagtaaatacgtctgccaaaaatgtatttatttttgataataaaaaaggacctaatccactggacttctttgatttttcgaatattaagggtagagcgggaagaatgttaaaacattacactgggaaggtatacatatttaatagtgttcctcaaagagaagatattaatttagatataccttatcatgatcaaaaatatattaatgatgaaatattagttaatttagacagggatgaagtccatacatcacatttagaaagatacgatgaattacatgactacaacgaagaactgttaaaagttattaaaaagaatgcagtttcagtagcgggacaaaaagaaatcattaaacaactaagacaaaagttaaaaagtaatccagagttaattatgtgggataaattccctaataaatatcaacttgattttttaatttctttgtcttggaattatcttctaaagccaactgagacaactaggccaatgactataaataagttgcctgtaaccattagaaagcacatttcaaacagtttatacgtcttaattatggaagagcaaaaatatctaaaacaacaaaatccaaaatggacagaaaaaagagttattgatactgcgattgaaaatgtttttcgagaaaaacgtcattggatttcatataaagttccaaaatggttaaatgtagttaattcactacaaaaggtgctttgtaagaacgaaggattagctacaagtggggattattccttttttgcttcatacttagaaaatgaaggtgtggaagaaaggttttcattattaattgatatgggtattccttcatcggtaattaataaaatagatcatcttattcctgatgatttaaaggggcaagaattaatttattttgttaagaatttgaaaagagatgatgtatcttctttaatggcatatgaaattgataaaatcggacagctgtaa

SEQ ID NO: 59160 - DNA, 951 bp, Bacillus cereus; identical to SEQ ID NO: 59156

SEQ ID NO: 59161 - DNA, 2163 bp, Bacillus cereus; identical to SEQ ID NO: 59151

SEQ ID NO: 59162 - DNA, 906 bp, Bacillus cereus; identical to SEQ ID NO: 59154

SEQ ID NO: 59163 - DNA, 2565 bp, Bacillus cereus; identical to SEQ ID NO: 59155

SEQ ID NO: 59164 - DNA, 951 bp, Bacillus cereus
ttgagtagagccgtagaagttagaagtgtattaacttgtaaaattaatgatactaatttacattcgtattttatagattttgacattaatgatgacgggaatattgagcaaatgcttaaagaatttgtaacactgttaactgaagagatacctagttttgctttaggatatcatcaaggagcaatggttgcacaagagaatatattacgtgtattgatagaggcggcaaattcgatttataaaattgatgcatatgaaaaggcggcaacaacatatttaaatgatgaatgttggggtgatgatctacaggataaatatttaaaaagaggtgaatttggagaattaatacttcattttatcttaaaatatttttttaatacattacccctcgttgcaaagatttattttaaagattcatatggacatgctgtacatggatttgactcagttcatatcgatcctacagaaaatactttatggctaggcgaatctaaaatatatactgatggtggacgaggaatagatgctttggtcgaagacttatttgagcattttaatagtgactattttgaaagcgaatttactattatatctaaaagaataaaagatacaaagcaaaatttagttgatgcaggaacagatcccgaacattgggttaatctattaaacaaatatactagattagcagagaaattaaataacataatagtacctatgttttgtgcatatgaaactaaagttttttctaagtatggtgaccctacagagtttgaaagtgaatatataaaagaaatatctaaattaaataaacgatttatgaaaaaaaaagggagtcacccgtggaatgcccatttgaatattgtagttattttagttcctttggaaagcaagaaaaaattaattgctgcattgcatcgtaaattgaaaaatctgcaaatgttgggagattga

SEQ ID NO: 59165 - DNA, 2163 bp, Bacillus cereus
gtggattggaatcaagtagatatatctaatatagaaagtttaaattttgaggaaagtttttctttggcgaaatatatatcgcaaaaagatgtagtcacagaagaaatcgctaataaaattattataaaagtattagatatatgggagaatgttgacgattcgacaaaagatttatgggtagatttaatagaaagtgcaggtttttatccatacctacttagaataattgaagctaataatcagctagatactacatctgaaatccgctcagcataccattcttctaaaaaattagagaatattacttttcacaaagaacaaaaaattttagcgaatttaattgcagaagaaaagaatttaatagtaagcgctccaaccagttttggaaagagtttattgatacaagaaatcatatctttgaataagtataaaaatatactgataatacagcctacgctagctttaattaatgaaactagggtaagcttaagaaagtttagtaataattataatattattgtaaacacttctcaggaaatggagtctaaaaatatttttatattaactgcggagagggttttagagtatgaaggtcttccggagatagattattgtattttagacgaattttataaattgagttcctttagagatgatgaaagatcggatgtattaaatattgccttaagaaaagttttgaaatctgatcctattttttactttataggtcctaatattgataatatacctgaaggatttaaagaaaggtataatgcaatattttttaaaactcaatattcattggttaatactgaaattgttaaagtagatttagaatatcaaactacaggagtacgaaggcaagcaaaagaaaaggaacaaaagttgtttgaattattgtatacgcagcggcatgagcaatctattgtatatgtttcctcaccgcaaagagcatataatttagccgtgaaatattatgattatctaaatgaaaatggacttgtgaaagaagagcaatgtttgcccgtaagtgaatggattcaagaaaacttaagtgaggattgggggtttaataaccttataaagaattatattggtgttcattcgggaattataccgaaacatttagtacattctatgattgaatattttaatgaaggaaagctagatgtgttattttgtacttctacgattatagagggagtaaatacttctgccaaaaatgtatttatttttgataataaaaaaggacctaatctactggacttctttgatttttcgaacattaagggtagagcgggaagaatgttaaaacattacactgggaaggtatacatatttaatagtgttcctcaaagagaagatattaatttagatataccttatcatgatcaaaaatatattaatgatgaaatattagttaatttagacagggatgaagtccatacatcacatttagaaagatacgatgaattacatgactacaacgaagaactgttaaaagttattaaaaagaatgcagtttcagtagcgggacaaaaagaaatcattaaacaactaagacaaaagttaaaaagtaatccagagttaattatgtgggataaattccctaataaatatcaacttaattttttaatttctgtgtcttggaattatcttctaaagccaactgagacaacaaggccaatgactataaataagttgcctgtaaccattagaaagcacatttcaaacagtttatacgtcttaattatggaagagcaaaaatatctaaaacaacaaaatccaaaatggacagaaaaaagagttattgatactgcgattgaaaatgtttttcgagaaaaacgtcattggatttcatataaagttccaaaatggttaaatgtagttaattcactacaaaaggtgctttgtaagaacgaaggattagctacaagtggggattattccttttttgcttcatacttagaaaatgaaggtgtggaagaaaggttttcattattaattgatatgggtattccttcatcggtaattaataaaatagatcatcttattcctgatgatttaaaggggcaagaattaatttattttgttaagaatttgaagagagatgatgtatcttctttaatggcatatgaaattgataaaatcggacagctgtaa

SEQ ID NO: 59166 - DNA, 951 bp, Bacillus cereus
ttgagtagagctgtagaagttaaaaatgtattatattgtaaaatcaataatgctaacttacattcttattttatagattttgaccttgatgacgacggtaatcttgagcaaatgctcaaagattttgtaacacttttagctgaagagatacctagttttgctttaggatatcatcaaggagtaatgattccacaagagaatatattgcgtgtattaatcgaagctgcaaattctatttataaaattgatgcatatgaaaagacggcagaaacatatttaagtggtgaatgttgggatgatgatttgcaagaaaagtatttaaaaagaggtgaattcggagaattaatacttcattttattttaaaatatttctttaatacattacccttaattgcaaagatttattttaaagattcatatggccatgccgtacatggatttgattcagttcatatcaatcctacagaaaatactttatggctaggagaatcaaaaatatatactgatggtaaacgaggaatagatgctctagttggagatttatttgagcattttaatggtgactattttgaaagtgaatttactatcatatctaaaagaataaaagacacacaacaaaatttagctgatgcagggacaaaccctgaatattggattcagttattaaatacatacactaaattatcagcgaaactaagtaagataatagtacctatgttttgtgcatatgaaactaatgttttttcaaaataccatgattctcaagagtttgaaaaagaatatatagaagaaatatctaaattaaatgctcggtttatagaaaaaaaggaaagtcacccgtggaatgatcatttgaatattatagttatcttagtccctttagaaagcaagaaaaaactaattgcagcattgcaccgtaaattaaaaagccttcaaatgttaggagattga

SEQ ID NO: 59167 - DNA, 2163 bp, Bacillus cereus
gtggaatggaatcaagtagatatatctaatatagaaagtttaaattttgaggaaagtttttctttggcgaaatatgtatcgcaacaacatttaattactgaagaaaatgctaacaaaattattataaaagtattggacatctgggagaatgttgatgattctacaaaagagttatggacagatttaatagaaagcgcaggtttttatccatatctgcttagaataattgaatccagtaatcagctagatactacatctgaaatccgctcatcatatcattcctctaataaattagaggatattacctttcacaaagaacaaaagattttagccaatttaattgcagaagaaaaaaatttaatagtaagtgctccaaccagttttggaaaaagtttattgatacaagaaatcatatctttgaataagtatgaaaatatactaataatacagcccacactagctttaattaatgaaactagaataagtctaagaaagtttaatgaaaattataatatcattgtaaacacttcacaggaaatggggcctagaaatatttttatactaactgcggagagggttttagaatatgaaggtcttcctgatataaattattgcattttagacgagttttataaattgagttcctttagagatgatgaaaggtcagatgtattaaatattgcgttaagaaaagttttaaaatctaatcctattttttactttattggtcctaatattgatcatatacctgaagggtttaaagaaagatataatgcgatattttttaagacccaatattcattggttaatactgaaattattaaagtcgatttggaatatcaaactataggggtacgaaagcaagaaaaagaaagagaacaaaagttgtttgaattattgtatacgcaacgacatgagcaatctattgtatatgtttcttctccgcaaagggcatataatctagcgataagatattatagctatttaaatgaaaatggacttataacagaagagcaatgtttacctgtaagtgagtggattcaagaaaatctaagtgaagaatggggatttaataatcttataaaaaattatatcggtgttcactcggggattataccaaaacatttagtgcattctatgattgaatattttaatgatgggaagttaaatgtgttattttgtacttctacgattatagaaggtgtaaatacttctgcaaagaacgtatttatttttgataataaaaaaggccctaatacgctggatttctttgatttttcaaatattaaaggtagggcaggaagaatgttaaaacattacactgggaaagtttatatatttgataatattcctcaaagagaggctattgatttagatataccttatcatgatcaaaagtttattaatgatgaaatattagtcaatttagatagagatgaagtacatagctcacatatcgaaaggtacgatgaactgcataattataatgaagaattattaaaagttattaaaaagaatgcagtttcagtagagggacaaaaagaaattattaaaaagctaaaacaagttctagaatataatccaagattaattatatgggataattttcctgataaacaccaacttaattttgtaatttctttagcttggaatcatcttttaaagccaacagaaacaacaaggccgatgactataaaaaaattacctgtaactattagaaagcatatctcaaacactctacacactttaattatggaagaacaaagttatctaaaacgagaacatccaaaatggacagaagaaagggttattgatactgcgattgaaaatgtttttcgagaaaaacgtcattggatttcatataaagttccgaaatggttaaatgtagttaattcactacaaaaggtgctttgtgagaacgagggattagctacaagtggggattattccttttttgcttcatacttagaaaatgagggtgtagaagaaaggttttcattattaattgatatgggtattccttcgtcggtaattaataaaatagatcatcttattccagaggatttaaaggggcaagaattaatttattttgttaagaatttgaagaaagatgatatttcttctttaatggcatatgaaattgataaaatcggacagctataa

SEQ ID NO: 59168 - DNA, 906 bp, Bacillus cereus; identical to SEQ ID NO: 59154

SEQ ID NO: 59169 - DNA, 1849 bp, Bacillus cereus
atgagttttcttaaagaactagcccacaaagcacttagtgatgaatatttagaaactttaatatataaattagaaaaacaatatggttaccactttgcaggtagtcatataaatagccccttaactagtaaggaatataatgatttgttaaggttctcagatatactttgtaggtccgatataatacaagctcgaaatctagcatataaaatcattagtttattatacaatttttatcatgaagataatttttttaaaatgcaagctgcaactgtactcgtaaagctaggtaacttcccttctcttaaactagccattaataatgaggaacttactctagatgaagtgaaattagaatcaatcattaaagaaacttatcaaatcgctcctgattcaaaaaccatttttactgatgctcaatacaaagtttatgagaaattaaaagacagtaaccactttagcttttcaggtccaacgtcttttggaaaatcattcattattgaatcatttattaaatacctaatcaaagaaaaaaatgcctctgataatattgttattcttgtgccaacaagggcattaatcaaccaagttacaaacaaattaaaaaaagagatttccgaacccaaatacaaaatactatcacacccaacagtacccttgctttataaaaataaagggaataaatatatttttgtatttaccccagaaaggttaatctcgtatttatcaaatgataatcctgcaatcaactatatttttgtcgatgaggcccaaaaattaatagctcaagatgattctcgcgctccacttttttatcatgctttgatgttagcaaaaaggaaaagtgtaaacctttatttttcctctcctaacattactaatagtgggatttttttacaattatttgggaacagtacagaagaaacactaagtgtcactgaaacctccgtggcccaaaatagattttttattgattgtattgaaaaaaaggcacttatgtttactgaaaacggaaaagaaattaaacttccttatgataacttttccacaaacgaacacaaaaatttaagaaacgctattactatattagggaaaaatgttcagaacataatttattgtaacactgttgatgatacaataaattatgctttgcagtttgcaaaaaaccttaatgaaaacaaacatcctaatttaacttccttaattgagctagttgaaacaactatgcatgaagaatattatttgatagattgtctaaaaaaaggaattgcgtttcactttggaggattaccccaaagaattagagaaaaaatcgaattattatttcgttataaaataattactcatattttttgcacctctactttacttgaaggagttaatttacccgcaaaaaacatatttattttaagcaacgccatcggacttaaaaagttctctgatgtagatttttggaacttagcgggacgcgccggaagattaactaaagacctaagtggaaatattatttgcctaagaatagtagataagaaaaatagatgggataaacctaaaaaagatttaaaaatagtaaaagaaaaaaaaataaaagaagttagctctattttaattacaaataaaaagaatttttatacaaatatagggaattcgattgaagaaaaaccattcactcgaaaaagtatacctaataatgaaaagaaaatgcttgattcctatggtaatatcttagcttatcatggtttatctaaaacagattcaattttaagaagtatgtttattaataaaaattctgagggggcatcaattcttaataagcttgactcgaaaaacagggttccaaacaatattc

SEQ ID NO: 59170 - DNA, 951 bp, Bacillus cereus; identical to SEQ ID NO: 59156

SEQ ID NO: 59171 - DNA, 2163 bp, Bacillus cereus; identical to SEQ ID NO: 59151

SEQ ID NO: 59172 - DNA, 906 bp, Bacillus cereus
atgttaaaaacactagtaagaaagtcatttttagaacattttcatcatgacattaaagaccatttcttaatagagaaaaaatgcagattaaatttacatatactaaagataactaataaccaatttgaactctcaccactcttaagggagctatcaaattcaatccttacgttttgcctatcaaaaaaagaatatcaacaatatatagacgagcaacgttttggagaactaaatttaatagcgcaagaacgttttagagattatcaatcgaatgacggtgaatttggcgaattacttttatactgtttattagaatctcatttaggtgcacccaaaatcttaactaagatgaacttaaaaacttctcataatgattacgtaaaaggagcggacggagtacatttattaaaattaaatgacgacgaatatcagatagtatttggagaatctaaaatgtacaaaaacgtacgttctggattaaaaaatgcttttgaatctataaacagttttctgacccattctaaaaacaatgtagactacgagatgcagatactgaatgcccacttccatcaagaggtacttgaagaaaatgcatacgaagaaattaaaaaaattatactacccagcgctcaagaagatgaaatccagacggacaaagcctttggtatttttgttggattcaatttagaagttgataaggatttaaaaaaacgactatctaataaagaatttaatattgaaattcgtaaaagagtatcagaaatcgtacaaaaggaattttcttatattgaaagtttaattgacaaatatgacttatatggatataacttttatatttattgcataccgtttagtgagatgagtgaaacgcgcaaagccgtaataaaaaaattaaaaggtgaataa

SEQ ID NO: 59173 - DNA, 2562 bp, Bacillus cereus
atgaaaattttagagagattagctatagatgcttatgaagatacatattttaaagagttatttgataaggcaaatgatttattatttaagaatatatttaaggagtctgatgccattcctcttaatcaaaaagaattaattcatttattgagattttgtgatattttatctaactctaaaaaagctcaacacagaaatatatcttataaaatcattacccttctccatcctttttatcaggaaaattccttctataaaactgtatctactgccgttttaaataaacttggaaatttccctgctcttgaacttttagattactctacgcctcttcctgtggatagagagttggaacgaaaaataaaaaagacgattcataaagtcaaagattttgaaaatacttttctaactgaccatcaattcgaattgtatcaaaaaatgaaaaattcaaattcttttagtttttcaggtccaacgtctatggggaaatcttttataatgaaaatcgcaatttccgatttaataaagaaagtgactaagcccaatattgcaattatagtacctacaagagccttaattcatcaacttgcaacagagataaaaacagaattaagcttcctcattgaagaaaatggctataccgtgctaacaagcggaaatttagatggaattgatttccaacactctaatctaatcatgatactaacaccagaaagattgttagcttatctttctgataatacatatcctataataaatactttatttattgacgaggcacataaattggcgaataaacaagataaaaggagcgtaactctctatactgcaattgagagagcaacttatgttaaccgtaatgttcaaattatttttgcctcaccaaatgtaacaaaccctgaagtttttttacaattatttaatcaaaacacagaacaagttttttattcaaatgaagctccagttgctcaacagttattttatatagatttattagataaaaaagtaattcattatacagaatataatcccaaaacatttcatcctaaaattttagaaaataaagattccctagatatgatttataccttatcgcaggggtattccaacattatttattgtaattctgttagacatactgttgataaagctatccaatttagtatgcgattcgggaaaataatttcttcacagaaagaaaaagaaaaaattaataaagtcattgaaacaataaagaaaaccgtccatcctgattattttctaattgactgcttaaaaaagggtatcggttatcatttcggaaatttaccacaggttatacgccataatattgaagctttattcaaggaaggtattatcaaatacttgttttgcacatccacattattagaaggtgtcaatctcccagctaaaaacattttcatattacaaaacaaaaatgggagacgtaacttcgagaaagtcgatttttggaatttagcaggacgagcaggaaggttacgctttgaattatcaggtaatatttattgtattagagatgataagagttcttggaagaaaataaatgatttagttaaaaacaaagaacaaattctattaaagcctaccgtttctaataatctagaaacaaaaataaaacaacttgaaagtgcaattcaaaataaagatatagataaagctaataaatctgaaaaagaaattatacgttaccttgcaaacattattagtattgatacattagaattaccaacaggatatgaaacacctataattcaaaaattaattgaacgtaacgaacatgaaattctatccttagcccaagaaaaaatcaaaacaattaccgtaccaaagtatattttaaaaactaatcaacttatcgatgttcaacaacaagaagctgcttatcaatatattttaaaacaaatagataatcctaaatctgttactttccctactgttatcaattacgacaattgcctagaaattttaaacaaatttcattctatctataagtgggaggaatatgattctcgtttaggctataagccttcattacgctatttcgctttattaatgaacaattggataaacggcactggtttgaatgagttaatcagccaaaggattaattattattctgataatcacaaaaatatctatgaatacgtcgaaaatgaacgtcagcttgtaccgttcattagacacaataaaaatcacattaatatcttaataaatgagttgattaaagaaattgaggagattttgcgttttcatatacaaaaatacgtaaatcattactatctagttttacaagatgtacttggcaaagagcatgccggaactaactggggcaattacttagagtacggtacaaggaatagctctgcaataactcttcaaaatcttggtttatctcgacatgtagcaaactatttattaaacgagtattctaaatacttttcatttaaagatggacgcttaattaaaattatgaaaaatgaactcttaaaagaattggatgataatagcatagaaaaacaagaagttttattatttttataa

SEQ ID NO: 59174 - DNA, 708 bp, Bacillus pumilus
atggcgacagagacttcaatctttaaatcagagttaatttttgaacagtttgttgagaaaacttattttcgtgggttttctgtcggttatgaatttgaggaatttaggtatgaagcacttgtcgagctgattttttcagcagtacttgatttttctctacctgagagcgaaaaaaaatcaattacacctgtaaatgcacaaagaaaaatgaggaatgctgcaaaagctgtttatacttcagataaatatagtaagcgtggagaatttggtgagatattacttcatattataatgagagattattataattcgattccagctatttctaaaatgtattataaagatggttctaatgaaacagttaaaggttttgacgccgtccatatagtacctgtagaacaagagttagaactctggttaggagaagtgaagttttataataatatgtcaaatgctataagagatgtaataccagagttagtagttcacacagaaaaaaagtatttaaggaatgaatttctctttatttcaaataaaattgatcctttatgggagtatgctgacaaagtcaagaatttaattgatgaacggactagtttggacaagatctttcaacgtattaggattcctgttctccttacttatgacagtgaagtggttaaatcatttaaagtcatgtcatgtgtaatgattacaaaaacgcactaa

SEQ ID NO: 59175 - DNA, 1896 bp, Bacillus pumilus
atgtcaactaaaatgttgctcaggtatgaattttatcgatctgaaaatattcctgatattgtaatgcatcaaaagcaggccgagatttatgatactatttcaaatcaaaagagtgtaattttgagtgcgcccacaagttttggcaaaagtctattaattgaagaaattgtagcttcattaatgtataagaacattgttattattttacctacacttgctttgattgatgaaacaagattaaaaatgactaaatacactgataaatataaattaatattttcttcaaagcaaaatattgcttctaataatatttttattttaacaccagaaaggcttatggagattgagaatattccaaaagtggatttttttattatagatgagttttataagttggatagtacaagaagtgaggatgagagaataaacgttttaaatcatgctttctataaattaattaagttaacaaataaattttatttattgggacctaatatatcgtcaataccagcaggttttgaaagagaatacaattgtgaatttattccatctgatttcactactgtatcttgtgatgaggtgtttatagaaagagaaaaaggccgagaatttgaacaattaatagaactagttcaaaattttaatgatcctacaatgatttattgtaaatcaccaaaaagtgcggagataaaggtaagtgattatcttgagaaaacccaaaataacttaacattaactgatgaacacacagatgcgattaattggataaaacaaaatattcatcctgattggttactaattagagccttgtcctatggaattgcttttcatcatggtgctatgccaagacacttaggtagatacattgtagaggaatttaatcgtggttcaatcaagtatttattttgtacaagcacattaatcgaaggaattaacactacagctaaaaatgttgtaatatttgataataaaaaaggaacggttccaattacttattttgactatcggaatatccgtgggcgggcagggagaatgacgaaacactttcttggtaaagtatattcgttttatacacctcctaatgatcttgaaataaatgtagatttcccatggtacactcaagatactgcttcagatgagattctcattcaagtagaggatgtagatttaaaaccggaatctagggaaaagatgcaattctttaaagatcaagatttacttgatgtagacgtaataaagaaaaacaataatattccagtgaaaggccaattggagttggcagaagaaattaagaaaaatattgatcattataataaacttttatcttggacaaattatccttcttacgagcaattagagtgctgttgtaatttaatttataattatcttcgatttaaaaggacacgtgacgaagtattctctggtaagcaacttgcgtttctagttaataaatatgtgcaactaaattccaatatggctaactatattaggtattttattagtaacgacagtagaatagatactgttgataaggctgtgcagaaagcgtcaaacttaagtagaaagtggtttgaatttaggtttccaaaactattattagcgttgcagcagatacaggaatcggtttttaaacaacatgagaaaccgtatggagattataaattttatgcttctttagtggagtctgcttgttgttctccaactctggcttctcttcaagagttcggtcttcctatttcactattaaaacatttagagccatatcttgatttaagaacattagaagatgaaggagatttggataaattaatattgcaaattaaaaaactagacgttgattcactcagcttagatccatttgaagataaaattttgaatgaatttattaaaggataa

SEQ ID NO: 59176 - DNA, 846 bp, Bacillus akibai JCM 9157
atgacgacagatgcaccgatttttgaatctgatttgatatttgaccaatttattgaagaaatacaattcagagcattctctgtagggtatgaatttgaagagtttaggtatgaagcattagttgacttgattttctcagctttgttggattttgcactgccagcatctgaacaaaccattacagccattaatgcacaaagaaagttaagaagagcagctaagaccgtgtacgcaaccgaaaaatatggaaaaagaggagagtttggagagatattacttcatatcgttatgagggattattttggttctgtacctgccatttcgaaaatgtactataaagacggtccaaatgaaacagttaaaggatttgatgcggtacatattgtacctcgtgataatgatttggagttatggcttggagaagtgaaattctataacaatattagaaatgccattagagacgtgttaccagagttacacgcgcatgtagataaagtatatttaagaaatgagtttttgtttattaataataaaatcgatgatagttgggaatattcggatagactaaagcgattaattgacgaaaggacgagtttagataagatatttagtcgaatcaagattccagttttacttacttatgatagcaaggttgtccgttcgtttagtcaagcttgcgaagaatataaaaaacacttaataagtgaacttaatgaatatcacgatgtctttagaggcaacgaactacctaatgtagatattgtactaatattaattccattcgaagataaaaagaaattagtagataaattacatgagaaattaaggatattacaactaatatga

SEQ ID NO: 59177 - DNA, 2145 bp, Bacillus akibai JCM 9157
atgaaaacaaacactgaatattatcaaataaagcaattgctagaacataaaatagatttaagtatggacgagtgcttttctatattctcttggttaactgcttctattcaaaaagaagatacagagggaagtgcgagagacatcctgttaagactattagataaggcagatgtattgccgatagaagcgcggacgatattaaatgactatatagagagatttgggtattttccatatttgcaagatttagataaggcatctgtaaggactttgttgaggtatgaattttatcgctcggaacatatccctgatattgttatgcatcaaaaacaagcagaggtgtatgattctttatataataaacaaagtgttattttaagtgctccaacaagctttggaaaaagtttacttattgaagaaatagtggcttctcgggaatacaacaatattgtcattatcttaccgacactagcactgatagacgaaacaagaatgaaactaatgaaatatgcaaaagattacaaattaatattctcttctaaacaatcgtttgatgaaagaaacgtctttattctaacagctgagaggctaatagaaatcgaacagattcccaatattgatttttttattattgatgaattctacaagttggacagttcaagaagtgaagatgaacggttaaatgtcttaaatcatgctttttacaaactattaaagtgtacagataagttctatttattgggaccgaatatcgcatctattccttctggttttgaggaaaggtatggttgcaagtttataccttctgagtatacgactgttgcttgcgatgaaatctatataaagcggaaaaaaaacaaagaatttgaccagttagttgaactggttcagcagttaagagaaccaacgatgatatattgcaagtctcctggtagtgcggaaaagtatgtaaaaaaatttctggataaagggaaaaccttcttagataaaaatacttcacatacagattctatcgaatggattgagaaaaatattcatccagaatggttgttaattgacgcattgaggcacggtattgctttccatcatggttctatgcctagacacttaggacgctatatagttgaagagtttaacaaaggaaatataaagtacctgttttgtacgagcactttaattgaaggcatcaacacaacagcaaaaaatgtcattgtgtatgataataaaaaagggagggaccttatttccttttttgactataggaatatacgaggaagagcagggagaatgacgaaacactttgttggtcgtgtcttttctttctatactcctccagaagatatagatgtagatgtcgattttccatggttcacacaagataacgcttcagatgaaatactcattcaagtagaggagaaagatttgaaagacgattccattgaaaaattaaaaccatataaggaacaaaatgtccttgatattgaaataatcaagaagaacaataatattcctgtaagaggacaagttgagctagctcaactcctccatgaaaatgtagattattatcataaatttttggggtggacaagctatcctacttacgaccaattaagggtaacttgtgaactgctatataaatacttacgttttgcaaatactcgggacgaagtatattccggaaaacagctagccttatacgttaacaaatatgtgagattcaaatcaaatatggcacgatttatagatttttttgtaacaagtgataaggacaatgtagataaagctgtacaaaaagcaaccaaaataagtcgcaattggtttgaatttcgatttcctaaattattattaggtcttcaagaaattcaggaatctgtttttaagcaacatggaaaaacctgtggagattatcgcttttatgcgtccacaattgaagcagctttttgtaccccagctttatctgcgctacaggaatttggtttgccaatttctctcttgcggaaactggagccgtatctaaatttaaaagagatagagaaagaagaagatttagataaagtcattgcacaaatcagaagtttacacattaacgaaatagaacttgatgcatttgagctcaaactgttaaaggatttcttaagaaactag

SEQ ID NO: 59178 - DNA, 894 bp, Bacillus subtilis
atgagagaacaattattatccctgataaataaaacaatagtatataagtatgatttacccaatcattcattaggtattgatagatcaattttctctactgaaaatgatagatgctattcaaccatttgcaaccaatcacttattgagataatttataactcaattattgaatattcattcaacgaatttgatataaatggaaaggagtatgataatttacacgccatagctctaaaaactaaattgaaatacaatgaggttgcatcagaaacttcaaaaataagctatggattccatggtgaaacgatattgtattgtatattatatgcaaaaatggatgctaaaccggttatttcaagaggatatttttataatccactcgaatcttcagagactaaaggatacgattcttatcatttgatcgagcgaaatggaacaactgaactatggttcggtgaagtcaaatttagaaataatcatacgtcaggaataaatagtgctattgatagcattgagaaggctatttccgatgcttacttatctacaaatttccttgcaatcacaaatcataaaaacaactttaatatttcaggtactaaggtagaagaaataattagcaaatgggaagaaaaccctctagttgatataattgaggagatcaaaaaatacgatattaagctgatctatcctattattattatttatgatattaaagacgattatgataatagtataaaaatagctattgaacatattaaaaataatcactctttaaaaaccttctcactatcaattccctattccatatattttatttggctaccagttgataaggtgcgggatatcaaagctgaggtgataaaatggatagaacaaaggaagccgctaatataa

SEQ ID NO: 59179 - DNA, 2298 bp, Bacillus subtilis
atggatagaacaaaggaagccgctaatataatatataatttaaacctatataagaaggggcaaataaaggattataagtttataaatatagtctgtaattactttgatcagataaaagacgtaaatttaactgagtcagactttaaatttcttagatatattgctaacatatctggaataccccatttttataatctattaaaacaatttaataatgtgctagatatccaaaatttcgatttgaataccttttcatctatattgcatgagagcacactacatatagatgaaaatagtatgctgcatagatatcaaaaacaaataattgataaatttgaaataaatagtttgaatagatattttctatcagcaagtacctcgttcggcaagacacatcttgtttttgaaattattaaaaagatgagatattcaaatgttgttttaatcttccctacaatagcattacttactgagaatttggaacgaattctatctaatcatcactataaatattttaaagaaaaatatctaatacatactcttagtgaagtaaataatcttggagagagaaacttatttatctataccccagaaagatacctatcatttttagagaaatctaatactaattttgactttaattttgcatttgttgatgaagtttataaaattgacaatgattatataattgatgaggaaaccaaagaaaatgaacgagatgttgcttatagattagccgtacattactctcttaataataaaactgatgtgttatttgctggaccatatatggagttttctttccctaacacaaccaactataacccctcatttaacacttttttacatgataataaaatttctttaatcaattataacgaatatgaaacagtcaataagtcttatttctatgtgaaaaaaaataaaacgtttcctcatgacaataaatttaatattaattactcaagtaataaaaagacaaatagattaattgaaacggttaaatcgattattaatattcaccaaaatacaattatttattgtgcaaatagggggaaaaacggtggagtagaatattatgctgatgtgctaataaattcacaagtacttaaagaacatagctacactaagtatattgaccttattgatcatctttcatcaaacttcgaaccaaactggattttagttaaatcattgaaacatggaataggaattcatcacggactaatcccaaagtatatacagaaagaaattattaacctttttaataacggattaatcagtgtgttaatttctaccactactattactgaaggagtaaatacatctgcaaaaaatttgatagtaatgcatagtaaaaaaggtaataaaaacttaaaaaaatttgacgcaaaaaacattgctggtcgtgcaggacggtttggttttcattatagtggtagggtcattgatttaagtaactctctattaaatattatcgaaaaagagggggaagcccttaaacacaagaactatgacttaagtgctccaaaagaagagattgatttgttttactctaatgaaaagtatttatcagataaggaaatgactaaaaagagagaaattattacagaacaaagaaaaagaaatattcctgactttataatgaatcagtataaagttataagtcgtatggataagattaaaatttatgatgccattgtgaaattaaaggatgatgacttttctcacattaataaactaataagaacaattaattacaaacttaagattgattttactggctttcaaatcgtattggatgtcctgaaaccaattgttaaaaatcaagatttaaagtttcttattgatcataaaggtaaaaataacaattattcaacgcttacatacttagttcattactaccttaaagatggcttcaaaggctctgttcagtataagttaaaaaatagagaaacaattgatcaagcaatacaacaaacggctaaatttatttatagcactttaaaatatcagacagtgaaataccttggggtttttaatttaatgtataagtattttatttcaaacaaagaacaaaaaaagattgaagatattgcaggtattgataaattgataataaaatttgagtataatgctattactgaaaatggtaggattgcaagtgattacggagtaccctcaaaagtagttgattactatgaggagtcagaaaagaaactccagataaaaaaagactttgacaagtatgaattagaagcatttgaaagaattgaaaaaatatttaataaagattga

SEQ ID NO: 59180 - DNA, 1587 bp, Bacillus thuringiensis serovar monterrey BGSC 4AJ1
atgttagaaataattgataaattacacatgttaacatccaagttatcatgtggggagcaaggtactgcttttctaattgacaaaaatcgtgctgtaacagcaaggcatgctgtaaagcagaatatattatatcaacatccgataaagctggaattctatatatcagaaggaaacacaataattaggtccgcacgagtgattgatcatgataaaacacatgatatagccattctagagttagataaggcagtaactcatgttaacgggtggctacaatttagtagtcgaaagattggaaatgttgatgattgggaaacggtaggattcccgagggattggataacagagggagaaggaagtcgctattgttatattaaaggggatatatttctaaggactaaaacagatgcaacagctaaatatgatattcatttagctagtgattatataaaagaagagtggccccatggttttggagggttatcgggtgcgccgttaattgttaacggtgatatagtaggcgttataattgatgaagaatatagtgctattaagtcaccgctgaaggctgtaagcatagagaagtctatagatatttttacacgtaataacataagtgtacttaatgattcagcaaatcagccattaagaatgaaacatctacttagtgaaaggatggaatcacaacaaaatacgtgcaaggagctattccggaattttgaatactatgtttcccctcctttgtcggaattaagcatatcagttaattcctatcatttaaaatatgatgaaggaggtacccatagaattaaagaattagcaaagcatctaggtgaaatgttaattaagtatgcttgtacactaagtgatataaataaattaaataattcattaacagttaaaaatcttgaaattataaaagaaaaaacagataaatgtatctctagaataaaaagtcaaggggaattaggccctctaatgctttggatgttattagaaggagtattaggtttacctagagtatacacaagagcaaacttgtatgacttagaaccattaaatcaagttcatgttggaattaataatgataataaattttctttatactttggggatgggagattaaaagattcatttgatttggctattcaagaagttatagaatcattaacgggctcatttgattcaaaatccccttctttagatgcgcaggatagcatgtatcttttggataactatgcttttgattgtatagattcttgtcgtttaaaagatttactagatcccttcactaagccacatgagagggattggactaaagtagcctgggaagtaacaatttttactggttataattctagtactttatcaaatctagcaaaacgaaatttatctaaagaggagcttgagcaggttttacgtcattcctatgagcgggaatatagagcaaatcttttaaaaatatatgatttaataaaggaaaatatacatattaatcagttgaaaatccattggtttatgttaccttttaatacagttgaagaacttgagaatctagtattagaggagataaggaggggaatataa

SEQ ID NO: 59181 - DNA, 2544 bp, Bacillus thuringiensis serovar monterrey BGSC 4AJ1
ttgggtatacaagatattattaagtcaattgaatctgcagacattattccacaattattaattaaaataaagaaaatggagatacaaaaggatttattttctcatacaacggaaaccattactcatcaagagataaaactattaattgagatagctaacattcttgctgcctctcctgagatagaacataaaaaagaagcactacatatagcaacctctctcccacttattacggaatttaaaggggtacaacttacttcactcatgatattaagaaagttggaaaactttccagctatacatcttctagaggaaaaaaggaatatttcggagtatagaaatggattaagtggacttagtttatttgaggcttatttccaggaaagtcttaatacaagaaatttctttgggaaagactttgtattaacaaaatttcagaaaaaagtttctaatttagtttctgagtttaaaaacttgagcatttcagcccctacttctgcaggaaaatcctttatctttttaaaagtaatacttaacttaatttatgaagagaaaggagctacagctatatatatcgttcctacaagggcgctcataagacaagtaatgaatgattttttggagaatattaaacaatttaatttagaagatatatatattggttgctcttctgaaataagtagtttattaggtcgtacgggtaaatcaaatattttagtgttgacacaggaaagactatatcaactgtgtactaaagaaaatgtgaaaacattaaatacaaaaataatagttgtagatgaggcacataatattgaaagtggtggaagaggagtattacttgaaggagctcttaagtatgcacagattttatggccacaagttcgtttgttgttttcaagtccattagttagtaatccagagaagttattaagtacatttaaactagaagattcttgcccagaaaaagatttgtttcctttggttagacagaacattattgaagttcaaagaacttcaaaaaaacttatagttagttcagattttaaaaaaaataagtttgagattgcacgaatttcctatgtgaataatggtagttctagagcgaaaattttggctaatgtagtaattgaattgtggaatgagcaaacatcaattatttatgctagtgagccgatgctatcgtcaaatgtagctcgtgaattatttaatagtgggaagtttccgcaattaaatgatgaaagattagatgaatttgctgattttatcgaggagtacatttctgaaagatacgaattatctaaatttataaggtgtggaatagcctttcattttagtgctttgccacctattgttcgagctggaattgaagatttatttaaatgtggtgcgttaaaaattattagttgtacatctaccttacttgaagggataaatatgcccgcgaaaaatatttttacatataaaccaaataaggggaaaaatacacctattgatagactgaacttttggaatttagtaggtcgtgctggtagaatggggactgactttgccggaaatataatttgtatagaccctaataaatgggatgaaaacccattagaaggagaagtattacaacaggtaattcctgcatctgagaaaaaacttgtagataaagatgaaagtgaaaagttaaaggaatacatcgccaatagagataaaccatcagggattgatgattataatgaacaactggcgagtatgattattagagaaaagatacgaggagaacaattagttaattcaatatataagagtcaggaaaatatacaagttttaaaagaaatagacgaaatcacagaaacaatattaaatgaatttactgctccaattgaattattagaacttaatccaggaatagaccctgatcgtattaatgatttatggaagttctttatgcaaaatgaagagttatataagcagttaatacctcggtttccttatgaagaggaaggttatcaaaggcttaggttaatgattaaaataataaagaaagtttttctattcaatgaagattggtctgaaaagtttatagaaaaaattactgctgtaagtcataattggatgattggtgcaccactatctaaaataatattttataataaaacagtattgcaaaaggaaccaaagaaaattacaagttatgtgaaagaacaaatagattttcttaataccaccattagatataagttagttaaatattcacaagtatacacagaggtgttaaaagtatttttagatagaattgggaagaaagaagaagcgaaaaaagttgtaaatatatctgtttatctagaatacggggcttgttctgcacctgcattagagtttatggctattggacttccaagagaagctgcagtcaagttggaaaaattaattaacaaaaaacaaaatgctactagtgaatattatttaaagtggcttaaaaatttagatttggacgcattaaagatatcaagttacttgaaaaagcaaataaaaaatgttcgagaaacgctgtag

SEQ ID NO: 59182 - DNA, 852 bp, Bacillus thuringiensis MC28
atgtcaagttctacaccggtatttgaatcgagttttatatttgaagaatacatcgaagagacccattttcgtgggttttctgtaggttatgaaataggagaatatagatatgatgctcttgtagagcttatattttcagctttagtagatttttctctgccacatagtgagatatcgacatttacaccaataaatgcgcagagaaaaatgagaaatgcagctaaagcagtttatgctactgataaataccgtagtcgtggagagtatggagagatcttacttcatattgttatgagagattattttaatactgttcctgctatttctaaaatgtattataaggatggaccgaatgaaacagtaaaaggttttgatgctgtacatattgtagatcaagaaaatgatttagagctttggttaggtgaggttaaattctatcaaagtattagtggtgcaattagagatgttgtccctgaacttcaagcgcacgtggataaagattacttacggaatgagtttttatttatttctaataaaatagatgattcttgggaacatgctgaaaaaatgaaaatgttgattgatggaagaaccagcttggacaagatttttaaaaaaattagaatccctgttttgttaacgtatgatagtaaagtggtcagttcgtataaagaagttagtgaagaatatcagatgcaattaattgaagaacttaataagtaccacgatacatttaggagtaatgaattacctaaaaatattgatgtgattttaatattaattccttttgaacaaaaaaaacgcttagtcgaattgttgcataaaaaattagaggtgtggcagcagatatga

SEQ ID NO: 59183 - DNA, 2163 bp, Bacillus thuringiensis MC28
gtggcagcagatatgattaaagatatggattataattatataaagacattaattgcaaatgagaaactttctactgaacaatgcttttctatatttacttggataaatcgtgtgttgcaagatgaaaaatctgaaagtgaaggaagagatattttacttcgaatgctggacaggaagaatgatttacctagtgaaatccattcgattttaactgattatattgaacaaatgggttattttccttatttaccaattcatgattatgacgtttcgactaagactctattacactatgaattttatcgttctgaaaatattcctgatattgtaatgcatcgaaagcaagcggaagtatatgatgctatttcaaatcagcaaagtgtaattttaagcgcaccgactagtttcggaaaaagcttacttattgaagaagttgttgcatcaaaaatgtatgcaaacattgtaattattttaccaacattagctttgattgatgaaactaggttgaaattaataaaatatacagatgaatataagttgattttttcttcaaaacaaggcttgggaaataaaaatatttttattttaaccccggaaagactcttagaaatagaaagcattcctgacatagacttttttataattgatgaattttataaattagatagttcgaagagtgaagatgaaagattgaatgtattaaatcatgcgttttataggttaattaagtctacgagaaatttttatttactgggtcctaatatatcttcaatcccaaatggatttgagaaggaatataattgtgaatttattccttctaattatgctactgtagcttgcgatgaaatatttattcaacgtaaaaataatcaagaattagaacaactcgcagaattacttcgcactcttcatgagccaacaatgatttattgtaaatcaccacaaagcgctgaaaaaaatgtaagggatttcttattgaaaaacaaagaacacttgtacaaaaatgattaccatattgatgcgataaattggattgcgaaaaatattcatcctgagtggctattaatcgaggcgttatcatatgggattgcttttcaccatgggtctatgcctagacatttgggcagatatattgtagaggagtttaacaaagggacaataaaataccttttttgtacaagtacattgatcgaaggaataaatacaactgctaagaatgtaattgtttttgaggatagaaaagggactaatcggatttcttattttgattatcgtaatattcgtggaagagctggtaggatgactcaacatttcctaggtaaggtttattcattttatagccttcctgatgctacagatgaaagtgtagatattccttggtatacccaagataatgcatcagacgaaattttgattcagattgcagatgaggatttgaaagattcttctaaagataaactcaaaccttatacggaacaagatgtattggatgttggaatcataaagaaaaataacaatatccctgtgaaggggcaaatagcgttagcggaattgctacaaaataatctagagtcctatcatgaaaacctaaattggaccaattatccttcctataaacaattagaaacctgttgtatattaatctatgactatctgcgttttaaaaatagtaaagattttgtttatagtggtaaacaacttgcttattatgtacataactatgtaaaagttcaatccaatatggctagatatattaaattctttttggataatgatgataaggttaaaactgtggatcaagctgttcaaaaggcgacgaaaataagtagaaattggtttgaatttcgattgcctaaattacttctagggttacaacaaattcaggaatctatatttatgaaaaatggaaaaacatgtggagactataagttttatgcttcgcaaattgaatcagcgttttgtacaccagttttatcgtcattacaagagtttggattacctatttcgcttttaaaacagttagaaccttacttgcatttgaaaaaactcgaagaggaagaagacttggatgaagtaattaggaaaattaagaaattagatgttgattcacttccattagacgcatttgaaagtaaaatattaaaggattttgtgagaaattaa

SEQ ID NO: 59184 - DNA, 903 bp, Clostridium botulinum A2 str. Kyoto
atggagtttccacaacataaagttcctgaatcctttcagaatattttttatcacttgatacagaatgaagaaattaatataaatgatggaattattaatttattttgtatgaagatacataataaaagttttgatacaagctcattagtagatgaattgtctgattctattgtatcgtattgtttatctcaaactgattatgatgaattttatcaaaaacataacattggaaaaatgtatagacaagcagcaagtctttttagagattatgcatctaataaaggtgaactaggggagattattctatattcttttttagaatcacatttaaatgctccaaaaataatttctaagatgaaattaaaaacttcaactaacgattatgttaaaagagcagatggcattcatatgcttaaattagatgatgaaaactatgagttgattttgggtgaatcaaagatgtatgaaagtctaaatgatggaattaaagatgcttttaattcaattcatgaattaaagacaagaactactaataatattgatgatgaaataaacttaatatctactaatatttcatcagagtttgcaaaagaaaactatgaattaattaaaaaaattattaagcctagtaaaaatgaagactatgagtatgatgtttcatttggcgtatttgtagggttcgagatgaaaattaaaaaaattcttgatagtaatccatctcaaattgattttaaaaagcagattaaagaaaaagcacaacaagatgttttaaataagatagatactattaggcaacaaattataaatttaaaactaggagatcataatttttatatatatttcattcctttttttgatatagataaaacaagaaaagatataattaaacaattaactcaataa

SEQ ID NO: 59185 - DNA, 2541 bp, Clostridium botulinum A2 str. Kyoto
atgtttatagaagaattagttaaggatatatatgaagatgaatactttattgagttatatgataaaatatgtaatttatttgtgagagctacatttaaatttaaaactgaaaaattaagcgtaaaagagttaaaagatattttaagatttgcagatatattgtcaaattcccaagaagcgctagcaaaaaataaagcatataaaatcataagtttattaaaaaaaacatatgaaaagaatgaagtttataaagcatattctattgcgatattgaaaaaattatcgaattttccagcattggataattgtgaagacatacaattgcctatagatcgtgaaattgaatatggattaaagaaaattgaatataaaatacctataggtaatggacattttacccctacacaatataaaatttataaaatgataagacaaagtaatttctttagtttttcaggtccaacatctatgggaaaatcatttattattaaacaatttatactagaaaaaatacaaaaagataattttgttaaaggtttttgtatattggttcctagtaaggcattaattaaacaatatctattagaatttataaaagtattaagtgaattaaacattactaaatttaatgttttaacaactcctaatgtattagattttactgaatttgaagaagataactttatatttatattaacacctgaaagactgctaaatttacttagttctacaactaaagttcaattagattatcttataattgatgaagcacataagctatttaatgatgatgatagggcattaacatactatacaagtattgattattgtatgacaaaatttaaattcataaaagtaattatgtcatctccactaattaaaaatcctaatatttatggaaatatgtattatagaaaagaatcaacttcaataagagcattggaaacaccagtaagtcaaaatttattttacatagatttattaaaaactactatagatttttatgatgataacaaaccgtatcattttaatatttcaagaatcctaaaacttcatactgctaatggaatattacataaggttgggcaagggaatagtttaatatacctaaatagtaaaaatgaaatgatagaatatgctatagatttatgtgcttattttaaagaaaataatatagatatattaaatgttgaagaaaaagcaaaagtaaatcaagtatgtgaattaattgctaaaattattcatcctgaatactatttgatagagtgtataaaattaggaataggatatcattatggtaatttaccacttataattagggaacgagttgaagaattgttcaaaaatgggactgtaaaatacttattttgtacaagcactttacttgaaggtgtaaatatgccagctaaaaatgtgtttatattctcagataaaattggtagaaaaaatatatccaaaattgatttttggaatctagcaggtagagcaggccgattaggctatgaattttatgggaatattttctgcttaaaaataaaagaaaatatgtggaaacataaggagatattcattgaaaaagatgatataagtgcacaagatattttaaaagacacattaaagaagaaaaataaagaaattaaaaacgttctattagaggaagaaattaaacaagatataagcaaaaaagaaaaatatattaattatatatctaatattattcaaattgatacaatagcaaagcaagatacttcaatgattaagcaaatagctgaaattgataatgaaacattggatatctgcaaagaatttgaaaataaggttgatattgatgttctaaatgctaatagatctatagatataaaagttcaaaataatgttaacaattacttagttatgaataaaatgccatcaataataaatacaaaagtatgtttttcagttttaagtaatatgtacgacctgtatagatgggatataaaagaaaaaaatttaaaaaatagaggcgctttaaaatatatagcattattaatggcagaatggatgaatgatatgccattaagtagaataatacatggaactatgcagtattatcataagaatgctaaagaagtttgggtaaataatcaaccgataggtatatttgatatatctaatcaatctcatataaatatactaattaatcaaactataaatgatattgaacatatattgaaatttgacttggaaaaatatttcaatcattattatatgttacttaaaagtaaatatggagaagaatgcattggtgctaattgggcaatgaatttagaatttgggactagaaataataaaaacataattatacaaaacaatggattttcaagatattgtgctaatattttactaactgaatatacaaaatacttagtatttgaaggcgatattttaaaaacaattgatattaatattttaaatagtgaggaaataagaaatattgtattaaagaatgaattaaagacatggtttggaataaaaaatatttatatagataatattgattaa

SEQ ID NO: 59186 - DNA, 948 bp, Clostridium botulinum
gtgatagataatttaaaaagcaattttaaacttaatccaggtgcgtttaatgcaagacttaaagaagtaaaatatgagtggaaagtaaataatattgttactgaaggacgttttttttatttgtcatttaaaaatggacaacctaatctggatgattttatagattatatatattataaggtacctaagttttgtattccagctaaagaacatgaaatagctagaaaaaaagcattagaaactgaagatgatagatatatgatggaattgtatgataaagctaaagaattatttataaaatcaaaacaacaacaaaaaaaagcaggagaaccaggggaactaatattatatatattgttagaagaagcaataggggcaccacaagttgcttgtaaaatgtatttaaaaactaataaaaatatgcctgttcatggttcggatggcatacatttatattatgataatgaaagagatatgttaagagtaatttggggagaatcgaagctatataattctttatcaacagctttagatgaaatatgtgaatcagtaaagagttttcgtgaatcaaatgatgaaacagctccaatagctagggatatagagatactaaaagattatatatcaattagagatgaacaattaagaacagggatattgaagtactttgatccttatgaagaagaaagtaataataaagtagactgccatgcatgttttgttggttttaattattctaaattagttgatgaaaaggatatagaaaagataattgaagatgaatttagagacgagtacttaaatagaataaaatcagcatgctctttatttgaagaaaaaatcaaaaaaaataaattggataaattagaatttatttttttcttgattccttttaaagatataaatgaattacgtgataaattttataaaaaattggagggaaaatag

SEQ ID NO: 59187 - DNA, 1479 bp, Clostridium botulinum
gtgatagatgaactagccaatagaatatggcagaatagtaagtttaaaattgaatatgctaacctaattgatgaatcaattaagttagagttaaatttaaatagtaatactaaaaaaataaataaagaaagttgtatacgtttagtaaaaagcttattgatttttgcatcgtgcgaaaaagagtttctcagaaagatatcctataatattggggtagctttattaaatattcttgatagaaatagcgaagaatttgattcaatagtggagctaattaaattagcattctctagaatgggcaattttgttgcaattgacttaattaaatttaaaaatgaagatattaaaacacatattcctagaatgctatggtttgaagagaaaagctatgagatgaataatacaataaatttacttagcaaagaagttaaactaacaaattttcaatttagattatggaaactattaaatgaaggaaaatctatatcattatccgctccaacttcttctggtaaatcctatatattgaagagttatatgctttctgtggtaaatcagtttaagaataaatcatatatttatatagttcctacacgagcattaataacgcaggtaagtcaagattttatagaattgattaaagaatatggactagaaggtattaatataataactacacccaatatagaagaaaatatggaagaacatttggaaaataatatttatattttaacacccgaaagagctagagtattatataattcaaaaaaaattaaatttaaggtagctgttgttgatgaggcacagactatagaagagatggaacgtggattaattcttcaagatattgttgaagatataataatgtataatgatgatttacagttagtatttatatcaccattaataaataatccacaaatacttaatgagattttcgatagagatagagcaatatcattaaaagagagcgaaagtcccgtaagtcaaaatattattgggattaaatcagaaaaatctagtttagagttcgaaattttaataaatgatgtatttcattcactagggaaattaaagttaaaaaataacatagaaaataaggataataaacttgcaataattgcaaaaacagtaggtgaagaaaatcaaaatataatatatactacaggaccagcaaaatgtgagaaaatatgtaaatcattaatagaattaaatgaagaaattaaagaagatgaagctaataatgatttaattgaattagctaaatttatagaggaatatattcataaggactatttattagcaaagtgtataagaaatggagtagcatatcattatagtagaataccatctgtgattaaaaagaatatagaaaaattttttgaacaaaaaaaaattgagatatatagtatgtacaagcacgttattatatgggatgaatttaccagcaaaaaatatatttattttagaaccttataa

SEQ ID NO: 59188 - DNA, 930 bp, Peptoclostridium difficile CD3
atgggggagccaaaattatatgtagatgatagcttcttaaatgtttttgatgagttattaagattaaatgatcctagttcttgcaatataaatttattttctatgaagattaaaaataaagattttgattataatttattgagtgaagatttgactaacagattaataacattctgtacaagttctaaactctataatgaaatgaaaggacaagacaaggttggggcattaagtaagctctcgagaaagtcattccgagagtatgtaaaggtaaaaaggcttcaggaagagtacataaatactagaacaaaagatggtgaaataggagaattaatactatatgcatttttagagtcacacttaaatgcacctaagatattaactaaaatgagattaaaaacatccactaatgatgccgtaaagagatcagatggaatacatttattaaaagtagatgatggatactttgaattaatatatggggaatcgaagttaaatgaaagtctaaatacagggatacaagaagcatttaaatctatacatgagtttaaaaatagagatgataacaacatagatgatgaatttttgtttttggtaaataacatcgaatcagaactattaaatgacgaatatgagtatgtaaaaaatatattaatacctagtaaaaataatgtagagcatgatgtatcttttgggatttttgtaggatttgatattaaaataccttctgctattcaagagaagaggcaaagagaattcagaaatgaatttaaggaatatataaaagatagagtaataaaaaaaattattagtattagagaaaaaatagatgaattgagtttagatgaacacaatttttatatatactttgtaccttttgtaaatttaaataaagtaaaagtagaaattttagattcaattttagaatag

SEQ ID NO: 59189 - DNA, 2514 bp, Peptoclostridium difficile CD3
atgttagaacgattagctaaagatgcatatgatagcgaatacttttgggagttatataaaacgttaactaatgtatttctaaaaaatatttttaatgaagaaaaatctgatattacacaaaaagaacttgtagattcgcttagattttctgatatattttcaaattcaaatgaagaaaaaatgagaaatttatcatatagaatagttagtttactatatgatagatacaaggataatgatatatatataacttattctaatgcaatattgaaaaaactgaataattttccagcattaaagaatacaccatatagagaactaccaattgaaagagagttagaattctttataagtaaagaaagatttaaatctccaatagagaatgagcactttttgccaactcaatataatatctatgaaaatatggtaaataaacagtcattaagcttttcaggaccaacatctatgggtaaatcttttgtaataaagcaatttatactaggagaaattttaaaaggagtattaaaaaatttttgtataatagtgccaactagagcactaataaaacaatatgtaattgatttaaatagagatttaaaaaagataaatattaataaatataaggtagttactaactccaatatattagaatatctaacaccaaatgaagatagatatatatttgtattaacaccagaaaggttaaatatattattattcaatcgtaataaggtcaatataaattatttgattgtagatgaagcacataaagtatttgaccatgatactagggcgttgacctattatagcagtatagatacatgtatgtctataaataaaaatataagtgtgttcttttcatcaccattgataaaaaatccagagatatttaaagattcatataaaaaaatcaattttaaagactatagaactgatgaatcaccagtgactcagaatttattctatatagatatgaatgaaaaaaaagtagaggtagtagataatttatataaaaatattgatataagtacaacaatcgataacgatgatataaataatttatattatcatataggtaaaggttacaataatatagtttacttaagtagtaaagctaaatcaatagaatatgctatggatttttataaatatatgtgctcaaacaatattagaactatatcagatgaagagagtaaagaaatagataatgtatgtgagatgataaaagaaaatatacataaagactattacttgataaaatttttaaaaaaaggtatagcatatcattttggaaagttacctagtattgttagagaaagtatagaagatttattcaagagaggaattataaagtatttattctgcacgaatactttacttgagggagttaatttgccggcgaagaatatatttattatggcaaattatataggcaactctaaaatgaaaggactagacttctggaatcttgcaggaagagcaggtagattaggatacgaatattatgggaatgtattttgtataaatgattacaacagacaacatgcttggaaggataaagatgtactttacaataaagataatataaaaataaatgataatctagatagtgctttaaagaaaaataaagtgaaaatagaaaagaatattcaaagtaatgagttaagtttagatttctccaaggatgataactataataactatttatctaatataattaagattgataacatggtagataaaggaagttctatactggaaaaagctaaattaaataatttagatattgaatatgaagatgttgataagaatataaattatgatacaattaactcagcaaaaagtatagattataaaatacaaaagcgattatataaagaagataacttaaaagtacttactaataatattaattataaaaactgctatgaaaccctagtattaatgcataataagtataggtgggatattaaagagaaacgacttaaagataaaaagacactagagtatatagcaacattaatgaatctgtggatgaatggtatgcctttaaatataataattaattctagtatagaacacaaaagtaaaaataaatctaatatagaaattgctcgtaaccaatataaaagatttaataaagaggatataaatcatataaatattttaataaataatattataacggatttagaagatatattaagatatgatctagagaagtattttaatcattattatagtatactaatagacaaatatggaatagacttatgtggaattaactggtctttatatttagaatttggaactagagatcctaagaatataatattacagaatgcaggattctcacgttatgcaagtagtattttaataaaagattatagtaaatatttaatatttaaaggaaatatatttgaaggtataaaaaaagaaatatttaatcatgaaacaaagaataaattatctttattcaatgaaataaagaactcaagctatataatattataa

SEQ ID NO: 59190 - DNA, 930 bp, Peptoclostridium difficile DA00126; identical to SEQ ID NO: 59188

SEQ ID NO: 59191 - DNA, 2514 bp, Peptoclostridium difficile DA00126; identical to SEQ ID NO: 59189

SEQ ID NO: 59192 - DNA, 930 bp, Peptoclostridium difficile DA00142; identical to SEQ ID NO: 59188

SEQ ID NO: 59193 - DNA, 2514 bp, Peptoclostridium difficile DA00142; identical to SEQ ID NO: 59189

SEQ ID NO: 59194 - DNA, 930 bp, Peptoclostridium difficile DA00165; identical to SEQ ID NO: 59188

SEQ ID NO: 59195 - DNA, 2514 bp, Peptoclostridium difficile DA00165; identical to SEQ ID NO: 59189

SEQ ID NO: 59196 - DNA, 930 bp, Peptoclostridium difficile DA00191; identical to SEQ ID NO: 59188

SEQ ID NO: 59197 - DNA, 2514 bp, Peptoclostridium difficile DA00191; identical to SEQ ID NO: 59189

SEQ ID NO: 59198 - DNA, 930 bp, Peptoclostridium difficile DA00195; identical to SEQ ID NO: 59188

SEQ ID NO: 59199 - DNA, 2514 bp, Peptoclostridium difficile DA00195; identical to SEQ ID NO: 59189

SEQ ID NO: 59200 - DNA, 930 bp, Peptoclostridium difficile DA00197; identical to SEQ ID NO: 59188

SEQ ID NO: 59201 - DNA, 2514 bp, Peptoclostridium difficile DA00197; identical to SEQ ID NO: 59189

SEQ ID NO: 59202 - DNA, 930 bp, Peptoclostridium difficile Y384; identical to SEQ ID NO: 59188

SEQ ID NO: 59203 - DNA, 2514 bp, Peptoclostridium difficile Y384; identical to SEQ ID NO: 59189

SEQ ID NO: 59204 - DNA, 930 bp, Peptoclostridium difficile Y215; identical to SEQ ID NO: 59188

SEQ ID NO: 59205 - DNA, 2514 bp, Peptoclostridium difficile Y215; identical to SEQ ID NO: 59189

SEQ ID NO: 59206 - DNA, 930 bp, Peptoclostridium difficile F601; identical to SEQ ID NO: 59188

SEQ ID NO: 59207 - DNA, 2514 bp, Peptoclostridium difficile F601; identical to SEQ ID NO: 59189

SEQ ID NO: 59208 - DNA, 939 bp, Clostridium symbiosum WAL-14673
atggctaacagaattttcgataaaaagaatgtaattttactgaaggttaacgaagatgatttgaatacttttttagttgatatggatattgacgatgaaggaaatccaaaatattgtttggacgattttactaaagctatatgcaacacaattccagaatatgtttttgcgcaatatgaagatcccaatattcatcaaaatgatattgttgaaaagttaagagaagcggctcattgcatttataaaatcaaagactttcaattaatgaaacagtggtgtgtagataaagatattaatgcatataacgaattaaaaaagtctagtacagctaaacggggagaatttggagagttgttgttgcatttgatattaagggaatttaaacgtacaataccacttatttctaaagtttattttaaagatagtgcgagtgtgcctgcgcatggatttgatgcagtacatatttccacggatgaaaaaattttatggcttggtgaaagtaaactttacgatgatagtaaagagggaataaaagcattagtaaaggatttgaatgaacatattaatatagaatatttaaatgaccagtttgtaataattaaaaaaaatcttgataataattcaatacctgacagagaacaatggattgatacgataacgaattgtacaaagctaagtgataaacttaatattataaatataccaatgctttgtacctacacacatgacatttacaaaaagttttctgatatgaatgatcctaatgcagtagcttaccataaattaaatattagagagttaaaagaatattttgataaacagaacaaaatgccattaaaagatagagttaatattatacttatgctatttcctgtaaatgacaaaaatgaattagtcattaatttgcataaacgtctttggcatatgcagagtatttga

SEQ ID NO: 59209 - DNA, 2217 bp, Clostridium symbiosum WAL-14673
atggacaagacaacagagattatattagaagttgaaaatgtagaaataatttcttgtgaacagagttttaaaatcgtttcatattgcacacaattgttgtcacaacattcagcggaagcagaattatccgcaagaaagatagtaatacatgttctgaataattggggaaaagttgatgacaacttatatgaagtgtgggcggatttgattgaaacattaggattttatccatatattcaaaaaaatagcactgatttaaaaattatgtcttttgctgatgatgtgcgaatgagttattttcagtcagattttttagaaaatacatatctacataaagaacaaaagaaaatttctaattatcttctggcagggaaaaatataattgctagtgcaccaacaagttttggaaaaagtttgctgatagaagaaatcgtagcttcaaaaaaatacaaaaatatagttattatacagccaactttagcattgctagatgaaactcgattaaaattgaagaaatatgccgatgactacaaaattatagtgagaacttcgcagccatattctgaagataaaagaaatctttttctgctaacagcggaaagggtaatggagtatgagcccctacctcaaatagattttcttattatagatgaattctataaattgagccttagaagaaaggatggccgggcagataccttaaacaatgcgtttttgaaggtggtaaataaattccatcctagattttacttcttaggaccaaatatagatggaataacagatggatttgcagaaaaatatgatgcaatattttataagtcagatttttctttagtagattgtaatgtaatagataagagtaatttaattaactggagtagcagtgataaacagattgataaagaaaaaatctcaattttgtgtgaactattgagcgagttacgaaatgaacaaacgcttatatattgttcaactcctgcacgagcaagacgtatggccaaagtatatttagaatatttgcaaagaataggacgagaaaacaataatcaactaccattaatagaatggattgataaaaatgtttcgccggaatggagtttggctaaggaattgcaatacggtgtggcaattcatgatggttctctacaaaagcatataggagcttcaattattaaatattttaatgagggacggttaaattgtattttttgtacctctacgataattgaaggtgtcaataccagtgctaaaaatgtaattttgttcgatgaaaaaaaaggaggaaacgaaatagatttttttgattacagtaatattaaggggcgttctggaaggatgatggaacattatgtgggaagagtatttaatttttgtcacgttccaatgcaggagtctattgtaatagatatcccattttatgaacaagatccagaaatattgacaaatgagatacttattaacataaaaaaggacgatgtaaagcaagaggtcagaaagcgttatgatcagattaatgcacttcctgctgatttattaaatattattaagcaaaatggtgtttcagtaaatgggcaaatcaggatttataataaattaattggtgatatgaaatcaaagggtacattacaaaatatccaatggagtcaattacctacatgggatcaaatgtactatgttttagaattggcagaaaataacctttttaactttgatagcaaaaggggagtattttcagtaaaacaacttgcaagatatttgaatatgtataggacgaaaaagaatattattgatattgtcaatgatatttttaatagtaaaattgagactgtaaagacgctgacagatgagagaaaagcaaaatattatgatgaagctatagaaacagcatttcatatctaccgacattggtttcagtttactatacctaaggcgtttagagttgtagatagtattcaacgcctgttatgtgaaaagaagaacgttaaaccagggtcttataccttttttgtacaacaattggaaaatgattttatacgtgagaatttatccattctagtcgaatttgggataccaagtaacgctgtaagaagattggaaaaggttattccggctagtctgttagaggatgaagtcattgattttattaagaaaaatcgtagtaatatgaaaaagtatttgttactatatgaaaatgagcggttagatcaatgtatatag

SEQ ID NO: 59210 - DNA, 918 bp, Desulfosporosinus orientis DSM 765
atgaagataagcatcggtgagaatgattttttggattcttttgagcatctatgggaaaaaaatttagatgaaaatggcgtcagtaaattgaatttatttgtccttaatataaatgcaaacagttttgattactcatgcttaataaaaaacattcgtgatcctatgattgactattcagtatccagaaaaataaaagaaacttacaagcagagaccagcaacgttaacatatgaagcacagaaaaaattcaaaaactatattaacaacacgggagaacttggagaattattgctatattgttttttggagacacatctaaatgcacctaaaatactatcaaaacttgagttgaaaacctctacaagtatgtatgtgcatggagctgacggaatccatatgttgaaattagacaacggaaattatcagttgctctttggggaatcaaaaactattgctgatttgacagttgcacttcgtgatgcttttgattcaatttatgagtttaaaaatgaggtcaatgaagttggaaaagagaagagtggtatcaactatgaaaaaaccttattatataataatctcgacaaagaaattttttcggaaaaagaaagagatttcttaaaaatgattatttacccaagtagagaacgaaactttgaagttgatgacgccttcggtatttttataggttacgaaattgagatgtccgatgatgataagaaattacctaatagtgaattccgaaagaaactcaaggaaaaaataagcaatgacacaataaaaagaataagttatatcaataaaaagattattgatttaaaattatttggtcatagtttttatatttatattgtaccatttaccgaactggataataatagaaaacatatcatgaaggagattactcaatgggggtcttaa

SEQ ID NO: 59211 - DNA, 2547 bp, Desulfosporosinus orientis DSM 765
atgggggtcttaaaagagtttgcatcaaaagtcttcgaagatgactattttttagagttgtatagtaaagtggaagaaattgaattaaataagttttttcattttagacataaaaacctaacagaaaaagaattctttgatttaatgaggtatgcagatattctctcttactcagataaagccaaagaaaaaaattgtagttataaaataataagtttattatttgaagaattttcaagtagtaaacttttcataagtttagcatacgcaattttaattagattggggaattttccagcccttgagataatttcaaaaaaatgtagcaatatcatttcgcctgatgaggttgaaatggaaaaaattataaaagaaatatttcaaaaagatccatacggaaaatatattttcactgatcctcaatttaatatttatcaagctcttaaaaataacaatcattacagtttctctggtcctacttctctcgggaagtcctttattatggaagcttttattaaatatttaatacatgaacatcattattgtgaaaatattgttatattagttcctacaagagcattaataaaccaagttactcttaaaatgaaaagtgaattaaaagatgtaaaagaatacagagtattatcacatccagttatccctaaactacatacaaacagcaatactaaatatttatttgtttttacacctgaaagattaatatcttatttagctaatgttaataatcctaagatagactatatgtttattgatgaagcacataaaatggtatctaataatgattcaagagggccattattttatcatgcaattttacaagccgaaagaaaaagtgtaaaactgttcttttcctcaccaaatgtacctaatactgaagtgtttcttcaaatttttgaaaaaagcactgaagaaacaatgtcaattaaagaatctcctgttgctcaatcaaggtactttttagatttatataataataaaataaccctattttctgattttaacaaagatgtagaaattcaattaagttctattaacgaaaatgaaaaaaattttaacttttggttaaataagcttggtaaaaactcaaaaaatatcgtttattgtaattctactaaagatactattgaatatgcaataaggttttctagagtgttgccaataaaaaagaatgagaaaataaatgaattagttcaactaataaaagaacatatacatagagattattatttgatagagtgcttaaaaaaaggagtagcataccattttggtaggttgcctcaaagagtaagggagaaaattgaacaattatttagtgagagaattatagattatattttttgtacatcaacattgttggagggagtcaatttaccagctaaaaatatatttatcttaagtaatgccattggtctatcgaaatttaaagacatagatttttggaatttagcaggtagggcagggaggttatctaaagaattatctggaaatatcatttgcactaaaatagtagataagagaaatagttggggtaatctagaaaaagatattcaaatcattaagaataaagatgtaaaaaaaatacaaccgctagttataaaaggacaaaaaaatttttttgaaaatattgcgcgttcattagaaaaccgagaattcactaggaaaaatgtgtctagtggtgaaattgagatttggaaccattatgctaacattgcactgattcatgaattaagggatgatcagtcagtattaaaatcaaatttcattactaaaatacaaaacggaaaagaaatactaaaaaagaaaacaaaggaaaattatgttcctgcaaatatattaactgtttcctcaacgattaaggaaacatatcaaaatagaatttggttaaaagacaacttaataactttaccaactgaggttacaaaggaaaattgttatggttttcttatccaattatatgatttatataattgggctgaggaagagtcaaaaggtcatgctcctttagcaaagaatattaataagctaaaatattatgcgatcctaatgaaagattggatgacttcagtgcctttaaataaaattatctggagtattataagctattacaaggaaagaggagaattctgggatgtagatggttttatagagtttactggagaagaaaaatgggttataaatctcattataaatgagttaatgcgtgatattgagaccaatattagatttaaaatgaaaaactattttacaaattattatttaattatgtgtgaaaaatatggcgaaaagaatgctggagctaactggggggactatttagagtatggcactaccgatttgaaaataattgaactccaaaatatcggattaccaagacatttggcaacttatattttggataatcatttagattgtttagagtttgaagatggtgctttgataaatatcttcgaagataaaatcatacaagatttagataaaaacaagcctgagtattatgaatttatccaaacttttggattgaattaa

SEQ ID NO: 59212 - DNA, 1401 bp, Lactobacillus gasseri CECT 5714
ttgaatagtagcaaactaggtataaatcaacctccgagtttttttatgaaactccgaaaaactccaaaaaagttgggaagcaaaatggcacgagaagctaatttcacttatttaataaatttggttaatccttatttaccagatgctgaagtcacttcaaaagaagaaacagttagattaataattaagcaagtatcaaataaccaatacttacctatgcctgcttcatcaacattgaataaatacgcagcagatgggatatccagaactgctgctaaaaagctgcttaaatttataaataaagaaacagcttcactggaagaatatttcagcaaaattggcgcagatcagttaaccttgattgctaataaattaaagaaggatgggatttcgtcagatgtatatcggggtaaagtaccagcgttactagctaaacttttcactgaagagtgcgagagggtagcgagcagaaaaaataatcgaaaacaaagaatccccatccaaagtgaggaggaggacatatttacaaaaactgtttcagatgagatgtttgcagccgtctttcgtcacgttaatgttagcgagatggatgcagtaaaaaatagtaatgctattcatgcttttgttcttaagccagaattactaccctttaattatgagaaactgaggcaattagtggaatctaacatcactaactatgcagtagcacgaggaattagaaaaaacgatgttgtgggtctgcgtgcagcgcggcttcttcggaactatacgcaaagcggtattccaagtaatttattgggtgagctactgaattatgtgtttctagagcatgcagaacatgcttttaaactctatacacgtgccgaaatatataaaagctctaggattatcgataacgagggtgtttatcttaaagataatgaggaaaagattcagttggtgtttggtgtttcacagttaaatgatagccttcaagatgcaattgataatgttatagaagagttgaaagattttcaaaacaatcaatctaatgaactggtagtggctagggatatgcttgacacgtcagttcttgaatcccagcttggagaagaaaggagcaaggaaataatcaagatgattgttcctgatgacgatgaagttgacgaaattccttcatacggtattttccttggttatcaatttgagactgataaagacttggttgattgttcagcaaacgttgcaaagacacgttgtctagagacagttaaagaagatatgaaccaagctattaggcagcttaatcaagccattaaaagctgtcatttacagaaatcttcattttatgtgtatatgttaccttttactaaagcaagtgaagatggaaataagataatgcgagaagtaataggagaatag

SEQ ID NO: 59213 - DNA, 2604 bp, Lactobacillus gasseri CECT 5714
atgcctagtaagaaacttggccagtatttatatgataacttgaaccataatacatatttacgaaagcttgttaaaattttgttgattcagtatgccaactttttatttggtgctaattggcagttaactcaaaagcaaaaaagcgacttattaacattcgctgatttattatctaaatcaataaataaaggtggcaccgagaagcaacggaatttagcgctaagaattatagcattgttaacgaagatgtatcccaaagatccaagtgtgggtatagttaatgatgaagtgatgagcagcttaaataattttttgcggcggcaggacagtggttatattcagacaataactttaagtcgtttatggaacgatgttataaaggatgctcgaaaaagagaacgaaaaattccagggcaacaaggcaaatactttattggcaaacaagatcaactatttcgatctttggaaaatgagttaaatagtttctctgcaccgacttcaatggggaaaacattcttaattaagaaatatattgaattgaaaatcatttcaggagaaaagagtaattttgctattacagtcccaagtaaagcattaattactgaagtaagaagtagtctaattgatgagcttggaggaaacttagctaataattcttatagaatcgtatcgcgtgccgaagaatatgagctagattatcaaaatcagagtttcatttttgtaatgacgccagagcgtttatcaaatgtgttgatgcaaaaccaaaatcttagtttaggtcatctttttatagatgaatcacagaagattactgaagaagattcacgaagcattttttactatgagatatttgatcgaattaaaagctggcagcagaaaccgaaaataacatttgcatcaccacttattcctaatcctggaatatttaatcaattagtttcagatgacgaaagtgatgatggcttaagcatttcggagtctcccgttacacaaataaagtttattattgacagatattctcaaaagttattggagtatgatgatttaactcacaaagcgataaacttagttcagtttagtgaaaattcaattccacatattatattaaatttgtctaacgcaatcggtagcgataaacagagcctgatttactatagttcaaaagcagcggcaatttctgatgcggtactcttggctcgtcaatctgatgaaattaatgatggtaatttgaattcacttgctaattatatttctcgaaaaattcatcctaactatgtactagttgatttagtaaagaaaggtattgcttttcatataggggatcttcccgtagatgtcagaacaaaaattgaagatgcatataggcaaggtgctctaaaatttgttttttgtacgagcaccttacttgaaggagttaatttaccagcagacaacatctttgtaacatcacttaataacggacaacgaaaacttacgccactagaatttttaaatcttatcggacgtgtaggtagacttaatcattctatgattggaaatgtatttttaattactggtgaaagagaaaagtcgagaagtaatttagatgcctatttaaaagatttgaataataatttgaaaaaagaaaaattatctgttgaaaaagctgtaaagccaaaacaagtggcagcgatcaagcaaagcttaaaaacaggtaacattaagctagaacagttaaagagtgataagaattatgatttacttcggaaactttcgctgctatatatccaagaagttagaaataatcgtcaaggggtaattaggaaacatttttcatcttcaataactaatgatgatgagcaaataatccttgattccttaaataaacgttataaagataatttagaagaaaatattaatttctcctctgatcaatctgaaaagttaaaacaagaaattagtgatgcaggaattcaagaatatcctaatatttataatggcgataaattaaacgttcacgatactaaggcctttttcctaaagctatcgaacatttttaattggcaattatatgaaagaaagtttattgctggcaatcagagtccggagattcaagataaagtaatcgatgattatacaaagatgactttactatggataagtggtttgagcttaaggcgtatctgtgacatagcaattaggattcgaagaagtggtgattatagattcttagacaggttagaccgtcaccgctctgatattagcaatattaattgggatacgataaccattaatgcggtaatgagacagctgcaaactattcaattcattctaggaaagtattttttgaaagtaacgactgaacttactaaaaatggaattcccccagtgaatgactggtatcgctatatggaatatggcacttgtagtgacctcaggatatggcttcagcaaaatggatattcccgtgatgcctcagcgtatatagaagacaatcaagacaagtttattattcaagtgggtgacaattactttatctctcaaaatatttttcaagcaaatgatctcgatactgtgaatgaaactaaagaaattaaagtaaatgttccggaaatttttatttag

SEQ ID NO: 59214 - DNA, 1299 bp, Lactobacillus reuteri SD2112
atggcgaacaatgaatttagaatcctgattgattcattacgaatagctatgagtgaggatgatggtcattctattgagggctctataaatattgtcttgggcaagtacactaataactggaaggaaaatacatatagctctcagaacttgaaaaagctttattacaaagggttgaattacaatgctgctaagaagatcaagggtgcagttattaatgaagaatcgtttagaaaatatatcgacagcttttcgtctagtgacaaagaatctatggccgcacagcttcaaacagttaacaaagatgtgactcaactagaagctaatgctgttccgtacttttgtgtaaatctgctaaacgagctaattgaagaggcaataaccggacaacaaaaaaagcccactaaaagtggaccaaatggatatttaaaaaaaactgtttctgatgattcattttcatcagtgtttaccgaagtagctactaaagagttgccactaattaagaatagtaatgctatccatgcgtttatcttaaagccggatttctttccattttcgtataaaaatctggaagaccttattttgaaaaatattactagttatgcatctgccagaggtattgaaaaaaatgatgtggcaggcataaaagcaacaagaatattaagatattatatgcatagcggtgtaccgcaaaatctcttaggagaaatgttgacttatatttttcttgaacacattgatgacgctaagaaaatttatactcgagcagaaatttcagcaaattcacgtacaattaatagtgagggaatctatttaaaggacaacaaaggaaaaagtcagttgattctaggggcgtcacagcttaatgataatttgcaagatgcaatcaagaatgttgtatcagaattaaaagaatttaggaataatcgatctcaatctttggttatgcctatcgatttaatcgatagctccatattacgtgagcaatacagtgaggaagagagtaaagctatcttaaagattctagtacctacagaaaacaagatagatgaagtggcagcttatgggctatttattggctataaatttgcacccgatgataatttgaaaaattgctctactgatgaagcaaagttaaagtgtcataagatcgttgagagtgacctccatcaggtaattgctcagttagacgatgaaatcaggctaaatgaatggcaacgttcctctttttatgtatatatgcttccgctcattagcgcaagtaccgatggaaatacgattatgagtgaactaattgggtaa

SEQ ID NO: 59215 - DNA, 2610 bp, Lactobacillus reuteri SD2112
atggttaaaaaaaacaaatcacttgcggaatatctttatgataatttgcaacaaaatcattatttgaggaagttagttaaacaattatttacgcaatatgcatactttctttttcaagcaaaatggtcgttagataaaaaagaaaaaacagatctgttaaaattcgcagatctattatctaaagctcaaagtaataacgggtcttcagaatgtaaaaatttagctcttaaaataattacgatgctacaagaaatgtatccagaagatcctaatgttgatattgtaagaaacaccgttttaagtagcttgaaaaactacttacctagagaaaatcatgggtacataaaaataaatactgttgatttcctatgggatgaagtgattgataattacaacaaaaatcaaagaaaaattccgggacaagaaaaccaaacttttattggtgaccaagataaaatttttaactcactagaaaatagtatcaatagtttttctgcaccgacatcaatgggcaaaacatatttaatgaaaaaattcattgaatataaagttaaaatgggcgaagagcttaatcttgccataacagtgccaagtaaggcgctgatcacagaagtgcgaagttctttgttgacagaccttgttgacaatcttagcgaacattcttaccgcattatctcaagagcagaagaatatgccttcgattatgaaaacagaaattatatttttgtaatgaccccggaaaggttatcaaatctgcttttagataatggcgaccttagacttgattacctttttattgatgagtcgcaaaaagcaaccgagatggacgatcgaagtatctactactatgaaattattgataaggtacaaaaatggaagcaaaagcccagaataacttttgcttctcctctaattccaaatccagatgtcttcctccaattaatagatggcagtattaagaataatattagagttgatgaatcacccgttacacaaactaaatttataattgatcgatataataaagagctttcagtttataacgatcagacaaagaaaaaacagcatttatgtgaatttacagaaaatgccataccgcacattgttaagatgattaccgatgttatgaaggataaaacacaaagtcttatttattatggatccaaaagagatgtaatgtctgatgcgatcgttttttcaaggcagtttccaactattgaaagtaaagaactagatgaattagctgcttacattagcagaaaaattaatcctaaatatgtattagtcgatttggtgaaaaaaggaatagcttttcacattggagaattaccaattgatgtgcgaactaaaattgaagaggcatatagaaagggaatcttaaggactgtcttttgtacaagcacgctattagaaggggtaaatttaccagctgacaatatttttgttacttcacttggcaacggtaagaaaaaactaagccagttagagtttttaaatttaattggtcgagttggtagacttgggcactctatgatcggtaatgtctttcttattaccggcgaaaaagagaaatcgcatagcaacttaagttcttatttgaagtatttaagtaaaaaaataagcaaggaacatctatctgtagaaaaagcgttaaagcctaaacaagttgcagcaatcaaaaaatcattgagtgcgggtgatcttaaactttctgctgtaacagataagagaaactatgatttgctcagaaaaatatctctaatttatattaaagagctaaatcataatcaagaaggattcactagaaagcaattcaagaagaagatttctgacgatgatgaaacagaaatttttactgccttgcattctagatatccagatgaatcacaagatgacgttaatttttctgctgatcaatctaatttactaacgcgcgcaatttctgatgagcaaattaaaggattccctcaaatctttaatgatgaaaataagctaaacgttgaagaaacttatcaattctttctaaaacttgctcatatttttaactggaatctttatgaaagaaaatttgtgcatgctgattcagatgaaaatatacaacatcagaccttagaagattatgccaagttaactttgatgtggattagcggatatagtcttaaacagatttgtgattatgtaattgcaattcgtgagcgccttgattttcagtttcttgatcgattagatcaaagtcgaaagttagtaggaaacattaattgggataccattgcgatcaatataactatgaatcaactaaacaagcttaattttgtcctaggtaagtatttcctcaaagtttcaaaggaactgtctgctaatagtattcctttagataataattggtaccaataccttgaatatggaactagtagcgatcttcgaatatggttacaacaaaatggatattctcgggagtcgtcgcaatatatagagaacaaagcagatgaacttattgttaacggcccctttggaccattaatatcaaatagaatagacgatgctaacgatccggatgttattaatgaaacaaaagagataaaagttaatgtgccagaaatattcaattaa

SEQ ID NO: 59216 - DNA, 1386 bp, Lactobacillus reuteri SD2112
atgggcataaatccacctccgagtttttatatgaaactccgaaaaactccaaaaaagctgggaagcaaaatggcaaaggaagctagtttcacttatttaatagatttggttaatccttatttacctgatgctgaagacacttcagtagaagagacagttagattaataattaagcgggcatcaaacaatcggtttgcacctataccagcttcatcaacattgaacacatatgcttctgggggaatatctaggactgcggcaaaaaagatacttaagttaacaaacaaagaaacatcttcgctggaagaatatttcagaaaaattggtgcagatcaattaactttgattgctaagaaattgaagaaggatgaaatttcaccggatgtgtatcgaggtaaagtaccagcattactagctaagcttttttatgatacgtttgacagagcagcaaacagaaaaaataaacgcaaacaaaaattccccaccaaaagtgaggatgaggatatatttacaaagactgtttcggataagacgtttgcgaacgtttttcgtcaagttaataccagcaaaatggatgcggttaaaaatagaaacgcaatccatgcttttgttttgaagcctgaattgttaccgttcagctacacaaacctaaagaatttagtgacatctaatattgctaactacgcagtggctcgtggagttagtaaaacagctgttgtaggtatacaggcagcgagtttactgagaagatatgccaaaagcggtattccaaataacttacttggcgaattactggcatatatctttttagagcatgaagataacgcgcttaagctctataccagagcggaaatttcaaaagataaacgtacaatcgacagtgagggaatgtatctgaaaagggaccaagggaaagcccaactaattcttggagcatcgcaattaagcaataatcttgagaatgcaatcaataatgtagtaaagaagatatcaaactttaataataaccagtccaatgagatggtactggctaccgatatagtggacagttctattcttcagacacaatttggtgaagataagagtaatgccattattaagctaatggccccaaccgaaacagattttgaagatattgcatcgtatgggatctttattggctataagtttagaaccaaattagatttagatgactgcacacaagaagaagcaaaggagagatgctgtcaagctattaatagtgacatgaagcaagcaatcggtcggttaaatagggcgattcagcagcatcattggcaaaagtcatctttttacgtgtacttgttaccttttactaatgcagaagaagacagctttgcaataatgaaggatttgataggggactaa

SEQ ID NO: 59217 - DNA, 2613 bp, Lactobacillus reuteri SD2112
atgccaaaccaagggaaaaaattgggtgaatacctttatgattatttgaaaaacgatgattacttacacaaattagtgggtactttatcaaaacggtacacctattggctatttcatctagattggaagttaacaggtaagcagaagcatgatcttctacgcttcgccgatctgctagcaaaatcaatcaataaaaagggagacagtaggcaaaaaaatattgccttgaaaatcgttgctactctatccaaaatgtatcccgacgaccccgaggttgcactgattactaatgaagttttgaccagctttaacaactttttgcctcgtcaaggacaaagctatacgctagttccaacaattgagcagttatggaacgaagccgtggtaaactatcaaaaagagaaacgccagattcctggagaagaaagtaagtcgtttatcggtaagcaagatataatttttaagtctttgagcaatgaacttactagtttttcagctccaacatcgatggggaagacctttttaattgagaagtatattgagcttcaagtgaaggagggtgtcgtaggcaactttgcgatcactgtaccaagcaaagcacttattaccgaagtaaaggttcagcttattaaggatttaggggcaaaattaggcgaaaaacaatatcgagtcatttctcatcctgaagagtacagattagattacgagggaagctatatttgcgtaatgactcctgaacgcctattagcccttttaatacaatattcagaagcacggttaatacacctgtttattgatgagtctcaaaaagttacagaagcaagttcgcgtagtgtcttttactatgaaatatttgacagggttagtgcatggaaaaatcgaccgaaggtaacctttgcctcaccattgattccaaatccaggaatatttaaaaagttagtacaaacagccgcatcgaatgatggccttcgcattgtcgaatccccagtaacccaggtgaaaatcatctttgatcgctccgctaataaagcagaaatatatgatgatttgaatcaaaatactattccgataggtacatttaaggaaactccgtcagtaccagatattattcggaagatgatgagagttttagggaatagtaattgcaatttggtttattacggttcaaaagtaaatgctatttcagatgctgtggttgttagtcgttcaatggaagaaagtaacgatccaaggttgatagagttagctgattatatttcacgtaaaattcaccctaaatacatcttggtaaaactagttagaaaaggaatagccttccacactggagaattgccggttgatgttcgcattagaatcgaggaagcctgtcggcaaggaatcttaaagctgattttctgcaccagcaccctactggagggagtaaatttgccggctgataatattttcgttactacgctgcaaaacggaaaaaggacgctcagtcaattagacttcttgaacttaattggtcgagtgggtaggttaggtcactccatgctaggaaatgtctttctaattactggcgatacagcgaattcgcatagcaaccgtgctgcttatttatctaggatgaataacagactaaaaaaagctaagttatctgttgatgctattaagcctaagcaagcggcagcaattaagaagagcctagagaaaggcgatgtgcgtttagataacattgaaaaagataagaactatgatttaattcgtaaattatcattactttatgtcaaggaattacggaatcatcatcatggagtagttagaacccatttagcaaaacatataacctacaaagaagaacgaaaaattttacaatccttacaagaacgatatgctgacgaattagaggatgatattaacttctcttctgatcagtctgaaagtcttagaaacaagattagtcaaaaaaatattaaaggatatcctaatattcatgatggggaaaaattgaggtggccggaagcaaaagcttttttactcaaactgtcagaaatatttaactgggctatttatgaatccgactttgttaagtcaaaacaagacaaggaaactcaggataaggtcatcgaggatgacgctaaaatagccttactttggatgagtgggtacagcttgcaacggatttgcgactttgcaattcaaatccgtgatcctgaacgtggagatacaagatttcttaatagggtaagtcaataccatgagaatactcctaatattgactgggagactataaccattaatttagtgatgaaaagattgcaaaatcttcagtttgtattaggtaaatatttcttgaaagttacccaggagttaactaagagtggaatgccacctcagaatgactggtatcgtttcatggagtatggaacagatagtgacttacggatttggttacagcagaatggttattccagagaatcctcagaatatatagaagacaataaagatgaatttatcattcaagccgataataattactttgtctccaaggatatcttaaaagcgaacgatcttgatgctgttagtgagactaaggaaattgaaataaacgttccagaaatttttatttag

SEQ ID NO: 59218 - DNA, 1299 bp, Lactobacillus reuteri CF48-3A; identical to SEQ ID NO: 59214

SEQ ID NO: 59219 - DNA, 2610 bp, Lactobacillus reuteri CF48-3A; identical to SEQ ID NO: 59215

SEQ ID NO: 59220 - DNA, 1386 bp, Lactobacillus reuteri CF48-3A; identical to SEQ ID NO: 59216

SEQ ID NO: 59221 - DNA, 2613 bp, Lactobacillus reuteri CF48-3A; identical to SEQ ID NO: 59217

SEQ ID NO: 59222 - DNA, 909 bp, Lactobacillus salivarius cp400
atgggtcatagacactcagaacatgaaaagatatatgggaatttacatgtattttatattagttttgatcttgatgataatggagattatgttcagataaagagtgagttttataatgaactatttaatgatatcacctcttttgcgtttggagcaaaaaacgtaatgtctagaatcaaggaaccgcaagatattacgaggattcaacgagaagccctcagaaaaatttattcaataccagaaataaaagaggcaagtgactattatttgagttctaatattgttgaggataaatacttgaagcgtggtgaatttggtgagcttatgttataccaccttcttcatgaatattttaatgctgaagcattaatttctaaaatatacttcaaagatagtaatggattagcaccacatggatttgatgctgtccatgtagattccaacaataggttactttggcttggagaatcaaaactttataaagacggaaataaagcgattgacgcattaatgagagatttagaggagcattttaaccgaaatttttttcgagaagaatttacaattataacaaatagagttcatgactcaaatatggaagttgatgaatttatcaaatgtttgattgatccggaaacaaaggtcctagacaaacttgcaaaaataaatgttgcgctatttgcaggatttgattcaaaggctatatctgataaaaaccgaaaccagctacagtttcgggaaaaattaaatggagaaattactcgtctatataataaagtagaacaaaaaagaaaacagcataaatggaatgaacatctaaatctgtatttgtttttgtttccgttggactcaaagaatgagtttgttaaggatttacattgtaagttgaagggggctcaaaaattgtga

SEQ ID NO: 59223 - DNA, 2133 bp, Lactobacillus salivarius cp400
gtgatggaaattacaatagaaaatattttatctaagagagagtttcttaattttcaagaaagttgggacttagcaaagtatgtaacacgtgttgtagattcaagtgatggacggaaaatattgatacatcttttagatatctgggataaagtaaatgaagaaacaaaacctatttggatagatttgattgagagggcaggtttttatccatattacattgataagattgatactgttaatagtgaaaaagcatctcttcagtcattgataagagcttcatttttcaaatcaaactatttggacggtatatattttcatgagcaacaaaaagagattgaaattgctatttccgaaggaaaaaatgttgcagtgagtgctccaactagttttggaaaaagtttattgattgaagaaattgttgctagaaatcaatttgataacatattaataattcaaccaacgttagcgcttattgatgaaactcgcagaaagatgcgtaaatacgctgatagatataatttaattgtaaatgctcatcagaagataaaagaaagaaatatatttattttaactgctgaacgagtattagaagttatagaacttccaagaatagatttttttgttattgatgagttttataagattagtaatcgaagaaatgatagtcgaattgatgctttgaatgttgctttgttgagaataatggatatggaacctcaggctatgttcttaacaccaactgttgattcactctctaaaaaatttaggaataaatataatgttactttttttaaaacagattatgcactggtcaatactaaagttgaagaaattagaacaagatatggcaatgtatatactggaaaagaaaaaaaggaaaaactgttcaaacttcttaaagaacaaaaagaaccgagtattgtatatgtcaaatcacctaatgaagcttataaactagcaaatgaatatttaaaatgggcaaaaccagaaacaattgagaataatgatttagatatttttgaatggatagacgagaatatatcaagtgaatggcagttaaaaaagttactcaaaaatggaataggtacgcataatggtgctttgcctaggcatgtagtgacgtcagaaatcgagttgtttaattctagaaagataaaggtgttatttgcaactgtttcattaattgaaggggttaacacggttgctaaaaatatgtttatctacagtgctaataaaggcaataatctaatagatttttttgattttgccaacatacgcggaagagctgggagaatgggcaaatatttcacaggtaatgtgtttgtatttaatgaagagcttgagccggaaaaatttgtaattgatgtacctggtgtggatcaagaagaagtttccgatgaaatattagtaaatataccagaggttgatattgaaaataaggaaagaattaaaattttaaaagatggattagatgatgaaatattgaaaactattcgagataacttggtttcgataaatggacaaaagaaactattaaattttatcgagttacactatcaggatttaaattatttaagatggcgtaatattccttcgtatgatcagctatggcgaacactgcatttaggatataaatttttatatagtacagataagccaaaattatctcaaaataaagctgttactgctcttaaacttgtgaaggatccactaaaaaaagttatttctgaacagaaagaatatttaattgaaaaaggtcataaggaccctttagacgctgcaattcatcagattttaaaatttcaaagagacgatgcaaattttaaaatacctaaattgcttgcagtagtggaatcaatacaaaaatatgtattaaaaaaacatgatatagttgaatgtggagaatacacatcgttcgcagcgttacttgagaatgatagagtaagtgaacgattgcagtttttagttgactatggtgttcctagttctgctattagaaagatagaaacaatacttccttctgatattgaatctgatgttgatgtaattagatttattagggataataaaagtagcgttgaagaaaaacttattaattatgagaaaaatttagtctataaagcaatagtatga

SEQ ID NO: 59224 - DNA, 1308 bp, Lactobacillus salivarius
ttggagattaatagatttaaagtgttagtgcaggcgttaaagccgcttagtgtaactgaaggaaaagtacccattccaacagcggtattagctatttttaagaattacaccaaaaattgggatgaggatacttatggggaatcaaactataaaaagctatactataaaggtttaaatccttcggttgctcaagagctagacgacataatagatgaagacaaatttaagcaatttgtgaaccacgcaacggataaacaaaaagaatcgatagcgggttatctgtttaaaaagctaaaactgcgtgaggaaattccactagatgggctagcttatttctgcgttaatttaatgtctgaattagtcgaggaagctagagaggggaataagaaacaaaaaatccccactcaaaaaagtgaggataaaattgcttttgtaaagactgtctcagacaaaatgttcactagtgtttttcatcaggtaaatgttggcgagatgaatgtagtgaaaaataggaattcaatgcatgcatttgttttaaaacctgaattacttccgtttagctacaagaacctaagagaattagcaatgtccaacattactaactacgcaattgcacgcggagttgaaaagactgatatcacagggctaaaagcaggacagttacttcggcgttatgctaaaagtggtattccaagtaatttgctgggagagctgctgacgtatatttttctggagcatgaggagaatgctctgaaattgtatacacgagctgaaatttctgccattgatagaacaattgatagtgaagggatgtatttaaagagcgatagggaaagagttcaattaattctgggggcatcgcagctaaataatgaccttcaagaagcggttaataatatagtagaaaaattatcgaaatttagaaataaccaatctgacgaaatgatgctagcaacggacatagttgatatgaccattcttaacgcacagcttggagaagcagaaagccaagctattattcaaacaataattccaaatgaatcaggtcttgaagaagtggcatcgtatggccttttcataggttaccaatttaaaactgaacaggatttagataactgtactcgagatgaggctaagaaaatatgccggcaaaccgttaataacgatttacaacaagccattagtcaattgggtcgtgctatccaacaacaccattggcaaaaatcatcgttctatgtatatttgctaccttttacaagtgcagaagaagatagtcacaaaattatgaatgacttgataggagggtag

SEQ ID NO: 59225 - DNA, 2616 bp, Lactobacillus salivarius
atggagaagaacggtaaaaagttaggtgaatacttatatgagcatttagcaaataatgagtatctaatcaagctaatggatgatttatccttgcaatatgctcttgggatatttagtggtacatgtaaactcactagtaagcaaaagaacgatttactgaaatttgctgatttactaggaaaatcaatcagtgatcaagagaataatgaacaaaaaaatacagcattgagaatagttgcaatgctgtcaaagatgtatcctaatgatcctagtgtgaaacttatatccaacgaagtattgactggttttaataatttcttaccgcgaaaaaggcaaggatacagccttgttccaacaattgattatttgtggaatggtgccctaagagaatatcaaaagaaaaagcgccaaattcctggacaagctagcctatcttttattggtaaacaagatattatctttaattctttagaaaatgaacttaatagtttctctgctcctacttcaatgggaaaaacctttttgatagagaaatatattgaattcaaagtaaagaacggttcgataggcaattttgcaatcactgtacctagcagggcattaattactgaagtaaaaagtaagtttattgatgatttaggaactagtctaagcgagaatcattatcgggtgatttcacatccagaagagtattggctagattatgaaggtaactttattttcgtgatgactcctgaacgcttatcagcgttaatatatcaaaatcctggtattagattcagtcacttatttatcgatgaatcacaaaagattacagaaactacctcccgcagcatcttctattatgaaatctttgatcaaattaaggagtggaacgatccgccaaaagttacctttgcagctccgctagtacctaatcctggggtgtttaaacaacttgttgaaacgggtaagggtgacaaaggacttcaaattaccgaatctccggtaacgcaagtgaaaattatttttgatcgatatgctaataaaaccttagtgtatgacgatttaagtaagaaagctattccaatattttcgtttgagggttcttggacgacaccaggaatagttttgagtatgttgaataagctagaagacagcaagtgtaacttggtctactatggctcgaaaaagaatgccatttctgatgctgtcgttgttggccgacaattacccgaacttgatgataaagaattaaatgagctagccgactatatttctcgcaaaattcacccgaattatatattggttgatttaattagaaaagggattgcttttcatactggggaactgccgattaatgttcgaataagaatagaggaggcctgtcgagaagggcttttaaaactagtcttttgcaccagtacattattggagggtgttaacttacctgcagataatatctttgttactacgttgcataatggcaagggaaagcttagtcgattggattttttaaacctaattggtagggttggtcgattaggccattcaatgataggaaatgtttttttaattactggagaaagtgagaaatcacatagtaaccgtgaagcttacttatctatgctggctggcaaacttaataaagctaaattatcagttactgttatcaagcctactcaggcagcagcgattaagcgaagtttggagcagggaaatgtgcgcctagaggatctcaaggaacatcgtaattataatttgattcgtaaattatccttactttatattaaagaactaaagaataataggtctggtgttgttaggaaacatttagctaagagcataaatcctgatgaagagaaaaagatcttgcaaactttgcaaaatcgatattcagacatgctggaagatgacataaatttctcttctgatcaatcagaaaaacttagagaaaagatcagtcaagaggatgttagaggttatccagatatctataaagatgagaaactcaatttatccggaacaaaagattttttactaaagctatcagaaatattcaactgggatatttatgaatctgactttataaaacccaaagaggacaagaaaatccaagaaaagataatggaggatgacgcaaagctaacgttactttggatcagtggttatagtctgagaaaaatttgtgattttgcaatcaaaatgcgcaatcccaagtctggcgatacaggttttctaaatagagtaagtaaatataatgatgaagttcctaatattacttgggacacaataaccatcaatgccgtgatgaataggctacaaaaacttcagtttgttctgggaaaatattttttgaaagttacgcaagagttaactaaaagtggtgcagcacctcagaatgactggtataagtttttagaatatggaactgatagtgatttacgaatctggttacaacagagtggctattctagagaatcttcagaatacatcgaagaacacaaggatgaattaattatagaagagtttgatggatggaaggtctcaaagctagttcaatatgttgatgatatagatgtagccaacgaaactaaggaagttatggtaaatgttccagaaatttttctaagctag

SEQ ID NO: 59226 - DNA, 912 bp, Listeria monocytogenes; identical to SEQ ID NO: 59130

SEQ ID NO: 59227 - DNA, 2166 bp, Listeria monocytogenes; identical to SEQ ID NO: 59131

SEQ ID NO: 59228 - DNA, 1458 bp, Listeria innocua FSL S4-378
atgaaacgattatgttttggtacactcatgcacatattgtatcaagctcgtaaccaaaaagttacgaatgatttgttgtgcgatgccatcttttcttcttattctcaaacaacaaattcttttgatagttccttgcctggacatctcaaaagtggccggaataatgtaccaccagatgtgattgccgctgctagagatacatcatttgaagatgcagagagagtatttgaaaataaagtagtaaaattaataaaagatagtaagcgtgaatcggtagttcgtgctattaaagttattttgcgagaagacacaacgattcaagatcactcggtaattggatatgttaaaggctatgaaaagcttaatatcacaaataactctacatttagcttatcggctcttttggcctcagtgttttactatgcaataattgaagtaaagaaccaagattgtcaagctggaataaaggagatcgataaaaagtttgttgagtcttttgacctatctgatgagcagatttattttgaaagtgcaaaagctgaatcgcaaatccctttacataagactttacatgacccgacttttgacagggtatttgaaaaagtgtcctctataaatatatttggtttatctaatccgtccaatgtacatatatacggtgttgacgctaataattgcaagtttaagtttagggcgctaaaggaatatcttgtggataacataggaaactatgtcttttctagagcgaaaacaaacagacttattacttcaaagaaaagttatgctataggttcacaagctttaattaaatttatgcaagcttatggagcctctgcagaaacggtcctaggagaaatgctcctttatgtatttatggaacaagagctaaatgcacctaaaataatgagcaaaatcgaaataaatgatctgggtagaagcatcgaaagtaaaagtgatggggttcacctacttgctataaatgataatggccagctattccatcagcttgtctttggagcatcagatgttcatggagatttagccatagcgattgaccgtgcattcgataagattattgagattgaaagtaacagtgacactgaattaaagatggtggagaacaccacgcatggaagtatctatgattctgatacaacaaattatatggttaatcttctgatacctaataaagctagtgtagcaaaaccagatatggcctttggtgttttccttggttatacactttcgttaggctacacagaaactaataataacaagtatcgtattgcagtcaaagaacagatgaagagagatatttctgctctaaagccgtatattgaacagaaaatttttgataacggtatgagtgggtataatttttatttttacgttgtgccctttaatgatgctccattagagaagagcagtatcatatcggaaatgcttgatgggaggtag

SEQ ID NO: 59229 - DNA, 1680 bp, Listeria innocua FSL S4-378
ttgataccaaaaatcaatatagatgaagtgaaaaaactagcatcaaaatatacaccggtatgccagtttaaatattttctagatttgtgcgaaggtcaagcttatttttataatgattattctaaatcattatcatctataggaaaaataccacaagaagatgagctgagtgatattgttaatcgagttggatccacacaacaaaacattatctattgtaattcgagacaaaaagttgtcgattatgctgtacaatatgcaagcaaacttcctattaaagatgatgagaaacttatctcattagctaatgatatccgtaatgaagtccataatgattgttatcttgctgatttaatacaacgaggcgtagcatatcatgtcggatacctccctaccaacatccgattaagaatagagaagagttttgttgatggtattctaagaacaatattctgtactagcacacttgttgaaggagtaaatctaccagcagacaatttatttattacaagctatagaaacggaaattctaatatggatgaggtggaatttagaaacttagtaggacgtgttgggcgcataaaatataatttatatggaaatgtgttcttgattcgcatggaggacagacttaaaactcagaattatattgatttacttcaaaacgatgttccaaaacaagagatttccattaacttaatagataacaaaaaatatttaagcttggtagttgatgatttagctcgtggtgatatggaattgactaaggttcgtgaagcagctacagaaaaggactttgatgctctacgtaaatttgcaatgatttttaccaaagatattgcagaggataatattacacctatacgagaagctttttcatcgctattagatgaagaaagtgaatataaaataaaagaaaactttcctgtcgaaaagacaagtgacgatatcaatttttcatacgaccaaattatcaatttaagagagcttgttgaaagtggacaagaatatccaaaattaacaggagaaaatgatgaggttgattttgaagaattagtcgatttccttatgaaacttcgaaaggttttcaaatgggatatttatgaaaaacgtacgataggaaaatcaggtacctatagagaggactctgttgtcaggtggtatgcagttatcctattaagatggattaggggcaatggccttagtcagattatataccatgcacttaaatataaagagaaaaatccaaattcaggtgtatgggttggcaatatgaaaatggctgatgtttataataagaactccaaatcccacaaaaactatattattgctgaaacacttggtgtaattgaaaatgtccttttatttagtatctcaaattattttaggaaattttccctggaatataaggatgtacatcaagtagatcatttccaaaatgattggtatgaatatgtggaatacggtacaacaaatcctttgactatttttcttcaacaaagtggtttttcacgagaatcttcaaaatatatagaagaaccaactaatcagaataaatatttaatagaagttgatggtgaaatacaaattcaccgttcgatactgacatgtggtaatgtcggtgtagaaactgaagcacacgatatacaatttaatatgcctgaattatttatagattag

SEQ ID NO: 59230 - DNA, 930 bp, Bifidobacterium indicum LMG 11587 = DSM 20214
atggtcgagttctcggaagatgcccaggctgcggtgaattggttcgagcaattagaggacattagtttatttgaaaatgaactaaaacccacaaaaatgaggatattcatgccaaagctggatggacatgaatttgactactcagggatgaaggatgttctttttaacccgttgacctactatgtcctcagtcgtaaaagcgtagacgagtatcttgagcataagcagtatcagcagatgacgcaggctgctaggagggctttcaaagattatgcgcgcaataaaggggaattgggagagcttatcctttatgttcttctcgagggacaccttaaagcaccaaaaatcctctctaagatgtcattgaagacttcttctcaagattatattaaaggctgtgatggggtacatcttcttaaattggataatggcagatatcacctgatattcggagagtcaaagctctacaagaatctgactgctggatttcgcgcagcgtttaagtcaatcaatagtttccttggcagtggccctttaaaagagaaaaaagactgggaagggcagcttatcagccagcatattgatgatgaaaagctcagtgaaaaagatgctgttgaagcaattaagcaagtaatctatccttctcggcgaggtgctgagaaattgaagggcatcaaatttaccaggactttcgggatttttattggatttgaaataaaggttgataaagaaaaagagaacttggacgaagatgagtttgagacttggattaaatcatttgtgtctgagcagataaggggactagtgggcacaatccaaaaacagattgagaaccagaagctgaaagggaagcatttttatgtctacttgatgccgtttacggacttggctaagacaagaagagaactaacgaaagaacttacatcgtga

SEQ ID NO: 59231 - DNA, 2523 bp, Bifidobacterium indicum LMG 11587 = DSM 20214
gtgaatgcacaaaaaactgtaaccgatttgcttaatgaacaggctatgaacgatgtctatctttatgagttgttggaaaaagctcaaaagaactatggctcccaactgtttggagaagaacctgcaagattggaagataaagagttcgcagatattttgcggtttgctgatatcttgtcccggtcaaagactccaatcaacaaaaatgtggcactaaaaatcatttctgttctttacgacgaatatatgaacaataatgccttcaagctattttcgaagagtgttctgacaaaactgggtttatttccttcaatttcgttcgtcgaggaaaaagggaacgacgcccaagatttagagtttgtgattgatggcggcatcaaaagagaaatccaaaagacagcagatggtaagcatgttttaaccgatcagcaattcaagatactgaataaaatgatgaactcgaaccacttcagcttttctgctggcacatcatttggaaagtcatttctttttgatgaatatgtggaacgcatgattcacggagcgaattctagccagaatttcgcctttttagttcccactcgagcattgataacgcaggtggtgaatgacttgaatgaaaaggttgaattgcttaatagagggagcaaagacagacagtataagattataaccagtccagaagtgcccttgctatttgcgaagaacaagtttatttttgtatttacgcctgagcgattagtttcctacttcagtaaggaaaatccggtaattgatatcttgattgtggacgaggcgcaaaagaccatatccgatgatgaaagatcgccactgttctaccatgcaatttcattggcgaaacaaaaaagcgtcaagttattctttgcctcgccctgcgtgccaaaccctgatatcttcttatctctagtaggaaactcggctgaggaagtatcacgcgtgcaggatttgagtgtcacgcaaaacgttttctttttagattttgttaaaggtaaagcatggcagtattttgacttcatatccgagaacgaaagtagctatgctgagttgccccttccttggtcgggagtaaatgaggtttttgaccacttctcgaacaaaggacaatcgctagtatattgtaattctgtagggacgactctacgtgaagcagagtgcgaggcgaaacgacttcctgctgataagtcaccagatagagtccgtctagctaaatttatccgtgagacaatccatgagcagtatgatttagctaactacgtagagaagggtgttgctgttcacttcggtgccttgccacaattggtgcgtaatagggttgaagatgcctttaagagcggagttattcattccctatttactacctcgacgttgcttgaaggggtcaacttacctgccaagaatctctttgtgctctcaaaaaaagttggccgaagcaggatggatcaactttcctttaggaatttaattggtagagccgggagactgtcgaaagaactgtctgggaacgttattgttgttcggagtaaggaagacgactggtctgaaaaaacggtcagtgatttgcttacgaaagaggtgtgtcctttagaaaccgctataattactggcgacaatcggttttatcagaatatcggtaacgtgttgctagataaaccgttaacccgaaagaaagtgtcgattaaagaaaaacgacagctgtcaagttatgccacgatttttgcatatcagcagaatgcgcgagttgattctgtcctccatacgactttcgcaaagaagaacccggacatgcccgaggtccttcgcaaggttgaggcaattgatgtgccaagcagtattcttatgtctgctatttcgattaagcccaagtatcagcaacaaatttatgtatctggtgatcgatatagcttgccgactacgtacgattacgaatcgtgttcaaaagttttgcacgcaatgtttgattactataactggtcagaggaagaggactcaaaaaaactgggaaaccgacagaatcttccttattacacagttctaatgagcgaatggctcaattctcgaccgctgaatctaattatacaaagtactttaaacttctacagtaaaacaaagaaaaagatatgcacggattatatcaactgggtagaattcgatggcagtaattctgtacatgttaactcggttatcaatgatgtgatgagagatctggaaaatatcgtccgctttaccattaagacatacgttagtaactacatgcagctgactgatcaggcttcaagtgggtggggagactacttgaactacggaactaacgacccgttaatcatagaactggaaaaattaggttttgagagatacgtcgctattgaacttcaaaagaaagccgaggatgcattcgtaatgtcggagaatagtgaaattgctggtgtgactaaggaaaagctcgccgcaattagtttctcgcacgagacagagcaggccgtcagccgtattctacttggatag

SEQ ID NO: 59232 - DNA, 921 bp, Mobiluncus curtisii subsp. curtisii ATCC 35241
atggcacaggcaacgatcacgccaacgctgcgcggcgacacattcgcgtccacgttcaccgaagtggcccattcgaacacgttaggtcttcgaaacgacgaacagttacgcctgttccatctgtctatccaaaacaaccgcttcgaccacacagccctcatcaagttcctcaaacgcaacgttgggcgctacgtcttctcccgcgccgaatacgaaggctacaaacagcgagacgatctcgaagaagttgctctcgacgcggtaaaccggatgcgttcacaacaagacggcatggggttaggtgaaatcttgctctacgtcctgctcgaacaaatcctcgaagcacccaaagtgatgagtaagatcgagctcaaccaggcccgaggccagatccacagccgctgtgacgccatccacctactcacaccagacggtcagcgaaccaccagcagcatcgtgtttggaacctccagcgtggtcggcaacattggggatgccatcactgcagcattcgaccgcgttgtagatatagaacagaatcgctcagacgaggttcagctcgccgagcaaactgtgttcaccaagaccctcgacccagcaacagcaaactacgtcaaagatctgctaatcccgaagccgggtggggcacccgtgttcgataccgcttattcgatgttcctgggctatgacatcggtctcgatccgaagaactacagcaaccagcagtatcgggctgtgctcgatcagaaaatgcagggagatatcgccgcgcacgcccaaatgatcgccaacgaaatcaacacccgaaacttggataattactcgttctacatctatgttttgccactcaacgaagtagacgttgacgcgggcgcgatcatggatgggctcgtgggtgggccaggtggtagccatgtctga

SEQ ID NO: 59233 - DNA, 2670 bp, Mobiluncus curtisii subsp. curtisii ATCC 35241
atgggctcgtgggtgggccaggtggtagccatgtctgacaagcaagtaaccgtcggcgatctcgtattttctgacatcgactccaacgaattcctcaaacagctgtacgccaacctgctctacaactacggcttacatcggttggggctggtggatcgtcaaccatacgacgtggatcttgaagcagtactgcgattcgctgacctgctgtcgaaatcaacccaccccaccaatcgtgaccggcacagggtgtgggcgcaagaaatcgcgctcctgtgccacattctctacccacaagacgcgcgaacgaaagcatacgttcctgcaatcttcaccacgctaggtaactacccaggcctgaagcagttgggtgtgacttccgatgcgggcatcctcgacgccgcattcaacgcctaccaagccgaatacctcaccgtgcccggtgataagtcgatgaagtttttcgcgccgcaaaagaagatctacgaccgcctgaacgacggcaagttttccttctcggccccaacgtcactgggcaagtccttcatcatgcgcaccttcatcaccaaccagatcaaatccggggtgacagccaactttgcgatcatcgtgccgtcaaaagcgctgatcaacgagacccgctcgaaactgatcgctgacctcggcgaagaccttgaacggcacaactatcgaatcgtcagtgccgctggtgacatcgtgctcgaaggcgatcacaacttcatcttcgtgctcaccccagaacgcttgctttaccttctgatcggcaaacctgcaatcgaattcgagtacgtctttttcgacgaatcacacaaactctcaggcaagaacagccgcgccccgttctactaccaaaccgtgacaatccttcaacaccgccacagaccaccacacttcatcttcgcttcacccaacattcccaacccagaggtattcctaaggctggttgatccaaactctgacgaaaatgaaaccaacgcggtcgcaacccagtattcgccagtcgcgcaattcaaatacctcgtcaacctgcacgagaacaccatttccagctacaacgaccacacccaagaattcacgcacctagcctcacttcaagctcaggacgctaccgcacagggcgtaacccgatttgttagtgaatcatcacgaggttcagatcatcgtgggcaaaccatcgtgtttcattctgcccggcatcacgcagtgcaagcggcgcgtgactatgcccagggtttggcagacctcaacgataaagacttggacgctctcgcaaaagacatcgaacgcgacgtccacgaggactactacctcagcggtctcatccgtagaggcgtcagctaccacatcggctacctcccgccagcgatccgcgaacgcatcgaaggcctgttccgcgaaggcaaaatctcgacactattctgcaccagcacgctcctcgaaggagtcaaccttcccgccgacaacctcgtcatcacaaccaacaaaatcggcagagcaggaatgacagcagtcgacttcaagaacctgatcggccgagtcgggcgtatcgagttcaacctctacggcaacgtattcatcatcgtgggcaaccaacttgcatccgagcaaaaggccaaggaactcctacaagcgaacgttcctgtacagaagctatccgtgcaaactgactcacaaattatcagcaagaaaatgaagcaaggtgtcgtcaaggatctacaggaaggtcgcatcgaattctccaaagggaatgagagctatgagcgttatgatatgaaacgcaaattcggtctcatgctcttgcgcgacatcactaccggacgtcaaagcctggtgcgtgaagaattctctgactatcttgacgaacaggctaccaacagcattattgctactttctcgcgacgcgaaggccaacaagatgacgatatcaatgtctccgttgaccaggcagaagcgctgacgcacgcaatccaagctggactccagtatccacaactttctccaaagggaaagttcagttacgacgagaccctcgcgtttcttcagcggcttgcctcaatcttcaaatggcgaatttacaatcccgagacgttagggagaacaaccaagggaagtgaccagctcgctatgctgtcctggtacaccgtcctcctgttgcagtggatggagggacacggtttgcgttccatcatgaatcgtgcaatcgagcatcaccggaaaactggaattgtgtggatcaatcggcaaccgaatcgctacctagattcgaaagaacaccgaaaccttgtttttagtgacacgcttgaagctattgagcaagtaatcctttttgagctatcgaattactttcttaaattctccaacgaatacaagaaggtccacggaaaagagcagttcgacaacgactggtacgaatacgtcgagtacggcacaacgaaacaggaaaccatccttctccaacgactcggattcacccgcgagagcgccacttacattcgaatcaacgtctccaatgcaatcttccttcacgaaggaaaaccccacctgaacccgattctcctcgaaagctcgaacatcaacgtccgcaaagaagccaacgaaatcagatacaacgtgccagaagccttctcgatgccagatttcttgttctaa

SEQ ID NO: 59234 - DNA, 951 bp, Mobiluncus curtisii ATCC 51333
atggagggcagcgagatgacagcaacaatcaccccaacactggcaggggcagattttgatgccatcttcactgagtgctcgcactcgtcatccctgcaactcgtgaaccctagccagttacgcctgttctacttggacaccattaacggtttgtttgactatgcagggctagaagaattcatccttgattgtctcggtgattatgtgttttcacgtgccgaaatagaagactatatacagcgaggtaaaaccagaaatattggtttatatgcgctacgcaggttaaggcaacaccaaaccgcaggacagattggttcagggtctgacttaggtgaaatcttgctgtacgtgttcctcgagaaaatacttggggcaccgaaaatcatgagcaagatagaactgagccggacaggaggaacccagccaagtcgttgcgacgcgatccatcttcggccaccgaacccagcagagaacctgccatataacacgattgttttcggcacttccgaaatcgttgacgacatcgaagatgctattgatgatgccttcgagcgaattaaccacattcaaaccaaccagcgcaacgaagtgctgatggcagaaaacacggcttttgagaaaaccttcgatgatcgaaccacccaccacatcaaagacttgttgatcccaaagaaaggcagaggaactaaacgcgacattggatatggtattttccttggctacaagctcggcctcaacccttccgcgtattcttctgatggctttgatgcacaattggctgccaaaatgcggctcgatatcgcccagcacgctgaccttattatgcacaaaatcaacgaactgaaccttgccaactattcgttctacatctacgtactgcctttaaatcttccctcgacagatcgcatagaaatcatgaaccatgtcctcgaccaaggtgtacagccatga

SEQ ID NO: 59235 - DNA, 2631 bp, Mobiluncus curtisii ATCC 51333
atgaacaccctcggggatgccattttcagcgatatcaacaacaacgagtttttgaacgagctctacgacgacctgctctacaattacgggttactaaaattcccaaccaggcgagagcctaggccggtggatttagaagctgcgttacgctttgccgaccttctatccaaatcgaaccatccatacgagaaagagcaccatcgcacgtgggcgcaagaaatcatcatcttgtgtgacaagctctatcctgacaatccgctggtgcgcatctacgccacttccgtctttatggctgtaggtaactatcaaggattgaaacttatcggaggtggcaacgtacccttaagcattttcgagcgcgctttttccggtttccaagaagattatttgcgcgtacccggcactgaagatcagacgttcttcgtaccgcaaaaacgcatctacgaccgcttgaaagatccagaattcagctactcggcacccacttctttgggtaaatcgttcgtcatgcgaaccttcatcatcaaccaaatcaagcaaggagccacagccagctatgccatcttggttcccactaaagccctcatcaacgagatgcgctctaaaatcatcaacgacctgaaagaaaccttggcagagagaaactatcgggtcatctccgcagctggcgatatcgccctggaaggcgaacacaacttcatatacgtgctcaccccagaacgcctgctctacctactcgtcgccaagccacacctcaaacttgactatctcttcatcgatgaagcgcacaaactctcaggtaagaacagtcgcgcaccgttctattaccaggtcgttagtatgcttcacgaccggccaaaaccaccacgcttcatattcgcctcacccaacatcccaaatccgcaaacctacctccagctcgtggatgcagccatcgacggagacgaatcagctatcgccaccacctattcgcccgtgacacaattcaaattcatcatggacgcatccaagcaggaaatcctcgtctacaacgaccacgcgcaccacagcaccacaattgcaccgtatcaaggagcagatccactcaacaatctccttgccacgctacaactagccagtgccgaggacagagcagcccagaccgtcgtgtatttcccctcaaaagaaaaagccataaaagccgcgaaaaactgggcactaaaacagccgatactagctgacaatgaattagatgcactcgccgaagacattagtcgtgacgtccacgaccagtactacctcgttgaattagtacgcaaaggcctcgcataccacatcggctatctaccaccggcaatacgccagcgaatcgaggatctattccgtcaaagaaaaatcaaaaccatattctgcaccagcacgctcctcgaaggagtgaacctaccagccgataacctcatcatcacctcaaagaaaaacggccgagcctccatgagcgcagtggatttcaataacctgatcggcagagtagggcgcattgaatacaacctttatggcgacgtcatcatgctcgtcttaccaaaagaaaccagccgagaagatttcacacagttccttgatgaagagatcccgcagcaaaaactgtccatcgaaactgacactggcctattcagaaaaatcgataaacagcgggtcgtagaaactttaatgcaagggaaaatcgcgcttccagaaaagaagcaaaatgagagtgaagacaagcgtgagatgattcgtcgctacgaactcatattgcttcgcgacatcatggaagaccgttcaagcctcgtgcgccgagagttcgctgaccacctcgataaagaaaaagaagccacgattagacaacagttcgcaaagcgagaggccgcccaggacgttgacctcaatatttccgtagatcaagtagaaaacctcacccacgcaatcagaaacggcctcacatatcctgaacgtatcgaaagcagctctttcgattatcgtcaagtgctaaagtttctcgaaaaactcgccatcattttccactgggacatttacgaaagttcaacacttgggtaccgaaatcccaagactcaagagcacacaaaactgcgttggtatgccgccatactttgccgctggatggaaggtagaggacttaaattcatcatgaatcaagccatccagtatcaaatgaaacatccagaccgtttcttcgtgacggactacctaatggagcgctacaccgatagtaaagagcaccgcaacatcgtcatggccaataccttgaagacaatcgaagagcagatcctgttcagcctctcgaactacttcctacgcttctcaaacgaatacaagaaaatccacaacgtcgagagctttccaaacaactggtacgaatatgtcgaatacggcagcaccaacgaggaagccatcgctctgcaacgttccggcttttctcgagaatcagctacctatatcctgaaaaataacccagactatctgagaatcgatgaacgaggaagcctccatctcgacttcgggctcacatcttcaccgaatatcaacgttaaaaacgaagcgagcgaaatcttctacaacttacccgaggtttttgacagtcttccacccttctag

SEQ ID NO: 59236 - DNA, 921 bp, Mobiluncus mulieris ATCC 35239; identical to SEQ ID NO: 59232

SEQ ID NO: 59237 - DNA, 2670 bp, Mobiluncus mulieris ATCC 35239; identical to SEQ ID NO: 59233

SEQ ID NO: 59238 - DNA, 921 bp, Mobiluncus mulieris ATCC 35243; identical to SEQ ID NO: 59232

SEQ ID NO: 59239 - DNA, 2670 bp, Mobiluncus mulieris ATCC 35243; identical to SEQ ID NO: 59233

SEQ ID NO: 59240 - DNA, 897 bp, Gardnerella vaginalis 6420B
atgagtcatatttattcagagaatataaaaattaatgatgaattacatatttactatataagttttgatttacttgatagtggctattgccagtcaaaagataaattttatgatgagttatttaacgatatacctgcttttgcctttggaacagacgtaatgaatatgaaaaaagatacaataggattggttccaactgtaagagaggctttgaagaaaatatattctattaaagaaatccaagaagctagtagagaatatttagattctaaatctacagaagataaatatatcaaaagaggtgaatttggcgaattactactatatcatatcttacatgagtattttggtgcagattcattaatttctaaaatatattttaaagacagtattaacggtgtcgcacatggttttgatgcagtacatgtagacactgataaaaaaattatatggttgggagaatctaagctatatagaaatccaactacagcaattgatgaactcgtaaaagatgtaatgagtcattgtaatgttaattttctagaagatgaattccaaattataacaaatagaatatgtgactctaaaactgcatgcgatgattatattttaaaactgttggattatcgtacgaaaaatcttgaaaaattagcaaatattaacatttgtctgtttgctgcatttgaaagtaacagcttagttcacttcaatgaagttaatttcaaagaaacattaaaagaagaagttaacaaattatatgatagaatggataaatcgttgagtaagcacaaatggaaggaacatcttaatgtttatttgttagcatttcctttggataataagagagaattcgtatcttctcttcatcaaaaattaaaaggaggccaacaaatatga

SEQ ID NO: 59241 - DNA, 2136 bp, Gardnerella vaginalis 6420B
atgagtaataatgatgttgaatttaatgttaattttttaaaagattttgaatataattgggagtgtgctaaatattgtacctcggttatagatacgtctaaagcaagaacttttctgataaatatattagaaaattgggaacaagtcaatgacgacatcaaacctatttggctggatttgattgaaagagctgggttttatccttactacattgataaaatcaaaagtgttaaaagttataatcaatctttacaatctagcattcgtagtgcttttttcaaatcagattttttaaatggcgtatattttcatgaaaagcaaaaagaaattgaaatagcagttagtttaaagaaaaatattgcagttagtgctccaacaagttttggcaaaagtcttcttattgaagaatttgttgctagaaaacaatataaaaatattttaataattcaacctacacttgctctaattgacgaaacaagaaaaaacatgagcaaataccgagactattacaacattgttataagcacaaatcaaaaagcggcagaaaataatatatttatattaactgcggaaagagtccttgactatacaagtttaccaaaaattgatttttttgttgttgatgaattctataaagttagcagtttgagaaatgacgatagaatagatgctctaaatatttctataatgaagattatggaacacaagcctcaagctttgtttttgactccttgcgtaaattcgctttcagacaaatttattgaaaaatataatgttgaattttttaaaacggattattcattagttaataccaatataaaggaagttcgtaaaaataatagacctttgaaaggtaatcaaaaaaagcgtgaactatttaaattacttgaaaaattaaaaaaaccaagtatagtgtatgtaaaatcaccaaatgaagcctataaattagctaatgaatacatagcttatttaaaacctactaatttttgtaatagtagattgccaatatttgaatggattgatgaaaatatatctactgaatggaatcttaaaaaacttatggagaatggaataggagctcacaatggagctttgcctagacatatagtttcttccgaaattgaaatgtttaataagggaatcctttcaattatgtttgcaaccgcgtcattaatagaaggtgtgaacactattgcaaaaaatattttaatatatagccaaaataaaggaaatagtcgtattgatttttttgacttttctaatattaaaggtagagcaggtagaatgggaaagtactacactggagatgtttatttatttaatgaagaattgcagcatgaagaattttcaattgatgttccttttgttgatcaatataacatatcagatgagatattattcagtatacctgacgaatacgttgaaaataaaaatagaaaaaagctattgacttcaaacatgccagtagatctacagaaaataattagaaaaaatataatttctgttgagggacagaagaatttatataattatattaaagcaaatgttgataatttgtcttatttaaagtggactggaattccgtcgtacaatgatttatggaagactctttatttagcatacaaatatttagataataaggataatgaaaaatttgcgcaatccaaagctataatgtcattaaacattgtcaacaaatcgttaaaagaaataattcttaaaagagagaattttttaaagacaaaaaaatcaattaaagatcctcatgaaaaagctatagaagatgttctgaagtttgttagaaatgatgctaactataaaattccaaaattgctttcagtagtagagtctattcaaaaatatacttttgagaataattgcaataatgaatatggtgactatagtgcattcaatgctcttttagagaatgaaaatataggtgaaaaattcagatttttgatagactttggagttccatcatctgctattaaaaaaatagaaaatcactttaaccaatgcaatgaaataaatgacgacacagaagtaatatcatttctgaaacaaaatattaaagttttaagaagaatattactggattatgaatattatcttttggaaagagctttaggcatttaa

SEQ ID NO: 59242 - DNA, 927 bp, Streptococcus mitis SK321
ttgagagataatcttagaaaattaataaatagtgcaatagtaaaatatacttttcctattatacttactgacgaacaagaacaagtaacttcaattaataagagtaatttaacaactgctggaaaggatgaatattgttttaaaggcaatgataatgacatttcaaagataatttataatggaattgttgaattcgctgagaatgaatttaagattgattatgataatttggatagagaacaaacaaaggtgatcaaaactaaattaaaatataatgaaaacgatttctctcaaacaaaacttcaatacggattttatggggaagtacttttagatttatttttaagaaattattttcatacggatgttctaattgctagaggttatttttattcacctcttgaaaagtctgaaccaaaagggtttgatgcttttcatattattgataataaaggaaatttagaactctggtttggagaagcaaaatttcatcaaagttttacatctggaatcaactctgtacttttcaagataaattattctatttcagatgactatttgaataatcatatgtttgcaattattaatgagaaagataatatctctcatttgcatccaattttagaaggaataattaaaaaatgggaagataatcctgatattattcttaccgatgaattacaaaataataatattgaattagtgtatcctgtttttattgcatatcaaaaacagcaaacctacgattacgaaaaatcaattgcatccagtgtagataaaatcaatagggagttaggaaaatattcgttaaatttagctattaaaataaaggttagtatatttgtaatgctcttacctgttgatgattctaataaattaaaggaagaagtgattgaatggatagaaacgaaagaaccgctcatctaa

SEQ ID NO: 59243 - DNA, 2286 bp, Streptococcus mitis SK321
atggatagaaacgaaagaaccgctcatctaattaaggaattgaatttatacaaacgataccctgaaagaagaggtatctttgtcaaggcaacttgtgactattacgacgctgttaaaatagacgaacttacaagtagtgatttaaattttttgcgttatatagcaaatgaagctggagtaccacaatactttgagctacttgaaagaaaatatcaagaaggtaatgaaataaatcaagaggatatgaatttattatccataagctcgtttttaaatgaagcacatttaactttgaataattatatgttacataaatatcaaaaagaagttctagaattatttgaattccattttgataataggtatatcctttctgccccaacttcatttggtaaaacttttattgtttatgcaattataaaaaagatgggatattctaacatattgttaatttttcctactattagcttgttatcagaaaattatttaaagttgcaaaatgatgaatttttctctacatataaaatacatacactaagcgaaatatccgaggaagaacttggcgaaaaaaatatttttatttacactcctgaacgatatctgtcatttttagataataatactagatattttaatttttctttcgtagatgaaatatataaaatagataatgatttcattatagataatgatactccagaagaaaatgaaagggatactgcctatagacttgctttagaatatgtatgtcgcaatagtaaagatattttgcttgctgggccttatattcaatttcaaaaacttgaaacagaaataaattcatttaataattttactctatttaacaaatttaaaatacttgaatataatgatgttgagattgtgtctaagaatattacacatattgatagaaataagtttgaacttggaaatataaaatatagattagatcatggtgcttcatcattacaagataaagtaatacaaacaattgtaaaaatagatgataatactttgatttattgtggaagaaagtcagaggtagaaagactagcaaatcatttgttggaaaatgatgaatatctttctcttatctcagaaaaacattatagcgaagatgaggaactatattctatttttttgaatcatgtgggaaacacctttgggtatgattggattctatatagagcacttgaaaagagaatcggaattcatcatgcagggataccaaaatatattcagaatgaattaattaatttgttcaataaaggtgatttacaatgtcttttttctacaacaacaattactgaaggtgtgaatacgactgccaaaaatttgattgttactgctatcaaaaaggggaaaaagagactaaaacagtttgatgctaaaaatattgctgggagagcaggtcgttttaatgtccattatagtggtaatgttattgatttaacaaaacaatttgaaactctaattaattcgcaacaggcagaaattgaacataaaaattatgataatcgtaacaataaaactgacattgatttagaagtaactttagatgaatttttgacagatgatgatagaaagtttaaagatgaaatcaatgaggcaaaacaagaatcgggattaccaaattttatttttcattcatataaagcgataggccctttggataaaatctctatttataatcgaattaaaaaaatgtctccagcagagtttcaaaaaatcgaacaattaaagcgagtcttaaatacatctaaaggtaaagaaattcattgggaaggatttcaaacggttattaatatttgttctgaatttgtttctaattctgatttaaaacaattaatggaaaagaaagttgggaaaaaacagttctctttaattgttatacagttagcaagttatttacagaatggatttttaggaacagtggattactatgtagaggaacagaaactgagtaaagataaagcaattagtagaacctctaaattaatttatactacatttaaatatcatcttgtaaagtatttaggagtatttgatttattatatagattccattattcacaagtttatagaaaagattttgacaatgttgctggaattcaaattcttctacaaaggctagagtataatgctcttactaatactgctcgaaaattaagtgattttggagtaccttttgaattagtaagatattatgatagagtagtagagaataaaaactttgatttgtatgagagttatgtcgatgaaaagattcaaaatctacttaagtga

SEQ ID NO: 59244 - DNA, 930 bp, Streptococcus mitis SK1073
ttgagaaaaacacttcaagatttaattaataattctattgttttgaaatataagttaccttttaatttcacaaacggtaagggaagttcaatttctataaataaaagcaatttaacaagtaaagggaaaaatgagtactgctttgaaggtaatgataatgatatttcaaaaattatttataatggaataattgaatttgctgaaaatgaatctgagattgactatagtaaattagatagagaacaaacaaaggcaattaaacttaaactgaggtatgataaagaggatgaatcttcaaccaaacttcaatatggattttatggtgaagtacttttagatttatttttaagaaattatttccatacggatgttttaattgctagaggttatttttattctcctcttgaaaaagctgaagcaaaaggatttgatgcgtttcatttagtggataataatggaatcttggaactttggtttggtgaagctaagttccataaaaaattttcctcagggattaaatctgttatttctaaaatgaatagctcactttcagatagttatttaaatgatcacttatacgcaattattaaagaaaaaaagaatatttctaagtcgcatactactttagatactataatagaaagttgggaagacaatcctgaaattattcttatagacgaattaacagctaaccatatcgaattaatatatcctatttttatagcatatcagaaacaaggtacttttagttatgaaaagtcaattgattcttgtgtgaagaaaattaatgatgagctgtctaaatccacagttatgccggctgtaaaaattaatctaagtatttttgtaatgctattacctgttgatgattctaataaattaaaggaagaagtgattgaatggatagaaacgaaagaaccgcttatctaa

SEQ ID NO: 59245 - DNA, 2286 bp, Streptococcus mitis SK1073
atggatagaaacgaaagaaccgcttatctaatcaaagaattaaatttatataagcgataccctgaaagaagaggtacctttatcaagacaacttgtgactattacgacgctgtaaaaaaagacgaacttacaagtagtgatttaaatttcttgcgttatatagcaaatgaagctggagtaccacaatactttgagctacttgaaagaaaatatcaagaaggtaatgaaataaatccagaggatatgaatttattatccatgagttcatttttaaatgaagcgaatttaatcgtaaatgattatatgctacataaatatcaaaaagaagttttagaattattcgaaattaatttagttaatagatatgttctctctgctccaacttcttttggtaaaacttttattgtttatactattataaagaaaatggattattctaatatactattagtttttcctacgattagtctgttatctgaaaattatttaaagttacaaaatgatgaatttttttcttcgtataaaatacatactctaagtgaaataaacgaggacgaacttggagaaaaaaatatttttatatatactcctgaaagatatctctcgtttttagataataatactagttattttgattttacttttgtggatgaaatatataaaatagacaacgactttattttagataatgacactccagaagaaaatgaacgagatattgcttatagacttgctttagaatttgcttgccaaaatagtaaagatattttactcgctggaccttatattcaatttcaggaaccagatgcagaaagaaattcattcaataattttgttagagttaataaatttacaattcttgaatataatgatgttgagattgtatctaagaacattacacatattgatagaaataagtttgaacttggaaatattaaatataaattaaatgtaggtacttcgtccttacaagataaagtagtacaaactattgtaaagatagaaggtaatactctaatttattgtggaagcaagccagatgtagagagatttgctaatcatatgttgaaaaatgaagaatatctttcgcttttgtcagaaaaagagtccaaagaagataatgaactgttttctatttttttaaaacatatagaagagaaatttggatcagattggattttatataaagcacttgaaaagagaattgggctccatcatgcaggaataccaaaatatcttcagaatgaaataattaatttgtttaatagtgggcaactattgtgtcttttttcgacaacaacaattactgaaggagtcaatacaactgcaaagaatttgattgttactgcagtaaaaaaaggaaggaagccattaaaacagtttgatgccaaaaacattgctgggagatctggtcgatttaatgtccattatagtggtaatgttattgatttaacaaaagaatttgaaactatcattaattcgcaacaagatgaaattgaacataaaaattatgataattaccacaataaaactgacattgatttagaagtgactctggatgaatttttgacagatgatgataaaaggtttaaagatgaaattaataaggcaaaacaagactcaggactaccagattttatttttcaatcatatagaattataggccctttggaaaaaatcttgatttataatcgaataaaagtaatgtccgaggttgaatttcgtaaaattgatcgattaaagcaagtattaagtctaagcaacggtacaaaaattcattgggaaggttttcaaacagtagttgatatttgtcgccaatttatttttaattccgagttgaaacagataatagaagctaaagtaggtaataaaaatcattctttaattgtagtacaactgtcaggatttttagaaaaaggctttttaggaactgttgattattacgttaaacagcagaattacagtaaagataaagcaattagtcaaacttctaaattaatctatacaatatttaaatatcatcttgtaaagtatttaggtgtatttgatttgctatatagattccattattcaaaggtttacagaagaaactttgatgatgttactgggattaaaattcttctgcaaaagctagagtataatgctctgactgatattgggcgccaattgagtgattatggagttccttttgaattagtaaaatattatgatggaagtgtaactactaaaaattttgatttatatgaaagttatgtagatagaagaatacaaagattacttgaataa

SEQ ID NO: 59246 - DNA, 915 bp, Streptococcus mitis SK579
ttggagggaaatgagttgattacttcatctgttaaagcacaacaagttgttgaagggtttattcaattacaaagtattaatctattttcaggaacaggaatacaaacagaactgaaaatttttatgcctagattaaatggaaaagattttgattatgcttcatttgcgtcagaccttcggtctatacttgatggttttgtcttgaacaaaaagacaataaaaaaatacattgaagaagaaaattatatggaattatcattacaagctagaaataaatttagagatgtttatgtgaataatggtgaacttggtgaacttattttatacacttttcttgagggtaatcttcgagcgcctaaaatcttatcaaaaatgtctttaaagacatctaataatatgtttgtaaatggagctgatggtgtacatttgttaaagatttcagaaagtaattatcatttgatttttggtgaagctaagatgtatgccgtttttttagatggttttaaagcggcttgtaaatctttaaaagaatttatagggaatagtagaatgtttgaattgaatttaatcgattcacaattagaaaatgagatactagatcagaatgatgttgacttaatatctaaaattatatatccttctaagagccaaaatatatatacagttgtggattcatactctgtctttgttggcttccaaattgatatccctgatgaaaaactatatttgtcagatgaagaatataatttgtggataaaggatgagatagaagtagagattaaaaaggcatctgcaaaaatggaagatgccataaaaaaatattcgttgataggaaagaatttctatttatatgttatgccatttataaaaatagatgagactagaaagaacattttgaaggaggtggtggaatga

SEQ ID NO: 59247 - DNA, 2502 bp, Streptococcus mitis SK579
atgagtaatgaatcaataatagcatggttgaatagtagagctattgaggatagttacttgtatgaactattagctgaaagtcaaattagatatggagataatctgctaggaatctctaaaaaagtaatggataaaaaaaggtttttagacttattgagatttgctgatatactttcaagatctgagaaagctcagaatagaaatatctcattaaaaataatctctcttttatatgatgaatttaaagaaaatatgacttttcaattagtttctaaaagcgtgttagttaagcttggtaattttccatctttaagtcttattgattctaattgtgaaaataatatttttaattttgacattgagattgataaattaattaaaaatatttttcaaagtacttcgaataagaacaaaatttttacagatgctcaatacaaaatatttaaggaattacaggggacaaatcattatagtttttctgctagcacttcgttcggtaagtcgttcctacttactgagtatgttaagtggattattgatgaaggaaatgcaagtcaaaatattgctttcttagttcctagtagagctttaatttcacaagttgcagaagatttaagtaaagtaatcgttggtactagatataagatactgacggttcctgaaatcccagatttatataaacataaaaagttcatttttgttttgactcctgaacggctcatacaatacttttctcaaagaaatccccccatttctatcttaatagtagatgaagcacagaaattagtcgctaatgatggaagatctccgattttctaccatgccatttctttggctaagcaaaaaagtatcaaacttttttttgcctctccaaatgttcctaatccagaattatttttaaatttagtaggcaattctacggatgaagctactcaaatcattgatatgaatgtttctagaaatttattttatattgatttacaatcgctctgtataaggcaatatcttgaatattgtaacgaagatgtaaaagaaagaacttttaggtgcaaaaatctatttgatactgtgagttatttatctaagagccaacaatccatcatttattgtaattcactcagtgatacaatggcttttgctgataagtttagtgagggtttctcacagatcaacaataaaaatttagaggatttgtctgattttattaaagatacaatacatgagagatatgagctagctgaaatgattagaaaaggagtttctactcattttggtgctctaccacaggttgttagagaaaaaattgaggaagagtatagattaggaaatatcagatatttatttacaacctcaacattgttagaaggtgtaaatttgccagcaaaaaatatttttattttaagtgaaaaaattggtctcactaagatgtctgatttggattttagaaatttaattggaagagctggcagacttacaaaagaactttcaggtaatatttttattgtcaaattagataataaaaaatggcaaggtagtgctattgatttattgaatttaaacaaattaccaattttgaattcagagttacttacagggaaagatgcattttataaaaaaattggacaaattattaatgatgaaccattgagtaaaaatactagtcttccaaaaaggcattttttaaatgaatatgcctcaatattatcctatcagtataaacaaaatctagattcaattttatatagaaagttaaatgaaaagaacaaagattcacagaagattttaaaagtaattgaaaaatatgaagtaccttctgaaatattaatgacctcagtaacaatcagtccagttatccaaaataaaatatatataagtgaaaggccgtatatttttccaaaggacattagttattacacatgtagagaggttttagaacaaatgtttattatttataactggggagataatgaacataaaaattttcttgggaaaaaaaatagattgggttattatgcaaccttaatgattgattggattaccactaagccattgaatgtcattataaaaagcattataaagtactacagttcaaatagattaaatattactcttgattttaatcaaaattttattctgtttgatgaaaccaactcacaacatttaaatcatattgtgaaccaagttatgagggatttagaaacggttgttagattttcaattaggaactacataacgaattatttacagttgactaaacaagatgaaagcaagtggagagattatctggattatggtactaatgaaagtttagtaattgaactacaaaaactaggcattgatcgacaaattgctattgaaatttctaagaaagcatataaatattttgaattgaatagcgaaaataaattatggaaaataagaaaagaaataaagaatgacgagaatttgagtactgaagcacaagattcgatactagctgttctaaaagaacttgaattataa

SEQ ID NO: 59248 - DNA, 984 bp, Streptococcus mitis 18/56
atgagccgtgttttttggtataatgaaatcaatatctattgggtcgggagtgggatattgagagataatcttagaaaattaataaatagtgcaatagtaaaatatacttttcctattatacttactgacgaacaagaacaagtaacttcaattaataagagtaatttaacaactgctggaaaggatgaatattgttttaaaggcaatgataatgacatttcaaagataatttataatggaattgttgaattcgctgagaatgaatttaagattgattatgataatttggatagagaacaaacaaaggtgatcaaaactaaattaaaatataatgaaaatgatttctttcaaacaaaacttcaatacggattttatggggaagtacttttagatttatttttaagaaattatttttatactgatgttctaattgctagaggttatttttattcacctcttgaaaagtctgaaccaaaagggtttgatgcttttcatattattgataataaaggaaatttagagctctggtttggagaagcaaaatttcatcaaagttttacatctggaatcaactctgtactttccaagataaattattctatttcagatgactatttgaataatcatatgtttgcaattattaatgagaaagataatatctctcatttgcatccaattttagaaggaataattacaaaatgggaagataatcctgatattattcttaccgatgaattacaaaataataatattgaattagtgtatcctgtttttattgcatatcaaaaacagcaaacctacggttacgaaaaatcaattgcatccagcgtagataaaatcaatagggagttaggaaaatattcgttaaatttagctattaaaataaaggttagtatatttgtaatgctcttacctgttgatgattctaataaattaaaggaagaagtgattgaatggatagaaacgaaagaaccgctcatctaa

SEQ ID NO: 59249 - DNA, 2277 bp, Streptococcus mitis 18/56
atggatagaaacgaaagaaccgctcatctaattaaggaattgaatttatacaaacgataccctgaaagaagaggtatctttgtcaaggcaacttgtgactattacgacgctgttaaaatagatgaacttacaagtaatgatttaaatttcttgcgttatgtagcaaatgaagctggagttccacaatattatcagttacttgaaaataaatatcaagcaggaaaaactattaataaagagagcatgaatttattatctatgagttcttttattaatgaagcgtctttaattgtaaaagatgagatgctacataaatatcaaaaagaagtcactgacttgtttgaaattaatactgaaaatagatatattctttctgcgccaacttctttcggtaaaacttttacagtttatactattataaaaaagatgggttactctaatatattattagtatttcctacaattagtttattatcggaaaatttgttgaaactacaaaatgatgagttcttttctacatataaaattcatagcttaagtgaaataaaaaaagaagagtttggagaaaagaatatatttatctatactcctgagcgatacctctcatttttagataataatagtttaaattttgattttacattcgtagatgaaatatataaaattgacaatgattttattatcaataatgagactccagaagaaaatgagcgagatactgcatatagacttgccttagaatacgcttgtcgaaatagtcgggatttattacttgccggaccgtatattcaatttcaaaaaccagaaactaaagtaaactcatttaataattttacttcaataaatagatttaataaattagaatacaatgatattgaaattgtttcaaaaaatataacccatattaaaagaaataaatttgaaattggaaatatagtgcatagattaaaagctggtacgtcaactatgcaagataaagttgcacaatctattataaatttagatgagaataccctgatttattgcggaagaaagtatgatgtagaacgatttgcagattttttgttaagaaatcctgaatataattcacttttattaaaaaaagatgacaatgaattgtattctatatttttagaacacgtagaaaaaaattttggttcagattggattctgtttaaagcacttgaaaaaagaattggaatccatcattcaggaataccaaaatatatacaaaatgaaatgattaatttatttaataaaggtgatctactatgtcttttttctacaacaacaattactgaaggtgttaatacgactgcaaaaaatttaattattacttctgtcaaaaagggaataaagtcattgaaacaatttgatgctaaaaatattgctgggagagcaggcagatttaatgtatattatagtggtaatgtcattgatttaactgaagaatttgaagctgttattgaatcgcaacaggacaaaattgaacataaaaattatgataacaaccgaaacaaaacggatgtagatttagaagtaacacttgatgaatttttgacagatgatgataaaaatttcaaggctgaaattaataaagctaaagtaaaatcaggattaccagattttatttttcaatcttacaaaacaataggccctttggagaaaatctcaatctataatcgtataaaagagatgtcgttagtcgaatttcataaaattgatcagttgaagcaggtattaaatttgagcaacggcacagaaattcattgggaaggttttcaaacagtagttgatatttgtcataattttgtctctaattcagatttaaaacatataatggaaactagggtaggaaagaaacaattttctttaattgtgatacagttatcagagtttttacaaaaaggttttttagggatagttgattattatgtcaaagaacagaataaaaacaaagatatggcaattagaataactgcaaaattaatctacacaatatttaaatatcatctcgtaaagtatttaggagtgtttgatttgctatatagattccattattcaaaggtctacaaaagaaactttgatgatgttactggaattaaaattcttctgcaaaagctagagtataatgctctgactgatattgggcgcaaattgagtgattatggagttccttttgaattagtaaaatattatgatggaagtgtaactactaaaaattttgatttatatgaaagttatgtagatagaagaatacaaagattacttgaataa

SEQ ID NO: 59250 - DNA, 984 bp, Streptococcus mitis
atgagccgtgttttttggtataatgaaatcaatatttattgggttgggagtgggatattgagagataatcttaaaaatttaataaatagggcaatagtaaaatatactttccctattatatttactgacgaacaaggacaagtaactccaattaataagagtaatttaacaactgttggaaaggatgaatattgttttaaaggcaatgataatgacatttcaaaaataatttataatggaattgttgaattcgctgagaatgagtttaagattgattatgataatttggatagagaacaaacaaaggtaattaaaactaaattaaaatataataaaaatgattgccctcaaacaaaacttcaatacggattttatggggaagtacttttagatttatttttaagaaattattttcatacggatgttctaattgctagaggttatttttactcacctcttgaaaaatctgaaccaaaagggtttgatgcttttcatattattgataataaagatggattagagctctggtttggagaagcaaaatttcatcaaagttttacatctggaattaactctgtactttccaagataaattattctatttcagatgactatttggataatcatatgtttgcaattattaatgagaaagataatatctcccattcgcatccaatttttgaaggaataattaaaagatgggagaataatcctgaccttattcttatcgatgaattacaaaacaataatattgaattagtgtatcctgtttttattgcatatcaaaaacagcaaacctacgattacgaaaaatcaattgcatccagtgtagataaaatcaatagggagttaggaaaatattcgttaaatttagctattaaaataaaggttagtatatttgtaatgctcttacctgttgatgattctaataaattaaaggaagaagtgattgaatggatagaaacgaaagaaccgctcatctaa

SEQ ID NO: 59251 - DNA, 2277 bp, Streptococcus mitis
atggatagaaacgaaagaaccgctcatctaattaaggaattgaatttatacaaacgataccctgaaagaagaggtatctttgtcaaggcaacttgtgactattacgacgctgttaaaatagacgaacttacaagtagtgatttaaattttttgcgttatatagcaaatgaagctggagttccacaatattatcagttacttgaaaataaatatcaagcagggaaaactattaataaagagagcatgaatttattatctatgagttcttttattaatgaagcgtctttaattgtaaaagatgagatgctacataaatatcaaaaagaagtcactgacttgtttgaaattaatactgaaaatagatatattctttctgcgccaacttctttcggtaaaacttttacagtttatactattataaaaaagatgggttactctaatatattattagtatttcctacaattagtttattatcggaaaatttgttgaaactacaaaatgatgagttcttttctacatataaaattcatagcttaagtgaaataaaaaaagaagagtttggagaaaagaatatatttatctatactcctgagcgatacctctcatttttagataataatagtttaaattttgattttacattcgtagatgaaatatataaaattgacaatgattttattatcaataatgagactccagaagaaaatgagcgagatactgcatatagacttgccttagaatacgcttgtcgaaatagtcgggatttattacttgccggaccgtatattcaatttcaaaaaccagaaactagagtaaactcatttaataattttacttcaataaatagatttaataaattagaatacaatgatattgaaattgtttcaaaaaatataacccatattaaaagaaataaatttgaaattgggaatacagtgcatagattaaaagctggtacatcaactatgcaagataaagttgcgcaatctattataaatttagatgagaataccctgatttattgcggaagaaagtatgatgttgaacgatttgcaggttttttgttgagaaatcctgaatataattcacttttattaaaaaaagatgacaatgaattgtattctatatttttagaacacgtagaaaaaaattttggttcagattggattctgtttaaagcacttgaaaaaagaattggaatccatcattcaggaataccaaaatatatacaaaatgaaatgattaatttatttaataaaggtgaactactatgtcttttttctacaacaacaattactgaaggtgttaatacgactgcaaaaaatttaattattacttctgtcaaaaagggaataaaatcattgaaacagtttgatgctaaaaatattgctgggagagcaggcagatttaatgtacattatagtggtaatgtcattgatttaactgaagaatttgaagctgttattgaatcgcaacaggacaaaattgaacataaaaattatgataacaaccgaaacaaaacggatgtagatttagaagtgacacttgatgaatttttgacagatgatgataaaaatttcaaggctgaaattaataaagctaaagtaaaatcaggattaccagattttatttttcaatcttacaaaacaataggccctttggagaaaatctcaatctataatcgtataaaagagatgtcgttagtcgaatttcataaaattgatcagttgaagcaggtattaaatttgagcaacggcacagaaattcattgggaaggttttcaaacagtagttgatatttgtcataattttgtctctaattcagatttaaaacatataatggaaactagggtaggaaagaaacatttttctttaattgtgatacagttatcagagtttttacaaaaaggttttttagggatagttgattattatgtcaaagaacagaataaaaacaaagatatggcaattagaataactgcaaaattaatctacacaatatttaaatatcatctcgtaaagtatttaggagtgtttgatttgctatatagattccattattcaaaggtctacaaaagaaactttgatgatgttactggaattaaaattcttctgcaaaagctagagtataatgctctgactgatattgggcgcaaattgagtgattatggagttccttttgaattagtaaaatattatgatggaagtgtaactactaaaaattttgatttatatgaaagttatgtagatagaagaatacaaagattacttgaataa

SEQ ID NO: 59252 - DNA, 843 bp, Bacteroides ovatus ATCC 8483
atgagtagaccttttaaatctgatttagtaattcaagaatatatttgtgaacctacattgaaagcgtatcatattggattcgatcaaaagcaatttagactacagcctttggttgacatagtaagaaatgtaatacccgaattttctttaggttatcactgtggtacttctattccacttactgaaataatatctcgcttaaaagaagccgcacaaatagtatacctaacagacaaatatcaaaatagaggagaatttggtgaactaattcttcatttattgttgcgagattttcagaacacaattccattaatttcaaaaatatattttaaagattcacacaatgtacctgctcatggttttgatggtgtacaggtaactatcactggagacaagaaaaaattatggcttggtgaatctaaattatacaaaacaggagatgctggagtccgagatttggctgaagatataaaaaagcatgttaatgcagattatttacgaagagagtttagcttaatatctaagaaactcccagaaagcattccagagatagaatattggcgaaatcttatggatgagcatcaaaaactagatgtaattttttccaatatagtaattccaatggtgtgtacttataatagtgatctatttaaaaatcattgcgaagaaagtaataaatattttgaggatttcatatcggaatgtacagctctttgtaagacctttgataaattgaaagggaatgtttcaacagaagtcatattaatgcttctacctgtacaaaataaagatatgttaaatacagaattagataaacgattaaaattaatgcagcaaatatga

SEQ ID NO: 59253 - DNA, 2205 bp, Bacteroides ovatus ATCC 8483
atgacaccacagaaagttcaagatgctatcatatatataacagaaacaaaaaacattgattatgagcatagtttttcgctttcgcaattgtgttcatctttattacgttctagagaaaataataaatatggtagagatataatcattagaatactagatgcatggaagaaagtagataaaaacacctattccatttggaatgacttaactgccgctgcaggtttatatccttatgttgatccaaagcaactttctcaaagctcccttttatgttatgaatatcacaaatcccctcacttagataatatttatctacatgaagagcaacaacatttatctatagaattacagagtaaacgttctttggttgtaagtgcaccaacaagctttggaaagagtttacttattgaagaagttattgccagcaaactatatgaacagatagtaattattcaaccaactctagctttacttgatgaaacccgaaagaaacttttgaaatataaaaactggtacaagataattgtttctactagtcaagagccaactaaagaaaaaggaaatatttttttatttacaggagaacgtgtggttgaatataaccaatttcctgaaatagagttttttgtcatagatgagttctataaattaagtttagatagagatgatgatagagctatagctttgaatcaagcatttgccaaactattgaaatttactagtaaattctatctattaggacctatgattaaagatatacctttaaatttcaaaaataaatatgacttaatttggtatcctactgaatttgcaacagtagcagtcaatgagactaatgtcaatattcaaggtaaagctaaagagaaaaaagaattaaaaaagctagaactcttcaaattactttcatcaacaaaagaacaaacgattatttactgttcctctcccaataaggccactaatctagcattagactatgcttcatatttaaaaaatgaaaataaattaatgctagttccgtatgttcaaagaaataaagaaataggtgaatggattaaagacaatattaattccaagtggtctttaatagatgctttgaattgtggtataggttttcatcatggcgctttaccccgtcatttaggcggttcaattgttgattgttttaatgaaggatcaatcaggtggctattttgtacatcaacattgatagagggggtaaacacatctgctaaaaatgttattttatttgataaagataaaggaggacaacctatagacttttttgattataaaaatattgcaggtcgatctggtcgtatgaggaaacattatattggtaatgtaattagatttgaaaatcagcctgaacaaatggaactatttgttgatatacctatttttaatcaagaacaagccccattagaagttttaatttctatggatgaaaaagacattgaagagaaagcaaaaataagacttgcgaagtttgacaatatgtctcccgaaataaaagaagtaattagatccaacaacggtatttcaatagaaggtcaattagccattataaataaaattgagtctaacctccaatattataactcccagctaaattggacatctactcccaaaactttcgacaatttaagtgtagctatcgaattatgctgggatacgttaagtggtgcaggtgacaaaacatatattgagggtattggacgtttatctgctcggtggttggctagtttcgctttttcatatattaacatgaagtctataaatgctgttatttcatattatgtaaatgacaacttttggtctagcaaaattcctaataaacaaaagcggattgatgttgcttcttatgccattttacatattagccgacattggtttgattataaactacccaaatggttaaatgtcatctccaacttgcaggagtatgtatttaaaaaatcaaatatgaagtatggtaattatagctttattgcaagtaatcttgaaaatggttttttacatcccaatatcgcagcattaatggaatacggtattccaatatcagcaattagaaaattaacagaatatataaacataaatgaatcaccagaaaataatatactaaaactaaataagttagcaacaacgacattgacaaatcttggtctaatacaatatgaaattgacaaattgaggaactcttattag

SEQ ID NO: 59254 - DNA, 843 bp, Bacteroides ovatus; identical to SEQ ID NO: 59252

SEQ ID NO: 59255 - DNA, 2205 bp, Bacteroides ovatus; identical to SEQ ID NO: 59253

SEQ ID NO: 59256 - DNA, 609 bp, Alistipes putredinis DSM 17216
ttggagaccgttcttcttcataaatccgctttcctttacgttacctcgatttttcgcctgtcctcatttgtcttcgcaaacgccttattgacaggcattacgaagacatttgtccctttttattcgtcttttccagagatttatagtaacatcgccaatgagcgaatgtacgagcctgtcaagtccgtattcgatactatcagtactgataagataaagaaagaaaattccattattacaagtatttcggatttgcaatatgtcattcccgatcctgatacgagaaagtttgttcaaactattctcagacgtgaaacttctgttgacgaaataaggaaaagactacatgttcccatactattgcttcatgaatgcgataagacacagaaagcaactgagttgtcagagacttatttggaagagattaagcgataccatttggaccgagctgtcaactatttcaatattcagaacggtaagcaaaagaaacagaatgtccatggctacgataatattcaattccatttgattcttttccctgtccctaataaaaatgagattgtcaattggtttgtagaacgagctaaacaaattaaggaagatgcttga

SEQ ID NO: 59257 - DNA, 2103 bp, Alistipes putredinis DSM 17216
atgcttgattacgagatatactccgagtgcgatcagattaatgatttgattgagaagcgagacttggcgacggctcgctgtaaagtgatcaatttattggatagaatgcaacaagacgggaaccagtataatcctatggttaatcatttcatccgggttgtcggtctattcccatatatcgataaaaagacagcatcatgggacgatcaagtcgtggtcgaggcattcaaagcagatgttggcgataaaacacccgtaacactgcatagtgcccagtctcgtgttttgaagcgcctattgcttggcgagaatatcgctgtgagtgcccctacgagttttggcaaaagttttatcatcgacgctttcatttcaatcagaaaaccggacaatgtggttataatcgttccaacgatagccttagcggatgaaacacgccgcaggattgaacataagttttctcgtttctataagataattactaccacggatgccaccattacagaaagaaacatttttatctttccgcaagaacgcagctttgcttatttcgataagcttgaaaagattgacatgctcatcgtggatgagttctacaaggcaagttccatgttcgatgactccagaagttcctctctgctaagtgcgatgatagaattggggaaaatttctcgacaacggtattaccttgctcccaacattcataaaatttctgacaacgtctttaccgaaggaatgcagtttatgcgtttaacggactttaaaacagtcattacaaaggcggcccatctttataagaatttgcccaaaagcgcagacaaggagcaatttaaaaaaggacatcttctgaaaattttacaaaaaaagagagcaaaaacgctgatctatgccggcagttataagaatatcgatacaatctcgaatatccttgccaatgatttagcggtaaaaaagacctcacttcttcaggatttcaacgattggcttagagttaattatggacgtaaattttcgctatgcaagttaagtgaaagaggaattggggtacataatggcaagatgcacagatcattgagtcaaatacaggtcaaactttttgagcaagaagaaggtattgacacaatggtttccacatcttcgattattgaaggtgtaaatactcaagccgaacaagtagttgtttggtctaacaagaatggctcgtgcaagtttgactattttacttataggaacatcattggccgtgcaggtcgtatgttcaagtattttgtgggaaaggtgtatttgttggaagaacctcctgtacaagaaaatacaaccctcgagatcgattttccggaagaggttgttgaatctctggattcagcaaatccgggcgtagaaatcaacgaagagcagaatgaccgtattaaagagtatgagtcttttatgataaaagctttaggacgagaaaacttcaacaacatccgtaggctccctgctttcaaatcttgtgattccaaactcataaaaactttggtaagaaagttaaaggcagaccctgcctggccccaaaattatgctgcccttgcagcaactaatacatataattggcgtgaacctattaaagatgtcattaatctccttggtgataaaatgggaggattgataaaacttgctatatggaaaatgccaaagaattggtctcattctgtggcattcatctatgatgaattagaaaaggacggatataaaattagttacgaagacttattcgcagctgaacgttacctttcatacaacttatgcacaactttatctgtcattaatattttgaaaaaatctttcgatccggcagctcccgacatatctctctttataggacgggcatctaacgcattccttccaaaactcgtatatcaactagaagagtatgggttgccaagaatgatcagtcgcaagattcaagattctggtttaattaatttggaggatgatactaaggaaatttctgaaattatcatacaatttaaaacaataagtccaaagaacctcatttcaaatcttaaagatataatgccttttgacaaatttattattcaatatttttatgaaggtatcagttaa

SEQ ID NO: 59258 - DNA, 840 bp, Porphyromonas endodontalis ATCC 35406
atgaagcctcccttcttcaatattataattcataaagacgacactttccctgatttacatggattgtgcgcaggatttgaaagtcgtcagtggagaaaagaccagttggtaaattatctttttgaatatttaccagaatttgctttgacatattctgaattaggcaaccttacaagcgagaacatggttgctaaaatgcgacaagtagccgcaagtatctatcaatcagaaaaattcaaaaatagaggtgaattcggagaattgttattacacgctataatccgagaaatgtatgatacgattcctgctatcagtaagatatattacaaagatggtccaaatgaaacggtaaaaggattcgatgcagtacatgtgatagttacagataaagcattagaactgtggttaggtgaggttaagttctacaataacatatccaatgccatatctgatgtgattgaagaattaaatcaacatataaagacaaggtatgtaagaaatgaatttattgccattacaaataagatagacactaaatggcctcatgcaaacatattaaaaactttacttcatcccaacacctcattagatgatgtattctcaaatacatgtattccagtactgctaacatatgattcttccgtacttacaagatatgataataagtgcgatgaatatattcaggaaatatccgaagagtttcagagattccataaaaaattctgtgataagttgggtgaattccctttgacgatacatctatttttgttcccgctaaatacgaaagcggaactaataaactcccttgagtctaaacttaaaatctggcaaagcttatga

SEQ ID NO: 59259 - DNA, 2106 bp, Porphyromonas endodontalis ATCC 35406
ttgcgaaatatattaagaagaaagtttcctgctaatacagatagatttcaaatcataaaagaggtcgcaattctcattgttacagaagaatctgtagggcaggagtttgttcttcgattattgtcaaggattgaggattttcaagggatggagactatgattcatagtttggttcgtcaggtaggactttttccctatctggaagaagaaaatttatctttaaaagatactatagcctatgaagtacatcgtccctctggattcaaagaaaacattgtttttcatcatgcacaagcagaagtctattacactcttttaagaggggaaaatgttgttctaagtgctcctacaagttttgggaaaagccttattattgattccatcatagcctcacaacagcattcaaatatcttcattatagttccaacaatcgcattgattgatgaaacccgaaaacgattatctaaatttaaagactcatataaaataatcactcatccaagccagtctttttctcaacgcaatatttttattttaacgcaggaaagggcaatagaaataatccccgatgtaaatgtagacttctttgtaatagatgagttctacaagttaagtcctcaaaaaactgatgaggaaagatgccacgttttaaatcaagtgttctatatgttggtaaagaaagacgcccaattctatcttttaggacccaatatagaacaagtgacaacctccttattggataacgttaaatttaaatttataaaaaccgattacaagactgtcgtctcagaacgccatcaggtaaatctgaaaaatggagaagactctattgaacggcttattgaactgagttcttctttggaagatccgactttaattttttgtcaatctccggcaagtgccaataaagtagccaaagcatttttcaatagcaataagtttgaaaggacagatgaaaataaggatttggctgattggttaagaagtaattatcattcccaatggattctaccagattgtttggaatatgggataggcatacatcacgggaaaattccacgagcaatagcccaaaaatgtatcaagctgtttaatgaggggaaaatcagataccttatttgtacatccactttaatagagggtgtaaatacaaaggcaaagaacgtaatcgtgtacgacaacaaaattgcaaaaacaaaaattgactattttacatttaataatatatgcggtcgctctggcagaatgttttctcatttcattggacatatttatctttttcacgaacctcctgtcgccgagttgcctttagtagatttcccgattttctcacaagctaatgatgttccagaaaaactactgattaatgttgatattgaagatttaaacgaatcctctaagcgtaaattaaacaagtattttgaacaagacgttttgtctcaagagacattaaggaaaaattcatatatagatttagacaagcagttggaattggcaagtttcattcaaagcaagctgaatagaattcacaacttaatgaaatgggagcaatatccaaccaatgaacagttaaaatcagcatgtaggttgatttggaattattttgtttcttcaaggaaacgaatatatggagtaagttctggagagcaattgcattttagacttaatcaatttagaggagcaaaaaacattaagaactttattgctacaattatagaagcagaaaatgcccaaactccagactctattaacaatgctatagagttggcttttgatattcagcgccattggataaattttcaatttcctcgttatctgatgagtttaggagatattgcaaatgatattttcagaaagaacaacctacctttgtgtgattactcctactttgccagtttggttgaatgttattttatgtctccttatgtaataccaatggatgagtatggcttgccgatacaaatatcaaataaggtcggagaaataactgaaatttcttcaaatatagacgatgcattggagcaactacgcagatttattccatctcaatacaaattttcaagtatagaacgggaatttattgaggactttaagatgtatatataa

SEQ ID NO: 59260 - DNA, 942 bp, Prevotella bivia DNF00188; identical to SEQ ID NO: 59032

SEQ ID NO: 59261 - DNA, 2124 bp, Prevotella bivia DNF00188; identical to SEQ ID NO: 59033

SEQ ID NO: 59262 - DNA, 942 bp, Prevotella bivia DNF00650; identical to SEQ ID NO: 59032

SEQ ID NO: 59263 - DNA, 684 bp, Prevotella bivia DNF00650
atgatgcagacgaatgatatatataatacatgtttagatataagtaatgttctaaatgctggtgatataagtaatgcaagatccaaagtaattacattacttcatgagattaatggtactaacaataattcatatatggaattagtcaaccatcttattcgtgaagtggggcttttaccgtatattgatacatatactgcatcttgggaagatcggtttgtatgtgaagtttttaaagttaatattggagaaagaaaaccttgtgtcttacatactgctcaatcacaggtattaaagaagttattagaagggaaaagcgttgcggtgagtgctcctacaagttttggtaaaagttttgttattgatgcatttattgcgattaaacaaccaattaatgttgtaatattagtacctacggttgctcttgcagatgaaacaagaagacgaatttgccgaaaattctctcatcaatataaaataattacaacaacagatgtagaacttgcggagaaaaacatattggtatttccgcaagaaagagcttttgcctatatagataaacttccttcaattgatattctaatcgttgatgagttttataaggcaagtacaaattttgatcttgaaagaagctccactttactcagttcaatggtagaactcggaaagaaagctaaacaaaga

SEQ ID NO: 59264 - DNA, 942 bp, Prevotella bivia DNF00320; identical to SEQ ID NO: 59032

SEQ ID NO: 59265 - DNA, 2124 bp, Prevotella bivia DNF00320; identical to SEQ ID NO: 59033

SEQ ID NO: 59266 - DNA, 942 bp, Prevotella corporis; identical to SEQ ID NO: 59032

SEQ ID NO: 59267 - DNA, 2124 bp, Prevotella corporis; identical to SEQ ID NO: 59033

SEQ ID NO: 59268 - DNA, 942 bp, Prevotella disiens FB035-09AN; identical to SEQ ID NO: 59032

SEQ ID NO: 59269 - DNA, 2124 bp, Prevotella disiens FB035-09AN; identical to SEQ ID NO: 59033

SEQ ID NO: 59270 - DNA, 888 bp, Prevotella veroralis F0319
atggcaatgcgagttagtcttaagaaattgatccaagattctatcgttgtgcaatatcatttaccttatgatgttgtagataagcatattccttgttcatgtatttcaacagaaaaggattattgcttacttcaaaatgggaccgatattgatgtagcaaacataatctataatggaatagttgattatgcttatagcgataatgaaatagatttaactcaacttgacaagctccaaataagggcactattaagcaaactaaaatttgatccaaatgcttcagaaagtattcagctggggtatggctttcagggagaagttatgcttcatcttcttctgagtcatttttttcatgctgaaaaggcacttgctagaggatatttatattctgctttagaaaatgctgagactaaaggttatgattcatatttgatgatagagaacaatgaaacaatatttcttctttttggagaagcaaaattttacttggatggatataaaaggtcattagactctatctttaataatattgacaaagctctttctgattcttactttaatcggaattttattgcaatggaaaatcactatgagcatatcgaaccgaaaagtagaattcgtgagattattgatcaatggcgaactgatccgttgataaatatggcagaagaagccaaacagcacaatatgaacctagtatatccgatgctagttatttttgatgataaaatgacagaatacgataatctcataatggatataatatcttatattcaaaccaaatataatgctgtacagcctacacttacaatcccatatacaatctttttttgttttttcatgtggataatagtcgtattattaagacacaagttttgcaatggataa

SEQ ID NO: 59271 - DNA, 2313 bp, Prevotella veroralis F0319
atggataaatcaaaagcagcagttgatgccgtaaagcttatcaaccaagccaaagagaatttaagtttgcagcctttaatgattaaggctgtttgttctttttttgactttatgaaaggtaaagagttatctcaagcagatagactcttcttgcattatctcgcgaatcgagcaggtctacctcagtactattatccgatgctaaatattggagaagacgttgatgaagaagtctctttgcagaccttttcaaattatatcaatgaaagcagtttgatagttggagaaggtattatgttgcatcgctaccagaaggaacttttagaaagattcaagagaggacagagaaatcgtatttttctgagtgcttcaacatctttcggaaaaacatttttgatttacgaaatcgtaaggaagatggagtatactaatgtcgcatttatttttcctaccctttctcttctttctgagaacttgtttaagattcatttattgcctgaatataaatgggtaaaggataactatgtgattcatacactcagtgataaagaggaaataagcggacggaatcttttcatttttaccccagaacgattcttgtcttttttggataagaacaaagaaattcaattggattttgtatttgtagatgagatatataagcttgataatggttttatcatagacgaggtggctcaagagaatgagcgagatgtggcttacaggatagctttgcacgaattgctaaagaatccacatatagattctttacttgcaggtccatatatagcacttccaaccgaagataaaaaagacacacaattttcatttaaaactttccttgactattatgattttgttgttgttaactacaatcactacgaaatagtgaataaggtggaagtctttgtcaaaacagcatcaaacattaagattgataatacgtttcacttgacatttacaaataagacaaagagtgatcgtgttgtccaacttgttacacaacttttgaatcgaggagaaaatgccatagtctattgcagtacaaaagcttcaacggaaaaatatgctaaatttttaattagtgagaataaatatatcaaagatattgattctgaaaaggtaattaggcttacaaatcatatagatagtttatttgtgaatgggaagggggcgcaatggattgtttcaaaagcattaaaaaaaggaattggcatacatcacggttcagttcccaagtatatacagcaggaaattatctcgctgtttaatcagaatattttaaagatcctaatatgtactactactattactgagggggtaaataccacagctaaaaacgtgatagtgctttctggaaaaaaaggaacgaaagatttaaaaaagtttgatgcacagaatatagaggggcgagctggtagatttatgcagcattatcaagggcgggtttttattctagataaaaaatttgcggatcgaatgaacgaagaggacgaattgttgcaacataaattttttgacaagaatattgataaaaaagatgtggacattgttctctcagattccaattatctcacaaccgagcaagaaaatagaaaaaagcagttagaggatatcaaagaaagtggaataatgcctaaagcatgttttgaggagtttagaacaatatcatatgatgacaagatttatttgtacaatacgattgctcgcttttcaacaacagatcatgaaaagataacagagttaataagacgttacgttggtcaaaggaagtcttatcttccaggccttgaacttatatgtcaaactatccgtccaattatcaaaaatgacaatttatgttattatgtagagaacggaaatgatcagcctggtaactgttatcttgttggtatgatttctgcatttatttctaaaggattttcaggctcggtaaattattatattaaaaaagaagaggacgtggataagggagttagaaaggctgctaattttgtttttaatatgctccgttaccaagtagtaaaatatttcggtttatttaatttgctctacaaacaatttgaatcaattcgcaagggtgtaaatgttgatgaagttaatggcattgaagcgttattactcaggcttgaatatagtgcagatacaagattaggcagacaggttagtgacattggtgcatcttttaatgtagtgaaatattatgatataaaagagaaaaatccagataatagcgagattgtaggagaatattataaccagctggatgactatgagaaatacaatattacaaaaataaatcagatattataa

SEQ ID NO: 59272 - DNA, 402 bp, Cronobacter sakazakii ES15
atggatgcagcacttaaaagtattgatgatttccatactaatgaaatgtataagcatgaatttggcatggcgacaaaacattataaatacgctaaggatgaagttagggaagctgtaaggaaactattcgtttctggcgagcccggttctgatgttcgtgttaatcatgcgtgtttaattggttttgattggaatggatttgacaagttagattatgcgtcttctatttctataaatgagcaatttattacagagttgactaacgcacttccgcaatggattagtctgttagatgaaaaattcagcaagtttaaccgtaaatatttaaggtttgatgttttctttattccatttccttcggtggttgattttaggaatgaatttaacaaggcattggattaa

SEQ ID NO: 59273 - DNA, 2532 bp, Cronobacter sakazakii ES15
atgttaaagataaatgaattgtactctaaacttgtcaaagttagcattgataacatatttggagtagtaggtgagttaaaagtaagcgttagtgatatttataagctattatcatatggctccatactgtctttgtcagagaatgaagttgacataaaaaaagcctacgatattgtcagtagagttttagaatcagacactcagtacgattcgaacataattgcagcttgtgatcttattttatctagaatcggaaattttccgggtagaggactattaagagataaatataataatggagagtctcctacgctgaatttatcactttcactggaacgtattggacgcgaaacagaaaatacatataatgatataactttaacaaacttccaatgcaagctgcttaaatcgctaagaaaaaataattatctcagtgtgtccgcaccaacgtctgctggaaaatcttttgttctttcattagctgttattgataaaattcaagcctatgaaaaagaatgcattgtttatgtagtcccaactcgtgcgttaattagtgaggtgtcaaataaatttcgttatgagtgtaaacaagcaggaataaataaagtcattataagaactgcaccagaaataatagagagtaatagtatagaacaaggcttgatttatgttctcacacaagaaagactagttagtttactttcgaattctcatggaaatagcaatttccatatagatacattacttatagacgaagcccatgaaatccaaaagggaaaaagaggcataatccttcaaaatgctgttgaattagctcttgaaaaatatccgcatatgcatgttatgttttccagtcctttgataagtaatcctgactattttttttcaattttcagatggcgcaaggatggtaagtcatttattgaaactatatcacctgttacacagaatgttttacttgttaatcaagtgaaaaataatactcaagctattaacgtaaagttaaacaatgaagataaatccattgatcttgggaattataatttagattttgtgttgcggggcaatcgtaaggttcagaaagcaaaacttgctgagtttatatctcgatccggtggtgctgtaattgtatttgaagatactccatctaatgcagaaggtgttgctatcaatatagcggaaagtattggtgatacatctttacaagatgattacgaagagtttgtgtcttcgattgaagaagaaatgcatgagcaatatactttgatcacatgcttacggtcgggagtggcttttcattatggaaatatgccatctataataagaaatgggattgaatacttctttaaacgtggcgatattaagtttattgtttgcactagtacattacttcagggggtgaatttacccgctaagcatcttattttagagaatccacacagtggtgatgaaccaatgtcaagggctgatttcttgaaccttgctggtagggctggccgtttgaaatatgagtttcatggcaatgtttggtgtgtgagaagtaatctttgggataacaggtcctttgaaggtgataatctccaaactataacttccgcgatgtccaaagttatggaggatggcggtagcatcatttcaaatgctattgataatgtattttccccaactgatgacaaggaattggcagacgttgcattcgcgcgtttttatcatgaagtgcaaagagatagttttcaattatcatacttctctgaattagagggggaggaggtcaatgaaattttggaatataattatgacaaagttcgacgaatgaaaataaccattcctgaagagctgttgaaattgaactcaggcacgcgacctgattacatacaacgactttatgaattcttcactcaacaggatgatttagatgattacattcttcatagcccttatcaacaaggagggaaagcaagagtagatcgcgccattgagattattattgatatattcgcttggccggttacattgcaatatgcaaagttaattagtgttatggctcatcattggatgacctctcactcccttaaatccatgattaactataagattaggagttcgcatgaactatcagatatgattaatcgtggtgaatcaattgggaagataagaagaaaaacatcctctcttattagggatgtgctcaatacacttgagaatcaggtaaggtataatttagtacggtatttaaagatatatagagaaactcttgtttacgttcttctttcaaaaggagaaaaaggtaaggctgagaaggttgagaatattagtgcctatctagagtttggctcctgcaatccaactgaattaagccttatgtccttaggcctttctcgaagcactgctttatttttaaaaaatagatttaatttcccgcgggattcctcccctgaagaattgattgaatttttattaacgaaagatttgaattctaaaaatatgccagaatttagacttagagaacttaaagatgtacttgggatttaa

SEQ ID NO: 59274 - DNA, 906 bp, Leptospira noguchii str. Cascata
atggatttaaaaactagcgtaccaaaaaactttttagatttgttctataacgagattgaatgtgtaattcctgatacccaatctcaattaaatcttagaattctcaaaattgagaataatcgattttgctataatgatttggttgataagttagctgaatgtgttgttcatttttctctttcaagaacctcattagaaaacttatcagcagaggggccgctttcgcggccatatcgtgaagccgttcggcgctttagagactatgcaagtaatgatggagaagcgggtgagttacttttatattgttttttagaagcgcacttaaatgcacctaaaattgtatcaaagttagaattgaaaacttcatcaaatgattatgtaaaaggatccgatggggtgcatgttctaaagttagctgataaagaatatcaattaatattcggcgaatctaaactgtatgccggtcttacagcaagtttgtccgaagcatttcaatctatttatgattttattaaccgtccaaaaaataatataaatcatgaaattggcctaataaatacccagctacttaaagaagcatatgatgaagatttgtataaattaataaaggaaattatcattcccaaagttagtgattctagcggaattaagaaggataatgcgttctctatctttgcaggatttaacatcgagctgtcggaaaatgaaaagaaaatggggaatcgtgaattcgaaattcaccttagggaacgaatacgacttgaggtagaaggaaaaaaagaaaacattaaaaacaagatagagcatcataaactttacggatatacattttatacttatatatttccatttattgatatagagaacacaagaaagaaaataattcaagatttaacgacgccatga

SEQ ID NO: 59275 - DNA, 2589 bp, Leptospira noguchii str. Cascata
atgataattgataagctaactgaagatatattccaagacaaatatttttctgacctatttaaaaaagcgtctcaaatgttggctcataatttattttatgatgataatatcgaaagatcaatgtcgcaaaaggaacttaccgatatacttcggtatgcagatatactttctaactctaataatcctcaagcaagaaataagtcctatcaaattattgctacgttaaatgagtattatagaaatgatccgaaatataggacaatcgcacacgcagtatttgctaaattaggtaattttcctggtattaactatctttccgtttctgatcagaatacctctgagttgccttttgatcgtgatattgaaaaggcaattaaagaaaaggtacaagaaattccgaattccgatgggttaatatttaccgatgttcaatttgatctttttacaaaaataagcgactcagactactttagtttttcaggaccaacgtcaatggggaagtcttttatcattaaatcaatgataaggcgaattatttcatcagataaaaagaataatataatcgtaatggttcctacacgggcattaattgcgcagttttcaaatgacttaagaaaagaatttagtagtgttttagaagaatatggttacaaaatcatgactacatcctttgtatcggatattattactgatgaaaatacagcgtatttatttatcttaacgcctgaacgcttgctgagttttctatcaaacaaaaagagtccgaaagttgcatatctttttgtcgacgaagctcataagcttgcttcgatagcagatatgcgaagtattacgtcatatacggcagtggagaaaactattaaagctaatagagaagttaaactgtttttttccgctccaaatgtctctaatccagaaatctttttaaaactttttaataaagaaaaatctaacacatttcataccgttgaatctccggtatctcaaaatcttttttttgtggatcttattaagagtgaagtaactcactatgctgggttagaaaaatatatttttgtacccaagttcttggattcaatcaaaaagggtgctgaattcattcgaagaataggctacggtgaaagtaatattatctactgcagcgcaaaaactaaaactattactaaagctatagagctttacgaaataatagagcaagatgataataaagaggatctatataaaagtaacgaaaaaatttcaaagcaaattaaaaattatattcacgaagaatattatttggcgaaattattgaaaaaaggtgttgcctatcatttcggaaatcttcctcaactaataagaaataaaattgaatttctctttaaagaaggaaaaatttcgtatttattctgcacttcaactttattggaaggagttaatatgccttcaaagaatatttttattcttaataacaaaaagggaagtgataaacttgaaaagatagatttttggaatctagcaggtcgagcaggaaggttgaaatatgaactttcaggtaatatattttgcttaagagaaacagagtcagaatggaaaacaacaaatctattagatgatagtgaaaaaattcaacttgagccgactatagaaaggcatatcaataaaaatttaaaagaaattgaaggaataattaaagatcaagacggccaaattggtataaaggctcttacggaaatattgaaatatattgcaaatgtgatttctatagatactttagaaatcacttccgattataaaagcaatataattaggaaattaattgaagaaaataaagatgaaatcatcgagctttctaaaaataagtataagaatattgaagttccaattaatatcttaaatgtaaatcaatcaatcaaagtagcaatacaggataaagcgtataaaaacttaaagtcttcttctaataaggaagacattaagttacctgcaagagttgattatgagcttgcaaaactttggttaaataaactttacgaattgtttgaatgggagacggaagaaaaaattttatttaaaaagactaaagattctgcgaaaaaaaggaatttattatcatattatgcgctacttatggtcaaatggataaatggggaaccgctaagtttaattatttcgcactcattgcaatattatcgagaaaatgctattcaagtctacgatgaaagcgggagaaaagaggtattcgataatagtccaaagcatattaatattgtaattggaaatataatagatgatattgaaaaagttttacgattttctctggaaaaatattttaatgattactatagtatattagtagaagttttgggggaagaggaggctggtccgaattgggcaatttttctggaatatggaactcagaaccctattattattgaacttcaaatagcaggtctttctcgtcattctgcaaattatctatataaaaatcatagcaattgtttaactatcgaaaagggtaaggtaacttctgttaataaggaaaagttaaagtcatcattggataatgaaagtattgaatatgaagagattagttcgttattcttttaa

SEQ ID NO: 59276 - DNA, 783 bp, Capnocytophaga canimorsus
gtgggaaatataaagaatatgcttaatcatcttactaatactgatttgctactaaagcatatatattggttctatgaagatttaaatatagaacctagaaaagaacattatggtctttcgataaattattctgatataaaagaaagaagagatgatttcttggcagagttacttaatactattgtgaattgggtttaccataaaagtaaacaagagaaattattcaatgatagattaaaagatacggattttggtaatgctatgagttttatagttaatcaagcgtatagtaagtttagaccaggacatcctcaaggacaatttggagagttattactgtttaatcttattcagaattactataaagcaatcccaattcttagaaaacaacgaattacaacatctcttggacacgaaagatttggagcagacgcgattcattataaaaatgaagaaaatataaatgtatttatactaggggaatctaaatgctataagagtgattatcagtttaataaagcttttaaagaatctatacaaagtattataaaaacatttaacgatttagacaaagaattagatttatatctatacgatgattttattgaacctgaattagaggaacttgtaaaaaaatacaaacaaggcaaactagaaaacattcgatatgaacttgtttgtttaattatttatagcgaaaataaagaagtgttagacaatagaggagaggaaattatcaaaagtaaaattaaaaagttattcaagatagatgtaactcaataa

SEQ ID NO: 59277 - DNA, 1296 bp, Capnocytophaga canimorsus
ttgtcttatctcgtattggattttgctccttctgcaattatggttgataaggattttgattttgaacaaaatcgatttagtcctatggatagttttatcaatcagttaagtacaataataaatcagttgaaatatgagatatttgtaaaagataaaatatttctacttactgattttcaaaaaaatatttgggataaatgcaatgaagctaaatttatagggatttctgctcctacctctgctggaaaatcatttattatattattaaaatcaatagaaaatatattgagggagggaggaaatattgtctacattgttcctacactaagcctaattacacaagttgttaatgattatcataaaatattaaaagagtttggattagataattatagtattttaacaagttgtaatgacagtgaaactatcaatatcatatatatattgactcccgaaagaatgatttcggcatatagagaaaatgaaaagccatttggaaatataagtacatttattgtggacgaaattcaaaacatagaaagaattgaaaacgaagatgatgagagagcaaagatactttttgatagccttattgaattgagttttagctacaatcctaaaaatattatttttagtggaccaagggttaatggattaaaaaaaatgggatttgagatatttgaagaaaaagattctgtggaagtaaagactgattcttcgcctgttgcaaatttcacatatagcatttctaaaaaaggaaagaaatatttttttaatcaatactcacaaatcaagaaaaactatcagacaattgagattaaaaacacagaatatattaaaataggaggaagtcaatatgatgatacttattttaaatacttaaacaacgttgtacaatatttaggcaatgaaacaaaaaatataatttttgcaccaacttcaaatactgctagaaaaattgctctaaagctaagtgaaaaaatagtattaaaaaatgatagtgctaaaattcatagtttgataaaatatatttccaacactattcataaaaattatgatcttaaccaagtacttcgaaaaagtataatttatcatcacggaaaaatgcctattcatataagaaatgttttggaatatgccgtacgagaaaaaatgattaataatattgtttgcacaacaactcttatgcaaggagtaaatataccagctcaaaatgtaattatgagaaatggaaatattaggcttaaaaaagaaaatggaattatgccaaaaattgacaaactacgaaatctctaa

SEQ ID NO: 59278 - DNA, 891 bp, Arcobacter butzleri L353
atgagagatacattaaaaaatttaatttcaaaaactttattttttgaatattcattaccaaatgaaaaagtaaaagacaaaataaaaataagtatgtattcagatgattgtttttcatattcttcagatagtgacttatctgaattgatatatcaatcaatattggattattcatataatgaatttgaaatcacagataaagatttatctattcttttatcaaaagccctatacaataaaataaaatataaagaatatcaagatgaattaacaaaaatcaaatatggtttttatggtgaagttttactttattcaatgttatatagtttttataatgcaaaaccgattatttcaagaggttatttttataatccacttgagaattcagaaacaaagggttatgactcatatcacttgattgaaaatgaagataaaattgaattatggtttggtgaagtaaaatttagagatacattagaaagtggtgcaaaaagtgctattgaaggtttagaaaaagcttttactgatacatatttatcaaataatattattgctatggataactataaaaataattttaatattcaaggtacaaaaattgagaaaatacttaatgaatgggatggtactccaattaatataattgaacaagtaaaaaaacataatatgattttagtttatcctattctacttattttccctgataattctactaattatgatgaaaaaattaaaagtgctattaataaaatcaacgaaaaattttctttgaaggaatatagtttatcagtaccctataaattattttttatattactgccagtaagtgaagttaaaaaaattaaaaaggaggttattgaatggatagagtcatcgaagcctcgaatttag

SEQ ID NO: 59279 - DNA, 2337 bp, Arcobacter butzleri L353
atggatagagtcatcgaagcctcgaatttagttaaacagttaaatgcttatagaaaaaaagaaatagaagattatgagtttataaaagtagtttgcacatattttgataaagtaaaagatttagattttctttctccttctgatttgaaatttttaaaatatatttcaaatgttgcaggaatacctcattattatgatttactattctcaaaatttaatcatagtgaaaattttttaaaatatgatttaaatacattttcttcattactttatgaaagtagtttacatgtagatgaagaaattaaaatacataaatatcaaaaaaaagttttagattcttttgaaaaaggaaagctaaatcattattttttatctgcaagtacttcttttggaaaaacatatttaatctatgaaattataaaaaaaatggaatataaaaatataattttagttttccctacaatagcacttttgtctgaaaattttgaaaaattaatgacaaatatagaatataaattttttagagataattttaaaatccatactcttagtgatgttgaagattttgaagatagaaatatatttatttatacaccagaaagatatttgtcatttatagataaaaataacgattttaatatagattttgtttttgtagatgaaatttataaaatcgataatgagtatttaacaaatgatgaaaaaaaagagaatgaaagagatacagcatatagagttgcattatataacttactttctttacaaagagatgctttattagtaggaccttatattaatttcccaaatccagaagataataatataaatcaatcttttaataagtttttaaaagcaaatgaatttaaaatacttgattttaataatattgaaattgtaaataaaagttttaaagaagtatattcatctaatattcataatgttgatgaagaattaacaattagtttagatggcttaaaaacaaataaacaaaaaatacctaaaatagttgcagaaattagaaaaataaatcaaaatatgattatttatacaaaaggtagtggaacagctgaaactatggcaaaaaatgttattgaatattcgaaatctaataaaaaacaaagtgaagaattaaaagagttaatagctcatttaaaaaaaacatttatctatagtgattggtctgtaataaaaggcttagaaaataacattgctattcatcatggacttgttcctaaatatgttcaaaaagaaataataaaattatttaatacaggagatattgatatcttaatttcaacaacaactataactgaaggtgtaaatacatcggcaaagaatttgatagttacaagtgcaaaaaaaggggataaacctttaaaaacttttgatgcaaaaaatattgcaggtagagcaggacgatttttgtatcattatagcggtagagtattaatttatgaaaaagaattttcaaaaataattaatggaaaagatgatgaaataaaacataaaaactacgatgaaaattcttctaaaaatgaaatagattattttattacagaaaatgaatatttagatattaaagatattgatagaaaaaatgaaattgaaattatgaggaaagaaagaggaatacctttagaaattattcaagcatataaagttatttcatatagtgataaaataaaaatttatgatgaaataattaaattattaaacaataaaaaagaatcatatttatctatgaaagcgtctattggaaaaatagctcataatttatacttagattatgatggattaacattaattttatctataatttatcctatagttaaaaatgataaattaaaattttttattgattttgaatctgaaataaaaaaagaaggaaaaaataaaggtaaaaaatattctatattaatttatatgttatctgcttatatagaaagtggacatattgggaatataaaatataataaagaaaagagaaaattgagaacagatgaagctattagagaagcttctcaatttatttataatactctaaaatatcagttagttaaatatttaggtgtatttaatattatgtataaatttattgaatccaaaagaactaacatagatataaataaaattgttggtattgataagttactaagaaagcttgaatataatgcaacttctgaattaggaaaacttacaagcgattatggagtacctagcaaaattatcgattattatgataatgaagaaaaacaagatgaaattaaaaaaagttttgattcatttgaattaaaaaaatttgaacaagttgaaaatataataaacaataaacaataa

SEQ ID NO: 59280 - DNA, 975 bp, Burkholderia pseudomallei
gtggaagccaacaacgcagtgaattcgagcatcgagaagtacttcaaacctctcatcggcaagcacattgtcgtgaatcgaatacgccagatatcgacgggcggtacgttagagccgtctgtctcggcgtatttcctgtatccagcgtttgagcgtggaaagccagcgatagatgcactcattgaggccttgaaactagagattccagctttttgcaccacaaagcaagagcgggcgagggcgttggcgaaggatagagcaggagggttggaaaccttcgagacgcaaatgttagtagacaaagcgcggcgactgttcatcaaagccacggcgggaaagagggactctggcgaaggcggggagctattgctgttcgcgttcatcgagcacttccttggggcgcccatcattctatcgaagatgaggttgaagacaaacacgcagatgccagtgcatggagctgatggtgttcacgcaaagtgggacagcgaaagcaaccagcttgttgtcatatttggcgaatctaaggtccatgcgtcaattcacggagcactcagggccgcagctgagtcagtcggctctttcgtcgcggatgtcgagggcaggaagacgcatgagcttctgttgacgactgaccacgtcgacctcgatggttttccggacgagtataaggaggaacttatacgctatctccatccattcgctacggaagagggcacgcgccgtcaagaaaggtttgccatcttgcttgcatatacgtccaaaggatatgcgacgttggacaagcttacagctgctgaagcggagagggcgttcctagacgattacaacagcaaactgtcgccggcactgcgcctcgcaaagaaacatcttgcacaggctggcgtggaacttgacacagtcgacctgttcattttgcctatgccgaatgtacaggaatttcgcgacaagttcgacgaggtgctgggtggctga

SEQ ID NO: 59281 - DNA, 1791 bp, Burkholderia pseudomallei
atgctgattgtcgatgaagctcagcaaatcgcggatggggccagaggaatgctcttgctggattgcctcgaagacgtcgcgtcaagaatgccgcagtccaggttactcttcatcacccctggtacgcagagcgcagctaccatcggtaggttgcttggcgttcacggcgtggtagacgttggaacgaatctgaggccggtgcggcagaatttgattttcgtgaatttcgaagaggcgaagcgtgacgagcacatggtgctgacgcttcagcggcccgaaggcgggcgcctcactatcgggaggttgctcgccggcccttcgagtactgaaatcggccgcttcatcgatgcgatacttcagctcggaaaagaggggcagagcctcgtttacgcttcttccaagcatcccgcagagagcatcgcaaacgagctggcaaacgctagtaagcatgagccgaacgcccgtttgctcgaattggctggattcattcggaaacacgtccacccggaatttactctggcaaactgtgtggaacgcggtgtagggtttcatttcggcaatatgccaacaaacctcacaaaggctatagaagagtatttcgtagaaggcctgctgcatacattggtttgcacgtcgaccctccttcagggagtcaaccttcctgctcgcaacattttcttgtacaagccggagaagggcaaccacacgccgatgaatccggacgacttttggaatttggccgggcgtgccgggcgactcaagaaggatactcacgggaacgtcttcttggttagctatgacacatggaagaataggccggcccacgaacctccgtcgacagaagttactgccgcgtttacaacagcactgactacagaacagaagattctcctgaagttcgcacagaacgctaatcaccggtccggcgtacgtcagacggcattcgccgaaagcgtgttttctcgtttggttactgacatcaagaccggtgcactggcagagacgattcggcgtgttgcgccaaacggtcttcacgctgatgctgtacagacgattgcggcggtagaaggacagttggataaggtgacccttcctccagaagtgctaaaacgccatgggatgatttcgccactacgtcagcagcaaatgtatgacgttcttcggttcgcggttcgtgcggggcaactcgaggagcacgttcctcttcatcctcagcacaaatacagcgaggtgaagacgcgcttcatgttcattctttctctaattcatacgaacctcgagggcatatcgaatcgtgctcaccgttactacagctggttcgctttgtcgtggatgagaggtcgttctttgtacgagatgattgattttcagcttaaaagggcacgagaaaaggcaaaagaggaagggtatgacgggcttgtgcctgcgggcgaaacgattaagagtgtgatgaagcaaatcgaggagcagttgaggttcaaatatgtgaaattcgttgcttgctatatcgacctacttcgcttggccgcattaacggagaagggtttggatttgcaagacatacctcctattccgcttttcttggagctcggggcgtgctcgggcacgatgattgggtgcatggacttgggaatgtcaagaattgcggcaagagaggtgacggacgttttagatggcagagacctgaactctgtaattgtcaagaaaagactgaagtcgttatcgcccgagcgatttagacggttgtcgccgttagttaggcgagagttgcagaggctcgcgctgatttaa

SEQ ID NO: 59282 - DNA, 1038 bp, Salmonella enterica subsp. enterica serovar Newport str. SL254; identical to SEQ ID NO: 58678

SEQ ID NO: 59283 - DNA, 2550 bp, Salmonella enterica subsp. enterica serovar Newport str. SL254; identical to SEQ ID NO: 58679

SEQ ID NO: 59284 - DNA, 1038 bp, Salmonella enterica; identical to SEQ ID NO: 58678
  subsp. enterica serovar Newport str. CVM 33953

SEQ ID NO: 59285 - DNA, 2550 bp, Salmonella enterica; identical to SEQ ID NO: 58679
  subsp. enterica serovar Newport str. CVM 33953

SEQ ID NO: 59286 - DNA, 1038 bp, Salmonella enterica; identical to SEQ ID NO: 58678
  subsp. enterica serovar Newport str. CVM 21550

SEQ ID NO: 59287 - DNA, 2550 bp, Salmonella enterica; identical to SEQ ID NO: 58679
  subsp. enterica serovar Newport str. CVM 21550

SEQ ID NO: 59288 - DNA, 1038 bp, Salmonella enterica; identical to SEQ ID NO: 58678
  subsp. enterica serovar Newport str. CVM 22513

SEQ ID NO: 59289 - DNA, 2550 bp, Salmonella enterica; identical to SEQ ID NO: 58679
  subsp. enterica serovar Newport str. CVM 22513

SEQ ID NO: 59290 - DNA, 1038 bp, Salmonella enterica; identical to SEQ ID NO: 58678
  subsp. enterica serovar Newport str. CVM 21538

SEQ ID NO: 59291 - DNA, 2550 bp, Salmonella enterica; identical to SEQ ID NO: 58679
  subsp. enterica serovar Newport str. CVM 21538

SEQ ID NO: 59292 - DNA, 1038 bp, Salmonella enterica; identical to SEQ ID NO: 58678
  subsp. enterica serovar Newport str. CVM 22425

SEQ ID NO: 59293 - DNA, 2550 bp, Salmonella enterica; identical to SEQ ID NO: 58679
  subsp. enterica serovar Newport str. CVM 22425

SEQ ID NO: 59294 - DNA, 1038 bp, Salmonella enterica; identical to SEQ ID NO: 58678
  subsp. enterica serovar Newport str. CVM N18486

SEQ ID NO: 59295 - DNA, 2550 bp, Salmonella enterica; identical to SEQ ID NO: 58679
  subsp. enterica serovar Newport str. CVM N18486

SEQ ID NO: 59296 - DNA, 1038 bp, Salmonella enterica; identical to SEQ ID NO: 58678
  subsp. enterica serovar Newport str. CVM N1543

SEQ ID NO: 59297 - DNA, 2550 bp, Salmonella enterica; identical to SEQ ID NO: 58679
  subsp. enterica serovar Newport str. CVM N1543

SEQ ID NO: 59298 - DNA, 1038 bp, Salmonella enterica; identical to SEQ ID NO: 58678
  subsp. enterica serovar Newport str. CVM 22462

SEQ ID NO: 59299 - DNA, 2550 bp, Salmonella enterica; identical to SEQ ID NO: 58679
  subsp. enterica serovar Newport str. CVM 22462

SEQ ID NO: 59300 - DNA, 945 bp, Salmonella enterica subsp. enterica serovar Newport str. JS09102; identical to SEQ ID NO: 58706

SEQ ID NO: 59301 - DNA, 2580 bp, Salmonella enterica subsp. enterica serovar Newport str. JS09102; identical to SEQ ID NO: 58707

SEQ ID NO: 59302 - DNA, 945 bp, Salmonella enterica subsp. enterica serovar Agona str. 64.H.00; identical to SEQ ID NO: 58706

SEQ ID NO: 59303 - DNA, 2580 bp, Salmonella enterica subsp. enterica serovar Agona str. 64.H.00
atgagtatgaaagaactacctaactggttagtccacaataaaggttttataaaaaaaatagaaaaattaactatcgcatctgtagttgaccaatttccttcggttaaggcgtctcatgaaaaaaatatttctgattcggatattagttatctattaacttgtggaagtatcttgtcacaatcaaatgatgaactctgccaagacgctgccttgaggatttctcaatattgtttagttaactcttttagtgcgcagcggaaagacagtgccgcattgattttagatgctttggcaaataatgcgacagtagcattggcaatagaaaaaggttttcttagtgaggggtttgagaaaagactacctatagctggtcagcttgaaacaatgaagaggaaaattgaaaacacaatagaaattgggaatgataaatttatttatgcaaataaatttcaatctgaattttgggatagtgctcaacaaagcgaatggataagcatctcagctccaacatcagttggtaagtcttttattttagagtcttgggtagaggactatatctacaagagagaaaaaagtttaattatttatttggtgcctacgagagcattaataagtgaagtgtttgaatctattttgacacggcttgacccgaatagaactggtgtaattaatatacaaacattaccactcagaagtgcttatgataactcaaggacgaatgtttttatattcactcaagaaaggcttaacatattttataattctttaaatgaaaagcctgtagtggatcttttaataatagatgaggctcataaaattggtgattcactcagaggaatattcttacagtatgtgttggaaatgacatgtgctaggaataggaatattaaggttatttttgctagcccttttacttctaatcctgaactgttattgttagatgccccctataaagggaaaacaagtgttataaaaagtagctatgttactgttaaccaaaatttgatttgggttgagcaacgtccaaatactcctaaaaaatggcggatgtactttttttttaggggagaacgaaaatttattggggattttgaactagaaaatacgccctcttcagacagtaaacgattgtcttttattgcactgacgctgggaagacatgtatctggcaatgtggtttatgtaaacggtgctgctgatgcggagaaaacagctaaacaaattgcagatggtttggagcaatatactgaggatgaagatgttctaaatttaattgagttaagcgagaaagttattcatgaacgatttgctctcaatgttacattgaggaaaagagttgcatttcattatgggaatatgccattaataataaaaactgagatcgagagattatttagcaaaggaaaaataaaatatttgatttgtacttccactctagtagaaggtgtaaatttggcctgtaaaaatatttttattcgtgggcctaagaaaggtagtggtaaacctatgcaagaggatgatttttggaatttagctggtagagctgggcgatggggtaaagaatttcaagggaatgtgatttgtgttgatactaataatgaaagaatttggaatggtacgcctccagttagtaagaaaaacattaagataattcgtgcaacagactcattgcatgatgagattgattctatttatgaatacattgattcaccttatcattatggaatgacacgagcaaatcctagattacaggggttgtttagttatttatgtatatcatattatcttcatgatgggctgatatttaatccctactttgaaaagtataatttagaaaacttagatgaattggatgctaaaattactaatgtattagatttgttgagttttcctcttgaagtggtagctcgtaatccgggtattagcccaatattaatgcaaaaactgtgggacaggttttgtgattgcgatagagaaaatttagaaaaactactcttagctgatccgtcaagcgatgatgctttatcttcatatgttgcagcctttagacgcatatctgatacgatgagtattgaattaggatataattcgaaaggcacatttgttttggctttgttggtaattaagtggatgagagggtacccattagcaagattgatatcagaaagaatagactattataaaaataaaaataaagaatataaagagccttctgtaataagaagtgttatggaggatgttgagagggttgctaggtatcaagctccgaaactactttcttgctataatgatttgttaagatatttttatatttctgaaggtcgtgccgaccttgttgaatacattgatgatataggggtttatttagaactgggtgtaagcataaaaacgcaaatatcactgattagcctaggcttttcacgaacttcagcggttatgatatctgaatatattacaagcgataatttagatgagttatcttgtatgcaatggattaatgaaaatagcagtttacttgatgatttacctgcattagtaaaaatggaaatttactcaattgttaatggaattgaactgtaa

SEQ ID NO: 59304 - DNA, 1038 bp, Salmonella enterica; identical to SEQ ID NO: 58678
  subsp. enterica serovar Newport str. USMARC-S3124.1

SEQ ID NO: 59305 - DNA, 2550 bp, Salmonella enterica; identical to SEQ ID NO: 58679
  subsp. enterica serovar Newport str. USMARC-S3124.1

SEQ ID NO: 59306 - DNA, 1038 bp, Salmonella enterica; identical to SEQ ID NO: 58678
  subsp. enterica serovar Newport str. WA_14885

SEQ ID NO: 59307 - DNA, 2211 bp, Salmonella enterica
  subsp. enterica serovar Newport str. WA_14885
gtgaacactttagctaatgaagtcatcaaccaaataaaaagtcgtttagaatttaaaaatgatcttggctttttatttgcacactcttttttgcagaagcatacacaaacttctttctctgcacttcaaggcaaaatagaaagtgacagtgtcgttatatacaaaaggttaattgagtctgcatacttattttcccaatccgagtcagacgaggataaaaacttagctcaaagcattgcatatcatctaaatataattacaagtgataactatttaaaacaattatctgagaatttattaagggcacttggtaacttccctggagcaagttatttacaagaaaaaaatggatttataccagaaaccttttatgcttatttgaaaagatctttcattgaaaatgaaaataaagtaaaaatagccaacaaagagataatattaacgaactttcaaaagaaagtatgggaatcattacattcaaatgtcccacaagctatatctgctccaacctcagctggtaaatcgtttttagtcgtagagatgcttgccaataggataattagcggggaattaaactctgctatttatatagcgccaactcgagccttagtaaatgaaataacacaaaaatttattaacaagactttaccatatcaaaatgaagttagagtaacatccatacctacaattaacgatgaatattataaacagatatttgttttaacacaggaaaggctgcaggtccttcttgataattttaaaaataaaatagacatagtagttattgatgaggcccaatcaatttctgacgaaattagggggatgatattacaggattgcctagacaaaataagcatacaaaacccagatgcaaaatatgtttttcttgcgcctggtgccgaaggcttcaatgatttagctgatattattgggattgatacaatccacgtagaaaaaaccaatttatctccagtggtccaaaacaaaataattattaaagttgatcctgcgaaagaaaataacttacaactatcattattagataactcaaatatattatctataggtgaattaacttcaacaagaggatttgctaatgaaaatactagattagctgctgtagctttagaattaggaaaagatgagggttctcttgtttacggaaccggagctgctaatgcagaagacgttgctaagcaaatagcatctgggttgcctcttctagaaaatgatagcgatttgaaagaactttcaaagtttataaaaaaacatgtccataaggattactctcttgcaaatctggtattaagaggggtggggtatcattatggtaaaatgcctagcttattaagagaaactttagaaaaaaactttacaaataacaagcttaagtttttagtgtgtactacaactctattccaaggggttaatcttccagcaaaaaatgtttttattgatacacctactcgagggaacagaggagaagcattagatccagcatcgctttggaatttcgcagggcgggcaggtagactaggttatgctttctcggggaatgtatatcttattgattatgatgattgggaaacaaaacctttagattctaaaatagatttcaaaattacatcatcttttaagaaagtaatcaatgaagattttgacacagtaatatcccgtttagataaaaacaatcatttaggagtaagccaatatagtaatgttgatgcagcggcgggtcttttaatttccagagcagcaaaaggcgatttacacaattttcttgagagatcttttcgaacgattcctgataaatctaagcttgaaattattgaagatgctacatatagctcactagaatctcttaatatcccccataatatattgactttaaactggactgtcgatccatttgggcaggaaagattatacaatagatttattcagaagataaaagatggtaagattgacgaacttataccacgacatccttcaggcaatgtttacactaattacgttggtgtttttagcagaataaataaatacattctcaatcataatacatctaagttttctaactacctcacagccatggcattaaattggatgagaggaaaatcccttccagagatcatatctctttcgatagcaaagaaaaagaaaaaattctacccgaccagtgaatgtagaccgagctgtacgagaggtttttga

SEQ ID NO: 59308 - DNA, 1038 bp, Salmonella enterica; identical to SEQ ID NO: 58678
  subsp. enterica serovar Newport str. WA_14881

SEQ ID NO: 59309 - DNA, 2550 bp, Salmonella enterica; identical to SEQ ID NO: 58679
  subsp. enterica serovar Newport str. WA_14881

SEQ ID NO: 59310 - DNA, 1038 bp, Salmonella enterica; identical to SEQ ID NO: 58678
  subsp. enterica serovar Newport str. WA_14882

SEQ ID NO: 59311 - DNA, 2550 bp, Salmonella enterica; identical to SEQ ID NO: 58679
  subsp. enterica serovar Newport str. WA_14882

SEQ ID NO: 59312 - DNA, 1038 bp, Salmonella enterica; identical to SEQ ID NO: 58678
  subsp. enterica serovar Newport str. RI_10P078

SEQ ID NO: 59313 - DNA, 2550 bp, Salmonella enterica; identical to SEQ ID NO: 58679
  subsp. enterica serovar Newport str. RI_10P078

SEQ ID NO: 59314 - DNA, 1038 bp, Salmonella enterica; identical to SEQ ID NO: 58678
  subsp. enterica serovar Newport str. RI_10P069

SEQ ID NO: 59315 - DNA, 2550 bp, Salmonella enterica; identical to SEQ ID NO: 58679
  subsp. enterica serovar Newport str. RI_10P069

SEQ ID NO: 59316 - DNA, 1038 bp, Salmonella enterica; identical to SEQ ID NO: 58678
  subsp. enterica serovar Newport str. RI_10P079

SEQ ID NO: 59317 - DNA, 2550 bp, Salmonella enterica; identical to SEQ ID NO: 58679
  subsp. enterica serovar Newport str. RI_10P079

SEQ ID NO: 59318 - DNA, 1038 bp, Salmonella enterica; identical to SEQ ID NO: 58678
  subsp. enterica serovar Newport str. RI_10P068

SEQ ID NO: 59319 - DNA, 2550 bp, Salmonella enterica; identical to SEQ ID NO: 58679
  subsp. enterica serovar Newport str. RI_10P068

SEQ ID NO: 59320 - DNA, 1038 bp, Salmonella enterica; identical to SEQ ID NO: 58678
  subsp. enterica serovar Newport str. VA_R100512570

SEQ ID NO: 59321 - DNA, 2550 bp, Salmonella enterica; identical to SEQ ID NO: 58679
  subsp. enterica serovar Newport str. VA_R100512570

SEQ ID NO: 59322 - DNA, 1038 bp, Salmonella enterica; identical to SEQ ID NO: 58678
  subsp. enterica serovar Newport str. VA_R100512572

SEQ ID NO: 59323 - DNA, 2550 bp, Salmonella enterica; identical to SEQ ID NO: 58679
  subsp. enterica serovar Newport str. VA_R100512572

SEQ ID NO: 59324 - DNA, 945 bp, Salmonella enterica
  subsp. enterica serovar Senftenberg str. ATCC 8400
atggataatcttgataaactgatgaagatagattggaaaaaattggtgatcactgaccattcttggattcagagccaattagttgagagagcgccatcagtagagagaaaaataacctctcgattattcaccataccattcagtggcgtaatacaagaagccaattcattcattgaatcattagctgactcaatagaacattatgtttttgataaaacggcgattgatattatgcgacaaaagggacaaataccatttagaaaagcggctcaatttttcggtgataccaaccccataaaagatgggaaatatggtgaattgcttctttatattctttcggaagctatcttaaacacccctatggtttctcataaaataacaactctcactaatttaaatgaccaagttaaaggtggtgatggtgttttttttggtaagtacagagataatatatccattcttattggcgaatcaaaaatatataaaaacttcagcggtgctttagatagtgcatttgattctttagaccgtttctcaaaaaattactcaagcggagctctttcccatgaattgtttatcgcaagaaaaaacataagtaataatttcgactttgaaacaatggaattaatctaccaagctttcacccctggctctgaaatatattcagaatgtatcaaaactcaccctgtattattaatatttgaagatagcgatataaaggaaatagagaacaacgctttaacaaaatcagaggctgaaaatttatttgaaaaatggttatctaacaaaaaagaagaaataaaaattgcgatcaaggataaactaactaagtatccggatgttaagccatgtttcttagatttctttcttattcctatgagtgatgtcggtaattttaagaaatcattatatcgttctatccatggcattgattataagccgtaa

SEQ ID NO: 59325 - DNA, 2628 bp, Salmonella enterica
  subsp. enterica serovar Senftenberg str. ATCC 8400
atgagtagcgggattgcagcagaggcattagatcacattgatttcaagcgtgtttttgatgcgttgattaggaatttattcttaaaaaatagagacagtgacactgatgttactatagatatagaaagcattagaagagcaacatggctggcctcattaggttctttaggagatgaaagtcaaaaaagtattgcaaatgcatttggtagcctcctctatttatatgacccgagcaacgagctatatttgaaaacatgttatatcctgcaatctcgctcaggtaatcttgtatcatcaaagcacttaaatggtttgtataaagaaaatcaaaaattgcataattttggtacaactcttgactttgagcttgcaactcatagatttgaattaggtaaagattttgatggtaaaactatatttttcactcattatcagaaatcattatgggagaagttggaatctggtgtaaacattgcggtttctgcaccaacctcttccggaaaatcgtttataattaaaaaatttatatttgatagaattcaaaaaaacaaatcaaaatttttcgtgtatgtcgttccctccaaagcattaatcaatcaggtaagcaatgaactttctaaagagttaaaagaaagcgctttagtgctaactacgtacagggaagtagaatgttttgataaaaatatagtttatgtgcttactccagaacgatgcatgagattactgcaagagcaaaaagattgttctcctttattagttttcttcgatgaaatacagaatattgaagatggtacacgaggaagcgtatatgagaatgtgatttatagaatgacaacaagctggaaggattcacaatttataatggctggcccttatatagagaatctccacctttccttgcgtgaggtaatagacatagatttacttgagcataaaacattagctacaccagtacttcaactcaagaccgtcctgacggtatttaaaaaatcacaaagtgttaagtataaaattatcacccccacgggaagcattgttcagggggattacgatataggcaaagctttatatagtaaactatcaaattcaagaggacaggcattaaaatacttaacctcagtatttcatgaagatgaacaaaatataattttttctcccaaaaaaaatatggcagagggatgggctctatccgtagcaaacgatgatcaagataatcataaggttattgacaatgaaaaaattaaaaatctttgttcatttttagaaagtgaaatccacccattatactcattagttagatgcattaaaaaaggagtggcttttcatcatggaggattattagatgtggccagactggaaatagaagatttattttcatctggtgtaattaaaaacctcgtttgcacttcaaccttgctacaaggggtgaatttacctgccgacagaattgttgttatctcacccaaaataggaaactacgaactctctcaatttgaatttttaaacctcataggtcgtgctggtcgcattaacacttctttgtatggtgagatattttgtatcgaacttagcgatgaggagtgggcagaagaacgcataaaaaatgaagataaaaaagaaattgtatcttctgttttaaataaattaaatggaaatattgaatcagttattgactatataggattgagtggtaaggaaatactcaacagcgatggtgattataaactctacccgttggttttatatttaagaagccaatatcttgtcgataaaaatcattactcgaaaattataaaaaactcaaagttaaataagaaacaaactgaagacttagaaaataaactagacattttttctaaaaaaatatctatccctaaaaatttattggcaaggaatccttttgttgatcccttactattaagtgagttctttgaactaataaaatctcagggagttggtgaatggatgatttcaaaatatcctggaggcaagagagaggctaaatcactggatgatgaattcaaaaacatgaactactacaatcaatataaaagcattatctctcgtatgaatgagatatttaatattgaacaagaggtgaattataaagatgatggaaaatctcggcgttatagatatttcgtaagcatcaacaaattagcctatgactctcataattggatgaaaggccataactataagttcttcattgataacatggttaaagataagttaacaaaaaaaggtttagaaataacaaataaaaatattgataaaataaccaattttgttacagctcacatcaacactaatttgaactttatattagttaaatatttatcactttggactgatgttgttggacatttgatgtcagaagaagagaaagaaaaaaacaaatttttcctgaacctaccttccatgctggaaatgggaagttatgatcctttagttcttgaaatcatgagttttggcattaatagatctacagcaattgaattaacaaaaaaacagagaataaaagagggtcaatcagttgaattatatttgagaaattacaatatagccaagttatcaagccttcataggaagtatttagaaaaagcaggatttggctcaattaaataa

SEQ ID NO: 59326 - DNA, 597 bp, Salmonella enterica
  subsp. enterica serovar Paratyphi B str. ATCC 51962
cttaaaacccctatggtttctcataaaataaaaactcttactaatttaaatgaccaagttaaaggtggtgatggtgttttttttggtaagtacagagataatatatccattcttattggcgaatcaaaaatatataaaaacttcagcggtgctttagatagtgcatttgattctttagaccgtttctcaaaaaattactcaagcggagctctttcccatgaattgtttattgcaagaaaaaacataagtaataatttcgactttgaaacaatggaattaatctaccaagctttcacccctggctctgaaatatattcagaatgtatcaaaactcaccctgtattattaatgtttgaagatagcgatataaaggaaatagagaacaacgctttaacaaaatcagaggctgaaaatttatttgaaaaatggttatataacaaaaaagaagaaataaaaattgcgatcaaggataaactaactaagtatccggatgttaagccatgtttcttagatttctttcttattcctatgagtgatgtcggtaattttaagaaatcattatatcgttctatccatggcattgattataagccgtaa

SEQ ID NO: 59327 - DNA, 2628 bp, Salmonella enterica
  subsp. enterica serovar Paratyphi B str. ATCC 51962
atgagtagcgggattgcagcagaggcattagatcacgttgatttcaagcgtgtttttgatgcgttgattaggaatttattcttaaaaaatagagacagtgacactgatgttactatagatatagaaagcattagaagagcaacatggctggcctcattaggttctttaggagatgaaagtcaaaaaagtattgcaaatgcatttggtagcctcctctatttatatgacccgagcaacgagctatatttgaaaacatgttatatcctgcaatctcgctcaggtaatcttgtatcatcaaagcacttaaatggtttgtataaagaaaatcaaaaattgcataattttggtacaactcttgactttgagcttgcaactcatagatttgaattaggtaaagattttgatggtaaaactatatttttcactcattatcagaaatcattatgggagaagttggaatctggtgtaaacattgcggtttctgcaccaacctcttccggaaaatcgtttataattaaaaaatttatatttgatagaattcaaaaaaacaaatcaaaatttttcgtgtatgtcgttccctccaaagcattaatcaatcaggtaagcaatgaactttctaaagagttaaaagaaagcgctttagtgctaactacgtacagggaattagaatgttttgataaaaatatagtttatgtgcttactccagaacgatgcatgagattactgcaagagcaaaaagattgttctcctttattagttttcttcgatgaaatacagaatattgaagatggtacacgaggaagcgtatatgagaatgtgatttatagaatgacaacaagctggaaggattcacaatttataatggctggcccttatatagagaatctccacctttccttgcgtgaggtaatagacatagatttacttgagcataaaacattagctacaccagtacttcaactcaagaccgtcctgacggtatttaaaaaatcacaaagtgttaagtataaaattatcacccccacgggaagcattgttcagggggattacgatataggcaaagctttatatagtaaactatcaaattcaagaggacaggcattaaaatacttaacctcagtatttcatgaagatgaacaaaatataattttttctcccaaaaaaaatatggcagagggatgggctctatccgtagcaaacgatgatcaagataatcataaggttattgacaatgaaaaaattaaaaatctttgttcatttttagaaagtgaaatccacccattatactcattagttagatgcattaaaaaaggagtggcttttcatcatggaggattattagatgtggccagactggaaatagaagatttattttcatctggtgtaattaaaaacctcgtttgcacttcaaccttgctacaaggggtgaatttacctgccgacagaattgttgttatctcacccaaaataggaaactacgaactctctcaatttgaatttttaaacctcataggtcgtgctggtcgcattaacacttctttgtatggtgagatattttgtatcgaacttagcgatgaggagtgggcagaagaacgcataaaaaatgaagataaaaaagaaattgtatcttctgttttaaataaattaaatggaaatattgaatcagttattgactatataggattgagtggcaaggaaatactcaacagcgatggtgattataaactctacccgttggttttatatttaagaagccaatatcttgtcgataaaaatcattactctaaaattataaaaaactcaaagttaaataagaaacaaactgaagacttagaaaataaactagacattttttctaaaaaaatatctatccctgaaaatttattggcaaggaatccttttgttgatcccttactattaagtgagttctttgaactaataaaatctcagggagttggtgaatggatgatttcaaaatatccaggaggcaagagagaggctaaatcactggatgatgaattcaaaaacatgaactactacaatcaatataaaagcattatctctcgtatgaatgagatatttaatattgaacaagaggtgaattataaagatgatggaaaatctcggcgttatagatatttcgtaagcatcaacaaattagcctatgactctcataattggatgaaaggccataactataagttcttcattgataacatggttaaagataagttaacaaaaaaaggtttagaaataacaaataaaaatattgataaaataaccaattttgttacagctcacatcaacactaatttgaactttatattagttaaatatttatcactttggactgatgttgttggacatttgatgtcagaagaagaaaaagaaaaaaacaaatttttcctgaacctaccttccatgctggaaatgggaagttatgatcctttagttcttgaaatcatgagttttggcattaatagatctacagcaattgaattaacaaaaaaacagagaataaaagaggggcaatcagttgaattatatttgagaaattacaatatagccaagttatcaagccttcataggaagtatttagaaaaagcaggatttggctcaattaaataa

SEQ ID NO: 59328 - DNA, 1038 bp, Salmonella enterica; identical to SEQ ID NO: 58678
  subsp. enterica serovar Newport str. VA_R100506907

SEQ ID NO: 59329 - DNA, 2550 bp, Salmonella enterica; identical to SEQ ID NO: 58679
  subsp. enterica serovar Newport str. VA_R100506907

SEQ ID NO: 59330 - DNA, 942 bp, Salmonella enterica
  subsp. enterica serovar Bareilly str. CFSAN000181
atggatgcactgcatgtcgcgcttgaaaatctgattagagatgatggtcaaacactaaatagttattttagtgaagttaaagttaattcattgattgaaaatacaaatgcaacttgtcattttcattgccttaatcttgatggcaatggacgtcctcgggtagacgcgttaatccaattcttgaacgataaagtagttgattatgctattccaaggaaaaaaatcaatgaggcagtgcaatattttaatgaaacacaatcaacagcgaaaataacaaaattagcaaatcaagcaaaaagattatttactaggcttgcaaatagtggcgaaggcggtgaatttatcctttttttatttgcagagcaattccttagatttccacaaattatttgcaaaatgagtctgaaaacgagttctcaaatgcattaccatggtgcagatggaatacatataggcgtagataaagataataaaaaattatgtttatactggggcgagtctaaactctattccaatctgagcaaaggtatttctgagtgtatggatagtatagctccattacttcaaagttctatgggaatagaaggcgctgagacacgtgatatgcagttgctggagtcgcacttaaatgttgatgatatagaactagaacaagcgttgaaaagattcttagatcctgatagcccggattttaataaattggaatacagaggaatatgcttagttgggtttgatcttaaagattatccacaagggcccagtccaattgatatcagtgaactagttgctttgattaatactaaagtcgggaaatggtcaactagtgtgcaaggtggtatagttaataaaaaacttgatcgctttgctatgcatgtttttattcttccttttccttcagtaaaagcatttagggctagtttaattaaagcattggagagttga

SEQ ID NO: 59331 - DNA, 2583 bp, Salmonella enterica
  subsp. enterica serovar Bareilly str. CFSAN000181
atgtcgttgcgagatttatctgggtggttgattaagaatcaaggattcttaagaaaatatcaggcattagtcgctaactcgataaaagatcaatttccagagttaaaatcagatgtaatcccacagattagttctgaggatgtcggctatcttttaacatgtgctagttctttggctttctcaagtgatgagaaatgccaagatgcagccttaaggattgcacaatattgcttattgaatgaaaaaagtgaagcaagaaaagatagtgctgcattaattcttgattcattatctaataatccagcaatacaacttgctgaaaatagggggtatcttaaccctgatttcgaagaaagattacccttaaaggctcagttagaactaactaaaagaaaaattctatatacaattgaaatagatgctgataagcatatttatgctaataggtttcaatcagagttttgggatgcggtacaagaaaactcatgggttagtgtctctgctcctacctctgtaggaaaatcatttatcctggaatcttgggtggagcagtttgtaaaaagaaataagaattgcttagttatttatatcgtaccaacaagggcattgatttcagaagtatattctgagttgcaaaaacgtttggatcctaatttaacaaatatagttaatattcagacactaccattgagtaatgtataccagagcgaaaaatctaatgtcttcatatttacacaggaaagattaaatttattctacaatcatttctcacaaattccaaagatagacgtcttagttgttgatgaagcacacaagatcggtgatggtggaagaggtgttattcttcaacatgtaattgaactgacttgtctaaataaccctgattcaaaagttatctttgcaagtcctttcaccttaaatcctgaaatattgctcagtgatgctccaatattaaaaaacaaaagaactataaaaagtgactatgttacagttaatcaaaatttaatatgggtagaacaaaaaccacgcaagaccaaagattggttgatgtattattttgcaaacggtgaaaaacgcgagttaggaaacttttctttagaaaatgcaccatctcctgaaagtaaaagattgccttttgtagctctttgtttaggtaagggggcttctggtaacgtagtttacgtaaatggagccgctgaagcagaatctacttccaagctaatatctgcaagtatagaaaatgagactgaggatgaagaaattttagctctcgttgagcttagtgagacaattatacataaaaatttcgcattaaatcgcactctaaaaaagagagtcgcttttcattatggcaacatgcctttaataataaagggcgagattgaacgattgtttagtaaaggtaagattgattttttaatttgtacctcaactttagttgagggcgtaaacatggcttgtaaaaatatttttataagaggccctaaaaagggtaattcaaccccgatgcgagaagaggatttttggaatcttgctggcagagctggtcgttggggaaaagaattccaaggtaatgtcatctgcatcgatagcgacaatgaaaaaatttggaatggagagcctccaaaaaccaaaaaaaatatatttataactcgcgccacggatgctatttcccatgacatggataagttggtttcctatattttttcagagcatcattttggtatgtctgagcggaatcctaatctccagagtctatttagttatttatgttcatcattttatttttataatggcttggataataatccttacatggaaaagtacaatataaaaaatatcgatgttttaaatgaagcaatatttgatgtttttgattctttaacttttccacacgaattggttgtgcggcatcctggtataagcccgcttttaatgcaaaacctttgggatagattttcgcgggatacaaacaaacctgtagagagattactgctttctgaacctggtagtaatgatgcgttagattcatatgtatccgcattctctagaattagtgatactctgagtaagaagctaggttataattcaaaaggagcttacgtacaggccttgctagtttccaagtggatgaaaggttatcccctaggaagattgatctcggatagaataagatataacaaaaagaaaaatattgttttcaaagaagcgactttaatacgaggggttatgaaggatgttgaagagatcgctcgctatcaagctccaaggcttttaggatgttataatgatttattaaaaagcttttatctttcgatagatcgcacagacttagcaaaagatgttgaagatatcggtgtttatttagaactgggtgtaagtttaaaaactcagatttcactaatagggcttggcttttcaagaactgctgctgtaatgatttcagagcttattcctaatgatagtttagatgaggaagaatgcattaattggattaaggacaataaagttgacatggaagaactgccacaattagttcaaaacgaaatacataatatatttcgtaacttttgggtacaatag

SEQ ID NO: 59332 - DNA, 894 bp, Salmonella enterica subsp. enterica serovar Liverpool
atgctgctgcccatacgagtcaacaagcgattcttgaatttatttaggacacttacattagacaaagcaccacggcaatctaccgtaaacttacatgttctaaacattgaaagtaacagttttgtttataataaattggttgaggaattaagagacttaatagtttgttacgtacattcaaatagaagaatagctgagtttgaaaaagattatccatcttttagtcccaaaccatatttagaagcaatacagaaatttcgcacttatacatcaaatgaaggtgagttaggtgagctactgttatacgcatttcttgaatcaggtttaaatgcacctaaattgttatccaaaatggagttaaagaccgatgcaaatgattatatcaaaggctccgatggtatacatttattagagatcgataataattatcaactaatttttggtgagtccaaaatgtactcggacttactggagggggctcgtgaagcatttgactctattgctgactttaaagccaacggattaggatttgaacgaggcttaatagatactcatgtaataaatgaaatggttactgaagaaggatacgaaacaataaaatccatactattaccttcaggaaatgatgggctaaaccttgatctatcttttggcattttcctaggatttgagttgcctgtcagtgatacacaattatctatgaaaaacaatgaatttcgggagtgggcatattcatttgtaaaaaataatgcgtctcgtgtaattgatacgatagaaaaaagaattataaagcataaactctttggtcacaactttcatatatacattgtccctttcacagacatagatatcactcgtaaaaaattaatccaagaaatgctaacaattggataa

SEQ ID NO: 59333 - DNA, 2589 bp, Salmonella enterica subsp. enterica serovar Liverpool
atgaacgaaaaagatgtagcaagaaaaattccattagcacagcgtctttcgatggacgcttatacaagtagctactttaaagagatctataattatatatcagttttatacgacaattttttgtttaataataaccacactcagaagcctgtatttgttgacacaacaaaaatagagaaagctttacgttttgctgatattctatctcattcacctgttgaaactcatcgaacaaaatcatttgaaatcataagtaaaatagctgcatttcattcagatgatccttattttaaaatgataggttcggcggtcataaatcgtttgggtatatttgcagcagataatttaatatcacagggagtacatttaccgttagaccgagaaatagaatcatccataaaaaaatcattccaaagaactagtatagatggattattttttacagacaaacaatataaactttatcaatccctaattacctcaaacactctaagctttgccggccctacgtcaatggggaaatcgttcgtcattaatgaatatataaaacatattgtttttggtaatgctaaaaaaaatatagtgctcatagtcccaactagagcattaattagccaaagtacattaaaattaaaaaatgaactaagagatgaaattgatggcaatcagtataagatagtaacaacatcttacatgctcagaggaggtattgatcatagtaaagggtatattttcgtattgactccagagagattggttagtttaattagttcatctcctgatataatcattgattatatttttgtcgatgaagcacaaaaacttactattaaaaatgatacacgaagtctcgtaacctattccgcgatcgaacaaacattaaatttaaattcaaacgcaaaactatttttctcatcaccaaatctatccaaccctgaagtatttaatgatttatttaatcgggaccatgctaaagtttatcgcagcattgaaggcgctacagctcagaacttgtactttattgacttattaaacaacaagtttagttatgttgataaaaataaattaattgatatagataatgttaatcagacttataaatctgctaatgatcttatctttcagattaacaaagggaaaagtaagattatttacactggaggtatcgataacacattatctcgaacaagggatttcctacgttatataaagaaattacaaagtaaaaagaaacctcaaaattttgatctagcatctcaggtccgagaatttgtgcataacggctacgaacttgctgaagctatagagtatggagtagcatttcatttcggaaacctgccacaagcaataagagatcttattgaacaccactttaaaataggtaatatagattacttgttttgcacatcaactcttcttgagggggtaaatttacccgcacgttcagtatttattttgacatccaaaaagggtactagatattttgaacctgtggatttttggaatctcgcaggcagagcaggaagactagccatagagttagctggtgatatattttgcgtaaaagatgaaagtggaacttggaatgataaagcggtaaaaaaattaatcctatccaataaaaatgaaattgaactgactcccagcttttatcttaatgattctaaaaggattaaagaactagaacaaataataaaaactggttctactgaagggattcaaaatagcgaatttctcagaacactaagtgatatggtaaggattgataccctacgaactgacaaagccaataatttaccacttatcaattatttcagaaataatggaaataacgatatattacattatgccttgaaaagcatagataacattaacatacctacacatattttattagcaaatagccatattgcaattaactcacaacatagtgcatttaatagcataagaaattattcaattgacgaactaaagttatcatggaatcctacaaatgatgaaataaaagaaaaattagctctcatattcaatatttatcaaatagataaatatagcaaaggattaaatcgtcttaattttaactcaatcccatattacgcagtcattttaactaagtggatgcatggtaatacattaagtgaaataatctctgacgcgattgtttattacatatcgaatagaaagaatatctatctttcagataagactcaagaaccatttgatcaaaacaatcctattcatataacaaaattagtaaatgatacaattaaagatatagaattaaaaataggttatcaactacaaaattatatttcacattattgccaacttctttcacttgtttttgaaaataaccctggagcaaattggtcacaattcatagagtttggctcgaatgatccgattgtatggcaactgcaatttatgggattttccagacattgtgcaatatttttaaagaaaaatttccctaaacaccttaaatatgatcaagaaaacaatcagttatacatattaaacaaagctgaaatcaagtcaaaggttaaacagaacaaattatattggcttgaaattcaggccctgctttaa

SEQ ID NO: 59334 - DNA, 894 bp, Salmonella enterica subsp. enterica serovar Liverpool; identical to SEQ ID NO: 59332

SEQ ID NO: 59335 - DNA, 2589 bp, Salmonella enterica subsp. enterica serovar Liverpool; identical to SEQ ID NO: 59333

SEQ ID NO: 59336 - DNA, 1038 bp, Salmonella enterica; identical to SEQ ID NO: 58678

SEQ ID NO: 59337 - DNA, 2550 bp, Salmonella enterica; identical to SEQ ID NO: 58679

SEQ ID NO: 59338 - DNA, 1038 bp, Salmonella enterica; identical to SEQ ID NO: 58678

SEQ ID NO: 59339 - DNA, 2550 bp, Salmonella enterica; identical to SEQ ID NO: 58679

SEQ ID NO: 59340 - DNA, 1038 bp, Salmonella enterica; identical to SEQ ID NO: 58678

SEQ ID NO: 59341 - DNA, 2550 bp, Salmonella enterica; identical to SEQ ID NO: 58679

SEQ ID NO: 59342 - DNA, 1038 bp, Salmonella enterica subsp. enterica serovar London; identical to SEQ ID NO: 58678

SEQ ID NO: 59343 - DNA, 2550 bp, Salmonella enterica subsp. enterica serovar London
gtgaacactttagctaatgaagtcatcaaccaaataaaaagtcgtttagaatttaaaaatgatcttggctttttatttgcacactcttttttgcagaagcatacacaaacttctttctctgcacttcaaggcaaaatagaaagtgacagtgtcgttatatacaaaaggttaattgagtctgcatacttattttcccaatccgagtcagacgaggataaaaacttagctcaaagcattgcatatcatctaaatataattacaagtgataactatttaaaacaattatctgagaatttattaagggcacttggtaacttccctggagcaagttatttacaagaaaaaaatggatttataccagaaaccttttatgcttatttgaaaagatctttcattgaaaatgaaaataaagtaaaaatagccaacaaagagataatattaacgaactttcaaaagaaagtatgggaatcattacattcaaatgtcccacaagctatatctgctccaacctcagctggtaaatcgtttttagtcgtagagatgcttgccaataggataattagcggggaattaaactctgctatttatatagcgccaactcgagccttagtaaatgaaataacacaaaaatttattaacaagactttaccatatcaaaatgaagttagagtaacatccatacctacaattaacgatgaatattataaacagatatttgttttaacacaggaaaggctgcaggtccttcttgataattttaaaaataaaatagacatagtagttattgatgaggcccaatcaatttctgacgaaattagggggatgatattacaggattgcctagacaaaataagcatacaaaacccagatgcaaaatatgtttttcttgcgcctggtgccgaaggcttcaatgatttagctgatattattgggattgatacaatccacgtagaaaaaaccaatttatctccagtggtccaaaacaaaataattattaaagttgatcctgcgaaagaaaataacttacaactatcattattagataactcaaatatattatctataggtgaattaacttcaacaagaggatttgctaatgaaaatactagattagctgctgtagctttagaattaggaaaagatgagggttctcttgtttacggaaccggagctgctaatgcagaagacgttgctaagcaaatagcatctgggttgcctcttctagaaaatgatagcgatttgaaagaactttcaaagtttataaaaaaacatgtccataaggattactctcttgcaaatctggtattaagaggggtggggtatcattatggtaaaatgcctagcttattaagagaaactttagaaaaaaactttacaaataacaagcttaagtttttagtgtgtactacaactctattccaaggggttaatcttccagcaaaaaatgtttttattgatacacctactcgagggaacagaggagaagcattagatccagcatcgctttggaatttcgcagggcgggcaggtagactaggttatgctttctcggggaatgtatatcttattgattatgatgattgggaaacaaaacctttagattctaaaatagatttcaaaattacatcatcttttaagaaagtaatcaatgaagattttgacacagtaatatcccgtttagataaaaacaatcatttaggagtaagccaatatagtaatgttgatgcagcggcgggtcttttaatttccagagcagcaaaaggcgatttacacaattttcttgagagatcttttcgaacgattcctgataaatctaagcttgaaattattgaagatgctacatatagctcactagaatctcttaatatcccccataatatattgactttaaactggactgtcgatccatttgggcaggaaagattatacaatagatttattcagaagataaaagatggtaagattgacgaacttataccacgacatccttcaggcaatgtttacactaattacgttggtgtttttagcagaataaataaatacattctcaatcataatacatctaagttttctaactacctcacagccatggcattaaattggatgagaggaaaatcccttccagagatcatatctctttcgatagcaaagaaaaaagaaaaaaattctacccgaccagtgaatgtagaccgagctgtacgagaggtttttgatttcgttgaggacaacctgcgattcaaatacgttcaacttggtaaggcatatattgatttattgcgacaagctttaattgtaaataatcaagctgaaaaagcggaagaaatatatgacttccctttatcacttgaattaggtgtttcctcaatcgctggacaagtttttattgaactggggctatcaagaatatcagcatcctatcttgaaaatataatcccaaactctaatcctacgataagcacggcaaaagagtggctaagaaacaatgattatgattcattaaatttgccactcaccatttattcagaattagaagataagggattgttataa

SEQ ID NO: 59344 - DNA, 1038 bp, Salmonella enterica subsp. enterica serovar Newport; identical to SEQ ID NO: 58678

SEQ ID NO: 59345 - DNA, 2550 bp, Salmonella enterica subsp. enterica serovar Newport; identical to SEQ ID NO: 58679

SEQ ID NO: 59346 - DNA, 921 bp, Tyzzerella nexilis DSM 1787
atgggtaaattgcaggaaagtgaaatcactaaaaggttaatgccaaataaggctctttttgctgatattcatgtgatatcgaaaaaatttgatattttgccagatggtaatgttcattatggtgcaagtatagcgtatcaagatttacaagaacttcgagaagattttttagtagatttaatggatacgatagttgattggatttatagtgcggataaatatgcggtgttgaaagaaaaggaaacgaaaaaaggaaaatctgaggcaacggcgcatgcttctgttcaacgaagggcaagagataagtttcgtaaaggttccggcaatactcttttggtacaagggcaatttggagaattattattgtttcattttatacaaaaatgtatgaaggcggttccattattaagaaaaatgaaaattactacatcatcacaacatgaaagatttggtgcggatgctatacattataaggttgagaacggaaaaaatataataattttgggtgaagcaaaaacgtactcgagcaaatataagtttaatgcagcatttgaagatgctttaaatagtattttaaatacctataaaacacacagagatgaattgaatctgtatgtgcatgaagattttctggatgaagaaatgaatgaaattgctgaggagtatttggataagagactgcaaaatgtagaaatccatttagtaagcataattgtgtatgatgaaacgaagaaaataaatttgacaaatgaaaacgatatcagaagacaaatagaagaaattattgaaatgagatatcgtgattttgataattcaaaaataccgataaaagaaaatataattctaaaaagaatgacatatatagtttttcctatatggaagttagatgaattaataaaagaatttcaagagcagttataa

SEQ ID NO: 59347 - DNA, 2541 bp, Tyzzerella nexilis DSM 1787
atggaacaaaaagttcaagaagtgttacagaagtggttggaaatagatttttattatattgcaaataaggcgggattcataaacaaatctctggcagtagagccccaattaattaatgatacagtaagatgtttggactatcttacttctatgaaacaagggaaagaaagcacaaatttagttattacattgatttcgctgatgtggacatatgtaaatcatgaaaagtatgatttacgttcttttgttgtgaaaatattatcaagaataggttatcctacttctgcaattatagctgatgattattttgataaagaaaattgtttgtttacttcgcttagcagcgtggtggatcaaattactgttgggttaaatcaaattagtaatgaggtggaggtaaatgggaaatatttcctattaacaaattttcaaaaaagaatttgggattcaatggatgaaaagaaagtgattggtatatcagcacctacttcagctggaaagtcctttgttattttactaaagattattaaaaaattgatgaatgggatttatgatattgtatatatagttccaacgctcagcttattaaatcaagttacggaggatttccatacattgttgaagagtatgaaaatatcgcaatatagaatctcaaacacttttttacctacagaaaagagtgaagcaaattgtatatatgtaatgactcaagagaaagcaatagcagctttcgctaatgaagaaaaagcatttgaaaaaagaatgattttggttgctgatgagattcagaacattgaaagaattaaagaagagacagatgaaagagccaaaattttatttgatacacttatggaatttagatataagaataatgtagaacaaataataatatcaggaccaagaatagaggatattgataaattaggaaagagtatatttggaatagagactgaagatattagtacggatataagtccggttttgaatctaacctatagtatttgcaaaatagataaaaaatattattttaaacaatattgtatgttgaattcgaatccgaaatgtgaagaaataaccaattcagatataatatatgggtacggaaaaaaattatataaccttcaatatttggattatttatcgtattttcttgaacatataggaaaaaatgaacagaatataatatttgcgcctacagcgcctacagctagaaaaatagcagattatttgtcgcagaataaagaagataaagaaagtaatactgatttaatacagtattacaaagatacaatacatgaaaaatatacgttatgtaaaactttaggaagtggaacagcgtatcatcatgggaagcttcctatgcatgttcgtagaaccttggaaaaagcgatagtagagaaaaagataaataatatcgtgtgcacaacaactctgatgcagggtgttaatatgccagcacaaaatattgtcatacgaaatccacatttatatttaaaaaagacagattcggctgcagaactttcaaattatgaaatggcaaatttaaggggaagggcaggacgtttgctcaaagattttattggcaggacatatgttcttgatgaaagtgcttttgctgatgcagatggatatgatcaattggaattgtttgaagatgttacgaaagaattgccttcagggtatggagaacgatttgaagaatatcgcgaagatatagaagatgttattgaaacaaataaaacagtagatcatagcatgaagaaatatggttatttgatttcatatattcgacaatcagttttacgatacgggaaaggatcacggcgaaaaatgcaagatgtgggaattaaattaacacaaaaacaagtggcggcaataatccataaattggaaacacttactattccgaaagatatatgtattaaaaatagatattgggatccatttgtgttgcaaaaaatatttgaagactataaggaagcggttccggtgtcaccttacgaacgcggtgcaaaagctaaattaaatagaatgttgaagtatatgcgtgatacagaagaaacttcatcaatgtatgaacgttatgttccatcagagttgcagaaaggttctaatagatcatatttagttaacttatgtatgaaatgggcgacaggtgtttcgttgcatgatatattaaatgaggaacgttattctggtgaaacgggagcggatgaaatagaaagaacgatacaagttttgcaaaatgtcgtatcatttaatgtaccattattattgaaaccaatatttgatataaagaatccagatagcattttcctgacatgtatacagtcgggagcaacaacagaaacaataaaaatgatgatagaattaggtattccgcgagaaacagcattgtatttatatgatgaagtttttacaggaaaacaaaaagagagtgatgatgaagaggatttagagcaaaaaattcgtaatcaacttcaaaaatcatttaatgatttaccatattgggtacaagtgcaattagatttccttatttga

SEQ ID NO: 59348 - DNA, 897 bp, Gemella morbillorum M424
atgagtcacaatcatacaacaaatatagaaattagtgataatttacatatttactatattaattttgatttacttgacaatggttatggacaagtaaaagataaattttataatgaattatttgatgatattcctgcttttgcatttggaactgacgttatgaatcgtaaaataggtgaaattggattagttcctactgtaagagaagctatgaaaaaaatatactcaattaaggaaattcaagaagctagcagagaatatttggattctaaatctacagaagacaaatatattaaaagaggagagtttggagagctgttgctatatcatttgttgcacgagtatttcggggctgacgcattaatttcaaaaatatattttaaagatagtgtgggtggtgttgcacatggttttgatgcggttcatgtagatactagtcgacaaatattatggttgggtgaatcaaaattatataaaaactcctcgacagcaattgacgaacttgtaaatgatgtgataaatcattttaatataaatttttttgatagtgaatttcaaatcattacaaatagagtacatgatactaaaattaattgtgatgattatattataaaattactaaatcctgaaactaaaatattagataaattagccggtattaatgtatgtttgtttgcagcctttgaaagtaatagcttattaaattttaataagaataattttgaagaaactttaatggaagaagcacgaaaattgaatgataaaatgaagaacgtattaagtgaacatccgtggataaaacatcttaatatttacttattgacttttcctttggataataagagagaatttgtatcttcacttcatcaaaaattaaaaggagcacagcaaatatga

SEQ ID NO: 59349 - DNA, 1749 bp, Gemella morbillorum M424
atgattaaaggtattgaatttgatgttaaaagtttaaaagattttgaatataattggaattgtacaaagtattatacgtcaattattgatacagtcgaagcaagacgatttttgataaatatattagaaaattgggaaaaagtaaataatgatacaaaaacaatttggttagatttgatagaaagagcaggattttacccatattatattgataaaattgatagtgttgaaaattataatcaatctctccaatcaagtgttcgtagtgcctattataaatcagaaaatttagatggggtttattttcatgatcaacaaaagaaaattgaacgagcacttagtttcaagaaaagtgtagctgttagtgctccaacaagttttgggaaaagtcttttaatagaagaattcgttgcaagaaaacagtatgataatatattaataatacaacctacacttgcattaattgatgaaacacgaaaaaatatgagtagatattctgattattataatattattattaataccaaacaaagagcaacggataggaatatatttatattaacagcagaacgagttcttgaatatgaatctatccctaaaattgatttttttatagttgatgaattttataaagttagtaatttaagaaatgatgatagagtagatgcattaaatatttccataatgaaaataatggattacaaacctcaatctttatttttaacaccgtgtgtaaattcactttcagatagatttatagagagatatgatgtagaattttttaaaactgactattctttggtaaacaccaatataatagaagttcgtagaaataataaaccattaacaggaaataaaaaaaagaatgaattatttaaattacttgagggtgtaaaggaaccaactatagtgtatgtaaaatcaccaaatgaagcatataaacttgctaatgagtatattgactatttaggtgactctggttgtgtgaatagtgatttaccaatatttgaatggatggatgaaaatatatctgaaaagtggaaacttaaaaaacttatgaagtatggtgttggagctcataatggagctttaccacggcatatagtttcctctgaaattgaaatgtttaataaaggtattttatctattatgtttgcgactgtatcattaatagaaggagtaaacacagtagctaagaatataataatatatagtaataataaagggaaaaaatctttagatttttttgatttcgcaaacataaagggaagagcagggagaatggggaaatattactcaggaaatgtttatttatttgatgaggagatggaacccaaagatttttcaatagatgtaccttttattgatcaaaatcatatatcagacgaaattttatttagtattccagacgagtatgttaaggataaagatagaaaaaaacacttagtatcagatatacctgaaaatttaaaaattattataaaaaataatttgatttcagtagaaggtcaaaaaaaactatacaactatattaaacgaaatattgcatatttatcatatttaaagtgggatggaataccaacttttgaagaattgtatcaaacgcttcatttagcatataaatatttagagaataatgataagaataaatttgctaaatctcaagccataacatcgttagatattataaataaaccattaaaagaagtaatagttaaaagagaaggatttttaagaaaaaaaacttaa

SEQ ID NO: 59350 - DNA, 1617 bp, Yersinia frederiksenii
atggagtcgaatgattcaggcggagtagccgccaagcacggtttcttttttcaggactgcgtagccgcttaccatgtcacccgaatgcttcgtgacaagtctatccgtagtgttcgctgcgaggtcacagacgatatcgatattgtatctgatggatacatcgacttcgttcaggtaaaaagcaccggcaaaacacgttggaacatttcggacatcgttcagaattcaaaaggtgctgataaaaagccgatcccctgcagttcaattttgcacaaatcaatgcaatgtgagtctgacctgttccttggacgtaggtactccatcgtcacagaggaaaaggtcaacaaaaccttggagtacttgacgatcagcccaaccgcccgactagataagccaggccgacaggaactcatcgatgatctcaacaaacgtacaaacaattatttaacagactcaggtataagcgtttcaaattggatcgatgcggctacatgggaagtgttttcatctctgcgagaactggaacttctagggatcaaaaacatacggctggcctcccacgatctacatggggtcattctcagttccgaaaccgtcgccgaagacatttggtgccgcatccttgataccgtgacgcgcaagggggaacattctcgacgcattcacagtgtgaatgacaagtcctgcttacgaccagacctacttgagtggttcaagcagcgtgtcgaagatgaccagtctcggtcaggccgcaaaatctacgtcaaacgggacttaccccacatccttacgccatttagagcgcctatggcttcggtctgtgctaagcgtaaaggcttggttctacatcagcagtactcgcttaagaaatatcgctacaagcacatcgcggataacgtctgccaatggttggatgaggtctttctccgaccaaaagaattgtctgatattcataaactgacactcattgaaaagcgagaacgattaaagaattcagtcttcaaatcgctccatgatgtcagcgaatttttggggcgagttctgttgcatgcaacgatccggcagcaccacgaaagccagcctatcccttgcatgttatacgtggaaaaagcaggggccgaaaaaattcttgaaaatgtgcacatcgttcgccgcgatccagaaggtgatcagctctggattggcttcagtgagttggtgactaatattgacattgccgtcagattgccggagatacgggatcagttatacgaggacatatcggattgcatcgatacagcacgcagaaagatcctcgacattaaagatgataactacctgcttcgccacgacattgacgaaattcttgatggcagcagacctttcgatgctcaccttgatcgtttcacgtttgttctgttcgtgggctacgactccaggctgctaactgagcctgaaacgccgggattcgagggtggcttggagaaggaaacgacggcgctattcgaaaaattcgcggctgacctgatcgaggattcgccgtttgcgaatctttgcatccacgtattcatttatccagccccgagtcttgaacggttaacccaattagttgatgagaaggtgagagaggtcgtatga

SEQ ID NO: 59351 - DNA, 2190 bp, Yersinia frederiksenii
atgacagaggtctatgaacaggcgaaacatagcctgcagggtgaggacttctcatctttcaattatctgtttgcggttaacaagctgttgtctaatcctgtttcgtatgacttaggacgggacttgatcgtgcgagctctcgattcgcgcgagcggttttccgagcacaccacgatattgaaaaatatggtgagaaaatcaggtttgttcccgtatctcaaaaaggagttcaccagccttacaccggatgacctgagggtgcttgagctataccggacgccattctcggatggttttgttttccactcaatgcagttccacatatttgatctgcttaagtccggtcaaaacgtggttctgagcgcacctacaagcatgggcaaaagcgcaatcgtcgattcgttgctcggcatgggaacgttgaagcggctcgttctggttgttccgactgtggctcttgccgacgaaacccgtcgccgactacaagagcgattcggtgaccgatatcagatcatccaccacagttcccaagtgtgccattccgatcaggctgtctacgtgttaacgcaggagcgagtgaacgagcgtgacgacatcgtcgatattgacctcttcgtcattgacgagttttataagttggcgttccggcaactgaaaagtggggacattgatcatcaagacgaacgcgtcatcgagctcaacattgctttgagcaaactgctcaaggtctccaggcagttttacctgactggaccgttcgttaacagcattcgcggtctcgaaagacttggatatccgcatactttcgtttctaccgacttcaatacagtcgcgctagatgttaagacgttcggcatcaaagcgaacgacgacaaagccaagctcaacgcgctaggagaaatcgcgcacgcatgcgtcgacgcaacgatcatttattgcaagtcaccaactgttgcgggccaagtggcgcgcgagctgatcaggctggggcatggcactccgactgagagtcctcatgtcgactgggtcagcgaagagttcgatgccgactgggattacacagtcgcacttagaaacggtattggcttgcattttggcgcgctaccgagggcattgcagcaatacaccgccgaccaattcaatgctggaaaactgcgctttttactttgcacctccacgatcattgaaggagtcaatactatcgctaagaacgtcgtgatctacgacaaccgcgatggaactcgcagcattgacaaattcacccatggcaacatcaaagggcgtgccgggcgcatgggcgttcacttcgtcggcaaaatcttttgcctggaggacatcccggaagacaacctcaatcaagaggtggatattccgctcggtattcaggacattgataccccaatcaacctcttggccagcgttcaaccagatcacttgtccgagttttcacaggatcgctttgatgaaattttcataaacgaccatgtttccatcgaccttgtgaagaagcattcgtacttccgtgtcgagcagttcgaaatgctgcaaagcatgttcgagatgatggacgacagcgaattttcctcgttggtatttcactggacccccgcgacaaacttcctcaagacctttgcaaagatcattgccagactggttccccatacgttcagtcgcaatggggtccctgttaagcctacggatgtgatgatcgccaaacttgccggctatttaagcgctgaaagttattcggaatatctgaagaatcaaatcgtttacgcacgacaacgggtctatgaaggggaaaagcgcactctttccgacgcacttaacaatgatctgaaactaataaccaatactttcggttacacgttacctaaagtgctcagcttgatggaggatgttgtaaaatatcacgcgttgaagagaggtattcgcagcaaagtcgattacacgcatgtcaaaatgacgttcgagaattttcatcttccgccaggtgtcaatgccttggaggagattggcattcccattcagacgttacaccggctggtagatttgctggaattttccgaccaaactgatgtggatgggttgtgccagtatcttcgggatactcaggacgtttggagtcgaacaattgggttcgtggatcagacgttcataaggcgcgcgctcggtattgaacaacattga

SEQ ID NO: 59352 - DNA, 1617 bp, Yersinia frederiksenii; identical to SEQ ID NO: 59350

SEQ ID NO: 59353 - DNA, 2190 bp, Yersinia frederiksenii; identical to SEQ ID NO: 59351

SEQ ID NO: 59354 - DNA, 825 bp, Yersinia rohdei ATCC 43380
atggatcctttgattatgaagattttatcggccctgcatgagttcgcttatgggttccacgaaggggagcagacagataacacacaaacattatctaaaataatagatgcggctcgttcaatttataaaattgatgaatatcagaaggttaaagatatttatctgaattcaggtgaattgactgacgatgttgctaataaataccttaagcgaggtgaatttggtgaacttattctgcatctgattttgagagattttcataatacgctcccacttctttccaaaatttatttcaaagattctatcgggcataccgttcacgggtttgatgccgtgcatatcgatcctgtcaataaaaccctctggctaggtgaatctaagttatatattgatcccaagaaaggtattggtgatttaattaatgatgttgaagagcattttaaagctgattatttaaattctgaatttaatttgatagcgaaaaaaatacgccatgtacaaaactctccagaattagaatattggttggacattttatcgacaggtgggaaactatcagataagcttacgaaaattaacatcccgctgctatgtacctatagctgtgattcatttttaaaatatgataacgaaaaatcaccggatttttctgcttattatgaaaataaaatacttatgctaaaaaaatattttgatgaaaattacaaacatcctttaaaaaatcatttaaatattattcttatgctttttccagtgagtaataaaatagaattagtaaagaaacttcatcaaaaactatcattgattcagcagattggtggttga

SEQ ID NO: 59355 - DNA, 2181 bp, Yersinia rohdei ATCC 43380
atgaatgagcatattgggaatggaagtgacgccctattcgaatatacttttagtgagtatcaaaaatgtgctaggttactaatatcagatgagaatcaggggagagatgaattaataaaaattttagaaaagaagaatgattattcgcgaatattagatggtgttttagctgatctaatcgagtctgcaggtttttatccttatataataaaaaatgatttaacactatcctcatcatcgcaaaaaataaggtttgaaaataacagatcaataaatatcaaagataaagtatttcatgatgaacaaaaatatttactgggtctaatcaattcagaaaaaaatgttattgcaagtgctcctacaagttttgggaagagtctcttaatagaggaaatagtagcatccaagaaatacaaaaacatcattattattcagccaactctagctttactcgatgagacgaggaaaaagatttcaaaatattccaatgactataaattaattgtaagaacgagtcaggcgttttgttcagaaggaaagggtaatatttttctgctgacatctgagcgagttaatgagtataaagaccttcctaaagtagattatctaattattgacgagttttataaacttagctctaagagggatgatgaaaggcatcagtctttaaataatgcatttataaaaatttttaaaaacagcacgccaaaattttactttttggggccaaatattgatggcataactccggggtttgctgataaatataatgctgtcttttaccaaagccaatatagtttagttaggtgtaatgattttaatatatataaggattatgctgatttattcggttctcgtggaaataaggcaaggtttaaagaaagtattttatttaaattgatttctggacgttgtgatgaacaaacaattgtttattgtgcctctccgagtaaagcaagaagactctcaagagagtttgctaattttattcaaaaaaataaatctggagagctaactcataaccctccgctgatagaatggatcgagaaaaatatctctaagaggtggtcgttaattgactcaataaaacatggtgtggcatttcatgatggagcactccctagacatattagttcatctataatagattattttaacgaaggcttgataaaggtgcttttttgtacttcaacaatcattgagggagtaaatactagtgctaaaaatatagtctattttgatgaaaaaaaagggaaggacttgagtattgactactttgattattcaaatatcaaaggtagagctggaagattgatggagcactattcaggaaatatatttaattttaatcctcctccagaaaaagaggtgatatacattgatataccatttttcgaacaaaacccgattaatgaggaaattttaatcaaccttgatgatgctgatataaaaaataaaaactcaatcgaatataatttcatatcatcattacccttcgatgaaagtgttttatttaaaaataattctataaacatccgtggacaaaaaaaacttcttgattatttaaagtccaacatacgtgataattatgcactggttgcatggtcctctacaccaaaatatgaacagttaaaattttgtgtacatttgtgctgggagtatttattaaaagataatgagaaaagtaaccaaatgtccgccgaaagattaactaaagttacttttgattatggcttttcccaaaatatactagagttagtgaaaaatacatataactataatttaagcaagtcagggaagatgaatgatgaaaaaacaataaaaataatagatgaatcgataaaagattctttttatatattgcgtcattggtttcaatataaacttccaaagttgttatctgtattaaatgaattgcaaacgtatgtctgtaaacttttgggtttagtacccggaaattatctgtattattcatccataatagaaaatgattttataccagaacatttaaatattcttatagaatatgggattcctaagtcggcaatacaaaaaattgcgaaattcatacccgatcacctagttgatgatgaggttgttcggttgatatcaaataaaaaattgtatgattataatgaattaatagattatgaaaaaaatatcattaagaaaatgttttaa

SEQ ID NO: 59356 - DNA, 936 bp, Yersinia rohdei
atgggaccattcaaagcgcatgaagtaatcgaagaaagaatgagagagcaagttttatgtagttacttggtaggttttgatattaatgatacaggtgtatcctactataggatggatcctttgattatgaagattttatcggccctgcatgagttcgcttatgggttccacgaaggggagcagacagataacacacaaacattatctaaaataatagatgcggctcgttcaatttataaaattgatgaatatcagaaggttaaagatatttatctgaattcaggtgaattgactgacgatgttgctaataaataccttaagcgaggtgaatttggtgaacttattctgcatctgattttgagagattttcataatacgctcccacttctttccaaaatttatttcaaagattctatcgggcataccgttcacgggtttgatgccgtgcatatcgatcctgtcaataaaaccctctggctaggtgaatctaagttatatattgatcccaagaaaggtattggtgatttaattaatgatgttgaagagcattttaaagctgattatttaaattctgaatttaatttgatagcgaaaaaaatacgccatgtacaaaactctccagaattagaatattggttggacattttatcgacaggtgggaaactatcagataagcttacgaaaattaacatcccgctgctatgtacctatagctgtgattcatttttaaaatatgataacgaaaaatcaccggatttttctgcttattatgaaaataaaatacttatgctaaaaaaatattttgatgaaaattacaaacatcctttaaaaaatcatttaaatattattcttatgctttttccagtgagtaataaaatagaattagtaaagaaacttcatcaaaaactatcattgattcagcagattggtggttga

SEQ ID NO: 59357 - DNA, 2181 bp, Yersinia rohdei; identical to SEQ ID NO: 59355

SEQ ID NO: 59358 - DNA, 1620 bp, Yersinia ruckeri
atgacagaactcttactagtcaaagatcaaaacgatcacggggcgatagctgcaaggcatggctataagtttcaagactatgttgcaacaaacttagtacttgatatgttgattgatcattcacttaaaggtgttcgatgtgaaaaaattgatgatattgacttaatattcattggatacactgaatacatacaagtgaaatccacttcaggtgaaaaatattggaatttaggagagcttcacaagaaacaaggaaagaaaacaattgttcaaaaatctcttgattctgactgtgaattaggaatagtagccaaatttagaataattactgaacgaggaattcaaaactcattaaaacacttagaaatcaatcgttccaatagacttaaatcaacacaacgaagtgatttaattaaatctataaaaggaaaaataaaagaccataaatcgcctaacaataatgatactgaatattgggttgataactgtttatggcaagtgatcccctcaatgcaagatgcattattattggcacagaaaaaaataaatatattctcgaattcctttggaattcctgcttttgatgatgaagttgacgtaatatattataagatattaaggctagtttctgagattgccgaccaatcaaataaacaatacaccacagagcaaaagacattcagtcaaaatgaagttaggctgatgattaaagaatggttagaccaaatttgttcaaaaagaacatcccacaaaaaggtgtataataagaatagggagattgtcctttcctcattatcacacttacaaacagatgattcaaaaaggtcatcccatggatactttttagagtatgcgaggaataagtttcgccatgaaaaaatagttaagaacattttagagtggatgcctgaatttctactatcccccagagaactagcagaaacagactctagtgactgttattcagtctggcagaagacgttagaaaggataaaaaaaagaccggtcaatattgatatatcaactttaatttctgaagtcttactgcatatgctaatccgttatgataagcgcagtcaacctatctcgggaatgctttatattaacagtggtaaagaaataaaagaatttaataacatccatattatccgtaatctcgatactgacgaactttggatgggaagcgcctttgtttcacaagagtatagcgttgattcaataacaaaggatttcgcaagttttttatattccaatcttgacccagatatttttgacacatctaaaagccgagtctttgaggcaaaacaagataatcatttacttcctcattctataaacgaactcttgactccaaaagctacaattagtggatatgctgataggtataaatttgcatcgctattcatttataattctgcgatgcttgaaaatggttacactgagaactacaagcaaaatttgatcgatgaatgtgaagaaatatttaaaaaattctgccaaaaaataaaagaactcaatgataatgaaattaatagagtgagtatttctgtatatttattgccattggaaagctttgataacttgatgaaaactttcaatgaggacatttcaaatgcatga

SEQ ID NO: 59359 - DNA, 2133 bp, Yersinia ruckeri
atgcatgaaattgaaaagattcgacatgcaataggtaaagaaataaatatagaagctcgattctatacacttaattatattctaaagttattgagcaatccgcttactgaaaaatatggccgagaattagtaattagaatcctagatagtaaagaaacatactctgactcgactaaattactgaaatatattgtcagaaaatgtggtttatatccatatttaataagtgagtttgacaatctatcaacagaagagacattggtagtgaatctttacaaacccaatatggatgataccgaattcacattccattcacttcaaaaactagtctactcatatttaattaaaaaaaacaacgtagtgcttagtgcttcaacaagtgttggcaagagcgcaattatagactctattattgcatctaaacaatttaatagaactgtaatcatagttccgactatagcgcttatagatgagacaagaagaagactatccgataaatttcaagatgatttccaaatcattacccatcctagccaagtagcttctacaaataaaactatatacatactaactcaagaaagagttatggaacggcaagatctcaatgagatagatattttcattcttgatgagttttacaaacttaacataaactccgagaatgactctaggtcaatactactaaatatcgctttcttgaagctactcaaaagctcaaaacagttttatttaatagggcctaatatagattatgtaattggtttaaagcaactcggattaagctacatttttataccatctgaattttcaacagtcgcattgaatatatatgagtttgacctacctactcatgatgaccaaagaattataaaaacagctgagttgttaaaaaatgatagcgattcaacaatgatatactgtcaatctccggttactgctgttaaggtcgcagaagaactcattgaaagaaattgcggaaataaaacaaatgttgatgataactttacaaaatggttaattgagaactatcacaaagactggattattgttaaggcactactcaatggcattggaatacatcacggttctttgcctcgagcaatacagcaaaaaatgatcaggctgttcaatgaaggtaaaataaaaatcttagtctgtacttcaacaataattgaaggcgttaatacatcggcaaagaatgtgataatttacgataggcgttcaaatagatcagtagtgagtaactttactcatagaaatatccaaggtcgtgcaggtaggatgggacgccatttcgttggaaacgtttattgcttagaaagcatacctgacaatgagggacaccttaatgaagttaatataattactgggacgcaaccttctgacattccattaaacttgttatatggcgtggatggttcttatcttactgagtcgtcggttacgcggatggcagaatttgagtcaggctcaattttagacgctaatatcatttcaatgaacactaaataccctccgcaacgccttgaagaattggctgtggaaatcagaaaaaatattttatcaaactggcaagggatattctggggcgggatgcctaacaaaaatcaaatgaggacattatctgactatatccttattttagagcaagcaagcctttcccgtgtacacctttctgatggtgacacactatcaacattcctaattcagtacctaagtagtagttcttactccagttttcttaaaaataaaataagccattaccaaggaaatggtgatatttcaaataccattgattggttattgaaaacattacgaaatgccatcggccataacataccatcggctatatccaccatttctagcattatagaatatctgtgcaaacggatgaagttagttgcacaatttgattataggctaattgcttataagtttgaaaatagccatttgccaagtatttacaatgcactggatgaatttggaattccaatacaggttgccgaaaaactcacattaaaaaacctagaaattgaggaactcgatctcctcgtcatgtatttaaagaaaaattacattcatatgccgaacttgactattggcgatatagcgttcattaaagagtcgttataa

SEQ ID NO: 59360 - DNA, 1617 bp, Yersinia ruckeri
atggagtcgaacgattcaggtggagtagccgccaagcacggtttcttatttcaggactgcgtagccgcttaccatgtcacccgaatgcttcgtgacaagactatccgcagtgttcgctgcgaggtcacagacgatattgatattgtatctgatgggtacatcgatttcgttcaggtaaaaagcactgacaagacacgctggaacatttcgcatatcgttcagaactcaaaaggtgctggtaaaaagactatcccctgcagctcaattttgcacaaatcgatgcagtgtgagtcggacgcgacccttggccgtaggtactccatcgtcacagaggaaaaggtcaacaaaacccttgagtacttgacgatcagtccaaacgcccgactagataagccaggtagacaggaactcatcgatgatcttaacaaacgcacagacaattacctaacaacctcaggtataagcgtttcagattggatcgatacggctacatgggaagtgttttcatccctgcgagaactggaactcctagggatcaagaacatacggctggcctcccaggatctgcatggggtcattctcagttccgaaaccgtcgccgaagacatttggtgccgcatccttgataccgtgacgcgcaagggcgagcattctcgccgcatttacagtactgatgataagtcctacctccgaccagacctacttgagtggttcaagcagcatgtcgaagatgaccaatctcggtcaggccgcaaaatctacgtcaaacgggacttaccccacatccttacgccattcagagcgcctatggcttcggtctgcgctaagcgtaaaggtcaggttctacatcagcagtactcgcttaagaaatatcgctacaaacacatcgcggataacgtctgccaatggttggatgaggtctttctccgaccaaaagaaatgtctgatattcataaactgacattcattgaaaagcgagaacggctaaagaaatccgtcttcaaatcgctccacgacgtcagcgaattcttgggtcgagtgctgttgcacgcaacgatccggcagcaccacgaaagccagcctatcccttgcatgctatacgtggaaaaagcaggggccgaaaaaattcttgaaaacgtgcacatcgttcgccgcgatccagaaggtgatcagctttggattggcttcagcgagttggtgactgatattgacattgccgtcagattgccggagatacgggatcggttgtacgaggacatttcggattgcatcgatacagcacgcagaaagatcctcgacattaaagacgataactacctgcttcgccacgacattgacgaaattctcgatggcagccgacctttcgatgctcacctcgatcgtttcacatttgttctgttcgtgggctacgactcgaacctgctaaccgatcctgaaacgccgggattcgaggatgacttggagaaggaaacgacggtgctgttcgaaaaattcgcggctgacctcatcgaggattcgccgttcgcgaatctttgcatccacgtgttcatctatccagctccgagtcttgagcagttaaccgaattggttgatgagaaggtgagggaggtcgtatga

SEQ ID NO: 59361 - DNA, 2190 bp, Yersinia ruckeri
atgacggaagtatatgagcaggcgaaacacagcctgcagggcgaggacttctcatcgttcgattacctgtttgcggttaacaagctattgtccaatcctgtttcgtatgacttggggcgggacttgatcgtgcgtgctctcgattcgcgcgagcggttttctgagcacaccatcattttgaaaaatatggtgagaaaatcaggtttgttcccgtacctcaaaaaggaattcactggcctgacaccggacgacctgagggtacttgagctataccggacgccattctcggatgattacgtttttcactcaatgcagttccacatcttcgatctgctcaagtccggtcaaaacgtagtgctgagcgcgcctacaagcatgggcaaaagcgcaatcgtcgattcgttgctaggcatgggaactttgaagcggctcgttctggttgttccgaccgtggcacttgccgacgaaacccgtcgtcgactgcaagagcgattcggtgaccgatatcagatcatccaccacagttcccaagcatgccattccgatcaagctgtctacgtgttaacgcaggagcgagtgaacgagcgtgacgacatcgtcgatattgatctcttcgtcattgacgagttttacaagttagccttccggcaacttaaaagtgggggcattgaccataaagacgaacgagtcatcgagctcaacattgcgttgagcaaactacttaaggtctccaagcagttttacctgactggaccattcgttaacagtattcgcggtctggaaagacttggatatccgcatactttcgtttccaccgacttcaatacggtcgcgctcgatgttcagacgttcggcatcaaagcgaatgacgacgaagccaagctcaacgcgctaggggagatcgtgcacgcatgcgtcggcgcaacgatcatctattgcaagtcaccaactgttgccggtcgggtggctcgcgagctgatcaggctcgggcatggcactctgactgagagtccccatgttgactgggttagcgaagaattcgatgccgactgggattacacggtggcactcagaaacggtatcggtttgcattttggcgcgctgccgagagcactgcagcaatataccgctgaccaattcaatgcaggaaagctgcgcttcttactttgtacctcaacgatcattgaaggagtcaacactatcgccaaaaacgtcgtgatctacgataaccgcgatgggcctcgcagcattgacaaattcacccatgggaacataaaggggcgcgccgggcgcatgggcgttcacttcgtcggcaaaatattttgcctggagaaaatcccggaagacaacctcaatcaagaggtggagattccgcttggtattcaagatattgataccccaattaacctcttggccagcgttcaaccagaccacttgtccgagttttcacaggatcgctttgatgaagtcttcataaacgagcgtgtttctatcgaccttgtgaaaaagcactcatacttccgtgtcgagcagctcgaagtgctgcaaagcatgttcgagatgatggacgacaccgaatttgcctcgctggtgtttcactggactcctgcaacaaacttcctcaagacctttgcaaagataattgccagactggttccctctacgttcagtcgcaatggagtccctgttaatcctactgatgtcatggtcgccaaacttgccagttattcaaacgctgcaagctattcggaatatctgaaaaaccagattgatcgcgcacggcagtggttgtctgaagaggaaaagcgctctctttccatcgccattaacaatgatttaaagctcatcaccaatactttcggttacaccctacctaaggtgctcagcttaatggaggatgtagtcaaataccatgcattgaagagaggtatcctcagcaaagtcgattacacgcatgtcaaaatgacgttcgagaatttccatctaccgccaggtgtaagtgccttggaggagattggcattcccattcagacgttacaccggctggtagatttgctggaattttccgaccaggctgatgtggatgagttgtgccagtatcttcgggatactcaggacgtttggagtcgatcgattgggtacgtggatcagtcgttcatcaggcgcgcgctcggtattgaacaatattga

SEQ ID NO: 59362 - DNA, 1620 bp, Yersinia ruckeri
atggcaattacttctgcaccatcaaacaaaggtggccctgcggctaggcaaggttttaaataccaagatcatgttgccgtaagctttatattaaagatgctccgagatagcacttatctgcagattgaatgtgagactgcagatgacatcgttgtagtctctcggcctgatacagaattgatttacgaatatattcaggtcaagacgacagagggggactctaaatggaatctcactgagataactaccctggacaagggaaaacccgatagctcgctgttgcaaaaatctcttaaatgcgacaagcgagccggtattgctcacttccggattgtctctaagagagacatttcaaaaccattgcaatgttttctcattgatatcaacaaacgagtgcttcctgatggctgtactgagcgtggagctaaactagctaaaaaattctccaaaactgtatcagatcaacaaagggattttaaatattgggctgataactttgtgtggcaagtctgcggtgaagttgcgtggcttgaagctatgaacattcgtgtgctatcagaattagcagagcaacatggtgtaacgcctagtcatcgacagcagaaagaaatatacgaacatttccttaactgggcagatgatgccgcgacggctgatgttaaaactcagagtaagatgaaaatcatagagcgagaggaagcccttggacggcttagcaagttactatatgcggccgaagcatcttcttctttaacagcaaagccttatagatctaaacctgagccttttttagttgagtttcacagtgtggctgaaacaaatcttttacgctctttcgcgggattcgatgttgagtacgatttcgaccaatggagatgtagagaattggctgaacacttagtggagtggcttccggagttctgtttacgtgctagtgagatcgctaatttccaagtacatcacgcaaaaaccgttttagttaaatcgataggcactttcactcaagcaaaaatgcctcgtgataaactcattgccgagcttattttgcatactattttgcgaagcagaaaagaaagtgagccaatcgcttgcaaagttttctatgagtctaatggtaaactatctgagttcggtaatgcccatattgttcatcaagctggtgaagctgatcaattatggcttggcctttctaaaatgattcctgcgggaacgatggacgatacgctaaaggaaatttgtgccgtactagacgctactatttctaaagccgtattaagttcagagcgagaaatcataattacattgcgtgaacctcaccaccacttaccaacagctgagcaattcagtaaagcactgaaccgaaattcccctgcccaagaaatgctcagggttatgtgtttcccgatattgcttgcttatgacagcgacgtgcttggaaaagggtatgtctcagattacattgaccatttaaaaaatgagatcattgatcactataccgcgctaatcagcaaattacccccgaaggttatacaagttaaaatagctatttttctccttccaatagagagcattcagagtcttatcaccgaattcaactcgctctgcaaggccgagaattga

SEQ ID NO: 59363 - DNA, 2145 bp, Yersinia ruckeri
atgaattacgaaatggtaaagaagcagcttcaattaatcggtggaaaaaatttctccacaacagaaattcttgtggcgatgagtaaaatcgtcaacagaggacttcccgagtgggaagggcgtgacttagtaatacgagcattggataaaattgagttgtttgatgatgtcgaacagtcacttttattaagcatggttcgttctgttggattatatccttatatcaagccctatctagatgaagtatcaggcgatgaccgcctagcgtatgaaatacatcgaatcgatagtgttgagcctggaatggtttttcatcgtcttcaggcacatgtgtacaacttgctaatgcaacgtagaaatgtcgttcttagtgcatctactagtgtaggtaagagtttagttattgatgctattctagctagcgaacagtaccgtaaaatagtagtcgttgtgcctaccatcgcgttaatagatgagactcgacgcagaatggtcaagcgattcaggtcgcactgcaatataatcacccatcctagccaagaggctaattcttgcttagcaaatgtctacttacttacccaagagcgtgtacttcaacgtgacgatttggatgatgtagatttttttgttattgatgagttctacaagctagatcttgaaaatgactcagatgagaaaaaccgttcagttgacctaagtctcgcttttcacagacttgctaagcaaggtgcccaattttatttgcttgggccaaatatccaagatattcgagggcttgaagcctacgaatacaattttattccgtcaaatttctcaacagtgtctgttgatgtgttccactacaatctttcatcgaaaggtgatgcacgaaaagaaaaactgcttgagctttgttcccaactatcgtccccgacacttatctattgccaatctcctgcaagtgcaaacaaagttgctcagtttcttattaatgaggctaagcttactaatgtggaaaatactcaagatgtcgccgattggattagtaagcactaccaccctgactggaacatttcaaaggctatatcgttaggcgtaggaattcaccatggtggggtcccacgagctcttcagcaatactttgtaaagctgttcaatgaagggacgattcgatatattgtttgcacctctacaatgattgaaggggtgaacacctctgctgagaatgtaatcatctatgaccgaagggtcaacaatactccatttgacttctttaccttcaaaaacatctctggtcgagctggacgtatgaatcgttattttatcggcaaagtgtttatgcttgaagcaccaccattagagacagacttaagtgttgagtaccctattggagctcaggacgaggcttcgccaatgggtttgttgctcaaattagaacctgagtttttgtccgacctatcccgtcaacggctagaacaggcttattcaacgccacagatttcggctgcaacattgatcgaaaaccggcatataccaatagatgcacaagtcaaagtcgcagaacagattattgaagatcaatattcacacaacgaccttctttgctggaaaggtaatccagaacagaatcaacttgagcatctttgtactctcgtttatgagcatcttcctcacagacttcaggaatacggaattttctcaggactccaacttgcttggcatattaatgccctaaggtcgcagagggatttcactgaatatttacaacaagcgattgatgatgatcggcatgaccgcacaccaagcgaggcaataggactccgtctaaaactaattcgtaacgttattagctaccgtttgcccagggattttatggctatcagtcgaatccaggccgatgttttaggcagacaaaatctggagtttggggattatacgtttatctcagaacaactcgaaaatttgttctacgatcctcttcttactgctttggatgaatatggtatccctatacagatatcgacgaaaattaaaggaattatacttccgtcagataacttgaatgaagtactaaccaagttaaggaagttggctacttatattgacgagttacaattgagttcgtttgagaaaaatatcctacgctgggctatcgccgatatgtga

SEQ ID NO: 59364 - DNA, 942 bp, Helicobacter hepaticus ATCC 51449
atgagtgattatacttttacaaaatatagagacaaggataaggtagattttgaagtgttgattgacgaatggcttatgtcaaatgattcggtgaatcacgctatgctatctcttgttaatgattttgagagcaatcaatggaggagcaagaaatttaggaattttattataaataatctaaaagaagttgcgttaaataaaaaagaaagagatgcgttgagtggaaatgaaggtgatatattggaaagagctatttctaaaatgcacattgataactcagggggtgaaattggagaagtttttttatatggtattatgaaaagctattacaatgctttaccagttgttccaaaaatattctacaaacaaaaccctaatgataacgcaaaaggcgcagatagtgtccatataaccttagaagaaaatacttatcatatatggcttggagaatcaaaaatttataatgatataacaggttctattaatgaagcagtaaaatctgtgtatgaacttttggctactgataaattaaaaaaggaaaaatctttaataatgaatttaaatgatattgaggattatttaagtgatgctgatgattcaaagaagcttttaatgatagagctaaaaaagacacttaatgatagaacttcactagatgagatgaaaaaaatcttgcatatacctatttctattatttatgagtgcgaaatgacaaaaaaacatttgcaaaacccttcagtttgtcttgatgataattataaaaatttaattattgaattccataagaatcaatgcggcaatttatctcaaaagattattagcaaacttaataatatacctttgattgaatatattaaatttcatattataatttttccaattcccaataaaaaagaattagtagcacaaatcaataaaatttttgaggcacatagacaatga

SEQ ID NO: 59365 - DNA, 2070 bp, Helicobacter hepaticus ATCC 51449
atgactaacgaacaaatttttgatgaatgcaaaagaatctacacgcttgatgacaaagaaaaagctaatgagctttttagattgcttgataaaataggtaataaacgaaattattcccctgtattaaaccacttaattagagaggttggaatatatccttatatcaatcaagatacagccatattttcagataggctcgtgtgtgaatgtttcaagactgatgtaggagagaatgaaccaaagatattgcatagagagcaatcaaggattttaaaacgattattggagggagaaaatctaatcctttcagctcctacaagttttggaaaaagctttattattgatgcactcatcgccattaaaaaaccaagcaatatcttaattatcgttccaactatttcgcttatggacgagacaagaagaagattaacgctaaaatttggtagtgactatcatattattacaactagcggttctcaactaaaagataaaaatatatttattttcccgcaggaaagggctttagaatactttgagaatcttagagaaaaaagcttggatttatttatagtagatgagttttataaaatgtctaataaagacagaagaacacatatacttcacaatattgttaataagtttaaaaatattgccaaacaaaaatattatatatgccctaatgcagacgacatagaagataagtctaaaaataaaatttttctagcaggtttaaagaaagaaattttgacaatcacaacagtggctctcaataaatttgacttaagcaaagaaacagggagcaaggaattaaaaattcaaaatcttttaaaaaatgaaattggcaaaagtttgatttatgttagcacaaaacctaattctaaaaaattatgtaaaattttattaaaatttattaaagcaggcaatgaggaacttaattcgttttctcaatggctgcaaaaacactatgccagagaatgggattttgcaacaaatataaaaaatggtatagggcaacataattccgcaattcatagatatatacaacaattacaagttaaattattttctgaaaaccctagtatgaatattatggtaagcactacttctttaattgaaggggtaaatactgcagcaagaaatattattatatggaataatcaagttgctaatgattctttgaacagctttacttataaaaatataattggtagaggcggaagaatgtttaagtattttgtaggaaatatttatttgttggataatgaaaataaaatagaagaaaaagaagttgaaaaaattgatattaatcctgatgaagagtttttatatagaaatgatttagaaaatcctgatttagaaagtaaaaaattaattgaacagaagctattcagtctcataaaagataaacaaaaatttcaaaaattaataagctatataaaaaattacaaaataataatgaatattgaaaatgtcctgcaaatcatagaaagtgtcaatgaaattatgaagagcattaaacatcttaacaatgataatccagattcttggggattgttagaggtaaaatctgttagaaatattttttctaacaatgataagaagctagatagagcatataaaaatattaaagtatttgcaaaatataattggaatggcacttctgcattattgaacaatagcactattaacataaatgattattttaatattgaaaaaatcattgtttttgatatagctagtttttttaacgatattaatgaaatacagcaaattctttatcctgataagcacattaatatttctccctttgtaagcaaactttctaacgcatttcttccctctgttgtctataccttagaagaatttggcttgccaagaatgttatcaaagaaattgcacaaatataactttatcaactttgaaaataatgatttaaagattgatgaagctttagaaacatttaaagaatcaagcgttgaagaaataataaacttattcaaatctcacaatgattttgatgattttgatgagtatatattaaaatatttttatgatggattgggaaaataa

SEQ ID NO: 59366 - DNA, 921 bp, Actinomyces neuii
atggcacaggcaacgatcacgccaacgctgcgcggcgacacattcgcgtccacgttcaccgaagtggcccattcgaacacgttaggtcttcgaaacgacgaacagttacgcctgttccatctgtctatccaaaacaaccgcttcgaccacacagccctcatcaagttcctcaaacgcaacgttggacgctacgtcttctcccgcgccgaatacgaaggttacaaacagcgagacgatctcgaagaagttgctctcgacgcggtaaaccggatgcgttcacaacaaaacggcatggggttaggtgaaatcttgctctacgtcctgctcgaacaaatcctcgaagcacccaaagtgatgagcaagatcgagctcaaccaggcccgaggccagatccacagccgctgtgacgccatccacctactcacaccagacggtcagcgaaccaccagcagcatcgtgtttggaacctccagcgtgatcggcaacattggggatgccatcactgcagcattagaccgcgttgtagatatagaacagaatcgctcagacgaggttcagctcgccgagcaaactgtgttcaccaagactctcgagccagcaacagcaaactacgtcaaagatctgctaatcccgaagccgggtggggcacccgtgttcgataccgcttattcgatgtttctgggctatgacatcggtctcgatccgaagaactacagcaaccagcagtatcgggctgcgctcgatcagaaaatgcagggcgatatcgcagcgcacgcccaaatcatcgccgacgagatcaacacccgaaacttggataattactcgttctacatctatgttttgcctctcaacgaagtagacgtcgatgcgtgcgcgatcatggatgggctcgtggacgggccaggtggtagccatgtctga

SEQ ID NO: 59367 - DNA, 2682 bp, Actinomyces neuii
atgggctcgtggacgggccaggtggtagccatgtctgacaagcaagtaaccgtcggcgatctcgtattttctgacatcgactccaacgaattcctcaaacagctgtacgccaacctgctctacaattacggcttacatcggttggggttggtggatcgtcacccatacgacgtggattttgaagccgccctgcggttcgcagacctgctgtcgaaatcaacccaccccaccaatcgtgaccggcacagggtgtgggcgcaagaaatcgcgctcctgtgccacattctctacccacaagacgcgcgaacgaaagcatacgtttctgcaatcttcaccacgctaggtaactacccaggcctgaagcagttgggcgtgacttccgatgcgggcatccttgacgccgcattcaacgcctaccaagccgaatacctcaccgtgcccggtgacaaatcgatgaagtttttcgcgccgcaaaagaagatctacgaccgcctgaacgacggcaagttttccttctcggccccaacatccttgggtaagtccttcatcatgcgcaccttcatcaccaaccagatcaaatccggggtgaaggccaactttgcgatcatcgtgccgtcaaaagcgctgattaacgagacgcgctcgaaactgatcgctgaccttggcgaagaccttgaacgccgcaactaccgaatcgtcagtgccgccggtgacatcgtgctcgaaggcgatcacaacttcattttcgtactcaccccagaacgcctgctttaccttctgatcggcaaacctgcgatcgagttcgagtacgtctttttcgacgaatcgcacaagctttcaggcaagaacagtcgcgccccgttctactaccaaaccgtgacaatccttcaacaccgccacaggccaccacacttcgtcttcgcttcacccaacattcccaacccagaggtattcctgagactggttgatccaaactctgacgagaatgaaaccaacgcggtcgcaacccagtattcgccagtcacgcagttcaaatacctcgtcaacctgcacgagaacaccatttccagctacaacgaccacacccaagaattcacgcacctagcctcgctccaagctcaggacactactacacagggcgtaacccgatttgttagtgaatcatcacgaggttcagatcatcgtgggcaaaccatcgtgtttcattctgcccggcatcacgcagtgcaagcggcgcgtgactacgctcagagtttggcagacctcaacgataaagacttggacgatctcgcaaaagacatcgaacgcgacgtccacgaggactactaccttagcggtcttatccgtagaggcgtcagctaccacatcggctaccttccaccagcgatccgtgaacgcatcgaaggcctgttccgcgaaggcaaaatctcgacactattttgtaccagcacgcttctagaaggagtcaacctgcccgccgacaatcttgtcatcacaaccaacaaaatcggcagagcaggaatgacagcagtcgatttcaagaacctgatcggccgagtcgggcgtatcgagttcaacctctacggcaacgtattcatcatcgtgggcgaccaacttgcatccgagcaaaaggccaaggaactcctacaagcgaacgttcctgcacagaagctatccgtgcaaaccgactcacaaatcatcagcaagaaaatgaagcaaggagtcgtcaaggatctacaggaaggtcgcatcgaattctccaaagggaatgagagctatgagcgttatgatatgaaacgcaaattcggtctcatgctcttgcgcgacatcactaccggacgtcaaagcctggtgcgtgaagaattctctgactatcttgacgaacaggctaccaacagcattattgctactttctcgcgacgcgaaggccaacaagatgacgatatcaatgtctccattgaccaggcagaagcgctgacgcacgcaatccaagctggactccagtatccacaactttctccaaacggaaagttcagttacgacgagaccctcgcgtttcttcagcggcttgcctcaatcttcaaatggcgaatttacaatcccgagacgttagggagaacacccaaaggaagcgaccagctcgctatgctgtcctggtacaccgtcctcctgttgcagtggatggagggacacggtttgcgttccatcatgaatcgtgcaatcgagcatcaccggaaaactggaattgtgtggatcaatcggcaaccgaatcgctacctagattcgaaagaacaccgaaaccttgtttttagtgacacgcttgaagctattgagcaagtaatcctttttgagctatcgaattactttcttaaattctccaacgaatacaagaaggtccacggaaaagagcagttcgacaacgactggtacgaatacgtcgagtacggcacaacgaaacaggaaaccatccttctccaacgactcggattcacccgcgaaagcgccacttacattcgaatcaacgtctcaaatgcaatcttccttcacgaaggaaaaccccacctgaacccgattctcctcgaaagctcgaacatcaacgtccgcaaagaagccaacgaaatcagatacaacgtaccagaagccttctcgatgcctctaacaccctcgtctgatacccgctaa

SEQ ID NO: 59368 - DNA, 915 bp, Peptoniphilus lacrimalis 315-B
ttgatagtaagtcaaaattcaaaagatctaattaagatatttcaaaatataaaagatatacctataagtacaaatttagatgacgggaatttaaatattttcatgtgtccaataaacgctaggaaatttgattataatcaaatttccttagtattagtagattctgtaattgattatgctatatccaagaaaaatataacaaaatatcaaaataagcctggaagattatcacaaattgcacgtaaaaagtttaaagaatacttggataatacaggtgaattaggtgagttgcttttatattgttttttagagggtcatttaaatgcccctaaaattttaacaaagatggaaatgaaaacatctaatagtttatatgttaatggttcagatggtgtacatcttttaaataatggtgatggaacatacaaacttatatttggagaatctaaactgtataaaaaattgtcagatgccttaaatgctgcttttaattccataaacgattttattaatgaaaacaatcctaatggaaaaaataaaacaggtataaattatgaaaaagatttaatatcatcaaatatagaaaattgtgaactaagtgatgaagataaagatgtacttgaattattaatttatcctactaaaaatgagaaaaaaatacgcatagatgatgctttttctatttttataggttatgagacagatatatcaaatgagactagaagttgtacaagtaataatttttctgatgaagttaagaaaaagatacttttagatttagacaaatatgaaaacaagatatatgaaaaaattaaagataataatttattaggtcatactttttttgtctatattattccgtttactgatatagacattacaagacgtaagattttaaaggatattttaacatga

SEQ ID NO: 59369 - DNA, 1821 bp, Peptoniphilus lacrimalis 315-B
atgaacaattttattgattatatttcatcaaaagcttatacagatgattatctgataaatttaatatataatttggaaaaaaatttttgtaataagctactagatcaagattataaaatagatttatctaataaagaaaagtgtgatttaatgagatttgcagatatattatgtaggtcatcaaaagatgaacataaaaatttatcattaaggatagtaagtcttgtatatgagtttaaagaacttttagaggataaatttataaaattaagtattataaatgttttaactaaattaggtaactttccttctattaatttaattggaattaaagacgagaatacagggatagatgagattgatttggacttaataattaaaagagtatataatgagtctccaattaaagaaatttttactgatgaacagcttaaaatatttaatgaattacagactaataatcattttagtttttctggtagtacatcatttggaaaatccttcatttttgaagcatttactaaatatttaatagaagaacataatcagtcagataatatagcatttattgttccgacaaaagcactcataaatcaagtttcttataaaattagaaaattagtaaaatcatatagctataaggttataaattcgcctgaaatacctaaagtaataaaaaggcaagatggtaaatatatctttgtttttacgccggaaaggttgattgcttactttttagatacaactaatcccaaaatagattatttatttgtagatgaagcacataagttattgagcgtaaaagatactagaacaccattaatgtatcatgctttagttatggcaaaaagaaaaagtataaacatattttttgcatctccaaatattcctaatccttcagtttttttagaattagtaaataatactccagatgaaagttatgcagttaaagttgaatcagtatctcaaaatagattttttgttaattgtcacacagactatagttacatgattagtgattatggagaagatatcttatttccgaaattaaatttttctggaaatgttattacagatttaggtattattttaaatactttttctaatggaagacaaagtatagtttattgcaatactatagaaaaaacgatattaacagcatttgaatttgcaagaactttgggagaagtaagagatgaaaatatagataaactaattgatataataaatgaaaaagttcatgagcagtactatcttagatattgcttgaaaaaaggaattgcatatcattttggaggaattcctgaagaaataaaaataagagttgaagagctatataaattaggagttataaaaatcattttttgtacttcaactctattagagggagtaaatttgcccgcaaaaaacatttttattttaagtgaaaaaattggattatcaaatatgaatgaagtcgatttttggaatttagctggcagagcaggtagattaagcaaagatttagctggaaatatattttgtgttaatctatataatcaacaaggttattggaatgatgatagcaaaattaaaattcttagagataaaaatatagatgaaacaaaacctattatactaagaaagaataataagaatttgtataagaatattgccaattattatacgaggaatgattataccaacaaaaaattgtctgaagatgataaaaaaatcatagaaatgtacggcaatattttactataccatgatacagtgaatagcgattctgttttgaaagatagatttatagattcaggaaataattttttagatgtttaa

SEQ ID NO: 59370 - DNA, 1677 bp, Sphingomonas sanguinis
atgcgcttaggtggtgaaccgcctaccggtcggaaactcgcctttatgccattcgacagcttgatcgatccagcgacggcctccgatgcagggggagttgccggacgacgcgggcagaagcaccaggaccacgtcgcagcgagctacgtcatcgcgatgctatcggatccgggcattgcgcagatcgaatgcgagacggccgacgacataaccatccgccgctcggctgccgacggcgggaccgacaatgaatatgtgcaggtaaagacgaccgacaatgaggacaagtggacggcgacggcgctcctggcgcgcgaggatggcagggaggggagctcgatcgccgaacgctcgcttgcctgcgacgcccacccgggcgaaccgtcgttccgcatagtcacgaatcgggagccgaggggcaaccttgcctcgttcaagaggcctcctggttcgaggtcccccaccgacgcggccctccaggccgccagcgcatcaatcgccaagaggtatcccagcttcaggtctatcaacggccgtagcctcggcgactggtgcgacaggctcctgtgggaggtggagccggatctcgcgaggcttgcagaccggaacacgctggaactgcacaagctcgcgaacaagcagggcgagcgaccgagcaccgtcgacgtggaggcggcctacggacagctgctgaacattgtgatcgacgcgggcgatgcgtcccgcgtcctcacacccgaacgcaagcgcatctcccgggaggctgcccgggcatggtggcgaggtcgcatcgccgccttcgcggcggagacgcggaggaccgtcaaggtctaccgcgtcagaacggacgagttcttctccagcttcatgctcctcgacgagagcgtcatcagccgcacgctcgctgcctacgacgtcgaatacgacggcgagcgctggcgctccgaggaactcgtccgccacctcatcgactggatacccgaggtggtgcttccgcccgagattctggcgaccttcgaccacctgtccgcgcgcgccgttctgtcacgggcgattagggcctgcgacgcgcggggcgcgctgccgacgcaggagctgctgaccgagctgatgctccatgccatcctcaggcaccaccacggttcggagccgatcgcctgtaagatattccacatgagcgcaggcctgatgacgttcggaagcgcgcacattgtcttcgatgatgccggcgaccagctttggctgggacagaccagggtcaccgtcgcggcggacagggccgcccttccgtccgccgtggccgcgagcctcaaggcctccctcgatcggaacgtgctcagggaggaacgcgagatcatacttcagctgcgccaccccgcccatcttagcgatcacgagctcggcagatccatggcggcgcacggcagggtcgacgacctactggccgtcctccacgttcccctgttgatcgcctacgacagcgcgactctgggccgcggcttctcggcggattacctcgaagggctgcgtgccgaggccgaaggcatatacgagaagctaaaggcggaactccacgtcgacttcggggatgtccgcatccacatcttcctgatccccgtcgagtgcgccgccacgctcgcccgggcgttcgagacggccctgagagccggtcgatga

SEQ ID NO: 59371 - DNA, 2121 bp, Sphingomonas sanguinis
atctctcccgaagacaccttcagagtgctccggacgatcagcgcgctggcgaacgacagcggccggcagtccaccgcgagagacctcgtgatccgagcgctcgcgataagagatcgaattcgaccggacttcatcccgctcctcgacagcctcgtccgcgtcgtcggcctgattccctacgccgatccggagcagaaccggtccatcgacgacttctacgtgctagaggcccatcgggcgcctgttccggacggcgacctgctgttccataccctacagctgcagatcttccatgacctcctgcgcaggcgcaacgtagtcctcagcgccacaacaagcgtcgggaagagcctcgtcgtggacgccgtcatcgccacgggccgctttcggcacatcgcgatcatcgtgccgacgatcgcgctaatcgacgagacgcgtcgtcgactggggggacgcttcgcggcgagccatgatatcatcacccatcccagccagactccggatccccaccgaccggccgtcttcgtgctgacccaagaacgcgcgctggcccgagacgacctgggatcggtcgagttcttcgtcatcgacgagttctacaagctgatcgtcggtgacaaggacccggatcgcgccgtggacctcaatctgatcttcgcgcggctggcgggacagggagcgcagttctacctcatcggtccgacggtcggcgcggtggtcggcatagccgcccgctacaatcccgtattcgttccatccgaattctcgaccgtcgcgctcgacatcgtcgaattcaactatccggacaacagcgacgagcggaaggacaagctgatcgagctgtgctccgacctcgagagtccgacgctgatctactgtcagtccccgccgcgggccagcctgctcgctgagcatctgctcgcgcacggctccttcgagctgagcgaggcgaccgccgacgccgtggactggctgcggcgcgaatatccgggcgagtggatactaactagggcgctcgaacgaggtctcggaatacatcacgggaacgtcccccgcgcaatccagcaatacatggttcgcgccttcgacgcgggcgacatccggcacatcatctgcacgtcgaccctcatcgagggtatcaacaccgtggcggagaacgtcatcgtttacgatcgtcgggtgaagacgaccggtttcgacaacttcacgttccgcaacatcgcaggacgtgccggccgcatgcgccgatacttcatcggcaaggtgttcgttctggaagccgctcccgccgacgaggcgctatccgtcgacgtcgccgtcggccggcaggacgagaacacccccgcctccctcatcctggaactaccggaggaggagctgacgccggtatcgaaggcgcgcgtcggcgaaatcatcgcgtcgagccctctctccatccagaccctccgtctgaaccggcacattgagctcggacggcaatacgccctccacgacgtaatttcgagagacatcgtcctgctcgaggacgcgctcgtctggtccggaatgccccagcccttccagctgaggatggtctgtgaactcatacacgaccacctcgatggggccgcgctgagccaatacggcatcaagagcgggaaggcgctcaaggcggagctcgacaggctccgcgtcgccaagacctttcgctcctacattgatcaccgcttggagaacaaatctgaatatcagacgacaagcgagtccgtcgagaaaactttgcagttcatgcggcggtacgtcggctacacgtttcctcgcagtttgatggcaatcagtcacatacaggcagaagtgctgacgcgcgccgggcggacgacggtgggagactacaacctgctggcctctcgagcggggagcctgttcatgaacgcgaacgccttcgcgctggacgagtacggagtccccccggaaaccgcgcggaagctggccgccgccgggggcgaccccgacacgctgaacgacgccctgatactcgccgttgcagctttacgtctacccgggatcgatctgcatccctttgaacgcgagattatcaccgatcttcaaaagacgctttcaccaagacaggtggccaagtaa

SEQ ID NO: 59372 - DNA, 1665 bp, Pseudomonas viridiflava
atggaaataaccgactcaggaggcgtagcagcgaagtacggcttcctttatcaggactgcgtcgcagcctggcttgccactgagatgctcatggacagggaaatgcgtgccgtgcgtgttgagaccgttgacgatattgatatcgtttgggcaggtttcacagagttcattcaggtcaaggctgccgctgagaagaaatggacaccgaccacgattaccgataacgctacaagcactgctgtcgcctcgaccaagagcaaatctgtaggcaaaccgcgaaagaaacgcatacctggttcatcgatggtgcataagtcgatgaagcaagcgaccaccccaattgacaagtgcaagttccgaatcgtctccgcagtgcgcccaaccggccttctggagtatcttcgggtattaccgacctcgcgaactggcaggccaggaaggcaggagttagtcgatgacctcaaccagcgcacctccagctttgttgccgcatccaaaaatgatattgggcactgggtagactcgacctggtggcaggtatatgcgtcggcacgcgaaatcgaattactgggcattaaaaacattcgcaatgctgctctagaagtcgtgggggtaacgctgagctctgatgccgccgccgaggcaatttggcgagacatcgtctacacgctaaccaagaaaagcgcactctctagaaaggtttactgcgaagacgacaagacctaccaccgcaacaacctcatcgactggtttagatccgaaattttgacccacgagaagtcatcccacacaagaaccaagatatacgcaaacaaaaaattgcaacctatcctcaatcacctacacacgcatacgccaagctgtgggagcatcgcaaggtgcggaaaggtaatgcaccagcgttacaatattaataactatagatatagctacatttcggacagcgtcataaagtggatcgacgaaatcctgctactgcctgaggaaatcgcagacgtcaccgggctctctactgctgaccgatatcgaacgctattatctcgattaaaagcttccatgaccgagcttggagactttcttggcaaagtcttacttcactcctgcatccgaagcctccatacgagtcagccaatacctgcctcgctgtacatagaaaagccgtttgaagtgaaagttctcgagaacgttcacatcgtgccacgagcttcagagggtgatgagctttggataggatttagtcatctctatactggcatcgacataattgaatgcctccagaacctccgtaccattctttacacagatattaccgacaacatcgactcagctcgatccaagattcttgaaatcaaacaagactcttacttgctccagcatgatatcgatgagcttcttgagaccagccaggccttcgacacacacctgaacagatatcgatttatagttttcctaggttataactccgccctaatgaccgaccccaaaacaccagggtacgagcctgaccttttaacagaaacaaaaaaactatttgacgatttcgcgtcagatctaaagaccagcggattcggagaggtgctgatcgagcttcatctataccctgtgccagacatagaaaaacttctatccgaagtaaaaaaagcactggagaaagcttgtgcttga

SEQ ID NO: 59373 - DNA, 2175 bp, Pseudomonas viridiflava
gtgcttgaaaactacgagtccgcgctgcaaagcctccaacaacagagcttttcggctttttcttatttaaaaatcgctgataagcttttgtccaaccccaagtacagaagctcgggacgagaacttgtcatccgggccctggactctcgaagccgattcctggctgtacatgcattgttacggcacctagtgcgaaaatcgggactctatccgtatctaaaaacacaattccaagatctatcgcttgcagaagagtgtgtcttagaggcctatcagacgcctatctcgactgatatcgtctttcactccatgcagtacaaaatctacgaactacttctagaaaaccgaaacgtgatcttgagcgcccccactagcatggggaagagcgctatcgtggactcgctgatcgcgtcaggaaaatttaagaaactcgtcatagtccttcctactgtcgccttggtagacgaaactcgacgcagactcgaagagcgatttggtcaaacatttcagatcattcatcatggcactcagcgttcagagcaggagaaaatcctctacgtacttacacaagagcgcgtaaatgaccgagacgatctcgagagcattgatttatttgtacttgatgaattctacaagctagccttcaaacgcaagaaagacggcgacattgacgatgaagatgaacgagtgcccgctctcaactcagccctgagcaagctcctacgttgctctgaacaattcttcatgacaggcccatttatcaatggcgtcagcgggctacccacgaccaaccttaattacacattcatccccactgactacaataccgttgcagttgacgtcgagttcttcaacatcaagcctgatagtgccgatgagaagaacaaggctttagccacaacgctcaaacaaatccatgggcctaccattatttactgcaagtcaccaggccgcgcagtacaggttgctaaattccttctaaaatctggctatataaaatccgtagaagatgactatctaacgtggctggatcagcactaccaccccaaatgggagtacacgcgagcatttagaaatggaatcggcctacactatggaggacttccaagggccatgcagcaatacacgattgacaaattcaatcgtggcgagttgccgtttctcatctgcacctcaactatcattgaaggcgtaaacaccgtcgccaagaacgttttcatatacgacaaccgggccggaaattttagcattgatcgtttcactcacggcaacatcaaaggccgagcaggacggatgggcgtgcatttcgtcggcaaggttttttgcatggaagagctaccaaagcaaagcgactgttttgaggtagagatacctctaggcaagcaaaccgaagaactaccattgaatttcctcgccggcattcagccagaacatttgactgacttctcccaattaagatttgaggccggaacatcagccagcaaggcaggtaaagattttctgaggaagcacgcatcattcaaatttgagaccattgaagcggcatttagcttcatagaaatctgcaatgaaagcgaatttcaaagctgtttattttcaggcgtcccaaaaacaggatttgctaacttcctatctcgcttcgttgatcgcgtatgcgctggctcgcttaagaagctgggactcatcaataacatcagcgttatcaatgccaggatctctgcctacctgatggcgccgagccacgaaagttaccttgcgcagcaaatttctcgcataccgtccagtaccgacagcgaggagctgtccgagcagattaaccatgccctgaactttgccagtcgaatatttggttatgcgatacccaaagctttagccctgcttgaggatatcgtcaacctcgagctcgaagagaggggcacagagttccgggcgtcctatggacatctgcgcagtatcttcgaaaactatcatttgcatccggcctgggccggacttgaagaaatgggaattcctgttcaactgcttcataagctcggaacactatttccatttgtagaagaggcaagcgtagacgacgcttctcgaatcttgcgtgaaaacctggatcgactccaaggcctgaccttgcttgagcgtcatttcatcgatagagcgctaggtcgagtaaagcggtaa

SEQ ID NO: 59374 - DNA, 918 bp, Eubacterium brachy ATCC 33089
gtgaagctaaatccaaattcaaagaatgctattaaaccatttaagcatcttaaacatttatttatatctaaaaatacagatgatggatttttagatttatttttacttcctattaatgcaaggaattttgattataattctgtttctgaaaatctaatggaatctgttgccgattacgccttatcatggaagattagagataaatataaagataaggcaatgactctgagtaggaaagcaagagaaaaatttaaggaagctgcaaaaaatgatggagagctaggagaattactattgttttgttttttggaggggcatttagatgctcctaagatattaacaaaactagaattaaaaacatctaatcagctttatgtaaatgggtcagatggagtgcatttgaagaaactctcagataaaaaatatcaactgatttttggtgagtctaagacttatgatgatttgaatcgtgcatttgataatgcttttaaatcaattggtgagtttgttaatgaggtaaatgcaaaaggtaatgataaaagtggtataaactttgaaaagggattaatatccagcaatatagagtcggatatttttgaaaaagatgaggaagaaattttgaatgtgcttttatatccagaagaaaaagcaaactacaaattttctttagatgatgctttttcaatatttattggttacgagatagacataaaagatgagcaacagaaatgctcaaatgatgaatttcctattgaaatagaggggaaaattgtaaatcagatagagacttataaaggtaatgtttataaattaattcaaaaatatggtttaatgggatacaccttttatgtatttataatgccatttactaatattgacgagaataggaaaaagatattaaaaaaggtgcttgaataa

SEQ ID NO: 59375 - DNA, 2598 bp, Eubacterium brachy ATCC 33089
atgaatataatgcagaaaatgtctaatagggcatatgaagatccatatttaaggaatttaattcataaattggaaaccgattattgtagaaaattttatacaaactcaagtcagttaatgctaaatgaaaaagaaattttacacttattacgattttcggatattttatgcagatctgaagaaagtatgcatagaaatttatctctaaaaataataagtttacttttggaattagaagatgttagtacatcagaatattttcggattattgctgctaatacattggtcaagttaggaaatttcccatcgttaccaattattgatagagatggaaagtatttaaaggttgacgaaattagaaatgactatattctaaaaggactaatgcaagcatctccattaggtaagccatttacagacgcacaatataatgtgtttgaagaaatgaagaaaagaaatcattatagcttttctggcagcacatcttttggtaaatcgttcatttttgaggcgtttacaaaatatataataaaagaacataacaaaaccgataatattgcatttattgttccaactaaagcacttataaatcaagttgggaataggttgaaagagattgtagatgagtttggatataaggttactactacaccggttattcctaaagtttttttaaatcaagataataaatatatttttgtatttacagctgagagattaatcttatattttacagataaaaataatccccaaattgactatctttttgtagatgaagctcataaattgcttagcaaaaaggatacgagaacaccattactttatcatgcattagtattagccaagaggaaaagtgtcaatatatattttgcatctcctaacatacctaatgcggatgtttttttagagatgataaataatagcactgacgaaagcatgtctataatagaatcgccagttactcaaaatagattttttattgataccatagagaacaaatctttcatgatatcagattatggagatgatatagtttttcctaaatttgatttcaaagagaatgatattattggtaatttgcaattggttttagaatcattttctgaagatagacaaagtattatttattgtaatacagtagataagactattcaaacggctatcaattttgcaaatcgatgctctaaaattgattctgaagagatagatgaagtgataaaacttatagatgaaaggattcatcatcagtattatttaaaaaaatgtttaaataagggtattgcatatcattttggtgggatacctgaagaaataaagttgagaattgaaaatctatataaacaaggattaataaaatttctgttttgtacatcaacattgttagagggcgtgaatttaccagctaaaaatatttttattttaagtgaaaaaataggggatggtaaaatgagcgatattgatttttggaatttggcaggaagagctggtagattaagaaaagatatttctggaaatatcttttgtgtcaacctgtataatcaaagtggatattggaaagattcaaaaaatgcaagcatcctcagaacaaaagagatatgtgaaattaaaccacaaatactatcgagacaaaatgataatttatataagaatataagcaattattttgaacaaaagggttatagtaacaaaaatctaagtagtgaaaaaaagaaaactatagagatgtatggaaatattttgctttttcatgattcaataaataatgattctattttaaaggatagattcgttgatagtgacaaaaattctgtgtcattattgaagaaaacaagaaattcattaaaagtagcaccagaaattttagcaacgagtatagatataaatattgcaaaccagaacaaaatagcaattagtgatgttcctaatttaccaacttctacaaagagagaagattgtcttaaagttcttactatactttatgagcaatacaaatggactgaaactgaatctggtggtagaaatccgatgattagacataaaaatcagcttaaatattatgcaacattgatggaatcatggattaacacaaaacctttgaaagtgcttatacaaagaactatcgattatttttataatgatggagatgaaagaaatctttatattagacaagaaggaaagttaaagcctgttaaatttgataaagaaaatgaatttcatataaataaattaatcaatgatgttgtgagcgacatagaaaacattttgagatttaagataaaaaactatgtttctaattatcaggcattattaaaaaataaagagaatttaaatgttaatgtggctgattgggaaagttatattgagtatggaacgactgataataaggcaattgaaatacaaaatttaggttttccaagaaacattgcaattttccttagagataaatatttagatgcatttgaaaagaataacatgggtataatttgtgatgttgatgaaattaatttaaaaaataatattgacagagataagtataagtttgagtatgaggaactagcgttatttatgaattgggaaacagagaaagaagcaaaatag

SEQ ID NO: 59376 - DNA, 921 bp, Dermabacter hominis 1368
atgacacaggcaacgatcacgccaacgctgcgcggcgacacattcgcgtccacgttcaccgaagtggcccattcgaacacgttaggtcttcgaaacgacgaacagttacgcctgttccatctgtctatccaaaacaaccgcttcgaccacacagccctcgtcaaattcctcaaacgcaacgttggacgctacgtcttctcccgcgccgaatacgaaggctacaaacagcgagacgatctcgaagaagttgctctcgacgcggtaaaccggatgcgttcacaacaagacggcatggggttaggtgaaatcttgctctacgtcctgctcgaacaaatcctcgaagcacccaaagtgctgagcaagatcgagctcaaccaggcccgaggccagatccacagccgctgcgacgccatccacctactcacaccagacggtcagcgaaccaccagcagcatcgtgtttggaacctccagcgtggtcggcaacatcggtgatgccatcactgcagcattcgaccgcgtcgtagatatagaacagaatcgctcagacgaggttcagctcgccgagcaaactgtgttcaccaagaccctcgagccagcaacagcaaactacgtcaaagatctgctaatcccgaagccgggtggagcacccgagtttgataccgcttattcgatgttcctgggctacgacatcggtctagatccgaaaaactatggcaaccagcagtatcggtctgcgctcgatcagaaaatgcagggagatatcgccgcgcacgcccaaatgatcgccaacgagatcaacacacgaaacctcgataattactcgttctacatctatgttctgcccctcaatgaagtagacgttgacgcggacgcaattatggatgggctcgtgggtgggccaggtggtagccatgtctga

SEQ ID NO: 59377 - DNA, 2643 bp, Dermabacter hominis 1368
atgtctgacaagaaattaacagtcggcgagctcgtattttctgacatcgactccaacgaattcctcaaacagctgtacgccaacctgctctacaactacggcttacatcgattggggctggcggatcgtcacccatacgacgtggatcttgaagccgccctgcgattcgcagacctgctgtcgaaatcaatccaccccaccaatcgtgaccgacacagggtgtgggcgcaagaaatcgcgcttctctgccacatcctctacccaaatgatccccgcacgaaagtatacgttcctgcaatcttcaccacgttaggtaactatccaggcctgaagcagttgggcgtgacttccgatatgggcatccttgacgccgcattcaacgcctatcaagccgagtacctcaccgtgcccggtgacaaaacgatgaagttcttcgcgccgcaaaagaaaatctacgaccgcctcaccgacggcaagttttccttctcagccccaacatccttgggcaagtccttcatcatgcgcaccttcatcaccaaccagatcaaatccggggtgacagccaactttgcgatcatcgtgccgtcaaaagcgctgattaacgagacccgatcgaaactgatcgctgaccttggcgaagacctagaacgacacaactaccgaatcgtcagtgccgccggtgacatcgtgctcgaaggcgatcacaacttcatcttcgtactcaccccagaacgtctgctttaccttctgatcggcaaacctgcgatcgaattcgagtacgtctttttcgacgaatcacacaaactctcatgcaagaacagccgcgccccgttctactaccaaaccgtgacaatccttcaacaccgccacaggccaccgcacttcgtcttcgcttcacccaacattcccaacccagaggtattcctaaggctggttgatcctaactctgacgagaatgagaccaacgcggtcgcaacgcagtattcgccagtcgcgcagttcaaatacctcgtcaacctgcacgagaacaccatttccagttacaacgaccacacccaagaattcacgcacctagcctcgcttcaagctcaggacgctaccgcacagggcataacccgatttgttagtgaatcatcacgaggttcagatcatcgtgggcaaaccatcgtgtttcatgctgcccgacatcacgcagtgcaagcggcgcgtgcctatgcccagggtatggcagacctcaatgataaagacttggacgctctcgcaaaagatatagaacgcgacgtccacgaggactactacctcagtggtctcatccgtagaggcgtcagctaccatatcggctaccttccaccagcaatccgcgaacgcatcgaaggtctgttccgcgaaggtaaaatctcgacactattttgtaccagcacgcttctagaaggagtcaaccttcccgccgacaacctcgtcatcacaaccaacaaaatcggcagagcaggaatgacagcagtcgactttaagaacctgatcggccgagtcgggcgtatcgagttcaacctctacggcaacgtattcatcatcgtgggcgaccaacttgcatccgagcgacaggccaaggaactcctgcaagcgaatgttcctgcacagaagctatctgtgcaaactgactcacaaattatcagcaagaaaatgaagcaaggagtcgttgctgatcttcaagaaggacagattgagttcgccaaaggagatgaaagctacgagcgctacaacatgaagcgcaaattcggcctcatgctcttgcgcgacatcaccacaggacgtcaaagcctagtgcgtgaagaattctccgactacctcgacgaccaaaccgtcagccaaatccgcgaatccttcgcgcaccgagaagggcaacaagacgacgacatcaacgtatctgtcgaccaagcagaatccttaactcaagctgtccgagccggactcaaatacccacacatctccccggacgggaagttcaactacgacgaaactctcgcgtttctccaaaggctcgcctcaatcttcaaatggcgcgtctacgaccccgaaacactcggaaaaacagataagtacagcaaccaactcacgatgctgcgctggtacaccgtattactcacacaatggatggaaggtcacggactccgttcgatcatgaaccgtgccctccagtaccgcctgcaacaaggaacgctctacatcaaagggcaaggagagatccgttacgagaacacgctccagcaccgcaacatcgttatcagtgaaatcctgaaagttcttgaagatgtcatcctcttcagtctgtcgaactacttcctcaaattctccaacgaatacaagaaggtccacggagtagagcagttcgacaatgactggtacgagtacatcgagtacggcacaacaaagcaggaaactatccttctccaacggctaggattcacccgcgagagcgccacctacattcgaaccaacgtctccaatgcaatcttccttcacgaagaaaagccttacctgaacccgattctcctcgaaagctcgaacatcaacgtccgcaaagaagccaacgaaatcagatacaacgtgccagaagccttctcgatgccagattttatgttctaa

SEQ ID NO: 59378 - DNA, 903 bp, Porphyromonas cangingivalis
atgttactaagaagggatgtacaatgcaattttttgaatttattttctaaaataatagaaaatgaaccatgcgaaaatgggaataagctaaatctctttgctctaaaaataaccaacaactgcttttcttacgaaactcttacggaagaattaggaaatattcttacgacgtatgctctttctcggagtacatatgatgagttgtgtgctcaaaagaaatatacctcattagtcacaaaagcgaaagaaaaactaagaaaagcagaaagtaatgacggagagcttggcgaattattgttatattgcatgttagaatcacatctaaatgcacctaaattgttaacaaaattagaactaaagacggctgttaataactatgtaaatggagccgatggagtacaccttctgaaaatagatgattcgacatatcaatttgtttttggtgaatcgaaattaaattctgacttacaaaccggtatttatgaagcgtttaaatccataaacaccttattaaaggacgacttaaataaactacggtatgagatcagtttagttaatagcaatatattaaaagagacagcgaccgaagaatcttctactatcctaaagaagctattaatccctacagagaatgacgaagacctgaacatagaccattctttcggtatttttctagggtttgacattcctatatcagatacagagcggaaaatgaaaaattctgatttcagaactttaatgaataataaaatagaaaaggctgttagggaagtattaacaacactcaataatcaaatcaaaaaaagcgagtttaccggctatagcttttacatctatattatgcctttttcagaattagatagcactagaaagaaaattatagaaaatctcaaaacgatgtaa

SEQ ID NO: 59379 - DNA, 2550 bp, Porphyromonas cangingivalis
atggcattagctgacgaaattgcattagagatattatcaagcccttatttccttaaattatttaaggtttgtatagaacgctcaatttatcatacattaagcattgataatcaaaattcatattcggaaaaagagtttagggatttacttcgttttgcagatttattgtcagtttcctcaatagcagaagcgaggaattatgcatatagaataattacatacctcaatccatatttccagaaagacgagtactactgcactgtatctaaagcagtctattacaatcttgggaattttcctgcagtcgcttatttggaaaaagagaacaacaatcaatcggaattaccatttgatagattggttgaattagaagccaaaaagctaattcaagaagttccagaatctgaaggtgaatttttcacagatactcagtataaactattttccgaattaagcagtgcccgcgaatttagtttttcggggccaacgtctatgggaaaatcatttattatcaaagcttttatccgtaaagttatacaaaacaaaccacctgaaaatttagtggttcttgtgccaacaagggctttaatcaatcaatttgctttagaattaaaaagaaacttaggcacattactcgagcaatacaagtatagaattgtgaccaattcaaatatatctgaattttccgcagctgaaactatcaattacatattggtattaactcccgaaaggctaattagttatatatctcagtacaatcctcctattggatttctttttgtcgatgaagctcataagattgctcaaaatgatgattcaagaagtattacaacttatacatctattgaaaaaacacttaaaaaacatccgaatattaagttatatttttcctctcctaatgtttctaatccagaagtatttcttaaaatattccgtgatactcaaggaaaaaatcatttcaaaacagaagaaactcctgttgctcaaaatttatattttgcagacttagataatggggagttttcttattttcacaaaaacgagtttgttaaaatagagagtccattacctaaaaatgcaaaaacaatcaatgatatcttagaacatctcgggaaaaggagtaatcttgtttattgcaatacaagattaaggactattaaatatgcaaaatcttatgctgatacaataaatttggggaaagagaataaaaccttgaacaaagcctctcgaattatcagagagtatattcaccccgattattacttagctgagattataaaaaaaggtgttgcatatcattttggcaatatgcctcaattaataagaaatcttgtcgaagatttgtatcaaaaaggggatattcggtttatgttttgtacatcaaccttattagagggagtaaatatgcctactcaaaatctttttattcttaataacaaaaagtctacaaaaacattaaaaccgattgacttttggaatttggcgggcagagcagggcgattatctaaagagctgcaaggaaacgtattttgcgtaaggcattctgattgcccttggaaggacacctcattttttaataaaagagaaattgaacttgttccatctgtattttctcgtatcaatcacaatctaaggaaaattgaaactttaatcaatggtggtgaagttaaatcaggttcagaagaagaaataaacatattgagatatattgctaatataatatgtgtagatactttagaaatcaaaacaggctaccagagtccaatcattgacgagttaatcagaaaaaagaagagtaacattatagagttggctaaatctaaagcatcgaaattagaaacaccatattcaatacttaactctaatgaatcaatcggattagactctcaagatgcagcctataaacggttgaaatatttacatgcccaaagaactcctataactctgccgagacaggttaattacaaatcttgcaaaaatgtcttgttatcgctccatgaactttataactgggaacagacgaacaaatatttatctaacaagaacagtttgaaatattatgctacgttaatgaacaaatggattaacaacgaaagtctaaatcaaattatttcagatttagttgattattattctaaaaatcggaacactttaaaggtatcgtataacgaatatgaggcgtttgacaaatcaaataaaacgcacgtaaacattctgataggcaatataatcaatgatatagaacatattcttagatttcaatttgagaggtattttaatcactattatttaatgttgcaaaatttgctaggggaagaaaatgcaggagaaaattgggctactttgctagaatatgggacacaaagccgcattatgattgctttacaaaatatgggattatccagacttaccgcaagtaaaataaacaaggaatgtaaagacgcattgacaatagaggaaggaaaacttaagagtgtaaataaagcatttttattggcagaatttactcccggaacgctagaacatgaagaggtaaaaaatttactgtaa

SEQ ID NO: 59380 - DNA, 828 bp, Stenotrophomonas maltophilia AU12-09
atgctagaactcgtattgcacgaaatcggttccgataggtcgatctcgggtctatgtgcgggctatgaagggaagcagtggcggcactctgcgctggtcgactatctaatggaatcacttccggacttctgcctcacctacagtgagtacagccagatcggccacgagtcggcggtgcgaatgatcaggaaagcggcaaagtcggtttacagcacaggaaagttcaagaacaggggcgagtttggcgaactgttgctccacgtcattcttaagacgacgatgggaaccctacccgctgtatctaagatttattacaaggactctgcaaatgacacggttaagggattcgacgcggtccatgttgtcccctctgagacaggactggagctttggctaggggaggtcaaattttacgaagagattggctctgccattcgcgatgtagtaaaggagctggagcagcacctgacggctgactacctacgaagcgaattcgttgcgatcctcaacaaggttgataaagattggccgcacgggcgacaacttctagccttactggatgagcgaacgtcgctagaccaagtattcgaagctttttgcattccagttcttctcacctacgacggccaaaccactgccgaacatgacgcgtcctctgaagcatacaaacgagccttggtctcagaaatgcgtttcatcaaggagaggttcgacaggcgggttgccagcctcccacaccgcattcatcttttcttggtgccgttgaaaacgaagaagattctggtagaagccctccatcagaagcttgaggcaatgaaggccctatga

SEQ ID NO: 59381 - DNA, 2145 bp, Stenotrophomonas maltophilia AU12-09
atgacatcggacgtctttcagttttcggaccccgcctccatcctggcggaccctttccgtgccacccagcacctagcatctcttgtcagtcgagcagagttgaacaaattcgacgacactgcggtccaagaggctgttttgtatgcgctggagaacaaagccagcttcgggccatgcagtgtcatcgtagagagcctggcacgcgcgcgcggactgtttccttatatcgccaatgacgagctcagtgtccgagaggagcttgccttggaggcgcatcggcccaccggcatggaagacgtggtgctacaccgaaagcaggctgaggtttaccagaggttggttgctggtcagagcattgtgctgagcgccccaacgagcttcggaaagagcctactgattgatgcgctaatcgcttcggggcgctacggcaacgttgccgttgtggtgccgaccattgcgctgatcgatgagaccaggcggcgcttggcggagcgcttcggagacaccttcaagctgatcacccatcccacccaggaggtttcttccaaaaacatctttgtgatgacccaggaacgcgtcttagatgtggacacactcccatcaatcgacctcttcgttatcgatgaattttacaaactcgaccctaaacaagatgcggaccgcgcgttattgctaaaccaagcattgcatcgcctactgaagactggcgcacagttttacatgctaggaccaagcataaaagaaatttccgctcagctttcgagcttgacagggtctatattcgttgacactgactacgcaaccgtagtgactgagcagatcaatgtcagtccgaaggacggggacaacatgaaggccctcgtggaactctgccgagggcttcatgaatccaccctcatctactgcgcttcgcccgcaagcgcacgaagagttgcgacggccctagcggcagccggactgggcacgagggagcccaaactcaaaggcgcttatgactggctcgccaagaactatcatcccgactggacagtcgcccgcggcttcttgacaggtataggggttcaccacggcaaggtcccgcgcgccatcgctcagtatgccgtacgtcaattcaatcacggtagacttccctatcttgtttgcacctcaaccctaattgaaggcgtgaacacgaaagcaaagaatgttgtcatttttgacaacaaggtggccctaaagaagttcgacttctttacattcaacaacatccgaggccgatcagggcgaatgctgcgacactttgttggccgagtctacctatttaatgctgcacctcaggcggacttgccactggtggacattcctctggtcaaccaagatgaccgcacgccagactccctactcattcagctagaccaagaattcctaacgccagaatcccaggcccgcatgaccgcgcttcagaagagctcgctcttgcccattgaggtattgcgtggaaattcaggagtagaccctggcgcgcaaaatgccctcgccaagcacttgtgggcggccggcagcgaaggattgggcatgctgctttggcagggctttccagactacgagcagttaaagtacgcctgtgaattgatatggaagttcttgattgggaagaagcggatcggaggcacggttttatctggaagccaactcgcgtggaagataagtcgcctagcatcagccaagagcgttaagcagctgatcgatcttgagctcgccgaccaagattcttcagaggcggaccgcatcgttgaggaagtcttggatttcgtcagaacttgggctggcttccacttcccccgctacctaatggtgctcgaccgcatccaacgcgccgtctacatgagtaggaatggggaagcgggggactactccgtgtatgccgcaaagattgagaccttgttcacgacaagtggcttgattgcgctggatgagtatggaattcctatccaaatcgcggagaaattgcgcccgtacttcgctcaacatgacaccgttgatgaagccgttggccaactacgacaacttgatattgcacgtgtcgcgtcgctaactgaattcgagcgcgagctagttcaagaggcacaaacaggccttggaacgcgtgcagtgccggtagcctaa

SEQ ID NO: 59382 - DNA, 960 bp, Stenotrophomonas maltophilia
gtgtcgaatattactgcagcagatctggaggccgcgcttacagggaatcctgaagcacttgatgttcacctcgctcttgtgtcgagagatgtttctattgatgggcatcttgtaaagattcactgtcattgcctgacgctagacggaaatgggcgagttcaaccgcgccgattggcagagtttatgcggaatgctgtcgtggactatgcgatcccacgctcacaacttttggaggctaaggcgcgggaccaaaagttcaatagctcggaagcagtaactgagctggtagagcgagctaaacgttcgtttaccgacttggcgactagcggtgaagggggggagatgcttctgttcttgttggcggaacgcttcctcaagctgcctcagattctttgcaaaatggatctgaagacggatacgcgaatgcactatcacggggccgacggcgtttacgctggggtgacggacgacggtctgctaaagctctactggggagagtcgaaggtttacggtgacgcgagtgcagccgttcgtgagtgccttcgttccttgtcgccgtttttgactgagccagatcacgaggatgctgaaagagagcgcgatctgctactactgagcgataaggcagatcttagtgatcgtcgcctcaccgaggcaataaaaaagtacttcgataagtcttcggttatgtcgaagcgtgtacagtattgcggggtggcccttgtagggttcgatgcgccattctatccgggagaaaatgcaaaagggattgctgaggatatcctcgaagcctctcgagctgcgcttgttgggtgggctgatcgcattggcgagcggctcattgtagagaaacttgatcaggtcgaaattgaactgctatgcgtacccctgccatcggctgatggatttcgtgcggcattcttgaaggctatggggatcgcgaacaatgagtcttgctga

SEQ ID NO: 59383 - DNA, 2592 bp, Stenotrophomonas maltophilia
atgagtcttgctgaactacagtcttggcttcttgaaaatggaatccgagatgacctcaataagttgactcggctcaccgtccgcaatgagcttgataatttagcgccggaggaatcttcagattccgctgaatccattgactgggcaaggttgcttctggctggcagcattctggcccgatctaatgagaaaggcgatcaggatgccgctctacgtatcgcaacaggcgcagtgttgttggcaaaaggccaagcgctgaaagatgctggcggagtactgatgagcaagctgtcgaactttcgtgcaatttcattagcttgcgttcgtaaactcgtatcagccgatcttgattccagactcggcacagcgctgcgtcttgagtcccaccgtagggagatggatcggtccattttggtgcaggcaagtgggacttggctgcaggtaaatgattttcagaagatgttctgggccaatgctaggagagaaggttggctttcagcatctgcccccactgcttctggaaaaacgttcttagttcttcagtggctaattgaccaagtgaagactggtggaaatcaagtcgcagtctaccttgcacctactcgagcgctagtatctgaaatagaaaaaaatcttagagattcactcgatcacagcgagctgattgaagtctcatcattgccacttcctgaaaagtacagggtcgcgcgagcaggtggtgctcgagtaattctcgtgttcacccaggagcgactgcatcttcttgctaacgtgcttggggatgagttgctaattgatttgctcatcgttgatgaggctcacaaaataggcgacaatcaacgcggtgtgattttgcaggatgccgtagagcgggttactcgcgctaaccctcagttgaaagttgtttttattagtccggctactcagaaccctgaggcattgctcgccgacgcgcccagcggcgtgcagacgattgcagtggacagcgactcctcgacagtgctccagaacttagttgtcgctagccaagtttcgcgacgcccgaagctttgggaactaaagctgaggcagcagggaggagagttgccaattgggacgctgcagcttgctagcacgcctgttggaatcaagaagcgactggccttcatcgcggctgctgtcggggaaagaggtggaacgttagtctattcgaacggggccggtgaggcagaagaggtggcagacttaattagtcaactcttgcctaagcttgacgtcgtcgatcctgaactttcgcagcttgctgagcttgctcgaaagggcgtgcatagtgattttctgcttgctccgcttgtcgagttgggtgttgcgtttcattacgggaatatgccttccctgcttcggttggaaattgagcggctttttcgcctggggaaaatacgttttctggtttgtacatcgaccttgattgagggtgtaaatttatcgtgccgaacgattgttgtgcgagggcctcgcaaaggtaaagggcacccgatggagccgcacgatttttggaacttggctggtcgcgccggtcgatggggagatgaatttcaagggaacataatttgcattgatccagcggatgagacagcctggcctggaggtgtcccgggacgcgcgcggtatcccatcaagcgtgagagtgacgcagttgtcgagcagggggattgcgttacggagtatctgtccagcaggggagcagtggatcaagccagcattgagggtagcgataaatttgagcaagtgggggcctatttgctaacgacatttatgcggcttggctccatttcgaaggccgggcttgcgaagcgccatgatcccgcattgatagcgaagctcgactatgcattgggcacgctcgcagacgggattgagatcaccgtggatttggcgtcgcggcatccgggcgtaagcgctattggcctccagcggcttcttgagatgtttcgttcttacgctggtgatgtggagaacctgctgccggcggaagttgcgagtgacgatagctatgatcgattcataactattatggaaagagtaaattcgcacgtatttcgtgcgttctctcctgatgccagaattcggttgttcgctttgatcgttgtgaagtggttaaagggatactcgctgtcccggatcattcgtgacagcgttgagtggcatcagaaagcaaaaagaccttacaaacttcctatcctgatccgggatacgatggagttagtcgaacagatagctagattcagagcgcccaagtacctgtcagcgtacatggatgtgcttcacttgcaccttcgcgagatagatcgtgaggatcttatcgaggatggtctagatataggcacgcagctcgaattcggtgtttcttcggccactcttctttctctaatggagctagggctctcgaggatgtctgccgtcgctttgtatgaaagaattgcccgcgatgatctcagtcgtgaagaatgcgtggcctggataattgatcgaaatagtcagcttcaatcaatggagattccgggtctaatcattcgcgaggtgagggagtgcctagcactgtctagtagctag

SEQ ID NO: 59384 - DNA, 894 bp, Pseudoalteromonas luteoviolacea B = ATCC 29581
atggataagcgactagagccacaactaaaaaattgcgatgaagtaaaagcaatacttaaaagagtagatgtcccttttactctcgatgatggcaggcaagtcgacaccctgcttatgtatgtgtcacctgatggtactcctgatccgctaacacaattctttgccaccataaaaaatggaatattgacgaacttcgttttaaggtgcagtgaaattgagaaaaaactcggattgaaaaaagaaggtgctgccgaaaagctctttgaaaagtcaattcgtaagctaagtcagcacacagcaaagggggaattgggtgaattaattatgttcactttgcttgatgtatatctagaagctcctaaattattaagcaaaatgtcatttaaaacttcccgtagaatgccagtttttagcgctgatggtgttcacggacagttttatgatggcaagttcaagctgtttctgggggaatcaaagctttacaaggactttaaatcgggtgcaactgaagcagccacttcgataaaaaaagcggcagataagtaccaagaagaatttgatttaattgagagttttattgattttccaaatctagatgaagaacaagaagatatacttttagacatattgaaccctctctctaatcctgattttgaagatgttttatataactcttgtttcataggttttactaagcctgagttggttggctgtgtgccaaatgagtttgaagctgcctatctcaaaatcgctggtgaatatattggagatttttatagaaagttagaggggaagatgctgccagtaaataaaactgtattaatgattctgccttttaaatgcgttgatgatttagttacacaatttataaaatatatggatataaaagaatga

SEQ ID NO: 59385 - DNA, 2508 bp, Pseudoalteromonas luteoviolacea B = ATCC 29581
atgagccaattcattacgaaactctcgacaagagcattggctagcgaggattataagcaagcaactaacgaacttttccgttcttatgtatttaaaatggttgggcaggaagctaaattaagtagaaaccatgtaaaacagttggttagtattgctcaatatttctatagggtaaacgataataaatttagaaaggaaggcgctgcactcctttctatgcttattgatgtttgtggtgacctttacccagaaatcatcgcaattgctaaaaaggtattttccaatgccggagattttccaaatataaagctcatagacaaaaattacccttcactaaattttaagtacaatttttattctgaagctgaaatggattttagacaagagcttaatactgtcgaagatcttaatttccctcttactgactttcaaagatcgctttgggagaaccttatagctgatgaagatgtaataactgtagcacctacgtcagcagggaaaacgcacataattcttagttatttagttagaagaataatggactcagatggtgcttttgctgcaattatagtccctactagagctttaatttctgaggttgcaaataaactttacgagatagctaaagaacataattttgaccaacagattgagatctgcacagtaccaaaagataacacctacgcagacaaaacatttttcgtaatgactcaggagagattgtttgatgcgttgcaagcgggtgacttaacattcaactacctgtttatcgacgaagcccataacataacagatgaaagtagaggggtgttgcttcatcttactatcgataagttgttagaaactagtggctacccacaagtaattattagtatgccctctgctagttatcaagactcattctcaacagtttttgaaggggtgaaatttacaaaagagattacttccgtttcacctgtagctaagattttaatggaagtaaaacccgcaggtcgaaatttgaccattcaaaggttaaacacagaagataaaatagaaataccaaaaggctttaaagggaagcatctatcagatattgctattaagcttggtcaaggtcatagcaatatcatatatagaaaccaaacagatcattgtgaagatattgcgagaaatatagcggacaaaattgaattctttgatactaccgaagaattagaagaagctgctgattatgttgaagagtttatccatgatcgattcacattggctagtaacctgaggaaaggggttgctttccattatggtcctttgccaagttctctgagggtcatgattgaaaatctcgttaaggaagaacaaattaagttcgtagcttgtactagcacactggctgaaggagttaatttacctgcaaaaaatctatttctctataaaccaatgcaatccgcaggaatgggagcgccagaacggttagacgatgtaaaaataaataacattacaggaagagctggcagaatgcttgagcattttgctggtaatgtcttcattgtcgaaccagaagagtggcaagtgcaagactattttgaagaggtagatattgatgagcaaaagatacccacatttttcaaagcactaaatgaagagttagcacatgtttacttggctttagaagggcagtacgcacatgatgcagaaaaccagtacaaattttacactattgctaataagttgattaaggaattagctgaaggcaatatagatagaaccctcaaagcacaggaattggagttagaccctgatgacttaaattctttgtatacagctgtagaaaacgcatataaaagtttattagtcgcacctttcaccctcgaagctagcccaacaataggctatatacagcaaaacaagttattcaaatttttaaatgatacacctgatttaaatgattgggttttacctcatcccaaatcgaaagatttatataaagttttggttaaggtttgtgaaaagctaacagaattcggtgtctttactccgacaggtgattacctaatgacgtatatgggggttattgctgcaaaatgggttcaaggggaaagcttgaaagatattattactgagcaacttgaatggatggaaaaccataagaaaaaagaaacagatttagttaatccgaataaagctgtcagagatgttataaaagttataaacaatgatattcgattcaggatggcaaatgcattgcgttgttatcaagttttattgtcaaatgttataaagctaaaaaaactcgatttagctagtatcaaactacatacctacattgagatcggtgctagtgatgagcgaatgatcgatttgattaatataggtttgtcccgcgaggcagcaaaagaagtcaatgataagctttcagctaatgttgaagtcgaatccttgcatggactactagagcttttagaaaaaaatatgctcgattcattgcatccgataacaagaaaagagatattatcaatgtctaagtga

SEQ ID NO: 59386 - DNA, 894 bp, Pseudoalteromonas tetraodonis
atgggatgcacactgcaaactcaattagaaaacgcacatcagatcaaagatgtccttaaaaaagttcataccacattcaagttgcatgatggtagaaaggttgagactcttctggtgtatttaccttgtattgaagactcaaagacattacatgacactctttttgagtgcgttagagatggtatccttcaaaacttcgttttctcctaccatgaaatccaaaaaaaattaggtaaaacttctgatactgcgatggaggatttgttcgataaagcagtaaaaaaacttagtagacacactgctaaaggtgagctcggtgagttaattttatttactttgttggacgtgtatatccaagctcctaaattgttaagcaaaatttctatgaaaacaaatcctagaatgcctgtttttggagctgatgctgtgcatggacaatttctagacggtgaatttagagtatatttgggggaatctaagttacataagaattttaaatctgcagctacagatgcaacaagctcgatagttagtgcaaaaagtaaattcgaagacgaatttttgttgttggacagttatcttgatttccctaacttgaccgacgaacttgaggaaagaattttagaatatctagatccttataattcaagcctctcaaatcgaattcactctccttgctttattgggttcactcagccagaaatcctctttgtagatgaagcttcgcttttagagcactatacaaaactttcttgccagtatgttggggacttcttcaataaagctgaaagtaagagcctagatatcgaagaagtgaccttactaatgctgccatttggttgtgttgatgaattggttagtgaatttatttcgtatatgggaataaaaaagtga

SEQ ID NO: 59387 - DNA, 2496 bp, Pseudoalteromonas tetraodonis
gtgagtacaattgctgcaaaactaggaaaaaaaattttctcgaatagcgactttactaaagatcgaaacgatatctttgagcagtatgtagaacaacttatagggaataaaccactacttgaaaggagcttagtaaagcgtgtttcaacgactattcaggtattccataaaagcgaagatgagaaattaaggaaagaagcgtctgctttacttgcaattcttctagatattgtaggggatgactatctagatttaattcctattgcaaagaatatttttattaactccggtgactttccaaatgtctcgctacttgataagcggcaccctaatgtttctattaactatggctttaataacagtacgaaatttgagcttaaaaaagaaatgaactctgttgatgagctttccttcccattaacagactttcaaagaatgctttggagtaatttgaaattagataaagatgtcgtgactattgctccgacatccgcaggtaaaactcacataatcctctcctatctcgtaaataaagtgattaaatctgatggttcatttgcagcgatcattgtcccgactagagcattaatttctgaagtatcaagtaaggtttttgaaatagctaaagaagtagattctgaaaatgaacttgagatatgtagcgtccctcgagatgaaaagtttaactccaagactatttttgttatgactcaggaaaggctatatgaattgattcaacgtggtgacttgaggttcgattatctgtttatcgatgaagctcataatatttctgatgatagtagaggtgttctattacatttaactttagacaaaatatgtgatgaaagtgatcctcaaataataattagtatgccatcagagagctaccagaacgctttttctgccgtatttaacggagttgaatttaaaaaagaaatcactaggcattctccagtagcaaaaatactactttccgttgttatgaagggaagaaacattgaaattgagaggtacaatacttcggataaagctgtaattcccaaaggattcacaggtaccacaaccgcagatctggtttataggttaggtaaaggacagagcaatattatctaccgaaatcagacagatcattgtgagaatacagcgagagcaattgcagcccttattgatgatttcgatattacacctgagctagaagaggctgctgattatatagaacagttcatacataaaggttttactcttgcttcaagccttcgaaaaggcgttgcgttccattacggcccactaccaagttctgttcgggtgatggtggaaaatctagtaaaaacaggggatatcaactttatagcctgcactagcaccctagctgaaggggttaatttaccagcaaaaaatttatttcttacgaacccctttagacctgttatggctcaaaagcctgaaaggctagaagatgtaaaaattagtaatataactggtagagctggtcggatggttgagcacttttcaggaaacgtcttcttgattaatcatgataaatggaactatcaggattattttgatgaaaaagaagaaaaagaagaaaaaatcccaacgtactataaatcattaaacgaagatttagcctctgttgttcaggcattacagggcttatacccttactcagaacccgaccagtaccgcttttatactatcgctaataaacttattaaagaatttgaaaatggaagtttagacgacaggctgttagctgaagaactaacgttgggggaagaaggtaaagaattattactatggcatattgaagatgcacgtaactcattaatgatagcaccgttcattttagaagctaacccgacaattggttatattcaacagaatagactgtctcagttttttgatagcttagaaagctacgaagagtgggtactacctcaccctaaatctaaggacttgtataattcattggttaagattacttctaagttatttgaagtcggtgtttatgttagcagcgacagctactctattgaacatgttgctgtaatagcttcaaaatgggtgtctggtaaaagcttaaaagagattattgcagaacaaatagtttgggataaatctagacctacaagttcaagtgttaatcaatcggtgaggaatgtgatcaaggtaataaataatgacataacattcaggcttaaaaatgccttaggctgctattatattttgttaacaaacacaatgaagctaaaaggcgtagataagacatcagtaaagcttcatacgtatcttgaacttggtgcatgtgatgataggatgatcaaccttataaacttagggctttcaagagagtcagctaaggaaatacaggagtctattcctataagcattgagatcaagtcaatctatgatttgctcgtcttactagaacgagggctattatcaaacacgcacccagtgacactgaaagaggtacggtttttacttagtaaataa

SEQ ID NO: 59388 - DNA, 945 bp, Pseudoalteromonas piscicida
atggaaaaattgaaagatatcaattggaagggattagttgacggtaagcactcatggatggaagagcatctaagagctcatccagttaaacgtgagggtaagactgtgactaggttttactctgtagacttttcaggaactcaacaggaactgcttgcattagtagagtcaatggctgattcaatttctcattatgtatatgatgaaaagcagctagaagaaatgaaaaagagaaacatagagccttttaggaaagcctctggtttttttggtaatactaaccctgatatggatggaaagtacggtgagcttttgctttatattcttacagaagctgtattgagaacgcctcttgttagccataagttatcattgttaactaatactaatgatcaaataaaagggggggatggaatattctttggtgaatatgatgacgagctatcgatattgattggtgagtcgaaaatacataaatcatattctggagcagcaaaagatgcgctgtcttcactagatcgatttcatgataactatagttcttcgacactagggcatgagctatttattgctcgttcaaatatttctaataactttagcttcgatgagatggaagcactgtataatacattcactccaggatctaaagaatataaaagctgtataaaaactcatccagtgttgctagtttttgaatctgataaaattaagacaattgaaaagacggctaaaaataaaaaagaggcagaagagcttttcgacatatggattcaaaaaagaacaggaaagctccatgaaaacttgaaagaatatttagaagaatatccgaagcttaaagctgtttatatagatgttttcttactccctttaaatgatgtctcaacctttaaaaattcactttataaagcaattcatggtgtggattattcacctaaaaataaataa

SEQ ID NO: 59389 - DNA, 2601 bp, Pseudoalteromonas piscicida
atggaaaatagtaaaaaagccgctagtcatatcgactttgtaagtgttttagacaagcttcttgaaagtcaatttctgttagataagtcttatgacggagaaaaaattgtcattacagatagcgaaattaagagagctacatggttagcttcaattgctgcgttgggtgatggggatcaagaaaagaatctagctaacgcatttggagctttgttatatctgagtgatcctgataatgaagtgtatagtagagcttgttatattcttcagtcgagaagtgggaacctaatcactagcgcacatataccaaagatttttagcaaagaaaccaatgctcacttgggagattatggtactttactgaactttgagttggcagccaatagagcaatacttcaacatacattctcagatgaaacggaaatatttttcacaaaatttcaaaaaagtttatgggagtcattaactgatagaaagaatatagcaatttcggctccaacgtctgctggtaaatctcatattataaaaaaatatatatatgaattagttagtaaggggagcagaactatattttttattgttcctacaaaggcattgattaatcaagtaagcaataatctgaaatttgatttaaaagataaagctcatgttttaactacttatatttctactaatttcattgataaaaaatcaataatttatgttctaacacctgagagatgtttgaaatttttacaagatacgaaggcagtaaaaaaaccagatctagtgtttgttgatgaagttcacaatgttgaagattcgtctcgaggtgcaaaattcgagaatgttatttatcgcttgataaataaattcccgctaacacagtttgttatggctggcccatttattgataatttatctgaaagcttgaaaaaaatctgcaatatagacctagtagaccacaaaacattgtcaacaccagtttttcaaataaaagcagcgctaacattttatcctaaggataaatctgcgaaatacaaaatagctagcccaagtggcaatgttttaagtggtaccattaaattaaaaagaacactctattctaaggttaaatcaaataaaggtgatgctttggaggtaattgcagatctttttccacatgatgataataacatttattatgcaccaaagaagagtagcgcagaaaaatgggctagtaaaattgcacctatgatagcttctaaaaatcctaatatagttgatggggcagatgagagaattaaagatttaattagttttttagaggaagaagtccaccctaactattcattaattagaaatttaaggttaggtgttgcttatcaccatgcaggtcttcctgacatagctcgtcaagaggttgaagaactttatatcaactcatcaataagaaatattgtttgtacctcgactttgcttcagggagttaacttaccagctgatagactgattgttatttctcctaaagttaacaataatgatatgactgattttagctttttgaacttaattgggagagctggtagggccaacactaagctttttggcgaaatatattgtatcgatgttaaagaagatgaatgggctgaggataaattaacaaaagaaaaatctaaaactgttgaaagctcaacttcactatttttgcgtaaaaatgaaagtgaattagcgaaaatggcatctctttcaagagcagaaattaaagatttaacagatgatgtaaatgtatatgaaagtatatcttatatgaggtcgatttatcatactgatattgaacacttcaagcgcatgctaggaagctcaggaatttcaagcagctctgtgcaagctttctctgatgagcttgaaagaatctatgatgacatggttatacctgtagagttattatcaaaaaacccattcattgacccatttttacaaaataagctttttttagatattaaaaaaagtggggtttttgattggatgattactcgttttcctgttagtaaagatggaatagatgattcatcagttcacatatcagaacaaagttattaccaacagtttaaaactatatttagtaagcttgaccaaatatttgaaatagaatctgaggttaatggcgttaacttcaacggtaactatgtaagtataaataagctggtaatggattctcatcactggatgaaaggtaaaaagcataggtttttcattgatagagaaattggtggtgaagttaatgatgaaaaagttatagataaagctgcgcggcatataactggtcatataagtaaaaatattacttttataggggttaaatatttgatgctctggtctgatatggtttcatattttcttaacgaggaagagttagaaaaatactcatatattctaaatttgccatcaatgttggaaatggggagctatgatcctaccacgcttgagcttatgagttatggaatcaacagatctgtagcattagaaatatcaaagaaaataaaaagaatggatatacctgtagaacaagctctaagtaaaataaataagagtgaactgtcagggttgtttaatcgtcatttagtgaaagctggttattaa

SEQ ID NO: 59390 - DNA, 891 bp, Paenibacillus durus ATCC 35681
gtggatgagaattttttggatttgttttatcatgaaatccagagttttgaattggataggtataacaccaaaattaatctccatacacttaaaattgaaaataatatttttgtatattccgaattagtggaaaaacttttcgactgtattgtaacctattgcttatcccgaaaggaacttgaaatatataaaaataataagggaatatacgtaaaagcaattcagagattacgaaagtgggaaaataacgacggagaactaggtgaggttctgctttattgctttttagagtcacatttacgcgcaccaaagatttttacaaaaatggagctgaaaacttcacctaatgattacgtaaaagcatctgatggggtacatgttttacaggtggataaaaataattttcaactaatatttggagaatcaaagttagaaaaaacatttcaacgatctttatatgatgcttttaactcgattaatgatttcataaatagaagtacaaacaatattcatgatgaaataagattgttgaatactcatttggaaaaagaaagcatttcacctgctctttataatgttttaaagaaaataattatgccaagtgccagagaagatgaaatatttaaagataacgcttttgggatttttgctggatttgaaatcactgttgatgatgactcgcggaaactaagtaactccgaattcaggaagatgatacgaaccaaaattaaattagaagttgagagtcaatacagttatatacagaagaagattgatgagcataaattatatggaactacattttatgtttatgcctttccatttgttgaaatcagcaacactagaaagcgcattattaaaaatttaatggaggccactaatgatttttga

SEQ ID NO: 59391 - DNA, 2568 bp, Paenibacillus durus ATCC 35681
atgatttttgacaaactgtctagagatgtcatgatagatgattattttaatcaactatacgaacgattgttaaaaaatatcgcttctaaagaactagtggtcgatagtcccgtgactattagcgaaaaggaactggttcacttattgagatttagtgatattctatctaattcaacattaaatgactgtagaaatatggcgtatagaattgttgcttttctaagccccgtatacaaaggtaatcctatttttaaaacatattctacggcaatattaagtagactagggaatttccctgctataaacaatctaaatcataatgtggaacttccgttcgtaagagagattgagtctgttgtgaagaaagcgattcagaaaataccaggagctgagaacaaatattttacagattcacagtttgatttatttgaaaaaataaaagaatcaaatttctatagtttttctggacccacttcaatgggaaagtcatttatcataaaaacattcatacgtgataaaatctccaaaaaagatgcagggaactttgtgataattgttccaacgagagcattaataaatcaattttcttatgaaattaaagaggatctaaaagaactaattatcaataataattataaagtaacaacaaactccatagtcacaattgaagaagaaaacgcagagaagaaatatatttttgttctaactccagaacgacttttgagctacatctcaagtaaagaaaatccgaaaatacattatttatttgtagatgaggcacataaattagctgctgaaaaagactatagaagcattacaatgtacttagccattgagaagagcatgaagaaattctctgacttaaaaatatattttgcttctcctaatgtatcaaatccagaaacatttttagaattatttcaaaaatctgcaacaaagacatttactactattgagtcccctgttacacaaaatgtcttttttatagatttaataagtaggatagttagttactataatgaagggcgtaaatatgactttgaggatgtttctattagtaagtattcatcatcgtttgagctaatacataatattgggcaatcttcttctaacgttatatattgcaattcagttgaaaatacaataaataaagcaaaagaatttttaaaatttttacccaataaattagtggaaacacctaatccaagtcaatatgaactagatgaattaatattggaaactaaaaaaatgatacatagagattactatttagctgattgtttagctcacggagtagcttttcattttgggagtttacctcaagtgataagaaataaagttgagaaacttttcaaagaagggaaaattaaatatttgttttgtacatcaaccttattggaaggtgtgaatttaccagcgaaaaatatatttattttaagtaacaaaaaacataaatcaaatatgtcaaagatcgacttttggaatttagcaggtcgtgcaggtagattgaattatgagttgtttggaaatgtattttgtatccgtgaagaaactaaggattggaaaaatacaactgtactaactggtaagtcaaccacacaactacaaattaatgctacacatcaaatagataaaaacgaaaaaaatattgaacagttactacaagcaaaacaaattacatcttcagaagcagaaaaagaagtcctaaaatatatagcgaatattattagtattgatgctatagacagtggaaatgattacaagagccctattatcaagaaattaattaatgatggaaaactagatttactattaaaggctcaagacaacataaaagatttaaagattccagtagatgttcttaataataatcaatctattatggttagacaacaaaataatgtttttgaatttattcttgaaaatcaagcatttgaagagataattaaacttccacatgaaattaattacaacaactgtgttactgcgttggaacttttgcatgagaagtacaactggaacgtgaacgaaagtaaaaacgatattgccaataagaattctttaagatattacgggcttttagtaaatcagtgggtaaatggacaaagcctgagtgaaatgatcaatgaagcactccgtttctacgagaaaaataataaaaaattaatgttttatgagaacaatattcaagtttttgaagttttcaataaaagcaaacgtcacattaataaagtaataaataatctgatttcagatattgaaaatgtagtcagatataaattagagaaatattttaataactaccatgctatattagtttctattttaggtgagaaaaaagctggacctaactggaatgtttttttagagtacggtacaagggatactgttgcagtatatttgcaaaacatgggcttttctaggcatgtttctgctttattaacgaaagaacatagagacttattgaatatcaaggacggaaagttaatatcaattaataaaaagaaacttgttaatcgattagttcagggaacacctgagtatgatgaaattagcatgttaatctag

SEQ ID NO: 59392 - DNA, 924 bp, Sulfurospirillum barnesii SES-3
atgagtactatttttaattcggacaaggtgttatgtaatcatatttctgaagttgatttatgtacttattttattggaacagatttcgatgatagtggtaatgaatttgtaagatgtaatgatttaatcaaaattttacaagaagttcttttagaatttgcctttggaattaacgaggcatcaaagataagtcatactcaaattatttctaaattaagtgatgccgctaaatcaatctataagattaaagattttgaaacggtaagacagctttatgaagaaggaaaagatattgattctattaaatctaccaaaaaatatctaagcagaggtgaatttggagaattgattttgcatatgttattaagagattttcataatacgattccattactatctaaaatttatttcaaagattcctactcttttacagttcatggctttgacgcggtgcatattgaaccagaaactcaatctttatggcttggggagtctaaattatatacagatggtaaagcaggaataaaagaattaattaatgatattttagaacatttaaaaaaagattatctaaatgatgaatttaacatcatatctaaaaaaataaagccctatgatgatatacccgaaaaaaaatattggcttaatttaatgaatgaaaatactagcctaaaagatattcttacttcagttacaattcctttattatgcgtatatacaagcgacacatataatcaaaaagattttttaaaagaatacgaaaaagaaatgagaactttaaaacaatattttgatgataataattcgcatccactcaaaacgaaactcaatattatattaattctatttcctgttaaaaacaaaaatgaattagttaaaaatcttcatagaagattacatactttacaaggactatcaagttga

SEQ ID NO: 59393 - DNA, 2199 bp, Sulfurospirillum barnesii SES-3
ttgaatgagtcaaaatatattgaaaaaatcataaatgaaaaacaacttagttttgatgaatgctttgagttgtcaaaagtatgtatgagatatttagcttctgaaacagaacagtatattggaagaaaaattataatttatgttctagaatattgggggaaaatacatatttcaacatacgaggtatgggctgatatattagaaacagcggggttttatccttacttggaaaaatttaaggataaaatatttttaactcaaactgcgggtcaaataagaaaagaatttcatttatcaaatcatttgaattattattttcatgaagagcaaaaaattgttaatgatatgctaaacagtgaaaaaaatttaatagttagtgcgcctaccagttttgggaaaagcttattaattgaagaaatagtggcaagtaagaaatataaaaatattgtaattattcaacctacattggcattgcttgatgagacaagaaaaaaattaagaaagtattcaaatcaatataagatagttattaaaacatctcaaaaacctgatcttgataaaggaaatatatttttattaactgcagaaagagtaattgaatataattattttacggatatagattttttcataatagatgagttctataaattgagtcaaaaaagagatgatgaaagatttgataaattaaatattgcattttatgagctatataataaatacaatgctaaattttatatgttagggccaaatatagatggcatatcagaaggttttgaagagcattataatgaaaaattctatccaacgaatttttcattagttgaacagcaaacgaacgatgattatattggtattgtaaaacaagaaaaagaaatagctttatttaatttattattttctttaaaatcggagcaaaatttaatatattgttcttctcctaaaatggtcagagaattatcaaatagatttttacaatttttgattgaacaaaagttccaaaaaaatattgatttgccaataattcaatggcttgaactatatatgcataatcaatggtcattaattgagtgcttaaagtataaaattggaattcatgatggtgctttacaaaagcatattacaagttcaataattgaatatttcaatgaaagtaaaattaatttcttattttgtacttctacaataattgaaggggtaaatacaaataccaaaaatattatcgtttttagtaataaaaaaggcccacataaaatagattatttcgattataagaatatcaaaggtcgtgcgggaaggatgatggaacatttgataggaaaaatttataatttctatttacctcctttggaagaaacatttattgttgatatgccattttttgaacaaaatgaacctaaaaaaatacctgaaatattgatcaatttagatagtaatgacattttaaatcatgaatcagaaacatatctaaaaattcaaagtataaatgaaaaagaaagagagataattagaaaaaatagagtttcagtatttgggcaaaagcgaatactcgaacaattaaaaaaagatatccatacaaagtatgaattgattttttggactaaaccaacttatccaaagttagaatatgttttttctttatgttgggatacacttaaaaaacctaaagagtcaatgtcaataaaaacatatggtcacttatcgtataaaatacttaattatcttaatcacaaaaatatgaaagattttattgaagatacaatagaagattataaaaagaatagaacagagcaaaagcagacatggcaaaaagaatataaattattaacagatgcacaaattcatgaaaaagcaattttagactgtttacaaatttataaacactggattacatataaagcaccgaaatggttgcaagttgtaaatgaactacaaaagtatgtttgtgaaataaatggtgtaaaacctggaaattatttaggtttagccactatattagaaaatgattttcttaatgagaatctaacaattctattagaatatggcattccttcttctgctattaataaaatcaaacaaaaaatttctaaagatatagatgaaaataatatccttaatgaaataagcactaaaaaactatacaatgagcctagcttattggcgtatgaaagaaatttaattttgaataatgtaaattaa

SEQ ID NO: 59394 - DNA, 915 bp, Parabacteroides merdae ATCC 43184
atggcaatgcgagtaagtcttaaggaattaatccaaagttcaattgttttgcagtatcatctacctcatgatattgcagataagcacatttcatgctcatgtatttcaacagaaaaagattattgtttacatcaaaatgggaccaatattgatatagcaaacataatctataatggaatagttgagtatgcttatagtgataatgaaatagatttaactcagcttgacaagctccaaataagagcattgttaagcaaactaaaatttgacccaagtgcttcagaaagtattcagctggggtatggttttcaaggcgaagttatgcttcatcttctccttagtcatttttttcatgcagaaaaggcacttgctagaggatatttatactctgctttagaaaatgctgagactaaaggttatgattcatatttgatggtagaagacaatcaaacaatatttctactttttggagaagcaaaattttacttggatggatataaaaagtcgttagactctatatttgataatattaacaaaactctttctgattcttacttcaatcggaattttattgcgatggaaaaccactatgaacatattgagccgaagagtagaattcgacaaattattgatcaatggcgagctgacccattgataaatatggcaaaagaagccagtcgacacaatatgcaccttgtatatccgatgctagttatctttgatgataaaatgactgtatacgatgatctcataatgggtataatatcatatattcaaaccaaatatagtgctgtgcaacctacactaacaatcccatatacaatctttttcttgttttttcatgtggataatagtcgtattattaagacacaagttttgcaatggataaatcaaaagcagcagctgatgccgtaa

SEQ ID NO: 59395 - DNA, 2235 bp, Parabacteroides merdae ATCC 43184
atgattaaggctgtttgttcttttttcgacattatgaaaggaaaagagttatctcaggcggatagactcttcttgcattatcttgctaaccaagcaggtctcccccagtattattatccgatgctgaatgttggagaatacgttgatgaagaggttactttgcagaccttttcaaattatatcaatgaaagcagcttgatagttggcgaaggtgtcatgttgcatcgctaccagaaagaactcttggaaagattcaagagagggcagagaaatcgtatttttctgagtgcttcaacatctttcggaaaaacattcttgatatacgagattgtaaggaagatggaatatactaatgttgcatttattttccccaccctttctctcctttctgagaacttgtttaagattcatttatcgcctgaatataagtgggtaaaggataactatgtgattcatacactcagtgataaagaggaaataagcggacggaatctttttatttttactccagaacgattcttgtcttttttggataagaacaaagaaattcaattggattttgtatttgtagatgagatatataagcttgataatggttttatcatagacgaggtgtctcaagagaatgagcgagatgtggcgtacaggatagctttgcacgaattgctaaagaccccgcatgttgattctttacttacaggtccatatatagcacttccgaccaaagataaaaaagatgcacaattctcatttaaaactttccttgactattatgattttgctattgtcaactacaatcactacgaaatagtgaataaggtggaggtctttgcagaaacagcatcaaccattgagattgataacacgtttcacttgacatttacaaataagactaagagtgctcgcattgtccaacttgttacacaacttttgaatcgaggagaaaatgctatagtctattgcagtacaaaagcttcgacggaaaaatatgctaaaattttaattagtaaaaataattacatcaaagatgttgattccgaaaaagtaatcaggcttacaaaccatatagatagtttatttgcgaatgggaggggagcacaatggattgtttcaaaagcattaaaaaaaggaattggtatacaccacggttcagttccaaagtatatacagcaggaaattatttcactgtttaatcagaatattttaaagatcctaatatgtactactactatcacagagggggtaaataccacagctaaaaacgtgatagtgctttctggaaaaaaaggaacgaaagacttaaaaaagtttgatgcacagaacatagaggggcgagctggtagatttatgcagcattatcaagggcgggtctttattctagataaaaattttgcggatcgaatgaacgaagaggacgaattgttgcaacataaattttttgacaagaatattgataaaaaagatgtggatattgttctatcagattccaattatctcacaatcgagcaagaaaataggaaaaagcagttagaggctatcaaagaaagtggaataatgcctaaagcatgttttgaggagtttagaacaatatcatatgatgacaagatttatttgtacaatacaattgctcgcttttcaacaacagatcatgaaaagataacagagttaataagacgttacgttggccaaaggaagtcttatcttccaggtcttgaacttatatgtcaaactatccgtccaattatcaaaaatgacaatttacgtttttatgtagagaacggaaatgatcagtctggtaactgttatcttgttggtatgatttctgcttttatttctaaaggattttcaggctcggtaaattatcatattagaaaagaaggggatgtggataagggagttagaaaggctgctaattttgtttttaatatgctccgttaccaagtagtaaaatatttcggtttatttaatttgctctacaaacaatttgaatcaactcgcaagggtgtaaatgttgatgaagttaatggcattgaagcgttattactcaggcttgaatatagtgcagatacaagattaggaagacaggttagtgacattggtgcatcttttaatgtggtgaaatactatgatgtaaaagagaataatccagatgatcgcgagcttattggaaaatattataaccagctggatgattatgagaaatacaatgtcgcaagaatagatcagatattataa

SEQ ID NO: 59396 - DNA, 915 bp, Parabacteroides merdae CL09T00C40; identical to SEQ ID NO: 59394

SEQ ID NO: 59397 - DNA, 2313 bp, Parabacteroides merdae CL09T00C40
atggataaatcaaaagcagcagctgatgccgtaaagcttattaaccaagctaaggaagattcaaatttgcagcctttaatgattaaggctgtttgttcttttttcgacattatgaaaggaaaagagttatctcaggcggatagactcttcttgcattatcttgctaaccaagcaggtctcccccagtattattatccgatgctgaatgttggagaatacgttgatgaagaggttactttgcagaccttttcaaattatatcaatgaaagcagcttgatagttggcgaaggtgtcatgttgcatcgctaccagaaagaactcttggaaagattcaagagagggcagagaaatcgtatttttctgagtgcttcaacatctttcggaaaaacattcttgatatacgagattgtaaggaagatggaatatactaatgttgcatttattttccccaccctttctctcctttctgagaacttgtttaagattcatttatcgcctgaatataagtgggtaaaggataactatgtgattcatacactcagtgataaagaggaaataagcggacggaatctttttatttttactccagaacgattcttgtcttttttggataagaacaaagaaattcaattggattttgtatttgtagatgagatatataagcttgataatggttttatcatagacgaggtgtctcaagagaatgagcgagatgtggcgtacaggatagctttgcacgaattgctaaagaccccgcatgttgattctttacttacaggtccatatatagcacttccgaccaaagataaaaaagatgcacaattctcatttaaaactttccttgactattatgattttgctattgtcaactacaatcactacgaaatagtgaataaggtggaggtctttgcagaaacagcatcaaccattgagattgataacacgtttcacttgacatttacaaataagactaagagtgctcgcattgtccaacttgttacacaacttttgaatcgaggagaaaatgctatagtctattgcagtacaaaagcttcgacggaaaaatatgctaaaattttaattagtaaaaataattacatcaaagatgttgattccgaaaaagtaatcaggcttacaaaccatatagatagtttatttgcgaatgggaggggagcacaatggattgtttcaaaagcattaaaaaaaggaattggtatacaccacggttcagttccaaagtatatacagcaggaaattatttcactgtttaatcagaatattttaaagatcctaatatgtactactactatcacagagggggtaaataccacagctaaaaacgtgatagtgctttctggaaaaaaaggaacgaaagacttaaaaaagtttgatgcacagaacatagaggggcgagctggtagatttatgcagcattatcaagggcgggtctttattctagataaaaattttgcggatcgaatgaacgaagaggacgaattgttgcaacataaattttttgacaagaatattgataaaaaagatgtggatattgttctatcagattccaattatctcacaatcgagcaagaaaataggaaaaagcagttagaggctatcaaagaaagtggaataatgcctaaagcatgttttgaggagtttagaacaatatcatatgatgacaagatttatttgtacaatacaattgctcgcttttcaacaacagatcatgaaaagataacagagttaataagacgttacgttggccaaaggaagtcttatcttccaggtcttgaacttatatgtcaaactatccgtccaattatcaaaaatgacaatttacgtttttatgtagagaacggaaatgatcagtctggtaactgttatcttgttggtatgatttctgcttttatttctaaaggattttcaggctcggtaaattatcatattagaaaagaaggggatgtggataagggagttagaaaggctgctaattttgtttttaatatgctccgttaccaagtagtaaaatatttcggtttatttaatttgctctacaaacaatttgaatcaactcgcaagggtgtaaatgttgatgaagttaatggcattgaagcgttattactcaggcttgaatatagtgcagatacaagattaggaagacaggttagtgacattggtgcatcttttaatgtggtgaaatactatgatgtaaaagagaataatccagatgatcgcgagcttattggaaaatattataaccagctggatgattatgagaaatacaatgtcgcaagaatagatcagatattataa

SEQ ID NO: 59398 - DNA, 1620 bp, Pseudomonas amygdali pv. mori str. 301020
atggactcaagcaatgcggggggcgtagcagccaagcttggattcttgtatcaggactgtgcggcggcgcttttcgtaacccagatgctactcaacaagaagatccaggctgtcagatgcgaagttacagacgacatcgatatcctatacgatacgcatactgagttcgttcaagttaagacttctgacaagcctcgctggtctgttagcacggttacaagtcgtactcgtggagctgataaaaagcttattgccaacagttcaattgtgcacaagtcaatgcagtgtgcattcacgcctattgagaaatgcaagtttcggatcttatctcctagagactgtaaagcgccactcgactacttagaaattgagctctcaaagcgagacggtaagcctggccgacaaagcctgatcgatgagctcgacgtaaaattgcgaaaatatgttgcgccagcaggcaattctatatccgactgggttgactcttgttcttgggaggttatacctagcttaaggcaagtagaacttacaggtcttagtaatatcagaaatgctgcccttaacctgtatggcgtaattctaagttcggattcaatggttgaaagtatctgggttaatattttagtagctatgactaaaagaagtgcactcgataggcgtgtgtacgttgaagatgacaaaacctaccatagagataattttcttgcttggttcaaggcagaggtcttattttatgatcgcggaaattctcattgcaaagtttatgttcatcgcaaactgccagatatattaattcaacttcaggcgccttttttaagtccgattccaaccaggaatgggcttgccctacatcagcgttatcagatggggcagtaccgctatgagcacatcgccaagaatatttgttgttggtttgacgagctcctgttgagaccaggtgaaattgccgacttcatcagttcgactgctacggaaaaatacaaattattaaggtcacgtctcgctgataatgccagagaccttgagcggtttcttggaaatgcattgctgcattcggtcatgaggctaagacataacagtcagcctattccggctaccctataccttgattctaaagatgaaatgcgggtttttgagaatgttcacatcgtaccgcgtgctaagggaggtgatgagttatggcttgggatcagcaagttaacaaaagccaagacgttatcacaggttttaaatgatcttagagatacgctgtataatgatattgtaagtggtctggacggagttagagaaaaggttctggatgtcaaggaggactcatatctacttaatcacgatatccatgatattctagataccagcaattcgtttgaagatcatttgaaacgccttcgatttgtaatttttttcgtctatgagtcaagttttctcactattcctgagactaaaggtcatgaggcaaacctgtatcaggaagcttatgatctcttcgttgattttatttccgatatcaccaagagtccggaatattcacaatttaattttgagctctatctctatcctgccccaagctttgacgacttatgtggtttggtggaaaagaaaatgagggatgacatgtga

SEQ ID NO: 59399 - DNA, 2075 bp, Pseudomonas amygdali pv. mori str. 301020
gtgaataggatttacgacactgctcggcttctgctcgaaacagaaggaacatcagcatttagctatcttcatgctgctgacaagctgttgtcgaatcccgtttcattgcatatgggtagggatttagttatccgagccttggacgctaggctgaagtttacgagctatacgcctttgcttcgcaacctggtacgcaagtctgggctgtatccgtatttgaagaaagagttccaagaggtaacggtcagcgaaaaagcggctttagggatctatcagactcctttttcggatgaaattgttttccattcaatgcagtttcagatttttgaactgcttcgatctggacgcaacgttgttctaagtgcaccgaccagcatgggaaagagcgcaatcgtagattcgataattggcttgggaatagtgagtagagtggttctagttgttcttactatcgcgctagccgacgaaacgcgcaggcgccttcaggagcggttcggcgaattctatcaaatcatccatcacagttctcaggaagcgaatggtgataaggtgatttacgttctcacgcaggaaagggttaatgaacgacaggatattgttggaattgatttcttcgtaattgatgagttctacaagcttgcatttcagcagcgggccagtgggaagatagactatgaaaatgagcgagttatcgagcttaatatcgctttgagtaagctgttgaaggcatctaagcagttttatatgaccgggccttttattaacagtgtgacaggcttagcgagtctcggcctcgagtataccttcatctcctccgattttaataccgtggctttggatgttgagtccttcgacctgtctcctaatgatgaggagggtaaagaggaagcggttctctctattgcagacctgtgtcgtggtgaggcgacaataatttactgtaaatcctctgctgttgctggaggagttgcaaggtctttagccaagcatgggtttggtgctgagtttcatagccctcatctcgactgggtcgcccaagagtacgattctgattgggattattgtgtcgctctacgaagcggaatcggtcttcactttgggggggggccgcgtgctttgcagcagtacactattgatctttttaatcggggaaaaattaactacctcatttgtacttcgacgataatcgagggggtgaatactattgcaaaaaatgttgtgatacatgacaacagggatggcaattttagcattgataaattcacacatggcaacataaaggggcgcgctggtcgcatgggtgtccatttcgtaggaaaagtttattgcctagagtcgattccccaggactcattcaaccaagaggtggatatccctctcggaattcaagatgatacgacgccaatgaatcttctggttggcgttcagcctgagcaccttagtgattactctcagtccagattcgaacgagatgaaaatatcgatgaatttggtgtggacttgttgaagcgccatagctcattcactttggaggcattcagagagttgtactcttatgtcgagatgttatttgaggaatcctttcagtccaccatcttccattggatgccttcaggtgagtttctcaatgttttggctgaggcactaacgaggttccaatccggcgcgcttcgccgagtgcggatcccaaccaagaatagttcggttatccatgaaaaactcacaagttatctgtatacccctcagtacgcagaatactttaagtcacagattgttcagtcgaaggcgcgcttagagaagggcgaggtcgataatctttccacatgtattaatgatgacctcaaggtggtggtcaatattctggggcacacagttccaaaactactcggtattcttgaggaagtcgttaagttgcatgctaaaaggcgtaatattaatgcgaagattgattattcaaaacttcgtggggtttttgaacattaccacctcccatctggccttgctggcttggaggaaatgggcgtgccggtacagacgctccagaggctcaacactctcatggatgtccctcatga

SEQ ID NO: 59400 - DNA, 1617 bp, Pseudomonas amygdali pv. lachrymans str. M302278
atggtgagtattccaagcccttcaaataagggtgggccagcagctcgacagggtttcaaataccaggatcacgtcgccgttgcgtttattttgaagatgctgcgtgacagtacctatctccaggtggaatgcgaaactgctgatgacatcgttgcggtttctgagaatgctggggagactgtcaatgagtacattcaggtcaagaccacagaaaatgataagaagtggaacctgactgaatgcatcaccctggagaagcaaaaagctgactcctccctgtttcagaaatcattaaaatgcgatgtgcggccaggcatagcctgctttagaatcgtgtccaaacgcgatatcgcaaaggctctggagtatttcgccaaggagctgagcagacgcgttactcccgatctagccacccagcgggggctgacgctggccaagcagctaaagaccgtgtctgccagagggcgtgacttttcctattgggcagacaacttcgtctggcaggtttgcggtgatgtttcgtcgctggaggcaacgaatctgcgtgttcttgcagaggttatcgatctgtacggagagaccccttctcatcgccagcaaaaagatatctacgatgccttcctggcgtgggccgactatgctgcaactgctgatgtaaaaaccgtgcccgagaagaaaataatcagtcgtatggcggccctctcgcgactgaaagctctacttggtgcagctgcccagcactctgccgcctttgctaaaccctacaagaccaagcctgatccgttcttggtggagtttcacacgaccacggaggacggtttgctacgtactctttctggctttgacgttgattacgatttcgaggaatggcgatcccaacaactagcggagcacttgctgcagtggctgcctgaattctgtctacgtgcgagtgaaatcgccaatttccagatacaccacacgccaacggcgttggcgcgatcaatcaacacgttgacccaagccgccgtacctcgagatcgattgattgcagagttgatattgcatgccatcctgcgaagtcgggaacacagcgagccaatcgcatgcaaggtcttttacgcggtcaacggcaagctttccgagttcggcaatgcgcacatcgtccagaaaccgggtgaagcagaccagctatggctcggcttgtcgcggatgatttccaccggaacgatggatcagacactgaaagaaatttgcgatgtgctcgatgccaccatctccagagcggcactaactgaggagcgagagatcatcatcacgctccgcgagcctcatcaccacctacccacggctgaagcattcaacaaggccttgcaccgcaatgctcctgcacaggagatgctaagtgttctgtgcttcccgatcctgctcgcctacgacagcgacgcgttgtccggggggtacctatctgattatctggccaacctcaagacagaggttacgcagcactacaatgcgctggcatgtacgttaccgtcaaaaatcaaacaagtcagggtagtggtcttcctggtaccgatcgagagcatccaccagctcgttcagaaatttaatgcgctctgcaaggctgctagctga

SEQ ID NO: 59401 - DNA, 2172 bp, Pseudomonas amygdali pv. lachrymans str. M302278
atgcgctctgcaaggctgctagctgacatgaaatacgacctcatcaaacagcagctagagaatctttacgatctcaacagtgacaaaaccggcctgctcatgggaatgagcctcatcgtgaacaaggggcatcccgaatgggagggccgtgacctggtcattcggtcgcttgacaagtttgagctgttcgatgaagtcgaacagtcgttgctgctcagcctagtacgtaccgttggactgttcccctacatcaccccgcatgtggagagcgtttcattccccgaccggttggcctatgaggttcatcgagtggaagggattgagaagggcatggtttttcatcgcctgcaggcacatgttttccatttgttgatgcaaggcagaaacgtcgtactaagtgcctcgaccagcgtcggtaagagccttgtgattgatgctgtcctcgcacagggcaagttccgaaaggttgtagtgatcgtgcctacgatcgcgctcattgatgaaactcgccggcggctggtcaggcgctttcgtcagcagtgcaacatcatcacgcaccctagccaagtggcaacagacgcccctatcaatgtgtacttgctgacccaggagagggtgcttcagcgtgatgacctgggtgatgttgattttttcgtcattgacgagttctacaagctcgaccttgccagcgattctgacgaaaaaaatcgatctattgatctcagccttgcttttcacaagcttgcgaagctgaatgctcagttttatctactcggcccacacattcaaaacatccaaggcctggatgggtatgagtacaatttcattccctcgaacttctcgaccgtggcagtcgacgtgacgcactacaacctgcgaacgcgcggcgacacgcgaaaggataagcttcttgagctgtgctcgcagatcaactcccctaccctgatctactgccagtcaccggcaagcgcaaatcgggtcgcgcaatatttaatcgatgagggggacttctctgcgcttgatggcacccgtgaaatttcagaatggatcgcggataactaccatcctgcctggaacgtagcgaaggcgatttcgctaggcatcggcattcaccacggtggcgtaccaagggccatccagcaatattttgtgaagttgttcaacgagcgaaccattcgctacatcatctgcacgtccaccatgatcgagggagtgaacacgtcggcagagaacgtcatcatctatgaccgaagaatcaacaacagtccctttgattttttcaccttcaagaatatttccgggcgcgccgggcgaatgaatcaatacttcatcggtaaggttcatatgctggaagagccaccagaggagaagagcctcatagtcgagtacccaatcggcttgcaagacggggcgtcccctatgggactgctcatgaaactcgaccccgaatacctcaccgaccagtcgcggcagcgtcttgaggctgcctatgcgactcctcagctgtccgtcgcgacgctgatcgaaaacaggcacatcccagtcgaacgtcaggtcgaattggccgaccgaattctgcgagagctcgcgctgggtcgcgtatggctcacgtggaaaggtaatccagagcaaaagcaacttgagtatctctgtactctgatctatgagcaccttcctcatcggctgccggagtatggtatccattcagggctgcaactcgcttggcatatcaatgccctcagagcccagaaagacttcaaggcctatctccagcaagcgattaatgaggatggctccgaccggactcccagcgagtcgatagggcaacggctcaagctcatacgcaacgtcatttcataccgccttccccgagacatcatggcgctgagcaaaatccaagcggacgttttgacccgcacgggcatcgagccaggggactttggctttttcgccgaacagcttgaaaacttgttccatgatccgctgctcaccgcgttggatgagtacggtgtgccgacccagatctcctcgaaattcaaaggggcgatcttaccttcagaaaaccttacccaactactcgacaagttacgcgcatgggcacctagaatcgaatcagcaccgttgacacacttcgaaaaaagcatcgtaaggtgggctgtagacgaaatctaa

SEQ ID NO: 59402 - DNA, 1632 bp, Pseudomonas amygdali pv. tabaci str. 6605
atgatgcgtataaatagcccatccaacaaaggtgggcctgcggcaaggcagggcttcaagtatcaagaccacgtggccgtcagcttcattttcaagatgctgcgtgatagcaactatatccaagtagagtgcgaaaccgccgacgatatcgtggtcgtattccagtgcgggggtcagctcgtcaacgagtacattcaggtcaagacgactgagggtgaccacaaatggaatatggacgaggtgaccgagctggatggcaccaaagcaaactcgtccttgctccacaaatcgctgaagtgcgatgtgcgcccaggccttgctcgcttccgaatcgtgaccaagcgcgacgtcgcgaagattctcgacggtttcaaaacggagctggacaagagggttctgcctgacaccaccacagcccgaggcaaagttctgctgcggaaattcaagacattcatctccccacaaaatcggaatttcgcctactgggcagagaactccgtctggcaggtctacggtgatgtggaagcactggaagcggtcaacatcaaggccctttccaagcttgctgaggatttcgggaaccgtcccaacaatacccagatgcaggcaatttacgatgatttcttggagatggctgacaaggctgccacggccaacgtgaaaactgcagcatcgacgaagatcattctgcgggaaccggccctggcccacctgaagcagctattagagtcggctgatgacaagtcaacggctacagccaaaccctataaaaagcgaccagatcccttccttgtcgagtttcatgcaagcaccgaagaaggcctgctgcactcattttccggctttgacgtacgctatgcgctgaaggcgtggcggcatgatagttttgctaaacatctcgtcgaatggctcccggaattttccctcaaggcgagcgagatcgtgaacatcctcgcgcacaatgccgaagccatcttggcacgatccatcaatgcgttcaccgacagcgaactgcctcgcgacaggctgatcgccgaactgatcctccacgccatcctgcgtagccgccaaaacagcgagcctgtcgcgtgcaaggtcttttacaaatcctcaggcaagctttccgagtttggcaacgctcacatcgtgcagatacctggccaggacgatcagttatggctcgggctcgcgcgcctgatccaggcaggtgccatggacgcgaccctggcacagatctgcggcgtcctagacgccaccatatcggagacggtgttgtcgtcggaacgcgaaatcattatcaacctgcgcgagccccttcaccatcaaccgaaagcggacgccttcaatcaggcactgcacaaaaactcgccagtcgatgacatgatgaacgtcctctgctttcccatcctgttgacttacgatagtcacgcactctcgtcaggttggctcgctgattacgtgaaccatcttagaaaggagatcgaggcccacttcagcaccttcaccaaacagctgccacagaacatcacgcaagtgaaggtcatggtcttcctcgtgccgatggaaagcatcgagaagctgatcaatgaattcaatacccggtgcaaaacacttggagacctgcaggcataa

SEQ ID NO: 59403 - DNA, 2142 bp, Pseudomonas amygdali pv. tabaci str. 6605
atgaactacgaaacgatcaagaacagcctggcgaacctcagtgatgaaggcgcttcaacagtcgatgtgctgcttgccatcaacgccatcgtcaacagaagcaacgctgagtgggaaggacgcgacctggtgatccgcgcgctcgacaagttcgcgctttttgacgtagtcgaacaatcgctcttgctcaacatggtgcgagccgttgggctctttccttacatcacgccacatctgagcaacatggccctgtctgaccgcttggcttacgaggctcacagggttgagggcgtggaaccaggcatggtgtttcatcaccttcaggcccacgttttcagcttgatcatgcagggccgaaacgtcgtcttgagcgcctccaccagcgtcggtaaaagcttggtcatcgacgcggtacttgcccagcgccggttcaagaaggtagtggtgatcgttcctaccatcgcgctgattgacgaaacccggcgccgcttggtcaagcgcttcagagacttcaacctgatcacacaccccagccaggaatccgtgcccgacgtcaccaacgtctacctcctgacgcaggagcgcgttattcagcgtcctgatctggatgatgtggagttcttcgtgctggacgaattttacaaaatcgatttggggggcgataaggataagaacacacgcgccgtcgatctgagcttggcattccataagctcgcaaagaccggagcgcagttctacatgctcgggccgcacattcagaagatctctgggttggacggttacgagtaccatttcatcccgtccgactacagcaccgtcgcggtcgatatccagaatttcaatctgggtatgcgctcagaggagcggacacagaaactcctggaactggtcaggacgctggagtcccctaccctgatctactgtcaggcgccggcaagcgcaaacagggttgcagagtatcttatccaggatgccgggttgaccccggtgccagagacgcaggaaattgctgcatggatctccaagcattaccacccagaatggaacgttgccaaggcgatcgccctaggtatcggaatacaccatggcggggtgcctcgcgcgctgcagcaatacatcgtcaagctgttcaacgaaggcgtcatcaagcgaatcatctgcacatcgacgatgatcgagggcgtcaacacctcggctgagaacgtcatcatttacgaccgccgccttaaaacgtcgacgttcgactactttacctacaagaacatttccgggcgcgctggccgcatgaacaaatacttcatcggcaaggtgtttatgctcgaagccccgcctattgagcagggactgacggtcgagtaccccatcggccaccaggatgaaacctcacctatcggcctgttaatgcaactggaaaacgaatatctcacggacatgtcgagaggccgtctccaagaagcgtatgccaacccggtgctgtcaccggccaccttgatcgaaaaccgccacatccctatcgagcgtcaggtcgaggtcgcgaaaacgatcatcactgaccttccaggcagccaggaattgttaggctggaaaggcattcctgagccgaaccaactgaactacctatgtgagctggtctacagcttggaaggtaagaacctgatggactatctgatctcgtccagctctcagttggcctggcacatcaacgagctccgaaatcagaaaaacctgccggcctacctgagcgaagcaatagaaaatcggtgggagaatgtctcagcgagcgaagcaattaacctgcgcctgaaattcatcaggaacatggtgtgcttcaggttgcctcgggacatcatggccattcacaaaatccaggtcgacgtgctggagcgagaagggtacgaacctggagacttcagcttcttcgctgagcagctggaaaacatgttccttgatcccctgctcaccgcactggacgaatacggaattcctacccagatctcgaccaagatcaagcacctgatcttgccatcggagcacctgaacgatttgctggcaaaactgcggttgcttgtcccacggatggagcgcctccagctcaccagctttgagaaaggcctgatgcaatgggcggtcgctgaaatgtaa

SEQ ID NO: 59404 - DNA, 1617 bp, Pseudomonas amygdali pv. lachrymans
gtggaacctaacgactctggcggtgttgccgccaagcacggcttcatctttcaagattgtgttgcagcctaccacgtcaccagaatgctgcgtgacaaaaccatgcgcagtgtccgctgcgaggttaccgatgacattgatatcgtctcggacgatgtcattgagttcatccaggtcaaaagtaccgcgaagacacgatgggatagatcgcatatcgtcgtgaactcgaagggagagggaaagaaggcgatccctgaaagctcgattctccacaaatccatgcaatgtaagcccgagcctggatttcgccagagattccaaatcgtaacggaagagaaggtcaacaagactcttgagtacctgacgatccgtagggaggatcgtgcaggtaaacctggtcgggacttgctgatcacctacctcacctcgaaagttggtacctacgaagcccctagcggcctggatttaagcggctggattgatgctgtccaatgggaggtattccacagcttgcgggaaatcgagctgatgggaatcaaaaacatccgtaaagcgtctcaggagctccgtgggcaggttttgagctcagaggctgaggccgaggatatctggtgccgtatccttgataccgttacccggaaaggcgcacagtcgcgccgagttcatactgccgacaataagtcatacctgcgtgctgatctgatttcatggttcaacgtccgcgtagacgaagatcaaaagcgctcaggccgaaaaatctacgtcaagcgatcgctccctcacatcctagtaccgttccgggcacccctcgcatcctcatgccaaaagcgccattggcgagttttgcatcagcaatacacgttgaagaagtaccgttatcagcacatcgttgaaaatgtctgtaactggttggatgaggttttcttgcgacctaaggagctagcggacatcgataaactgggtcatgtagagatgcaacaaaggctcagggctgcggtgtccaagtcattggaagacgtcaatgctttcctgggccgtgttttgctccatgccaccgtccgaaagatgtatgacagccagccgattccatgcgcgctttacatcgacgggctcagcttcgtcaaaattcttgagaacgttcacattgttcgccgcgaaaccgacggcgatgagttatgggttggattcagcgagctcgtgacggccagcgacatagcactcaggttgccggagatacgtgacaggctttatcaagaaattgaagattgctttgactctgcccgaggaaagattctcgacatcaaggacgatgactatctgctacggcatgacatcaacgacattttggacggaagtctgtcattcgatacgcacctgcagcgtttcaggttcatgcttttcatcggatacgactcgtctctgctgaccgatccggagacgccagggcatgaagatgatttgcatcaggaaacctcccagctgtttgagcaattcatagccgatctacaagatgagtcgcccttcgccgagttgcaaatcgacgtgtttgtttttcctgcgcccagtctcgataggttaaccaggatggtagaggaaaaagtcagggaggccgtatga

SEQ ID NO: 59405 - DNA, 2187 bp, Pseudomonas amygdali pv. lachrymans
atgaccgtcgattacgagatggcaaaaagcagtttgggtcacgagggtttttcagcatttcagtacctggctgcaataaacaaactactttcgaacccagtttccatggatcttggtcgggagctgatagtccgagccctagacgctcgggaaaaattctcagatcactctgtaatcctgaaaggcatggtgagaaaatccggcctgtatccgtatttgaagtctgacttttcggatctgaccgccagcgatctggtagcgctcagcctctacaggacaccgttctctgacgattttgtattccattcgatgcagtttcagatttttgatcttctcaaggctggccgcagcgtagtgctcagcgctcccaccagtatgggtaagagcgcgcttgttgactccctactgggcctgggcgcggtgaaaagagttgttctagtcgtgcctacggtcgcgttggctgacgaaacccgaagaagacttcagcgccgatttggggacacgtatcagatcatccatcacagctcccaagaatgtcggtcggaacgggccgtttacgtccttactcaggagcgggtcaacgagcgccaagacattgaggcgatcgatttttttgtcattgatgagttctacaaacttgcgtttcgagaactgaagagcggcgggatcgactacacggacgagcgtgtcgttgagctcaatatcgccttgagcaagctcctcaaggtgtccaagcagttctatctgagcggcccgttcgttaatagcgtgagagggctcaccgaactcggttatccacacaccttcatctcgactgacttcaatacagtggcacttgacgtgcagaccctaggcgtagccgctgatgacaaaaagggcaagctcaaggctcttccctccatccttgaacagtgtgagggagcgaccattatctattgcaagtcgtctgcggttgcaggggttgtcgcacgagaactgatacgcctaggctatgggcaggttgctcaaagcccacacctcgaatgggtcgcgcgcgaattcgattctgaatgggattacaccgtcgctctgaaacatgggataggcctccactttggtggattgccgagggcactccagcagtacacagccgaccagttcaacgccgggaaaatcagattcctgatttgcacctctaccatcattgagggcgtcaacacggttgcgaagaatgtggtgatttatgacaaccgtgatggtactcgcgggattgataaatttacccacggcaatatcaaggggcgagctggccgtatgggggttcacttcgtaggaaaggtgttctgcctagaggctattccggaagacaacctcaatcttgaagtggacatccctttgggtgttcagggcgatgacaccccgatcaatttgctggccagtgctcagccagaccatctatctgagcattctcaagaccggttcgacgaggcgttcaagcaagatcgcgtgtccattgatcttgtcaaaaaacactcctacttccggatggagcagtttgaaacgctgtacagctttgttgagatgctgacatccgaagattttgccacgttgaccttccactggacgcccgcaccggattttttgaagacgtttgctcaggtgattgtgaggttggttcctcaaacattttctcgcaacggcgtgcccaccaagccaacggatgtgatgatcgcgaagctggtttcttacttcaatgcggagagttattcacactacctcaaaggtcagatcgagtattcgaagcagaggatccggaacggcgaaaaaaacaccctttcgttcatgattaacaacgaccttaagctgattaccaacgtgttcggttatacccttccgaaggtcttgggcttgctggaggatgtggtacggattcatgccgctaagcgcatggttcgcagcaaaatcgactacagccatctccggatgatattcgagaacctgcatttgcccactggggtgaacgcgcttgaggagatggggattcccattcaaactttgcaccgaatggcattgattatggatttccctgaggaggcagatgtcgacggtttagccgattatctgcgagccaatactggtgcctggagtaatttgggtgtggttgatcgctcgttcattgttcgagcgttgggattggattcgcggtag

SEQ ID NO: 59406 - DNA, 1617 bp, Pseudomonas amygdali pv. lachrymans; identical to SEQ ID NO: 59400

SEQ ID NO: 59407 - DNA, 996 bp, Pseudomonas amygdali pv. lachrymans
atgaaatacgacctcatcaaacagcagctagagaatctttacgatctcaacagtgacaaaaccggcctgctcatgggaatgagcctcatcgtgaacaaggggcatcccgaatgggagggccgtgacctggtcattcggtcgcttgacaagtttgagctgttcgatgaagtcgaacagtcgttgctgctcagcctagtacgtaccgttggactgttcccctacatcaccccgcatgtggagagcgtttcattccccgaccggttggcctatgaggttcatcgagtggaagggattgagaagggcatggtttttcatcgcctgcaggcacatgttttccatttgttgatgcaaggcagaaacgtcgtactaagtgcctcgaccagcgtcggtaagagccttgtgattgatgctgtcctcgcacagggcaagttccgaaaggttgtagtgatcgtgcctacgatcgcgctcattgatgaaactcgccggcggctggtcaggcgctttcgtcagcagtgcaacatcatcacgcaccctagccaagtggcaacagacgcccctatcaatgtgtacttgctgacccaggagagggtgcttcagcgtgatgacctgggtgatgttgattttttcgtcattgacgagttctacaagctcgaccttgccagcgattctgacgaaaaaaatcgatctattgatctcagccttgcttttcacaagcttgcgaagctgaatgctcagttttatctactcggcccacacattcaaaacatccaaggcctggatgggtatgagtacaatttcattccctcgaacttctcgaccgtggcagtcgacgtgacgcactacaacctgcgaacgcgcggcgacacgcgaaaggataagcttcttgagctgtgctcgcagatcaactcccctaccctgatctactgccagtcaccggcaagcgcaaatcgggtcgcgcaatatttaatcgatgaggggggacttctctgcgcttga

SEQ ID NO: 59408 - DNA, 1629 bp, Pseudomonas amygdali pv. lachrymans
atggacgtcgatgtggaacctaacgactctggcggtgttgccgccaagcacggcttcatctttcaagattgtgttgcagcctaccacgtcaccagaatgctgcgtgacaaaaccatgcgcagtgtccgctgcgaggttaccgatgacattgatatcgtctcggacgatgtcattgagttcatccaggtcaaaagtaccgcgaagacacgatgggatagatcgcatatcgtcgtgaactcgaagggagagggaaagaaggcgatccctgaaagctcgattctccacaaatccatgcaatgtaagcccgagcctggatttcgccagagattccaaatcgtaacggaagagaaggtcaacaagactcttgagtacctgacgatccgtagggaggatcgtgcaggtaaacctggtcgggacttgctgatcacctacctcacctcgaaagttggtacctacgaagcccctagcggcctggatttaagcggctggattgatgctgtccaatgggaggtattccacagcttgcgggaaatcgagctgatgggaatcaaaaacatccgtaaagcgtctcaggagctccgtgggcaggttttgagctcagaggctgaggccgaggatatctggtgccgtatccttgataccgttacccggaaaggcgcacagtcgcgccgagttcatactgccgacaataagtcatacctgcgtgctgatctgatttcatggttcaacgtccgcgtagacgaagatcaaaagcgctcaggccgaaaaatctacgtcaagcgatcgctccctcacatcctagtaccgttccgggcacccctcgcatcctcatgccaaaagcgccattggcgagttttgcatcagcaatacacgttgaagaagtaccgttatcagcacatcgttgaaaatgtctgtaactggttggatgaggttttcttgcgacctaaggagctagcggacatcgataaactgggtcatgtagagatgcaacaaaggctcagggctgcggtgtccaagtcattggaagacgtcaatgctttcctgggccgtgttttgctccatgccaccgtccgaaagatgtatgacagccagccgattccatgcgcgctttacatcgacgggctcagcttcgtcaaaattcttgagaacgttcacattgttcgccgcgaaaccgacggcgatgagttatgggttggattcagcgagctcgtgacggccagcgacatagcactcaggttgccggagatacgtgacaggctttatcaagaaattgaagattgctttgactctgcccgaggaaagattctcgacatcaaggacgatgactatctgctacggcatgacatcaacgacattttggacggaagtctgtcattcgatacgcacctgcagcgtttcaggttcatgcttttcatcggatacgactcgtctctgctgaccgatccggagacgccagggcatgaagatgatttgcatcaggaaacctcccagctgtttgagcaattcatagccgatctacaagatgagtcgcccttcgccgagttgcaaatcgacgtgtttgtttttcctgcgcccagtctcgataggttaaccaggatggtagaggaaaaagtcagggaggccgtatga

SEQ ID NO: 59409 - DNA, 2001 bp, Pseudomonas amygdali pv. lachrymans
atggtgagaaaatccggcctgtatccgtatttgaagtctgacttttcggatctgaccgccagcgatctggtagcgctcagcctctacaggacaccgttctctgacgattttgtattccattcgatgcagtttcagatttttgatcttctcaaggctggccgcagcgtagtgctcagcgctcccaccagtatgggtaagagcgcgcttgttgactccctactgggcctgggcgcggtgaaaagagttgttctagtcgtgcctacggtcgcgttggctgacgaaacccgaagaagacttcagcgccgatttggggacacgtatcagatcatccatcacagctcccaagaatgtcggtcggaacgggccgtttacgtccttactcaggagcgggtcaacgagcgccaagacattgaggcgatcgatttttttgtcattgatgagttctacaaacttgcgtttcgagaactgaagagcggcgggatcgactacacggacgagcgtgtcgttgagctcaatatcgccttgagcaagctcctcaaggtgtccaagcagttctatctgagcggcccgttcgttaatagcgtgagagggctcaccgaactcggttatccacacaccttcatctcgactgacttcaatacagtggcacttgacgtgcagaccctaggcgtagccgctgatgacaaaaagggcaagctcaaggctcttccctccatccttgaacagtgtgagggagcgaccattatctattgcaagtcgtctgcggttgcaggggttgtcgcacgagaactgatacgcctaggctatgggcaggttgctcaaagcccacacctcgaatgggtcgcgcgcgaattcgattctgaatgggattacaccgtcgctctgaaacatgggataggcctccactttggtggattgccgagggcactccagcagtacacagccgaccagttcaacgccgggaaaatcagattcctgatttgcacctctaccatcattgagggcgtcaacacggttgcgaagaatgtggtgatttatgacaaccgtgatggtactcgcgggattgataaatttacccacggcaatatcaaggggcgagctggccgtatgggggttcacttcgtaggaaaggtgttctgcctagaggctattccggaagacaacctcaatcttgaagtggacatccctttgggtgttcagggcgatgacaccccgatcaatttgctggccagtgctcagccagaccatctatctgagcattctcaagaccggttcgacgaggcgttcaagcaagatcgcgtgtccattgatcttgtcaaaaaacactcctacttccggatggagcagtttgaaacgctgtacagctttgttgagatgctgacatccgaagattttgccacgttgaccttccactggacgcccgcaccggattttttgaagacgtttgctcaggtgattgtgaggttggttcctcaaacattttctcgcaacggcgtgcccaccaagccaacggatgtgatgatcgcgaagctggtttcttacttcaatgcggagagttattcacactacctcaaaggtcagatcgagtattcgaagcagaggatccggaacggcgaaaaaaacaccctttcgttcatgattaacaacgaccttaagctgattaccaacgtgttcggttatacccttccgaaggtcttgggcttgctggaggatgtggtacggattcatgccgctaagcgcatggttcgcagcaaaatcgactacagccatctccggatgatattcgagaacctgcatttgcccactggggtgaacgcgcttgaggagatggggattcccattcaaactttgcaccgaatggcattgattatggatttccctgaggaggcagatgtcgacggtttagccgattatctgcgagccaatactggtgcctggagtaatttgggtgtggttgatcgctcgttcattgttcgagcgttgggattggattcgcggtag

SEQ ID NO: 59410 - DNA, 1719 bp, Pseudomonas amygdali pv. lachrymans
attcacgagcttgctgtccatggcacgacctgcctaagttggtgtgcttgcttcggttatcagcatgtcaagcgatacagggacgtcatgatgcgtataaatagcccatccaacaaaggtgggcctgcggcaaggcagggcttcaagtatcaagaccacgtggccgtcagcttcattttcaagatgctgcgtgatagcaactatatccaagtagagtgcgaaaccgccgacgatatcgtggtcgtattccagtgcgggggtcagctcgtcaacgagtacattcaggtcaagacgactgagggtgaccacaaatggaatatggacgaggtgaccgagctggatggcaccaaagcaaactcgtccttgctccacaaatcgctgaagtgcgatgtgcgcccaggccttgctcgcttccgaatcgtgaccaagcgcgacgtcgcgaagattctcgacggtttcaaaacggagctggacaagagggttctgcctgacaccaccacagcccgaggcaaagttctgctgcggaaattcaagacattcatctccccacaaaatcggaatttcgcctactgggcagagaactccgtctggcaggtctacggtgatgtggaagcactggaagcggtcaacatcaaggccctttccaagcttgctgaggatttcgggaaccgtcccaacaatacccagatgcaggcaatttacgatgatttcttggagatggctgacaaggctgccacggccaacgtgaaaactgcagcatcgacgaagatcattctgcgggaaccggccctggcccacctgaagcagctattagagtcggctgatgacaagtcaacggctacagccaaaccctataaaaagcgaccagatcccttccttgtcgagtttcatgcaagcaccgaagaaggcctgctgcactcattttccggctttgacgtacgctatgcgctgaaggcgtggcggcatgatagttttgctaaacatctcgtcgaatggctcccggaattttccctcaaggcgagcgagatcgtgaacatcctcgcgcacaatgccgaagccatcttggcacgatccatcaatgcgttcaccgacagcgaactgcctcgcgacaggctgatcgccgaactgatcctccacgccatcctgcgtagccgccaaaacagcgagcctgtcgcgtgcaaggtcttttacaaatcctcaggcaagctttccgagtttggcaacgctcacatcgtgcagatacctggccaggacgatcagttatggctcgggctcgcgcgcctgatccaggcaggtgccatggacgcgaccctggcacagatctgcggcgtcctagacgccaccatatcggagacggtgttgtcgtcggaacgcgaaatcattatcaacctgcgcgagccccttcaccatcaaccgaaagcggacgccttcaatcaggcactgcacaaaaactcgccagtcgatgacatgatgaacgtcctctgctttcccatcctgttgacttacgatagtcacgcactctcgtcaggttggctcgctgattacgtgaaccatcttagaaaggagatcgaggcccacttcagcaccttcaccaaacagctgccacagaacatcacgcaagtgaaggtcatggtcttcctcgtgccgatggaaagcatcgagaagctgatcaatgaattcaatacccggtgcaaaacacttggagacctgcaggcataa

SEQ ID NO: 59411 - DNA, 2166 bp, Pseudomonas amygdali pv. lachrymans
gtgaactcaaggaacgatgcggtaatgaactacgaaacgatcaagaacagcctggcgaacctcagtgatgaaggcgcttcaacagtcgatgtgctgcttgccatcaacgccatcgtcaacagaagcaacgctgagtgggaaggacgcgacctggtgatccgcgcgctcgacaagttcgcgctttttgacgtagtcgaacaatcgctcttgctcaacatggtgcgagccgttgggctctttccttacatcacgccacatctgagcaacatggccctgtctgaccgcttggcttacgaggctcacagggttgagggcgtggaaccaggcatggtgtttcatcaccttcaggcccacgttttcagcttgatcatgcagggccgaaacgtcgtcttgagcgcctccaccagcgtcggtaaaagcttggtcatcgacgcggtacttgcccagcgccggttcaagaaggtagtggtgatcgttcctaccatcgcgctgattgacgaaacccggcgccgcttggtcaagcgcttcagagacttcaacctgatcacacaccccagccaggaatccgtgcccgacgtcaccaacgtctacctcctgacgcaggagcgcgttattcagcgtcctgatctggatgatgtggagttcttcgtgctggacgaattttacaaaatcgatttggggggcgataaggataagaacacacgcgccgtcgatctgagcttggcattccataagctcgcaaagaccggagcgcagttctacatgctcgggccgcacattcagaagatctctgggttggacggttacgagtaccatttcatcccgtccgactacagcaccgtcgcggtcgatatccagaatttcaatctgggtatgcgctcagaggagcggacacagaaactcctggaactggtcaggacgctggagtcccctaccctgatctactgtcaggcgccggcaagcgcaaacagggttgcagagtatcttatccaggatgccgggttgaccccggtgccagagacgcaggaaattgctgcatggatctccaagcattaccacccagaatggaacgttgccaaggcgatcgccctaggtatcggaatacaccatggcggggtgcctcgcgcgctgcagcaatacatcgtcaagctgttcaacgaaggcgtcatcaagcgaatcatctgcacatcgacgatgatcgagggcgtcaacacctcggctgagaacgtcatcatttacgaccgccgccttaaaacgtcgacgttcgactactttacctacaagaacatttccgggcgcgctggccgcatgaacaaatacttcatcggcaaggtgtttatgctcgaagccccgcctattgagcagggactgacggtcgagtaccccatcggccaccaggatgaaacctcacctatcggcctgttaatgcaactggaaaacgaatatctcacggacatgtcgagaggccgtctccaagaagcgtatgccaacccggtgctgtcaccggccaccttgatcgaaaaccgccacatccctatcgagcgtcaggtcgaggtcgcgaaaacgatcatcactgaccttccaggcagccaggaattgttaggctggaaaggcattcctgagccgaaccaactgaactacctatgtgagctggtctacagcttggaaggtaagaacctgatggactatctgatctcgtccagctctcagttggcctggcacatcaacgagctccgaaatcagaaaaacctgccggcctacctgagcgaagcaatagaaaatcggtgggagaatgtctcagcgagcgaagcaattaacctgcgcctgaaattcatcaggaacatggtgtgcttcaggttgcctcgggacatcatggccattcacaaaatccaggtcgacgtgctggagcgagaagggtacgaacctggagacttcagcttcttcgctgagcagctggaaaacatgttccttgatcccctgctcaccgcactggacgaatacggaattcctacccagatctcgaccaagatcaagcacctgatcttgccatcggagcacctgaacgatttgctggcaaaactgcggttgcttgtcccacggatggagcgcctccagctcaccagctttgagaaaggcctgatgcaatgggcggtcgctgaaatgtaa

SEQ ID NO: 59412 - DNA, 939 bp, Pseudomonas amygdali pv. aesculi
gtgccgccccataaggctccccggatcgcgcttttgcatgtccgcttcaaggaagatctccccagtgtccaggcgttcgccaatttccttggcaaccaagcggcgaactatgcgttgagccgtcgacgacgagatgagtatcaggcccggatagcttccgcggaaaacggggatgtgtcagctgcacaagagctcagtcgtgcggttaggaatgcattcattgagttccgcaaagcccacccatcaagggctagtgaagtgggggaggtgctggcctactgcgtggccgttcaccatctacaggccgcacaactgatcgccaagatggccttgaaaaccagcacgaatatgccggtctacgggctcgacggtattcatgcttcggtgaccgacggtgagttgaatgtgtttttcctcgaatccaaacttgcaggtaacgcagccagtggaacagccgactacgccgattctgtttcgggctttctcaaaaacgaggggcaatatgagcaggagtacggactagttacgagcctgggaaacctcgacgcgctcgatcctgccgataaagccctgatgatggactatctggatgtgttcggaaatccaaatgcgccaaagcgtgagcgatcagtaggggtagtgtgctattcggaggtcaaacacttcgcgaacaagcttgaggtcgatgatggcccactatcaaaacatgaggatcatttcggtcagctttataggggggatctcaacaggcaccataccaacctaactaatcagctagacgtcaagaaggtcgatgcgaataaatgcatggtttatttggttgccgtgcctaatgtcgatgagttaagagagctattttatgattctataggtctggcggggttagaatctgacgttcctctcacgcccccttcggtaattgaggagggcgccccgtga

SEQ ID NO: 59413 - DNA, 768 bp, Pseudomonas amygdali pv. aesculi
atgctgtattgcgcatcagtattcgcgcagtcaggggtagaatcgcatgtaagtctggctcagaccattgcattcaatgcaatgctgatctcgcaagagtcgaccgtactggagcggtgcgcaacgatattgacagagatcggaaattttccgagtttaagttatgccgagaaacgcaactctacaaagccttcaacgttgctcggaatgattcaaagaaatattgttgagcagttaaatactgtcgaggtggctggttctgctattactttgactgactatcagcggaaggtatgggactccctccaagaggggcgctccttggccatctccgctccaacttctgccggtaagtcgtttttggtgatcgaacacctttgtagggatgcgttggcgcttcctcaatttgttttcgtttacatcgctccaacgcgagccctgctgtctgaagttcatttgaaaatcaaggagcgccttgcaagtgatgtgaatatccgagtcaccgatattccaacttttgagaacgtgcctcggcaaatttttgtgctcactcaggagcgttttaaagttcttctttcgataacctcatccccggtaaattttttggtcgtcgacgaggctcagaacctatcagatggcgcacgaggaatgatcctgcaggattgcatcgagcagtgctatgtccgtgaccgtaaaacccatgtcgttttgctcgcgccgggcgctcaagggtttacggatgcactcgaaagcctagggaaggtctga

SEQ ID NO: 59414 - DNA, 1632 bp, Pseudomonas amygdali pv. tabaci; identical to SEQ ID NO: 59402

SEQ ID NO: 59415 - DNA, 2166 bp, Pseudomonas amygdali pv. tabaci; identical to SEQ ID NO: 59411

SEQ ID NO: 59416 - DNA, 1620 bp, Serratia fonticola
atggactcgagcaatgcgggcggcgtagcagccaagtttggatttctatatcaggattgtgctgcagcacttttcgtaacggagatgctgctcgacaaaatgatccaggcagtaaggtgtgaagtcactgacgacattgacattctctacaaaacgcacactgaatttgtccaagttaaaacgtctgataagtcacgctggtctataagtagcgttgtagagcgtgctcgcggtgcccaacggaaactgatccctgaaagctccatcgttcataagtccatgaaatgtgcgactgtgcctatcaattcatgcaaatttcgaattttgtcttcgcgagatacgaaggctccgctcgactatcttgagattgaactctcaaagcggtatggcaaacctggtcgtgatgatttggtcaaggagcttaataataagatgtcgaattattctgcacctgcaggtaattcaattacccattgggtagactcttgctggtggcagatcattcctagtatgcgggagatggagcttacggggcttaaaaatatccgcaatgccgctttcaatttgtatggcgtgatattaagtgttgactctgtagcagagaatatatggattaatatattaaacaccatgacgaagaaaagtgctcttgatagacgcgtttatgttgaggacgataaaacctatcatagaaataattttcttgcatggtttaagtcagaggttttacatttggatagaggaaatgcccatagaaaagtttatgtacatcgaagacttccagccattttggttcaactacaagagccatttaatagtcccgttgtcagtaggcaaggcttggcattacatcagcgttatcagttggggcaatacagatatgagcatattgctgaaaatgtatgccagtggttcgatgaacttttattacgccctagcgaaattgcagatgtcatcagttctacagcgactgaaaaatataagctacttaggtctcgtttaatttgtaataatagggatcttgaacagtttcttggtaatgcactactccactccgtaatgagaattaaatatgatagccagcctatcccagcaacactttaccttgatgttgatgatggtgttaaaatttatgaaaacgtacatatagttcagcgaactaatggtggggatgaactgtggctcggtgttagtaaaataacgaaaggtagtactgtttcccaggttcttgttgatctaagggatgcattgtataatgaaatactcatagatctagacggagttagagaaaaaattctagatatcaaagaagactcttatcttttacagcatgatattgatgaaatattagattcgagtaattcctttgaagaacatatggacagatttcgattcgttatcttctttggatacgaatcagaatttctcaccatacctgagaccaaaggccatgagccaagtttatatgctgaggcatatgaactttttttagcgttcatatccgacctcaagacccacgtgcatttttcgactctgaatgttgacttgtatctatatcctgcgccaagctttactgatttatgctctttgttagatgaaaaaatgcgagatgataaatga

SEQ ID NO: 59417 - DNA, 2190 bp, Serratia fonticola
atgaataagatttatgataacgctcggcttcagtttgagtcacaaaattcgtcagctttcagctatcttcgcgcagcggatcaactattatcgaaccctgtttctctgcatatgggaagagacttggtaattcgtgccctggatgctagagaaaaattttctaactatacgccgttgctgcggaatcttgtgcgtaaagctgggctatttccttatctaaaaaaagaattccaagatgtaacagttagtgaaaacgcggccttgagtatctatcaaacccctttttcggaaaaaattgtctttcattctacccagtttcaagttttcgaactgcttcgaagcggtaggaatgttgtcctcagcgctcccactagtatgggaaaaagcgctatagtagactcgataatcggattaggagaggttcgacgaatcgtgctcgtggtacccactattgcattagcagatgaaactcgtaggcgtcttcaagaaagatttggcgaaaattatcaggttatacatcatagctcacaagaggcaacgagtgacagagtgatcttcgtgttgactcaagaacgggtaaatgagcgtcaagacattattgatattgatttttttgttatagatgaattctacaagctcgcatttcaacagcgagcaagtggaaaaattgactatgaaaatgaacgtgtcattgagttgaatattgctttaagtaaattactcaaagcatctaagcaattctatatgacaggtcctttcattaatcatgtaaatggtttagctagtctgggtttagagtacacattcatctcatcagattttaatactgtagcgcttgatatagaatcatttgatattgcacctaaagatattgaatccaagaaaaaagctgttataagcatctctgagagatgtcgagggcaagctacaataatttattgcaagtcctctggtgtggccggggatattgctaggatattagctggcaatggatttggtgcggattttaatagttcgcatctcgattgggtcgcaagcgaatatgatcctgaatgggactactgtgtagctctgagacatggtattggtctgcattttggtggattgcctcgtgctcttcaacaatatacaattgatctttttaataatggagagattgatattttaatctgtacctctactattattgagggggttaataccatcgcaaaaaatgttgtaatacacgataatagagatgggaacttcagtattgataagtttacgcatgggaatatcaaggggcgagctggccgaatgggggtgcattatgttgggacagtatattgtcttgagtctatcccggaggattcatttaatcaagaagtagaggttcctcttggtattcaggatgaaaccactcctatgaatttgttagttggtgttcagcctgagcacctaagtgaatactctcagtccaggtttgataaagacgaaaatgtttatgagtttggagttgaactactaaagcgacatagctcgttcagccttgaaacattcagagagttgtacgcatttgtggagatgctttcggaaaatagcatgcgatcagcaattttccattggctcccaactggtgagtttctgaacgtgctcgctacagctctgattaggttcaccccgggggcgctgcatagggcgagaatcaagacgggtagtcccgcggtcattcatgcgaagcttacctcctatatatacactccaatttatgccgagtatttcaagacgcagataaaccagtctaaaggtcgactaagcaggggggaggtcaataatttatctacttgtataaacgatgatctcaagattgtgattaacatttttggccatacagtaccaaaactgcttaatgttcttgaggacgtagttaaattgtacgcaaaacgacactacattgagggtaaagttgattactcaaagcttagaagtatctttgagcattaccacttatctacagggcttgctggtatggaggaaatgggtataccggtacagaccctacaaagactcagccgagtcctatctgtaccggaagatcttgatgttgataaggtagctcaatttttacgcgataatcacaaccgatggcaagaaatgggcagtgttgaccgcgcgtttatggaaaggacgctctatcctgacgcaatttag

SEQ ID NO: 59418 - DNA, 945 bp, Acinetobacter pittii ANC 4052
atgagtacaactccatttggatcaaatgaaatcattgaaataaaagttttagagagtgatttaaggggctttttagtaggatttgacttagatgataatggtacaagtcaatatcgatggtcagctttgattcaaaagattctaagcgtaatacatgagttttctttcggatttcatgaaggaacatctacttcaaatacaaaaacatttgaaaaattagtggaagcagctaattcaatttacaagattgatggctttcagagagctaaagatatatatgcaaataatggtgaagtagatgatgatattgatgataaatatctaagaagaggcgaatttggagaactcatacttcatcttatcctaagagaccatttcaatacaattcccttactttcaaaaatatattttaaagattctagaggtcatgctgttcacggtttcgattgtgtacatatagaacctagctcaaaaacattatggcttggtgagtcaaaagtctatacagatcctaagcgaggtttaatagaattaataaaagatattaaagaacattttaaaacagattatttagattctgagtttaaccttatatcaaaaaaaataaaattatttgataatattccagaaaatgaccactggataagaatattatctggaacaaccaaattaaaagaaaaacttactaatatttgtattcctttaatctgtacatacagttgtgagttatttactaaatataatgacgatacacttgaggaatttataaaagattacaatgaaaaaattaaagaactaaaggaatattttgataaaaacaacaaccatgcacttaaagaaaatttaaatatagttgttattttactccctatacaatgtaaaaaaacgcttgtaaaaaaactacatcataaactttctatgatacaagctttaggagatgaatga

SEQ ID NO: 59419 - DNA, 2184 bp, Acinetobacter pittii ANC 4052
atggaaaatttaattaaaaaaataaaagaatttgataattttaattttgacgagactttctctatttattcagagtgctctaaaagtttaatacaagatgaaaagataggaatagaatttttaatatatatcttaaactataaagaaaaattccatccagatttaaatgaaatattatcagatttaactgaatctataggattctatccatatctacaaaaagagaaattaaaaataaataatactagcgcaaacataagagttggtattaatcaatcaaaaaatattaaaaataaatattttcatgatgaacaaaaatatgtattagatattttaaatactggaagaaatcttattcttagtgccccaactagttttggaaaaagtttacttattgaagaaatagtagcctcaaaaaaatataagaacattgtcataatacaacctactctcgcattattagatgaaacaagaaaaaaattaaacaaatataattcattttacaagctcattcttagaacatctcaagaacctgatgtgaagaaaggtaatatatttctattaactgctgaacgagtaaatgaatatcaaaaattaccaaaaattgaatttctagtaattgatgaattttataaactaagctcaaaacgtgatgatgaaagatcagattcattaaataatgctttccagtatttaataaatagattctctcctcaattttatctccttggaccaaatatagaaggaatatcatcaggttttgaagaaaaatatgatgctattttttataaaactcaatacaatttagtaaattataatgaaattaatatatacaaagataatgaaaacttattcggagatcgtggtgataaaaaagcttataaagaacacattttatttgatttacttttcacattaagaaacgagcaaactattatctattgctcttcccctggtagagctagatatctttcaaatgagtattgtaagttccttataaataaagaaattcgaattaaaaacacagatttacctatcattgaatggattaaaaactatattgatccaagatggagtttaatccattgtttacgttttggtataggtattcatgatggagcattacaaaaacatattacctcaacaataatagagcattttaatacaggaatacttaatacacttttttgtactgcaactattatcgaaggggttaatacaaccgcaaaaaatgtaattttttatgataaaaataaaggctatcaaacagcagttgatttctttgattattctaatattaaaggaagagctggaaggttgatggaacactatatcggaaatatttacaatttcaatcctcctccccctcaaacacagttctatgtggatattcctttcttcgaacaaaatcctatatctgatgaagtattaataaatatcaatcctgagaatattattaataaagaaagtgagcaatattcatttatatctaaaatgacccaaaaagaaaaagatctctacgcacataactcagtatatattcgtggccaagttgatctcctacaaagattacgcatagaccttaaagataaatataaacttattgcgtgggatggaatgccgacatatgaacaattacaatattgcttagggttggcttgggactatttgattaaacctactgaaaacctgggatctatgacaaaaaaccgtatagttaaggtcacttttgattatggtttaaataaaaatattaacaaacttattcaaggcatatactcatataataagagcaataataaaaaactaagaaatgataacgaaatactagatgatgccataagagattctttccatatacttagacattggtttcaatacaaaattcctaaatggttacttgtactcaatgaaatgcaatcttttgtttgccatgaaaatggtatcagagcaggtaattacaaattttatgccagttctattgaatttgattttattagagataatatggtcattttaatggagtatggaattccaaaatctgccattaataaactcgaaaaatatattccaaaagacttggatcaagaaagcgtacttaaagagattataaataaaaaattatatctacgatctgatttcattgaatatgaaaaactaaaaataatagaaaatttccaataa

SEQ ID NO: 59420 - DNA, 840 bp, Pseudomonas fuscovaginae
ttgaaaaagttatacacgcgattcactaagcttgtattcagattcgatgaagatatcgaagacagtggtgttggtaaacatccttatcatttgaactatgaaagtggtgtctacagagagtctgatctagttaaaattattcgtggtgcagtgccgcactttgctttaacgccggaagaatatagcagattaaaagaccaggacgatattgatgagatgtatagacttgcattctctaggatatcaaaagcaaaaaaagataaaaagggagactatggagagcttctattatttttgttattgcagtcattctataataccgagcgattagtcacaaaggtcaagctgagaagctcggtgaaagaccaaataaagggttttgactgcgctcattttacagtcggtgatgatgggcaacctcttctctggctgggtgaagttaaattttataagtccttttctggcgctctagatgacgttgttgaagaaattgttgcgcatacaaagggcgaatatttaaaaaatgaattttcaattctttgcccaaatgtagagtttaatggtggtgtagatattccggactccgtagtcgacattttggatggtacggttacgctagatgacgttaaaatagtcattcctgcattggttacttatgagactgcagtccttaaagcgcacacatccatcgaccaaagtttcaaagatagcataaagaaacaatttgagaaaaagtatgagctcataaattctagggatatcactataccacctaatgtcgaagtgttctttttgttacttccgctgtcggatgtcgattcaataaagagcaagttataa

SEQ ID NO: 59421 - DNA, 2193 bp, Pseudomonas fuscovaginae
atgaatttcttgcaaaggattgccgatagggcgcacgaacgactgcagaatgacgagcaagctatttctctcgcttgcgactcaaaagtatttgccaggcatgttcaagatatatacaaggtacttcaatcccccaagtactatacgttcggtgtgcagaaactttgttttgcatgcgaggctgcagtaaacgaaccaatggtgattgctctactagagcagtgtataaattcatctcgtatatttttatatgaggagatgctgcggaaacgattacagtatgctccgtcggctgaaggttttttagaggtggctcaaaaggcattctactctttggagagtgatgtgattttgaccaaagagcaaaaagatttatatgatcttttcttgaaaaaaaggcggttagtgattagtgcgcctacatcctttgggaagtctcgcattgtcagagaaattatttctcacagttcctatcagtgtgtggtaatgatcgtacccaccaatgcgctattgaatgaaacctatcaagcttttagagaggatagagggctttctgagtattcgttggtgttctcaactcatactgaacccccagaagggaaagctatttatatatttacgcctgaaaagtttgatttgtatacagacgagcatgggatacagttcgatttctttgtgtttgatgaggtgtataaggttggtaactatgatgggcgttcttctgtattttcaaattgtttgtacaaggcgtacaagcgtaagtgtgattattacctgattggcccttacttcaaaagttttagcgcgaaatacttggagaggacgtctgggcattttgagagatatcagactgacatcgtgcaaaaagaaatcataagctattttgatgggggggcgccgacctatcgaaaaataacacttcctgtgagagccggtaaagatgcgaggctaaagcaagtcctacaaaaaatcgatgggcctaccattgtatatgtgggtcgcaaggataccgcagaaacccgagcgaaaataattcacgagataaaatctaaggcgttgcggcaaaaaagcgattcagtagtagagcttgttgagtatattaaaaagacgatatccacggagtggaggctaattgattttttgcagtcaggagtcgcttttcatcatgcgggcatcccaaaatacatacagtcagagatagttgacttgtttaatgctggggagctcgatgtgattgtttgtacgcccacattaacagaaggggtgaataccactgcgaaaaacgttgttttctttgatactacaaaggctgatcaaagtttaactggattcgaagttaagaatgtagttggccgatcaggtagatttggtcagcatttcgtagggcgtgcggtatttttggagcctcacgctgagcaagatgatatcgaagaaatttcttttcctatatttgattcagaaaatttgagagaagaagacaatattcagatatcgctagatgatttgaatgacgctggacgtaatcaaagagagcgaattaataatcttgctgggtccttgatgattcctctagaggtattaaagaagaataagtatgtgtcgcttgataatcaaattcggctcataatgcacctcagggaaaacccctcaatcaggagggaactgctcggagcacataacccgccacgaaaagagcaagtcgatttaattattcatttggtccatgattttctctattctgactccgacaagagagatagttggagtaccgggaatatttcgagattcgttaagtatcacgtgtatcacagtccgtctataaaacagctgataaaagagcatcacgcggtgaaggaagatacgaggattaggaatgttctcgatctgatatatacgtattttgaatattctcttcctaaatatatatctgcgcttgagaatattgtaaattttgtatattcggaaaaaatatcctttgcattgtttgttaccaagctccagtatggaagtactgagccgcaagatatactcttggctgatgctggtatacctagatctataataattcaagtgtcgggaggtttgagtggggccacaacaatcgaatctattaaggaccgccttagccgtaatcctgggatcctaagcagattaagtgggattgagaccaggatgttaaagaaacgaatttga

SEQ ID NO: 59422 - DNA, 963 bp, unidentified eubacterium SCB49
atgacaaaattagataaattcaatatccactttgatagtagcttaaaagatttttgtccagatgttgattttaacataattgacggaagagaggttttaagtattgctaatgatttttccgatgaagattggcaatatcaaaaatttcaaaaatttatttttaataatattgctcaaactgctttatcaaaaaaagaaagggataatattattgatgatagttatggaactctaattgaatccgctaaaaagctaagacttctcgataaaaaaaatatcacaacggatactgaaggtagtgaactagctgagattttactatacggtattatgcatcatcattataaagcactccccgtagttcctaagatattcaacaaacaaaattccaacgataatgcaaaaggttcagatagcgttcatatagttttagaacaagaaaatgaattttctatttggtacggagaatctaaattttacaatagtattgaagatgctagattgtatgaaattgtaaattccgttctaaacatattttcagattctgcttttaacactgaaaataggattctaagcaatagcaatgacttaaaagaatatttaaatgataacaaaaaattatttgacaaaatcattgacattcttgatacagactcacctatcgattatgtaaaagctaggttaaacattccaattcttttattacatgagtgtaagataactaatcaacaaaaagaaaatgcagatgagtacattgaagaaattttgaattatcaaaaaggacgagttaaatctttttatcaaaaattatataataaagcgactaaaaataatgataaggttaaacctattataaacttcgacaagataaaatttcattttatttttttccctgtacctgacaaagagaaggtaatttcaaattttttaactagagcagaatctttaagaaatgaattatga

SEQ ID NO: 59423 - DNA, 2118 bp, unidentified eubacterium SCB49
atgattgaacattttgatagatgtaaaaaactttttggttttattaaaactaacaattacctaaaagctcgtgatggtgtaattcatttactaaatgatttaaaggaaaaaaatattcagtatgatgaattggttaatcatttaattagagaagtaggactatatcaatatatagatgagagctccagtaattggagtgatagatttgcaaaagaatcatttaaagtcaatacaggtaatgaatttcaaactattcactttgaacaatcttctattttaaaacaccttttaaatggtgataatattgctttaagtgcccctacaagttttggaaagagttttataatagatgcttttatagcaaataaaaaaccaaataatgtagtaattattgttcctaccatatctcttacggatgagacaagaaagagaataaataaaaaattcggaaatgaatataaaataattacaactcccaatataaaattatcagataaaaacatttttatttttcctcaagaaagagctattaactacagtaatattattgaagaaattgatttattgattattgatgagttttataaaataagtaaagctaatgataaagaaagagctgttaaattgcaagaagctcttataaaacttgacagaaaatctaaacaaaaatactttttagctcccaacataaaatccattaaagataacccttttacagatggtatgattccagttgtaaagttagattttaatactgtagtactcgagcatcataaattatataaaaaaataaataaagatgaagaactaaaaaaggaatttcttttaaaaatatgtagcaatgataaaaatttaatttatgctgcactatataaagaaattcataaacttcgacaattatttattagtaaatttgatgatgcaaagaatgaaaaacttatagagttttcaaattggttaaaagttaattattatccagactgggatttagctgatttaattttaaaaggagttggaatacataatggtcgcctgcatagatctattacacaatatcaagtactcttatttgatgatgaaagtagtggattgaatagtcttatttcaacatcttctcttatagaaggagtaaacacatcagcaaaaaacgttattatatggtctataaaaagtggtcaaggtaataataatttaacgtcattatcttataaaaacattaaaggaagagctggacgaatgtttaaacattttgttggtaatgtatatgaattagttgagccaaacctaaaaaatatggatgatatccaattatccattgaaattgacaactctcttattggtggaatcacaaatgaaaattttctttctcaaataagctctgaaaaacaaacaatagctaacgaccaaatagataaaatagaatctattttaggcattggagtttatagaaaattacgagaagaaaatttactgaattcgaataatgaagacttaatatataaaatatgtttagaattaaaaaaaaaatattcggattggagtagtttaaaaatgttaaacattgaagacccagaaaaatggagaggcattcttggaaaattatgttttttgaatccaaatagcatgagatgggataatggaaataataatcaattcaagcaagcacaaaaatttatacaagttatatcaaaaaattggacaacatctcttcctaatttaatgttagagcttaaaagtgaaaatctatctattgacgatttttttactttagaaaagaaaatctgtcataatttttcaggatatctaaatgattttaatgtacttaatgaaataattaatgaaaataaatttatagatatatcaaattttataggaaaatgttctaatgcatttatgccacctgtagtcttagtattagaagaatatggattaccaagaatgattactaaaaaaattaattattgtaaattaattgattttgaaaacaatgaaatgaatattgaaaaagctataaacttactaaagtctgttggtaaaaagcaaatactcgaaaaatgctcaatatatttagatgattttgatacatatattataaataatttttttgaaaacatataa

SEQ ID NO: 59424 - DNA, 1668 bp, Pseudomonas coronafaciens pv. atropurpurea
gtgagagagattgtcataaattcgatggctaaaattgccatggatgtcgagatggaacctaatgatgctggcggagtcgctgccaagcacggcttcatcttccaagattgcgtcgcagcctactacgtcacccagatgctgcgggacaaaactattcaacgtgttcgatgtgaagtcaccgatgacattgatgttgtttgcgatgatttcgtcgaattcgtgcaggtgaaaaccaccacgaagacactttgggcgagaagcgatcttgtcgtcctcagttcaggtgccggcaacaaaaagatcaaatacagctcgatcatgcataagtccatgcaatgcgagcccacgctcaccgtgcccaggaagttcagaatcgtcacggagcatccgaccaatgtcaccctcgaatacctgctcatcaaccgtgaagagcggaatggaaaagcggggcgcgatgagctggtcgactacctcaattccaaaacctccgactatgtcgcacccagtggggtggacgtggcgacctgggttgacgcagcgtgctgggaagtcttccgcacgatgcgcgagattgagctcctgggcatcaggaacattcgactagcctcgtatgatcttcacggagtcttattgagcaccgaagcctcggcggagaacatctggcaggggattctggatacgattacccgtaaaggtgccctgtcacgcaaaattcactccgtcgacagcaaatcgtacctgcgcgcggatctaaacgcgtggttccaggggctggtcgaggaggatcagaagcgggcgggtcgcaaggtttacgtcaaacggcaactcccccatatcctggttccgtttcgcaactcgctggccaccccatgtgctaagcgcaatggtcacgtcctgcaccagcaatacagcttcaagcgctatcgctacaaacacattgtggacaatgtgtgcaaatggctggatgaagtgttccttcgtcccaatgagctcgcagacattcacaagttgtccctagtcgagcaatctcagcgcctgaaaaacacggtgtttgcttccttggcagacgtccgctcactcctggggcgagtgctactccatgccacgatacggcagatgcatgcgagccagcctatcccgtgtctgctttacctcgaaggtaagggcgaagaaaagatcctcgaaaacgtccatatcgtcaggcgagatccggagggcgatcagctgtgggtcggcttcagtgagctggtcacagcagccaacatcactacgcgtcttccggagattcgccaacagctttacgaagagatcgtggagagtttcagcaacgcccggggcaagattctcgacatcaaggatgatgagtacctactgcggcatgacatcgacatgatcctggacgagagcaacccgttcgatgcacacctggatcgattcaaatttgtgctgttcgttgggtacgactcctcgttgctcaccgaccctgagacacccgggcatgaagatcatttagaacgggaaacgacagctctcttcgaaatgtttgccgacgacttgaaacgcgacccaacgttcgccgagcttgcgatcgacgtgttcatctaccccgcaccgagcttggagacgttgacccagttggtggacaaaaaggtcagggaggccatatga

SEQ ID NO: 59425 - DNA, 2223 bp, Pseudomonas coronafaciens pv. atropurpurea
atgaccgaagtttatgatgcagccaagttgagcttgagcggtgatggattctccgcattccgctacctgtcagcggtcaacaccctcctgtccaaccctgtctccacccctctgggccgagatctaacaatccgagcgctcgatgcccgtgagaaattcaccgaccacgttggcattctgcgcaacatggtcaggaaggctgggctgttcccctacttaaagaaagagttttctgagctgtcccagggtgacctgattgcgctcgacgtttaccgcacgccattctcagaggattttgttttccactctatgcagttccggatcttcgacctgctcaaggacggtcgcaacgttgtgctcagtgcgcccaccagcatgggcaagagtgccattgtcgactcgctactggggctcggtcgcttcaatcgggtcgtcttggtggtaccaacggtcgcgctagctgatgagacgcgcagacgccttcaggagcgcttcggagaggtctatcagatcatccatcacagctcgcaagaatgccgcagcgaacgggtcgtgtacgtcctgacccaggagcgggtcaacgagcgtgatgacatcaaggccatcgacctcttcgttatcgacgaattttacaaactggccttccagcagctcaaaagtggcaccacagacttcaatgatgagcgggtcatcgaactgaatatcgcccttagcaagctgctaaaggtgtccaagcagttctacctcaccgggcctttcgtcaacagcattcgaggcctgactgaacttgggtacgaccacaccttcatttccgccgacttcaacacggtggctgtcgatgtgcagacgttcggtgtggatgccaatgacgacgaaggaaagcttgcaatgttggcgactattgcgccccagtgcgaaggcgccacgatcatctactgcaagtcctctggcgttgcaggcaaggttgcacgcgaactcgtccggcttgggtatggccgtccgttccagagtgagcacattgattgggttgctgaggaattcgacccagagtgggactatacctatgccctcaggaacggcattggcctgcatttcggtggcctccccagggcgctccaacagtacaccgccgaccggttcaatgccggcgaccttcgttttctgctgtgcacggccaccatcattgagggggtgaacacggttgcgaagaacgtggtcatctacgacaaccgtaatggcactcgcgggatcgacaaattcacccatgggaacatcaagggacgtgcgggccggatgggtatccattttgtgggcaaagtgttctgtctggaagacgttccggaggacaatctgaaccaagaggttgatgtgcctctgggaattcaggatgcggatacaccactgaatctgctcgccagtgcacagccggatcacttgtcagaatattctcaggagaggtttgaggccgcctttgcccaagatcgattttccatcgatctactcaagaagcactcctacttcaggatggagcagttcgagcagctctacagcatggtcgagatgctcagcgagaacgaattcgagtcgcttctgttccactggtcgccagcgcctggtttccttaccactttggccatgatcagcagcaggctagtgcccaaggcgttttccacgaatgggctgcagaccaaaacgcccgatgccatcctggccaagctgacgagctttcagagagctgagagctactctgcttatttgaagggccagatcgaatacaccaagcagcggatcaaggatgatgagaaacggatcagggctggtcaacaacggatcaaagctgatgagaagttgaccctttccactgggctcaacaacgacttgaagctggtgagcaacaccttcggctacaccattcccaaggtgctggcgctgctggaagacgtggttcgcttgcacgctatcaagaagggcatccggagcacgattgactacagctatgtcagaatcaaattcgagaaccttcatttaccgccaggggtgaatgcccttgaggagattgggatccccatccagacgctgcaccgcatgtgtgagctactggagtttcccgaaggggccggggtggatgaactggctgactatcttcgccacaacgagccggcctggggttttatggggtacgtcgaccagagcttcgtgaggcgggcgctcgggtctgtgtga

SEQ ID NO: 59426 - DNA, 936 bp, Raoultella ornithinolytica 10-5246
atgggaccattcaaagcgcatgaagtaatcgaagaaagaatgagagatcaagctttatgtagttacttggtaggttttgatattaatgatacaggtgtatcttactataggatggatcctttgattatgaagattttatcggccctgcatgagttcgcttatgggttccacgaaggggagcagacagataacacacaaacattatctaaaataatagatgcggctcgttcaatttataaaattgatgaatatcagaaggttaaagatatttatctgaattcaggtgaattgactgacgatgttgctaataaatatcttaagcgaggtgaatttggtgaacttattctgcatctgattttgagagattttcataatacgatcccacttctttccaaaatttatttcaaagattctatcgggcatacggttcacgggtttgatgccgtgcatatcgatcctgtcaataaaaccctctggctaggtgaatctaagttatatattgatcccaagaaaggtattggtgatttaattaatgatgttgaagagcattttaaagctgattatttaaattctgaatttaatttgatagcgaaaaaaatacgccatgtacaaaactctccagaattagaatattggttggacattttatcgacaggtggaaaactatcagataagcttacgaaaattaacatcccgctgctatgtacctatagctgtgattcatttttaaaatatgataacgaaaaatcaccggatttttctgcttattataaaaataaaatacttatgctaaaaaaatattttgatgaaaattacaaacatcctttaaaaaatcatttaaatattattcttatgcttttcccagtgagtaataaaatagaattagtaaagaaacttcatcaaaaactatcattgattcagcagattggtggttga

SEQ ID NO: 59427 - DNA, 2181 bp, Raoultella ornithinolytica 10-5246
atgaatgagcatattgggagtggaaatgacgccctattcgaatatacttttagtgagtatcaaaaatgtgctaggttactaatatcagatgagaatcaggggagagatgaattaataaaaattttagaaaagaagaatgattattcgcgaatattagatggtgttttagctgatctaatcgagtctgcaggtttttatccttatataataaaaaatgatttaacactatcctcatcatcgcaaaaaataaggtttgaaaataacagatcaataaatatcaaagataaagtatttcatgatgaacaaaaatatttactggatctaatcaattcagaaaaaaacgttattgcaagtgctcctacaagttttgggaagagtctcttaatagaggaaatagtagcatccaagaaatacaaaaacatcattattattcagccaactctagctttactcgatgagacgaggaaaaagatttcaaaatattccaatgactataaattaattgtaagaacaagtcaggcgttttgttcagaaggaaagggtaatatttttctgctgacatctgagcgagttaatgagtataaagaccttcctaaagtagattatctaattattgacgagttttataaacttagctctaagagggatgatgaaaggcatcagtctttaaataatgcatttataaaaatttttaaaaacagcacgccaaaattttactttttggggccaaatattgatggcataactccggggtttgctgataaatataatgctgtcttttaccaaagccaatatagtttagttaggtgtaatgattttaatatatataaggattatgctgatttattcggttctcgtggaaataaggcaaggtttaaagaaagtattttatttaaattgatttctggacgttgtgatgaacaaacaattgtttattgtgcctctccgagtaaagcaagaagactctcaagagagtttgctaatcttattcaaaaaaataaatctggagagctaactcataaccctccgctgatagaatggatcgagaaaaatatctctaagaggtggtcgttaattgactcaataaaacatggtgtggcatttcatgatggagcactccctagacatattacttcatctataatagattattttaacgaaggcttgataaaggtgcttttttgtacttcaacaatcattgagggagtaaatactagtgctaaaaatatagtctattttgatgaaaaaaaagggaaggacttgagtattgactactttgattattcaaatatcaaaggtagagctggaagattgatggagcactattcaggaaatatatttaattttaatcctcctccagaaaaagaggtgatatacattgatataccatttttcgaacaaaacccgattaatgaggaaattttaatcaaccttgatgatgctgatataaaaaataaaaattcaatcgaatataatttcatatcatcattacccttcgatgaaagtgttttatttaaaaataattctataaacatccgtggacaaaaaaaacttcttgattatttaaaatccaacatacgtgataattatgtactggttgcatggtcctctacaccaaaatatgaacagttaaaattttgtgtacatttgtgttgggagtatttattaaaagataatgagaaaagtaatcaaatgtccgccgaaagattaactaaagttacttttgattatggcttttctcaaaatatactagagttagtgaaaaacacatataactataatttaagcaagtcaggaaagatgaatgatgaaaaaacaataaaaataatagatgaatcgataaaagattctttttatatattgcgtcattggtttcaatataaacttccaaagttgttatctgtattaaatgaattgcaaacgtatgtctgtaaactttttggtttagtacccggaaattatctgtattattcatccataatagaaaatgattttataccagaacatttaaatattcttatagaatatggggttcctaagtcggcaatacaaaaaattgcgaaatttatacccgatcacttagttgatgatgaggttgttcggttgatatcaaataaaaaattgtatgattataatgaattaatagattatgaaaaaaatatcattaagaaaatgttttaa

SEQ ID NO: 59428 - DNA, 921 bp, Vibrio anguillarum 775
atgaccatcaatattaatcgttatttatctgttgataaaagtgcgtatgatgcttgtattggttgtttggaacacgagtatgcaattgaaggctacaaaaccaacataaggctccactacttgaagtttgatggtaacggacaacctatggttaaagcacttgccaatctgttgtacgaattcatcatcgattactgcatttcatccgcaaacaggccagagcaactcacagcgagagaatccaccagactaaccaaagaagcgagaaaactatttcgtcatcctgaaatagataaagacaacccagatagaacaggtgaagcaggtgagttacttttattcttcttaatcgaagctatcttaggtgctcctcaaatggtctctaaaatggaattgaaaactaaccacaaagacgaagtcaaaggatcggatggtattcatgcaaaatacaaccaagaagatgatctcgtagacttcttttttggagaggccaagctttatgtcgattctaattcagctattcaagcagcattgaacagtatcgacgacttccatagtgtcgatatgcttgaacatgagttcacaatggttactaaacacttcaagtattctaatgaagagactaaaaaagctttgtcatctctcatcatttgtggggaacctgggcctaacgctcgactcaatcacgcctgccttatcggatataactataaagactttagcactatcgatggcggaaaccccagggttctaacagagaactttgtttcaaagtttcaggaagaaggattgcgcttaactaaatccttacagaaaaaaattgcaaatatgaattgcaatcatctttctttcgagttttttttccttccatttccctcagtagatgatttcagaaatgcttttaacaaagcgttagactaa

SEQ ID NO: 59429 - DNA, 2526 bp, Vibrio anguillarum 775
atgagtgaattgctcgatattcacatgctagtaaggaagcttgaaaaggctagtattcaaaaccagctaccatctagcttctcctcagaaaatttagtttctttcgaagataatgaaattagagcgctcgtaagccatgcttctgttttgtctcttggaacaagcgacgacgttaatgaatcatatgaaatcattactaggctccttgaagaaactagcggaaatagcaaactcgtgaaaggggctgctgaagttatcttgtctaggatcggtaacttcccaggtagagatctgttaaggagcagatacgcaattgaaagcggtatacctgctcctttaagactagaaatcatcgctagagaatcagaaaatacaatcactgacgaaaccgataatgaaatacaacttacagacttccagctccagttattcagatcattagaaagcgaacagaacttgagtatttctgcacctacatctgcgggaaaatcctttgtattgaacctttctttatccaatcaaatcaaagagaaaagctgcaacagtattgtctatgttgttcctacacgtgcactaatctcggaagtatcaacacgagtccgaagtgcaataaaacgcattgggcaagataaagcgattatacgaacaacaccatttccagttgatagaacaaaggttcgcactaacgttgtatatatctttacacaggagcgactgttaagctttttaagcgcaacagatgtcgaacctcaaatcgacactcttattgtcgatgaagcacatgagatacaaaatggcaaacgaggaataatccttcaaactgctatcgatatcgccttgaggaagttttgtaatgctaaactacttttcgctagccctttgatacagaatcctgagtacttcttatctctatttcaacgaacatctaatggcaagttctttaccgaggtcatttcccccgtttctcaaaatatactgttggtcaaccaggtagcgagaaaaccaaccaaaatgcatatatccttgcttaacagtatagggacgacggaaattggagagttcgttctcccctttcagctaagaaatagcaaacaccagcaaatcgccaacttagcgttatcgttgtcagatgacgactctgttattgctttttcaaacactccttcaagtgcagaagaacgtgctgtacaagcagctcaattagctcaaaacattgatgtaagtgaagatatcgaaatgtttataagcttcattaagcaagagattcatcctaactacgcgctgataaactgcttaaaaaagggcattgcttttcattacggaaacatgccctcgttgctccgcacgggtgtagaagatcttttccgaaatggcgatgttaaagtcgttttttgcacgagcactttattacaaggtgtaaatcttcctgccaagcacattattattgagaatccaaaatctggcgacaatggtatgacccgtgctgatttccttaacttggcaggacgagctggtcgattactcaatgaatttcatggaaacgtgtggtgcatccgacctgaggaatgggaaagcccgtgctatacaggagataagctacaaacgataacttcatccatcagtaacatattgattgatggcggtactgagttgcagaaagcaatcaatcctgataccactgaggactcttgggatgaaaagagacaggatgaagcggacgtagcaataggtaagctctacaacgattatcttgataccaaagatttttcattcatggagcaatatcggacagatataaatagccgtgaactagatcagacgatagaagttgttagatctttggaagttaccctacctgaagaaattatcaagcgaaaccaatcgttgcgaccagatcaattagataagctatacacgtacttgttggagcagaacaatattgaggacttctacccaatatatccatatttatcgggagcaaaggctagagtcgaaaaaatacttggggtcattgaagtttgtttcgaatggaaactacatgaaaagttcaaatcttggctcagttttcttgcttatcaatgggtatggggcgtgccaattggaaaaatactccacgagagagtttcttttctggagagcaccaaggagagagagaacatcaaccctactaaggtagtaaggtcttgtcttaaagttcttgaaacagatattagattcaagatggtaaaatatttttctgcttatctggatgttctaaaatacatcgctcttgaagaagagttaaaatccgcagaaaccattgagccttatcacatataccttgagttcggttcatgtaaaaaaagcgttctaaacctaatgtctgtaggcctttcacgttttactgcgattcatttagataagtgctttaacttcagtgaaagtgacgagcctgaggaatatttagcagagttacaacgtattaacatacataaactgaaaatgcctaggctatgtataaatgaagtagcaacccttattacatag

SEQ ID NO: 59430 - DNA, 921 bp, Listonella anguillarum M3; identical to SEQ ID NO: 59428

SEQ ID NO: 59431 - DNA, 2526 bp, Listonella anguillarum M3; identical to SEQ ID NO: 59429

SEQ ID NO: 59432 - DNA, 921 bp, Vibrio anguillarum; identical to SEQ ID NO: 59428

SEQ ID NO: 59433 - DNA, 2526 bp, Vibrio anguillarum; identical to SEQ ID NO: 59429

SEQ ID NO: 59434 - DNA, 852 bp, Desulfovibrio alaskensis G20
atgactttaccaatgccagagaagttttgggacatcagaatccataaggtagacattcatccaggtgtgaccggattatgcgtcggctatgaacgtggcgtatggcgcaaagatcagtttgtgaggcatgctatggattggcttccagagtttgctttaaaagagagtgaactcaagggagtggattctgcaaatatggtccaaatggtccgcgatgcagcaaccgccatatataaatcagaaaaattccataaacgtggtgagtttggcgaactgttcctacacatggcaaaacggcaagtttttaattcaataccagctgtttctaagatttattacaaaacagctcgtaatgatacggtaaaagggtttgattctgttcatgttgtggaagctgaagatggactggagctatggcttggagaggtgaaattttacaaagacctcaattcggctgtcgcggatgtagttaaagagctacaaggccacactcagacagactaccttcgagatgagtttaatctcataatgaacaaagtggacagggactgggaacactatgaaacaatgaagaggctcatgtcaaaaaacacgtctttggatgaggtttttaaacgggcatgtattccggtccttcttacttacgagagtgaagcaatttgtcagtgctccgtttgtgacgaagaatacaagaagctcttcatcaatgaaattagagaagcttacaagctcttttcttctaaaaaattacctacagatataagaatccatttgtttttgttccctttggcatcaaagcccgaactgataaaggctctggataaaaaactgaaactttggcagcagctatga

SEQ ID NO: 59435 - DNA, 2100 bp, Desulfovibrio alaskensis G20
atgaccaaaaaagaacttagagttattcttggtgatcctgagcgaattgctgcggacccttttcttgttttgaaggagatagcgtgttttgtgaatgaccccgcgctcgaagatgaggggagagacctcgtcctaagggcactggagcacaaaggggcttttggagattgtttcggaatcttaaacgatttaacacggcaagttgggttgttcccatatctggacgaagaaaggctctcgcttcctgattctatcgcctacgaataccataagccactgaatggtgatgacttcgtttttcatagagagcaggcatatatttatcgtcgacttctttctggagaaagtgtcgtattaagtgctccaaccagctttgggaagagtcgaatcatcgatgaaattgttagattgaataaatttaggaatattgcggttgtcgttccaacaatagctcttattgacgaaactcgcagaaggcttatcaaattttctgatcaatacaaagttgttactcaggttagccaagtaccagcagagaggaatctgtttattctcacagctgaaagagtaaatgcctttgaagagcttccccaaatagattttttcgtaattgatgagttttacaagctcgacatcacaagcagcgatgaaacacgtcctgtaaatttgaatcaagcattttatcgtctttacaaaaatggtgggcagtttttcttgctggggccgagtattgaacaagtctcagatcaaatggaagaacagtttagctgttatttctaccgcacgccattctcgaccgttgccagtgatcaatattacgttggtggcggggatagagaggctcagttggtcgaaatttgcagggagcttaatgagccaacgctaatcttttgtagctccccaaataaagtaaatgaaatagctgaacttcttgagggacaactgagtgcacgagatgtcccaagagaacttgcgtcatgtaacgattggatttctgagcactaccaccctgactggatttatgggaaagctttgctgaaggggattggcattcatcatggaaggctgccaaggtctttggggcaatatgtcgttagaaagtttaatgaattgaagctaaatttcttaatttgcacgtctactttgattgagggagtgaataccaaagcaaaaaatgtgattgtttatgacaatcaaatagctcaaaagaaaattgatttctttacgtttaacaatattaaaggtcgatctggaagaatgtttgaacattttgttgggcgagtatttctgtttgacccgccacctgaagaacaattgcctcttgtagaaatccccttggtaactcagggagacaatgtcccggacagtttgctcatccaaatggattcaaatgatttaactcctagatcaaaagaacgactgagtgaattcgttagaagcgccattctgccaatggatattttgaaacaaaatgctggaattgagccacaagatcaaatcgggttggcttctgcaatcctttccgaaaaaaagtaccatttactgtcatggaactctttaccctcttgggaggagctagaatacgcatgcgatttgatatggcgtttttttgtaaaacgtggtggctcaggtgcctacagtggtaggcagctggctttcaaagttaatagtctttccgaaaagctctcaattaaggatcgagtcgcaaatgaattaaatgcgggtaaatattctgcaaagactccaaatgaagctgtagaaaaagtgcttagctttgatagaaattgggcatcgtatgagttcccacgttttttaatggctttgtcgcacattcaagaatacatacttcagcatgagggctatcagcctggagactatagctattatgcgacccaagttgagtccttctttgacaattctttacttgtttctttggacgaatttggaatacctccgattctcggaaaaaaagtaattcgaggtatggaggatgtagatattgacaccgccataacacgtttaaagggcgctacaatacgagcctctgcgctacatgagtttgagcgagaggtgctggttgattcaatagaagcgatgtaa

SEQ ID NO: 59436 - DNA, 921 bp, Trueperella bernardiae
atggcacaggcgacaatcacatcaacgctgcgcggtgacacgtttgcgtccacgttcaccgaggtggcgcattcgaacacgttaggtcttcgaaacgacgaacagttacgcctgttccatctgtctgtccaaaacaaccgcttcgaccacacagccctcgtcaagttcctcaaacgaaacgttggacgctacgtcttctcgcgcgccgaatacgaaggctataagcagcgagacgatctcgaagaagtcgctctcgacgctgtgagccggatgcgttcacaacaagacggcatggggctgggcgaaatcttgctctacgtcctgctcgaacaaattctcgaagcacccaaagtgctgagcaagatcgagctcaaccaggcccgaggccagatccacagccgctgcgacgccatccacctgctcacaccagacggtcagcgaaccaccagcagtatcgtgtttggaacctccagcgtggtcggcaacattggggatgccatcactgcagcattcgaccgcgtcgtagacatcgagcagaaccgctcagacgaggttcagctcgctgagaataccgtgttcaccaagaccctcgacgcagcgaccgcaggctacgtgaaggatctgttgatcccgaagccgggtggggcacccgggttcgataccgcttattcgatgtttctgggttacgacattggtctagatccgaaaaactatggcaatcagcagtatcggtctgcgctcgatcagaaaatgcagggagatatcgccgcgcacgcccaaatgatcgccaacgagatcaacacccgaaacctagataactactcgttctacatttacgttttgcccctcaatgaagtagacgttgacgcggtcgcaatcatggatgggctcgtgggcgggcaaggtggtagccatgtctga

SEQ ID NO: 59437 - DNA, 2643 bp, Trueperella bernardiae
atgtctgacaagcaagtaacagtcggcgatctcgtatttgccgacatcgactccaacgaattcctcaaacagctgtacgccaacctgctccacaactacggtttacatcgattagggctggcgaatcgtcaaccatacgacgtggatcttgaagcagcgctgcggttcgctgacctgctctcgaaatcaacccaccccaccaaccgtgaccagcatagggtatgggcgcaagaaatcgcgctcctctgccacatcctgtatccgaatgatccccgcacgaaagcatacgttcctgcaatcttcaccacgctaggcaactacccaggcctgaagcagctgggcgtgacttccgatgcaggcatcctcgacgccgcattcaacgcctaccaagccgaatacctcaccgtacccggtgataggtcgatgaagttcttcgcgccgcaaaagaaaatctacgaccgcctcactgacggcaagttttccttctcagccccaacatccttgggcaagtccttcatcatgcgcaccttcatcaccaaccagatcaaatccggggtgaaggccaactttgcgatcatcgtgccgtcaaaagcgctgatcaacgagacgcgctcgaaactgatcgctgaccttggcgaagacctagaacgacacaactaccgaatcgtcagtgctgcaggtgacatcgtgctcgaaggcgatcacaacttcatcttcgtactcaccccagaacgcctgctttaccttctgatcggcaaacctgcgatcgaattcgagtacatctttttcgacgaatcacacaaactctcaggcaagaacagccgcgccccgttctactaccaaaccgtgacaatccttcaacaccgccacaagccaccacacttcgtcttcgcttcacccaacattcccaacccagaggtattcctaaggctggttgatccaaactctgacgaaaatgaaaccaacgcggtcgcaacccagtattcgccagtcgcacagttcaaatacctcgtcaacctgcacgaaaacaccatttccagttacaacgaccacacccaagaattcacgcacctagcctcacttcaagctcaggacgctaccgtacagggcataacccgatttgttagtgaatcatcacgaggttcagatcaccgtgggcaaaccatcgtgtttcattctgcccgacatcacgcagtgcaagcggcacgtgactatgcccagggtttggcagacctcaacgataaagacttggacgctctcgcaaaagacatcgaacgcgacgtccacgaggactactacctcagcgatctcatccgtagaggcgtcagctaccacatcggctacctcccaccagcaatccgcgaacgcatcgaaggcctgttccgcgaaggcaaaatctcgacactattttgtaccagcacgcttctagaaggagtcaaccttcccgccgacaacctcgtcatcacaaccaacaaaatcggcagagcaggaatgacaacagtcgacttcaagaacctgatcggccgagtcggacgtatcgagttcaacctctacggcaacgtattcatcatcgtgggcaaccaacttgcatccgagcaaaaggcaaaggaactcctgcaagcgaacgttcctgcacagacgctatccgtgcaaaccgactcacaaattatcagcaagaaaatgaagcaaggagtcgttgctgatcttcaagaaggacagatcgagttcgccaagggagatgaaagctacgagcgctacaacatgaagcgcaaattcggactcatgctcttacgcgacatcaccacaggacgtcaaagcctggtgcgtgaagaattctccgactacctcgacgaccaaaccatcagccgaatccgagagtccttcgcgcaaagagaagggcaacaagacgacgacatcaacgtatctgtcgaccaagcagaatccttaactcaagctgtccgagccggactcaaatacccgcgcatctctccagacgggaagttcaactacgacgaaactctcgcgtttctcgaaaggctcgcctcaatcttcaaatggcgcgtctacgaccccgaaacactcggaaaaacagataagtacggcaaccagctcacgatgctgcgctggtacaccgtattgcttacacaatggatggaaggtcacggactccgttcgatcatgaaccgtgccctccagtaccgcctgcaacaaggaacgctctacatcaaagggcaaggagagatccgttacgagaacacgctccagcaccgcaacatcgtcatcagtgaaatcctgaaagttcttgaagacgtcatcctcttcagcctgtcgaactacttcctcaaattctccaacgaatacaagaaggtccacggagtagagcagttcgacaacgactggtacgaatacgtcgagtacggcacgacgaaacagaaaaccatccttctccaacggctgggattcacccgcgagagcgccacctacattcgaaccaacgtttccaatgcaatcttccttcacgaaggaaagccccacctgaacccgattcttctcgaaagctcgaacatcaacgtccgcaaagaagccaacgaaatcagatacaacgtgccagaagccttctcgatgccagattttatgttctag

SEQ ID NO: 59438 - DNA, 1713 bp, Shewanella sp. MR-4
atgaacaaaatgaatactatgacccaatctgatggtggcggtgttgcggcacttaaaggtttcacatatcaaaacttagcagcggcatattatgtgctcaatatgcttcaagataaatcactgctgtcagtacgttgtgaagtaatagacgatatagacttaatttatgcagataagatcgaatacatccaagtaaaaacaaccgacagtgatacaaaatggtgcataaaagaatttgcggaagcaagcataaaaacagttcctccgactggacgacaaagggtaaatcaaaatattagtttggaagattcaattctacataaatctatcaaatgcgataaagagaagctacctagcttctttagaatattgacttctcgagatgtcactgatgctttgagatacttaaaaatttcaattattgaccgaaatgaaaaaacacaagaaagggaacctttattaaagagacttgatacagctattaatcgtaatcgcaaaaaactaccgccttatacctctccaaatggtaatgatacagagtattggctagatcatgccgaatggacggtgattccaaatcgtgaacatctagagttactttgtacaaaattaattcttcagtcagcacaacagaaaggaatttacttgagtgctaatggggatccagagcgtattctggcttctctgctaaaaaatgttaccgataaaggcgcagcttcgaggattctaaaaactatagcaaataaatcttaccatcgaactgactttattccatggtttaatgcagaagtggagtattatgcaggcctcagtagaaaccatgtaaaagtgtatacaaccagccgaaaggaactaacagcgattctttcatcttttttccatgatagggatatatacaaccttacaggtgaaaaattatgtacaggtcttcaaggccaatatcatcaaagaaaatatagttataaccttctagctaaaaacttgcacttatggctacctgaagttctactacacccaacagaaattgcagataacgcccctgaaaatttagtaaacaagttctctacatttactcaaagatacaatacgaatataacatttatcaaaaacttaatatcaaaagccttacttcactcgataattagaactcaatataaatcacaacccatagcagctgaactacatatagatgatagcaaaagaacatgttttgataatattcatattgtattagaagatcatgctccagataagctactaatgggatttagtgaattaatattcaacgatattaataaatcattatctgaaatcgtgaaaaaatttcataacttaattgactctgatgctttctcaactcaaaaagataaaattttaacagctaaagatgatagctatttacttgagcacgatatagatgaaatactctctaaaaataaatctttagatgattttttagacaggataagatttatttttttcattggatatgaatcagttcatcttaagtgcaatatgaaagaaatggagaaaacttatctagaagaattaactaccgaagttatagataggtttaagtctctcattgatgagcttattttagaaaatgaattttgtgaagaattacatatagaagtatttctataccctattccatcaatgtcatcacttatcagtgcagttcagaaacaaggggatcaaaatggacactaa

SEQ ID NO: 59439 - DNA, 2154 bp, Shewanella sp. MR-4
atggacactaatctaagccctgaaatctgcctaactgaagtaaaaaataaacagttaagtgcattttcatatctaaaaaaggcaaatgattgcttatcatctccacaactaaacacgattggccgagaatatttaataagagctttagatcagttccagctctttgaagaacaaaaaatattactacaaaacctacttagaaaagctggattatttccgtatataaaaaaatactttcaaaatttaactcctgaaaaagagcttgttctagatatatatagaagcaactttgacgaaaatttcattttccattctatgcaggcaaaagtattcaggttactaatgtctggtaaaaatgtggtgctaagcgcccccacaagcatgggtaaaagtgctatcattgatgcacttattacagagagaaaatttaaaaagatcgtcatcgtagtaccaactattgctctaattgatgagactaggcgtcgaattcaaaaaaaatttggactagatatacaaattatacatcatgggtctcaaattaaacgtaaagatagagtaatttacatcctcactcaagagcgtgtcaatgaaagggatgacttacgcaatatcgatttattcataattgatgaattttataaattagcttataacaatgatgagtcatctcgagttatttcattaaatatagcattaagtaaactgttaacaatatcaaaacaattctacatgattggaccatacattgatggatttagaggtatggaaaaattaggtagagactatacttttattccatccgattttaatacggtagctcttaatattcacaaatatgatattgcagcaaataatataacaagtaaaaacgagcagttagctaaaattattgaagagcataaagagcaaactataatatactgtaaatcagcatcgtctatcgcacaaattattaacttcataactaattcagaaaaaatcaaagatataaaaaataaaaatacaaaagaatatttaaaatggcttactgaaaactatggctatcattggaattgtactaaagcagtaagttatggaattggtatacatcatggagcactacctcgtgcaattcagcaaaagtctattgatttattcaattctggtagaattaaatttttattatgtacatccacgatgattgaaggcgtaaacacttctgcaaaaaatatagtcatatatgataatagaaaaggcacaccatcaattgataactttacgcacaaaaacatttctggtcgtgctggacgaatgaaccaatatctcattggtaatgttttctgccttgaggaaatacctccaaaagaaactcaggtagtagaactacctttaggtcaaataaatgaaaactcaccaattaatttattagccggaattcaatcagaacatttgtcggatagaggaagtcaaattttaaatacgttttcaaaaacatacaatattccaattgaaatcataaaaaaacatcaatcatataaagcagaagtaattgcagatggttataagtttttaacagagctatcttatcataacaaaaatgaattaattaagataaaaacacctaaaaaacatcaattggaattacttacagaatttataaaaaaagttgagtatggagcccttagcaaaattaacatacattatcttgataacgacgaactaaaaaatcgtttagggtggtatgtttatgcggatagtcatagttcatatttaaaagaaagaatagaacatatctatgaatcaagaatagatgaacaattacgttctgatgcaacagataaagagcttaagatagtcagaaatatttttaagcatgcagttactagagcattactacttttagaagatctattaaattatgaaatgaacaatttagtagataataaagcagattttggctacttaattcacttgtttgaaaacaatcatttacctccttcattctctgcactagaagaaatggggatccctatcgaaacattagagaagctcgttacagatagactaagtgaaaccagtattgacatattaataagatatttacgaatgcattacaattatttgccacaattaagttacatggataaatcatttatcaaacaagcagttttgtaa

SEQ ID NO: 59440 - DNA, 972 bp, Burkholderia vietnamiensis
atggcaacgaccgctgaagacgaaaatccgaggatacatttcgataggattctcggacgtcactacgtggatgcgcgtattcgtaagctgaccgtgcacgacgcgggcctaccacccgttgtcgcccacttcctatatcctgcgttcaagtcgggccagccaactgtggcggagctggtcatgatgttgatgggcgaaataacaggattctgcgcgacaaaagcgcagcgtcgactggcgaaaatgagggatgctgcggacccatacgattccagagaaactgaggagttggcccgatgggcgaaagcaagattcatcaaagcgagagagtcagatagtcgctccggagaaggtggtgaactccttctctacgtacttgtggagcatttcctaaaagcacccttagtactttcgaagatgcgactgaagacaagtcccgatatgcccgttcacggagctgacggcgtccacgccatgtgggacatcgacggaaatcgcttggcgatggtatttggtgaatcaaaactgcatcaaacattcgctagcggaatggcggaggcagcagaatcgattggtttgctcgccagaaatgtggacggccggatggagaacgagttgcagctaacgacaggcaacattgaccttgacggattcccttctgaaatccaggaacaccttctgaggttcctccatccctatgcaaccgaggaatctaactcccgggtggacaagttcgcgctgctagttggcttcgattttcacgcctacggaaaaataaccgggaagccggcagccgaggccgaagaagaattcgtgaaactttaccgcaagaatctcaaaacgagccttacaaccgctcaatcgcatctaaatgcgcacgatgtctcccttgacactgtagatttatttttcttccctttgccggatgtgcaagcgttccgtgacgctttcgataaggcattatatggctga

SEQ ID NO: 59441 - DNA, 645 bp, Burkholderia vietnamiensis
atgttcgacgttctcctcgaaggagtgaagcaacggcggctcaaggactacgtgccgctacatcctctgcaaccgcacgcggatgctaaggagcggcttgagtttgtgatgtcgctcatccacgagcacttagagggtaagccgagccaagcagggagatatttttcttggttttcgcttagttggatgcggggtaactcgctgaaagacatgattgacttccagctgcgcgacgcgcgggaaaaggcatcggccagcggcggggagccaccggtggcaggaaaaattattataaaggtcctttctgaagttgaagaaaagttgaggtttcactacgtcaggtatttcggctgctatatcgatttgttgaagtacgccgtgaagaccatctcgccggaccgtgagtttgatgttccacctatccccctatttctcgagctcggggcctgcagtggaaccatgattggttgcatggagcttggtctttcccgaattgcggcgcgcgaagtcatggattttctgggtgcccaggatttggatgccgtggccgtgaaaaaacggcttcggaattcgaagcttgcgacctcagggctatcgcatatagtcctcgcggagttgaaccgaatcgggttgagcgcagtttag

SEQ ID NO: 59442 - DNA, 912 bp, Sanguibacter keddieii DSM 10542
atgatggattctctagtgcgaggagacacgtcggactttctacacctagtcggtgcattcggagagccaaagaagcttgacgggactcgatctacggtacggacccacttcgtgaccaccgactccacaggtacgcctgcagttgatcttttgagctcagcaatggcatacgccgtggtcgatttctgtgtacccagagagcggattgaggcggccaacgcccactaccagcggactcgaagtacgatgcacgttgccagccttcagcaggaagcgcaagaactctttgtggatgcggatgaatctggagaaggtggggaactcctgctcttccttctgagcgagcaactccttggcctcccacaaatcatcgccaaaatgcctttgaagacaagttcgcagatgcacgtccacggtgcggacggcgttcatgcccggatcgatgacgaaggaatccttaacgtcttttggggcgagtcgaagctctacaaatcaagtacagacgctttcagggactgttttaatagcattaagccttttcttgctccggacggccacgacgctagacgtcgagatctccaactcgtgcgcgacaacatcaatgtcgatcacccagagctagccacgcacttggtccgctatttcaccacctccgatccgcaggcgctccaagtgaagtggggaggtgtctgccttattggtttcgacttagaggcctacccgaatacatcgtgccttgtggaggcggagcgagcggagctatcggcaaagatcaaccgatgggagaatgccgtgaagcgcagagtctcagagcattctctggtcgacatcgaaattgacgtgttctgcataccttttccaagcgttgcagaactacgaaaagctgttcgtaggaagttgggaggccgatga

SEQ ID NO: 59443 - DNA, 2559 bp, Sanguibacter keddieii DSM 10542
atgaacgaggacgacgttctagaaaacagtacttttcgtgatagttttcacgaaatgaggcggcaagagttgcgtcgagaattccccatggttgtgaacgatggggaggctgatccggctgtcttggactggaactttctgattttttgcgcgagcgcaatctcgtcctttcggaccgaacgctccgaggcttccgttcttcgagtagcaacgtcctgcctcacgaacgaaaacaccgatgaatcccaaaagcaagcagcggtgctactgctaaacagaattggaaattctcggacggtccaaatggcggcagcaaaaggcctggtccaaccgcaagtgccagcttcactgcctccgcttctacgattggaatcgatacgcggatccatggcccgcgttattccaatagcaagcggcgagcgccttgaagtcaacaggttccagcgagaagtctggcagattgcgcagtcgaatcagtggatcagtgtttctgctccgacatctgcgggcaagtcgagaattgtgcgtgaatggtttctcgaactgcttcgagaaacgccccgcttgacggcggtctacctttgcccgacccgggctctagtcgaggaagtctcggctgattaccggagtagcgtaccgataaacacaggtgtcttcacaatgccttgggatcctaagatctcggaaggcgacaaacgagtattagtgctaacacaagagcgcctgcaccttgtgcaagagaaattctctgacttcaaggtcgatctgctgttcgtcgacgaggctcaagggctgggcgcagtggagcgcggaattctgctgcagcaggtgatcgaccgagcagtggccgcgaatgcaagaatgcaggtaatttttgcaagtccactaagttctaacccagacattcatcttacacacaggcccaaagaagtttcatcagagcatttcgtatctgaggcagtaactgtcaaccagaacttgctgcgagtcgaggcagtcaagggaaagccgctacttcgtgccgtcaggtacgcgcacgaagggactattagaaaccttggccatattgaacttcctgaacgcccgaattctttgccggagcgaatagccaatgttgcttttgctctaggtgggaaatcgggcggcaatatagtctatgtaaatggggcaagtgaagcagaaaaagtctcagcagtgctcgcgcaacttaacagaaaatcgattcagaatgatgaggttcgcaatctgcagaaactcctggagactgtcgtgcatccggactacgctttaatcgacgctttgaacgccgggatcgcattccactacggcaacatgcctttagtggttcgatcggagatcgagaggctttttagcagtggccatattggctacttggtatgtacttcaacgctgctcgagggggtgaatcttccgtgtcgtaacattttcatgcggaatccgaagaagggcgtaggtaacccgctcactgaaagcgacttctggaatctggctggacgggctggtcgttgggggaaagaatttcagggcaatgttgtttgcatcgatactgacgtctctggtacttgggagaaccttccacttgttcgcaaaagatctaaactgattctggcgaccacgcaaggcctcgcacggactcccgatcttcttgagtatatcgatcggtccgagcgatcggcgatatctggtcctgaagaatatcttttttcatacctttgttcccgctatgctgcgggccgcgatctgactgacatgctttctaaagtccccgaggaatctctgagggacgagcttcgtaatcgtatcggtgcggtggtcgacaatgctcccttcccgaaggagatcatctctcgccattcgggtgtatctccattcgcaatggagagattgctggcgtcgttctcggcagagagcgatcttgagaatctctggctgccaggtccaaccgagggggattcgaagctgaaatatcagcgcgcgctctgtcgaattggtgaacacgtcactacggcctttggttccgtggcgatgtctcccgattcagacaagagaaaatggcaactggcgaacctaattgtgaattggatgctcggggtgccgttgccaatgctcattgatcagcggatctaccaaaggaaaaatatccccgcggcaatcaggggtgtactttctgacgttgaaaacatcgtcagattccacgcaccaaaacacttggctctgtatgaggacctggttcgtgttgaggcgttaaggcgggggcagccggttccgagtagtcggcccgacgtggtgatgttgctcgagctcggcgtgtcgaagcccaacgaggtggctctaaccactttggggctttcgcgaacgtcgaccgtagcgctcgccgcctatgttcctgtcgaaccgtggatgggtgatgaagccctgaactggctttccaactttgacatcaaacggcttcctctgccgaagatagtggagaaagaagtgcttgctcttcgctccggcctggcccgactcgaaccacctagcctaagcgagcagtga

SEQ ID NO: 59444 - DNA, 936 bp, Enterobacter asburiae
atgggaccattcaaagcgcatgaagtaatcgaagaaagaatgagagatcaagctttatgtagttacttggtaggttttgatattaatgatacaggtgtatcctactataggatggatcctttgattatgaagattttatcggccctgcatgagttcgcttatgggttccacgaaggggagcagactgataacacacaaacattatctaaaataatagatgcggctcgttcaatttataaaattgatgaatatcagaaggttaaagatatttatctgaattcaggtgaattgactgacgatgttgctaataaataccttaagcgaggtgaatttggtgaacttattctgcatctgattttgagagattttcataatacgatcccacttctttccaaaatttatttcaaagattctatcgggcataccgttcacgggtttgatgccgtgcatatcgatcctgtcaataaaaccctctggctaggtgaatctaagttatatattgatcccaagaaaggtattggtgatttaattaatgatgttgaagagcattttaaagctgattatttaaattctgaatttaatttgatagcaaaaaaaatacgccatgtacaaaactctccagaattagaatattggttggacattttatcgacaggtggaaaactatcagataagcttacgaaaattaacatcccgctgctatgtacctatagctgtgattcatttttaaaatatgataacgaaaaatcaccggatttttctgcttattataaaaataaaatacttatgctaaaaaaatattttgatgaaaattacaaacatcctttaaaaaatcatttaaatattattcttatgctttttccagtgagtaataaaatagaattagtaaagaaacttcatcaaaaactatcattgattcagcagattggtggttga

SEQ ID NO: 59445 - DNA, 2181 bp, Enterobacter asburiae
atgaatgagcatattgggagtggaagtgacgccctattcgaatatacttttaatgagtatcaaacatgtgctaggttactaatatcagatgagaatcaggggagagatgaattaataaaaattttagaaaagaagaatgattattcgcgaatattagatggtgttttagctgatctaatcgagtctgcaggtttttatccttatataataaaaaatgatttaacactatcctcatcatcgcaaaaaataaggtttgaaaataacagatcaataaatatcaaagataaagtatttcatgatgaacaaaaatatttactggatctaatcaattcagaaaaaaacgttattgcaagtgctcctacaagttttgggaagagtctcttaatagaggaaatagtagcatccaagaaatacaaaaacatcattattattcagccaactctagctttactcgatgagacgaggaaaaaaatttcaaaatattccaatgactataaattaattgtaagaacaagtcaggcgttttgttcagaaggaaaggggaatatttttctgctgacatctgagcgagttaatgagtataaagaccttcctaaagtagattatctaattattgacgagttttataaacttagctctaagagggatgatgaaaggcatcagtctttaaataatgcatttataaaaatttttaaaaacagcacgccaaaattttactttttggggccaaatattgatggcataactccggggtttgctgataaatataatgctgtcttttaccaaagccaatatagtttagttaggtgtaatgattttaatatatataaggattatgccgatttattcggttctcgtggaaataaggcaaggtttaaagaaagtattttatttaaattgatttctggacgttgtgatgaacaaacaattgtttattgtgcctctccgagtaaagcaagaagactctcaagagagtttgctaattttattcaaaaaaataaatctggagagctaactcataaccctccgctgatagaatggatcgagaaaaatatctctaagaggtggtcgttaattgactcaataaaacatggtgtggcatttcatgatggagcactccctagacatattacttcatctataatagattattttaacgaaggcttgataaaggtgcttttttgtacttcaacaatcattgagggagtaaatactagtgctaaaaatatagtctattttgatgaaaaaaaagggaaggacttgagtattgactactttgattattcaaatatcaaaggtagagctggaagattgatggagcactattcaggaaatatatttaattttaatcctcctccagaaaaagaggtgatatacattgatataccatttttcgaacaaaacccgattaatgaggaaattttaatcaaccttgatgatgctgatataaaaaataaaaattcaatcgaatataatttcatatcatcattacccttcgatgaaagagttttatttaaaaataattctataaacatccgtggacaaaaaaaacttcttgattatttaaagtccaacatacgtgataattatgtactggttgcatggtcctctacaccaaaatatgaacagttaaaattttgtgtacatttgtgttgggagtatttactaaaagataatgagaaaagtaatcaaatgtccgccgaaagattaactaaagttacttttgattatggcttttcccaaaatatactagagttagtgaaaaatacatataactataatttaagcaagtcaggaaagatgaatgatgaaaaaacaataaaaataatagatgaatcgataaaagattctttttatatattgcgtcattggtttcaatataaacttccaaagttgttatctgtattaaatgaattgcaaacgtatgtctgtaaactttttggtttagtacccggaaattatctgtattattcatccataatagaaaatgattttataccagaacatttaaatattcttatagaatatggggttcctaagtcggcaatacaaaaaattgcgaaatttatacccgatcacctagttgatgatgaggttgttcggttgatattaaataaaaaattgtatgattataatgaattaatagattatgaaaaaaatatcattaagaaaatgttttaa

SEQ ID NO: 59446 - DNA, 936 bp, Enterobacter asburiae; identical to SEQ ID NO: 59444

SEQ ID NO: 59447 - DNA, 2181 bp, Enterobacter asburiae; identical to SEQ ID NO: 59445

SEQ ID NO: 59448 - DNA, 919 bp, Enterobacter asburiae
tttaatcagcgagtcagcttgggaagaaatgacctgcttattcgcaccttccctagataaagttgattatatacttcaagaatataatccatgttttgaagatgataattacaagaatctcattgggaagttgttttatcaagattacgaattatttcgatatcggtttggatatattgttgaaggggtttataattggttgccagaagtattactttcacctgaggagcttagtaatatcaatggcacaaacttccaagagaaaattgatctattaaaaacaagaatggccttaaaggaaaaggaagtgccaagtttgcttccaagagttacgcttcactctatcattaggaaaaataatttaagtcaaccaatctattcagcaaatttatacgtagatagcaataaggaccgtgttactatatatgataacgtgcacattgtaattaataatgatgaccccgatgaactatgggttggttttagtgaaatattagatggcgataatttttcaacaacgatatcaaaattaaaatgtgattttatagataatttcctaaataattttcagaatcataaaaaagttatattggatgttaaaagagataattttctgttcaagcatgatgttgatccatacttaaaaggaacatcctctatagataatttgtttaatatgattcattttgttatttttatcggttataaaactaacagccagcccttagagtatgatgaaagtgaagatgaagcatacttaccttatttactagctgaagtaagaaagcattttgaaatgttagtgtctgagatagtaactgaaaaaatatacaaaaagataaatctacatttttacttatatccaatcccatgtgttgaaactttagttaaagagtttgaaaagagaattaaccaatga

SEQ ID NO: 59449 - DNA, 2130 bp, Enterobacter asburiae
atgaatgatcaaagtgaacgtttgtttttcgaatcagatttcaatccttttgaatttcttaagatagctaatgaaaaaatggataacaaactcaccgaagtcgatggtagggaaatggtgattcgagccttgaatgatatggatatgtttggtaagtatagggatatattaaagaggcttgtcaggaagtctgggctcttaccatatcttcgaagtgagtttcatgatctcaactatgaagaaagaatggccatcgatttgtttacgccagtaaaggatagtgatttcacacttcattcgatgcaattgaaaatatataatatattaattgaagggacaaatgttgtacttagcgctccgactagcatggggaaaagtgctgtagttgataccttaatcgaaagcggtaaatatgatgttatagtgataattgtcccaacaattgcactaattgatgaaacaaggaaaagacttactacaaaatttagatctgattatgatattatccatcacagtatacaaacggtaaaaaaaaacaaaaacatatttgtattaacgcaagaacgatttaatgaaagaaatgacattgaagttgttgatttattcgttatggatgaattttataagttgtcatttaaaaaagacttagaggatgaaagagttatatcattgaatattgccttaagtaagttactttcaatatccaagcagttttatttgatcggcccattcatcgaagatattagagggctatcagatgtggcccctgatttttattatgtaaatacgaatttcaacacagtagctgtaaatatatatgagttcaatttagcagctaatgatgtcaatgctaaaggagataaaacgatagagatattaaaaaaatatgatggacaaactatcatatattgtcgctctcctaactcggcatccgaaatcgttaaaagattaatttctgaagaagttacgggtacattctccagtgaatatgtatcttgggtaaaggatagctttacccctgaatgggattacgcccaagcaattgagcatgggattggtattcatcatggcaatctaccgagggctttgcagcaaactacagtagatcttttcaataatgcacttatcaaaatactaatatgtacatcaacaattatagaaggtgtgaatacatctgcagaaaatataattatttttgataatagaaatggtgttggatcaattgacagattcacacatagtaatattaaagggcgcgcaggtagaatgggcaaacatttcgtaggaaatgtattttgcctagaagctccacctttatcagattactcatcatctattgttgagattcctctgggaatgcaagaaaactctacgcccataaatttattggcgggggttcaagaagtgcacttaaaggatgaatcatataaaaggcttgatgattattataatagctgcaaggctcctattgatttactaaaagctcatcccgaatatagttttgataaaatccagtatttatatgaatctttggatgagtgtcaatacgatgtattaaaagaactgagctttaaacatttaccgacttcaaaagcaatgtggttgctaagttctctttttttgtacatggagcagggggctgttagaaatgctggttttaaaattgatgaagaagttatatcagctaaatttttctcatatgtaaatgctaatacttttcaggaatatctaaagagtgaaataaaatggataaaagaaaatagagatgatatatctaaagcactaaattccgagttgaagtttattaaaaatatttacgggtactctttaccgaaatttttaaatcttgcacaggacattatcaatacaataaattacgataataaatatgactttagtgcagattatggtttcttagcatcccaaatagaaaactatcatctaaatccgagctttgcagtactcgaagagatgggcattccggttccattactagaaagactaagtttcgatattaaggaatcattggagttggaagatttgatcgaaaaggtaaaggttttttatagcgagggaacatatttttctgagctggaatcgtactttgtaagaagagctttaattgattga

SEQ ID NO: 59450 - DNA, 919 bp, Enterobacter asburiae; identical to SEQ ID NO: 59448

SEQ ID NO: 59451 - DNA, 2130 bp, Enterobacter asburiae; identical to SEQ ID NO: 59449

SEQ ID NO: 59452 - DNA, 1641 bp, Enterobacter asburiae
atgagttcattggatactatggatcaaagtgatagtggtggagttggggctaagaaaggatttttctatcaagacctcgcagcagcattctatttaacacaaatgttaattgataaaacacttaaatatgttaggtgtgaagtcaccgatgacattgatttggtttacgaagagcatatagaatatattcaggttaaaacaactgatagtaactcgaaatggactgttaccgagttatgtaaaacgaagaacgatgctaaaaatgactcaataattcataaatcactatcctgcgacaacaatcctagctatatggcgaaatttaaaatactctcaccaagggaagtgaattcatatcttcaatacttaagaatccctttaaacaaaagagataataaagatggtcgcgttgggttgttgaaatcattgtcacctaaggttaaaagtaaaagcctgctaggaaatgacattgcttattggatagataatacttggtgggaagtgattccgtccaaaaatgagcttgagttgatgattctcaggaatattcgagtcgcggcacaagagaaggatatttttctaaaggataggcatgagagggcaattttacagtcaatagtatatgtgttgacagataaaagtgctctatcaagaaagataaatgttagtgaagataaatcctacttaagaaaggacttcatattatggttttgggatgaggtcgagtatgcatcaaaagatgatacatattccctaaaagtataccctcaaaaactagataaagttgattatatacttcaagaatataatccatgttttgaagatgataattacaagaatctcattgggaagttgttttatcaagattacgaattatttcgatatcggtttggatatattgttgaaggggtttataattggttgccagaagtattactttcacctgaggagcttagtaatatcaatggcacaaacttccaagagaaaattgatctattaaaaacaagaatggccttaaaggaaaaggaagtgccaagtttgcttccaagagttacgcttcactctatcattaggaaaaataatttaagtcaaccaatctattcagcaaatttatacgtagatagcaataaggaccgtgttactatatatgataacgtgcacattgtaattaataatgatgaccccgatgaactatgggttggttttagtgaaatattagatggcgataatttttcaacaacgatatcaaaattaaaatgtgattttatagataatttcctaaataattttcagaatcataaaaaagttatattggatgttaaaagagataattttctgttcaagcatgatgttgatccatacttaaaaggaacatcctctatagataatttgtttaatatgattcattttgttatttttatcggttataaaactaacagccagcccttagagtatgatgaaagtgaagatgaagcatacttaccttatttactagctgaagtaagaaagcattttgaaatgttagtgtctgagatagtaactgaaaaaatatacaaaaagataaatctacatttttacttatatccaatcccatgtgttgaaactttagttaaagagtttgaaaagagaattaaccaatga

SEQ ID NO: 59453 - DNA, 2130 bp, Enterobacter asburiae; identical to SEQ ID NO: 59449

SEQ ID NO: 59454 - DNA, 1641 bp, Enterobacter asburiae
atgagttcattggatactatggatcaaagtgatagtggtggagttggggctaagaaaggatttttctatcaagacctctcagcagcattctatttaacacaaatgttaattgataaaacacttaaatatgttaggtgtgaagtcaccgatgacattgatttggtttacgaagagcatatagaatatattcaggttaaaacaactgatagtaactcgaaatggactgttaccgagttatgtaaaacgaagaacgatgctaaaaatgactcaataattcataaatcactatcctgcgacaacaatcctagctatatggcgaaatttaaaatactctcaccaagggaagtgaattcatatcttcaatacttaagaatccctttaaacaaaagagataataaagatggtcgcgttgggttgttgaaatcattgtcacctaaggttaaaagtaaaagcctgctaggaaatgacattgcttattggatagataatacttggtgggaagtgattccgtccaaaaatgagcttgagttgatgattctcaggaatattcgagtcgcggcacaagagaaggatatttttctaaaggataggcatgagagggcaattttacagtcaatagtatatgtgttgacagataaaagtgctctatcaagaaagataaatgttagtgaagataaatcctacttaagaaaggacttcatattatggttttgggatgaggtcgagtatgcatcaaaagatgatacatattccctaaaagtataccctcaaaaactagataaagttgattatatacttcaagaatataatccatgttttgaagatgataattacaagaatctcattgggaagttgttttatcaagattacgaattatttcgatatcggtttggatatattgttgaaggggtttataattggttgccagaagtattactttcacctgaggagcttagtaatatcaatggcacaaacttccaagagaaaattgatctattaaaaacaagaatggccttaaaggaaaaggaagtgccaagtttgcttccaagagttacgcttcactctatcattaggaaaaataatttaagtcaaccaatctattcagcaaatttatacgtagatagcaataaggaccgtgttactatatatgataacgtgcacattgtaattaataatgatgaccccgatgaactatgggttggttttagtgaaatattagatggcgataatttttcaacaacgatatcaaaattaaaatgtgattttatagataatttcctaaataattttcagaatcataaaaaagttatattggatgttaaaagagataattttctgttcaagcatgatgttgatccatacttaaaaggaacatcctctatagataatttgtttaatatgattcattttgttatttttatcggttataaaactaacagccagcccttagagtatgatgaaagtgaagatgaagcatacttaccttatttactagctgaagtaagaaagcattttgaaatgttagtgtctgagatagtaactgaaaaaatatacaaaaagataaatctacatttttacttatatccaatcccatgtgttgaaactttagttaaagagtttgaaaagagaattaaccaatga

SEQ ID NO: 59455 - DNA, 2130 bp, Enterobacter asburiae
atgaatgatcaaagtgaacgtttgtttttcgaatcagatttcaatccttttgaatttcttaagatagctaatgaaaaaatggataacaaactcaccgaagtcgatggtagggaaatggtgattcgagccttgaatgatatggatatgtttggtaagtatagggatatattaaagaggcttgtcaggaagtctgggctcttaccatatcttcgaagtgagtttcatgatctcaactatgaagaaagaatggccatcgatttgtttacgccagtaaaggatagtgatttcacacttcattcgatgcaattgaaaatatataatatattaattgaagggacaaatgttgtacttagcgctccgactagcatggggaaaagtgctgtagttgataccttaatcgaaagcggtaaatatgatgttatagtgataattgtcccaacaattgcactaattgatgaaacaaggaaaagacttactacaaaatttagatctgattatgatattatccatcacagtatacaaacggtaaaaaaaaacaaaaacatatttgtattaacgcaagaacgatttaatgaaagaaatgacattgaagttgttgatttattcgttatggatgaattttataagttgtcatttaaaaaagacttagaggatgaaagagttatatcattgaatattgccttaagtaagttactttcaatatccaagcagttttatttgatcggcccattcatcgaagatattagatggctatcagatgtggcccctgatttttattatgtaaatacgaatttcaacacagtagctgtaaatatatatgagttcaatttagcagctaatgatgtcaatgctaaaggagataaaacgatagagatattaaaaaaatatgatggacaaactatcatatattgtcgctctcctaactcggcatccgaaatcgttaaaagattaatttctgaagaagttacgggtacattctccagtgaatatgtatcttgggtaaaggatagctttacccctgaatgggattacgcccaagcaattgagcatgggattggtattcatcatggcaatctaccgagggctttgcagcaaactacagtagatcttttcaataatgcacttatcaaaatactaatatgtacatcaacaattatagaaggtgtgaatacatctgcagaaaatataattatttttgataatagaaatggtgttggatcaattgacagattcacacatagtaatattaaagggcgcgcaggtagaatgggcaaacatttcgtaggaaatgtattttgcctagaagctccacctttatcagattactcatcatctattgttgagattcctctgggaatgcaagaaaactctacgcccataaatttattggcgggggttcaagaagtgcacttaaaggatgaatcatataaaaggcttgatgattattataatagctgcaaggctcctattgatttactaaaagctcatcccgaatatagttttgataaaatccagtatttatatgaatctttggatgagtgtcaatacgatgtattaaaagaactgagctttaaacatttaccgacttcaaaagcaatgtggttgctaagttctctttttttgtacatggagcagggggctgttagaaatgctggttttaaaattgatgaagaagttatatcagctaaatttttctcatatgtaaatgctaatacttttcaggaatatctaaagagtgaaataaaatggataaaagaaaatagagatgatatatctaaagcactaaattccgagttgaagtttattaaaaatatttacgggtactctttaccgaaatttttaaatcttgcacaggacattatcaatacaataaattacgataataaatatgactttagtgcagattatggtttcttagcatcccaaatagaaaactatcatctaaatccgagctttgcagtactcgaagagatgggcattccggttccattactagaaagactaagtttcgatattaaggaatcattggagttggaagatttgatcgaaaaggtaaaggttttttatagcgagggaacatatttttctgagctggaatcgtactttgtaagaagagctttaattgattga

SEQ ID NO: 59456 - DNA, 1617 bp, Pluralibacter gergoviae
atggagtcgaacgattcaggcggagtagccgccaagcacggtttcttatttcaggactgcgtagccgcttaccatgtcacccgaatgcttcgtgacaagactatccgcagtgtgcgctgcgaggtcacagacgatatcgacattgtatctgatggatacatcgactgcgttcaggtaaaaagcaccggcaaaacacgttggaacatttcggacatcgttcagaattcaaaaggtgctgataaaaagacgatcccctgcagttcaattttgcacaaatcaatgcagtgtgagtctgacccggcccttggacggaggtactccatcgtaacagaggaaaaggtcaacaaaacccttgagtacttgacgatcagcccaaacgctcgactagataagccaggcagacaggaactcatcgacgatctcaacaaacgtacaaacaattatttaacagactcaggtataagcgtttcagattggatcgatgcggctatatgggaagtgtttccatcccttcgagaaatagagcttttggggatcaagaatatacggctggcctcccaagatttgcatggagttattctcagctctgaaattatcgctgaagacatttggtgccgcatccttgataccgtgacgcgcaagggggagcattctcgacgcattcacagtgttgatgacaagtcctacttacgaccagacctacttgagtggttcaagcagcgtgtcgaagatgaccaatctcggtcaggccgcaaaatctacgtcaaacgggacttaccccacatccttacgccatttagagcgcctatggcttcggtctgcgctaagcgtaaaggcctggttctacatcagcagtactcacttaagaaataccgctacaagcacatcgcggaaaacgtctgccaatggttggatgaggtttttctccgaccaaaagaaatgtctgatattcataaactgacattcattgaaaagcgagaacggctaaaggattctgtcttcaaatcgctccatgacgtcagcgaatttttgggtcgagtactgttgcacgcaacgatccggcagtaccacgaaagccagcctattccttgcatgctatacgtggaaaaagcaggggccgaaaaaattcttgaaaacgtgcatatcgttcgccgcgatccagaaggtgatcagctttggattggcttcagcgagttggttactgatattgacattgccgtcagattgccggagatacgggatcggttgtacgaggacatttcggattgcatcgataccgcgcgcaaaaagatcctcgacattaaagacgataactacctgcttcgccacgacattgacgaaattcttgatggcagccaacctttcgatgctcacctcgatcgtttcacgtttgttctgttcgtgggctacgactctaacctactaaccgagcctgaaacgccggggttcgaggatgacctggagaaggaaacgacgatgctgttcgaaaaattcgcggctgacctcatcgaggattcgccgttcgcgaatctttgcatccacgtgttcatttatccagctccgagtcttgagcggttaaccgaattggttgatgagaaggtgagagaggtcgtatga

SEQ ID NO: 59457 - DNA, 2190 bp, Pluralibacter gergoviae
atgacagagctctatgaacaggcgaaaaatagtctgcagggtgaggacttctcatctttcaattacctgtttgcggttaacaagctgttgtccaatcctgtttcgtatgacttgggacgggatttgatcgtacgtgctctcgattcgcgcgagcgattttccgagcacaccacaattttgaaaaatatggtgagaaaatcaggtttgttcccgtacctcaaaaaagagttcactggcctgacaccggacgacctgagggtacttgagctataccggacgccattctcggatggttacgttttccactcaatgcagttccacatattcgatctgctcaagtccggtcaaaacgtggtactgagcgcgcctacaagcatgggcaaaagcgcaatcgtcgattcgttgctcggcatgggaacgttgaagcggctcgttctggttgttccgaccgtcgctcttgccgacgaaacccgtcgccgactgcaagagcgattcggtgaccgatatcagattatccaccacagttcccaagtgtgccattccgatcaggccgtctacgtgttaacgcaggagcgagtgaacgagcgtgaggacatcatcgacattgacctcttcgtcattgacgagttttacaagttggcgttccggcaactcaaaagcgggaaagttgatcatcaagacgagcgagttatcgagcttaacattgcgttgagcaaactgctcaaggtctccaggcagttttatctgactggaccattcgttaacagcattcgcggtctcgaaagacttgggtatccgcatacttttgtttccaccgacttcaacacggtggcactagatgttcagacgttcggcatcaaagcgagtgacgacgaagccaagctcaaagcgctggcgaaaatcgcgcacgcgtgcgtcggtgcaacaatcatctattgtaagtcaccaactgttgccggtcgagtggctcgcgagctgatcaggctcgggcatggcactctgactgagagtcctcatattgactgggtcagccaagagttcgatgccgactgggattacacggtggcactcagaaacggtatcggcttgcattttggcgcgctgccgagagcgctgcagcaatacaccgctgaccaattcaatgcaggaaaactgcgcttcttactttgtacctcaacgatcattgaaggcgtcaacactatcgccaaaaacgtcgtgatctacgataaccgcgatggacctcgcagcattgacaaattcacccatgggaacatcaaagggcgcgccgggcgcatgggcgttcacttcgtcggcaaaatcttttgcctagaggaaatcccggaagacagcctcaatcaagaggtggaaattccgcttggtattcaagatattgataccccaattaacctcttggccagcgttcaaccagaccacttgtccgagttttcacaggatcgctttgatgaagtcttcataaacgagcgtgtttctatcgaacttgtgaaaaagcactcatacttccgtgtcgagcaactcgaagtgctacaaagcatgttcgagatgatggacgacaccgaatttgcctcgctggtgtttcactggactcctgcaacaaacttcctcaagacctttgcaaagataattgccagactggttccctctacgttcagtcgcaatggagtccctgttaatcctactgatgtcatggtcgccaaacttgcctgttattcaaacgctgcaagctattcggaatatctgaaaaaccagattgatcgcgcacggcagtgggtgtctgaagaggaaaaacgctctctttccatcgccattaacaatgatttgaagctcatcaccaatactttcggttacaccctacctaaggtgctcagcttaatggaggatgtagtcaaataccatgcattgaagcgaggtatccgcagcaaagtcgattacacgcatgtcaaaatgacgttcgagaattttcatcttccgccaggtgtaagtgccttggaggagattggcattcccattcagacgttacaccggctggtagatttgctggaattttccgaccaagctgatgtggatgggttgtgccagtatcttcgggatactcaggacgtttggagtcgaacgattgggtttgtggatcagacgttcatcaggcgcgcgctcggtattgaacaacattga

SEQ ID NO: 59458 - DNA, 837 bp, Shewanella baltica OS155
atggaagacaacctcgatactatcggtaaagcattgactgagatggccagaggagagttgacggaactttcttcgctgcttgcttcagcatgtacacatgacattaatgaaaacaaaattaactgttattacttgaaagtcgatgccaatggcaggcctcgattaaacgagctcataaagtacatgagcatgaaaatcaccgactacacaattcctcgaaatagaataaataaagccaaacaaaaactcatcgaatctggatgtacagatgaaataacaaagatagctcttgaagcaaggaagcttttcaccaaactcgaactgacaggggaaggcggtgaactgcttttgttcgcattaactgaaagtatcctcaagtttccccaagtactatgcaaaatgagcttaaagactgatgagcagatgcactttcatggcgcagatggagtctttctaggggtagatgacaatgacatgttatgtgtttactggggggagtcaaagttacatgcaactcattcctcggcaatatctgagtgcatcacaagtattgctaatattctaaaaatggaaccagatgttgatagtgacattcgcctaatagactatatagacctcgacaacagctcactagaagaagcgataaaaaactactttgattacacttcaccaagttatgatcaactacgtccatgcgctgtttttttagtatcatttgatcattctgcgtatgagaaatcaaataccaagctcacaaacgaaaatattagagaaaaaattgaaaatgatttccttaaaccccgaattcaactccgaagtgcgacactcgacaattaa

SEQ ID NO: 59459 - DNA, 804 bp, Shewanella baltica OS155
atggtgatactcttttactttggcgagataaagcgtaccacttttcagcagttggcttcttctacacctcgattagagtgtcgcagttattatctgaattctggtactctagttgaaggcgttaatctttcatgcaaaaacatatttgttagaggccctaaaaagggaaggcgggctgataaaccaatgacaagtgaagatttttggaacctagcaggtagagctggcagatgggggcaagagttccaaggaaatattttctgcttagatgtaaacaatgagaaactatggccaaatggtaaaccagagaaaagaacaccctatataattacaccatctgtcgataaacaaatggagaacactgataagatcataaaatatattaaagatggcactccaagaagtgaatcagtcggcaatatagattacgagtatttaatcacttatataattgaaggcattgcaacgaacaataaagcaatccttggtagcttaggttcatccgatgcatcgtcagagatagaactcattttagaaaattgtgaattaccacatgaaatatttcgtaaaaacgcgggtataagccctatagcaattgaagagctatatagctattttcagaacaaagctgaaaatgatgatttagaatcattgatcccacctcatccatctagtgaaaatgcggttgtagaactaacaaaagtgcttagccgaattaacaagtatctatccccaagcagttttggctttatgttctggtctaatcccatcggacacttaattttgagacagtatggtcaataa

SEQ ID NO: 59460 - DNA, 1665 bp, Pseudomonas sp. VLB120
atggaaattaccgactcaggaggcgtagcagcgaagtacggcttcctttatcaggactgcgtcgcggcctggctcgccactgagatgctcatggacagggacatgcgtgcagtacgtgtcgagaccgttgacgatgtagatgtcgtctgggacggtttcacagagttcatccaggtcaaagctgctgccgaaaagaagtggacaccgaccacgatcaccgaaaactctacaagcactgctgtcgcctcgaccaaaagcaagcccacaggcaaaccgcgaaaaaaacgtatacctgattcatcgatggtacataagtcgatgaagcaagcgaccactccagttgacaagtgcaagttccgaatcgtctccgcagagcgcccaaccggccttctggagtacctacgggtattaccagcctcacgagctggcaggccaggaaggcaggagttagtcgatgacctcaaccagcgaacctccaactttgttgcagcatctaaaaatgacgttggccactgggtagactccacctggtggcaggtatatgcgtcggaacgcgaaatcgaattactgggcattaaaaacatccgcaatgctgctctagaagtcgttggggtaacgctgagctctgacgccgccgccgaggcaatttggagagacatcgtttatacgctaaccaagaaaagcgccctctcgagaaaggtttactgcgaagacgacaagacctaccatcgaaacaatctcatcgactggttcaaatctgaaattttaatacacgaaaaatcctcatacactagaacaaagatatacgcaaacaaaaaactacaacctatcctcaaccacttccatacccacacgccaagctgcgggagcatcacacggtgcggaaaagtaatgcatcagaactacagcattcgcaactacagatatggctatatttcggaaagcgtcataaagtggattgatgaaatcctgctaatgcctgaggaaatcgcagacgtcaatggcatatctacttctgaccgataccgaacgctgttatctcggctaaaagcctctatggccgagcttggtgactttcttggcaaagtcttacttcactcctgcatccgaagccttcatacgagccagccaatacccgcctcgttgtacatcgagaagccgttcgaagtaaaagttctcgaaaacgttcacatcgtgcctcgagctgcagagggtgatgagctttggataggatttagtcatctctacactggcgcagacgtagttgaatgtcttcagagcctccgcaccatgctatacacagatattaccgacaacatagactcagctcgatccaagatccttgaaatcaaacaagactcttacttgctccagcacgatatcgatgagcttcttgagaccagtcaagccttcgacacacacctaaacagatatcgatttatagttttcctcggttataactccgccctattgaccgaccccaaaacaccagggtacgagccgaaccttttaacagaaaccaagaaactgttcgacgatttctcttcagacttgaataccagcggattcggagaggtgttgatcgagctccacctctaccctgtaccggacatagacaaactgctgtccgaagtaaaaaaagcactggagaaagcttgtgcttga

SEQ ID NO: 59461 - DNA, 2175 bp, Pseudomonas sp. VLB120
gtgcttgaacactacgaatccgcactgcaaagccttcaacaacagagcttctcggcttttgcctatttaaaaaccgctgatcagcttctgtcgaatcccaaataccgaagctcaggccgagaacttgttatccgggctctggactctcgaagccgattctcggctgtacatgctttactgcggcacttagtgcgaaaatcgggactctatccatatctgaaaacacaattccaagatctatcgcttgcggaagagtgtgtccttgaggcctatcagacgcctatctcgactgatatcgtctttcactccatgcagtataaaatctacgaactccttttagaaaagcgcaatgtgatcttgagcgcccccactagcatggggaaaagcgccatcgtggattccctaatagcgtcaggcaaatttaataaactcgttatagttctccctactgtcgccttggtagacgagactcgacgcagacttgaagaacgatttggccaaacatttcagattattcatcatggaacccagcgctcagggcaggaaaagatcctctacgtccttacacaggagcgtgtaaatgaccgagacgatctcgagaacattgatttatttgtacttgatgaattctacaagctagctttcaaacgcaagaaagacggcgagattgacgatgaagatgagcgagtacctgctctcaactcagccctaagcaagcttctacgttgctccgaacagttcttcatgacaggcccgtttatcaatggcgtcagcggactgcccaagaccaacctgaattacacattcatccccaccgactataacaccgtcgcagttgacatcgagttcttcaacatcaagcctgatagcattgatgagaaaaacgaggcattagccagaacacttaaacagattaatggccctaccattatttactgcaaatcaccagggcgcgcggtacaggttgctaaattcctattaaagtccggctatgtaaaatccgtagaagatgactatctagcgtggctggatcagcactaccaccctaaatgggagtacacccgagcatttcgaaatggaatcggtcttcactacggcggacttcccagggccatgcaacaatacacgattgacaaattcaaccgtggcgaattgccgtttctcatctgcacctcaaccattattgaaggtgtaaatactgtcgccaaaaacgttttcatatacgacaaccgggccggtaactttagcattgatcgtttcactcacgggaacatcaaaggtcgagcgggacggatgggcgagcatttcgtcggcaaagttttttgcatggaagatctacccaagcaaagcgactgttttgaggtagagatacctctaggcaagcaaaccgaagaattgccgttaaacttcctcgccggcattcagccagaacacttgactgacttttcccaatcaagatttgaggcgggaacatcagccagcaaggcaggtaaagattttctgaggaagcacgcatcattcaagttcgagaccattgaagcagcatttagtttcatagaaatttgcgatgaaagcgaatttcaaagctgtctattctcaggcgtcccaaagacaggatttgctaacctcctatctcgcttcgttgatcgcgtatgctctggctcgcttaaaaagctggggctcatcaataacattagtgttatcaatgctagagtctctgcctacctaatggcgccaagccacgaaaagtaccttacacaacaaatatctcgcataccatccggtaccgaaagcgaggcgttgtccgagcaaataaaccatgccctgaacttcgctagtcgaatatttggccattcgatacctaaagcactggccttgctcgaagatatcgtcaatctaaagctcgaagagaggggcgcagacttccgggcatcttacgggcatctgcgcagtattttcgaaaactatcacttgcacccggcatgggccgggcttgaagaaatgggaatccccgttcaactgcttcataaacttggaacactttttccaattgcagaagaggcaagcgttgacgacgcttctcgaaccctgcatgaaaacctacatcgacttcaacgtcttacgcctttagagcgtcatttcattgatcgagctctaggtcgagtaaaacggtag

SEQ ID NO: 59462 - DNA, 993 bp, Mesorhizobium plurifarium
ttgggccagcagagcatagatccacccgaaagccaccacttggagacggtcctagcagctcttagccgtgactattcgaagctaggaccgagaataagggagctaaagcacgaggtggcgtgcgagtgcgctggcgtcaccctccgtttgcatttccccgccttccgacaaggcaagaccactgtccatgaactggtggagttggcttggcttcatctgacgccatttacgctaacgcggaaggaaatcgacgcagtaaaggcgcttcaatctaccttgccatttgaagactttctgatcaaaaccacccagctcaatgacgcggctgccaagcttttcatcaaggcgcacaaagcgacaaatcgaaatggcgaggccggcgagctgctcctctatctgctgaccgagtggatcttaggagcaccgcaattcatcgcgaagatgaccttaaagaccgatccgcagatgcctgtacacggtgcggatggcgtccatgttcgctattgtccggagaccgcgcggctcttcctctattggggcgagtcgaaaatgtatggcgatgtcggcgcggctatcatcgccgccgcagcatcgatcgcaaaatccttggagcccgacgagcaaggccacgaactccagcttgttcagcgaaacatcgatttcacagggttaggaacagaagcaaaggcagcgctgctgcgatacttggacccctatgaggaagaatacaacgaacgcaaggatgtcatcacctgcctgatcggctttgattttgatggcttccagaaggcaagcgctgccggtgagcagggtgccgaagatgccttccgagtactggcgaaagaggagctcgcagcagtggcaccgaagatctcaacggcattcgagacggctggactgggctcccaggacgtggagctattcttctttccactcccggccgttcaggaatttcgcgatctctttcaggctcggattggttggctgccatga

SEQ ID NO: 59463 - DNA, 2535 bp, Mesorhizobium plurifarium
atgatgcaagagttggccgacaaggtttggaataacagcggctttcacgacgcagcgcatcgcattgagctcgcgtggctaaccaaagagatcggcggtatcgacgatggctacgccgacatcactgacgccacacgattgatgcgctctgcagccatcttggcttgctcagaaacggcagatcatcggcgcgctgcgttccgagtagcgacttgtgcatacgacctgttcggaaccggccaagtccctctggaccaagccctgcgcatggtgctcacgcgcctcggcaacttcccttccatcggcacccgcgcggacgtggcgtccgcgagggtgaggctaccgcttgtacttgcggctgaggaaatcgcgtcagctaatgcccatgaggtgacgatcaacgggcaaacggtgttgctgactgacttccagcaaaggctgtggctgaatctcctgcaaaggcgtcgcatcgcgctggcggcgcctacatccgccggaaaatccttcgtcttgcaggggtatctgtcggcgctcttcgacaatgagcagccaaagtcggtcgtctacatcgttccgacccgcgccttgatcgcccaggttgctgaggatctgacgatccagtttcggggaatggaccaaaatatccccgacatagtgacggtcccggtcgatgctgaaaccaacctcgctgaacgcgccatctacgtaatgacccaagagagggtgcaactagccctcggggcccatcccgacttgagcgccagcgtcatcatcgttgatgaggcgcattcgatcgcagatggatcacggggcgtgctgctgcaatgggtcatcgacgatctactgatccgcaatccggcatcacaaatccttttcgccagcccagcgatccgcaatctggatatctttggtcggttgtttggcttgaccgacctagtcgagttcgcatccatagagcctaccgttgcccagaacttcttggttacgacggtccaatcggccaccaagggcgagctagagatccacaccgttggtgacggatcgagagcgctgcgacaagtcgcaacgttgaagctggggcgaacggtcgcgagtcggacggagaaactcgtccatatcccggcggtgcttggacgtgggcattcaaatatcatctacgcgaacggtgcggctgaagcggaaagcgttgcgcttcaacttgctgagctaatgtccgaccgtgagccaaccgaattgcgcctcgctctgtccgatttggcgaaagaagctgtgcacgctaactacgccttggtcgaatgcgtcaaacacggcgtagcatttcactactccaatattccgacccagctccgacgagcaattgaaacggcagtgtcgtcgggcgagatcgattatctcgtctgcacgagcaccctgcttcagggtgttaatttgcctaccaaaaacatcttcatgttcgctccggagaaaggtcgggccagagcattggagtcgactgatttctggaacctcgctggtcgcgccggcaggctcaagcgcgagtttcagggcaacatcttcctaatcgactatgacaaatggaagaagaagccgctccacggccccaaagactcgatcgttacccccgcgattgaaagcagccttaacgaacatcacgaccagttattgaccgtgatttctggctcgcccagaacgagcaaaagcgataataccgatcttgagacgaccttcgttcgtctttacaccgatttcaaaggcggtgatcttaatcagacatttgaacgggccggcattgcgccgggcgacatccagtcaggcctagtggaagctgctcttgcagcagctagtgataaactaacgctaccgacagcggttctccgacggactccgagcatctccgcccacaaacagcagcggctttacgaccggcttaacgcaaaaatagctcaaggtgccgatgtcgcgcgaaccctcatccctttgcatcctcgagagagcgaggcgttccactcctacgccaatattcttgaattgtgccacgagatcattctcggtatcgacacctcgaaaaatctacatcgcttccatgccctgatcgcgcgacgatggatgcttggtgtgccgctccctcagatcatcgacgagcaaatatcgcgaaatgcctcgaaaccagttcgaacgacgatcagaagcaccttggatctaatcgaaggcgatatccgtttccaagctgttcgtctctttggctgctacagcgcacttcttgtctacgcgcttgacagcgcgggcttggtggacatggcatccagcattccatccctgccactctacctggaaatcggcgcatccgataaaacgatgatcagcttcatctctctgggattgtcacgggtcactgcgatgaagctgaacgagatgtctgcccggaaagacctcgataagaccggcgcgctgcggtggctccgaactcggccgcttgaagccctgggactttcgccgctcttgcttgctgaggttcgggcgatagcaattgcctag

SEQ ID NO: 59464 - DNA, 852 bp, Vibrio halioticoli NBRC 102217
atgggctaccaaagcaattttttgaaagtgagtgtccatcagcctagtaattctccagtgttgagagctttttgtgttggctttgagcaaggtatgtggagaggggacgactttattaagcacctaatcaaaaatcacttagtatcttttgtgttacctccagaagaggccgccaatgtgaatgctagcaatgcaggtacatacttggctcgtgctgcacaatctatctatacctcagaaaaaccagaaaagcgtggtgagattggggagctgattctctattcgatcatgctagagcatttcaatgctgttccgttgatatcaaagttctactacaaaacacacgctaacgatactgtaaaaggctttgattccgttcatgtcactttgacggaggatgattcggttaatctttggcttggtgaagtgaagttttacaagagcattgatggggctatcagagacgtagtctctgagctgcatgaccacttccaagcaaagtatcttcgttccgagtttatgtggattgaaaataagattaatgatggtaacgagtacaaacgcaagctcgaacctatgttagatgcagctaacagtcttgatgacatcatagactcgattcatgtaccagtattcttaacgtatgaaagtaagctctacgctgatgcaactaaggcgactgctgagtttaaagagcaagtagaggctgaaattcagggtatttatgacaagttcactagaaaaaatatccctgatgtaaacattcatctaatacttcttcctctccaagacaagtctgttttggtcagtagttttgataacaagctaaaagcattacaagagctattctaa

SEQ ID NO: 59465 - DNA, 2097 bp, Vibrio halioticoli NBRC 102217
atgagccagataaccactatggatagaatctttgaggatgataacattcgaacaaacccattttcggttttatcagaagtttcaaagatcgttaatggcagtgatgacaaattggcaagagatgctgtcatcttcgctatggaaaaaagggagctattcggtcaatacaagcccatcttagacaaacttactcgttcagtggggctgtttccttacgtagatttcgagaaccttgatatcaacgataagattgcttaccgattcaatcagccaactgaaaacagtgacatcgtgtttcaccgtgaacaggctgaagtgtatagggcattaatgtccggtgaaaatgttgtattgagtgcacccacgagctttggtaagagtttgattattgacaagctcattgccactgagagatatgacaatattgtaatcattgtcccaactattgcgttgattgacgagcttagaaagaagtgccttaagcacaaagcctacaaaattatcactcactttggtcaggaaaaagctgacaagaatattttcgttctaacgcaggagcgtgctgtagagcgagacgatattgagaatgtagatctatttgttattgatgagttctacaagttagatcctgctgctgagggtgatgaggaaagggcaattgtactaaatattgcactctactcggttgctaagacagctaagcaactttacatgcttggtccaaacatcaacgagattccacaagctcttggtgagaagtatcgttgtaggttcttccgcacagatttcaatacagtttcttcgaagttactgactttgaaagcgaagccgaatcgtaagcaagcattcttgaagcttattcggactatgaatgaaccaacattgatttatgcaaagtctcctggtcaggcaaacactattcttaactacctcatcgaagaacttcctgtaatagagagtaacgatgatgttgctgaatgggtggcagataattaccatcaaggttggaacgttgttgacgggtatcgcagagggatatcagttcatcatggaaagattactcgttcgatagggcaactgaatgtaaggttgtttaacgaaggaaagctcaaatttcttgtttgtacttcgtcactaatcgagggagtcaatactgtcgctaaaaacgtagtgatatatgaaagcaaagttgctaataatgcgatggagtatttcacgttcaagaatattcaaggacgtgcgggacgcatgtttgagcactttattggtcatatttacacttttgatgagccaccagagcccgtcgatgaatctgttgatattccagcagtcactatcggtgaaaacattcctgagtctttagctgtgcagcttgacgatcaggatattgtaaatgaatctctgaagaatagactcgaatacctgcactcccaaacatcaataccgtttgatgttttcaaagagctaaagggtgttcctccatcaagtatcatcaatttagccaatgatatttacgatcatgtctctgcttatcacgagtttctatgttggaagaataaaccttcctatgatcaggtagatttctgtaacgagttactatttaggcacctaactaatggtaaaggtggtattcgatcaagtaagcaactgacattttggtggaatcgccttagacgtcttggctctggtaaagacttcatttgggatgtatatcaaaacgatagcaacatcaataatatgaacaaagctattgaagcatcatttgattttgagcgtagatgggctaactatatgattccacgtctttattctgcattggataaggttcagaagcatatttttggtgtatttgaaatgcccgccggagattacagttcgttcattgcacaagttgaaaacttgtacgaagtacccgagctaattgccttggatgaatatggtttgcctcttcctatagcgaagaagatccgcaagcaactcaaactaggaaaggggttggacgaaactctcgcttcactgcgacagattaatcctagctccttgtatgtttctgactttgagcgcaagttcattgaagatgcgatgaagaacatctaa

SEQ ID NO: 59466 - DNA, 942 bp, Pseudomonas veronii
atggaagatctgaagtccgaaaaatgggaaaaatacatatcaacggacctaaaatgggttgataagttttttatccagcatccatctcaagagaaaataaagacgaaagttagagtcctttcagtgaagttctctggtactgaacaagaaactttagctcttgtcgagtatttggctgactctatcaagcactttatctttgggcgttcggaaattcagaaatttcaacttgagggcgttgaaccatttagacgcgcggcggcccattttggtagtactaatcccgtgatggatgggaagtacggggaattgatgctctacatgttggtagaggctgttcttaaagctcctatggtctctcataaattgaggcttctgaccaatgtcaatgatcaagtaaaaggcggtgatggtgtattttttggcaagtatggtgatgaaatgtcaatcttcatcggagagtcaaaaattcatcagagttttagtaaggccacggatagttccttggaatcgctagatcggtttcaccaaaattactcctctagcgccctgtcgcatgagttgtttatcgcgcgttcaaatatatctgaaaatttctcgttggatcagttagagacaatttacaatgcatttttgccagggacggatgaatatcaaagctgtatcaaaactcacccggttcttcttgtatacgatgatgcaggaatatcaaaaattgaagatgaatgcacaagtaaaagtcacgcggaacaacttgtggagaaatggatttctaagaatgggttgaagctgtctgagtctattaatggaaaggtggacggctataagaagctaaaaaaagttcatttagatttttttcttattccaatgtcagatgttggaggttttaagaagtccttgtacaaggcaattcataatatagagttcaaggaagataaataa

SEQ ID NO: 59467 - DNA, 2616 bp, Pseudomonas veronii
atgagccagagtacaaagctatcggaggatgcctctaagcacccgggtttctgttcagtatatgatacgcttttagaaagcctatttttgaaaaagaaaggtatcagcattcctgagcacctttcgttatcggtagagcaactacgaaaagcgacgtggttggcatcaatagtcgcaacaggaagctcagaggcacttaaaaatttagcaaattcttacggggcacttctgtttctaaatgaccccggtaacgaagtctaccgtaaagcttgctacatacttcaatctagaactggaaatttattatccagcaagcatgttccgaatatatttagcagcggacaatatcaaagtaatttcagcacggtgcttgattttgaactgtcggctaagcggagttatttgacgcaggagttttttgatagcaccactgcaacatttactgattttcagcggaaattgtgggatacattgatagctggacataatacagctatatcggcaccgacctcagcgggaaagtcgtttattattcagaagtatatagtagagatgcttctgcagaagccatccgttgctttttatatagttcctactaaagcgttgattaatcaggctagctccgaacttaagatcgcgctgggtgagtcggctcacatctatactacatatagagagctggaaaaattcgataaatcagtggtgtttgtacttactccggaacgctgtattaagacccttcaagatgaaatgtctaagcctccaaaaattgtgttttttgatgagattcacaatttagaagatgccagccgaggtatcgtgttcgagaatgcgctttaccgaatggttacgaagtggcgcaatactcagtttatgtttgcaggacctttcattcataatgtggcagaccctataaaaaaggttgctaagattaaacttgttgaggcagcaacaatttctagtcctgtatttcagatcaaggcctcaattacatttaagccgagggaaaaaatagccagctacagattgtttagccagaccggtaaggtgattggaggggagttgaagcttaaaaggtctatatactctaaagcaaaaaacaaccacggcgaagcaattgccgcgttcatggataatattgacaagaatgatagttgtattgtgttttcacctagtaaaagctccgcagagaagtgggctaataaaattgctcccatagttggtatgtctaatgcgtcgattaccgagggagcatcacaggatataaaagatttgctcgagtatttggctgacgaaattcatcctgattattgtctaataaaaactttacgtcttggtgtcgggtttcaccatgcgggactccctgacatcgctcgaatggaaatcgaggagttatatacaaataatcacatcaagaatttggtttgtacctccacgttgattcagggagtcaatcttcctgcagataaattaatagttataaatcctaaggtgggagctacggcacttactcaatttgagttcatgaatctcattgggcgtgccgggcgagcgagtaccaatctttatggtgaagtttattgtttagatattatcgatgaagagtgggctgctggacgtataaccgacaataaacagaaaacgatacgtccttcggtagtgtctgcattagaagataactttgaaagaatttatcagcttgttgataaggaacgctctcatattgtggaggttgaaaatggagaaaagctttaccctacaatctcttacatacgtcaactccatgctgctgattcaacgcattatcagcgcatacttgaaagtgcacagattcccgataagtacagagatgctatcgctaaaaaactagcgcctgttagttcgtctctatcaataccttctgaactgttgcaaaggaatccatatattgatccattgttgcaaaataagctttataagctaattgttgctgagccactggaagattggattaccacaaaatttgccgtcagtcgtaaatctaaggggggagttgacagttctgacgagccaacattttattcacagtttgaatctatagcgcagaagctgaatgatgtttttaatattgagcacgagattaattcgaatcggtggggatcatatatatcgattaggcgtttagtctatgatgcttattattggatggccggtaagtctcataggtattttatcgaaagaattttaaatgaggcggtcggagaagatgaacaagaagacccaaaggtggatagtgctgcgcgatttgttacggatcatataagtagaaatattacatttattatggttaagtatttttctttgtggtctgatattgttagtcacacgcttacggaagagcaaaaagaggaaaacgcatactccttaagcttacctgcgatgattgaacttggcagttttgatcctaaggttcttgagctcatgtcgcttggtatcaacaggagtattgcgctcaggttgcgaaaaatgattcctagcgaggtcgttgacctagaggagtgggtgaaaagagcgccacttcgtggactacctctactgttttctaggtatctgaagcgtagtgggtaccgaacctaa

SEQ ID NO: 59468 - DNA, 963 bp, Myroides odoratimimus CIP 101113
atggataaattagataaatttaatattcactttgataaaagcttaaaagaattttgcccagatattgatatcgaaatcatagatggtagagacgttttaagtgttgctaatgatttttcagataataaatggcaatatcagaaattccaaaattttatttttaataatatagctagaacagctttatcaaagagagaaagagataatattattgataatagttatgggactttagtcgaatcagctaaaaaacttaggttaattgatagtaaaaatgaactcagtgatacagaaggtagtgaattggctgaaatattattatatggaattatgcaccatcgttataaagcgttacctgttgtgcctaagatttttaataaacagaattctagtgataatgcaaaaggagctgatagtgtacatattgtagtagaagaaggagatgagttttctatttggtatggtgaagcaaagttttataatagtattgaagatcctaggctatatgaaatagttaattcagttttgaatattttttcaagttcggcttttaatacagaaaatagaattttaagtaatagtaacgatttacgagagtatttaaaggataatttggctttatatgagaaaattattaatgttttagatactgattctcctatagattatgtcaaagcaagattgaatattccaattcttcttcttcatgtatgtgatataactaaacagcaaatggttaataatgaggaatatatagaggggatattagattttcaaaagaatagggttacatccttttataaaaagctttataataaagcaattaagaataatagtaaagttcagccagtaattaattttgataaaattaaattccattttattttttttccagtaccagataaaaaaagtattatatcaaacttcttaaagagggcagaaaatttaagagaagaactatga

SEQ ID NO: 59469 - DNA, 2121 bp, Myroides odoratimimus CIP 101113
atgattgattattttgaaagatgtaaactactatttgattatataaaagtagataagtatttggaagcacgtaatggagtaattcatttacttcatgatttaaaagaaaataaaattcaatatgatgaattaatcaatcacttaattagagaagtaggattatatcaatatattgatgatgagaccagtaactggaatgatagatttgctaaagaatcatttaaagttgatacaggagctgggtttcaaaccattcatttggaacagtcatcggtactaaaattattattagaaaataaaaatatagcattgagtgctccaactagttttggtaaaagctttataattgatgcatttattgcaaataaaaaaccaaatacagtagttatagttgtacccacattatcattaacagatgaaacaagaagaagaattaatagaaaatttgggcatgaatataaaataattactactccgaatataaaaatatcagataaaaatatttttatatttcctcaagagagagcaattcattatagcaatataattgaagaaattgatttattagttattgatgaattttataaaattagtaaagtaaatgacaaggaaagagcagtaaaattacaagaggcacttattaaacttgataataagtctaaacaaaaatattttttagcacctaatataaaatctattgtagataacccatttacagaaggaatgatttctgtagagaaattggattttaatactgtaattcttagtcatcataagctatataatgaaataaaaggcaatgaaaatttgaaagagaagtatgtattagaaatatgtaaaaaagataaaaatctaatatatgccgctttgtttagagaaatttcaattcttcaagaattattcttaaataaatatgaggataaaaaagataaattaatcgtagacttttctaattggcttaaaactaattatgatccagaatggagttttccaaatttgattttaaaaggaataggaattcataatggaagattacatagatcaataactcaatatcaagtactattatttgatgatgagaaaagtggtcttgatagtattatttcaacatcctcattaattgaaggagtaaatacatctgccaaaaatgtgattatctggtcaataaaaagtggtcaaggtaataataatttgactccattgtcatataaaaacatacaaggaagagctggtagaatgtttaaacattttataggaaatgtttatgaattggtagaaccaaaattgaaggattcagataatatacaactatcaattgaagtagatacttctcttattggaggaatcaaaaatgaaagttatctttctcaaataagtatagaaagacaacaagtagcagaagataatattaataagattgaatctgttttaggtgaggggatgtatcgatatttgcgagaagagaatttattagcatcaaatgatgaagaattaatctataaaatttgtgttgaattaagagataattatgtggaatggaaggggttaaaatggttgaacaatgatgatcctgaaaaatggtggtatattctgggaaaattatgttttttgaatccacaaagcttacgttgggatagtagtagagataataatcaatttaaccaggctaagaagtttattcaaatattatctaaaagctggtctacctcgcttcctaatttaatgatagaacttaaacaggaaggtttaaatatagatgatttttttgccctcgaaaaaagaatttgtcacaatttttcaggctatttaaatgattttaataatcttaataagataattaatgagagtgattttattgatatttctaattttattagtaaatgctccaatggattcatgccatctattgtattggaattagaagagtatgggttgccacggatgataacaaaaaaaattaattatgtaaaagtaatagattttgaaagagcagaaatgaatattgagtatgctattaaaagatttcattcggtaggaaaggataaaattatagtatcaagtaaggagtatttagataattttgatatttatattattgataactttttcgaaaatatttaa

SEQ ID NO: 59470 - DNA, 927 bp, Bifidobacterium boum
atgggaaaccctataagcagatcattacccgatgtgagcatggattccgtcttcacggaagtaatgcacaatgaaaagcttggattgcggaacccggaacaactgcgcctttttcgactgcaggtcagcaataatgcctttgtgtacacgagccttgaagattatttgacggacattatcagtgagtatgttttctctcgtgctcagatagagaagctgtcacaaccaggtgtcggcaatcctcgcagcatagggaacaaggcactccgggtcatgaagcgcaacggagcagcaaaccagaaagggacaggaaacgaactcggagagattctcctgtatgcttttctagaggaaaagctcaatgctccgaagatattcagcaaagttgagcttaatgctggaacaactccattcggcacggcctgtgatagtgtccatcttcttgatcttggcgatgataccggcatgtcctactaccagacagtgtttggaacctcagacatcgagggcgatattgcggatgcaatagacagtgcctttgacgccatagtgcgtattgaaaatgaaaatgggaatggaatccagtttgtcgacaatcgctctctgaacgattcttttgatgagaatgtcgtggataaactgaaaagcatcattattcctaaaccaggggctcctgttgcgaacgaccgggcttacggtgtcttccttggatattctcttggccttgatccgcatacaaggtctacgccggaattcctcaaggacctaggaaccaagatggatactgacattaagaaccatgccgcgtatattgcggacaaaataaagacgcttggtcttgatacacattctttttacttttacatcgtgcctttcaacgatgcaaagctggataaaaagcaggttatggaaaacctgctgatgtga

SEQ ID NO: 59471 - DNA, 2664 bp, Bifidobacterium boum
atgagtagaaaaagaatcagactcggagatgcaatcttcacagacatagaagaaaacgaatacctcaactgcctttatgaaggcattctgtttaactatgccaataaaacgcttcacacgcagctagaatatcggaacgtaaatatccatgatgcgctgcgtttcgcggacctgctttctaaatcaaacagcgcagataaagctgaacagcataagatgtgggctcaggaaattgtcgttctcttaaatgcattatatccagagaacgatgaaatccgagttgtggctggatcggtttttgcgaatacagataatgcaagagggacttcgcttcttgatgccaacttcgaggacccatttgtcttgaatcgaattttctcggattacaagaaggactatcttagaattccggcagcaccgaatctgcggttttttggcgcacagaaacaggcttatgatcacctgcaggattcctatttcagttactcggcaccaacgtcaatgggaaagtccttcctgatgaggatgttcatcaaggagcaagtggcaaatggcgctaagttgaactttgcgattattgttccgaccaaggcgctgatcaacgaaacttctcagaagatcatcaaggaggatctaaaggatcttctggaggagaaaaactacaaggtcgtcaatgctgcaagcgacattgctctcgatggaaaccacaacttcattcttgttttgacgccggaacgacttttgtatctgctcattggaaaacctgatattcagattgactatcttttcgtggatgaggcgcataagatgtccggcaagaacagtcgtggcccgttctattacaagaccgtcgacatgcttaagaaccgagacaatccgccgcacttcatttttgcttctccgaatgtcccgaatccagaagtctatttgagacttctgacggatatcggtgagcatggagacaaaaggtttagaacagaattttcacccgtaacgcaggtaaagttccttctggatctacagaatcgtgagatttctgtttataacgaacataccgagaaggaaatgcacataacaagcattccacagaacaaggcgacgctgacacatttccttctcaagattgaacgccggaatgatgatctgccggaagatgctatgcgacagacgatcgtctattttaacgggaagacgcgagcagtagaagccgctctcgatttgtctcagtatctcgatgaattggatgacgaagacttggcagccctttcaagagacatcgcaaacgaagtgcatggagactactatcttgccaagattatcaaaaaaggcatcgcctatcatattggctacttgcccgcggcaatacggatgaggatcgaggacttgttccgtaagggcaagatcacgactatgttctgtaccagtacgctgcttgagggtgttaatctgccagcggataatctgttcataacagataacaagatattccggtctcgtatgactcctgttgacttcaggaatctcatcggtcgtgtcgggcgaattgaatataacctttatgggaatgtgatatttgtgtcatctcaggatgaaaagctccctgagaccgaatatgtaaagatgctaaaagaaccggtgccggaacagacgctttctatcgatgccgggcctaagacacttactaacccggaaagaaaatatattgtagaagccctcaaagagggaaatattgagcttgtaaagaggaacaaggctcagtctgaagaatcttatatcatgatgagaaagttcggcctgattcttcttcgcgatatcatgacggataataacagtcttgttcgtcagtctttctctgatttgatcagcaaagatgatgctgctcttattaagcagaaattcgaagacccgatcgctcttccagacgatgatatcaacgtgtcagcggaccagacacggaatcttatcattgcgatacgaaatggcctcgaatacccgaaagcagtaaatggagaatttgattatgatgaagtagtcgggttcctcgagaagctatgcacgatattcaaatgggagaaatacgagtattccacgctcggcaaagtcacggatggcgtgcataagaagctgcgctggtatgcagtcgtactaatccagtggatgtccggattaggcctgagcaacattatgagacaaggcattcgtcaccatgtgcagcatccagataatttctggattagcaaaacgcagacaacggtttacaaagacaacgtggaatttcgaaatattctctttgcagatacgctggaagttattgacaacataatcctcttcagcttgtcgaactattttctgcgcttctccaatgaatataagaagatttatggcatcacggaatttgacaacaactggtatgaatatgtggaatacggaactacaaagcctgtgaccattctcctgcagcgcattggtttcacccgtgaaaacgcaacttatatacgagaacacagagataagtacatactgcaggaaagcgaatcaaaactacttcttagtcgagatcttttggaatgcaataatcagaatgttcgagaacaggcaaatatgattttattgaatatgccagaaatgtttgagccaaaaggagaatcaggaaggcaggcataa

SEQ ID NO: 59472 - DNA, 906 bp, Bacillus clausii
atgaatctaagtattacctcaaatgatttcttaaaaatattcaaacatctcagtacccatgatatcaataatactagtagcaaagttaatttgtttttatgtccaattaatgcgaataaatttgattataaccgaatcattgaagaattaattgaacctgtagcggactttgctatttcaagaaaagtaaagaagtcatattctaacaaacctatgaaactttctaaggtggcaagagaaagatttgtggaatataaaaaaaatactggtgaacttggagagtttcttttatattgttttttagaaggacatttaaatgcacctaagatattctcgaaattagaaatgaaaacttctacaagcatgtatgtaaatggatcagacggagttcattttctgaaaataccggacggaaattaccaactagtttttggggaatcaaagacaattaaaggattaagaccagctctgaacgatgcttttaaatcaatctatcaattcattactgaagttaatgataaaggtgcagcaaaaagtggaattaatttcgaaaaaaggttaataagtgataatcttgatcatgaaatttggtctgaagaggaaaaaaagttcttaacaaaactaatttatccaacttctgaagaagattttaatgtggatgacgcatttggtatttttgttggatttcaaataaatttagatggcgaagaaagaaagttaggtaataatgaatatagaaagaaagtagaagcatttgtaaaaagtcaacttctcaaggaattggagcaaatagaacacttaattaataaatataatctatacggatattctttttatgtatacgctctcccctttactgaacttgacaaagcccgagaacagattatgaaaggactaacaacatga

SEQ ID NO: 59473 - DNA, 2562 bp, Bacillus clausii
atgagtttccttaatgaacttgctataaaagcaatcaatgacccatatttagaaacgttaatttctaaattagaaaagatatatggttacaattttgcaggtaatactataattaaattaaatggaaaagaatacacagacttattaagatttagcgatatactttgcaggtcagatttaactgaagcaagaaacctttcgtataaaattattagtttattgtatgacttttattctgaagatatttttttcaagatgcaagctacaactgttttagttaaattaggtaacttcccttctcttaaacttgctattggcagtgatgagtttaatttagatgaaataaaggtagaatctataataaaagaaacttatcaactggcacctgattctaaaaatatatttactgatgctcaatataaagttttcgaagaattaaaagacagtaatcatttcagtttttcaggtccgacttcttttggaaaatcttttattatcgaatcatttattaaacacttaattaaagaaagaaatgcttctgataatatagttattctagtacctactagagctctaataaaccaggttaaaaataaacttaaaaaagaaattctagttagtaaatacaagattttgtcccatccaactgtaccacttttatttagaaataaaggtagcaagtatatttttgtatttacacctgaaagattaatttcttatttgtcaaatgataatccagcaattaactatgtgtttgttgatgaagcacaaaaactcctaaccgaaaatgattcaagggcaccactattttaccatgctttaatgttggcaaaaaggaagagtatcaacttgtacttttcatctccaaacatcaagaatagcgaaattttcttacaattatttggaaatagcactgatgatacattaagtgtgacagaaagttctgttgcacaaaatagatttttcattgactgtgtagaaaataaagcagtaatgttcactgaaaacggtgaagaaattgatatcccatacgactcttttaatacaaatgagcatgaaagtctaaaaaatgcaataaccattctgggaagagaagtacaaaatattatttattgtaatactgttgatgacacaataggctatgcactaaactttgcccagaatctagaagctaagtccaatcctaatttggattgcttaattgatttagttagaacaactatgcatgaagaatattatttagtcgattgtttaaaaaaaggtattgcttttcatttcggtggcttgccccaaaggataagggaaaaaattgaggttttatttcgtaataaagatattgagcatattttttgtacttctactcttctagaaggtgtcaacttacctgctaagaatatttttattttaagtaatgctattggacttaggaaattttctgatgtggatttttggaatttagcgggtcgtgcaggaagattgactaaggatttaagcggaaatattatttgtctcaggttgaaaaataaaaaaaatagatgggataaaccacaaaaagacctaaaagtagtgaaagaaaaaaaagtaaacaaagtagaatccatattaatgacgaacaaggaaaaattttatattaatattggtaattcaattgaggaaaaaccgtttactagaaaatctctatccgaaagtaagaagaaaatgtttgaaacttatgggaatatattatcataccatgctttatctagaacagaatccatattaagaagtaagtttattgaaaataataaagatggtaccaagatactaaataagatagatattaaaaatgaagtccctaaagaaattttagcacagagcatgaatataaaactaaaatatcaaaataaaattttgaaaaaaggcgaagatttaccaaatatacccaatgaggtggactatgatgcttgtttaaaattactcattacactttatgattactataattggagagatgaggaatcaaaaggtaaaagacgtttaggtaaaaataaaaaggttttgagttactatgcagtactaatgaactcttggataaattcaaaacctttaaatctaataattaaagatataataaagtattatgtttctaataaaaaggatattcttcttggtaataatttctatgaaccgtttgatcctagtaatagaaatcatattaataaagttgtaaacaatgctgtatcagatatagaaaacgtcttaagatttaaagtaaaaaattatgtttcaaattatatactactaactaataagattcaggaatatgaccgtttacctggaaaaatagattggtctgagtacttagaatatggaacaaacgataaaattattattgaattgcagaatttaggttttccaaggcatctagcaacattcattaaaaaaaattacattcaattctttattattgaagacaatgttataactgactttcgtgaaattgaattaaaaaaacactttaacaaggtactgcataatgaagaatacgtcgagctagcagaaatacttgattggaaaatataa

SEQ ID NO: 59474 - DNA, 918 bp, Erwinia pyrifoliae DSM 12163
atggactttgaaatcttgtttgatgatacggttctaacactctttccgcctttggaagcaaacaatttttgtaataacaaattcatttccatgataaacgactttgaagatggtggatggcgactcaaaaaatttcatcgatttgtttgggataatatcattgagactgcattatcttttaaagaaagagaagctttaatttcagatccccattcagcccttgcttctgcagcgcagaatttaagattaactgataagctcgatgatattagtcaaggcagtgaactggcagaaatatttttatatggattgatgaagcatcattttaaggcactacctgttgtacccaaaatattttataaacagaatgtacaagacaatgcaaagggtgctgacagcgttcatatcgttattgatgaagcaggggagtttacgctatggtttggggaagcaaagttttataatagtattggaaatgacagaattaactcaataactgaatcagttaaaaattcacttaacactgataaacttagaaaagagaatagtgtaatccttaatgtaaacgatataaaagaattaattctagatgagggaataaaagatgatatatttaaatgcctttccaatgccaattcaatcgataatatcaaagggaaaataaacatcccaatacttataattcatgagtgtaatacaaccagtaaagccacctgtataagtgaagcatacaagaaagagataattgatttccataaagaaagaacagtagcctattttaggaaaaatagacaaaaaatacaaagtttgtttgggtatgaaaacattaaatttcatttaatactgttccctgttccaaataaaaaatcaataatagacaactttgtaaagagcgtaagtttttataaggagcaatag

SEQ ID NO: 59475 - DNA, 2133 bp, Erwinia pyrifoliae DSM 12163
atggactcttttaataaaactatcggagatcatcatgaatatatttttgatatctgccgtaaaataagcaatctaattcaaaaaaacaacgaaacggaagccagaaacactttaattaaattattagactatcactatcgaaatgaactggattataccccccttgtgaatcaccttattagaaacttagggctatatccatatctaagagttaacacatctgactggcaagatagacttatttatgaagcatttaaagtagatgttggactaaaatttccagtaacacttcatcgtgagcaatccctggtattaaaaaaacttattaatggaaccgatttagccattagtgcacctacaagtttcggcaaaagctttattattgatgcattcatttcaataaaaaagcctaccaatgtaatgattattgtgccaactatttctctaactgacgagactcgcagaagattacatcggaaattttcagcagaatataaaataattactacatctgatgttgaactcggtgataaaaatatttttatatttccacaagaaagagccattggatatttagaaaaaataaatcaaatagacattttgatagtggacgaattctataaagccagtgaagttcacgataaagaaagagcatccgtgttactcaaggcaattataaaattaagcaaaaaggctactcaacgatattttctatcccccaacattgatcaaataaattccaatccatttactaaagggatggaatttattaagatagattttaatactgtattcttagaaaaacatgatttcagctccgaaataaaaaacgatgatagtttgaaaggtaaatacttactcgaaatactaaataaaagtaaagggaaatcattagtatatgctggaacttataaaaacattgacaagatcactgatgttttgactaaaagttcagtaaacagttcaagtaatattacaactcaattttccaactggcttagagagaactattcaaccggatggaaattacctaaactcattgaaaacggagttggcatacataatggaagattgcatcgttctttaagccaattgcaagtaaaattatttgaagagagcgatggtctaaataccctcgtttcaacatcatcaatagttgaaggtgtaaacactaatgccgaaaatataatcatatggcagtctaaaaatggaagtaggaacctcaaagattttctatacaaaaacataattggcagaagcggtagaatgtttaaacatttcatcgggaaagtctatcttttctctgctcctccacaagaagaattttctgaacttgatctcacaataccagactcattaatcacagacatagatgagaaagagttttcagatagtcttacgcctgatcaaattgcggctataatttcatatagagaggaaatgtctactttattaggcgaagaaaaattcaaacgattacatagtgaaggcgcatttaaatcaaataacccttcacttataatacaaatcgcttgggatattattcaaaacccaagagaatgggaaagagtatattttttaaatactcaaaaacctgatgattgggattcttatttatataaaatactcaaacttcaaccaggttcatggggtattgagtatagtaaatttgtagcatacataaaatctgccagtgaaaattggtcaaaaaccattcctcaacaattaattggcttatcatctaataatatttcaatagacaacctatttgaactcgaaaaaaacttaacacataagttaacatccttactaagtgatataaacgtgcttttacgcgaactaactgcaaaaaataacgctgacatatcctctttcatatttaaatgctcgcatgcatttttgccgccaattgtttttcaacttgaagaatatggtttacctcgcatgctatcaaaaaaaatacaactgaagtttttactcgattttgataaggagaacttatcagttcatcaagctatagagcacttaaaatttatagactcaataattggattggcagaggcaattaatgcctctgagttcgaaagatatataattagcaactttatcgatggcgtaacattgcaaaaataa

SEQ ID NO: 59476 - DNA, 918 bp, Erwinia pyrifoliae Ep1/96; identical to SEQ ID NO: 59474

SEQ ID NO: 59477 - DNA, 2133 bp, Erwinia pyrifoliae Ep1/96; identical to SEQ ID NO: 59475

SEQ ID NO: 59478 - DNA, 972 bp, Herbaspirillum rubrisubalbicans M1
atgaccacgtatgttgacgagcatcaacccgaaccgcattttgacggtctattaggcaatcgaaaagtagatgcaagagtgaggaaatgtgaaattcacgaggaaggcctgcctccggtttcagcacattttctttatcccgtatttagagcggggaagccaacagttccggaactggtcaagatgctggtgcgagaaatcacagggttttgcgcaaccaagcgtcaacgacgtgaggcaaaagaaaaggacttcaagagtaaatacgattcgagagagtgggaggatttggctgactgggcaaagggccttttcatcaaagcagatgcgtcgagtggtcgttctggtgaagcgggtgagctcttactctacgtatttattgagcactatctgaaggcgccattagtgctgtcgaagatgcgattgaaaacgtcaccagcgatgccggtccatggtgcagatggggtgcatgcaatgtgggacgtggacggtaagcgactgactatgttttttggcgagtcgaagcttcatgagagattttcaagcgctatgtccgatgcagctgaatctatcggttggcttgctaacaacgtaaatgggcgaatggacaatgagctccagcttactacgggacatattgatttagacggattcccggcagagctccaagagtatctcctcaggtatcttcatccatatgcgactgaggaaggaaaccgcagaaacgacagatttgcgattctcatcggctatgactacgcggcgtatgagaagttgattgcgattgcccctgatgcagcggaagagcggtttcttgagtcatatcgagaaaacctgcgtcagaaacttgaggctgctcaatcgcatctgcagagacacaatgtttcgttagcatctgtagacatcttcttccttccacttcctggtgtaaaagcattccgcgacgcctttaacgaggaactccgtggataa

SEQ ID NO: 59479 - DNA, 2571 bp, Herbaspirillum rubrisubalbicans M1
gtggataacttcaatcaacagctagcctaccgtgtggcaaaccaccagcagtttcaagatgcctatgcgacgttacagaaacaaagtcttgcgtcgctttctggaaaaattccagagcttgaaatagcggaaaagaatcgactcttgcgctcggcgctgattctagcgcagtcgaagaaacaggagtacgcaactctatcgcaagatattgtttacgctttagcgacactccaactggaaaattcagaaaggttagtttgtcagcatattctggccattttgggaaattttcctgcgagtgatttcctgcgcggggacaggagtaagttcgcgaatttaccttggcagcttcagctcgctgagcaagttagacgagatgaaaattttgtcaaaatactgggtgaagatgtcttgctgacagactttcaagtggacgtgtgggaggaactcgctgagaggcaatatctcagtattgcggcccccacttccgccgggaagtcattcctaattcagctctatttaaaaaaaattctcagcaatacagaccgtttggtcgatatcgcctatgttgttccaagtcgttcgcttattcatgaaatccaggcagcgctcacaagagctttccaaggtttcgagaatgcgccacttatcagcagtgtgccacgccaaaacgaaggcctcgcggcaagtcagtcgcgaattttcgttttcactcaagagcgtttgagaacggcgatggatgaaagtgatttgatgctcgattacctagtggtggacgaggctcagcaaatcgctgatggcgcacgaggtatgttgctgctttcgtgtttagaggaggtgcgcaagaattctccccgtgcgcagattcttttcattacgcccggctcgcgcagtggtgggccaataggctcacttttaggtttgggccagttacccacggtcgaaaccgcactaagaccggtacgacaaaatttaatatacgtacgctttagaagtctcaatcagaagcaatatttagagctaactttgcatcgagcgaatcaagagccgttggcacttgaaaaagctgatgtagaagggccgccagtcttcgctgcgggcgctcgatttttcagaacaataatgacgcttggtgatgaagggcaaaatatcgtctatgcgtcgacgaagaaaacagctgaaaaaattgcaatagcaattgcaaacgaattgcgagagcggaacgaaattccaaaaaatccgatttctctacttgagctttctgatttcgttaagcgacatgtccatccagaatatgtactggctgaatgcatcaaagtaggggtcgcgtttcattatgggagcatgccaacgacgctgacaaaagccattgaggagtatttttccaaaggcgcaataaaatatctcgtgtgcacttccactctgctccaaggggtaaatctccccgcgcgaaacatcttcattagtaatccctataaaggaaatggaaatcctatgggaactgaggatttctggaatttggcggggcgggcaggaagactgtctaaagacacgcacgggaatgtattcctggtcgaatatcagcactgggatagtgccccagtagatgagcctaggcagctcgaaatcattccttctttgagtaaagcgttttccactgcacgtccggagatgctgcgatttatgcgtaacgaaaaccatgaatcggggctgaggaaaaccaactttgcggaaagtgtatttacgaggctgtttatcgacgcaaaagaggggcttatcgagcgtactattgaacgagctaacatggggaaaatctcggaaggcgcgggcgtgctgaaggaggtagtcgaggggcacctgaataaagtcctgttgccaccagagattttaaagcgtaacgcgtcaatttctccattacggcagcaggcgatgtttgatgtactgctagctgaagtgcagaaagggagaacaaggcatttaataccgccacatcctcgtcaccctaacaccgcacgagaacgtatggaatacgtgatgtcgttgattcatcagcatttacaaggaaaagagacgcggcgccaacgatattttggttggttctcaatatcttggatgcggggaagctcattggcagacatgattgaataccagcttcgcaaagctcgccgagaagcagaggaaaaagggacgcggccgccagagcctggcgaaatcatcgtgaaggtattgggccaggtagaaaacgacctccggttccactatgttcgttacattggttgttacatcgatttgctaaggtatgccttcgagaaagtacgcccggggcgctccattgagattccagcaataccacttttcctggaattaggtgcttgtagcaaaactatgattagttgcatggagttgggactctcacgtattgctgctagagaggtaacagatttacttgggaaggaaggtttggatgcggtcgcggtgaaattcaggcttaaaaaaatgaagatttcgaatttctcactttcgccaatcattgtgagtgaaatcttgagattggggctggccaatgcataa

SEQ ID NO: 59480 - DNA, 720 bp, Delftia acidovorans CCUG 15835
atggagtggctgccggagttttgcctttccttttccgagcatgaatccattaaaggtactaacgcggtcagccagcttcgtgccgctgcccagaccgtctacgacaccgacaagtatgaccggcgtggagagttcggtgagctcctgttgcacgccctactacgagagacgaaacagacgcagcttgccatcagcaagattttcttcaaggactcggtcaacaacaccgtcaagggcttcgacgccatccacgtcattgataccccccagggacttgagctctggctaggggaagtgaagttctacaaagacattggaaaagccatctccgacgtcgccgccgagcttgaagtccacttcaaggacgactacctcaagaaggagtttctgctcatcactcgcaagctcgaccctgcgtggtctggcactccgaagctcaaggaactcctgcaccgaaacacgtcgctggacaaggtggtctccacgatcgtcgttccggttctgctggcctatgaaagtgcgacgacacaagcctatacgcgggcctgcactgagtacacccagaagctcgaggccgagcttattcaacttcatgctcgattcaaaaaggccaatacagtgacacgcgtccgtattgaactcttcctctttccaatgtcgagtaaggcggacctccttgatcagcttcacaaacggctcatcgccgcgcagaacatatga

SEQ ID NO: 59481 - DNA, 2139 bp, Delftia acidovorans CCUG 15835
atgagctacgccgatttacgcaacaccctggcggaccgaaacaatggcagcgagttcgatcccttcaagttcttagcagacctttctgccttcgcgtcactggctgacgaggatgacaagcttcaggaggcgcgcgacattctcattcgtgtcttggaagattctgccaagttcaaaggctacgaggccatcatccagaccctgcttcgcaatgttggcctcttcccatatcttgacttcaagaatgttgacgctgcagatcagctcgctgcagaggctcacaggccagaggcaatgcccgagaacatagtattcactgcgaagcaggctgaggtgtatcgcgaattgatggctggacgcagcgttgttttgagtgcgcctaccagcttcggcaagagccttatcatcgacgcggtcatcgcgtcgaacaaataccacagcattgttgtggtggttccgaccctcgcgttggtggacgagacgcgccctcgcctattgaagttcagagaccgctataagatcatcacccatttaagtcaagagccatccgaacgcaacatctttgtccacactcaggagcgagttgttgagaactcgaacattaaggatgttgacttcttcgttattgacgagttttacaagctgcacattgaggactctgccgaaggcgacgagcgtgcggtactgttgaaccatgccttctacaaactggccaaacgcgccaagcagttctacatgcttgggcccagtatccacgagttgcctgacgggtttggtccgaactatcgctgcctgtttattcgcactgacttcagtacagtggcctcggactcgcacctagttccagagggcagggacgacatctcccggctaaaggcattggtgcccaatcttgaaggaccgacccttgtattcagcggatcggtcggtggggccagaaagttcgggcgtgcaatcgcagaggtgcgctcggagttcagcccgaaagaagcgctcaaacagactatcgcctggctcagtgccaactactcgccgaactgggggttggtcaacgcactgtcgcgtggcgttggcattcatcacggcaaacttcctcgctcaatcgctcagttgctagttcgtttgttcaatggtggattcctagactatctagtctgcacgtcgactctcatcgaaggtgtaaacacagcagctcgaaatgttgttgtcgtggacaacaagatcaacaagaagaaatacgactacttcaccttcaacaacatccgtggccggtctggccgtatgtggcagcactacgtaggtcacgtatatctcttcaattcacctccagaccgtgagcttgagttcgttgatgtgccggtattcactcaaaacgagagtgcccctgacgcgctgctcgtgcaacttgaacaacaggatctttccgatgatgcgaaggctcgggtgaataaaatctggaatcaggcggtgctatctccgcaaactattcagcagaacgtcggcatcgacccgcaaggacaaattgaactagcaagggagattgaggcccgcctccaagaattgacgccactcttgtgctggactgggcagcccacatacgatcagacgaaagaaatatttgatcttgcttggcgacacttcaaggtgaaggctggatcaggcgtgcgctcagcaagccaactgacgctactggtgaataggtacaggaaaaaccccgattattcggcacagttgagcgccgccatcgccggaaagataggagatgaaactgacgaagctctggagtcattcttggaattcgcacgccaatggctaagtttcaaagcgccaaggctcgtgagtgcggtgggtcgaatacaaggcgatgtccttttgcgacacggcattcggccgggtaactacgcattcttctgcacccaactggaatctttgtttattaaccctgtggtcattgcacttgaagaatacggtgtgcccatccagattgcgtcgcgcctcgcccctatgctaggcgaccccaagacattggatgaggcattggccggtcttgctaggcggaggccagccgagttcagtggactcactacgtttgagcgagtcctcatcagccctttgtgcgcacgaccggccgctcaataa

SEQ ID NO: 59482 - DNA, 1356 bp, Lactobacillus selangorensis
atgaaactccgaaaaactccaaaaaagctgggaagcaaaatggcaaaagaagctaatttcacttatttaatagatttggtcaatccttatttaccggatgcggcagatacttcaaaagaagaaacagttagcttgataattgagtatgcgtcagataaccaatactcaccaatgcctgcctcatcaacattgaatacgtatgccactgatggaatctccagatctgcttctaaaaaactgctgaacttaataaacaaagaaacatcttcgcttgaagaatatttcaacaaaattggcgcagatcagttaactttgattgctaagaaattgaagaaggatggaatttcaccagatgtgtatcgaggtaaagcaccagcattattagccaacttatttactgaagagtttgaaaaagtagcgagcagaaaaaataggcgaaaacaaaaaatccccacaaaaagtgaggataaggatatatttacaaaaactgtttcagatgagacgttctcaacagtctttcgtcaggttaatgctagtgagatagatgctgtgaaaaatagaaactcaattcatgcttttgttttgaaaccagagctgttgccttttagctatacgaatttaaagaatctagtgacatccaatattactagctacgcaatagcccgtggagttagcaaaacagatgttgtaggtttgcaagcagccaatttactaagaaaatatgctaaaagtggtattccaaataatttactaggtgaattgctagcatatatttttttagagcatgaggataacgcacttaaactctataccagggcggaaattttaaaattcaagcgaacgatcgacagcgaaggcatatacctaaaaagagaccaaggtaaaactcaactaatccttggggcatcacaattaaacaataatcttgaggatgcaattaataatgtagtgaagaagatagcaacttttgataataatcggtccaatgagatggtactggctaccaacatagttgaccgttccattcttcggacacaattcggtgaagataagagtaatgccattattaagttaatggcaccaactgaaacagactttgaagatattgcatcatatgggatctttattggctataagtttagaacccaattagatttagacgattgcacgcaagaagaagcaaaagagaagtgtcgtcaagctattaattgtgatttggaacaagcgattaggcaattgaatatagttattcagcagcatcattggcaaaaatcgtcgttttatgtgtacttgttaccttttactaatgctgaagaggatactcatgcgataatgaaggatttgataggagaataa

SEQ ID NO: 59483 - DNA, 2613 bp, Lactobacillus selangorensis
atgccacaacaagaaaaaagattgggcgaatatctttacgagtatttagaaaatgatgattacttacacaagctgatgagtattttgtctaagcagtatggttgttggctatttcatctagattggaagttaacaggaaagcagaaacatgatcttctacgcttcgccgatttgctatcaaaatcaatcaataaaaagggagacagtaggcaaaaaaatagtgccttgaaaattgttgctactctatccaaaatgtatcctaacgatcctgaggtttcactgattactaatgaggttttgaccagctttaacaactttttgcctcgtcaaggacaaagctatacgctagttccaacaattgagcagttatggaacgaagccttggtaaactatcaaaaagagaaacgccagattcctggagaagaaagtaagtcgtttatcggtaagcaagatataatttttaagtctttgagcaatgaacttactagtttttcagctccaacatcgatggggaagacctttttaattgagaagtatattgagcttcaagtgaaggagggtgtcgtaggcaactttgcgatcactgtaccaagcaaggcactcattaccgaagtaagggttcagcttattaaggatttaggggcaaaattaggcgaaaaacaatatcgagtcatttctcatcctgaagagtacagggtagattacgagggaagctatatttgcgtaatgactcctgaacgcctattagcccttttaacacaatattcagaagcacggttaatacacctgtttattgatgagtctcaaaaagttacagaagcaagttcgcgtagtgtcttttactatgaaatatttgacagggttagtgcatgggaaaatcgaccgaaggtaacctttgcctcaccattgattccaaatccaggaatatttaaaaagttagtacaaacagccgcatcgaatgatggccttcgcattgtcgaatccccagtaacccaggtggaaattatctttgatcgctatgctaataaagcggaagtatatgatgatttgaatcaaaatactatttcgataggtaaatttaaagaaacgctatcagtaccagatattattcggaagatgataagcattttagggaatagtaattgcaacttggtttattatggttcaaaagtcaatgccatttcagatgctgtggttgttagtcgttcaatggaagaaagtaacgatacacggttgatagagttagctgattatatttcacgtaaaattcaccctaaatacatcttggtaaaactagttagaaaaggaatagccttccacactggagaattgccagttgacgttcgcattagaatcgaggaagcctgtcggcaaggaatcttaaagctagttttctgcaccagtaccctactggagggagtaaatttgccggctgataatattttcgttactacgctgcaaaatggaaaaaggacgctcagtcaattagacttcttgaacttaattggtcgagtgggtaggttaggtcactccatgctaggaaatgtctttctaattactggcgatacagcgaattcgcatagtaaccgtgctgcttatttatctaggatgaataacagactaaaaaaagctaagttatctgttgatgttattaagcctaagcaagcggcagcaattaagaagagcctagagaaaggcgatgtgcgtttagataacattgaaaaagataagaactatgatttaattcgtaaattatcattactttatgtcaaggaattacgaaatgatcatcatggagtagttagaatccatttagcaaaacatataacctacaaagaagaacgaaaaattttacaatccttacaagaacgatatgctgacgaattagaggatgatattaacttctcttctgatcagtctgaaagtcttagaaacaagattagtcaggaaaatattaaaggatatcctaatattcatgatggggaaaaattgaggtggccggaagccaaagcttttttactcaaactatcagaaatatttaactgggctatttatgaatccgactttgttaagtcaaaacaagacaaggaaactcaagataaggtcatcgaggatgacgctaaaatagccttactttggatgagtggatacagcctgcaacggatttgcgactttgcaattcaaatccgtgatcctgagcgtggagatacaagatttcttaatagggtaaggcaataccatgagaatacccctaatattgactgggagactataaccattaatttagtgatgaaaagattgcaaaatcttcagtttgtattaggtaaatatttcttgaaagttacccaggagttaactaagagtggaatgccacctcagaatgactggtatcgtttcatggagtatggaacagatagtgacttacggatttggttacagcagaatggttattccagagaatcatcagaatatatagaagacaataaagatgaatttatcattcaaaccgataataattactttgtctccaagaatattttaaaagcgaacgatcttgatgctgttagtgagactaaggaaattgaaataaacgttccagaaatttttatttag

SEQ ID NO: 59484 - DNA, 1356 bp, Lactobacillus selangorensis; identical to SEQ ID NO: 59482

SEQ ID NO: 59485 - DNA, 2613 bp, Lactobacillus selangorensis; identical to SEQ ID NO: 59483

SEQ ID NO: 59486 - DNA, 639 bp, Microbacterium oxydans
atgaagcgtgcgatcagggccaccttcggaaacggcaacgaccgtgggctgcccggcgagatcctccttcatgcgatctgtcggcagctgtacggcagcagcaccgttctcaacaagatctacttcaagacagccgacaacgacacgtataagggcttcgacagcgtccattgcgtccacacggtcgacggcaacctcgagctgtggctcggcgaggccaagttctaccggagcgccaagagagccatcgaccgggtgatcgccgacttcgatacccatctcgaggcggactacctgcacactgagttcgctatcgtctcgcagaagatctcggcctcccatcctcacgccgaagacctgcgcaagctcatgcatccaaacacctctctcgacgaggtgtttgacaggctggttatccccgtgttcatcacgtatgacagcaaggtcaccaatgcacactcgaaggactgccctgagttcttcgatgagatcagagatgaactcgacgccctccatgacaaggtcacttcagcgttcggggacgatcttccggtcagcgtgcgcgtcttctttctaccgctcgccgacaaggccgggctcctgcaagctctggagaaggaactcgcgccatggaaatga

SEQ ID NO: 59487 - DNA, 2115 bp, Microbacterium oxydans
atggaaatgaccttcaggcaggctcgcacactgctgaagaaaggtctcctctcggacgataacgccttcgaggtactcggcgctcttggcagagagacgagctttggtaatcgggacgctgcacgcgacgcgatcttctgggctctgggtcagaggacggcgattccggggggtctctcacctctcatggagtctctgcttcgcgagcacggcttgttcccctatgtccaggatgtcctcgacatgcctctcggcgaccgtcttgcctacgcggctcatcgtccagatgctgatatggggcgagatctcgtgttccacgcggagcaggcgaaggtctacgagcacctgcgcgcgggcgagaacgtcgtgctctcggcaccgacgtcattcggtaagagcctcatcatcgacgcctacctcgctgagaagtcgttcaccaacgctgtcatcatcgttccgactctcgccctcatggatgagtgccgacggcgcctcactcgactccccggagacttcaaggtcatcactcacggctcgcagaagctcggcgaacggaacttgttcgtcatgacgcaggagcgattcatcgagctcgatgcgctgccacaaatcgagttctttgtcgtcgacgagttttacaagctcgatccttctcatggagatgtcgaacgttccgctgtcctcaacatcgccctcgatacactcctcggcactggcgcgcagttctacttgctcgggccaagtgtcgcgagcatcagcaagctcgctgaagcccggctagacacgacgttcgtgcatcacacggacttcaccaccgtggccaccgacgttcgccgcatcgaaacggaagacctgacggaagcggtgccggagatctgccaagagctcgacggcggcaccctaatcttctgccgtagcccgaagagaacccgcgaggtcgccgagtggttgctcgcgcgcggggtcggcggcgggcataacctagaaacggcagcagactggatcggcgaagcgttccacgaagaatggaccctcgccaaggctctgagacaaggcatcgggatccatcacggaaaactccctcgtgcgctggggcatcacatggtgcggctattcgaggaggggcgacttccctacctcatcgtgaccagtacgctcatcgaaggcgtgaacacctcagcccgcaacattgtcatcgttgatccgaccgtttcgacgtcaaagtacgacaggttcaccttcaataacatcagcggccggtcaggtcgaatgtccaagcacttcgttggcagagtaatcgtgttcaacgagccgccagccgacgacggcacggctgtagacatcccagccctgagccagtccactcgactggacgacgccgtccttctccagctctcggagtcgagcctctccgacggcgcgctggaacggctccgcgagatcgaacgcacctctgctgtgagcctgtccaccctaagacgcaacaagggcgttccagtggcaaagcagatggaggtgggcgccgcgctgcgcgacaaccggcagcggtggcaacccgcgctgtcatggcgaactggcgtcccaggcgtagaagaggtgaaacgcatgggggacgtcctcgtccagctcacaggtaccggtaacgtcgtaaggagcgggaagcagctcagcgccaggatcaacatgctccgccaccagggaggagacgtcgcggcgctcgcgcggcaagagatggagcggaacggcaagtcagccgacgaggccatcgaagacacgctcgacttcgcccggaactggatgcagttcaagatccctcgtgccttgatgaccgcgacctcactcggacaggacgtttgggggcctgccacgaaggtgtcgaacccgctcgcattcgtggcgcagctcgaaaacatgttcatgccgcccttcgtcgtgatgctcgaggagtatggcttgcccacctccacaacgatgaagatcaaggatcaattggggctcgactcggccgagagcctcgacgaggtcttggatcgtctgcgcgaggtacgacaggtgccacgaaccatggggccattcgagcgcgagatgatcgtcgacaccatccgtacgatctga

SEQ ID NO: 59488 - DNA, 981 bp, Chlorobium ferrooxidans DSM 13031
atgagctctctttcagaaaatgaaatcgcacaacagaatccaagcctttataattctttacacccccttcttcgtgtaatcccaacagaattaaacggataccttgagaaggttgcctgcaaggtgtcagtgccggggacaaaaacccaagcacattgctactttattactcttgacggtaatcgtcgaccaagagtaaaagactttgctcggtttatagctgacaaaattgcagactttgcaatacctcgttctgaaatcgaacgcgcattaaaagaagctcaagacaaaaactcagtcgctcctatagctaggctcaataaaaaggcaaataagttattcacgacacttcctaattcaggtgagggtggtgaggtgcttctgtcgcttttggcagaggcatttatagagatacctcagattttcacgaagatggtgttgaagacaaattcggaaatgcacgtgcatggcagtgatggaatacatgcaggggtaaataatgatgggcatttggctctctattggggtgaatcaaaattgtataaaaacgcgaatagtgcgatcaaatcctgctttaacagtttggctccatttcttcttgatacgggtggaagtgattcaaatcaagagcgagatcttcagttgatgagggatggactatcattgcccgacccggctctgctcaatgcgctaaaacattatcttgatccagatgatccaatgtttaaaaaaatggaatatcgtggtctttgtttagtgggttttgattctgattcatatccgacttctccaaactcaaaggaaatacaagaggtcaagaacgctatagaggaagttttcatgcaaagcaaagaaaaaatacatgagcacgtaacggataaaaaaattgagagttttaccatagaagtgttttgcttaccgtttccatctgtggaagaatttcgaatggcttttagaaaagaattagggctagcaaaatga

SEQ ID NO: 59489 - DNA, 2586 bp, Chlorobium ferrooxidans DSM 13031
atgagcaagagcgaattgcaaaattggctctttagcaataaagggtttcaagagcgatatcgacatgtcgtaatcgattctgttacaaaccaatttccggctctaaatcgtttgccttctggtgagaagcatgattggagctatcttctgctgtgcgcaagtcttcttgcgcaatctgcggacggtaactgtcaagatgtttcattgcgaattgcccagttttgtcttcaagcaaacaatttgcaatcagagtataaagatgctgcggctgtcatacttgatatacttgcaaatcaaccggcaatcaatcttgcggaagctagaaatctaatcgagtgtggttttgaagatcgtttgcctcataacatgctttgtgagtggataaggcgctctttagaaaatgttatttctttatctgattgccgtactttgtcagtcaatcattttcaacgggagttttggggacggaccaaacaaaataattggattagtatatccgcgcctacttcttcagggaaatcctttattcttggtcagtggcttgcggattacattcgatcatcgccgtgtgctacgattgtatatcttgttcccacaagagctcttattcaacaagttcaacaagatcttgagcgtgttgtaaagtccgaaaatataccattagttgctatctctactcttccgctactttctgcttataaaccaggagttgcaaatgtatttgtttttacccaggaacgctttcacatccttatcggtgagagaggagctaatttaagtgtagatcttctgatcgtagacgaagctcagaagattggcgacaattataggggagtccttttgcaacaagccattgagaacactgtgcataggaataagaattgccgtatagtatttgcgagtccgatgacggataatcctgatgtattgcttgatgatgcaccagacggagttatttcaggtgatattgtcagtgaggatacgatggttaatcagaatctgctttgggtatcccaaattactggaaaaccgaaggaatgggaagttgaacttattctggatggaaagtctgagtgcatcggccagattgcgttgccttcaagccctgcacctgatagtaaacggttaccatttgtggcttttactctgggaagtaaggatggtggtaatgttctttatgtaaatggctcggcagatgctgaaaaggcagcaaagcagttatatgatttacttggtaaggatgcggatatatcatttgacgaagagatcgacgagcttgtagatcttatcaagaagactatacatagtcaatattctctatctcgtgttctcttgcgtggtgttgcctttcactatggaaatattcctcttttggttaggacagaaatagagcgtctattttgttcaaacaaaattaaatatctcgtatgtacatctactctaattgaaggtgtcaacatgccctgccaaagtatttttgcacgtggcccaacgaagggtcgtggtgtgccgatgaccccaagtgatttctggaaccttgcgggtagagccggaagatggggaaaagaatttcaaggaaatgtcatttgcgtggataccaaacgcaatggtgtatggaagaacggtgctccgttgcgtagatctaaatttcggattacaagaacaactgaccaagtattgtcgagtatagatgctttgttggaatacattgctaatggaaccccaagggacgaagcaataatgaatccaaatttagaatatgtcttttcatatctcatgtcttgcaatattcaaaatgggagcatctcaaacgcactttggtcacgccgttttcctgaggacgttatacagcgaatcaatttgctcttagctgaaatatcaaacacactctctactccacatgatgtcattctgcgcaatccagggatcagccctcttgcaatggatggattactcggttatttccatgaacggacagagtataggaaaatgtcagtggaagaattgcttcctccaccacctgaaagtgaaaatgctgtcaatggctatgctcggatactaatgcgaatcaacaaacatcttggtgacgtatttgggcgagaaggaagagtttttcaactcgcattacttattgtgaattggatgaaagggtacccacttgctcggatcatttctagtcgggaaaaatattatggaaacgataatcttgctggtttgatcaggaatacaatgaaagatgttgaggaaattgcacgttatcaagcgccaaaatatttagcgtgttacgttgaccttctcagagtctacctagagcgcattaataagccggacttgattaatcgattgtttgaactaaatgtacttcttgagtttggggtttcgcagaaaacccaattgtctttggtaggaatcggtttaagtcgttctagtgccattgctttatctgaactcataacagatgattctatgagtgaggaaacctgcttgacttggctacacgaaaatgactggatgacgcatgacatgccagctttgattaaacgcgaaattcgaacagtactagatagaaaaaaaagaagttattga

SEQ ID NO: 59490 - DNA, 1620 bp, Pseudomonas sp. M1
atggttactactccccgcccatcaaacaaaggtgggccagcggctcggcaagggttcaaatatcaggatcacgttgccgtaagcttcatattgaaaatgctagccgacagcagctacgtgcagatcgaatgcgagaccgccgacgacatcgtcgcggtgaagcagtcagcaggtagcactatcaatgaatacatccaggtcaaaaccaccgagaaggatgggaagtggaacctgaaggaaagcacccaactggagaacaggaaacccgatagctctctgatccaaaagtcgctcaaatgcgacgtaaggccggggccagcctgttttcggatcgtctccaaacgtgatgtcgcgaaggtactggaggacttcacccaggagctggacaagcgtgtcaccccggacggggcaacggctcagggcatcaagctggccaaacgttttcccaagtcgatttcggccatgggccggaacctgtcgtactgggccgaccacttcgtttggcaggtatgtggcaaggtcaacgctcttgaatctattaacctgcgcctgctttccgaagtgattgagttttatggggagaacccctcccaccgccagttgaaagaaatctacgcgaattttctcggctgggcagatgacgcagcaactgccgatgtcaaaatagcaccacaggacaaaattatcctgcgtgccgatgcattggcccgattgaaagcgctgctggactcggcgtccaagcaagccaacgccttcgctaaaccttacaaatcaaaacctgatccgtttctcgtggagtttcattcagccaccgagacggggctgcttcgctccatttctggcttcgacgtggagtacgattttgaggagtggcgcagcgatcagtttgcggagcatctcgtgcaatggcttcccgaattttgtttacgtgccagcgagattgccaatttccagatacaccagctctcaagtgcgctcgcgaaatccatcagcatgctggatcaaacgcctggctctcgcgaccgcttgatcgccgagctgattctccacgccatactgcgtcaccgagaaaacagcgaaccgatcgcatgcaaagcgttttacaccgtcaacggcaaactttccgagttcggcaacgcccacgtagtccaatccgagggtgaggtagaccagctttggctgggaatatcgcgaatgatctataccggcacgatggatcagacgctgaaagatatttgcaatgtgttggacgcgacgatttccagagccgcgttgaccgaagagcgcgagatcatcgtgaccctgcgcgagcctcaacatcatcgaccaaacgccgaggcgttcaacaaggcgctacacaaaaatgcaccgacccaggacatgctgaaggtgctttgctttccagtcctgttggcatacgacagtgaagtgttggccggcggctttctcgctgactacgtggcgaacctgaaaactgaagtgacgcagcattacaagaccttactcagcaccttgccttcgaagatccaacaggttcgggtggtcgtgtttctggtaccaatggaaagcattcgacagcttgtccagaaattcaactccctgtgcaaggctgttagctag

SEQ ID NO: 59491 - DNA, 2145 bp, Pseudomonas sp. M1
gtgaaatacgagatcatcaaacagcagctggaatcgctcggcggcaaagatagcgacaagactggacttcttgcaggcgtgacccagatcgtgaacagggggaaacctgagtgggagggtcgcgatctggtgatccgtctcctagataaattcgcgttcttggacgaaatagaacagtcgcttttactcagcctggttcgcactgttggtctgttcccctacatcacagagcacgtcgagcaagtgtccgccgcagaccgcctagcctatgaaatccaccgggtcgagggcgtggagaaaggcctggtcttccaccggcttcaggcaaatgtgtttcacctacttatgcaagggcgcaacgtcgtgctcagcgcgtcgacaagtgtcggcaagagccttgtcattgatgcggtgctggcgcaaggcaaattccgcaaagtggtggtgatcgtaccaaccatcgcgctgattgacgaaacgcgtcgccggctggtgaagcgcttccgatcggtctgcaatgtcatcactcacccgagccaggaggcgaagactggcctcatcaacgtctacctcctgactcaggaacgggtgctgcagcgcgatgatttgaacgacgtcgatttcttcgtcattgacgagttctacaagcttgatcttgccagtgactctgaagaaaagaaccgctccgttgacctcagcctcgcctttcacaaactagcgaacctaggtgcccagttttatctgctgggcccgcacatccataacatccaaggtctggatgggtatgaatacaattttatcccctcgaacttctcgacggtggcagtggacgtaacctactttaacctgcgcacccgtggtgacgagcgcaaggaaaagctgctggagctgtgcgagcaactcacctcccctacgctgatctactgccagtcgcctgcgagcgcgaaccgggtcgcacagcttttgattgatagaggtaattttccttcgcttcccgagaccaaggacgtatcggactggatttccagcaactaccatcctgactggaatgtggccaaagccatttctctgggaatcggcattcaccacggcggcgtaccccgagcgattcaacagtactttgtgaagctgttcaacgagagaaccatccgctacatcatctgcacgtccacgatgatcgaaggcgttaacacctcggctgagaacgtcatcatctacgatcggcgaatcaacaagaacacctttgacttcttcacctttaagaacatttccggccgtgctggtcgcatgaaccagtatttcattggcaaggtgttcatgctggaggagccgcccgaggaggaaaacctcaccgtcgagtacccgatcggtttgcaggacagcacctcccccatgggactgttgatgaagttggaaccagagtatttgaccgaccaatccaggcagcgtttggaagtcgtctattcaacaccgcaactgtcctcctcaacgctgatcgagaaccggcatatcccggtagaccgtcaaattgaagtggctgacaggattcgtcgtgagctcgcaatcagccacatatggctgacctggaaaggaaatcccgagcagaagcaactcgaatacctctgcaccctcatctacgatcacctcccacataaactgcaggaattcagtatccactccggcctgcaactggcgtggcacatcaatgcgctcagggcacagaaggatttccaggcctacctccaacaagctattgatgaagaccccacagatcgcactccaagcgagtcgattggccaacgcctaaagtttattcggaacgtgatctcgtaccgccttccacgcgacatcatggcattgagtaaaattcaagctgacgttttcacccgaataggtattgaaccgggtgatttcggcttcttggctgagcagcttgaaaacctgttcaacgaccctcttctcactgcgctggacgagtacgggattcccacgcagatttcgacgaagttcaaaagcgccatactgcccgccgagggcatgacccagctaatggaaaagcttaagcaatgggcaccacgactggaatactcacacctgagtcggtttgagaaaagcatcgtcaagtgggcgatagaggatatgtga

SEQ ID NO: 59492 - DNA, 309 bp, Clostridium sp. ASF502
atgaagaaagagttcttagaaagtttaatttaccctaccaagaacagaaattttgatgtcgatgatgcctttggtatttttattggcttccaaatagatataagcgatgaggaaaaggaaatgccaacatcagattttaggaaattaataaaatcgagagtagatattgaggttagtaagtaccttgtgagtatacaacagaaaattattgataataagctacaaggtcataatttctacatatatgttttgccatttactgacataaattcaaagagacagaggataatggaggccattacacaatga

SEQ ID NO: 59493 - DNA, 2547 bp, Clostridium sp. ASF502
atgaaatggttggaggctatggttcgccgggcattgaacgatccgtatttggatgaactaacacgaaaactggaatacaagtatgcacatatattcttataccaaaaagatgatattttattgactgaaaaagaatttgatgatgtgttacgatttgcagatattttatcgagaagtgataaagcagacggaagaaataaagcatataaaattgttagcttattatatgacgtatataaagacaatgtgcagtttcagtattatgccaattcaattttaacgaaattagggaatttcgcgtctttaagtattgcagttggaaattctgaaatagtagacacgattgagacagcattggaaaagcaaataaaaaagacttatcaaaaagtgcctttcaatgatttggtatttacagatccgcagtacaagctctttgaagcgatgaaagatagtaatcattatagtttttcggggccaacttcttttggtaaatcttttataatggatgcttttattcaatatattattactgaaagacatgggatagataatattgtgattttagtacctacgagagcccttatcaatcaggtcacagcacgattaaagaaaactatcacaaataaaaattataaggtgttggcacatccggtagttcctatgatttatagaaataggatgttaaaatatgtatttgtttttactccagagcgattaatttcatatttaggtgaaaaggaaaatcctgtaatcaattatatgtttgtcgatgaggcacataaaataattgctgaaaaagattcaagatcacctttgtattatcatgccattcttttggcggagagaaaaagtattaaattgtattttgcatcgcctaatattccgaatgcacatgtctttttacaattatttgaaaagagtatagatgaacaaatgattattaaggaatctccggttgctcaaaacagattttttatagactatgttgagggaaaaggcaggatgtttacggagacaggagaagacattatttttcaagacttggggaagaaagaacaagactatgtagggaaacttcttcggaaattgggaaaaaactgtaaaaatattgtatattgcaatacagtagcggatacgattgattttgctttgaagttttctaagggtttgcctgaacaaaatgatgcaaggattgattcacttattgaattgataaaatcatatatacataaagattattttttaattgattgtttaaaaaaaggagttgcattccattttggaagattaccacaacgtatacgggaaagaatcgaaagattatttgaagaaaaagtaattgactatatgttttgtacatctacacttttagagggtgtgaatcttcctgcaaagaatatttttatttttagtaatgctatcggaaattctaaattttcggatgttgatttttggaatttggcaggcagagccggtagattgagtaaagaattgagtggaaatattatttgtgtacgaatagaagataaaaagaatagatgggataatccaaacaaagatttagaagttgtaaggaataagaagatagaggctgttaaacctttggtgattaacggtcagaaaaatttttatacaaatttagattattctttgagaaataaagattttaccagagctaattacagtcaaacagaaaaagaagtatgggatcattatgctaatattgttttctctcatcaagcatcaaaaacagattccattttaatgagtaattttttgagaaaaaatgcagatgggaaaaaattattagagcgaatggaaaaagagaatcacattccattatatattttagagcagtgttcaaatataaaagttatatatcaaaataaggtatgggaaaaaataaaagaatcagagagcgcattcccaaatgaaatcacaactcaaacttgtctggaagtattggaaaagatgtatgattattataattggggtgaagaagaatctaagggaagaaacccgatggttaaacaaagaacaaggttacaatattttgcggttttaatgtattcatggatgaagtctacaccactaaatatgatgattatttatattattaattattacaaaaggaaaggcgaaatctgggatagaaatgagatggtaatatttaatcctaatgatcgaaatcaaattaatcttataataaataatttgatttcagatattgataatgttctcaggtttaaaatcaaaaattattttttgaattattatttgattgtttctgaaaaagtaggtaaacaaaatgcaggtgcaaattgggcagaatatgtggaatatggaacaactgacgatataatcatagaactgcaaaatattggacttccacgccatttgtcaatgatgataaaagatgattatatagattttttaacgtttgaggatggtatgctggttgatttgaatgcaagggaattaattgaaaatattgattgtaaaaaatacaaaaacgaaatagaagagttgaaagaaatgattttgtaa

SEQ ID NO: 59494 - DNA, 921 bp, Pseudoglutamicibacter albus DNF00011
atggcacatgcgacaatcgcgccaacgctgcgcggtgacacgtttgcgtccacgttcaccgaggtgaagcattcgaacacgttaggtcttcgaaacgacgaacagttacgcctgttccatctgtctgtccaaaacaaccgcttcgaccacacagccctcgtcaagttcctcaaacgcaacgttggacgctacgtcttctcccgcgccgaatacgaaggctataagcaacgagacgatctcgaagaggtcgctctcgacgcggtgaaccggatgcgttcacaacaagacggcatgggactgggcgaaatcttgctctacgtcctgctcgaacaaatcctcgaagcacccaaagtgctgagcaagatcgagctcaaccaagcgcaaggccagatccacagccgctgtgacgccatccacctgctcacaccagacggtcagcgaaccaccagcagtatcgtgtttggaacctccagcgtggtcggcaacattggggatgctatcactgcagcattcgaccgcgttgtagatatagaacagaatcgctcagacgaggttcagctcgctgagaataccgtgttcaccaagaccctcgacgaaacgaccgcaggatacgtgaaagatctgttgatcccgaagccgggtggggcacccgtgttcgatactgcctattcgatgttcctgggctacgacatcggtttagatccaaagaactatggcaaccagcagtatcgggctgcgctcgatcagaaaatgcagggtgatatcgcagcacacgcccaaatgatcgccaacgagatcaacacacgaaacctcgataactactccttctacatctacgttttgcccctcaatgaagtagacgttgacgcggtcgcaatcatggatgggctcgtgggcgggcaaggtggtagccatgtctga

SEQ ID NO: 59495 - DNA, 2673 bp, Pseudoglutamicibacter albus DNF00011
atgggctcgtgggcgggcaaggtggtagccatgtctgacaagcaagtaaccgtcggtgatctcgtatttgccgatatcgattccaacgaatttctcaaacagctgtacgccaacctgctctacaactacggcttacatcgattggggctggtggatcgtcaaccatacgatgtggatcttgaagccgccctgcggttcgctgacctgctgtcgaaatcaacccaccccaccaatcgtgaccagcacagggtgtgggcgcaagaaatcgcgctcctctgccacatcctctactcagaagacgtgcgaacgaaagcgtacgttcctgcaatcttcaccacgctaggtaactacccaggcctgaagcagttgggcgtgacttccgatgcgggcatcctcgacgtcgcattcaacgcctatcaagccgagtacctcaccgtgcccggtgacaaatcaatgaagtttttcgcgccgcaaaaggagatctacgaccgccttaccgacggcaagttttccttctcagccccaacgtcgctgggcaagtccttcatcatgcgcaccttcatcaccaaccagatcaaatccggggtgaaggccaactttgcgatcatcgtgccgtcaaaagcgctgattaacgagacccgctcgaaactgatcgctgaccttggcgaagacctggaacggcacaactaccgaatcgtcagtgctgccggtgacatcgtgctcgaaggcgatcacaacttcatcttcgtactcaccccagaacgcctgctttaccttctgatcggcaaacctgcgatcgaattcgagtacgtctttttcgacgaatcgcacaagctttctggcaagaacagccacgccccgttctactaccaaaccgtgacaatccttcaacaccgccacaggccaccacacttcgtcttcgcttcacccaacattcccaacccagaggtattcctgaggctggttgatccaaactctgacgagaatgagaccaacgcggtcgcaacccagtattcgccagtggcgcagttcaaatacctcgtcaacctgcacgagaacagcatttccagctacaacgaccacacccaagaattcacgcacctagcctcgcttcaagctcaggacgctactacacagggcgtaacccgatttgttagtgaatcatcacgaggttcagatcaccgtgggcaaaccatcgtgtttcattctgcccggcatcacgcagtgcaagcggcgcgtgactatgcccagggtttggcagacctcaacgataaagacttggacgctctcgcaaaagacatcgaacgcgacgtccacgaggactactacctcagcggtctcatccgtagaggcgtcagctaccacatcggctaccttccaccagcaatccgcgaacgcatcgaaggtctgttccgcgaaggtaaaatctcgacactattttgtaccagcacgcttctagaaggagtcaaccttcccgccgacaaccttgtcatcacgaccaacaaaatcggcagagcaggaatgacagcagtcgactttaagaacctgatcggccgagtcgggcgtatcgagttcaacctctacggcaacgtattcatcatcgtgggcgaccaacttgcatccgagcgacaggccaaggaactcctgcaagcgaatgttcctgaacagaagctatctgtgcaaactgactcacaaattatcagcaagaaaatgaagcaaggagtcgttgctgatcttcaagaaggacagatcgagttcgccaagggagatgaaagctacgagcgctacaacatgaagcgcaaattcggcctcatgctcttgcgcgacatcaccacaggacgtcaaagcctagtgcgtgaagaattctccgactacctcgacgaccaaaccgtcagccaaatccgcgaatccttcgcgcaccgagaagggcaacaagacgacgacatcaacgtatccgtcgaccaagcagaatccttaactcaagctgtccgagccggactcaaatacccacacatctccccggacgggaagttcaactacgacgaaactctcgcgtttctccaaaggctcgcctcattcttcaaatggcgcgtctacgaccccgaaacactcggaaaaacagataagtacagcaaccaactcacgatgctgcgctggtacaccgtattactcacacaatggatggaaggtcacggactccgttcgatcatgaaccgtgccctccagtaccgcctgcaacaaggaacgctctacatcaaagggcaaggagagatccgttacgagaacacgctccagcaccgcaacatcgttatcagtgaaatcctgaaagttcttgaagatgtcatcctcttcagtctgtcgaactacttcctcaaattctccaacgaatacaagaaggtccacggagtagagcagttcgacaatgactggtacgagtacatcgagtacggcacaacaaagcaggaaactatccttctccaacggctaggattcacccgcgagagcgccacctacattcgaaccaacgtctccaatgcaatcttccttcacgaagaaaagccttacctgaacccgattctcctcgaaagctcgaacatcaacgtccgcaaagaagccaacgaaatcagatacaacgtgccagaagccttctcgatgccagattttatgttctaa

SEQ ID NO: 59496 - DNA, 906 bp, Leptospira alexanderi serovar Manhao 3 str. L 60
atggaattaaaaactagtgttccaaaaaactttttagatttgttttataacgagattgaatgcgagattccagacactcaatctaaattaaatcttagaattcttaagattgagaataatcgattttgctatgatgatcttgttgagaaattagctgaatgtgtagtgcattttacactttcaagaacatctttagaagatttatcagtagaaggaaaatattcgaagccatatcgtgaagctgttaggcgttttagagactacacaaacaatgatggtgaagctggtgaactacttttatattgtttcttagaagcacatttaaatgcgcccaaaattgtatcaaagttagaattgaaaacttcatcaaatgactatgtaaagggctcagacggtgtacatattttaaaattagatgataaagaatatcaattaatattcggagagtctaaactacatactggacttacatcaagtttgtcagaagcatttcaatctattcatgattttatttaccgtccgaaaaataatataaatcatgaaattagcataataaatacacaactacttaaagaagcttatgacgaagatttgtataagcttataaaagaaattattattcccaaagccaatcatcctaaagaaattaaaaaggacaacgcattcgctattttcgcaggattcaatatcgaattatcggatgttgagaaaaaaatgggaaatcgtgaattcgagattcaccttaggaatcggattcgttctgaggtagaagggaaaaaagaaaatattaaaaataaaatacaacaacatcaactttacggatacacattttatacttatatatttccatttattgatatagaaaatactagaaagaaaataattcaaaaattaacaacaccatga

SEQ ID NO: 59497 - DNA, 2586 bp, Leptospira alexanderi serovar Manhao 3 str. L 60
atgataattgataagttaactgaagatatattgcaagatgaatatttctggcaactatttaagaaagcatcaaaaatgttggctcataacctatttcatgataatataaatgataattatttttcacaaaaagatctttgcgatttacttcgatacgcagacattctttctaattcaaataaacctcaagcaagaaataaatcttaccaaatcattgcgacactaaatgagtattataggaatgatcctaaatatagaacagtatctcacgccgtattcgcgaaattgggtaatttccctggtattaattatctctccgtctctgataagaacaaatcggaattaccatttgatcgcgatattgaaaagaaaattaaagaaaagaaacaagaaataccaaattccgatgggctaatattcactgatgttcaatttgatctttttgaaaaattaagtaactcagattactttagtttttcaggcccaacgtcaatgggtaaatcttttattatcaaatcaatgattagaaagattatatcatcagacaaaaaaagtaatattatcttaatggttcccacaagggcgctaattgcccagttttctaatgacttgaggaaagaatttaataacactttaatagaatatggctataaaatcatgactacatcatctgtatcggacatcctaacagaagagaagtcatcgtatttatttatattaacaccggaacgattgcttagttttttatcaaataagaaaagtccaaatattacatatctttttatagatgaagcgcataaacttgcttcgatattggatatgcgaagtattaccgcatatactgcagttgagaaggcaatcaaagcaaaccgagaaattaaactttttttctctgcgccaaacgtatctaatccagatatttttttgaaactttttaataaagagaaacctaatacataccatactattgaatctccagtatcacaaaacatcttctttgtggatctaattaagagcgaagtaactcactttacagggtatgaaaaatatttgtttacgccagaagtcttaaaatcaattaaaaagggcgatgaatttattcgaaaaattgggtccggtgagagtaacattgtttattgtagtgcaaaggctaagactataagtaaagctatggaactttataatatattagaacaagatgaagaggatgacttttataaaagtaatgaaataatctctaaacaaattaaaaattatattcatgaagaatattatttggcaaaattattaaaaagaggagttgcttaccatttcggtaatcttcctcagttaataagaaataaaatcgaatttctttttaaagaagggaagatttcatatttattctgtacttcaactttattggaaggtgttaatatgccttcaaaaaatatctttattcttaataataaaaaaggaaatacaaatcttgaaaaaatagacttttggaatttagctggtcgcgcaggaagattaaaatttgaactttcaggcaatatattttgtttaagagaaacggaaaaggaatggaaatcaaagaatttgttagatgatagtgaaaaaattcaaattgaaccgactatcgaaaggcatattaataaaaatttaaaggaaattgaaaaaataattaaagaccaagaaggtcaaattgataaaaaaaaacttaaagaaattctgaaatatattgcaaatgtaataagtatcgatacgttagaaattacttcagattacaaaagtaatataattaagaaattaatcgaagaaaataaagatcaaattattgagctttctaaaaataaatttaagaatcttgaagttccgattagtatcttaaatgtaaatcaatcgatcaaagtagcaatccaagacaaagcatataaaaaattaaaatctttctctaataaagaagatattaaattaccggcaagagttgattacaatcttgcagtagtttggttgaatagacttcacgaattatttgaatgggaaacagaagaaaaagaaatattcaaaagaacgaacgatgctagtaaaaaaaggaatatgttatcatattatgctctacttatgaataaatggataaatggagaaccattaagtttaattatctcacattctttgaaatatcatagagataatgctattcaaatttacgacgagaatagaaaaattgagatatttaataatactgcaaaacatataaatattgtaatcggcaatattattgacgatattgagaatgttttacgattttcctttgaaaaatattttaataactattatagcatattagtagaaattttaggagaagataatgccggtcctaattgggcgatatttctagaatatggatcccagaatcccactatcattgatcttcaaatagcaggtctttcacgtcactccgcaaattttttatttaagaatcatactaactgtttaaatatcgaaaagggtaaagtaatttctattaataaagaaaaattaaggtcttcaatgaataatgaaagtatcgaatatgaagaaattagttcattattcttttaa

SEQ ID NO: 59498 - DNA, 963 bp, Burkholderia ubonensis
atgacgaaggctaatgacggctttagcgcgttgctggacccgattaagggcgtcgacaacgtcctgaaggaagtgacggcgacgccgctgcttgaacagccacggcttctcttccttcggatgcaggagcacattccgcaagtcgatgcgcttgcggagctactggttgaccagctcgtcaactacgtcataccccttcgcaaacggagagacgccttcgcccagagtagcaactcggcgacgggcggcgatatgtcagcgatgtcacggcttcgccgcgaggccaaacggctcctggttaagtacaacgagaagcaccccggacgctacggcgaagttggcgagctcattgcgtacgttgtcgcggtgagatacctcggcgcggcgcaactcggcgcgaagatggcactcaagacgtcctccgaaatgccggtgcatggggttgacggattgcatggcagtcaagcggacgacgggtcagttttcttctacctcttagagtcaaagctcatcccgagtgcaaccgatgcgtcgcgggaaatggtcgattcaattgcggagcaccaggcagaccatgggcggatgctgaacgaacttcgccttgttagcgacttgtctaacctagactgtttagagggagaagcgcgagaggcggccaagtcattcttcaactcctacaccggtgatggcagccatctccggcgtcgcgacgtccacgtcggcagtctcgtattcagcgaaagtgccttccaggacaaactgcctcgcgacctgaaaaagccgccagagattcatgagcaacatctggagaagttgtatgcagccaagcacgagactttcagcaagaacttgaaaaatcaggccgacgcgaaaggcgtcgaccttggcggatgcatcgtctttttggttgctatacctgatgtaaatgaattcaagcgaatctttgccgagttgaacacatga

SEQ ID NO: 59499 - DNA, 2628 bp, Burkholderia ubonensis
atgagcacattcgccaccgaaattgcaattgacatccggcgggagccgggcttctggagcgaccttgccgaacttcgagcggtcggcatccggtcgacggtcctgcaggcaaatcaacaggttcgcgtagacgggcccgttcttgccgaaaaggccctgacgcgtctgctcaataccgcgagcgtgttcgcatcagcagctgacgaagagagtaaggagctggctcagcagattgcagtgttcgccagcttggcctcgagcgaggacatcgttcatgaggcaagcatccgcattctttctgacctcggcaatttccccggtctccgtaagctggaaagtgcgcatcctgtcgacctgggcttcgaaacgcacatgcggcgtggattgctccgagagctcaatacggtcgacatggccggcgtgcgtgtcccgctgacggagtaccagctcgacctctggcgaagcttagactcgtccgcggcaaccgctgtctccgcaccgacctcggccggaaagtcgtttgtcgtgctcgagcatctgtgtgagcgcgcgatggccgccgagcggtttgccgcaatctacattgcgccaacacgggcgttactgaccgagatacacggcaagctggaaaagcgcctgtcgagcatctccaagtccatccgtatcacgaccatcccggtacccgacccagagagccggccaaaacagatttacgtgctcacgcaggaacgagcgcagtttcttctgtcgacggtggccgttgccggtctcattgaccttgtcatttccgacgaggcgcagtctctcggtgatgacagccgtggcatgattttgcaggacacgcttgagaagttgcgcgagtcaaatcctgctgctcgcttcctgtttttggcgccgggtgcctccggcctgcagctcattggcgacagcatcggactgcccgacatcaacgtgaaggaaaccaccctgtcgcctgtggtgcaaaaccgtatcagcgtcgggttttcggacgtggacgagcacgtggtgcgtctcgacttggtcacgccgaaaaagcttgagccaattggtacgtaccagttccagcgcgggtttgcgttaggtgacgacacaaagctcgcggcggtcgcgcttgagctgggcgcctcgggccggtccctagtctatgccaccggagcgaagaatgcggaagatttgacggcactgctcgcgctcaatcgccaacccggaacctcgaaggggttatcggatttggcgaaattcatcgaacaacatatacacaagcaatactcccttgcgaattttgttcggcaaggcgtcgctttccactatggaaacatgccgagcctcttgcgcgaagggattgaggctgcgttcaagcgcggcgaattggattatctctgttgcacgacgaccctgtttcaaggggtaaatctccccgcgcggaacgtcttcattgatacaccgactcgcggtaagggcacggcgctcgatgaagctgcgctctggaacttcgctgggcgcgcgggccgtcttggtgaggaagtagtcggcaacgtgttcctagtgaactacgagcactgggagtcgaagccactgaccgagcgcaagccgttcgcaatgaaggcggcgttcaagcagaccgtagaggcggattttgatgcagtggttgagttactgcaggctgccgtggacaaagctcccatccttgagcgcgaccgcgcggctggggaccggattaccgctgcggcaggtctaatcctgtttcgttcatcccagaagacactggatgggttgctgggtcgccgcagcctctcgctgacaactgcgcaaaaagacagccttacggagctagccgaccaggcgcttacgagccttgagctaccggcttcagttttgacaactagctggatgctcgacccagtagccctcgcaggcctcctgcagcggattcgggagcttgtacgtcagcgcgacttcgcgaaagtgatgccttcgaatccttcgggtgacgcgtacacggtgtacaactcaattatccgacggctttataagtatttgggaggcatgaacctcaagggcgacgaagctaaaggaaaccgcgggttcgtcgcccacgtgactgttacagcgctgaagtggatgcgaggcgagccgttgacgcagttggtcgccgaagctgtgaaatacaagaagaaggttgcgcagcaaacgaacaaacggccgctaactcaggcagctatcgatggcgcaattcgggacatgttcacgcttattgagcaaacgattcgattcaaacttgtccagtgggcgaaggcctacgtcgaccttctgaagttcgctcttgcccaggaggggctcgatgagatggtcagtcaggtctacgacttctcattggctcttgaactgggcgtgtcgactcgcactggtcgttcgcttgtcgagttcggcttgtcacgcatcacagccgcggcaatggcatcgctgataacggattcgtcgttaagctcggaccaagttcgtggctggttctcgcagcaaccagcggccctgatacagcaactgtcaccgttggtggtagctgaattgcgtgaacgcggtctcgtttcggtcgaatactcagcttga

SEQ ID NO: 59500 - DNA, 951 bp, Burkholderia ubonensis
ttgtcgaccatcactgcgacggatctcgaatctgctttaacagggaacccggaagcacttgaggttcacctcacactcgtagagagagacgtgcccgttgacgggcattcagtcagaattcactgccactgcctctctgtcgatggaaatggccgagttcaaccacgtcgcttggcggagttcatgcggaacgccattgttgactatgcgattccgcgttcgaaactcgccgacgcaaaggcacgtgacaatagattcaacagcaccgaggcagttaccgaactcgtcgagcgggccaaacgatcgtttaccgatttggcgaacactggcgaaggtggagagatgctgttgttcttattcgctgagcgctttctcaagctgccgcagatcctttgcaaaatggatctcaagacggacgcgcgaatgcactatcatggtgcggatggagtgtatgcaggtgtgactccggaaggcactttgaagctttactggggagaatcaaaaatttatggggatgtgaatgctgccattcgtgcctgcctcagttcgcttgcgccatttctaatcgaacctgaaaacgaggatgccgaacgggagcgcgatctcatgctcctgagcgacaaggctgatcttagcaacccagcagtgaccgatgccctcagaaaatatttcgacaaatcgtcggtaatgtcgaagcgcgttcaatattgcggcgtggcgcttataggttttgatgccaatttttacccaacggacaacgtgaaagcggttgcagaggagattattacggcatcccgtgcggaactcactggttggagcaaaaacatcggcgaacgcctcaaatttgaaaagctcgatcaaatggaaattgagatgttctgcgtccctatgccgtcggcggaaggtttccgcgctgctttcctcaaggcgatgggggtaacagagcaatga

SEQ ID NO: 59501 - DNA, 2601 bp, Burkholderia ubonensis
atgaccccagccgacctgcaatcgtggcttctcaaagacggcgttcgagacgatctcgatgtgattactcgacttaccgtacgcaacgaacttgacaatctacatgtagacgagtctgcaccttccggcgctgcgatcgattggcccagattgttgctcgctggcagcatcctcgcacgatccgatcaaaggggcgatcaagaagcggcgctccgaatcgcgaccgccgcaattactctgacagatcgtcaagcaatcaacgacgcgggggccgtcctcttaggcaagctgtccaactttcgcgcgattacgttagctaccaatcgggatttgataacagccgaccttgacggacgattgggggtcgcgttgcggctcgaagctcagcgccgtgagatggaacgctctattttgatgcagtcgagcggcgcttggctacaagtaaacgaatttcagcaacgattctggacgaatgcgactgaatcgcgctggctttcggcatctgcgcccactgcatctggaaagacgtttctcgtacttcagtggttgatagaccagatgacagcgggtgaaacgcgagtggcagtttacctcgcgccgactcgcgcactggtttctgagatcgaaactaatctcaagaggcttatcggtaacacaggcctgatggaggtgtcctcccttcctctccccgataagtacaaagctgctcgtgctggtggagcgcaagtgatactcgtatttacacaggagcgattgcatctcctcgccaatgtgctcggcgatgtgttctcgattgacctgctcattgtggacgaggctcacaagatcggtgacaaccagcgtggcgtgatattgcaggatgcaatagaacgggccacccgtgctaatccaaagctgaaagcggtgttcatcagcccggcaacccagaacccggaggagttgctcatggacgctcccgatggtgtgcagaccatcgccgtcgatagcgattcctccatggtccttcaaaacctgatagttgcgactcaagtgcctcgaaaatcgaagctttgggcgcttacactccgacagcaggactcgacgcttccagtagggacacttcagcttgagagcacaccagacgggctcaaaaagcgtatcgcattcattgctgcagctgttgggcagagaggtgggacgcttgtctacacgaacggcgctggagaggcagaggaggtcgcggatcttataagtcagcttttgcctgagcttggaagcaccgatttggaactctcacaacttgccgagcttgctcggaagggtgtgcaccgagattttcgccttgcgccgttggtggagaaaggggtggccttccactacggcaacatgccgtcgctgcttcggctagaaattgaacggctgtttcggtcggggaagattcgctgtctggtatgcacttcgactttggtagaaggtgtgaatttgtcctgccgcacaatcgtcgtgcgcgggccacgcaaagggaagggccacccgatggagccgcacgatttctggaacctcgcggggagggcagggcgatggggtgacgagttccaaggcaacatcatctgtattgaccctgacgacacacaagcttggcccagtggtgtccctggccgtgcgcgttatcccattaagcgcgaaagtgatgccgttatcgagctcggcgatggcatggcagactatctccgcgatcgggggggagcggacctatccagcctcgaagacacggacaagttcgagcaggtcggtgcatatctgctcactaccttcatgcgcctcggttccatttcggcagctagccttgcgaagcgtcatgatgttgcgtcgattgctacgcttgaccaagcgctcggtgccttagcgcaacagatcgaaatcgatgttgatttagcaactcggcaccccggggtaagcgcgattggacttcagcggcttcttgaagctttccgctcgtatgccggcgatgtcgagaacttgcttccggccgaggtagcgagtaatgacagttatgatcggtttgttacgattatggggagaataaacaagcacttgtttctcgcgttctccccggaggggcgcattaggctatatgcgttgatagtattcaagtggctgaggggttactcgttggcaaggattatccgcgatagcgttgagtggcaccaagacgcaggaagatcttttaagcttccggacctgatacgtggcacgatggaattggtggagcaagtcgcacggttcaaggctcccaagtacttttctgcgtacatggatgtgctacatctacatcttcgcgagattggtcgtgcagacttgatccacgatggcttggatatcggcacccaacttgagttcggcgtttcatcgacgacgcttctttcactcatggaattaggactgtcccgcatgagcgcagttgcattgtacgagaaaattgccagagacgaccttagtaaagagggatgtatagagtgggttgccgagcgtgtggatcaactccatgccatggacattccagccatcattgtccgcgaagtgcgcgaacgtctcgcgttgcgtggcgacatagccacgtaa

SEQ ID NO: 59502 - DNA, 903 bp, Burkholderia ubonensis
atggattgggtcacaatctatctgacggagcattcggaaccggattccggcggtgtatcaatccggcagttcttcttgacgttgcgcgatgatgagccgatgctgatggagtttgcggccaagctcgcagaccaaataatcgcatactgcctcccgcgaaaacgtctcgctaaggcggtacagaagcatctcaataatccctctgatttggcggcagccatggctgcgttgagacgggaggctcgaaaggcttttcagaaatatcgtgaagagtaccccgcgcggtcgggcgagggcggtgagatgctcgcctatgtgttcgtggagcacttcctccgggcgccgatggcgattgcgaagatgcatgcgaagactaacaccaccatgccggtgttcggtgctgatggcgttcacgtgcgatatttgagcgagtccgacgagctcgaggtcatatatctcgaatctaaggtacatgccacgattggctcggcggctcgagacgcgtcgaaatcaatcgacgaatttcgccaggggcagcaacgaactgtcgagcttcgactggctttggaccttggaaacttcgaccaactcgaaagcgaggcgcaacaggcgctcgaagagtttttggacccctattcgggcgcacgaaccggtaaccgccttgataggcatgcttgcttgctggcatacaacgagccttcgttcgagaaggctgtggggccaaacgcaaaagaatccttgcgcgaggcttttaatgaaggttgcgacggccgtcgcagagttgtgactgatgcttacaaaggtcgccaactgccagaagacaaaattgtgacttttgtgctgggtcttccaagcgtggcggaatttcggagtgaatttgaaaaggcgttgagcaatggctaa

SEQ ID NO: 59503 - DNA, 2505 bp, Burkholderia ubonensis
ttgtgtgcaaatggtattgcggctctcacggagaatcaggacctgcagctcgatgtcgaccggagcgaggacgagacagtgcgactgacgaggctcgtcgagtcggcaagttgttttgcgatggatgacgacgtccgcagccaccaactggcacagacgatagcgctctatggtgtggcatccaatcgcgagcccgcactggcggcggcgtgtggacatatcctcgccgagcttggaaatttcccagcatccagtttcgtccggaaactgcacaatatcgaggaggacagcctgccgcgagttgtgcatgtgcgggacttcgcgcgtcggtaccataacacggtcaagttgccgagcgggagcattccgctcacggattttcagtttgacatctggcatgaccttaccgaaggtctctcaacagcagtctccgcgccaacgtccgcaggcaagtcgtttgtcgtgcgcgaatacgtagtgcagaaaatcaaggagatgccgactgtcagggtcgcgtacatcgtgccgacgcgcgccttgatggccgaagttcaggacaagctagcattatcgctgggccacgacgacaagacgctgcgcataacaagcgtacccatcgaggacatcgagatgcggcctcggcaagtgttcgttgtcactcaggagcgcctgctttcgtatatggacgaagtcccctcggcatgtttcgattttgtcgtcgtcgacgaagctcaacagatgggggacggttcgcgcgggatgattctccaagaatgccttgaacgcatcaacaaggcgaatccaggctgctatcagtatttcatcgcacccatggccagccgggtcgataatcttgcggctgcggtgggccgctcgcagattgcgacccacctgacgcaggattcccccgtggtctccacgaagattgtcgtgaggcctagtgctgactcagtccaagaccttattttagagatggtcgaccgcgggcagcgcattcctgtcggaagacttcatcgtgagtatgggtttggagaccggcgaaccttactggcttcggtctgcatcgagcttggagcggcgggcggttcgctcgtctacgcatctggccaggcggacgccgaagcgatagcgttgcaaattgccgtcgacctgccagagcgagacaccgcggaacttatcgagctggctcggtttatccgctccgacgtccacagggattactcgcttgcgtactgtatccttcgaggtgtcggtttccactatggctcgatgccgacgttgcttcgccaggcattggagaccgcattccataacggaagtctttcctatttggtttgcaccacgacactgttccaaggtgtcaacctacctgcgcgaaacgtattcatcgacaaggtaaagcgtggtcggaacgaccaacttgaagaggatgacgtctggaacttcgttggacgagccgggcgtctgatgcacgacgtggccggtaatgtttttctggtcgactatgacaactggccggccaagttgctcgatgcacctccacaagtgagagtagagccggcattaagtaaaattcttggtccgggcttggcacaactggagcaatatattgaaaagcgcggcgcggtcgagaagggcttccaaaatctccgcgacgtagaggctgccgcaggcttaatgctgaatcgcgtcagaagggggactttccgcgaaacgatttcgcgctgcggcgggcacctcggcgagatagaggtcacaaagctcgagcagcaactggagggggcgcttgcacagctgaatgtgccgtcggatgtactggataaaaattggctcgtctctgcctggcgacttcaggcaatgtacgaattcctcgaggggcaagttgttgccggtacgtggcgggaatactacccgtcgcatcccatgctgcccgagagctacgcgcggtaccagaacatgttcacggccattgaagtgcatcttaacggaaagccgaatgagcgttgggcgcgctatcttaactatcaggcgctcgcgtggatgaagggggcaaccatttcgacgatggtcgacaaagagctcgcccacaacccgccgaagcctcgcaagaatgccgccggggtgtctacttcaaacacggcggtgcgaaaaatcttcgaccttctggaaaaaacgcttcgcttcacctatgtccagttgacccgcgcgtactgtgattgtctcgcagcagcgttgcggaaagccgggctgacaaaggaagcggatagcgtgtattcggttgcgctcgctttggagctaggcgcctgcacgaaaaccatcatctcccttatcgagctcgggctatcgcgtatctccgctcaagcgcttagcaacgtcatcaagggttcagaactgactgcgccccagataaggagctggttgctttcccgtagcgagagggacttgccaatttcacgaattgtcctcgatgaactatcacggctccggctgttgcgaactacatag

SEQ ID NO: 59504 - DNA, 963 bp, Burkholderia ubonensis
atgacgaaggcgaataacagctttgacgcattgctggacccgattcatggcatcgacaacgtcctgaaggaagtgacggcgacgccgccgcttgaacagccacgacttcttttcgttcggatgcaggagcacattccgcaagtcgatgcgcttgcggagctgctggttgaccagctcgtcaactacgtcataccccttcgcaaacggagagaggccttcgcccaaagtaacaactcggcgacgggcggcgatatggccgcggtgtcgcgacttcgccgcgaggccaaacgactcctggtcacatacaaccagaagcaccctggacgctacggcgaagttggcgagctcattgcgtacgttgtcgcggtgcgatacctcggcgcggcgcagctcggcgccaagatggcactcaaaacgtcttccgaaatgccggtgcatggagttgacggattgcacggcagtcaggcagacgacgggtcagttctcttctacctcctggagtcaaagctcatcccgagcgcaaccgatgcgtcgcgggaaatggtcgattcaattgcggagcaccaggccgaccgcggacggatgctgaacgaacttcgccttgttagcgacttgtccaacctggattctttagagggggaagcgcgcgaggcggccaagtcgttcttcaactcctacactggtgacggcagccatctcagacgtcgagacgtccacgtcggcagtctggtattcagcgaaagcgccttccaggacaaattgcctcgcgacctgaaaaagccgccagagattcatgaggagcatctggagaagttgtatgcagccaaacacgacgcgttcagcaagaacctgaagaatcaggccgacgcgaaaggcgttgaccttggcggatgcatcgtctttttggttgctatccctgatgtaaatgaattcaagcgaatctttgccgagttgaacacatga

SEQ ID NO: 59505 - DNA, 2628 bp, Burkholderia ubonensis
atgagcacattcgccaccgaagttgcgattgaaatccggcaggagccgggcttctggagcgaccttgccgaacttcgtgccgtcggcatccggtcgacggtcttgcaggcaaatcaacaggttcgcgttgacgggcccgttcttgcggaaaaggccctgacgcgcctgctcaatactgcgagtgtgttcgcatccgcaacggacgaagagagcaaggaactggctcagcagattgcagtgttcgccagcttggtctcgggcgacgacatcgttcgtgaggcaagcattcgcattctttctgacctcggcaacttccccggtctccgtaagctggagcgggagcatcctgtcgacctcggctttgaaacccacatgcgcagtggattgcttcgagagctcaatacggtcgacatggccggcgcgcgtgtcccgctgacggagtaccagctcgacctctggcggagcttggactcgtccgcggcaaccgctgtctccgcgccgacctcgtctgggaagtctttcgtcgtgctcgagcacttgtctgagcgcgcgattgctgccgagcggttttgcgcaatctacattgcaccgacacgggcgttgctgaccgagatacacggtaagctggaaaagcgcctgtcgagcatttccgattccatccgaatcacgaccatcccggtacccgacccagagagccggccaaagcaaatttacgtgctcacacaggagcgagcacagttccttctgtcgacggtggccgttgccggtcttattgaccttgtcatttccgacgaagcgcagtctctcggtgacgacagccgcggcatgattttgcaggacacgctggagaagttgcgcgagtcaaaccctgctgcacgcttcctgtttttggctccgggggcatccggcctgcaactcattggagacagcatcggactgcctgacatcaccgtgaaggaaacgactctttcgccggtggtgcagaaccgaatcagcgttggcttttccaacctcgacgaacacgtggtgcatctcgacctggtcacgccgaagaggcttgagccaattggaacgtaccagttccagcgtggatttgccttaagtgacgacacgaagctcgcggcggttgcgcttgaactgggcgcgtcgggccggtccctggtctacgccaccggagcgaagaatgcggaagatttgacggcactgctcgcgctcaatcgccaacccggaacttcgaaggggttatcggacctggcgaaattcatcgagcaacatatccacaagcaatactctctagcgacttatgttcgacaaggcgtcgctttccactatggaaacatgccgagcctcttgcgcgaggggattgaggctgcgttcaagcgcggagagctggattacctctgttgcacgacgaccctgtttcaaggggtaaatctccctgcgcggaacgtcttcattgatacaccgactcgcggtaagggcgcggcgctcgatgaagctgcgctctggaacttcgctgggcgcgcgggccgtcttggtgaggaagtagtcggcaacgtgttcctcgtgaactacgagcactgggagtcgaagccactgaccgagcgcaagccgttcgcaatgaaggcggctttcaagcagaccatcgaggcagattttgatgcagtggttgagttactgcaggctgccgtggacaaagctcccatccttgagcgcgaccgcgcggctggggaccggattaccgctgcggcaggtctaatcctgtttcgttcatcccagaagacattggatgggttgctgggacgccgcagcctctcgctgacaactgcgcaaaaagacagccttacggagctagccgaccaggcgcttacgagccttgagctaccggcttcagttttgacaactagctggatgctcgacccagtagcgctcgcaggccttctgcagcggattcgggagcttgtgcgtcagcgcgacttcgcgaaagtgatgccttcgaatccttcgggcgacgcgtacacggtgtacaactcaattatccgacggctttataagtatttgggcgacatgaacctcaagggcgacgaagctaaaggaaaccgcgggttcgtcgcccacgtgactgttacggcgttgaagtggatgcgaggcgaaccgttgacgcagttggtcgccgaagctgtgaaatacaagaagaagattgcgcagcaaacgaacaaacggccgctaactcagacagctatcgatggcgcaattcgggacatgttcacgcttattgagcaaacgattcgattcaaacttgtccagtgggcgaaggcctacgtcgaccttctgaagtacgctcttgcccaagaggggctcgatgagatggtcagtcaggtctacgacttctcattggctcttgaactgggcgtgtcgactcgcactggtcgttcgcttgtcgagttcggcttgtcacgcatcacagccgcagcgatggcatcgctgataacggattcgtcgttaagctcggaccaagttcgtggctggttctcgcagcaaccagcgtccctgatacagcaactgtcaccgttggtggtagctgaattgcgtgaacgtggtctcgtttcggttgaatactcggcttga

SEQ ID NO: 59506 - DNA, 903 bp, Burkholderia ubonensis; identical to SEQ ID NO: 59502

SEQ ID NO: 59507 - DNA, 2505 bp, Burkholderia ubonensis; identical to SEQ ID NO: 59503

SEQ ID NO: 59508 - DNA, 963 bp, Burkholderia ubonensis; identical to SEQ ID NO: 59504

SEQ ID NO: 59509 - DNA, 2628 bp, Burkholderia ubonensis; identical to SEQ ID NO: 59505

SEQ ID NO: 59510 - DNA, 903 bp, Burkholderia ubonensis; identical to SEQ ID NO: 59502

SEQ ID NO: 59511 - DNA, 2505 bp, Burkholderia ubonensis; identical to SEQ ID NO: 59503

SEQ ID NO: 59512 - DNA, 963 bp, Burkholderia ubonensis; identical to SEQ ID NO: 59504

SEQ ID NO: 59513 - DNA, 2628 bp, Burkholderia ubonensis; identical to SEQ ID NO: 59505

SEQ ID NO: 59514 - DNA, 903 bp, Burkholderia ubonensis; identical to SEQ ID NO: 59502

SEQ ID NO: 59515 - DNA, 2505 bp, Burkholderia ubonensis; identical to SEQ ID NO: 59503

SEQ ID NO: 59516 - DNA, 963 bp, Burkholderia ubonensis; identical to SEQ ID NO: 59504

SEQ ID NO: 59517 - DNA, 2628 bp, Burkholderia ubonensis; identical to SEQ ID NO: 59505

SEQ ID NO: 59518 - DNA, 903 bp, Burkholderia ubonensis; identical to SEQ ID NO: 59502

SEQ ID NO: 59519 - DNA, 2505 bp, Burkholderia ubonensis; identical to SEQ ID NO: 59503

SEQ ID NO: 59520 - DNA, 963 bp, Burkholderia ubonensis; identical to SEQ ID NO: 59504

SEQ ID NO: 59521 - DNA, 2628 bp, Burkholderia ubonensis; identical to SEQ ID NO: 59505

SEQ ID NO: 59522 - DNA, 903 bp, Burkholderia ubonensis; identical to SEQ ID NO: 59502

SEQ ID NO: 59523 - DNA, 2505 bp, Burkholderia ubonensis; identical to SEQ ID NO: 59503

SEQ ID NO: 59524 - DNA, 963 bp, Burkholderia ubonensis; identical to SEQ ID NO: 59504

SEQ ID NO: 59525 - DNA, 2628 bp, Burkholderia ubonensis; identical to SEQ ID NO: 59505

SEQ ID NO: 59526 - DNA, 903 bp, Burkholderia ubonensis; identical to SEQ ID NO: 59502

SEQ ID NO: 59527 - DNA, 2505 bp, Burkholderia ubonensis; identical to SEQ ID NO: 59503

SEQ ID NO: 59528 - DNA, 963 bp, Burkholderia ubonensis; identical to SEQ ID NO: 59504

SEQ ID NO: 59529 - DNA, 2628 bp, Burkholderia ubonensis; identical to SEQ ID NO: 59505

SEQ ID NO: 59530 - DNA, 963 bp, Burkholderia ubonensis
atgacgaaggcgaataacagctttggcgcattgctggacccgattcatggcatcgacaacgtcctgaaggaagtgacggcgacgccgccgcttgaacagccacgacttcttttcgttcggatgcaggagcacattccgcaagtcgatgcgcttgcggagctgctagttgaccagctcgtcaactacgtcataccccttcgcaaacggagagaggccttcgcccaaagtaacaactcgtcgacgggcggcgatatggccgcggtgtcgcgacttcgccgcgaggccaaacgactcctggtcacatacaaccagaagcaccccggacgctacggcgaagttggcgagctcattgcgtacgttgtcgcggtgcgatacctcggcgcggcgcagctcggcgccaagatggcactcaagacgtcttccgaaatgccggtgcatggcgttgacggattgcacggcagtcaggcagacgacgggtcagttctcttctacctcctggagtcaaagctcatcccgagcgcaaccgatgcgtcgcgggaaatggtcgattcaattgcggagtaccaggccgaccgcggacggatgctgaacgaacttcgccttgttagcgacttgtccaacctggattctttagagggagaagcgcgcgaggcagccaagtcgttcttcaactcctacactggtgacggcagccatctcaggcgtcgagacgtccacgtcggcagtctggtattcagcgaaagcgccttccaggacaaactgcctcgcgacctgaaaaagccgccagagattcatgaggagcatctggagaagttgtatgcagccaaacacgacgcgttcagcaagaacctgaagaatcaggccgacgcgaaaggcgttgaccttggcggatgcatcgtctttttggttgctatacctgatgtaaatgaattcaagcgaatctttgccgagttgaacacatga

SEQ ID NO: 59531 - DNA, 1326 bp, Burkholderia ubonensis
atgagcacattcgccaccgaagttgcgattgaaatccggcaggagccgggcttctggagcgaccttgccgaacttcgtgccgtcggcatccggtctacggtcctgcaggcaaatcaacaggttcgcgttgacgggcccgttcttgcagaaaaggccctgacgcgcctgctcaatactgcgagtgtgttcgcatccgcaacggacgaagagagcaaggagctggctcagcagattgcagtgttcgccagcttggtctcgggcgacgacatcgttcgtgaggcaagcattcgcattctttctgacctcggcaacttccccggtctccgtaagctggagcgggagcatcctgtcgacctcggctttgaaacccacatgcgcagtggattgcttcgagagctcaattcggtcgacatggccggcgcgcgtgtcccgctgacggagtaccagctcgacctctggcggagcttggactcgtccgcggcaaccgctgtctccgcgccgacctcgtctgggaagtctttcgtcgtgctcgagcacttgtctgagtgcgcgattgctgtcgagcggttttgcgcaatctacattgcaccgacacgcgcgttgctgaccgagatacacggtaagctggaaaagcgcctgtcgagcatttccgattccatccgaatcacgaccatcccggtacccgacccagagagccggccaaagcaaatttacgtgctcacacaggagcgagcacagttccttctgtcgacggtggccgttgccggtctcattgaccttgtcatttccgacgaagcgcagtctctcggtgacgacagccgcggcatgattttgcaggacacgctggagaagttgcgcgagtcaaacccagctgcacgcttcctgtttttggctccgggggcatccggcctgcaactcattggagacagcatcggactgcctgacatcaccgtgaaggaaacgactctttcgccggtggtgcagaaccgaatcagtgttggcttttccaacctcgacgaacacgtggtgcatctcgacctggtcacgccgaagaggcttgagccaattggaacgtaccagttccagcgtggatttgccttaagtgacgacacgaagctcgcggcggttgcgcttgaactgggcgcgtcgggccggtctctggtctacgccaccggagcgaagaatgcggaagatttgacggcactgctcgcgctcaatcgccaacccggaacttcgaaggggttatcggacctggcgaaattcatcgagcaacatatccacaagcaatactctctagtgttccgtcccagaaataactttgcatag

SEQ ID NO: 59532 - DNA, 951 bp, Burkholderia ubonensis
ttgtcgaccatcactgcgacggatctcgaatctgctttaacagggaacccggaagcgcttgaggttcacctcacactcgtagagagagacgtgcccgttgacgggcattcagtcagaattcactgccactgcctttctgtggatggaaatggccgagttcaaccacgtcggttggcggagttcatgcgaaacgccgttgttgactatgcgattccgcgttcgaaactcgccgacgcaaaggcacgagacaacagattcaacagcaccgaggcagttaccgaactcgtcgagcgggccaaacgatcgtttaccgatttggcgaacactggcgaaggtggagagatgttgttgttcttgttagctgagcgctttctcaaactgccgcagattctgtgcaaaatggatctcaagacggacgcgcgaatgcactatcatggtgcggatggggtgtatgcgggtgtgactccggaaggcactttgaagctgtactggggagaatcaaaaatttatggggatgtgaatgctgccattcgtgcctgcctcaattcgcttgcgccatttctaatcgaacctgaaaacgaggacgccgaacgggagcgcgatctcatgctcctgagtgacaaggccgatcttagcaatccagcagtgaccgatgccctcagaaaatatttcgacaaatcgtcggtgatgtcgaagcgcgttcaatattgcggcgtggcgcttataggttttgatgccaatttttacccggcggacaacgtgaaagcggttgctgaggagattattgcggcttcccgcgcggaactcactggttggagcaaaaacatcggcgagcgcctcaaagttgaaaagctcgatcaaatggaaatcgagatgttctgcgtccctatgccgtcggcggaaggtttccgcgctgcgttcctcaaggcaatgggggtaacggagcaatga

SEQ ID NO: 59533 - DNA, 2601 bp, Burkholderia ubonensis
atgaccccagccgatctgcaatcgtggcttctcaaagacggcgttcgagacgatctcgatgtgattactcgacttaccgtacgcaacgaacttgacaatctacatgcagacgagtctgcaccttccggcgctgcgatcgattggcccagattgttgctcgctggtagcatcctcgcacgatccgatcaaaggggcgatcaagaagcggcgctccgaatcgcgaccgccgcgattactctgacagatcgccaggcaatcaacgacgcgggggccgtcctcttaggcaagctgtccaactttcgcgcgattacgctagctaccaatcgggatttgataagagccgaccttgacgggcgattgggcgtcgcgttgcggctcgaagctcagcgccgtgagatggaacgctctatcttgatgcagtcgagcggcgcttggctacaagtaaacgaatttcagcaacgattctggacgaatgcggctgaatcgcgctggctttccgcatctgcgcctactgcatctggaaagacgtttctcgtacttcagtggttgatagaccagatgacagcgggtgaaacgcgagtggcagtttacctcgcgccgactcgcgcactggtttccgagatcgaaactaatctcaagaggcttctcggtaacacaggcctgatggaggtatcttcccttcctctccccgataagtacaaagctgctcgtgctggtggagcgcaagtgattctcgtatttacacaggagcgattgcatctcctcgccaatgtgcttggcgatgtgttttcaattgacctactcattgtggacgaggctcacaagatcggtgacaaccagcgtggcgtgatcttgcaggatgcaatagagcgggccacccgtgctaatccaaagctgaaagcggtgttcatcagcccggcaacccagaacccggaggagttgctcatggacgctcccgatggtgtgcagaccatcgcggtcgatagcgactcctccatggtccttcaaaacctgatagttgcgactcaagtgcctcgaaaatcgaagctttgggcgcttacactccggcagcaggactcgacgcttccagtagggacacttcagcttgcgagcacaccagatgggctcaaaaagcgtctcgcattcattgctgcagctgttgggcagagaggtgggacgctcgtctacacgaacggcgctggagaggcagaagaggttgcggatcttataagtcagcttttacctgagcttggaagcaccgatttggaactctcacaacttgccgagcttgctcggaagggtgtgcaccgagattttcgccttgctcctttggtggagaaaggggtggccttccactacggcaacatgccgtcgctgcttcggctagaaattgaacggctgtttcggtcggggaagattcgttgtctggtatgcacctcgactttggtagaaggtgtgaatttgtcgtgccgcacaatcgtcgtgcgcgggccacgcaaagggaagggccacccgatggagccgcacgatttctggaacctcgcggggagggcagggcgatggggtgacgagttccaaggcaacatcatctgtattgaccctgacgacacacaagcttggcccagtggtgtccctggccgtgcgcgttatcccattaagcgcgaaagtgatgccgttatcgagctcggcgatggcatggcagactatctccgcgatcgggggggagcggacctatccaacctcgaagacacggacaagttcgagcaggtcggtgcatatctgctcactacgttcatgcgcctcggttccatttcggcagctagctttgcgaagcgtcatgatgttgcgtcgattgctacgcttgaccaagcgctcggtgccttggcggaacagatcgaaatcgatgttgatttggcagctcggcaccccggggtaagtgcgattggacttcagcggcttcttgaagctttccgctcgtatgccggcgatgtcgagaacttgcttccggccgaggtagcgagtaatgacagctatgatcggtttgttacgattatggggagaataaacaagcacttgtttctcgcgttctccccggaggggcgcattaggctatatgcgttgatagtattcaagtggctgaggggttactcgttggcaaggattatccgcgatagcgtcgagtggcaccaagacgcaggaaggccttttaagcttccggacctgatacgtggcacgatggaattggtggagcaagtcgcacggttcaaggctcccaagtacttttctgcatacatggatgtgctacatctacatcttcgcgaaattggtcggggagacttgatccacgatggtttggatatcggcacccaacttgagttcggcgtttcatcgacgacgcttctttcactcatggaattgggactgtcccgcatgagcgcagttgcgttgtacgagaaaattgccagagacgaccttagcaaggagggatgtatagagtgggttgccgagcgtgtggatcaactccatgccatggacattccagccatcattgtccgcgaagtgcgcgaacgtctcgcgttgcctggcgacatagctacgtaa

SEQ ID NO: 59534 - DNA, 951 bp, Burkholderia ubonensis; identical to SEQ ID NO: 59532

SEQ ID NO: 59535 - DNA, 2601 bp, Burkholderia ubonensis
atgaccccagccgatctgcaatcgtggcttctcaaagacggcgttcgagacgatctcgatgtgattactcgacttaccgtacgcaacgaacttgacaatctacatgcagacgagtctgcaccttccggcgctgcgatcgattggcccagattgttgctcgctggtagcatcctcgcacgatccgatcaaaggggcgatcaagaagcggcgctccgaatcgcgaccgccgcgattactctgacagatcgccaggcaatcaacgacgcgggggccgtcctcttaggcaagctgtccaactttcgcgcgattacgctagctaccaatcgggatttgataagagccgaccttgacgggcgattgggcgtcgcgttgcggctcgaagctcagcgccgtgagatggaacgctctatcttgatgcagtcgagcggcgcttggctacaagtaaacgaatttcagcaacgattctggacgaatgcggctgaatcgcgctggctttccgcatctgcgcctactgcatctggaaagacgtttctcgtacttcagtggttgatagaccagatgacagcgggtgaaacgcgagtggcagtttacctcgcgccgactcgcgcactggtttccgagatcgaaactaatctcaagaggcttctcggtaacacaggcctgatggaggtatcttcccttcctctccccgataagtacaaagctgctcgtgctggtggagcgcaagtgattctcgtatttacacaggagcgattgcatctcctcgccaatgtgcttggcgatgtgttttcaattgacctactcattgtggacgaggctcacaagatcggtgacaaccagcgtggcgtgatcttgcaggatgcaatagagcgggccacccgtgctaatccaaagctgaaagcggtgttcatcagcccggcaacccagaacccggaggagttgctcatggacgctcccgatggtgtgcagaccatcgcggtcgatagcgactcctccatggtccttcaaaacctgatagttgcgactcaagtgcctcgaaaatcgaagctttgggcgcttacactccggcagcaggactcgacgcttccagtagggacacttcagcttgcgagcacaccagatgggctcaaaaagcgtctcgcattcattgctgcagctgttgggcagagaggtgggacgctcgtctacacgaacggcgctggagaggcagaagaggttgcggatcttataagtcagcttttacctgagcttggaagcaccgatttggaactctcacaacttgccgagcttgctcggaagggtgtgcaccgagattttcgccttgctcctttggtggagaaaggggtggccttccactacggcaacatgccgtcgctgcttcggctagaaattgaacggctgtttcggtcggggaagattcgttgtctggtatgcacctcgactttggtagaaggtgtgaatttgtcgtgccgcacaatcgtcgtgcgcgggccacgcaaagggaagggccacccgatggagccgcacgatttctggaacctcgcggggagggcagggcgatggggtgacgagttccaaggcaacatcatctgtattgaccctgacgacacacaagcttggcccagtggtgtccctggccgtgcgcgttatcccattaagcgcgaaagtgatgccgttatcgagctcggcgatggcatggcagactatctccgcgatcgggggggagcggacctatccaacctcgaagacacggacaagttcgagcaggtcggtgcatatctgctcactacgttcatgcgcctcggttccatttcggcagctagctttgcgaagcgtcatgatgttgcgtcgattgctacgcttgaccaagcgctcggtgccttggcggaacagatcgaaatcgatgttgatttggcagctcggcaccccggggtaagtgcgattggacttcagcggcttcttgaagctttccgctcgtatgccggcgatgtcgagaacttgcttccggccgaggtagcgagtaatgacagctatgatcggtttgttacgattatggggagaataaacaagcacttgtttctcgcgttctccccggaggggcgcattaggctatatgcgttgatagtattcaagtggctgaggggttactcgttggcaaggattatccgcgatagcgtcgagtggcaccaagacgcaggaaggccttttaagcttccggacctgatacgtggcacgatggaattggtggagcaagtcgcacggttcaaggctcccaagtacttttctgcatacatggatgtgctacatctacatcttcgcgaaattggtcggggagacttgattcacgatggtttggatatcggcacccaacttgagttcggcgtttcatcgacgacgcttctttcactcatggaattgggactgtcccgcatgagcgcagttgcgttgtacgagaaaattgccagagacgaccttagcaaggagggatgtatagagtgggttgccgagcgtgtggatcaactccatgccatggacattccagccatcattgtccgcgaagtgcgcgaacgtctcgcgttgcctggcgacatagctacgtaa

SEQ ID NO: 59536 - DNA, 951 bp, Burkholderia ubonensis; identical to SEQ ID NO: 59532

SEQ ID NO: 59537 - DNA, 2601 bp, Burkholderia ubonensis; identical to SEQ ID NO: 59535

SEQ ID NO: 59538 - DNA, 903 bp, Burkholderia ubonensis; identical to SEQ ID NO: 59502

SEQ ID NO: 59539 - DNA, 2505 bp, Burkholderia ubonensis; identical to SEQ ID NO: 59503

SEQ ID NO: 59540 - DNA, 546 bp, Bordetella hinzii 1277
gtgcatggtctcgatggtatccacgccaaggtcgagaacggtgcgctctacgtctttttcctggaatcgaagctgagccagagcgcaaacgcgggcgtcaaggactacgcggaatcggttgctgggtttggaaacaacctcaagcagtatctgctggagtactcgatcgtcagggacctgggcaacttggattcgctcgctggcgaggagcgcgacttggcgcttgcgtgcttcgacgtgatggacagtccggacgctgtcgagcggcgcgaacgctcggtcggtgtaatcgtttacaaggagggccagttcggcaaactcacgccggtacagccgaagcagcccgtcggattccatgagttcgagttcgcgggagcctacgctgcgcaactggatcaccatcagcaagcggcgctgaagcacctttccgccggaaatgtggactgcaataagtgccatgtgtacttcgtagctgtccccgacgtcgacgaactacgcgagcagttctacatacgtatgggttacaagcccgaggtcaagaaatga

SEQ ID NO: 59541 - DNA, 2607 bp, Bordetella hinzii 1277
atgagcacttttgcccgcgacttgtctagacgcctgaccggccatacatccttctggaactatctgggccagctccaaggatccggggccgcacgtacgctggcgaagccaccggccgacgcgccgaccgtagacctccagaatctgctcaagctgctctactgtgcgtcagtcttcgtccagtccgaggaggacgaactgaagcggctcgcacagacaatcgtcttgaacactttgttattacacgaggatggagagctacgcgaacggagcctccacgttttgacggaactgggcaacttcccgggactgtcatatgccgagcgcgcctacggcgcgggtgaccagactttgcttggaaggatgaaccgcaaggtatcgcaagcattgaacactgttcccatcaatggaacgcccgttccgctcaccgactatcagaagcaggtgtgggacagcttgccgacgacccgtgcgcttgccgtctcggcgcctacttcggcaggaaagtcgtatgtcgtcatcgagcatctttgtcggcaggctgagcggcacagacatttcgccgccgtctatatcgcgccgacccgtgcacttctgtcagaggttcatcagaaaatccaacaccggctcaaggaccgagacaacattcggatttcgaccgtgccctcgctcgatccgctgcagcgaacctgccaagtgtttgtactgacgcaggagcggctgcacgtgcttctgtccatctggaacgcggcattcaacatcgtagtcgtggacgaggcccagaatctctcggatcaggcgcgcggaatgatcctgcaggactgtctacagactgtcatgtcgcgaagcagcgcgacacagctcatcatgctcgccccaggtgcctcgggacttccggaggtggctcggtcgatcggcgtgaaagcactgcgtccagagttcactagtctctctccagtgctccagaaccgcatcatcattaacaaggtaaagggccgtccgaatgaaatgcgattgcagttgcttcgcggaccaaaggagcgcgtcgaaatcggcaatttggtgtcctccctcggcctggataacaaggccacgaggctagccgccgtcgcgctcgaactcggcggtggcgaaggctcgctcgtgtatgagaccggtccacggggggctgagaagacagcattacagttgatgaacgaattgcgtcgcagacatccagatccacaagaccagtcgctgctggaattgtcggagttcatcaaggagcacatccatcctgagtaccaactcgcgacaatggtcgtccatggggtcgggtatcactacggccgcatgcccagccttttgcgtgaggcactagagtcgtcgttcaaacaggctcaaacgggtctccggtatctagtctgcacgacaacgctcgcgcagggcatcaacctgccggcgcgcaacgtattcatcgacacgcccaagcgcggacgaggggagagccttgaccctgcgctgctttggaatttcgcaggccgtgcaggccgtctcagtcaggacgtcgtcggcaacgtgtttctgctggactacgacgaatgggacagccggcccatggacgagtttgtcccgttcgaggtaacgtccgctattacgacaacgctctctagccactttgaccgtgtgatggacgccgtgcgaggcgacatgccggttgcgcttccgtggaatgccgaagccacccggattagggcgtgcgccggcctgctgatcgcaaaggccgcggcgggggtgtcaaaccccttcctcgaatccgtccttccgcctgaccggctggactccgcggccggaatcgcggagatcgccgccagtgccgcgcaggaaattgacctgcccgcgtcacttctccaagccaactggaccatcgacccgtacggtctgcggcggctgtacgaccgtctcgtggaaaagattgacgccgatgaactcgataatgtcattccgctgaacccccgcgaggcgcccgaagggctataccagagcatcttcaaccgcatcctgcggacggtcgatcaacagcagggaaacttcggcgcgttggtagccggtcttgcgatccagtggatgaaggggataccctaccccgtgatcctgaagtactgggtgagacgggcacgcatggcggaggagcgcagtgctcagaaggcgggctctaggggctcgcgtccgaagcgacctaggactgtagatgcgctaatccgggaggccttcgacctcatagaggataccgtccgcttccgcttcgtccagctggggaaggcttaccgcgatcttctcgtactagcgctgcaggagaagggcctgcagaaccgtgttgccaaggtctacgactttgcgctcgcactcgaactgggcgtctcgacggagacaggcaccgccttcgtcgaactgggcctgtcgcggatcgccgcatcggcgctggaggatctgtttccgagttccagcatgacggccgtcgaggctcgccaggcgctacgcacgctcgacgtcgtcgcgaacaagctcagtccgattatcgtggccgagctcgacaggctcggtcttcgtgggaccgtggcgacatag

SEQ ID NO: 59542 - DNA, 1635 bp, Acetobacter indonesiensis 5H-1
gtgtctcaaaaactggaaccactgatcgatcctaatgcggcctctgatgccggtggtgtcgcagggcgggtgggttttcgttatcaagatcacgtcggggccggttatgtaatcgacatgctgttcgatggttcactggtccaagtcgagtttgaaacagcggacgacattacgcttcgttggcgcgctgatagcgaagtggttaatgaatacgttcaggtcaagactaccgaaagcaacacgaagtggtcaattaaagagataacagatcgagttgacagtcggtctggatcctctcttatagagaagtctctcaaattagatattaatactggcccagctctatttcgatttgtcacaaaacgagatgtcgggacttctctgcgaccatttcttaatcaccgcgacaagcgtaggctagttaaaaccaagcttgatgcggcgattaaaagcattggtaacaagtggaaaacgataaaatcagcctgtggtcggaccaccaaggactgggcagagaatttatattgggtcgtagcgggcagtgaaattgccacgcagaacagtaacattaatcggatcctacagcttgcggaaagggcgggcgagattccttcacattcggtggcgtgcgaaatctatcatcagctaatgacgttggttcagactgctggtgatgcatcacgcgtgtctgaccccgatgctaaggccatagatcgaggtgaagctcttgcatggtggaaaggaaaggttgatgtaatcaggcagctcaatagagcaggcctccgcgtttaccgagtgtcaactgaggcatttttctcagaccttcatcacatcaacgatgctacaatttgtcgctctcttcgcgcgtatgatgtcgagttcgatgaggggcaatggcggaagtctgagctgattgagtacctgctacggtggctgccggagatatccctaccagccaacgttttgtcagagtttgatatcctacatgcgcgagacctaacccgccgggcggttgcacgaattgagcaaagtagggccatcagtgatgaggagctctttgctgaactcatgcttcatgctgttctgagacactatttcgacagtgaaccggtagcctgcaagatatatgctggcacgggtccaaatcggtcgataactagtgcgcatattgttcctgaggatgctggcgatcagttgtggatcggaaggtctcgaatcacgaccgcggcctctcacggcgcaattctgaaggcggtcatcgctgaacttgaagcagctatctctagcgaattcctcaaagaggaacgcagcctcattatgacactgcgggagccgcggcacatgagagcgacatctctagacaccgtgctttcagcacgtggaaaagtggaagagttgcgtcgttgcctacattttccaattctgatggcttacgacagcaatgtaattcaatctggcttctgtgaggactacctcgtcgatttacggaaggaagttgtcactgaatatgaaagtataaagtcgagaatgacaccagcgttggttaacatccagatccacattttccttataccggttgagaatcctgctggactaatagctgaatttggcaagcatctaagggggaagtcatga

SEQ ID NO: 59543 - DNA, 2145 bp, Acetobacter indonesiensis 5H-1
atgatttttctcgaagatgatcttcgcagcatccttgccaaggatgaaattacctcgacaaatgcggaaatcgctgtcgcaacgattgcatcgtgggtaaatgattttgcgacacatgatttggggcgtgacttcctaatccggctgttagccaagaaacctcagcttcccgaacacctatatgatctgattgatggtctcctgatgacaactggtctgctgccttatgccggaccgccacgaacgctggaagatgcactgtttcgagaagctcatactataccaaacctagacggggatcgggtgtttcactctctccagcttcaagtctttcgtcttataatgaataaaaagaatgtcatcctgagcgcgacaacaagcgtgggtaaaagcgtcatagtcgacgcaattatcgcatccggaagatttaggaagatagtggtgatcgtcccaacgatagcccttatagacgaaacgcgccgccgtatatcaagaatatttggtaacactcattcaataattactcacccaacccaagaatcagatggttctttacctactatttatgtactcacacaagaacgcgttctatctcgaaaagatctcgaaaatgttgatttttttgttgtagatgaattctacaaacttgatttggatcgaccagataatcgcgccgttgaccttaatttagccttccatcgattggcatcgtcgggcgctcaattttatctgattggtccgcatattagcgaggttcgagggattgctagccgttatcaacacgtgttcctaccctcaacattttctactgtagcgctagacatcgaatatttcaatcttagtcagacctcagatgatcgagagacgaggctgctagaactcgtgcgggacttgaaaactccaacgctaatctattgccagtctcctccaaagtgtggcgaggtagctcggattttgatcaaatctgagtatttctctcatgtctcggagacagaaatcgccgttgattggctactccaggagtttcctgaagaatggatagtcatcgaagcattacagcgcggaataggaattcatcatggcaatgttccacgagctctgcagcactacatggttcgctgcttcgaagagggaagcatacgctttcttgtgtgcacatcaacgattatcgaaggtgtaaatacggtagcggagaacgtcattgtctatgatcgacgtcttaatacgaccaccctcgattcatttacattccgcaatattgctggacgtgccgggcgaatgggacagtggttcattggcaaggtttacgttctagaatcgccaatcgaggatgaacaaaaagctgtcattcttccaattgaggatcaagacacgaatacccctatgtcgctgctgctagatcttcccgatagtgatctgagtgatctgtctttttctcggatcgaagatgcgctgcgaacatcgactctgtcactcgcaacacttcgtgcaaatagatacatatctattgatgcccaacgtcagattgctgaccgtattcggtcagatcttgtgtatcttaagattcttaattggcgtggaatgccaagcgcacgagaactcacggcagcctgtgagcttatctatgaatatatagatgaaggccgctcgctgaaggcctatcaaatttttggtggggaacaactgtctgcacgtctcttcaacttgtccagtgcgactttaaggagtttcatcgctgaccgcgtcgcacgacgacgtgatgatcagagtgtgagcgacgcggttgagttaaccctacgcttcatgagatcctacgtagttcacaccttcccccgtcaactgagtgctatcaataccatttataaggatgttgcgctggcccttggtttcgatgttgctgcagactattcattttacacggcgcggacggagaacctttttcttgagagtggcctttttgcgttggatgaatatggggtacccccgcaaacggcatatcgtttgggtagccgataccctggaatggacagtctcaataaagcactcgatctaattgcttccattgatttggaacaagaaaaactgcatccgtttgaacaagacctgcttcacgaattacagaggtctctggctcgtagagactga

SEQ ID NO: 59544 - DNA, 1260 bp, Lactobacillus frumenti DSM 13145
atgagtggggaagacagtagttctattgaagcttctgtgagggttgtgctagataaatacactggaaaatgggaaaaaccgtactcgactcagaatttgaaacggctttattaccacgggcttaataagaatgcggccaaaaaaattaaagatgcgggtatagatgaggactcgctaaaaaaatatatcgatgatttttctgatgaagataaggaaatcatcgcaaaaaaaatacaggctactaatgataacgatccattaatgaaaattgaccaaatttcctattattgcgttaattggctaagtaggcttgttgaagaagcaataaatgggcaacaaaaaaagcccactatttctagtgggtataatgaaaaaaatgatattagtttaactatcagagaagaaggacgtatttttgaaaaaacatttaattctataaaagaaattaagcttcctctacaaaacagtagaatgcgtgcctttgctttattaccagttaaaggtatttactctcataaaaacttaattagccttctacgtaaaaatttagcaagatatgtattttctagaaagaatagaaatgaatgtgatgacttggaggaactaactgctgaggcaacaacagagctgcgagagtttgttaggaaatgtaatccacagatattattgggagaactgttagtctatatttttttagagcactgtgaaaaggcgcctaagatctttacaagggctgaattcttccataaatatggggctattgataaaaaaagtgtatttctcagggaaaatgatgaaggttggcaactgatagttgggacacccaatttgagtacaacattagatcaaacaattttggccactctagaagaatgcgaaaagctaaaaaatcaaaatgaatttggcgatgggccgtatgtggctgaaaaattgcagtctagtttcctagaggatagctattatccagaacagattaagaaaattgagtcaataatgtttccgtcgttaaggcgaaaaagcttaggggtacaggtagattcatatggtatttttttaggttatcaagttgatgactttggaaatgatgaggaaagagtaaaacaactattaatccaagatgctgatagagcagtaaaaatgatcaataattttgtcactaatcatgatatgcaaagacactctatttatgtgtacttattaccctttaagaatccaaaatacgaaagtagtcggattattgataagttagtggggtgttga

SEQ ID NO: 59545 - DNA, 2622 bp, Lactobacillus frumenti DSM 13145
atgaccaaaaaaataaaattaagggatgcaattgcaagtgatttaaagaaaaatcagtacttaaaacaattgcatcaggagctattaagagcctatggattacagctctttggtaaagaattccagtttaagaataagtcaatacaagatttgttggtatttgctgatattatgtcgaaaactgaagatgtcaaattagagcaattatctttagaaatagtgatctgccttaataagatgtacccacagagccactcaatcaaattctataagaatcaaattttcgaagaattgggtaattattcgcggccagaattggataatgaatataagccaggtaaatctgtcgattcaataattgatagtgttcagcgagtaaatgaaatgtctttgcgacattttcctacaggtaagggttatttcattggagatcagaaaggactatataattctatttcaaagcagctaaatagtttctctgccccaacttcgatgggtaaatcatttttaatgaaaatgtttattgaagaaaaagtaagttctggagaacagcttaattttgtttatttagttcctacaaaagcacttatcaccgaagttaccaacgacttatgtaataaattaggtgataaccttaaggacaaccactatcggattgtcaaccattttgattctattgggacagggagttcattaactaattttatttatgtactgacccctgaaagatttgttaacttgctattaaataatttttctggggctattgattatctgtttattgatgaggcacagaatatatccaaagacgatagtcgcagtacagtttattatcggatttttgatctattaaggcagcaagaatatgcaccgaagattacctttgcgtcaccattgattgaaaatccagaaatctttgagacattggcatctttagaaaaggggaatgtcttaaaggctaatctgtcaccagtttgtcagatatattttttgttaaatgaaaaagggacgtttgaagtgtatgattcaatgacgtctgaatttttaagaataaatgatttgagctcctattcgaacgtttattatttaaaaaatttactctacactttacccggtcagaaacttatttatagaaatagcgtaaataatgcagtaaatggcgctaattactggtatcaagaatgtgatgatccaattgacaaaaagcttttaaaattaagtgattacatctcaaaacaagttcatcccgattattgtcttagtactatagtcaagaagggaattgcttatcattttggtaaggttcctgatgaggttcgtaataagatagaaatggcatttaatgatggcaaaattaatacacttttttgtacatctactttaatggaaggtgttaatcttccagctgacaatatgattattgataatagaagaattggtaacagggttatgaggccattccagtttaagaatttaaccggaagagttggcagacttagtagttctatgctaggtaatattttcataactgccacgtcggatatggactacaagaaatttaaagagcttattagatcaaaagatatgactgctgttctgtctattactgatttaatggatacagacattttaaaagcagtagacgttgatcttaaagcaggagatttaactctacaaaatgttagagaaaagattaagaatcagcataagtttgatactgttagaaaattttcgcttatttatttaaataatctacagaatagtagagaaggtgtcgtgacacgacattttagtaatgtgattagtagcgaagatcgtgaagcgattagaaaaacgtttaaagaaaaatatgaagatcacactgaagtcgatgttaatttttctattgatcagtccatgaaattagaaaagtacgtaaaaaaatcggatattatttatccacatattcttgacgaaaacggtgacttaaatactaatagtacttatgaattcctgaagcaattaggtgatatttataattggtcaaagtatgagcctgaattagcaatctctgaagaaaataacattattttacaggattatgcagagttacttctcagatggatgaatggtgattctttgcatcaattatgtgatttcatgattcaataccgaaaaaaagaactaaactttctagatcgctctcaaaaaataagagataattatggaaagatcaactggtgtggtaggcgtaacaatagtttagatgaatctaacttatctatctatgttttactgaaagcacttgatactattcaatttaaattcggtaattattttttaaaatttagtcatgcattaatgaaagaacgacaaattgataagctagaaaatgactggtatcaatatgtggagtatggtgctactgataaaaatgtgatttggctagaacaacttggatatgctcgaaacagtgcctttgcaatagcgaatagtgaattaaatattatattgacagatgaattgggtaataaagttctgctaagaaataggattgaagaattaaaaagacccgaaataatcgatgaaacagagcgcataataaagaattatcctgatttgtttataagtgaggcagactaa

SEQ ID NO: 59546 - DNA, 921 bp, endosymbiont of Bathymodiolus septemdierum str. Myojin knoll
gtggtgaattttgaaaaactaatagatacttcctttgttgatataagtataaatccagcattgctatctattgataaaaaacatgttcttagtttgatcaatgattttgaaagtggaaaatggaggtacgacaaattccagaattatatttgggacaacattgcggaaacagccttatctaaaaatgaaagagataagctcatagaaaagcccaactccgcattaatagagtctgcgaagaagttacgcataaccagtaatgacactattggcaagggtagtgagttatgtgaaatattgctttatggcattatgaaagactattactctgccctgcctatcgttcctaaaattttttacaaacaaaactctcaagacaacgcaaaaggtgcggatagtgttcatatagttattgaagataagggtaatgacttttctttgtggtttggtgaggctaaattttataaaaatattgatggcgctattgatagcgcaataggatctgttgataattttcttagaaacgacaatcaaataaaaaaagaaaatagtattattacatcggtttctgatattgataatatgggtttatctagtgagttagtggagaaaataaaatctactttaagtggtgaaaattcacttgacaacataaagccaaaaatcaatattccaattttattattgcatgagtgtgatattacaaagaaagaaaacgaacttacagaagagtataaaaataaaatgatttcttctcataagaaaaaagccaataaatattttaaaaaacaagttaaggtaatgtctaatatttttaaatattcaaatattaagtttcatttaatattatttccaattcctaataaaagagatattgtcgatagatttattagtaatgcagagtattatcgggcaccataa

SEQ ID NO: 59547 - DNA, 2073 bp, endosymbiont of Bathymodiolus septemdierum str. Myojin knoll
atggatattttcaaaaattgccaaaatattaatagtctaatttcttctaatgaagaagaggcaagagaaaaattgattaaattattagattcttgtaattgggatataagccaagatgatgacgcaattgaatacagtcatattattaataaccttattagacaacttggactttatccgtatttgaatatatcaacatcttcttggcaagaaaattttatttacgaggctttcaaaacagatgttggtgacgacaaaccaataacactacatagagagcaatcatcagtgctaaaagatttgatagatggtaaaaatttggcaattattgcccccactagttttgggaaaagttttattattgatgcttttatagcgttaaaacagcctaaaaatattgtaattattgttccaacaatcgcattaacagatgaaacaagaagaaggctacaaaagaaattttcagatcgatataaaattattaccacttcggaaatagagttaggtgaaaaaaatattttcatatttccgcaagaaagagccctgcattatgtagataaaatagcagagttagatatgcttgtaattgatgagttttacaaggctagtgctgattttgataaacaaagatctacttcgctgttgaatgctattttaaaacttggggaaaagtccaagcaaaagtattttttagcaccaaatatttcagagattcaatcaaatccttttacagaaggtatggaaatagagcgtattgatttcaatactgttttcttgaatattcatgacacctataaaaccattaaaaacaatgacaaaaaatcggaattattaaaaatactaaacaatacaagagacaaaactttaatttatgctggaacattcactcaaatagccaagctatcagaaatagtaagagatgattttcctgatttagatagtgatttacttaataatttttcacaatgggttgctacaaactactctcaagattgggagctggttaatttaattaaaaaaggaacgggggtacacaacggtagattgcatcgctcattaagccagattcaaattaaattatttgataaggatgatggacttaaaaatataatttcaacatcttccattattgaaggagttaatacatcagcaaaaaatataattttttttggtagaaaaaacggaaattcaaatttaaaatattttgactataaaaatttaattggtcgtggcggacgaatgtttaagcattttattggtgaaatatatttacttgaaaagccaccagaagaagagggggtgcaattgtctttagaagtgccaaaagaattaattgatgaaaataatatagaaaactttactaataataattttcaaaaagaggctattgatttttatggaaaaatgaacaataaattaggagggttggtttataaaaaattgcgtagacagtctttttttgaagaaaataactggactttaatagaagcgttagcagatgatatgatagaaaaacctggcgaatggaatgggcttaactatttgaatactgtcaatacgggacactgggaaaggcatttgtacaaagtattaaaaatagcaaaaagagggccatctggtgagttagtaaaatttattaaaatatctcctttaggctgggataagagtattccaaatttgattaacaaacttgatatttcagttaataaattttttgaattagaaaaaaaagtcagcttcagtgtttcaaatatatttaattgtgtcaatattttacagaaagaaatattaccaaatttaaatacagatatatctccatttactacaaaactttcttatgcattcttaccaaaaaatgtatatttacttgaagaatacggcttacctagaatgatttctaaaaaaatacatttatctggattgataaacttagaaaataacgatagaaatttacattctattatcgataattttaacgaagtaacttgtgaaaaaattattcaacaggttgaaagtttggatgattttgacaaatatattctaaaatatttttttaatggcatcaaaaggtaa

SEQ ID NO: 59548 - DNA, 924 bp, Bradyrhizobium sp. ORS 285
atgcccggcctctcatttgaaatcctcgttgatgacgccctagccgaagtaacctccgcttcccaactcgcgacggcagtcaacaagagagttctcagcctaatcaacgactttgaagacggcgagtggcgctacccaaagtttcagagctacctttgggacaatattgctcacaccgctctatcgcaaagagagcgatccgcattgatcgaccacagtcatagtagccttatagccgccgcccagaacctccgactaactgacaaggacgaattgggccagggcagtgagatagccgaagtatttttgtacggattgatgcaccatcgctttggcgcactacccgttgttccaaagatcttctacaagcaaaacgttcaagacaacgcaaaaggcgcagacagcgtccatatcgtggtgaatggggacgacttcacgctttggttcggcgaggccaaattctacaactccatcgtcgatgcgagattagacgcgattgtaacctctgtactcaactcgctatcgacggataaactcaaaaaagagaacgcaataatcacaagcgtctccgacctagatggcctgccaatcgccgcgaacgttcgcgaaaagataaaggccgccttgagcaatcgcgagtccatcgattatctaaagcccaaaattcacatcccaattcttctgctgcacgaatgcacaacaaccaaagagacaaaggaattatcagagcagtacaaatcaaagataattgcatatcataaagaccgagcggcttcgtatttctcaaagcaaattgcaaagtctggagcaattaacaaatacgacaaaattaactttcatattattctcttcccagttccgagcaaaaaaacaatcgttgacgcatttgtgcacgcagtagctttctataaagggcaaacatag

SEQ ID NO: 59549 - DNA, 2115 bp, Bradyrhizobium sp. ORS 285
gtggaaattttcgagacttgccaggaaatcaacgggctgttgtccgggcgaaacgagatggcggctcgaaacctactgattcgactgctagccgaactagaacgaactaagacgccctaccctcagcttgtgaatcatatgatacgggaaactgggctgtttccttatcttcagcttgccagcgcatcttgggaccagaaatacgtccaccatgcgtttgaggtcgacgtcggccgtcggctcgcaactctacaccgagaacaatcaacagttcttgccaggctactaaatggaaagagtatcgctgtaagcgctccaacaagcttcggcaagagcttcataatagacgcgttcatagcagcaaagcgccccgacacggccgtcattatagtcccaaccatcgctttaatggacgaaacccgaaggcggctctttaagaagttctccgaacattacaccattataaccgcaccagacacgcgtcttggcacaaagaacattctgatcttccctccagagcgcgcatttggatatctgaagttactcgaacaaattgacctcctcgtagtagacgaattctacaaggctagccaagagcacgaccccgcccgagcccctgcacttatcaaagccattctaaagctctccaagaatgccactcaacgatactaccttgcccccaatataaaaacactaaaggataatttgttcacgcgcgacatggagttcatcgaactcttggacttcaatacagtgtacctaaatattcaggagccatataaagagatcagaggagacatagagaaaaaaggcgcaaagctaatagaattaatgtctaccgataagcagaagtcgttgatatatgcgggaacctattctgagatcagaaagatctctgaacttgttgtaaagcacctccctctcgtagaccggatatacacgtcatctttcgcaaaatggctcagaataaactatcaatccgactggacactggccgacctagttgaacgggccgtcggagttcacaacggcagcatgcacagatgccttagtcaacttcagataaagctatttgaatacgaagatggcttcgacagtataatatcgacttcatcaatcatcgagggggtaaacacttctgcgcagaatgtagttgtatggcgaagcagagcaggaagcaccaatctaaaagattttacatataagaacatcatcgggcgcggcggcaggatgttcaagtacttcgtcggcaacatctacctgctagacgcgccaccgcgacccgaggacaaccagcttgacattgtatttccggacgagatgctcggaaccttggacgaagtcggcgacgtagaacaactgacggaccatcaactcgaacgcattatcgagtacaagacccaaatggcctccatcattggggagcaggaattcgctagacttaagcgcgagaatgttttgcaagacagcgacgcagattttctactgcggctagcgaaaaacatgaaggaagcccccgaagagtggaggggatttggctatctcaactcttcaaatcctgctgattgggacacaatgttattcaaagtaattggcctcaaaccggctggatgggattccgcatggtctaatgtggtgaatgtcgctaaagcaattgctcacaactggcgccgagacctacctcaaatcatttcgtctttgaagaacaacggaataagcatcgaagaattcttcaagctagaacgcacgattacattcaagctgaccgctcttcttagcgacaccaatgagctgcacaaaataatcattgacccctctgtagatatttcaggatttatagggcgtatgagtcgggcatttctgccgagcgcagtttaccacctagaggagtacggccttccacgaatgatctcgaagaagatccatgcggccggcttaatcgattttgaggaacccgagatggatctcagcaatacgctcgaacgcttcaaggctctggggagagaaaccgtgttagccgtaaaatctctcggtcccttcgatcgctatgtagtacgcttcttctttgacgggataactcctgacgagccgcaactggcagaggtctctgaatag

SEQ ID NO: 59550 - DNA, 1662 bp, Marinomonas mediterranea MMB-1
atgccgaaatcagatagtggtggtattggtgcaaaaaaaggctttttgtatcaagattatgttgcagccctgtacacactcaaaatgttggatgacaaaagtattgaaaaagtccgatgcgaagtatcagatgatatagacatcatttatgacgatcacattgaatatatccaagtaaaaacaactaaagcagacaagtcttggcaactcagtgaatttaccaaggcatcatataaaacaaccaaaactaagacgggaagggagagaaaaaagtacaataatgattctattctacataaatcattagactgcgatgcagaacatttaaatgggttatttcgtattgttactcctcgtgatgtttacgcaaatttatcatatcttaaaatacctctgagtgaacgttctggaaatccacgaagagagggtatcctcaagtcattacgaggagccttaagggactatgaatccccgaatggaaacaatgtggagtattggttggaccatgctacttggcaagttattgcaactgatgaacaaatcaaactagctgcatttaaaataataacgactgtggcttatgaatattgtggagtgcatttaaaccctacgcgtgacccacagcgaattctgaatgatttgcttacaaatctaattgaaaaaagtgcgacttctattgtattacggagtgaagatcaaaaaacttatactaggaaagactttatttattggtttaagaaagaggtcgaacactacggcaatcaagcccgaaatcagttaaaagtatataccaccgatagtgctaagctaactgcaattctagatacttttttaactgatgataacctatacaggcttgaaggtgataaatcctgcaggggaattaaaggaaaataccaccgaaaaaaatacaagtatgagagcatttcaaaggggatcacaaagtggttgccagaggtattacttcgccctagtgaaattgcagatcaatcccctgaaaaattagaagataaaattcaaagttatgcctcaaaaaaagcacatattctatctacgttagacagcttaatagccaacgttttgcttcactcaactatacgtacaagctacaactctcaacctataccagcacatctttatatcgacgatgaaaaaggcacttcttttgacaatgtacatattctactcaatgatcatgagccagactcattaatcatgggctttagtcaccttatcgaaggagatgtagacggttcactagagaaaattgtagaaaaattcgatgaattactcgagtctgatgcatttagctccagaaatgaaaaaatattagaggataaagaagatagttacttacttaagcatgatattgatgaaattttgcaatcaaatacatctttagatgagcacatatcgcgctttcggtttgctttctttttaggttatgagacagatatactaaaatgcaaccaatgtgaaatgtctaaagagtatttggtagaactagaagcggaagttatttctcactttcaaaaattaattgactctctcattgaaaaagatgatttttttgaagacctacatatatacgtatacctatgcccaatcccttctattgacacgcttaaatcctcagtaagaaaagtggtagaggaagtatga

SEQ ID NO: 59551 - DNA, 2154 bp, Marinomonas mediterranea MMB-1
atgtttaacctaaacccaaaagtatgtattgaaaatgttcgaaacgacgttttaagcccatttatgtacttaaaacatgctaataagtgtttatcgtctcctagtcataaatcaattggcagggagtacgtaattcgcgcacttgatgaatttgataaatttgaaagtcaaagtcaactactaaaaaacctagttcgaaaagcaggcttgtacccgtacttaataaagtttttttcttcaactaaagcacctgatatagagctgctgttacaactgtaccaaagtgaaattagtccagatttcgtttttcactcgatgcaggcaaagatttacaaccttttaatttccggaaagaatgtagttctgagtgcgcccacaagcatggggaaaagcgctattgtcgattcattgattgcaagcaatagatttaatcggttagtcgtcgtcgtaccaaccattgcattaatagatgaaacaaggcgacgcattcaaaaaaattttggtagaaagttccaagttatccatcatggttcacaggaacgtcgaaaagatagaactatttatgttctaacacaagaacgtgtcaatgagagagaggacttacagaatatagacctctttgttgtagatgagttctataaactagcatttagccatgaagataaatcaagagcgatttctttgaatattgctctaagtaaattgctatccgtctctaaacaattttacatgattggcccatatatagacgctatgcgtgggatggatgctttacaaaaagaatatgtatttgttccatctgatttcaatactgttgcattaaatgttaatgaatacaacatcaaaccaaatgatgttgcttctaagaatagtcagttaaaaaaaatattagaaacctataaaggacagactatcatctattgcagatcgcaaaagtcgattgatcaggttgtcacttcaatggattatatttgttttgataaaccttctcgtgaaattaaaaattattaccgttggttaaaaaggttttatggtagtaactggtgctactctagagccttaaaacttggtatcggggttcatcacggagctttgccacgtgcattacagcaaaaaactgtagacctttttaataaaaataaaatcaagtacttagtatgtacatcgacattaatagaaggtgtaaatacggtagctgaaaatgtagtaatttatgataatagaagagctaacgcatctattgatgactttactcataagaatatcgcaggtcgagcaggccgaatgaatcagcatctgataggtaacgtattctgtttggaatcccttccaagcagagagtttcaatccaacgtagttgaattacctctcgggcatcagaatgtcgaaacacctttgaacctgcttgctggaattcaaagcgagcatctgactgatatgagccgtgaatctctttctcaatttgatatgtcttccaaagtgccattagatttaattagaaagcacgcttcttacaatgttcttagcatcgaatctgcatacagtttcattactgagctttccattgaagatatgaaacttctatcgaaaaagaaaactccagatagttataacttagaactgcttgttcaatttataaaaattttagaagcgggagctcttcaaaagttaagcttacacttcgaagataatgacgagttaaaaaatagaatggcttggtatatttatgccgagagccataccgattatattcgtgaaaggctgaaatatatatacagtcaccgagaaggggttcagcgagtttctgagggtactgactgggagtttaaaatagctcgaaacatttttaaacactcaatccctagagccctaatgcttttacaagatttgctaaattaccaatttgaccaattggatattaaggttgtgactgattttgggtacttggttcatatatttgaaaactcacacttgcctacagcattctcagctttagaggaaatggggatagcaatagaaactctggaaaagctagttactgaacgcgtgagttcatcaagtattgaaacattgtctagatatattcgcatgtactacaaaaaatccgaaaggttacatgctatcgataggatgtttattcgacttgcattgtaa

SEQ ID NO: 59552 - DNA, 1626 bp, Pseudomonas psychrophila
atggtgcgtatttctagcccaaccaataaaggtgggcctgcggcgaggcagggcttcaaatatcaagaccacgtggctgttagcttcatcgtcaagatgcttcgcgacagtagctacgttcagattgagtgcgagacagccgacgatatcgttgcagtcttccaacattcgggactgaccgtctttgaatatatccaagtcaaaaccacggaaggtaaccacaagtggaactggaaagaggtgacggatcttgagaacaagaaggcagagtcttccctgttccaaaaatcgcttaaatgtgacatccgatctggcacggctcgcttccggatagtaacaaaacgagacgtagcaaccatcttggaaggcttcaaaactgagctggtaaagcggcttctgcctgatacaaccacggagcgaagcgaagcactgcttaagaaattcaaaacattctgttcccctcagaaccgagacttctcgtactgggcggagaatttcgtgtggcaggtttacggcgaagtgaatgccctagaagcgatcaacatcaacacgcttgctaagttagctgagcagtatggcaatcgacccaactacaaccagcttaaagatatttacgaggaactcttggagttggctgataaggcggcgaccgccgatgtgaagacggatgcagcgaccaagatcataagccgcgaaactacattaaccctcattcggcagcgacttgacgaagctgatgcggtttcaacctcaacctccaagccttacaagactcgacctgaaccatttttggtacagtttcacgccagcaccgaagagggattactccgctcagttaccgcttacgacgttcgctattcgttgaaaaaatggcgatgtgaggacatggcgaagcatctgatcgaatggttgccagagttctcgttgaaggccagtgaaatcgtgaacatccaggcacacaacgctgaagcaataatcgcacggtcgatcagcgcttttagcaacaatgagcttccacgagaaaggctcgttgcagagctcatacttcatgcaattctacgcagccgagcaaacagcgagcctatcgcctgcaaagttttctacaaggctgctggcaagctttcagaattcggcaatgcccatatcatccaagagcaaggacaaaacgaccaactttggcttggccttgcgcggctaatcgaagctggcagtatggacactacgcttgagcagatttgcgaagtgttggacgccaccatctctgaagccgttctgtccgctgagcgcgagatagtcattgcgctccgcgaaccccaccatcacctgccaaaagctgaaacatttaatcaggcgttacatcgaaactcgcctgtggacgacatgcttaacgtcctttgcttccctatcttattgacctacgacagcgcatcgctcgcctctggctggctggccgactacgtcaatcacctcgaaaatgagattatcgaccactacagcgctctaaggacgcagttacccgagaacattcaacaggtaaaggttgccgtctttcttgtacctatggagagcgttgcgaagctaatcaaagccttcaacgaacgctgtaaaaaacttgaagatttatag

SEQ ID NO: 59553 - DNA, 2145 bp, Pseudomonas psychrophila
atgaattacgagaaagccaaagaaaatctggttcagcttaacgaaagcagtctattgagtatcgatctgctaatagccatcaacacttttgtcagcagaagtgaccctgagtgggaaggacgtgacctagtcatccgggcgctcgacaaatttgatctgttcggcccagttgagcaatcactgttgctcaatatggtgcgtgcagttggcctctttccctatataacccctcacctgagcaatatggatctgtccgaccggctagcatacgaggctcatcgggtagagggactagaacagggtatggtattccatcacctgcaggctcacgtgttcagcttaataatgcagggccgaaacgtggtgcttagcgcgtccacaagtgttggtaaaagcctcgtaatcgatgctgttctggctcagcaccgcttcaaaaaagtcgttgtgatcgttccaaccattgcgttaatcgatgaaacccgtcgccgtcttgttaaacgattcaaacagttcaacctgatcacccatcccagccaagaagcagaagcaggaacgaccaacgtctaccttctgactcaagaaagggtcatccaacgcaaagacctagatgatgtcgaattcttcgttgtcgatgagttttacaaaatagacttgggtagcgacaaggacgggagtacccgcgctgttgatctgagcttggcgtttcacaagcttgccaagacccgtgctcaattttatatgctcggccctcacattcagcagattactggattggatagctacgagtataattttatcccgtccgacttcagtacggtcgcagtcgacattcagaacttcaacctaggtatgcgctcggaggagagaaaagaaacactgctgaaactcgtcaagaccctagcctcccccacgctaatctactgccaagcgccagcgagcgccaatcgtgtcgctcaatacttgatcgaagaggcagggctttccgaggtgccggaaacaaaggaaatagccgcctggatctcgaagcattatcacccggagtggaacgtcgccaaggctattgccttaggcatcggcattcaccatggaggcgtccctcgcgcgctgcagcaatacatcgtaaagctgttcaacgaaggggttatcaagcgcatcatttgcacgtcaacgatgatcgagggggttaatacttcggcagagaacgtcatcatctatgatcgccgattaaagacgtcaaattttgactacttcacatttaagaacatttctggccgtgctggtcgaatgaataaatatttcatcggcaaggtttttatgctcgaggagccccctgtggagcggggtcttaccgttgagtaccccatcggccaccaggacgaaagctctccaatgggccttctcatgcaactggagaatgaatacctcactgacgtctcgcgcggacggcttcaagaggcgtattcgaatcctgtcatatcaccagcaaccctgattgagaaccggcatataccaatcgatcgacaactcgaggttgccaacgcgatcattcgggagctggctgaaagcaggcagttgctcacttggaagggcattccagagaaatcgagtcagcttaattacctctgcgatctcgtttatagcttggaaggcggcaatttgatggagtacggaatttcttcaagctcccatctggcatggcacatcaatgagatcagaacaaagaaagatttgccctcctatctccaggatgccgtactgaatcgtagggaggatgacacaccgagcgaagcgataaatctgcgattgaaattcctcaggaacatggtctgctttaggttgccacgggacataatggcgattagcaaaatacaggacgatgtattcacccaaagaaatatcgagccaggagacttcagctttttcgcagagcagctggagaaccttttccttgacccgttactcacggccctggatgagtacggcattcctacgcaggtctcaacccagatcaaaggcatgattctaccgtctgataacctgaacgatttgcttcgaaagctccgggcgttggccccccaagtagaacggttaaggttgagcaacttcgagaaaagcttgatgagttgggccatcgcagagatgtaa

SEQ ID NO: 59554 - DNA, 492 bp, Helicobacter canadensis MIT 98-5491
ctaggagaatcaaagttgtatgataaattagatgatgctataagaaatgctataaaatctctaaaagatcatctaagtgacgacgaaattatgcgtaatgaagctagaataattgcaaatccatatgaattagataatttagcaaaacatcataacattcaggcaagcacattggcaaatttcaagcaaattattaatgagaatattaatcttgatgaattaaaaagcattttacatgtgccaatatctattatttataattgtgattatacaaaaagcattgaggaaattaccgacgattataaaacaacaataaaaaactttcataaagaaaaggggaataaaatatcagaggaaatcaaaaaactttcaaataaaattacatatatcgatagaataaaatttcacataattttatttcctgttcctgataaggaggaaattattagcaaaataaataaaatctttgagagttacagaaatgccgactaa

SEQ ID NO: 59555 - DNA, 2115 bp, Helicobacter canadensis MIT 98-5491
atgccgactaatgaacaaattggtgaaaaaatttttgataaatgtgtagaaatatatgaaattctaaataatgataaagaagcagaagctaaagaaaagcttttgtatttgcttgatgaaattcaagataaagctttatatccacctatactaaatcatcttatcagacaatttgggttatatccctatatgaatcaagatacttcaattttagaagacaaattcttactagaatgttttaaggcaaatatcggagaagacgaaccaaaagttttacatagagaacaatcaagagttttaaaaagacttttaagtaatgaaagtcttattctttctgctccaacaagttttggcaaaagctttattatcgatgctctaatagctatgagaaaaccaaaaaatatattaatcattgttcctacaatttctttattggatgaagctagaagaagacttataaggaagtttcataactataaaataattacaaccacacaacaaattaatcttgaaagcaataatatctttgtcttttctccagaaagagcaattgaatatttttcatttatgagcaaagaaaacgtaaggcttgatttttttatcgttgatgagttttataaaatatcaaaagaatacgaaaatgaaagatttgctccactgcaaaatgctattttgaaatatatgaatatttctaatcaaagatattatatttgtcccaatatagataagataaaaaatgaaaatagtattctttccaaaggaatggaatttgaatgccttaacttcaacactgtttttattcatattaataaatgttatgaggataaggattttaaaaaggaagaaaaaattatagaaatagtaaaaaaagatgaaaaaactctagtttatacccaaagtcaaagcaatataaagaaagtttgcaaaatcttggtggaaaatgccattatagaaaattcaaatgctttattggaaaattttgcaaaatggttatcaaaacattatggagaacactaccttaatgatacattaaaaattggtgtgggaatacatcatggaagacttcataggtgtctatcacaattacaagtaagattatttgatgaaaaagatttactaaaaaccattgtttctacatcttctttaatagaaggggttaatattccagcaaaaaatcttattttatgggataaaagaaatggaacaaaaaatataaattattttacttataaaaacattataggtagaagcggaagaatgtttaaatattttataggcgaagtatatttatttgaatccccaaatgaagatagcaatgaagaaaagatattagatgtagaaatcaaatcagaatctttatctattaatgatgagataaataatgaaattcccgataatatacaagcagaagttaaaaacaatcaacgagagataataaacttaataggagtggataaattcaatttactcaaaaaagaagcttcattaaaaaatgatttaaaagttattaaaaaaataattcaaatattgcagtataaagattttgattgtggcatttttacgcatttatttaatgacgaacctgacaaatggtatatcttatctaaaattgcgtctataggagaatttcattgtaaaaatattggcgatataaatactgttgagttggtaaaaaaattatcacaaaattggactaagccgctaccagaacttattgaatatatgggtattgatttggatgatttttttaaacttgaaaatcatgtagcttttaaggtcgcatcgatattttctgatatcaacactttacaaaagatactctaccccgaaaaagcgatagatatttcaagttttgttacaaaactttcaaatgcctttttgccatctgtggtttatacccttgaagagtttggactccctagaatcgtttctaaaaaacttcataaatgtggattcattgattttgaaaataaggatttagcaatagaacaagtattagataaatttaaagaatgtacagctgatgctataatcaataaattaaaagaaaaaaatctttacgatgattttgaagattatatattaaattatttttatgaaggtttagggcaataa

SEQ ID NO: 59556 - DNA, 957 bp, Paenibacillus dendritiformis C454
atgacaagtatatttggttctgagaatgtagtcatcgagcaaattacggaatcagcactaaaagcttatcttgttggttttgatattgatgacaaaggtcagaaaaaatatagatggagaaacctggtgaatatattacaagatgcccttactgaatttgcttttgggtaccatgagggtgaggttgtccatatctcacaatctacgagattattgtatgaagcggctagtgcagtgtataaaatcgatgagtttgttgaaaccaaaaagatttatgtcgatgaagatagctttatagaagatgatgacatagataaaaagtacctaaaaagaggagagttcggcgaattaatacttcacctactcttacgtgattaccataatactataccgttattatcaaaaatttattttaaggattcatatggtgtccctgtacatggttttgatgctgtacacattgaaccaaactcaaagacgctgtggttgggtgagtcgaagttatacattgatggaaagaaaggcattgaagcacttattggtgacataaaagaacactttaaacatgattatttgaatcaggagtttactttaattagcaaaaaaataaaacatatgtctggagatacaattcccgaaaaacaacattggataaatttaatggatcgaaataaggctttaaaagaggtattttcctcaataaatattccattaatttgcacctactcaagtaatttgttttatgagtacgatgatgaaacggatcctgaattcatagcattttttgaggatgaaataaggaatttagtgaatcattttaacctaaaaaatgaccatcccttaaaatcacatttaaatatcatcctcttattatttccagttcagtgcaaaaatacattaatacggcggatgcataaaaaattatatactttacaggggatatacgatgatgaatag

SEQ ID NO: 59557 - DNA, 2211 bp, Paenibacillus dendritiformis C454
atgaatagttctcaagtagatgatgtagtcgaaaactttagaatggcaaatcatattagcgacaatgcaatgtttgaatatactcaactgtgctccaaattgcttaggcattctgaaacagagtaccttggccgtaaaattattattaatgttcttgataattggaaaaaaataagcccgcaatttcatgaaatatggactgatttaatagaatcggcaggcttctatccataccttgagaaaaataaagaacaatttcctttaagtagcactgcttcactaattagaaaaaaactacatgtatcctctaatttacaaggtaaaatccttcatgaggagcagtatcttctaaaaaaacttcttcaaaacgaaaagaatttaattgtaagtgccccaacaagtttcggtaaaagcctactaattgaggaagtcgttgcaagtttaaagtacaataatattgttgtgattcagcctactctagctctattggatgagactcgaaagaaactaaataagtataaagacaattacaaaattatagtacgaacaactcaagagccttcaagaaacaagagaaatttatttttgctaacggctgaaagggttatggagtataagggcctacccaaaatagatttttttattattgatgagttttataaattaagtgcaaagagggacgatgagaggtctgatgttctaaataatgctgctaatttgcttttgaataaacatggaagcaagttttatttgctgggtccaaacattaataaaatctcggatggatttgcaaaggagtataatgcagaattttactctactaattattctttagtagataatatttcaatagatgtatatttggagcatcaaggtttatttggaagtagaggggcaaaaagagaatataaggagaaggtactattcgaattgctcgatgatttgaagtttgaacaatcattaatatattgttcatcaccacatcgtgccagacaacttgcaaaaaaatatttagattatttagttactaaaactcagcataaattgcaagaacagtttgaattaattgcatgggttaaagaaaatattagtgataagtggagtcttatttcatgtctagaatatggtattgcttttcacgatggtgcacttcaaaaacatatatcctcaacactcgttgattatttcaataacaataaaatatcatacttgttttgcacatcaaccataattgagggtgtaaatacaagtgcaaagaacgtaatttattttgatgagtctatcgggaaaaataaagaaatagatttttttgactacagcaacataaagggtcgctcgggaagaatgatgattcattatgtcggtaagatttacaattttaataaacctcctaaaaagcaagatattgttatagatattccgttttatgaacaaaaccctatttcagatgaagtattaatacaactagatgactcggatgttaaagataaaaatagcgaacaatacaaaagattgaagagtattccttttgaagaaagagagttgtttaagaaaactggtgaaatagttgttgggcagcaaaaaatagtagaaattctaaaaagagatattagagagcaatatagtaatattgggtggagcagatatccaaattatgagcagttgcaatatgtcttaactctaggttggaacaatttgataagagaaaatgaaaatgtaaagccgatgaccttaaaaaaacttgttaaggtaacaaatgattatagtagacttcaaaatattatgatattggttgagaataatatgaagttctacaagacacagaagagttatgaaaagtatgatgaggatgaactgtttgacttcgctatcagagaagcatttcagacattaagacattggtttcaatataaagtaccaaaatggttgaatgttgtaaatgaattgcaaaaatatgtgtgcacacaatataatatgagggcaggggattattcattctatgccagtcaaatcgaaaatgattttatcagagagaaccttgctatattagtggagtatggggttcctaattcagcagtaaaaaaattagaatcaatgattccatcaaatattggtgaggatgaagtattaaatactatcagacgtaataagtattatgaattaagttcattgattgactatgaaaaaggtaaaattatggaattattctag

SEQ ID NO: 59558 - DNA, 882 bp, Serratia symbiotica
atggatgactcaataaaaataagaatcaacaaccaaatctttaagtacgaagttagactaccttcatctggtgttgatgataacacatttacactggatttttttgatggcaagtatcgtcaagatgacttggttggattgatccgagatgttgtcccttacttctccttaacagcagatgaaatgaaagagctagatccctctgagatcaataaacgcagctttactcgaatctctgatgccagacgacaggcaaagggagattatggagagttaatgctatttttaattctgagtattttctatgatgttccgaaattcgtaactaaagcaagattacgttctacaacgagagagcagataaagggatttgattgcgctcacttctctgtggataatggtaaaattactctttggctaggcgaggcaaaatttcaccaatccatcagcggagctatttcatcagcactaagttcattgtctgagcatcttaacgacaaaagcagaatagcaagtgaactgaaattattaggtggtgaaatagagataaataagacacttgataaaaatctttacctgcaattgaaaagctatgttgatggtggaaaaagtttagattcagtcgaaattgccgtccctgtattattgacttacgatagtaaatatatacttcagtgctgtggtaaaggtaaggttataattaatcaagaccctttcctctcagagctgggaactgaactgactaaacattttcaagatatatataaaaaaagctggccaaaagactccaacatcaaattagtgtttttcctttttccttttgaagatattgcaaagttgaaagaaaagattgagttagttgaacaggcgatgaagttttaa

SEQ ID NO: 59559 - DNA, 1623 bp, Serratia symbiotica
atgagtattgaaaattttgaaatggaattagataaaatcaaaaactcaaaaggcaagaaaatcaatctagttgaagattttctaatcgatatttaccgtcgccttgatcatactgagaattataattcgtgtattaaagctatatgccatattgcaaaccttcaattagaagatgctatggttcaacaacttttacacgattgcatcattaaatcgagaatatttttatatgatgatatgttagggaatagtgatatcggttataacccaaacatttctccacaagacatatttttgaaatctttctatacaagttcggtgtctgaaacaacgctaactaaaccgcaaaaagagatttttaatgagtttcagaagagtaggcgattgattgtaagcgctccaacttcatttgggaaaactagaataattagagagatcatttctcacaatgaatacaaaatggttgttatcattatgccgacagtatcattactttctgaagcatataatgatttcaagcatgaattctctgatagatatatagtgtcaaagtcatctaaaataaaaatagaggaaaaaaaagaatatatccttattcttacgccagaaagaatgagtgttttaatgcaagataatattaatttgagagtcgacttttttgtaatggatgagatttataaggctgactataaactaaatgatgatagatataaagtatttgctgatatattatatagactaacaaaaagcggtgcagacttatacttgattggtccatacattagcgcattcagtgaaaagttcagaagtaagtttaatatcaagatgctgaggtatgatattgaaatagtccaaaaagattattatgaacttgatgttgtttctcggagaggttcacaccttatcgagggggttgatattcgtgtcgttggtgataaatataaaaatcttaaaaaaataacaggaaatgataaaattgatggtaaatatttgatatatagatatcaaaaacaatatgtggaaagtttagctgaaaaattcataaaagatttagatgataaagaatacaacagaagcctcgtcgactatctggagaataatatctctaagagttggtcattggttcagtgcttaaagaaaggtgttgcctttcatcatggtgcaatgccgaggcatatacaagatctacttatagatgagtttaataaaaataacgaagaaggcgttaagtatttgttttgcactacatcgctaactgaaggtgtaaactccactgccaaaaatgtcgttctttatgatctaaaaattggagatggaaatcaaataaaaagtctcgatagaagaaatattgaaggtcgggctggccgatttatgcaacactttcttggtagagttttttatttcgaccatgttgatagggatattaatgaggatactaatgtagaaatagagtttgtggatagtagtaatccagatatagaaacattggttcagttaagcgagagtgatataagtgaagattctcgaaataaatataaaagttttgttgagtatctaagtgggttaaatatcccactcaatcttttaaaggatataagttcgtcgatatcagcggtcagataa

SEQ ID NO: 59560 - DNA, 1647 bp, Vibrio albensis VL426
atgagacaaacggctatggaacaatctgatagtggcggtgtagctgcgcttaaaggttttacatatcagaacttagcagctgcttattatgttctcagcatgcttcgagataaatcactaacatccgtacgctgcgaagttgtagatgatattgacttggtgtatgacaacagaatcgaatacgtccaagttaaaacaactgacggtgattctaaatggtgtatcaaagattttgctgaagcaactactaaaaccgttcatcctacggggcgtcaaagggtcaatcagactatcagtcaggaagactcaattctgcataaatccatcctatgcgataaagatagattaccaggcttcttcaggatgttgacccctagagaggtcaccgattctcttcgatacctcaaggtcccattaagtgatcgaggtgagaaaatccaagaaagaggaccgctgttaaagagactttcagctgccgtcaatcgtcatcgcaaaaaacttccgccgttttcctccccgaacggaaatgacactgaatactggctagatcatgcagagtggaccgttattccaaatcgagaacaccttgaactactttgcacaaagctcatccttcaatcagcccaccagaagggtatttacttaagtgctaatgaagaccctgaacgtattcttgcttcgttgctaaaaaacgtaacggataaaggtgcaacttcgagggtacttaagaccatagcgaataagtcttaccaccgaaaggatttcatcccatggtttaatgctgaaattgagcattatgccaacctcagtagtagccatgtaaaagtttatgcaactagcagcaaagagctcaaggctattctttcatcgtttttccatcatcaaaagatgtatgagcttgtgggtgacaaatcatgtactggccttcatgggcagtatcatcagagaaaatacagctataacatcattgctaaaaacctacaccaatggctacctgaagttctgttactgccaggggaaattgcagacaatacccctgaaaaccttacgagaaagttttctacctttacagagaggtacagtaaaaacgccgattttatcagcaatctagtttcgaaggctttattacattcaactataagaactgagtataaatcgcaaccaatagctgcagtgttacacatcgatgatgcccaaaagacctgctttgataatgtccatattgttttagaagaccatgctccagataagctaatattggggtttagcgagcttattggtactgatattgaagagtcactagttgacattgtcactaactttgatgacctaatcgaatcggaagctttttcaagccagaaagaaaaaatactaactgcaaaagatgatagctacctacttgaacacgatatagacgagatacttgcaccaaataagtctttagatgacagcctagacaggctacggtttgtatttttcattgggtatgagtcaaaccaccttaagtgcgataagaaagaaatggaggaaacttacttagataagttggaaggtgaagccatccatcaatttaaggctctcatcgatcaactgatcttaaaaaatgatttctgtaaagacttacacattgaagtctacctgtattag

SEQ ID NO: 59561 - DNA, 2157 bp, Vibrio albensis VL426
atggactctagcctaaaccctgaactctgccttaacgatgttcaaaacgaacagttaagtgctttctcttatctaaaaaaagctagcgactgtttatcatctccacagttgaatgctctgggtcgagagtttttaattcgagcattagatcagttgccactgctcgaagggcagagtgtattactacaaaatttacttcgaaaggccgggttgttcccatacatcaaaaaatactttcctactctatcacccgaacaagaacttgtacttgatatatacagaagcaactttgacgacaatttcattttccattcaatgcaagctaaagtatttaggctgctaacgtctggacaaaacgttgtattgagcgctccaacaagtatgggtaaaagtgccatcgttgatgctctgattgcagagcggaagttcagcaaaattgtcatcgtagttccaacaatcgctcttatcgatgaaactaggcgacggattcagaaaaaatttcgccacgaatttcaaatcatccatcacggatctcagctaaaacgtaaaggtaaagtcatttatatactgacccaagaacgggtcaatgagagagatgacttgcgcaatatagacctattcattattgatgagttctataagttagcttacagcaacgatgagccatcgcgggttattgccctaaacattgcactaagtaaactgctcactatctccaaacaattctatatgatcgggccatatatcgatgcttttcgaggaatggagaacttaaggcgtgactacacattcatcccttccgagtttaataccgtagctctaaacgttcacaaatatgatattgctgcaaatgacatcgaaagcaagaatgaacagctggctaagattgtcgaaaagcaccaagagcaaactatcatttactgtaaatctgcgacttcaatatcacaggttgctcagttccttggcaccttagaaaacgtgaaagacagaaattttgggccacttaggaaatatcataaatggttagtcagtaactatggtcaggattggacctgctccaaggcattaaccaacggcattggcatacatcatggtgccctcccccgtgctattcaacaaaagtctatcgatttgtttaattcaaagcagataaagtatttgctttgtacctcgaccatgattgaaggcgtaaatacagtggcaaaaaatattgtgatttatgacaatcgcaaaggtacaccatcaatcgatagcttcacacacaagaacatctcaggtcgtgctgggcgaatgaaccaataccttgttggtaacgttttctgccttgaatctattccggacaaagaggcccaagtagtagagcttcccttaggtcagcagaacgataattcgccaattaacttgttggcaggaattcaaccagatcatctatctgaccaaagcaaccaaagtcttaatcaatttgtgaaattgtccgatgtacctatagagctcattcgtaatcattcgtcttataaggtagaagtcatttccgacgcatacgaattaataacagaactatccgtttctgatatggaactaatagccacaatgactaaaccaagaaaatatcatctaggattgctttcccgctttatcaaaacagttgagagtggtgcactcagtaaagttggcctccacttctacgacaatgatgaccttcaaaaccgattgagttggtatatttatgctgacaaccatagctcatatataaaagaccggattcgctatatctacagatcacgagaggatgagaagtcacgatctgaaactaccgataaagaactgaaaattgcgagaaacatttttaaacacgctgtaactagagcattgctcctcttagaagatctcctcaactatgagatgatgaacttaaacattccacataaagcagatctaggttatctagttcatttgtttgaaaacagccacttgccaccgtcattctcagcattagaagaaatggggattcctatagaaactttagaaaagctcactactgaacgattaagcgaagcaaacattgacgttctcactaggtatttacggatgtaccataaacatttcattaagctaagttcgatagatcatagttttatcaagcaagccgtttattag

SEQ ID NO: 59562 - DNA, 1647 bp, Vibrio albensis; identical to SEQ ID NO: 59560

SEQ ID NO: 59563 - DNA, 2157 bp, Vibrio albensis
atggactctagcctaaaccctgaactctgccttaacgatgttcaaaacgaacagttaagtgctttctcttatctaaaaaaagctagcgactgtttatcatctccacagttgaatgctctgggtcgagagtttttaattcgagcattagatcagttgccactgttcgaagggcagagtgtattactacaaaatttacttcgaaaggccgggttgttcccatacatcaaaaaatactttcctactctatcacccgaacaagaacttgtacttgatatatacagaagcaactttgacgacaatttcattttccattcaatgcaagctaaagtatttaggctgctaacgtctggacaaaacgttgtattgagcgctccaacaagtatgggtaaaagtgccatcgttgatgctctgattgcagagcggaagttcagcaaaattgtcatcgtagttccaacaatcgctcttatcgatgaaactaggcgacggattcagaaaaaatttcgccacgaatttcaaatcatccatcacggatctcagctaaaacgtaaaggtaaagtcatttatatactgacccaagaacgggtcaatgagagagatgacttgcgcaatatagacctattcattattgatgagttctataagttagcttacagcaacgatgagccatcgcgggttattgccctaaacattgcactaagtaaactgctcactatctccaaacaattctatatgatcgggccatatatcgatgcttttcgaggaatggagaacttaaggcgtgactacacattcatcccttccgagtttaataccgtagctctaaacgttcacaaatatgatattgctgcaaatgacatcgaaagcaagaatgaacagctggctaagattgtcgaaaagcaccaagagcaaactatcatttactgtaaatctgcgacttcaatatcacaggttgctcagttccttggcaccttagaaaacgtgaaagacagaaattttgggccacttaggaaatatcataaatggttagtcagtaactatggtcaggattggacctgctccaaggcattaaccaacggcattggcatacatcatggtgccctcccccgtgctattcaacaaaagtctatcgatttgtttaattcaaagcagataaagtatttgctttgtacctcgaccatgattgaaggcgtaaatacagtggcaaaaaatattgtgatttatgacaatcgcaaaggtacaccatcaatcgatagcttcacacacaagaacatctcaggtcgtgctgggcgaatgaaccaataccttgttggtaacgttttctgccttgaatctattccggacaaagaggcccaagtagtagagcttcccttaggtcagcagaacgataattcgccaattaacttgttggcaggaattcaaccagatcatctatctgaccaaagcaaccaaagtcttaatcaatttgtgaaattgtccgatgtacctatagagctcattcgtaatcattcgtcttataaggtagaagtcatttccgacgcatacgaattaataacagaactatccgtttctgatatggaactaatagccacaatgactaaaccaagaaaatatcatctaggattgctttcccgctttatcaaaacagttgagagtggtgcactcagtaaagttggcctccacttctacgacaatgatgaccttcaaaaccgattgagttggtatatttatgctgacaaccatagctcatatataaaagaccggattcgctatatctacagatcacgagaggatgagaagtcacgatctgaaactaccgataaagaactgaaaattgcgagaaacatttttaaacacgctgtaactagagcattgctcctcttagaagatctcctcaactatgagatgatgaacttaaacattccacataaagcagatctaggttatctagttcatttgtttgaaaacagccacttgccaccgtcattctcagcattagaagaaatggggattcctatagaaactttagaaaagctcactactgaacgattaagcgaagcaaacattgacgttctcactaggtatttacggatgtaccataaacatttcattaagctaagttcgatagatcatagttttatcaagcaagccgtttattag

SEQ ID NO: 59564 - DNA, 666 bp, Lactobacillus iners LactinV 09V1-c
ttgatagtaagtcaaaattcaaaagatgtaattaagatatttcaaaatataaaagatatacctataagtacaaatttagatgacgggaatttaaatattttcatgtgtccaataaacgctaggaaatttgattataatcaaatttccttagtattagtagattctgtaattgattatgctatatccaagaaaaatataacaaaatatcaaaataagcctggaagattatcacaaatggcacgtaaaaagtttaaagaatgcttgaataatacaggtgaattaggtgagttgcttttatattgttttttagagggtcatttaaatgcccctaaaattttaacaaaaatggaaatgaaaacatctaatagtttatatgttaatggttcagatggtgtacatcttttaaataatggtgatggaacatacaaacttatatttggagaatctaaactatataaaaaattgtcagatgccttaaatgctgcttttaattccataaacgattttattaatgaaaacaatcctaatggaaaaaataaaacaggtataaattatgaaaaagatttaatatcatcaaatatagaaaattgtgaaataagtgatgaagataaagatgtacttgaattattaatttatcctactaaaaatgagaaaaaatacgcatag

SEQ ID NO: 59565 - DNA, 1050 bp, Lactobacillus iners LactinV 09V1-c
atgaacaattttattgattatatttcatcaaaagcttatacagatgattatctgataaatttaatatataatttggagaaaaatttttgtaataagctactagatcaagattataaaatagatctttctaataaagaaaagtgtgatttaatgagatttgcagatatattatgcaggtcatcaaaagatgaacataaaaatttatcattaaggatagtaagtcttgtatatgagtttgaagaacttttagaagataaatttataaaattaagtattataaatgttttaactaaattaggtaactttccttctataaatttaatgggaattaaagacgagaatacagggatagatgagattgatttggacttaatagttaaaagagtatataatgagtctccaattaaagaaattttcactgatgaacaacttaaaatttttaatgaattacagactaataatcattttagtttttctggaagtacatcttttggtaaatcatttattttcgaagcatttactaaatatttaatagatgaacacaatcaatctgataatatagcatttattgttcctacaaaagcactaataaatcaagtttcttataaaattagaaaactagtaaaatcatatagctataaggttataaattcaccagaaatacctaaagtaataaaaaggcaagatggtaaatatatctttgtttttacgccagaaaggttaattacttactttttagatacaactaatcccaaaatagattatttatttgtagatgaagcacataagttattgagtgtaaaagatactagaacgccattaatgtatcatgctttagttatggcaaaaagaaaaagcataaacatattttttgcatctccaaatattcctaatccttcagtttttttagaattagtaaataatactccagatgaaagtcatgcagttaaagttgaatcagtatctcaaaatagattttttgttaattgccatacagactctagttatatgattagtgattatggaaaagatatcttatttccaaattaa

SEQ ID NO: 59566 - DNA, 915 bp, Lactobacillus iners SPIN 2503V10-D
ttgatagtaagtcaaaattcaaaagatgtaattaagatatttcaaaatataaaagatatacctataagtacaaatttagatgacgggaatttaaatattttcatgtgtccaataaacgctaggaaatttgattataatcaaatttccttagtattagtagattctgtaattgattatgctatatccaagaaaaatataacaaaatatcaaaataagcctggaagattatcacaaatggcacgtaaaaagtttaaagaatgcttgaataatacaggtgaattaggtgagttgcttttatattgttttttagagggtcatttaaatgcccctaaaattttaacaaaaatggaaatgaaaacatctaatagtttatatgttaatggttcagatggtgtacatcttttaaataatggtgatggaacatacaaacttatatttggagaatctaaactatataaaaaattgtcagatgccttaaatgctgcttttaattccataaacgattttattaatgaaaacaatcctaatggaaaaaataaaacaggtataaattatgaaaaagatttaatatcatcaaatatagaaaattgtgaaataagtgatgaagataaagatgtacttgaattattaatttatcctactaaaaatgagaaaaaaatacgcatagatgatgctttttctatttttataggttatgagacagatatatcaaatgagactagaagttgtacaagtaataatttttctgatgaagttaagaaaaagatacttttagatttagacaaatatgaaaacaagatatatgaaaaaattaaagataataatttattaggtcatactttttttgtctatattattccgtttactgatatagacattacaagacgtaaaattttaaaggatattttaacatga

SEQ ID NO: 59567 - DNA, 1428 bp, Lactobacillus iners SPIN 2503V10-D
atgaacaattttattgattatatttcatcaaaagcttatacagatgattatctgataaatttaatatataatttggagaaaaatttttgtaataagctactagatcaagattataaaatagatctttctaataaagaaaagtgtgatttaatgagatttgcagatatattatgcaggtcatcaaaagatgaacataaaaatttatcattaaggatagtaagtcttgtatatgagtttgaagaacttttagaagataaatttataaaattaagtattataaatgttttaactaaattaggtaactttccttctataaatttaatgggaattaaagacgagaatacagggatagatgagattgatttggacttaatagttaaaagagtatataatgagtctccaattaaagaaattttcactgatgaacaacttaaaatttttaatgaattacagactaataatcattttagtttttctggaagtacatcttttggtaaatcatttattttcgaagcatttactaaatatttaatagatgaacacaatcaatctgataatatagcatttattgttcctacaaaagcactaataaatcaagtttcttataaaattagaaaactagtaaaatcatatagctataaggttataaattcaccagaaatacctaaagtaataaaaaggcaagatggtaaatatatctttgtttttacgccagaaaggttaattacttactttttagatacaactaatcccaaaatagattatttatttgtagatgaagcacataagttattgagtgtaaaagatactagaacgccattaatgtatcatgctttagttatggcaaaaagaaaaagcataaacatattttttgcatctccaaatattcctaatccttcagtttttttagaattagtaaataatactccagatgaaagtcatgcagttaaagttgaatcagtatctcaaaatagattttttgttaattgccatacagactctagttatatgattagtgattatggaaaagatatcttatttccaaaattaaatttttctggaaatattattacagatctaggcattattttaaatactttttctaatggaagacaaagtatagtttattgcaatactatagaaaaaacgatattaacagcatttgaatttgcaaaaactttggaagaagtaagagatgaaaatatagataaactaattgatataataaatgaaaaagttcatgagcagtactatcttagatattgcttgaaaaaaggaattgcatatcattttggaggaattcctgaagaaataaaaataaaagttgaagagctatataaattaggagttataaaaaccatttttttgtacttcaactctattagagggagtaaatttgcccgcaaaaaacatttttattttaagtga

SEQ ID NO: 59568 - DNA, 915 bp, Lactobacillus iners UPII 143-D; identical to SEQ ID NO: 59566

SEQ ID NO: 59569 - DNA, 2577 bp, Lactobacillus iners UPII 143-D
atgaacaattttattgattatatttcatcaaaagcttatacagatgattatctgataaatttaatatataatttggagaaaaatttttgtaataagctactagatcaagattataaaatagatctttctaataaagaaaagtgtgatttaatgagatttgcagatatattatgcaggtcatcaaaagatgaacataaaaatttatcattaaggatagtaagtcttgtatatgagtttgaagaacttttagaagataaatttataaaattaagtattataaatgttttaactaaattaggtaactttccttctataaatttaatgggaattaaagacgagaatacagggatagatgagattgatttggacttaatagttaaaagagtatataatgagtctccaattaaagaaattttcactgatgaacaacttaaaatttttaatgaattacagactaataatcattttagtttttctggaagtacatcttttggtaaatcatttattttcgaagcatttactaaatatttaatagatgaacacaatcaatctgataatatagcatttattgttcctacaaaagcactaataaatcaagtttcttataaaattagaaaactagtaaaatcatatagctataaggttataaattcaccagaaatacctaaagtaataaaaaggcaagatggtaaatatatctttgtttttacgccagaaaggttaattacttactttttagatacaactaatcccaaaatagattatttatttgtagatgaagcacataagttattgagtgtaaaagatactagaacgccattaatgtatcatgctttagttatggcaaaaagaaaaagcataaacatattttttgcatctccaaatattcctaatccttcagtttttttagaattagtaaataatactccagatgaaagtcatgcagttaaagttgaatcagtatctcaaaatagattttttgttaattgccatacagactctagttatatgattagtgattatggaaaagatatcttatttccaaaattaaatttttctggaaatattattacagatctaggcattattttaaatactttttctaatggaagacaaagtatagtttattgcaatactatagaaaaaacgatattaacagcatttgaatttgcaaaaactttggaagaagtaagagatgaaaatatagataaactaattgatataataaatgaaaaagttcatgagcagtactatcttagatattgcttgaaaaaaggaattgcatatcattttggaggaattcctgaagaaataaaaataaaagttgaagagctatataaattaggagttataaaaaccattttttgtacttcaactctattagagggagtaaatttgcccgcaaaaaacatttttattttaagtgaaaaaattggattatcaaatatgaatgaggtcgatttttggaatttagctggcagagcaggtagattaagcaaagatttagctggaaatatattttgtgttaatctttataatcaacaaggttattggaatgatgatagcaaaattaaaattcttagagataaaaatatagaggaaacaaaacctattatactcagaaagaataataagaatttgtataagaatattgccaattattatacgaggaatgattataccaacaaaaaattgtctgaagatgataaaaagatcatagaaatgtacggcaatattttactataccatgatacagtgaatagcgattctgttttgaaagatagatttatagattcaggaaataattctttagatgttttaaaaaaaataagaaatgagaattctgtacctggaaatattttagccaaaagtattgatatagatatagggattcaaaatagggtctttaaaggtaataaagagaagttgcccacagaaactacttatgaaggatgctataaagttttaagattattatgtgaagaatatgattggcttagtactgagagtaaggggaattaccctatgatacgaagcaaagagcaattatcttattatgccacattaatggaggggtggataaattctaaaccattaaaatatttaattcaaaaaacgattagttattattataattctggagaaagtaaagagataagtttacgtaaagatggaaagatatattatatgaagtttgataaaaacaatgctcttcatattaatacgcttattaataatttaattaaaaatttagaaaataatataaaatataagattaagacctatgttagcaattatcaatcaatattacgctcatgtggagtagatcttgaatgtgattgggaagaatatattgattatggaactacaaatccacaaataatcgatatacaaaatttagggttttcaagaacaatggcaatatttttaatggataaatattataatttattcattagaaatgatataggtgagattatagatattgatgatgaaaaattaagaacgtctatagacaagaaaaaatatgatgaagaatataaagaactaaatattctattcgaatgggaaaagtaa

SEQ ID NO: 59570 - DNA, 921 bp, Lactobacillus iners SPIN 1401G
atgagtccaattctcaatttctcaaatcaagggaataaccttagctctatatttactgaagtaaaacatagcgaaagcttagggcttgtaaatccggaacagcttcgcctctttcaccttaatgtaagcagcaatctgtttaattttgcaagtttaagcaactatctaataaatattgtaagcgaatatgtattttctagagcacaagtagaaaaattaagccagtcatctaacccacgctcaattggaatacaagctctaagggtaatgaagaaaaacggagcagctgatgttagaggaacaggaaatgagctaggagaaattttactctatgcttttttggaagatattcttggagcaccaaagttattcagtaaagtagagctgaacgcttcttctacttcgtttggcaaatcaagcgatgcagtacacctactaacactagaaaacacaccattcccttgttatcaaacagtattcggttcttctgacattactggagacatacgttctgctatcgatcatgcttttaccactatcgacaaggtagagcatgatataaaaagagtggattctatacttatagatagcaatatttttgaagagtcatttgatgctgaaactgcggaaaaaataaaggatatcatggttccatcagccaatactaagatggctaacgacatagcatatggcgtctttcttgggtattccttgggattaaatcctcaaagcagatctaatttggattttcttaaagctatggacgcaaaaatgcaaaccgatattaaacagcatgcatcttacattgcaaataaaataaagcaatttaatcttggcacacactccttttacttttatatcgtcccatttaacgatgctgaaaaagataaaaaagaaataatggaagatttgctaatgtaa

SEQ ID NO: 59571 - DNA, 2652 bp, Lactobacillus iners SPIN 1401G
atgagcgatgataaagttaaattaggtgaagcaatatttaattcaattagtgaaaacgaatatctaaataagttatatgaaaaagcattgctttcttacgcacaaaaaatgctaagtgtgcccattgataacaactcactaaatagcaccgaactacatgaccttttacgatttgctgatttactctcaaaatcaaatcatgcaacaaaatatgaagaacataaaatgtgggcacaagagattatcgtgctgctaaatttcttatttcctgataataaaaacattaaagcgtttggtggctcagtattttcaaatactgacaatacgcgtggcattagcattttgaacactgattttgaggatccttttattttaagtagattatttcaagaatacaaaaagtcctacctacgtattcctacccaagaaaatatgcactttttctctgctcaaaaacaagcatatgatcaccttaatgataaatattttagctattctgcaccaacatcaatgggtaagtcatttctgatgagaatgtttataaaggaacagataactaacgaaaaacatcaaaattttgccatcattgtgccaactaaggcattaattaacgaggtgtctcaaaaaataatacgagaagatttgaatgatctgttaagtaagaaaaactataaagtaataactgcctccacagatattgccttagaaggaaaacatgattttgtttatgtattgacgcctgagcgtctcttatatatgctcatcgctcatccaaaccttaaaattgattatctatttatagacgaagcacataagctctctgctaaaaatggcagagctcctttttattataaagtagtcgatatgcttaggaagcgtaaatgcccaccaaagtttatctttgcatctcctaatatacctaatccagaagtatatttacgccttttaaccgatataagtgaaggaaatgtatcggcattaaaaacatcattttctcctgtaactcagattaagtttttgcttgatcttaaaaacaagaaaatgtctgtttataatcagcattccaagaatcttatcgaagtggcggatgtcaaatcaggaaatatacaacttgaagatttcctacaaatagttgaatcccaaaataaatccagtgatgttcctaatcatcatcaaactatcgtttatttcaattctaaaagtaaagctgttaatactgctaaaaattttgctgatagattaaatgacttaaatgataaagatctcaatgctttatctaatgacattgctacatcagtacacaaagattattatctagctgacatcatcaaaaaaggtattgcctatcatattggctatttgccctcttcaattcgtatgagaattgaagatctatttcgtgctggtaaaattacgaccctattctgtaccagtacacttctcgaaggcgtaaatcttccagctgataacctattcataactactaaaaaagtatttactcggaaaatgacacctgtagactttaaaaatcttataggccgagtaggaagaattgaatataatctttacggcaacgtcatatttgttacagaatccgatgacaaaagccaagcatcagaatacgtagatatgctaaaaactgacgtacctccacaatcgttatcaatagaagctggtgctggtgttcttacaaaaccagaaagaaaatatatcgttaatacgcttaaatctggaagcgttgtaatcgaaaaaagaaagaataatcaaagtgaagaatcatatgagctaactagaaagtttggtctgattctagcaaaagatatcgttacaaataacaatagtttcgtgcgtcagtcattttccgacttattaactcctacagacgaaaaaaatataaaatctaaactttctgaaaatggttttgtaccagatgacgatattaatatttcttctgatcagacagctgctctttctaaagcaataatagatggtctacaatatccacaacgaagtgatggtcactttcattacactgatataatggagttccttgaaaaattatgcactatctttaagtgggaaaaatatgaattttctacattaggaaaagtaactaacggacaacataaaaaattaagctggtatggcgtgctcctaatgcagtggatttctggattcggactaaacaatatcataaataaaggcattgagtatcatcgagagcacccagataacttttggattagcagaactcaaacagttacataccaagatacgatagaatttcgcaatattctttttgctgacacccttgaagtaatcgataatataatacttttcagtctatcgaactacttcttaaagttttctaatgaatataaaagaatacataaagtaacttctttccctaacgactggtacgaatatgttgagtatgggacaactaacgctgaaactattatgctgcagagaatcggatttagtcgcgaaacagcaacttatctcaagcaccacaaagaatatttaataaatgcggaaaatggtcagtgtaaattaaaaagaacacttttagagtgccctaatattagtgttagaaacgaggctcaaaatatgattttaaatatgccagaagcatttgcccacaagatataa

SEQ ID NO: 59572 - DNA, 951 bp, Bacillus toyonensis BCT-7112; identical to SEQ ID NO: 59156

SEQ ID NO: 59573 - DNA, 2163 bp, Bacillus toyonensis BCT-7112; identical to SEQ ID NO: 59151

SEQ ID NO: 59574 - DNA, 948 bp, Enterobacter hormaechei subsp. oharae; identical to SEQ ID NO: 58608

SEQ ID NO: 59575 - DNA, 2658 bp, Enterobacter hormaechei subsp. oharae; identical to SEQ ID NO: 58609

SEQ ID NO: 59576 - DNA, 948 bp, Enterobacter hormaechei subsp. oharae; identical to SEQ ID NO: 58608

SEQ ID NO: 59577 - DNA, 1200 bp, Enterobacter hormaechei subsp. oharae
atggctaaaagtactgctacaacagcattaaatcatcaagactttacaagcgtttttaatttattgattgagcatttgtttttgaaaaatagaggtaaggaagaaaaatataaaatatctgatgaaatgattaggagagcaacttggcttgcatcacttggatcatcaggcaacgaaaccgataaaaatattgcaagtgcattcggtacattgctctatttatacgacacaagtaatgatctatatctcaaagcttgttatattctgcaatctagggctggtaatatagtctctgctaagcatttagaaggtctttttagtcaagggaatattattaaacactttagttcatcattggattttgaactcacaagtcaaaagtttcttcttgaaaaaagagtttctgacaataattatatttattttactcattttcaaagaagtctgtgggacaaactagaacgcggtgaaaacgttgctgtatctgcaccaacatcggccggtaaatcatttgtaattaaaaggtatatttacgatagtgttatatctgcaaatgatggttacttcgtttacgttgtaccctcaaaggcgctgataaaccaagtcggcaatgaaatgtctagagagttaaaagacatagctacagtgatgacaacctataaggattcagaaaatgatgatttaaaaatagtatatgttctcacgcctgaaagatgtatgcgattgttaaatgagaatggtaaaaaagcacctaaaatagttttttttgatgaaatacaaaatttagaggataaaagtaggggtaatgtttttgagaacgttatctatagaatgacaagcttatggcagtcaactcaatttattatggctggcccatacataataaatttacatcattcactcaataaaattattgaccttaatctagttgagcaaacaacttctacaaccccggttttgcagttaaaagttgtgcttacagtacataaaaataagaaaaccgttaattataaattaataagcccggttggggatgcggtgttaggtgagtacgatataggtaaggcattgtatagtaaattatcttcatcaaagggtgcagcattaaagcatatcacttctattctagattctgatgaacaaaatataatatacgcacctaagaagaatttggctgaggtgacctgcccccacgattag

SEQ ID NO: 59578 - DNA, 1632 bp, Providencia rustigianii DSM 4541
atgatgagcattactagcctatccgatgcaggtgggcctgcggcaaggcaaggctttaagtatcaagatcacgtggctgtcagcttcatcttcaagatgctacgagacagcaactactcccaagtggaatgcgagaccgcggatgacatcgtggcagtataccaatacgcaggccagatactaaacgaatacattcaggtcaaaacaaccgaaagtgatggtaaatggaacttgaaagagataacagcgttagatggcaccaaggctaattcttcgttgctacataaatcgctgaaatgcgacgtacgtccaggtattgcgcgcttccgaatcgtgaccaagcgtgacgttgcaagaattcttgaaggattcaagaaagaaatagataagcggatgctgcccgacataaccactacccgaggtgtggcactgcgcaataagtttaaaacgtttgtatcacctcaaaaacgggacttcttgtactgggctgaaaacattgtctggcaggtatacggtgatgtcgaggcgctggaggccgtcaatataaaggcgttggcccagcttgcggaggagcaaggaaatcgccccaacttcacgcaactaaaggcaatttacgaagaatttttagagattgctgacaaagcggctacagctagcgtaaaaacatctgcagcatctaagatcatccttcgagctccgacgctggctcacctcaggaaattattagataaggctgatgacaagtcagcggccacatccaaaccatataaaaagcgaccggatccgttcttggtcgagtttcacgccaacaaaaaagagggtttattgcactcattttctggttttgatgtgcgctatgcgcttaagaaatggcgacatgaaaattacgcaaagcatctcatcgaatggctacccgagttttctctaaaggccagtgaaatagtaaacatccttgcgcataacgccgaaacaatactggctaggtcaatcagcactttcagcgacagtgagcttccacgcaacaggctcattgcagaattaatcctccattccatcctgcgaagccaccaaaacagcgaacccgttgcgtgtaaagtcttctacaaatctgctggcaggctttcagaatttggcaatgctcacatcgttcagattcctgatcaagatgaccagttgtggctaggtcttgctcgcttgatcaaagtaaatgacatggataaaacactagagcaaattcgagaaattcttgacaaaaccatatcagaaactgtgctgtcgacagagcgcgaaattattatttctctacgcgaacctttacatcaccagccaaaatcagattccttcaatcaagctctgcatcggaattcttctgtcgatgacatactgaatattatctgcttccccatattgctgacctacgatagtacagcacttttgtcaggttggctcgctgattacgtcgataacatcaagatagagatcgaaacccacttcagcacgttcacctcgaaactgccggagaacatcaaacaagttaaggtgatcgtcttcttggtgcctatggaaagcattgaaaatctgaccaaggctttcaacgctcactgcgaaaagctggaaaaattgcaggcataa

SEQ ID NO: 59579 - DNA, 2142 bp, Providencia rustigianii DSM 4541
atgaactacgaaaaaattaagaacatcttggcgaagctcggtgaagataacacaaaagcggtcgatatgctgctcgccatcaacaccatcgtaaacagaagcaattcagagtgggaaggccgcgatttggtgatccgagcactcgacaaatttacgtattttgactctgtagagcagtcgctcctgctaaacatggtacgagctgttggactattcccttatatcacacctcaccttagctgcatggcgatctctgaccgcttagcttatgaagctcacagggtagagggagtagaacaaggcatggtgtttcatcatctgcaagcccatacattcagcttgatcatgcaaggccgaaatgtagtactcagtgcttctacaagcgtcggaaaaagtctagtcattgatgctgttctagcacagcgacggtttaaaaaggttgtagtgatcgttccaactattgcgctgatcgacgaaacacgccgccgactggtcaaacgttttaaggacttcaacctaatcactcatccgagccaagaatccgtgatcgagacaaccaacgtttacttgctgacccaagagcgagtcatccagcgtactgatcttgctgatgtagaattttttgtcttagacgagttctacaaaatagatttggggagctccactgatggaagctcacgtgctgttgacctaagcttggcctttcacaagcttgcaaagactggtgctcagttctacatgctcgggcctcacattcagaagatctctggtttggatgactatgagtaccacttcatcccatccgattacagcacggttgcggtagacatccagaacttcaatctggagatgcggtccgaagagcgaaaggaaaaattgctagaattggttgcaactctagacacgccaaccttaatctactgtcaggctcctcctagtgcgaatagggtcgccgagtatttaattcaggaagctaagctgactccagtaccagagactcaggaaatagctgaatggatctctgagcactaccaccctgaatggaacgttgccaaggcaatatctctgggtatcgggattcaccatggaggagtgccacgcgcattgcagcagtacatcgttaagttgttcaacgatggcatcatcaagagaattatctgtacatctacgatgatcgaaggtgtcaacacatcggcagagaacgtgatcatttatgaccgacgcctgaagaattcaacattcgactattttacctacaagaatatttcaggtcgtgcaggccgtatgaataagtacttcattggaaaagtctttatgctcgaagctcctccccttgagcagggacttacagtcgaataccctatcggtcatcaggatgaaaactctccgatggggctcctcatgcaactggagaacgaatacctgacggatatttcacgtggtcgtctccaagatgtatacgccaatccggtactatcgcctacaactctgatagagaatcgacacgttccaattgagaggcaagtggaagtagcagaaacaattattcatgacctacagtccaacagcaaccttctggactggaaaggtattccagagccgagccagctcaattacctatgtgaactggtctacaatctagaagggggtaacctgatggactatgggatatcgtcgagcttacaattggtgtggcacatcaatgagcttcgaactcagaaaaacctcccggcttatctaagcgatgcggtgaaaaatcgacggcaagaacatacacccagcgaagcgatcaatctacgtttgaagttcatcagaaatatggtgtgtttccgattgccccgggacatcatggcagtaaataacattcaggccgacgtattggcgaaaaaaggggtcgagccgggagatttccgtttctttgccgagcagcttgaaaatatgtttctcgatccgctgctcactgcattggatgaatacggaatccccactcagatttcggttcagcttaagaatctcatcttgccatcggaacatctgaatgacctgttggataaacttcgaagtttggctcctaaaatagagcaccttcaactgactcactttgagaaaaacttaatgtattgggctgtgtccgaaatgtag

SEQ ID NO: 59580 - DNA, 1029 bp, Dysgonomonas mossii DSM 22836
atgaaatttaacagtaatgatatcttagtatctaaagtcacgaaatcaaaacttaaaacattctatattggatttgatttaggtctttgccaaacgtcgcaattcgctgaaattttaatggatactttagttgattttgcatttggttaccattctggaattttaaaatcctacaatcgtagaatcttgaaagaagcagctaaagcattatataacgtaaaagaattcaaagaagtaaaatggacatatgttgatgaagattcgatgttagatgatgatgaactggatgcaaagaacaaatatcttaaaagaggtgaattcggagaattaattttacaccttatcttacgagattattttaacacagttcctctattatcaaagatttttttcaaagattctgatggggttactgtacatggttttgattcaatacatattggatcagatttaatagatagcaagaaatcatctatttttctaggagaatctaaactttattatcgtaaaacaggtaaagctggagaatttggaataaatgacttagtaaatgatattaaagaacattttaatagggattttttacaacgcgaatgtattttaatatctaaaaaaaagaatgcttttccgcttctagattcttatgaagatatgaatacaaaagaagagtttacgaattatcttaaacaaaaagattattggatagatattcttgaaaaagttggttctggaacccataaaatacaagattttattgactctgtaacaatccctttaatatgtacatatgaatctgaaatattcaaaaaatttacagatgatactcatccagactttgaaaaaacttacgatgaggaaatggaaaatctaagaaaaattctggacgataagttgaataatattccagctgaaaaaggggaaattgtaaaatctaatttgaatattgtattaattctgtttccgataccttctaaaaaagatttggttaaattattgcatcaaaaactatataatcaacaaaatgcataa

SEQ ID NO: 59581 - DNA, 2208 bp, Dysgonomonas mossii DSM 22836
atgcataataatattgatcttattattaaatctctagaggataatcaacatgcgataaatatatctgtagcagaaagcttcaaatatgcacaactagcaaataatctgattagtaaatatgatgaaaatggatatcggctggttattaatattctaaataattgggacaaaataccaacagaaacaattgaattatggacagacataattgaagttgctggattttatccatatttggaaaaaaataaggaatctattattttaaaaaatctatctggtactataagaaaagaattacatttatccgaatatatccctcaaaaatatttccatgataaacaatttgagctgcttgaattattagatagtgataagaatgttatagtaagtgcacctacaagttttggaaaaagtcttcttattgaagaagtggttgcatcagctaaatataataatattgttgttatacaaccaacactagctttactcgatgaaacaaggagaaaattacaaaaatatagagataaatataagcttataataaggacatctcaagagccttctacaataaaaaagaatatctatttatttacagcagaacgtgtaaatgagtataaatttttccccaaaatagattttcttgttatagatgaattctataaacttagtggtctgagagatgatgaaagatctgcatctctaaataatgcattctaccatattctagaaaaatttagtcctaaattttacctacttggaccaaatatcgataaaattagcgatggtttttcaaagaaatataatgcaattttttacaaaagtaattattcattagtagatacacgtgaatttaatatttataaagactatgatgggaaatttggagccagcgggaaaaagaaagaatttaaagaacggactctttttgatttattgctatcattaaatgatgaacaaacaattatttattgttcagctcctcctaaagttcggtctttggccaataaattcacgacttatttaatagagaaaagtatatctccagtaaaggttaattattctttagtagagtggattgaagaaaatatctctacaaaatggtcattaatacagaacttacaatatggtatcggaatacatgatggtgctttacaaaaacatattacaacttccatcattgattattttaatgagggactaataaaatacctattctgtacatctactataatagaaggagtaaatacaagtgctaaaaatattatttattttgatgataagaaaggccctaatgatgtcgattattttgactattcaaatataaaagggagagctggtagaatgatggagcattatataggtaaaatatacaatttcaaccctcctcctaaaaaggaagatattataatagacatacctttttatcaacaaaacccaataaaagatgaagttcttatacaattatccgaaagtcatgtactgaataaaaacaccaatcaatttttagaaatacaaaaaataccattaagagaaaaagaagtaataaaacttaatggattaagtgttaacggccagaaaaatatactttcaattttaagaaaagaaatttctcaaaattatggtctgttatcttggactaattttccgacatataaacagctagaatatgttctttcccttgcttggaataatctcattctagatggagagacaactagaccaatgacagcaaatcggttaacatatatgacttttaattatggaatagaaagaagtattaattctataattaatgatacatttaaatatgacaaaaagaataataaaaacgctagcaaaacagattatgatatactaaatgaggctatccaaaagatatttcaaataatgaaacattggtttcaatataaagtgcctaaatggctatctgtaatgacttctttacaagaaatagtttgtatagacaatcaattaaagcctggaaactatttagtctatgcaaatactctcgaaaatgattttattcctgaaaacttaactattcttttagaatatggtattccaactagtgctataagaaagttagaaagatatattccgagagagatcggacaagacgaagtgttggcttatataaaagccaaatcccttcaagagtcagataaattattaatgtatgaaaaagaaaaattctcaataaatctgtaa

SEQ ID NO: 59582 - DNA, 1638 bp, Laribacter hongkongensis HLHK9
atgagtgctactagccaatccaatgcaggtggacctgcggcaaggcaaggcttcaagtaccaagaccacgtcgccgtcagcttcattttcaagatgcttcgcgatagcagctattctcaggtggagtgcgagacagcggacgatatcgttgcagtgtctcaccacagttcagggatgtacgtatacgagtacatccaagtcaagacgaccgaagatgaccgcaagtggagtgttacagagatcaccgcgcttgatggtgccaaagccaactcttctctgttgcacaagtcactgaaatgcgacgtgcgcccaggccttgcccgtttccgaatcgtgaccaagcgcgatgtcgcaaaaagtcttgaaggctttaaaacagagctggataagcgcgttttgcctgacaccacaacagagcgaggaaagaggctacaaaagcagtttaaaacgttcacctccccgcaaaagcgggatttcacctactgggctgacaactgtgtctggcaggtctacggcgatgtcgagtcgctggaagcggtcaatatcaaggcgctgtcccagcttgcggaaaggcttggaaaccggccgaacttcacccagctgcaggcaatttacgacgaatttctagagatggccgacgtggctgccacggccaacgtgaagacagctgccgcgtcaaagatcattctacgcgagccggcgctggtacacctgaagaagctattggacgaggctgatgacaagtcaatggccacttccaagccctacaaaaagcgaccagatcccttcttggtcgagtttcatgcaagccccgaagaggggctgttgcattcattttctggctttgacgtgaagtattcgctaaaaaaatggcggcacgacaacttcgcaaagcatctcatcgaatggttgcccgagttttccctgaaagccagcgagatcgtcaatatccttgcgcacaacgccgaagcgattctcgctcggtcaattagtaccttcagcgacagtgacctaccgcgcgacaggctcatcgcagaactgattctccacgccatcctgcgcagccgccaaaacagcgagcctattgcgtgcaaagtcttctacaaatccgctggtaagctttcggagtttggcaatgcccatatcgttcaggtacctgaccaaaacgatcagttatggctaggccttgctcgcctgatcaaagcaaacgccatggatgcaacgctggagcagatctgtgaagtccttgacgagacgatctcagaaacggtgctgtcggcagaacgcgaaatcatcatttctctgcgcgaaccattgcaccaccagccaaaagcagatgtcttcaatcaggccctgcaccgcaattcgcccgtcgatgacatgctgaatgtcctctgcttcccaatcctgttgacctacgacagcgaggcgctttcgtcaggatggctcgctgattacatcaacaacctcaaggctgagatcgagacccacttcagcaccttcaccacacaattaccggagaacatcaagcaggtgaaggtgatggtctttctggtgccaatggaaagcattgaactgctgaccaaggcttttaacgctcgctgcgaaaaattggaagagctacaggtatgtagctga

SEQ ID NO: 59583 - DNA, 2142 bp, Laribacter hongkongensis HLHK9
atgaactacgaaacgattaagaacaagctggcgaaactcggtgatgaaggtgcatcggtgatcgatgtactgcaggccatcaacagtatcgtcaacagaagcagctctgagtgggaaggtcgcgacctagtgatacgagcactcgacaaattcaaccttttcgacgcagtcgaacagtcgcttctgctcaacatggtacgcgccgttggactattcccctacattacgcctcatctcagcaaaatggcgctttctgaccgcttggcttatgaggcgcacagggttgagggtgttgaacaggatatggtgtttcaccatctgcaggcccacgttttcagcttgatcatgcaaggccgcaacgtggtgctcagtgcatccacaagcgttggaaaaagcctcgtaatcgacgcggtattggcacagcgacgattcaagaaggtagtagtgattgttccaaccattgcgctgatcgacgaaactcgtcgccgcttggtcaagcgtttcaaggatttcaacctgatcacgcaccccagtcaggaggcagtgcccgatacaaccaacgtctacctactcacccaggagcgcgttatccagcgtcctgaccttgcggacgtggagttctttgttttggacgagttctacaaaattgacttgtcgaacgacgcagacgaaagcactcgtgccgttgatcttagcctctccttccataagctcgccaagaccggggctcagttctacatgcttggtccgcacatccagaagatctctggtttggatggttacgagtatcacttcatcccgtccgactacagcactgtcgcggtcgacatcaagaatttcaatctggggatgcgctccgacgaaagaaagaaaaagctactggaactggtcacgacgctggactcgcccactttgatctactgccaggcaccacccagcgcgaacagggtcgccgaatatctgatcaatgaagctggactgactcctgtgctggaaacgcaagaaatcgcagaatggatttccaaacactaccaccctgaatggaacgtagccaaggcgatctctctgggcattgggattcatcatggtggggtgccgcgcgccctgcagcagtacatcgtcaagctgttcaatgaaggcatcatcaaacaaatcatctgcacgtcgacgatgatcgaaggcgttaacacgtcggcagagaacgtgattatttacgaccgtcgcctgaatacctcgccgttcgattactttacgtataagaacatttccggtcgtgcaggccgcatgaacaagtacttcattggcaaggtgttcatgcttgaagccccccctcttgagaaagggctctctgtcgagtatcccatcggccatcaggatgaaagctcccctatggggctactgatgcagttggaaccagagtatctgactgacatctcgcgaggccggcttcaagaagcgtacgccaacccattactgtcgccgacaaccctgattgcgaaccggcacattccgattgagcggcaagttgaggtagcagaaacgatcattagtgacctgccgcttagcagtgaacttctgggctggaaaggtatcccggagccgaaccaagtcaattacttatgtgagctggtctacaatatagaggggggcaacctaatggattatggaatatcgtctagctcacatttggcgtggcacatcaatgagctccgaacacagaaaaacctgcccgcttacctaagagacgcagtggagagtcggcgacaggaacacacgcccagcgaagcaatcaacctacgactgaaattcatcagaaacatgatgtgcttccgattgcctcgagacgttatggccgtgaataaaattcaggccgacgtgctagagaaagaagggattgagccgggcgatttcagcttctttgctgagcagcttgaaaatatgttcctcgacccactacttactgcgctggacgaatacggaattccaactcagatttcgagccagatcaagaaccgcatcttgccatcagagcatctgaacgacctactggcgaaacttcgagccttggctcccagaatagagcgtcttcaactaaatggctttgagaaagacttaatgcgttgggcaatctcggagatgtag

SEQ ID NO: 59584 - DNA, 948 bp, Acetobacter cerevisiae
ctgtctaatatcactgtcgagaatttggatgccgcgcttaccggcaatcctgagactctcgaagttcaccttgaactcgtcgagcgtgatgccgttctcgatggacacaaagtaaaaattcactgtcactgtctgacagtcgacgcgaatggccgcgtcgatccgcaccggcttgcggagtttatgcgaaacgcagtgaccaattatgcgatcccacgcgcgaaaatggctgacgcgaaggcgcgggatgagagatggaatagcggcgaggcagtcgccgcacttcacgaggaagcgaaacggtcttttaccgatcttgccctcacgggcgagggcggggagatgctgctgtttctgcttgccgagcgctttttgaagctcccacaaatcctctgcaaaatggacctgaaaaccgacacccgcatgcattatcatggcgcagacggcgtttacgctggcgtcacagaagacggaattttgaagctcttttggggtgagtccaaagtctacaaggatgttggagacggcatcaaaaagtgcttcgcgtcaatcgcgcctttcctgatcgagcccgatcatgagggcgcggagcgagaaaaggacctaatccttctgagtgataaagccgacctgtcggatccaatcgtcacgacggctctccggcaatatttcaacaagaactcaaagcaatccaagcgcgttcgttactgcggcatcgctctgattggatttgatgcggattactatccgaccgacggcgtaaagggcatagcggaagagatcgccaaagcggcgaaggccgaactggaaaatttgaaaacccctatcggcaagcaactgacagccgagaagcttaatcaaattgaaatcgaggtgctgtgcatcccgttgccctcggcagatggtttccgaaaggcgtttctcaaagcgatggggcttactgaatga

SEQ ID NO: 59585 - DNA, 2610 bp, Acetobacter cerevisiae
atgagcctcgaccaactcgcaacatggctgatggacgagggggttaaagatgatgtcgaaatcctcacgcgtttggccgttcggacagaactcgatcacctcgcgcccgaaactgtggagacagctcctatcgattggcaccgtctgctgttcgcgggcagcattttggctcgatcagcatttcgacagcatcaggaagcggctttgcgcatcgcgaccggagccgtgacgatggctgacactcagccagtgaaggacgcgggagccgtccttctaggcaagctgacaaattttcgagctgttgacctggcgaacgaccgtaagctgctcgaaacgaacctagaaggtcggttaggttttggtctacggatggaggcccagcgtcgcaaactagatcattcggttctgatagaatccagcggccactggcttcaggtcaatgattttcagcaacggttctgggatagcgccacactgaataattggctgtcggcctcggcgcccacagcatccggtaagaccttcctcgtcctgcaatggctgataaatcatatgcgctcggccgaaacacgggtatcggtctacttagcacccacgcgtgcacttgtttccgagattgagacaaatttggcgcagcttttgggcaaggcggcagagattgaagtgtcgtctcttcctctaccagagaagtatgatgccgctcagttaggcggaaagaagctcatcctggtatttacgcaggagcggctgcatctgttagccaatgttctcggaaaagacgtgcacgtcgatctgcttatcgtcgatgaggctcacaagatcggcgacaatcagcgcggcgtcattttgcaggatgcgatcgagcggctagagcgctcgaatgatgatctcaaagtggtcttcatcagcccggccacgcaaaatcccgaggagttattggccgatgccccggggacagcgaaaacggacgccgtcgatagcgacgccccgacggtcattcagaacctgatcatcgccgagcaagtcccgcgcaagccaaaactctggaatctgtcaataaaagaggggacggcatcccagtccgtaggtgttttgaagcttgctagctcacctaataacgccactaaaaaactggccttcattgcagccgcagtgggtgaacgaggcgggacgctggtttatgccaaccgagctggtgatgccgaagatatcgccgacttgatcgcccagcttgtccccgcgatcgacgggaccgacaaggaactgatcgaattggcagacctagcgcggaagggtgttcacccaaattttgccctcgcgtcgctcgttctgaagggtgttgctttccactacggcaatatgccgtcattgatccgacaggaagtagaacggctcttcagaagcggcaaaatccgctttcttgtctgcacctctaccctgatcgagggtgtcaatttgtcctgtcggaccatcgtggtccgtggtccccgcaaaggtatgggaaatccgatggagccccatgatttttggaacctcgctggtcgtgctgggaggtggggcaacgagtttcagggtaatatcgtgtgcatcgacccggatgacacaacagcttggcctaatggcgtgccgatccgctcgcgctatccgattaaacgcgaaagcgacgctgttttggagaccggtgacggcatggctgattacctggagagaagggcagatacacccctcttcgaattggccgaagtcggccggttcgaacaggttggagcatatctcctatccacctacttgcgactgggctcgattgcgcaggcgagcttcgcaaagcgtcacagtcctaataccatcgcaaaaaccgacgagcaacttgctgctttggctgacaagatcgagatcggatcaggcttctcggagcgacacccaggcgtgagcgcgcttggccttcagtcattgctggaagcttttcgggcctacgaaaaggatgtcgaaaacctgataccggcgccggtcgaaagccaggacagctatgatcgcttcgtcaccattatgcgaaggatcaacgagcatctctatccggcgttcatgccggatagcctgatccccttatacgtcgtgatcgtcgttcagtggctgaaaggtttttccctcgcggctatgatcagagcgaatatcgattatcacaacaggcatggtcggaagtttgtcctgccgaagttaatcagacaaacaatggaacacgtcgagcaggtggctcgcttcaaagcgccaaaatatctctcggcttacatggacattttgcatctatatttccgcgagatcgatcgtgaagatttgatcgataccgatctcgatatcggcacccagctggagttcggcgtgtcaacgcgcactctgctatctctcatggagatgggcctatctcgtatgagtgccgtaagcctctacgaaaagatcgcgcgagataaccttaccaaagaggaatgtatgacgtggattcggcagcgcgacgaccagttcgatacaatggacatcccagcgatcatcgttcgggaaattcgagggaagatacttgccatcgatcaaggcagtccggataccgttagtccgtaa

SEQ ID NO: 59586 - DNA, 843 bp, Burkholderia anthina
atgcaagagcacattccgcaagtcgatgcgcttgcggagttgctcgttgaccagctcgtcaactacgtcataccccttcgcaaacggagagaggcctttgcccagagtagcaactcggcgacgggcggcgatatggcagcggtatcgcgacttcgccgtgaggccaaacgactcctggtaacgtacaaccagaaacaccccggacgctacggcgaagttggcgagctcattgcctacgttgtcgcggtgcgatacctcggcgctgcgcaactcggcgccaagatggcactcaagacgtcttccgaaatgccggtgcatggggtggatggattgcatggtagccaggcggacgacgggtccgttctcttctacctcctggagtccaagctaatcccgagcgcaaccgatgcgtcccgggaaatggtcgattccatcgcggagcatcaggcagaccgcgggcggatgctgaacgaacttcgactggttagcgacttgtccaatctggactccttagagggagatgcgcgcgaggcggcaaagtcgttctttaactcctacactggtgacggcagccatctccgacgtcgcgacatccacgtcggcagtctcgtgttcagcgaaagcgccttcgagaaaaagctgcctcgcgacctgaaaaagccgccagagattcatgagcaacatctggagaagctgtatgcggccaaacacaaggcgttcagcaagaacctgaaaaagcaagccgacgcgaaaggcgttgaccttggcggctgcatcgtttttttggttgctatgcctgatgtaaatgaattcaagcgaatcttcgccgagttgaacacatga

SEQ ID NO: 59587 - DNA, 2628 bp, Burkholderia anthina
atgagcacattcgccaccgaagttgcgattgaaatccggcaggagccgggcttctggagcgaccttgccgaacttcgtgcggtcggcatccggtcgacggtcctacaggaaaatcaacaggttcgggttgaagggcccgttcttgccgaaaaggccctggcgcgcctgctcaataccgcgagtgtgttcgcatccgcaactgacgaagagagtaaggagctggctcagcagattgcagtgttcgccagcttgacctcgggcgatgacatcgttcgcgaagcaagcatccgcattctttccgacctcggcaacttccccggtctccgtaagctggagcgcgagcatcctgtcgacctcggcttcgaaacccacatgcgcagtggattgcttcgagagctcaacacagtcgacatggccggcgcgcgggtcccgctaacggagtaccagctcgacctctggcgaagcttggactcgtccgctgctacagctgtctccgcgccgacctcgtctggaaagtctttcgtcgtgctcgagcacctgtccgagcgcgcgattgctgccgagcggtttggcgcaatctatattgcaccgacacgagcgttactgaccgagatacacggcaaactggaaaagcgtctgtcgagcatttccgattccattcgaatcacgaccattccggtgccggacccagagagccggccgaagcagatttacgtgctcacgcaggaacgagcgcagtttcttctgtcgacggtggccgttgccggtctcattgaccttgtcatttccgacgaggcacagtccctcggtgatgacagccgtggcatgattttgcaggacgcgcttgagaaattgcacgagtcgaatcccgctgcacgcttcctgtttctggcgccgggggcatccggcctgcagctcattggcgacagcatcgggctgcccgacatcaacgtgaaggaaaccaccctttcgccggtggtgcagaaccgtatcagcgtcggattctcggacctggacgagcacgtagtgcgtctcgacctggtcacgccgaagaggcttgagccaattggaacgtaccacttccagcgtgggtttgcgttaggcgacgatacgaagctcgcggcggtcgcgcttgagctgggcgcctctggccggtccttggtctacgccaccggagcaaagaacgcggaagatttgacggcactgctcgcgctcaatcgccaacccgaaacctcgaaggggttatcggacctagcgaagttcatcgagcaacatatccacaagcaatactcccttgcgacttacgttcggcaaggcgtcgctttccactatgggaacatgcctagcctcttgcgcgaggggattgaggcggcgttcaagcgcggtgagttggattacctctgctgcacgacaacgctgtttcagggggtgaatctccctgcgcgaaacgtcttcattgatacaccgactcgcggtaagggcgcggtgctcgatgaagcttcgctctggaacttcgccggtcgtgccggccgtcttggtgaggaagtagtaggcaacgtgtttctcgtgaactacgagaactgggaaacgaagccactgaccgagcgcaagccgttcgcaatgcaggcagcgttcaagcagacagtcgaggcggattttgatgcggtagttgagcttctccaggcagccgtcgacaaggctcccatacttgagcgcgaccgcgcgtctggggaccggattaccgcagctgcaggtctcatcctgtttcgttcgtcccagaaaacattagacgggttactgggtcaccgcggtctctcgctgactaccgagcaaaaagacaccctcactgagctggccgagcaggcgcttgcgagtcttgagctaccggcttcggttttgactacgagctggatgctccacccagtcgcgctcgcaggtcttctgcagcggattcgtgaactcgtgcgccatcgcgacttctcgaaattgatgccttcgaatccttcgggcgactcgtacacggtgtacaactcaatcattcgcaggctctacaagtatctgggcggcatgaacctttccggagaagaagggagaagacagcgcggctacgttagccacgtgaccgttacggccttgaagtggatgcgaggcgaaccgctgacgcagttggtcgctgaagctgtgaagtacaagaagaaggttgcacagcaaacgaacaaacggccgctcactcaggcggctatcgatggcgccatccgcgacatgttcacgcttatcgagcagacgattcgattcaaacttgtccagtgggcgaaggcctatgtcgacctgctgaagtacgctcttgcccaagaggggctcgatgaaatggttacccaggtctacgacttctcgttggctcttgaactgggagtgtcgacgcgtaccggtcgttcgctggtcgagtttggtttgtcacgtatcacagctgcggcaatggcgtcgctgattacggattcgtcgttgagctcggaccaggttcggggctggttcttgcagcaaccagcgtcgctgatacagcaactatcaccattggtggtagctgaattacgtgaacgtggtctcgtcgtaatcgaatattcagcttga

SEQ ID NO: 59588 - DNA, 1407 bp, Lactobacillus coleohominis 101-4-CHN
atggtgagattaaaatttgggattatgctaactgatttttgggcatgctctagtttgaaacagagagtagcttgtgattacttgtttaaattagttaatcctgattataatgtggagaatggagttgccacaaaaatgaagaactgtcttgcttcaatacctcgtgatattactggcaatattttctacatagaagaagatgccagatttattcaaaatgtcagaacaaaaattgtacctttaataacgaagcctttagcatttgtcgctttttttctgaattgcctaaaaaaggatagcagcttgaatgatgatacacctatcggaaacaacacaaagaggcattatctaaatgctagctcttttgatttagctcaaaccatagcagattttttatttttcacaattagacagaatgataatgaagatcaggagacgcacagttatattaaaagtctgtctaaaacgaaaatcgcttcttttaacgtggcagggttatcgttaacagaggcaagacacccattaaatgatgttaaactcacgtcttcaaatagaaatttcgactccgtatttgaggagatatgtgtggggaaacttgacattcctaatcctaatcatatccgtgcttttaaactaagaaatagtttgtatgaagaagattacacacaggtaattagtttgttgcaaaataatatttgcaattatgtatattctagagctgaaatagatcaacttgaaagaaacattagctttgcagacgttcaacgtaaaaccttattagcagcttctcaattaaatgttgacagtaatactttaggtgatttactaaattatctttttattgaaaatgaagaaaatgcacctaaactaatgagcaaaattgaatttaataattataagaatgattgtgatggcgtttatttgaagaaaattaacgataaatatcagatcgttttaggcacttcaaaaatatacccatcggtatacgatggaatatcacatgcggtagagagaatatgttctttagtctctcaatcctttaacccttctatattggtatcggacttcaactttatcaacaggtttcccgtagatgatttaaaagccctgaagcgtatatttatcccaacacagccgcaagatgaacttgaagttaatggcttcggaatatttttaggatactcaatgaacttatcatgtgatattaatctactgtctaccgaaaaggtgcgggagattgtcaatttacaaattaataatgatttaaaggatgttattcaacaactgaatatagcaataagtgataaaaatattaagcaatattcatattatgtctatttattgccatttagggatgttactgaaacaagcaaaatgataatggaaaaggtattgggaaaaagatga

SEQ ID NO: 59589 - DNA, 2604 bp, Lactobacillus coleohominis 101-4-CHN
atgaaaacaactactaaagcagcaatggaagaatttttcggggatattacttctaataaatatttaaaagttcttttttcaaaacttttagatgagtattccaataaagtatttggtaaaaaacaccaattggatttagtaactaaaaataatttgatgaggtttgcagacttactagcacattcaaggatgctgaaagaatccaattttcatcaaaatatttcacaacaaattatttttatgttggagtacttatttcctgatgatatatctgtcaagtttgttaagcaaagaattcaatctacactaaacaattattctgttcaaaataatgatctacatacggttccatctggagatgctttgcttaattatttagcgaatacttataaaaaaggggagttacaaataccaggttctcatgatcaaacgtttataggtgagcagaaagcagtctatattgatatgaccgaaagtaaccttagtttttccgcgcctacttcaatggggaaatcctttttagctagaacatatattaagaatcaaatactgactaataaaaatggaaattatgcatttgttgttccaactaaagcattaattaacgaaatttctagcaaaattatcaatgatttgggtaataatttatctcaaaatagatatcgagttattcgttcagttagcgagttgaatgaatacagtattgatgatggatatcattatgtttttgtgatgactcctgaaagattaatgtacttactaattgcgtttccaaacatggacttgccattcgtttttattgatgaagcacaaaatatttctaaacatgacgttcgatctgggttttattacaatttagttgatatgttggaagaaagaaattctcgaatctcgtttgcttctcctaacatacccaatcctgatatttatttagagttaatacgagacaataaaaaaagtaaaaatgctaggaaaataaagtactcaccggtagttcaagtctcatatgtggtagattttacggatagtactgttcagatttataacccagtaagtaaacaattaaagccactaaaaaatataggtgaagaaagcttatttgatctgattgattctttttctgataactcgaattgtggaattcagaatttgatttattgtaacaaaattgatacagctattggattagcagttcaatatgctgatagcttagaagataaaaatgatttgacattggacaaattatcgtcagatataaagagtgaaataaacgaggattattatttagctgatttggtaaaaaaaggcgtagcatatcatgtatcttttttacccaaaaacgtaagactaagaattgaaaaggcgtacagagcaggaaaaataaagaatttattctcaactagtactctgatggaaggggttaatcttccggcagataatttgattattaccagtaataagaaggggaatgctatcttaagtactgttgattttagaaatttagtaggacgcaccggtcgtttaaagcattcaatgataggaaatgtatttttagcaatattacctgaatcattttctggaagagctaataagagagactataaaaaattactaaaggcgactatagaacatcaaagattgaatacagatcttttgactaaaaaagttgtattgctgataaaaaaaagtttgtttgagggagatcttacactgaaattgcttttcaatctctctaattggacaaactggaaatacaaaacagttaggaaatttgtacttcaatatttaaatgatattcaaaataatagacagagtattgttagaaaaaaattccagcaatttattgatcctcaagaggagcatgaaatactaacttgtttacatagtcgctatagcgaaaaatttgataatgatgtaaatatttcaactgaccaaactagtaagttaaaactgatgattaagaaaggattaaaatatcccacattcaatgaaagtgggcagttaaattatcaagaagtattaagttttcttgatcagctggactcaatatttaattggcaacagtatgagaaaagtaaaatcggtaatgcgaacaagcgtcgatggtatgcagttatcttaattcaatggatttctggattaggcttgagaaacataattaataaagcaatcgaatataaacgtgagaatcctcataatgctatatatcgtaatcaagagtactatgattttgatgattctaaatctcaaaaaaatataatcattaatgataccttatatgctatacaaaacgttctgctttttgattttgctagttatttcctgaaagtctccaaagaaatgaaaaattattttaatgtgccgagcctagataatgattggtatgaattcattgaatatgggactcacgacgggttccggatttggttacaaaaatgtggttattcaagagaatctgctaactatattgaaaaacatccagaattttttgatgttgatggcacatcatatcgattgagtagtgatttggcaaatgttaatgatataaatcttagagatgaaactagagatattatgttcaaccatccggaaatttttgtttaa

SEQ ID NO: 59590 - DNA, 906 bp, Prevotella oryzae DSM 17970
atgcgaaaaaccttggaagatataatcgtgaaagctattacttttcgataccagttacctaatatgcaattatcaatacctccttataaaaattcagtgaggaaagatgaatgttataaaggtctcaataataatgattttgccaatgcaatttataatggtcttatagattattcttataacgataatgatataaatgttgatagcttgactcctttgcataaaagggcgttgcaagcgaagattcgatatgataagaatgccagcatagaagaacaagagaagtatggtttctatggtgaagttatactgcatttaatgctgaataaattctataaaacgtcaacactgatttctcgtggatacttttatcatccgattgaaaatgctgaaacaaaaggattcgattgctttcatctaatacaaaatgcgcctgatcttgtagaactttggtttggcgaagttaaattctatgctgatggtaaagctgcaattaaaagtattttggagaaagtttctacttctttatcggacggctacctttccaaaaatgcaattacaatttttgatgaggatgctgataaatggaatatacagcagagtgaattattaagaatagcaactgattggaaagataatccttcaatcaatgtcgttgatgaaattgagaaatataacatgaggttggtttatcccatgcttgttatttgtaataatattaaaaacaaggactataatgaaacaataagtggattgatagattatgcaaataataaatatgcttcgttaaatattaaattatcggttcctttcgagttgtttttcatattgttgcctgtgaatgacactaaaacgattaaacaaactgtaatacaatggataagtcagcaagtgcagccaaaatag

SEQ ID NO: 59591 - DNA, 2262 bp, Prevotella oryzae DSM 17970
atggataagtcagcaagtgcagccaaaatagtaagaatgctaaatcaaaatgacgattcgttaacacctcagataatacatgacgtgtgcgaattttttgatgaagagaaggctaacggactttcgaatgccgatctgcaattcctttattatgtggcatcaaaagttggtatacctcaatattatgatatgctgccgcattttaataaagatgtgccacaaatcccaaatgtaaatcaattggtgtttggctatgtagtgcagaactcaagctattatgttgacaatgattcgtatttacatagatatcagattaacgttttggatcattatcatcatagggaacttaacagatattttctttcagcaagcacttcgtttggtaagacctatcttgtgtatgagataatacgcaagatgaaatataaaaatatcgtactaatgtttcctacaattgctctaatgacagagaaccttgctaaaatatatagtaatgatgaatacgaatggattagagaaaaatataagatacatacattgagtgactccaagcccgaaggagaatggaatatttttctatatacgcctgaaagatatcttacatttatagataataataaaaatataagtcttgattttatcttcgtggatgaaatttacaaactggataatggatttattatagatgaagagagcaaagaagaccaaagggatattgcctatcgtatagcactatattttgcattgcaggatgctcatacggatgctttacttgctggcccatatgtagagattcatcaaacagaggaaggacgggataaatcttcgctgtttaggttcttctcaaaatatggtataaagccattgaattataattcaatagagttggtaaataaaattgaacaatctgtatatattataaaagatgcaaaaaagatgtttttgagagaggttagtgaaattcttaaaaagaatcagaatgcaatagtatattcaaagtcaaggagtgatgccgaaaataaagtgaaacagttgataaaagagaatttttcattccttaatattaataatacccctgatgagtttaaagaatttattgaacatattaaggctaattatccaaaagaccatgatggacggcagtggattgaaataaccgcattggaacaaggaatagccatacaccacggccttgtgccgaaatatatacaaaaggagataattgatttttttaatagaggaattattaagattttaattgcgacaactactattacagaaggtgtaaatacaactgctaagaatgtgcttattacctccagcatgaaaggtactaaggatttaaaaaaatttgatgctcaaaatatagagggacgagcaggaaggtttatgtcacactatagtggcaatgttatcattttggattctaactttaagaagattatagaatcggatagtgagaaacttgaacatctttattttaggaaagatgtagagcatacttctattgattttccatatactgaaaataagtatttgtcagataaagaaaaagatatatatatttctactaggcagaaacagaatagattggggattcctgatgatatcatgaatatgttaaaagctttatctttggatgaaaaattgacggtgtatgagaatgttgctaatttgagtgatgaagataaaagggaaattaagaatttgattttaaattttaatcagaaaaagtttcttgataaaaaacttttggaaataattatcaaaacgatagcaccaattgctgttaattctaaaatagattctttcattaaaggcaggaaagaagaccattgttatcttacaggtattatattgagctatatgaaaggaggtttacctggaatgataaaatataaaatagatgagcaaaagaaaaatattaatacagcaataagagaatctaccgaatttgtatatcacatattgaagtatcaagtgacaaaatatttcggagcttttaatttgatgtataaatactatttaagcaaaacaacaaatacaccatttgaaaaagttgttggcattgatagcgttctaatgaagtttgagtataattcatatactcataatggaagaattgtgagtgattttggtgttcctcagaaaattatcgattattacgaggtagcagaagattcaaaaaagaaacaacttcaaaaggggttcgataattttgaacgtaaggtgtttaatgatgtgcagaaaatagtggagtga

SEQ ID NO: 59592 - DNA, 924 bp, Pseudoalteromonas porphyrae
atgaaaaatatgaaaattaatcattacgcatcagttgataaaaagacctttgattcatgtatcggttctattgagcacgaatatgatattaatgagctcaataccaaagttagacttcattacctaaaattaaatgggaatggcgaaccaatggttaaggctctagccaatctgttatacgaatacattattgactattgcatatcttctgcgaaccgccctgacgtcttaacagccagagattcaactagattaactaaagaagcacgaaaactctttaggcaccctgaaattggagagaacaatcctgatagaacgggagaggctggcgaattactactttttttccttgtagaagctgtattaggtgcccctcaaattgtgtcaaaaatggaattaaaaacaaaccatcgagatgaggtgaaaggatccgatgggatacatgcaagatacagtgaacaagacgatatggtcgactttttctttggagaagcaaagctctatatagaccctatctctgccatcacagcagctttgaaaagcatcgatgactttcacagcgtcgatatgctagagcatgaatttacgatggttactaagcatttcaagtactcaaatgatgaaactaaaaaatccatttcatctttgatcataagcggagaggctggtccgaatgtgaggcttaaccatgcatgccttattggttataattttaaagactttgcttctctagatgggtcaacgccaaaggaaatgacagcagactttataagaaaatttttaagtgattctgaacgattgacaaaatcattattttctaaagttgataatatgaagtgtaaacagctttcattcgaagtgttttttttaccatttccttcagtagatgcatttaggaatgcctttaataatgccttggactaa

SEQ ID NO: 59593 - DNA, 2517 bp, Pseudoalteromonas porphyrae
atgaatagtaaagaaagtatgcctcggctgttaagggagctaaccaaagcaagtgttataaaacagttacccaagagttttgtgcaaacagattctgtagaaataaccgacaagcaagtatctgcactagtaagttactcttcaattttatccctcggggtaggagaagacattaataagtcttatgagattataacgcgtttgttagagcatgatagtgaaaacacgttggttaaatctgcagcagaagtaattttgtctagaattggtaacttccctggtaaaaagttgctcgaagaaagacatggtttgggtaatagtatatcagcgccacttcgcttagaaataatagcaagggaaagtgaaaatacaatttactgtgatgaccaagaaatccagttaacagactttcaattacagctgtttaactctttaaaagtggagcgaaacctaagtatttcagcaccaacatcagctggtaagtcttttgttttgaacttgtcattgtcagaacaaattagggacggtaatggagaaagcattgtttatgtagttcctactcgagcactaatttcagaggtttcaggaagagttcgaagcgcaataaacaatattggttcagataaagctataattcgtacagctccttttcctattgatcgtaaaaaaataaaatctaatgttgtttatatttttactcaagaaagattatttagtttcttgagctctaaagatatattgccacatattgatactcttatcatagatgaggcccatgaaattcaaaaaggtaagcgcgggattatattacaggctgctgtagacctcgcactaaataaatttaaaaatgtgaagttacttttcgctagtccgctaataaataatccagagtactttttatcgctatttaatcgaacaaataatgggaagttttttactgaggtagtttcacccgttgctcaaaatatacttctagttaatcaagttccaaaaaagacaaagcgcttatctgtaacgcttgtcggtgagcgagaaaatatccagattggagagtttgatattccttttgtattaaggaaaagtattgcggagcagattggtaattttgctttgtcactatctggcggagatagtgctgttatttcgttttcaaacactcctataagtgcagaaaatagagctattgcagcgtctaaaatagcaccaaaaattgatatttcccctgagttagaagtgtttattaattttgtttctagtgaaatacatcctgagtattctttacttgattgtttaaagaaagggatagcttttcattatggaaatatgccatcacttttaagaagtggtgtagaggaattatataagcaaggaagtatcaccactattttctgtactagtacgcttcttcaaggagttaacttaccagctaaacatattgtgatagaaaacccgaagtcaggtgaaaaccctatgtctcgttctgattttttaaatttagcaggacgatctggcagattattacatgaatttcatggaaatgtttggtgtattcgtcctcaagattgggatagtgaatgttacaaaggtgataagttgcaaactatttcatcagcgataaataacttgatgattgatggtggaacagagattcaaagggtgctatcgggtaattatactgatcatgacgatgataaaagttctgacgaagcgaatattgccgtagggaagctttataatgattatctagatgccaaaggttctttatttcttgagcaatatcggtcagagaataattcagattcaatagatttaactaaacacttaatagagtctattcaagttacgcttccacctgaaatagtcaaaaatcatcaaagtattagacctgattatctcgaaaggctttatttatacctatcttcacaaaatgttttagaaaattactacccaatttacccttatacacaaggcgcgaaagctagagttgaagagattataaaagtgttaatacattgctttgactgggatattcatgaaagttatgtatcttggctcagctttctttcatatcaatgggtttggggcaagtctattggtcaaatattaagtggacgaattacttatttagaagagaaaaaagggaagagaaatgtaaacccctcgacagagattcgtaattgtttaaagtcattagaaactgatgttaggtttaagatggtaaagtacttttctgcttacattgaaattattaggtatgtagcagaaaaaagaaagttatcgacaaatggagaaattgaggcataccatatatatttagaatttggttcatgtaaaaaaagcattttgaatcttatatctgtaggtttatcacgttttacagctttgcacttagatcgtgttttcaaatttaatgagcatgatgagcctgaaaactatattaaccagataaaaaaagtagatatatcttctttaaatattccaaagctatgtgccaatgagctaataaaatttatttaa

SEQ ID NO: 59594 - DNA, 948 bp, Thalassolituus oleivorans MIL-1
atggacaaattgaaggcgattaactggccaagcctcgtagcaggcaagcactcatggattgacgatcatttcaaagtccactccgttcttgacgacaagaaaaccgtctgtcgattcttctctctggacttttcaggtactcagcaagagattctctctctaaccgagtcactgagtgaatcaatcgaacactatgtttttgatgagaagcagcttgcgagctttcataaagaaggtaaggttccattccaaaaagcaatgaaatttttcggaaagacaaatccagatatggatggtaagtacggagaactactcctataccttttaacagaaaaatttctccagacacctcttgtgagtcacaaactatctcttattacaaatacgaacgatcaagtcaaaggcggcgatggtattttttttggtgactataaaggtgaattggctattttaattggggaatccaagattcatcaaggagctgctggggccatggaagacgcgttagagtcactggatagattttacgacaactatagttccggtcaactaggacatgaaatgttcattgctcggtcaaatatttcagagaatttttcatcactagatgatgccgagagcctttatcaagcatttactccgggtactaaacagtacaaaggttgcgtcaaggcgcaccctgttcttcttgttttcgaatcaagtaaaattagtactatcgaagagaaggccaagaataaagacgaagcagagcagatgttcagcgactggctaactggcaggtcaaaagagatacaaaaacttctaggtgataaattaaacaaatactcagagctcaagaaggtatacatcgatgtatttcttataccattgactaatgtatctaagttcaaacacgcgctctatagagaaattcacggcatagactatgtatcaaatgaaaaataa

SEQ ID NO: 59595 - DNA, 2595 bp, Thalassolituus oleivorans MIL-1
atgacgcagatatattctcaagcagcaaatcatgaagattttattcgagtgtttgacaagctattggaaaagctatttctcgaggataaagtagcagataatgtacaggttgatcttgataatgaagagatcaaaaaagctacctggctcgcttcgatagctgctcttagtgacgatgataaagagcgcaatatggcaaatgcttttggagcgctgctccacctgaccgatagagaaaatgaaatatacaaacgtgcgtgctatatcttgcaatcaagagctggaaaccttattaccagcagccatatacccaaactcttccataaagaaaacacactcagcgattatggaacgctactaaattttgaactggcggcacacagagcactgctagaacacgaattctccgatgacacaaagatctttttcactgagtttcagaaaaagctttgggagtctcttaactctggagagaacatagctatttctgccccaacatcagcgggtaaatctttcataattaagaaatatattctggagctggtacaaggtggcgcgaagaatatcgttttcattgtgccaacaaaagcgctgataaatcaagtgagcaacgcgctaaagagccagttccacgaaaaagcgcacgtatatacgacctacatagctaatgaagaagatgatctggccactatctatgtgctgacgccagagagatgtttgaaacttctacaagacaaaaatataacgccaccagaattaatattcatggatgaagtacataatattgaagctggttcgagaggggttatatttgagaacatcttatatagagtaacctctacttgggcttctacccaacttgtcgtcgcagggccattcataagctcactttcagatagtattaagaaaatctgtaatatctctattattgatcatcaaacactatcctctccagtgtttcaggttcggtcggcacttactttttttccgagcaaaaaaatagcccaatacaaaatatcaagcccaactcaacgaattatctcaggtgagattaagttgaaaaaatcactgtattcgaagataaaaacaaacaaaggggaggcgctagaggttattgcagatatgttttctcctgaggatcataatatttattatgctccgaagaaaaacctttcagagaaatgggcaagcaaaatcgctcctgttatcgcctcaaagaacccaaaaattatcgaggcggccgactctagagttaaggatctaatcgatttcttatctgaagaagtgcatccagattactcactcatccgaactcttaggcttggagttgcatatcaccatgcagggcttccagatattgcaaggcaagaagtagaggagctatattcggaatctattatcaagaatattgtttgcacatccactttgctacaaggtgtgaacttgccagcagacagactcattgtcataagtcctaaagtgaattcacaggatatgcctgcctttgactttcttaatcttcttggtcgcgcaggcagagccaatactaaactttatggtgaaatctactgtattgatgttgttgatgatgaatggggaagcaagaaacttgaagctgacgtaaacaaaactgttgatacatcttcaaaccttttccttcagaaaaatgaagattatctatcagttattgccgatatgtcaggagatcagatacgcgaaatgacaggtgataaagatatttacggcaacctatcttacttaaggtcaatatttaaaactgacagaaatcacttcgacaggattctatcaagctcagggatttcatcagaaaacgtcgaaatcttttctaaaaaaatagaatctatgtacaacggtataactatacctcaagaacttatagccaaaaatccgtttattgatcctatcttgcaaaacaagcttttcgaagcgattcaatcggaaggggcaggaaactggctgataagcaagaagcccatgacaaaaggtggtagtgatctagattatgtggcgttccaagaaaaaagctattactttcagctatggagtgttttcgataggctcaatgaaattttcaatatcgaatatgagctcaatagtaatggctatgcgaacgacaattacatcaacataggaagacttgtaagggatgcacaccgttggatgactggaaaaaagcataaattcttcattcttgatctcattggtgaaaacaataatgatgaggcagaagtcgataaggctgcgaggcgagttactagtcacatcagtactaacctaactttcattgccgttaagtacctgatgctctggtctgacatgatttcgtactttttgagcgacgaaaaaattgaagagaatgcctatattctaaacctgcattctatgctcgaaatggggagctacgaccctgttgttctagagttaatgagctgcggaataaacaggtctgtagcactttcaatctctagcaaggtcaagatgatcgatgcttctgcagaaaaagcgctagccatcatcgataaagacaaacttccgaacatctttaaaaggcacttgatgaaggctggatattag

SEQ ID NO: 59596 - DNA, 951 bp, Bacillus marisflavi
ttgagtagagctgtagaaattaaaaatgtattatcatgtaaaataaatgaagctaatttacactcttattttattgattttgaccttaatgatgaaggtaaagctgagcagatgctcaaagattttgtcacacttttagctgaagaaatacctaattttgctttagggtatcatcaaggagtaatggttccacaggagaatatattacgtgtgttaattgaggctgcaaattctatttataaaattgatgcatatgaaaaatcagcagaaacttatttaaaaggtgaatgctgggacgatgatattgaggaaaaatatttaaagagaggtgaatttggagagctgatacttcattttatattgaaatatttctttaacacattgccattagttgcaaaggtttatttcaaagattcgtatggacatgccgtacatggttttgattcggttcatattaacccagaagaaaagactttatggctaggggaatcaaaattatacactgatggtaaacgaggggtagatgcactagttgaagatttatttgaacactttaatggtgattattttgaaagtgaatttactattatatcaaaaagaataaaagatacagagaaaaatttagttagtgcaggtacagatcctgaatcttggattaagttattgaataaatatactaaattatcgcaaaaattaaataaaataacaataccgatgttctgtgcatatgaaactaaattgttttctaaagatcatgagtctgaagaatttgaaagagaatatatagaggaaatatctaaattaaatgagcggtttatgaaaaagaaatctaagcatccatggaataaacacttaaatattatagttattttagtacccctggaaagtaagaaaaagctaatttctgcattacatagaaaattaaaaggtctgcaaatgttaggagaatga

SEQ ID NO: 59597 - DNA, 2163 bp, Bacillus marisflavi
atggaatggattggagtagacatagctaatatagaaaggttaaatttcgaagaaagcttctctttagctaggtatgtagcacaacagaaactagttgatcaagaaaatgctaataagattattataaaagtattggatatatgggatgaaattgatgattctacaaaagaattatggatagatttaatagaaagtgcagggttttacccatatctactcaagttaattgcgtctaataaccaattagatactacatctgaaattcgctcatcatatcattcatctaacaaattagaggacattactttccataaggaacaaaaaattttagcgaatttaattgctgaagagagaaatataattgtgagtgctccaactagtttcggaaaaagcctattgatacaagaaattatctctttaaataaatataaaaacatattgataatacaacctactttggctctaattaatgaaactagaataaacttaaaaaagtttaatggagattataatattattgtaaacactactcaggaaaaggaagagaaaaacatatttatattaactgcggagagagttctagaatatgagggccttttagatatagattattgtattttagatgagttttataaattaagttcctttagagatgatgaaaggtcagatgtattaaatattgctttgaagaaggttttcagaaacaatcctattttctacttcattggccctaatattgacagtatatctgaagggtttcaagaaagatatgatgcaatcttttttaaaactaaatactccttagttaatactgaaattgttaaagttaatttaaattatcaaacgacaggagtgcgaaaacaagcgatagaaaaagaaagaaagttgtttgaattattgtatatgcagcgagatgagcaatctattgtatatgtttcttctccacaaagagcttacaatctagctataaaatattataattatttgagtgaaaataaacttataaaaaaagagcaatacttacctgtaagtgaatggattcaagaaaatttaagtgaaaattggagatttaatgctcttataaaaaattttattggcgttcactctggtattataccgaaacatttagttcattccatgattgaatattttaataatggaaagttagacgtactgttttgtacttctacgattatagaaggggtcaatactgctgctaaaaatgtatttatttttgataataaaaaaggtcctaatgagctagacttcttcgatttttcaaatataaaaggtagagcgggaaggatgttaaagcactatacgggtaaggtgtacatatttaacaagatccctcaaaaagaggatgtcgatttagatataccttattatgatcagaaattcattaatgatgagattctagttaatctagatagggatgaagtacatagtcctcatatagacagatatgataaattgcatgaatacaatgaagagttattgaagatcattaagaaaaatgccgtttcagtagcgggacaaaaagaaattataagaaagatagaactggaattgaaaaagaatcctaaattaatcatttgggatagattccctaatagagaccaacttaattttgtaatctctatagcatggaaccaccttttaaagccaacggaaacaacaagaccaatgacgataaaaaaactaccggtaacaattagaaaacatatctcaaataatttacatactttaattaaagaagaagaaatttacttacaaaaaaataacccgaagtgggaagcagaaagagtcatggatactgctatcgagaatgtcttccgggaaaaaagacactggatttcatataaagttccaaaatggttaaatgtagttaatgctttgcaaaaagcaatatgtattaataagggctttagtagaagtggtgattattcgtattttgcatcatatctagaaaatgaaggtgtagaagaaagattctcattactgattgatatgggcatcccttcttcggtaattaacaaaataaatcatcttgttcccactgatttaaaaggtcaagaattaatccattttgttaaaaacttaaggaaaaataacatctcttcattattggtgtacgaaatcaataaaattaaacagctatag

SEQ ID NO: 59598 - DNA, 1050 bp, Pseudomonas poae RE*1-1-14
gtgtcctcatcattagcaactgtgccctcactgattgaggtcatagacaagctgttgaatcagtctccgctagacgactttgtcaaatgcgctttggacttttccgtccagttgccaggctcaccacccaagctcgctttgctgcatgtacgtttccaagaggacactcctaacactacttccttggcggacttcctaagcagccaagcggttaattacgcgcttagccggcggcgtcgtgatgcttacatgacgcagctgaactctggaaaaaatggtgatctgtcgctcacttctcagattcataaagctgtgaggagtgcgttcatcgatttccgcaaggagtttccgtctcgagcaagtgaggtcggtgaggttcttgcttattgcgtggcgatacatcacctgggtgctgcccagctagtagccaagatgtccctgaaaacttccactaatatgccagtccacggtctcgatggaattcatgcctctgtgaaagacggcgtgctaaacgtctttttccttgagtcgaagctggccggctcagccgcaagcggcactgctgattacgcagagtctatcgcaggattcggaagcaataaaaaacaatacatgcaggaatatggattggttcgagacctaggcaacctggacgcgcttgatccagcagaaaaagaactgctgatggattaccttgatgtttttaataagcctaactcaccaaagagagagcgatccgttggtgtgatttgttattcggaaactaagcattttggtaacaaagtttcagttgatgataccgtgctcgataagcacgagactcacttcggtgaattgtatgtcaaagactatggtcgtcatcatgaaaatgtgagcaaccaacttgcaaggcacggagttgaccccaataagtgtatgctatatctggtggcggtacctgatgttgatgagttgagggagcagttttacgagtcattggggattgtgccagcactatctgatacggcattaacacctccattgaccgatggggatgatcaaaatgagtag

SEQ ID NO: 59599 - DNA, 2631 bp, Pseudomonas poae RE*1-1-14
atgagtagctttgcatctgagttgtcggcgcgcatcatcgaaaacgccgaattcaggaagactctaggaactctccagtctgcaggtgcagcgaatactttgccaaagggcatcgagcgatctgaggctgatcctgatgtcgaagctctggggaagttactttactgcgcatctgttttcgctcagtcgaatatcgaggctcatgtagggatggctcaagccatcgcattcaatgcaatgctagttaatcaggaacaaagtattttggatcggtgttcagcagtgttgacagagctcgggaattttcccggtctccgatatgccgaactgaacttcaaatcaaagctgaatagtttggttggcttgattcaaaggcgcgtggtcgagcatctcaacactatccgtgtgcatgcagaacaaatagctctcacggattatcaaaaagaagtatgggactctctggagggtgggtcatcacttgcgatatctgctcctacctcagcagggaaatctttcttggtgattgagcacctatgccgtcgtgcagtttcctccagtagttttacatttgtatacatagctcctactcgagccctgctttccgaagtccatatgaggataaaggctcggctcgcaagtgatataggaattcgtgttacggatatcccgacatttgaacaggtacctcgacaggtctttgtcctgacgcaggagcgtttccaggtacttctttctacaaccgccgctaagattgatctagtagtcgtagatgaggctcaaaatctttctgacggtacgcggggaatgatcctccaggattgcattgaacagtgcgtggtgcgcgatgagcgtacccatgtagttatgcttgcacctggtgcggaagggttcaaaaaagctctcgaaagcctgggtttgcctgaaatttcggaaatcaccaccaccgtctcacctgttcttcagaataggattgtagtgactaagggcgttgggccgcgtcaattggatttcaagctactttcctctctcaacacgactccgataggttctatgacctgtagcactggtatgtcgtcgccagatagccgtttggcagccgtagcgcttgagctaggtagtagtggcggttctttggtgtatgccaagacgcccacagaagcagcaaaactcgcaggatctatagcgataggggttacagatccaggtgcccttggtaagactaaagacttagtagcattcatcaaagaacacattcatccggagtatcacctgatacacatggtggagaagggggtggcattccattacggacaaatgccgtcgttgctccgagaggctatcgaaaacgcatttcgtaatggctcgatcaaattcttagtctgcaccactactctgttccaaggcatcaatctaccagctagaaatgtcttcatcgatactcccgcccgtggtaggggtgataaacagcttctcgatcctgctctgctttggaattttgctggccgagcaggccgtatgactaaggatatagttggaaatgtgtttctcgttgactacgattcgtggagccaacagcccatggataagtttacgaagttcaccattaaatccgctttgggtgaggctatcacccaccacgctagtgaagttctcaaggtgctggcaggggaggcacccgctggtaaacctcgtgatgaagcaagtagaaatgcttttgcgtctgctggcatgctcatcaccaaggcacgacaaggtaacgttcagagcttccttgaacgcgttgcgcctgaattgaacgttaaagattcacagttgctttgtgttgcctctcaacaagcatcagatagcttggatctcccgcttaacgttcttaatgcaaactggactttagaccttttttctctggatagactgaagattttcttacgtgcgagcctagacgatggaactctggaaccgttgattccgcgaaacccttcagatctcgcccggaaatccatcgggcattaccgcgacatatttaacattatgtttaaatacataaaaggttatggaggtaacttcggcgggtatgtagcaagaattgcagttcgatggatggagggtaagccttatccagtgatcttaaagtatgagataaattctaagcagagtcagattcagaaaaagcgagatattgaaggtatgtatgcccgcacaattgagggttacaaggtaaaaagagtcactgagcttaatcccagcaaggtgattaaggatactttcgatatcatcgaagacgtcatccgttttcaattggtgcagatgggtaaagcctatatcgacattctcacttacgtgatggttgagaatggtatgagccatagagtgccagagatttttgatttctcgttagcgctggagttgggtgtcagcaccgtgacagggcgagcgtttcttgagcttggtctatcccgcatcgcggctgctgagcttcagcgcttagtccctgatagcgacctcgacgtcgtttcggctcggaagctgataatcgacttcgatcacacgccgttttcgttgagccaagtaattattgatgagatagctaaggttcgcgctacgatatctgacaccttggtcgtcacagagtaa

SEQ ID NO: 59600 - DNA, 921 bp, Actinobaculum massiliense ACS-171-V-Col2
atggcacaggcaacgatcacgccaacgctgcgcggcgacacattcgcgtccacgttcaccgaagtggcccattcgaacacgttaggtcttcgaaacgacgaacagttacgcctgttccatctgtctatccaaaacaaccgcttcgaccacacggccctcgtcaagttcctcaaacgcaacgttggacgctacgtcttctcccgcgccgaatacgaaggctacaaacagcgagacgatctcgaagaagttgctctcgacgcggtaaaccggatgcgttcacaacaagacggcatggggttaggtgaaatcttgctctacgtcctgctcgaacaaatcctcgaagcacccaaagtgatgagcaagatcgagctcaaccaggcccgaggccagatccacagccgctgtgacgccatccacctactcacaccagacggtcagcgaaccaccagcagcatcgtgtttggaacctccagcgtggtcggcaacattggggatgccatcactgcagcattcgaccgcgttgtagatatagaacagaatcgctcagacgaggttcagctcgccgagcaaactgtgttcaccaagaccctcgacccagcaacagcaaactacgtcaaagatctgctaatcccgaagccgggtggagcacccgagtttgataccgcttattcgatgttcctgggctacgacatcggtctcgatccgaagaactatggcaaccagcaatatcgggctgcgctcgatcagaaaatgcagggagatatcgccgcgcacgcccaaatcatcgccaacgagatcaacacccgaaacctcgataactactcgttctacatttacgttgtgcctctcaacgaagtagacgttgacgcggacgcaattatggatgggctcgtgggtgggccaggtggtagccatgtctga

SEQ ID NO: 59601 - DNA, 2670 bp, Actinobaculum massiliense ACS-171-V-Col2
atgggctcgtgggtgggccaggtggtagccatgtctgacaagaaattaacagtcggcgagctcgtattttctgacatcgactccaacgaattcctcaaacagctgtacgccaacctgctctacaactacggcttacatcgattggggctggcggatcgtcacccatacgacgtggatcttgaagccgccctgcgattcgcagacctgctgtcgaaatcaatccaccccaccaatcgtgaccgacacagggtgtgggcgcaagaaatcgcgctcctgtgccacattctctacccacaagacgcgcgaacgaaagcatacgttcctgcaatcttcaccacgctaggtaactacccaggcctgaagcagttgggtgtgacttccgatgcgggcatcctcgacgccgcattcaacgcctaccaagccgaatacctcaccgtgcccggtgataagtcgatgaagtttttcgcgccgcaaaagaagatctacgaccgcctgaacgacggcaagttttccttctcggccccaacgtcactgggcaagtccttcatcatgcgcaccttcatcaccaaccagatcaaatccggggtgacagccaactttgcgatcatcgtgccgtcaaaagcgctgatcaacgagacccgctcgaaactgatcgctgacctcggcgaagaccttgaacggcacaactatcgaatcgtcagtgccgctggtgacatcgtgctcgaaggcgatcacaacttcatcttcgtgctcaccccagaacgcttgctttaccttctgatcggcaaacctgcaatcgaattcgagtacgtctttttcgacgaatcacacaaactctcaggcaagaacagccgcgccccgttctactaccaaaccgtgacaatccttcaacaccgccacagaccaccacacttcatcttcgcttcacccaacattcccaacccagaggtattcctaaggctggttgatccaaactctgacgaaaatgaaaccaacgcggtcgcaacccagtattcgccagtcgcgcaattcaaatacctcgtcaacctgcacgagaacaccatttccagctacaacgaccacacccaagaattcacgcacctagcctcacttcaagctcaggacgctaccgcacagggcgtaacccgatttgttagtgaatcatcacgaggttcagatcatcgtgggcaaaccatcgtgtttcattctgcccgacatcacgcagtgcaagcggcgcgtgactatgcccagggtttggcagacctcaacgataaagacttggacgctctcgcaaaagacatcgaacgcgacgtccacgaggactactacctcagcggtctcatccgtagaggcgtcagctaccacatcggctacctcccgccagcgatccgcgaacgcatcgaaggcctgttccgcgaaggcaaaatctcgacactattctgcaccagcacgctcctcgaaggagtcaaccttcccgccgacaacctcgtcatcacaaccaacaaaatcggcagagcaggaatgacagcagtcgacttcaagaacctgatcggccgagtcgggcgtatcgagttcaacctctacggcaacgtattcatcatcgtgggcaaccaacttgcatccgagcaaaaggccaaggaactcctacaagcgaacgttcctgcacagaagctatccgtgcaaactgactcacaaattatcagcaagaaaatgaagcaaggtgtcgtcaaggatctacaggaaggtcgcatcgaattctccaaagggaatgagagctatgagcgttatgatatgaaacgcaaattcggtctcatgctcttgcgcgacatcactaccggacgtcaaagcctggtgcgtgaagaattctctgactatcttgacgaacaggctaccaacagcattattgctactttctcgcgacgcgaaggccaacaagatgacgatatcaatgtctccgttgaccaggcagaagcgctgacgcacgcaatccaagctggactccagtatccacaactttctccaaacggaaagttcagttacgacgagaccctcgcgtttcttcagcggcttgcctcaatcttcaaatggcgaatttacaatcccgagacgttagggagaacaaccaagggaagtgaccagctcgctatgctgtcctggtacaccgtcctcctgttgcagtggatggagggacacggtttgcgttccatcatgaatcgtgcaatcgagcatcaccggaaaactggaattgtgtggatcaatcggcaaccgaatcgctacctagattcgaaagaacaccgaaaccttgtttttagtgacacgcttgaagctattgagcaagtaatcctttttgagctatcgaattactttcttaaattctccaacgaatacaagaaggtccacggaaaagagcagttcgacaacgactggtacgaatacgtcgagtacggcacaacgaaacaggaaaccatccttctccaacgactcggattcacccgcgagagcgccacttacattcgaatcaacgtctccaatgcaatcttccttcacgaaggaaaaccccacctgaacccgattctcctcgaaagctcgaacatcaacgtccgcaaagaagccaacgaaatcagatacaacgtgccagaagccttctcgatgccagatttcttgttctaa

SEQ ID NO: 59602 - DNA, 1140 bp, Dickeya dadantii 3937
atgacgcatacttcatccatcacaagtaatcagaaaaatcctaattccaagtatgaattgctatatatcaaaacttttgatttggaggtaatacaaggaatgaaatctgtagacgccaattcgttacataaaatatacaaacctgtttatggtttagagcatataataattcttgcacaagaaagtcttcctaccgcccccttcaaagttaacctattatgtttaggcttcaaagaagatatgcctaaagataaggaactagcggaaacattatttttagaattagttcattattgcattcctcatccagttatcgaaaaaagaaaaaaacaagctttagatgaaggtaaagatgaggcaagactttatagtgaattacttcgagaagcgcgtagtcttttcatgaagtataaattagaaagtgccataaaaaagaaaagtggagaaacagaagaaaaatttgaacaacgagtaaggaatgccaactcacgttatggagaggtcggtgaattgatatcttactgtatagcaattcattttttgaaagcatctcagttagtttcaaaaatggcacttaagacatcatcagaaatgccggtcttcggattagatggtattcatgccacaatagacgctgatggtactttgaccgtcttctatcttgaatcaaagatcacaagagaatttgatagcggctcagaacaattttccaaatcagttagtggttttgaaatcgataggaatggccgcaggaacgagtatagaataattcaagatctaagtaaccttgagtcattagaaggggaagaaagaagcaaggcaataaattatttcaacccttactcaagtcagtcctcaaacgttagagagcgctttattggtataattgcttacagcgaaaaaaattattctaataaattaccaatcaacgatgaagcgcctttatcaatacacttcgagcactttaaaaatggctacaccagctcatatcaagagaaaattaacaccctaacgagcgatcttacgaaggcgggggcaaccctccaaaagtgtagagcatatatcttcgcattgcctgatgtagataattttaaattagattttgcaaaggagctatccggtgagcactttagcgcatga

SEQ ID NO: 59603 - DNA, 2577 bp, Dickeya dadantii 3937
ttgcaaaggagctatccggtgagcactttagcgcatgaaattataagccaaataagaaataagtttgagtttaaaagtgatctcggcttcttgttttcacattctttcttgaaaaaaaatgataaaaacattttcgttaacagacacagtgaagaagataatgcacccactgaaatattcaaaagattaattgaatcagcgtatctattctcacaatcagaatcagatgaagataaaaatcttgcacagagcattgcatatcatttaaatacaatcacagatgatgattttttgaaaaaaatgtctgagaatttgctcagaatattgggaaatcttccgggagcaaactatttacaaaaagaaaatagagatctaccggaaagtttttattcttattttaaaagaagatttatagaaaaagaaaacaccattaaaatatctaacaaagaacttattctaacagactttcaaaaaaaggtatgggactcattacatacaaataaatcccaagcaatttccgctccaacctcagcaggaaaatcttttttagtcgttgaaatgatcatcaataaaataattagtggtgagattaatttcgtagtatatgttgcgcctactcgtgctttagtgaatgaaataactgaaaagttcataaataaaactctagaatatcataataaaataagagtaacctccatcccaacggttaatgatggatttcataaacaaattttcgttttaacacaagaaaggctgcaagttttacttgatcaccaatatcataaaatagatatggtagttattgatgaggctcagtcaatttccgatgaaataagaggcatgatattacaagatggtcttgatagaatcagcgttcaaaaccctcatgcaaaatatgttttcattgctcccggagctgtaggttttgatgacttagcagatattataggaattgataaattacatatagaaaaaacaaactactctccagtggtgcaaaataagatcatagttaaggtcgatccagcgaaggagaataatttaaaattatcattgttagacaattcgaatatactacctattggtgaaattacctcaaaaagaggttttgctaacgagaatactagattagctgccgtagcattagaattaggaaagaatgagggttctctcgtgtacggaaccggtgcagctgatgctgaagacgtggcaaagcaaatatcctccggcttactccccattaaaaatgataatgatttacaagagttatcaaaattcataaaaaaacatgttcataaggattattcacttgctaaccatgtattaaggggcgttggatatcactatggaaaaatgccgagtttgctaagagaaactttagagaagaactttattaaaaacaaattgaaattcttggtatgtactacaactctttttcaaggagtaaatcttcctgcaaagaatgtatttatagatacaccaacaagaggtaacagaggggaaaagttagatcccgcatcactctggaactttgcaggaagagcaggaaggttagggtattctttttcgggaaatgtatatctaatcgattatgatgattgggaaactaaacctttagattctaaaatagatttccagattacttcatcctttaaaaaagtagtaactgatgatttcgataaaattctagagcgattaaataaagataatcactcaggagtcagtcaatatacaaacgttgatgcagcggttgggctcctaatttcccgagctgcaaaaggtgatttacataatttcctaaccaggtctttccgtagcataactgaaaaatcaaaaatcaactctattgaaattgctacacgcaactccctagagtcaattacaatccctcataatattttgtctcttaattggacggttgatccattcggccaagaaaggttatataatagattcatacaaaaaataaaagaaggaaaggcagatgagcttatcccaagacatccatcaggcgatgtttatgctaattacgttggagtttttagccgaatcaataaatatataattaataataacactgcaaaattctcaaattatctcacatctatggcgttgaactggatgagaggtaaatcacttcctgaaattattgatctttcaatcaaaaagaaaaaggaaaaagggggtaacaaacctgttaatgtagatagaactgtaagggaagtctttgactttattgaagacaatctaagatttaaatatgtacaacttggcaaagcgtatgttgacctattgcgccaagctttagttgataataatttaagtcataaatcagaagagatttacgatttcccattatctcttgaattaggagtggcttctattgccggtcaagctttcattgaattagggttgtcaaggatatctgcctcttatttagagaatataatacctaactcaaacccaactataaacatggctaaagactggttaaaaaataatgactatgaaacattggatcttccactgacaatatttagagagttggaagataagggtttgttgaatagcgattaa

SEQ ID NO: 59604 - DNA, 1629 bp, Dickeya zeae Ech586
atgagtattactagcttatccgatgcaggagggcctgcggcaaggcaaggcttcaagtatcaagatcacgtagccgtcagtttcatcttcaagatgctctgggatagcaactactcccaagtggagtgcgagacagcggatgatatcgtggctgtattccaatgtgcggggcagctcataaacgaatacattcaggtcaagactaccgaaagtgacagcaaatggaacttgaaagagataacagcattagatggcaccaaggccaattcttctctgctgcataaatcgctgaaatgcgacgtgcgtcccggctttgcccgctttcgaattgtgacaaagcgggacgtcgcaaaagttctagaaggattcaaaaaagagatagatacacgagttttgcctgatataactacggcccgaggcgtagcactgcgcaagaagtttaaaacggttgtctcgcctcaaaaacgagacttcttgtactgggcagaaaactttgtctggcaagtgtacggcgatatcgaggcgctggaggccgttaatataaaggctttgtcccagcttgcggagaggcttggaaatcgccctaacttcacacaactgcaggcaatttacgatgaattcttagaaattgctgacaaggcggccacggccagcgtgaagacaactgtagcatccaagatcatcctccgagatgagacgctggcttacctcaagaagttattagacgaggctgatgataagtcaatggccacatcaaaaccttataaaaagcgtccggatccgttcttgaatgaatttcacgccaacactaaagagggcttgttgcactcattttctggttttgacgtgcgctatgcgcttaagaaatggcggcatgaacattttgcaaagcatctcatcgaatggttaccagaattttccctcaaggccagcgaaattgtaaatatccttgcgcataatgccgaagcaaccttggcacggtcaatcagtacctttagcgacagtgagcttccgcgcgacaggctcatcgcggaactgattctccattcgatcctgcgcagtcgccaaaatagcgagcccgttgcgtgcaaagtcttctacaaatccgccgacaagctttcggagtttggcaacgctcacgtcgttcagatacctggtcaggaagatcagttatggttaggtcttgctcgcctgatcaaagcaaacgacctggatacaacgatggagcatatccgcgcaatccttgacgaaacgatctcagaaacggtgctgtcggcagaacgtgaaatcattatttctctacgcgaacccttacatcaccagccaaaagcagatgccttcaaccaggctctacatcgtaattcgccggtcgatgacatgctgaatatcctctgtttccccattttgttaacctacgacagtgaagcgctttcgtcaggctggctcgctgattacgtagacaacctcaagacagagatcgagacccactttagcacgttcacctcgaaactgccggagaacatcaaacaaatgaaggtgatagtctttctggtgccaatggaaagcatcgagcatctgactaaggctttcaacgcccgctgcgaaaaactggaagagttacaggcataa

SEQ ID NO: 59605 - DNA, 2199 bp, Dickeya zeae Ech586
atgaagatattccaagcaggtcactctttcgtggatatcttaaggaacgatgcggtcatgaactacgaaacgatcaagtataatctggcgaaactcggtgaagagagagcatcaacggtcgatgtgctgctcgccatcaacaccatcgtcaacagaagtagttcagaatgggagggacgcgatttggtaattcgagctctcgacaaatttaagcttttcgactcagtcgaacaatcgcttctgcttaacatggtacgagctgtcggactattcccctacatcacgcctcacctcagtaccatggcgctttctgaccgcttggcttacgaagctcacagggttgagggggtagaacagggcatggtgtttcatcatttgcaggcccatgttttcagcttgatcatgcaaggccgaaacgtggtgctcagtgcttctacaagcgtcggaaaaagcctcatcattgatgctgtgttggcacagcgacgattcaaaaagatggtagtgatcgttccgaccattgcgctgatcgacgagacccgtcgtcgcctagtcaagcgctttaaggacttcaacctgatcacgcatcctagtcaggaagcagtgcccgacacaaccaatgtctaccttctcacccaggagcgagtcatccagcgacctgatcttgctgatgttgaattcttcgtcttggacgagttctacaaaatcgacttgggtaacataacagatgaaagtacacgcgctgtagatctaagtttggctttccacaagcttgcaaagactggagctcagttctacatgctcggaccgcacatccaaaagatctctggtttggatgattacgaataccacttcatcccatccgactacagtactgtcgcggtcgacatccagaatttcaatctggagatgcgttccgaagagcgaaaggaaaaattgcttgagttggtcacaactctgaactcgcccaccctaatctactgccaggcaccacctagtgcgaacagggtcgccgaatatttgattcaggaagctggactgacgccagtaccggagacgcaggaaatcgccgaatggatctctaagcactaccaccctgaatggaacgttgccaaggcaatctctctgggtatcggaattcaccatggaggagtgccgcgtgcactgcagcagtacatcgtcaagttgttcaacgagggcaccatcaagcgaatcatctgtacatctacgatgatcgaaggcgtcaacacgtcggcagagaatgtgatcatttacgaccgtcgtctgaaaaactcaacgttcgattacttcacttacaagaatatttccggtcgtgctggccgcatgaataagtactttattggcaaagtattcatgctcgaagtgcctccgcttgagcagggcctcacagtcgagtaccccatcgggcatcaggatgaaaactccccgatggggctccttatgcaactggagaacgaataccttactgatatttcacgtggtcggcttcaagatgcatacgccaacccggtactgtcgccgacaaccctaaccgagaaccggcacgttccgattgagcggcaagtcgaggtagcagaaacgataattcgtgacctgccgctcagcaacaaacttctggactggaaaggcatccctgagccaaaccagctcaattacctatgtgagctggtctacagcctggagggtggtaacctgatggactatgggatatcgtccagctcgcaattggtgtggcacatcaatgcgctccgaattcagaaaaacctgcctgcatacctaagagatgcggtagataatcggcgacaggaacatacacctagtgaagcgatcaatctacgcctgaaattcatcagaaacatggtgtgcttcagattgcctcgggacatcatggccgtaaataaaattcaggccgacgtgctggcgaaagaagggattgagccgggcgatttcagcttctttgctgagcagcttgaaaatatgttccttgacccgctactcactgcgttggacgaatacggaattcccactcagatctcgacccagatcaagaatcttatcttgccatcggagcatttgaacgacctgctggcgaaacttcgggccctggctcccagagtagaacgccttcaactgactgattttgaaaaaagcttaatgcgttgggctgtgtccgaaatgtag

SEQ ID NO: 59606 - DNA, 975 bp, Clostridium bolteae 90A5
atgtgctttatttggttgggggagggactgcttaatatggctaacagaattttcgataaaaagaatgtaattttactgaaggttaacgaagatgatttgaatacttttttagttgatatggatattgacgatgaaggaaatccaaaatattgtttggacgattttactaaagctatatgcaacacaattccagaatatgtttttgcgcaatatgaagatcccaatattcatcaaaatgatattgttgaaaagttaagagaagcggctcattgcatttataaaatcaaagactttcaattaatgaaacagtggtgtgtagataaagatattaatgcatataacgaattaaaaaagtctagtacagctaaacggggagaatttggagagttgttgttgcatttgatattaagggaatttaaacgtacaataccacttatttctaaagtttattttaaagatagtgcgagtgtgcctgcgcatggatttgatgcagtacatatttccacggatgaaaaaattttatggcttggtgaaagtaaactttacgatgatagtaaagagggaataaaagcattagtaaaggatttgaatgaacatattaatatagaatatttaaatgaccagtttgtaataattaaaaaaaatcttgataataattcaatacctgacagagaacaatggattgatacgataacgaattgtacaaagctaagtgataaacttaatattataaatataccaatgctttgtacctacacacatgacatttacaaaaagttttctgatatgaatgatcctaatgcagtagcttaccataaattaaatattagagagttaaaagaatattttgataaacagaacaaaatgccattaaaagatagagttaatattatacttatgctatttcctgtaaatgacaaaaatgaattagtcattaatttgcataaacgtctttggcatatgcagagtatttga

SEQ ID NO: 59607 - DNA, 2217 bp, Clostridium bolteae 90A5; identical to SEQ ID NO: 59209

SEQ ID NO: 59608 - DNA, 924 bp, Oceanibulbus indolifex HEL-45
ttggttaatatagtttcgggcgatccagaagagttgggtgttcatctccagcttgttaaacgggacgtgctcttgaaagattgcgtggcccgtctccactgtcattgcctgactgtggatgggaacggacgcgtcaagccggagcgtcttgcggaatttatgcgcaactcaattatcgattatgccgtcccgaaatcgcggttggatgatgcgcgggcgcgggacgccagattcaagtccggaagcgcggttgcagccctgcaccacgaggcaatcggcacttttacggaccttgccaatactggcgaaggcggcgagatgctgctcttcctactcgcagagcgctttctcaaggttcctcaggtgctctgtaagatggaccttaagaccgactctcacatgcactatcatggtgcggacggcgtctatgcttccgtaaacgaaaacggccttctcaaacttttctggggcgagtcaaaggtgtatggcgaccctacagcggccataagagattgcctttcatcacttgcccctttcctcgtggagacggaccacgaaggcgctgatcgcgagcgggatctcgtgctcctcagcgacaaagccgatctcagtgatccggaacttacggccgcattccggaaatatttcgaccgaacctcaccgctatcgaacagggtcgaatattgcgggatcgcgcttatcgccttcgatgcggatttctatccgaaagatgatgcaaaaggcatcggggaggacatcctgaaggcggcgaatgacgaaatggaaaaatgggtgaagaatgtaaagaacagactatcggtggagaaactcgacaaattcgacattcagtttttctgtgtgccagtgccttcggcggatgggtttcgcgcatcgttccttaaggcgctgggtattaagaaatga

SEQ ID NO: 59609 - DNA, 621 bp, Oceanibulbus indolifex HEL-45
atgaaagataccgaactctttgattggctgtcgggtgaggcgcttcgtgatgatattatcaggttgactcagatcacagtggcgactgagataacaaatctggacgcaatccatgaatccgctgacccaaagaagagctttgactggcagcagcttcttttggccggaagccttttggccagatcaaccgaacgaacgcatcaggaggcggcgctgcggatcgcaaccgctgccgtcacactcgaaacttcgccggaagtgcgggatgcgggggctgtcctcctcgaaaagctgtccaatcgcaggtccgtcgagctggcaatactgcgaaaccggatcgctcccgatcttgagggcagactgggcgtgtcgatgcgccttgaagccaacagaagacgtttcgaggactcgatactccttgaatcgagcggaaaatggataggcgtcaacgattttcagaaagaactatgggcgggcgcctcttccggcgccggctggctttcagcgtccgcgccaaccgcgtccgaaaaacttacctcgttttgcagtggctgctcgatcacgttcgcacgagcaagacaaagatcgccgtttaccttgccccaacccgggctttggtga

SEQ ID NO: 59610 - DNA, 933 bp, Chryseobacterium koreense CCUG 49689
atgacgccatttaattccgacaaaataataatgcaccaaataaatgatgatcaattaagttcatttatagtgggttttgatttagacgaaaacgctgaaaaagtatacaggttgaaaccttttatagagaagttaactgatgtcattcacgaatttgcttttggttttcatgaagggacggaaacgctaaatacggaattggtatcgaaagttgcagaagcagcaaaatcgatctacaaaatcgatggctttcaaaaagttaaagatatttacgataatgatggaacattatcagatgatgtgactgaaaaatatttgcgacgaggggaatttggtgaattaatattgcatttgcttttacgagacttctataaaacaactcctttattatccaagatatactttaaagattcacttggccatactgttcatggtttcgatgctgtccatattcaggaagacactaaaacgctttggcttggtgagtcaaaactatatcatagtggaaaaagcggcgtaaaggctttagtcgaagatatagctgaacattttaaaagcgattatcttaactcggagttcatgttgatttcaaaaaagatcaaacactttaataatattcccgaaaaagattattggaataatttgatgtcaaaaagctctactctttctgatcaacttgcatctattaatattccattactttgcacatacgaatgcgagttgttttccaaatattcagacgaaaagtgtgaagaatttattcaagaatataccttagaaattaatgcgctaaaggattacttcgattcgataaatgtacatcctctcaaatcgcatctgaacgtaattctaatcttatttccagtacaaaataaaaaagctttagttaaaggacttcaccatcgcctctcacttttgcaagctctatcttaa

SEQ ID NO: 59611 - DNA, 2178 bp, Chryseobacterium koreense CCUG 49689
atggaagaactaattacaaggattacttcagcccaaaggtttaatgttgaagaatcatttgaaatatataaggcaatatcacaatacattgtgagcgacgatacgattgcacaaaagcttgttacaaatgtattggataacagaaacaaatttgatccggcgttagatttaattctctcagatcttgttgaagccgtgggattttatccatacattaataaagaaaatcttgttttagaatctacgaattcgttgattaggcttgaatatcatcactccggcaaccttaataaatttcttcatgaagatcagaagtacttattaggattattaaatacagataaaaatgttgttgtaagcgctccaactagttttggtaaaagcctgctaatagaggaaatcgttgcttcccacaaattcaaaaatattattgtaattcagcctactctcgctcttttggatgaaacccgaagaaaactattaaaatatcgtgatacttataaaataatcgttagaacctcacaggaatcctcaaatgaaaaaggtaacatctaccttttcaccgccgaaagggttaatgaatataaagattttcaacccgtagaattccttatcatcgatgagttttataaacttagcgctaagcgtgatgacgaaagagcagattcgctcaacaatgcatttcgtcacatcattaaaacttttggaagtaagttttatttactaggaccaaacatagacggtatatcagaaggttttactgataaatacaatgcggtgttttataaaagccggacgactttagttgacaccaaaacaataaatgtctataatgaccataaagaatactttgataaaccgttgaaatacaaagaatataaagaaaacgttctatttgatttacttctaagcaaacatgaagaacaatccataatttactgttcctcaccatctcgagtacgctatctgtcggcaaaattctgcaaatttcttattgaaaaaagtgaatcttccaatgaagaggagcttgatttaatcgaatggataaaattaaacatttcacctgagtggagcttaattaatttactgcaaaacaaagtgggaattcatgatggcgcattacaaaaacatatcacaacttcgataatagattattttaacacttgtaagcttcattatttattttgcacctccactataattgagggtgtaaatacgagtgcaaaaaatattgtatattttgatgcaacgaaaggggatcgcataccaatcgactattttgactattcaaacataaaaggtcgagcgggacgattaatgattcactattctggtacaatttataatttcaatacaattcctcctgtggagtttactattgtagatattccgttttatgaacagaatccagtatcaaatgaagttctaattcatttggaaactgaagaagttaaagaggagaatttagatcaatttcagcgaattaatgagattccaggtcctgaaaaaactattatcaaacaaaatggcgttcaagtattcggacaaaaaaacataatcgaagctcttcgcaacgatttaccgagaaaatatcacctaatttcctggactggctatccaacaggagatcaacttcattatgttttagaattagcgtggaacaatcttttaaaacctaccgaaacagtccggccaatgaccctaaaggctcttgttactgttactcaaatatatggctataaccaaaatatcagcaacctcataaacaatagctactcttatttcagaggccttaagcagtatgagaatcagacggatgctgaagttatggatgatgcaatccgccacgccttccagatcttgaagcactggcttgaatacaaagttccgaaatggctatcagtagtcaattctttacaagagtttgtctgtagtgaactcggcttaaaagctgggaattacggatatttttctaatcttatagaaaacgatttcttaagagataatctgagtattttggctgaatttggaattccgggttcggcaattagaaagttagaaaaattggttcccgcagatttacctcaagacaatgttttagattttattaaagaaaataacattcaaaataataatgtttttatttcttacgagcggaaaaaactaattgaaaattaa

SEQ ID NO: 59612 - DNA, 894 bp, Acidovorax sp. JS42
atggtgacagaagtggaaatcgacgcactgcttgcgtcaactgatagcttactcaataacgtcttcactttcacttgcaccgggcactcaatgcctggcaccagccatcgaggcgctgcggtcgcccatcaggacactctggagagaaaagaggatttcctgagggagctgaaaaacacaatgtgcgcatgggtttactcgaagaataaatacaacaagatatttcaggatgagatggcagtgcgcggggcagacgtccaaaacgttagctctcatctacagttccttgtaagagagaggtttcgtaaaggctatcctcaaggccaattcggagagcttcttctatttaactttttgcagcatttttttaaagcggcacctttgctgagaaaaatgcccatcactacaaaccaagctatcgaacgacatggggcggatgctattcattaccgtcctcaaggcggaaagaatttggtctttattggagaggcgaaaacttattccagcaagtacaggtttaaggccgcgctcgatgacgccgtggacagtgtcattaaatcattcttaaatctaagtaatgagcttaatctctacatcaatgacgacttcattgaagatagtcttcgagaaattgccgggaagataaaaagaaacacgcttccaaacgtcgtatatgaacttgtttgcataataagctaccaagaaaacgaaaaaaataaaaccgggaactgccagtccgaaattgagaagtccatcgaagatgcagtgacatcacatattctcaagcaccaaggtgctcttggccactttgaccaaggcaccctagggaaaattcactttattttctttccgttctgggagtttgataagttgttgaatgggttcgactcatga

SEQ ID NO: 59613 - DNA, 2571 bp, Acidovorax sp. JS42
atgataaaagacgagcagcgaatcaaagaggctgcagaagctctattcctcatagagcatcaaatgttcgccgctaacctaggtttaatcgaacacagcggggaactactcgacgatcaatcattgattagcgatctcgtattttcgattgatgaacttgcttggtccaacgaaacggaggaccggcgcttggcgattcaaatgattgcactgacctgggagcacgcaacctcaagtctcagagcaagaatgcgggagttttttatcctctcgctttctaggttaggggttgctccctctacccaaatgattgacctcgaatttaagaggagttcccattatgcgggcatcagcagttttcgcagcaaacttgcgactgtttcgatgcaaattcagtcgcagctactgataggcgaaattcgctatcaactaactgaatttcaaaaaagagcatgggatgcattctccagatcgccgtatgtaggtatttctgcgcctacatcagcgggaaaatcattcgcaatttatcttctaatagtagattcggcgcttcgctcaggactgccgtctgtctacattgtgcctacgatcagcctggtgaatcaggtcacggcggacctgacggagttgctggatgcacacggtcttacaaattggggcgtatccacctcgtataacgcgaatcaatcgaacacgctattcgtactgactcaagagagggcaattcttgccattgagcgcgggttatcagcgcaaaatcttgagattttagttatcgatgaggcgcaaaatctcgagaaggtcggtgatgacgacgagaccagatcgaagatcctatttgactttttgcatgatatgcgggagatgcgttcagcaaacaaaattatcctgagcggaccacggctggagaacattggattggttggggaagcagtcttcgacactgatttcgctgaagagcgagcattggaatccccagttgcgtccatcacttacgccgttgagcagcgaggcaacgatttttatctcaatcaatttcgaaactcgctgagcgaaaagtcttctttgaagattgaagatgctgagagagttcagggactactgtcgaaagggtatggagaggaatactatacaactttggccgcactcgtagattcgctcggagatacatcgaaaaatctcatattctgtccaacaaccgaccaagcacgaaaggttgccacaagactcccaggttttcgcgagcgaccaccaggcgaacaagccttacaagagttatctcagtatctcgcggaggcaattcacccgcggcatcgtcttgttgaactcgtgcagcgtggggttgcattccattcagggtcgcttccaccacacgcgaggttagtggtagagcaagcattttccgatggccttctgaaagatgttgcttgtacaacaactttgatgcagggcgtgaacttgcccgcaaaaaacgtatttattagaaatccaaatctgttcgtacgacgtagagccggaagcgaaaatgcggaactcacagagtatgagtttgctaatctgcgaggacgagccggaagattgctgcgagattttgtagggcgaactattgttctgaacgaagaagcgttcagaaccgtcggcgatcagcaggacgatttgtttaaggatacttataagtcgttgcgactgacttatgcagacattctggagcgcaatcgagaagaaatattttcagaacttcaggtcgttggaactgcgaattcacagggtgctaagtttatctctgcctatgtgcgccagcaattgtttcgggatggcctgaacgcgcctgcgcgactgcaaagtgtcggcttggaacttcccgcagacatcttacaaaaagttggacatgcgctaaagggcctaaccattaggcgagaaacaattctagagaatcgttattgggatccgtttgacttgcagaagatttctgatgagctgtctgcacaaaaaattgaaaaattaccggaaactgcgtggcaggcaagagtgcctgcacttatcaaattgcttgaacttctggaaacgttatgccctaactattttaggcgatttttaggcgacgtctcatctaacagatttttgatggctcttgttttgagtggcattagctgggcgcgcgagacccccttgcgaactatactggaagatcggaaattcaatgatgatgcaaattatgaaggcaatatcgatgatcaaatcgaaatcatctatcgaaaagttgtttatgggttaccagcgcttttgaagccaattgcaagcattcagggtcagggcaccgcttttcttgcatcccttgaatcaggagcctatcatccggtgacacattatttattgtctctcgggctctaccgagagacagctgtgtacctcaagcgaagaaatttcggccagatcagaggcgacgacccaaatttgacgtctttggtagatgagcgagtgccgagctctttgcaaggattgaatagatggacttcgaggcaggtcgaaataacccttaaaaggaaactacggaggaatgcaaatgggtaa

SEQ ID NO: 59614 - DNA, 672 bp, Alcanivorax sp. DG881
atgacgaaaaaggcagcaaaaattgtttatcaaacagaaaaatacgggttaaggggagagtttggtgagattttgctgcatatagctattcgtcaggtttatgaaacgcttcctgctgtcagcaagatttattataaaagcgcagttaatgaaacagtaaagggatttgatgctgtgcatgttgtcaggaaagatggtgatcttgagttgtggataggtgagactaagttctatgaaaatataaccagggctgtttatgatgtttctaaagaggttgttgaccatttggaaaccgactacttgaggtcagagtttattctcataaaaaataaaattgaccccacttggtcagaggctgaagcgcttaataagttattgcatgagaacacatctctggattctgtcttcaaacaagcgtgcattccgatactgcttacttatgatagcgatgttgtcggagttagcgagagtgacaacgaggaatacagagagaaaattaaagtcgagatgagagatgcctatgctaacttaagagggaaaataaatcatgaatatgagaatagattcaatcaatattttcctcttgttgttcatgttatctttgtcccattaaaagaaaaaaaacagcttatagcagctcttgatgcacgacttaaggcattgcaactatga

SEQ ID NO: 59615 - DNA, 2148 bp, Alcanivorax sp. DG881
atgatgaatatttctgctattcgtgaaaaactcaaatcagaaacctggacaaaagatcccttcattattctctcagaaatagcgaatgtttgttcttctagtatcgatttaggccgtgatctggtgattcgagctcttgaagggcaggatttcctcgatcaagactatagaaatatacttaatgatttgacgatgcaggtgggcctctacccatatgtttcagatcttgaggatctttctttaagaaatgcactgatgcatgccgctcatcgggctgatggggtaatgggcgagtatgttttgcataggtcgcaagctcgtgtattgaactggctaatgtcaggagcttctgtgattttgagtgcgcctacttcttttggaaaaagtcttctaatcgacataattatatcagcaaagagatttgataatgtcgtattgatagtcccaactttggcgttggtagaagaaactaggcgacgaatgtcaagattcgttgatgagtattcgatagtcacttctagtaaccaaaaaatagctgaaaaaaatatatttgttctcacgcaagagcgttatctctctttagaagatgatatcccaggaattgatttttttgtgattgatgaattctataagctttctatatcaagtgatggaggtcgttcaactctactaaatcaggctttcctgcgattatccaataccggggcgcagttctatatgttgggcccttcaattaagtcaataccggctattgttaaagagaagctaaattgcaaatttctcattgaggattttcaaacagtagctgttgaacttcattttcttaagaaaaagccaaataaggatgaagctctagctaatcttttggatgaaattgacggccaaacgatgatttattgccagtctcccgcaagtacaagaaagttaattaaatcttatcttgatataagagaagtggagatgactcaagatggtgaacttttagaggctgcgaagtggacctcggataattatcatgatgagtggttagtctctgtggctcttcggcatgggattggaattcatcatgggcgcctccctcgtgcgcttgggcgctttatgatccgcgcttttgaggagggaaagataaaaatactcctctgtacttctaccctgattgagggagtaaatacctctgctaaaaatgtggtggtctacgatagtaagcttaatagaagatcactagatttcttcacttttagcaatattaaagggcgatctggtcgtatgtttcgtcatttcatggggaatatctttgtttttgatgctccccctgaagaagaacttccctttgtggatatgcctgccataaacccaggagagaacacgccaagcagtcttctgattaatctttcagaaatggatgttccatcgacacttcgagagaaagttgactcattgttaaggcaaaaactccttcctgttgagcttctaaaacaacactcaggtattgagcctgagtatttattggatgccgctaaaacactgatttctttggaagttagagagttggaacgctatgtatgggcttcaaggcctgtgtatgatgacatcaaacttacgtctgatctgatttggacgcaattaggtggggcggcagcagctaggcagagttctatgcgaagtgcaagcatgatgacattctggatatggcgtctttactcttcgcgcaatgtgcctcaatttagaagagaaatgataataagccaaatagagcggaatacttcgcctgacgaagcggtagagaatgtgcttgccttcttgagaggctgggcatcgtttaattatcctaagtaccttgctgcgctaaatgatgtcgtcaatcatgttttgcaattgaagggcttgtcaggatgtaactatttaccttttgctatgataatagagcacttatttcaaccatcatcattttctgcacttgaagagtatggcctgccgacagaaatttcggaaaagctcttgaatggaagggtttttaacaaggacgattcattagatgtggtcgtgaataatttgcgaaaccgaaagcttgatcgttttggtgatggaatctttgaaaagagggttattgaagattttcagcggggtattggtgcgaagatcagctag

SEQ ID NO: 59616 - DNA, 1623 bp, Klebsiella variicola
atgagtattactagcctatctgatgcaggtgggcctgcggcaaggcaaggcttcaagtatcaggatcacgtagctgttagtttcatcttcaagatgctccgagacagcaactactctcaagtggaatgcgagacagcggatgatatcgtggctgtattccaatgcgagggccagattctaaatgaatacattcaggtcaaaacaaccgaaagtgatggcaaatggaacttgaaagagataacggcgttagatggcagcaaggctaattcttcgcttctgcataaatcgctgaaatgcgatgtacgtccaggtattgcccgtttccgaatcgtgaccaagcgcgacgtcgcaaaaattcttgaaggattcaagaaagagatagataagcgtgttctgcctgacataaccacgacccgaggtatggcactgtgcaagacgtttaaaacttttgtctcacctcaaaaaaggaactttttgtactgggcggaaaactttgtctggcaggtgtacggtgatgttgaggcgttggaggccgtcaatataaaggctttgtcccagcttgcggaggtgcttggaaatcgtcccaacttcacgcaactaaaggcaatttacgaagaatttttagagattgctgacaaagcggccacggctagcgtgaagacagctgcagcatctaagatcatccttcgagatccgacgctggcttacctcagaaaattattagacgaggctgatgacaagtcaacagccacatccaaaccatataaaaagcgtccggatccgttcttggtcgagtttcacgccaacactaaagagggcttattgcactcattttctggttttgacgtgcgctatgcacttaagaaatggcggcacgaaaattacgcaaagcatctcatcgaatggctacctgagttttccctaaaggccagtgaaatcgtaaacatcctcgcgcataacgccaaagcgatcctggctaggtcaatcagtaccttcagcgacagtgagcttccgcgcgataggctcattgcagaactaattctgcactccatcctgcgcagtcgccaagacagcgagcccgttgcgtgcaaagtattctacaaatctgctgacaagctttcagaatttggcaatgctcacatcgttcagatgcctgatcaggatgatcagttgtggctaggtcttgcccgcttgatcaaagcaaatgatatggatacaaccctagagcaaattcgcgaaattcttgacgaaacgatctcagaaaccgtgctgtcggcagagcgagaaatcattatttctttacgcgaacctttacatcaccagccaaaagcagattccttcaaccaagctctgcatcgaaattctcctgtcgatgacatgctgaatattctctgcttccctatcttgttgacctacgatagtgcagcgctttcgtcaggctggctcactgattacgtagacaacctcaagatagagatcgaaacccacttcagaacgttcacctcggaactgccggagaacatcaaacaagtgaaggtgcacatctttttggtgcctatggaaagcattgaacatctgaccaaggctttcaactcttactgcgaaaagctggaagaattatag

SEQ ID NO: 59617 - DNA, 2142 bp, Klebsiella variicola
atgaattacgaaaaaatcaagaacatcctggcgaaactgggtgaagaaagcgcatcgacggtcgatgtgcttctcgccatcaacaccattgtcaacagaagcaattcagagtgggagggccgcgatttggtgatccgagcactcgacaaatttaagctttttgactctgtcgaacagtcgctcctgctaaacatggtacgagctgtcggactattcccctatatcactcctcacctcagcagcatggcgatttctgatcgcttggcttatgaagctcacagggtcgagggagtagaacagggcatggtgtttcatcacctgcaggctcatgttttcagcttgatcatgcaaggccgaaacgttgtactcggtgcttctacaagcgtcggaaaaagtctagtaattgacgctgtgctggcacagagacgattcaaaaaggtggtggtgatcgttccgaccattgcgctgatcgacgaaacccgccgtcgtctggtcaaacgctttaaggacttcaacctgattacgcatccgagccaggaatctgtgagcgagacaaccaatgtctacttgctcacccaagagcgtgtcatccagcgtcctgatcttgctgatgtggagttcttcgtcttggacgagttctacaaaatcgatctggggaatgccacagacgaaagcacgcgcgctgttgacctgagcttggcctttcacaagctcgcaaagactggtgctcagttctacatgctcgggcctcacattcagaagatctctggtttggatgactatgagtaccacttcatcccatccgactacagcactgtcgcggtcgacatccagaatttcaatctggagatgcgatccgaagagcgaaaggaaaaattgctcgagttggtcacaaccctagactcgcctaccttaatatactgtcaggcaccacctagtgcgaacagggtcgcagagtatttgattcaggaagctgggctgacaccagtaccagagacgcaggaaatagcagcatggatctctaaacactaccaccctgaatggaacgttgctaaggcaatatctctgggtatcgggattcaccatggcggagtgccacgtgcattgcagcagtacatcgtcaagttgttcaacgagggcatcatcaagcgaatcatctgtacatctacgatgattgaaggtgtcaacacatcggcagagaacgtgatcatttacgaccgccgcctgaagaattcaacgttcgattacttcacctacaagaatatttccggtcgcgcaggccgcatgaataagtacttcattggaaaagtcttcatgctcgaagcgcctccccttgagcagggcctcacagtcgaataccccatcggccatcaggatgaaaactccccaatgggactcctcatgcaactggagaacgaataccttaccgatatttcacgtggccggctgcaagatgcatacgccaacccggtattgtcgccgacaaccctgatagagaatcggcacgttccgattgagcggcaaatcgaggtagcagaagcgatcattcgtgacttactgctcagcagcaagcttctggactggaaaggcattcctgagccgaaccaactaaattacttatgtgagctggtttacattctggagggcggtaaccttatggattatggtatctcgtccagctcgcaattggtgtggcacatcaatgagctccgaactcagaaaaacctgcctgcttacctaagagacgcggtggagaatcgacgaccggaacacacatccagcgaagcgatcaatctgcgcctgaaattcattagaaacatggtgtgtttccgattgcctcgggacatcatggccgtaaataaaattcaggccgatgtgctggcgaaagaagggagcgagccgggagatttcagcttctttgctgagcagcttgaaaatatgttcctcgacccgctacttactgcgttggacgaatacggaattcccactcagatctcgactcagatcaagaacctcatcttgccatcggaacatctgaacgatctgctggcgaaacttcggaccctagcacccagagtagagcaccttcaactgactggctttgagaaaagcttaatgcgttgggctgtgtccgaaatgtag

SEQ ID NO: 59618 - DNA, 1623 bp, Klebsiella variicola; identical to SEQ ID NO: 59616

SEQ ID NO: 59619 - DNA, 2142 bp, Klebsiella variicola; identical to SEQ ID NO: 59617

SEQ ID NO: 59620 - DNA, 900 bp, Klebsiella variicola; identical to SEQ ID NO: 58944

SEQ ID NO: 59621 - DNA, 2529 bp, Klebsiella variicola; identical to SEQ ID NO: 58945

SEQ ID NO: 59622 - DNA, 957 bp, butyrate-producing bacterium SS3/4
atgcctatagaggatgaatatagaaaaatatatgataatgaagtaaacagggaattaaaaagggaaatagccatttatgaagatgaaacagaaataaataattatcagccattgagtcataactgcaaggaaaaatgtgtcaataaatgtgaccatcaatgttataagagccttgggaaactaatgagaaagaatattgttttttactgttacggtgaagatgaagtggtagcgaagtttaataacgggctttttgctgatttagaaaaggctataaaagtagcttacaaaatgcgattgccgcaccgtgaacccaagatggatggtctaccaagcgaagtcttattggatgctatcgtacaatcattagttcctggcgcatataaattggctgttcgaacaatatttcgccagaatgataataacgaaattaaaggatatgatttgacttattttacaaacgtgaatggaaaaataacattatggcttggtcaggcaaaaatgggcagcaagcaatactgtaaaaatggaattttagatgatttaaataaaaaatactcaagtttatatttggcggaacaaatttattttctggcagataaaccgtcaggacttactaacgagggaaagcaacttgctgacttattaagtgaattaaatatgttaaatgcattggaaaatgataaaaaacgcgctgaacaattgatggattttctaaaaagtaaaaatatagatatatgtataccctgccttctggcttatgataactcaaatatatattctgagactatgaatattgaaaataagatgaaggtggaaatgaattggatgaaacactactttgaaaagaactttaaattcgaagatatcaaaccaaaattaatttttattatatttccaatagagaatatcgaagccttacgaggaaatgagggattttatgctggattatgttaa

SEQ ID NO: 59623 - DNA, 693 bp, butyrate-producing bacterium SS3/4
atggattttataaacaagaaaaatattaatgaaaaacatatatcggaattacaggccttatacaatcaaagcattgttaacatgtatagatccaaagtaagaaataacaatattctagataaaagtcagaaaagtattatagatttttatcagtcattagacataaagagaatgttgattagtgcgccaacttcttatggtaagacatttattatgcgggaaatcttatacttaaatcaagaaaaatataaaaacatattgctggtcttcccaacagttgcattattgcgagaaaatgcattgaatatggaagaattaaatcaggataagaaaatgggatataatgttattaaatctattgatcgcgaaatagattgtcaggatagaaatatctttgtacttacgcctgaacgagcgatgcagcttttagctcaatatcctaatatagaaatagatttcttcttttatgatgaaatgtataaaattgatgaagattattgtaatgatgaaacagatgataatgatgagaagaaaaactcatatgcggaacgaacattcttagatgaagcaagagcaaagacttttcgtattttgtttatatttgctttcaaaaagagtaaaagattattatttagctggacccaacctgaaaagagggaagtttggaaaaggaatgcaaagatatattgctga

SEQ ID NO: 59624 - DNA, 1734 bp, Vibrio crassostreae
atgagcttaaacgaaatggaacaatctgatagtggcggtccttcagctttaaaagggtttaactaccaaaatgttgtagcagcttactacgttttgaaaatgctcgaagacaaaaacttaaaagcggttcgctgcgaggtagttgatgacgtagatgtaatatatggcgataggattgaatacgtacaagctaaaactacagaaaaagatactaagtggtgtgttgccgagtttgctgatgccaaaaccgacattgttcccccgacaggcaaacaacgagttaaccaaacagtcagtaaagaagactctattctgcataaatctattttatgtgataaaagaaagggaactcttcctgcattctttcgaataattacgcaaagagacgttaccgatgcactaaagtatctcaaaacacaaatcgatattcgaagtgaaaagcttgatcttcggcctaagttactaaaaagtttaagaagtagcgttgagcgaaatcgccccaaaaagttagctccttttacctccccaaacgggaatgatgtcgaatattggttggatcacgcagagtgggaagtaattcaatcacaagaacttcttgatctacgctgtactaagttgatacgacaagcggcacacagaaagagaatctttttaagtgagaatggtgatcctgagcgaattctatgctctttactcgatagcctatttagaaaagggcaaaagtcacgaatactaaattcaatggctgataagtcttatcaccgaaatgatttcctcccatggtttgaaaatgaaattgagcactataccaacctcaccaatcaacatgtaaaggtatactctaccaatcaaactgagcttcaggctgttctttcttcattttttaagaacgattccatttatcatgcatctaacgacgaaggggtgaaggagtgtataggtcttcaaggagagtaccatcgcagacaatatggctatgacttaatcgcacataacttatatgggtggtttcacgaagtcttattgcttccaaatgagattgcagatcacacagcaacacgaataactgacaacttcaaattactaactcgtcgttatcgccaagaagctagctttttaaataaactaattgccaaagcattattacactcaaccattagaactacttataaatcacagccaattcctgcgagcctacatgtagatgacgaaaaaaatacatgcttcgacaacatacatattattctcaatactcacaagtctgacactttacttatgggatttagtcacctcattaatgaagctagtgaccagtcacttgaagctatcttacaagagtttcatgctcttctagcctccaaagctttttctagccaaaaagagaaagttcttattgccaaaaaagacaactatcttcttgaccatgatatcaatgacatacttgatgcaaacagttctctagatagaaaccttgataggtttaaatttgcattctttattggctatgagtcgcaacatctacactgtaattcaaaaagtatggatcaagatttcgaaaaacagcttgtatctgaagcgactaatcgatttaaacacttagtcgaccagctaattactgtagatgacttttataaagaactacatatcgaagcatatttataccctgttccatccttagcttctctcttaaatgaagttcaaaatcaagtggcagcgcaatggaaaacaccctag

SEQ ID NO: 59625 - DNA, 2178 bp, Vibrio crassostreae
atggaaaacaccctagatccccaaatttgtctaaacaatgttagaaataaaacactgagtgcattttcgtacttaaataaagctaatgagtgtctgtcctctcctgatttagtacctgtgggccaagagtttgttattcgagctttagatgaactttcactattcaagaagcaaagcttactactccagaaccttctacgtactgctggtttatatccctatttgaaaaagtactttacgaacttgtcagctgagaaagagtttgttctagatgtatataaaagcaattttgatgacgatttcattttccattcaatgcaggcaagagtttttaatcttctaaattcagggaaaaacattgtattaagtgcacctaccagcatggggaaaagcgctatcgttgatgctgtaattgcagaaaaaaagttcaacagtatcgttatagttgtgccaacaatcgcgctaatcgatgaaacaagaaggagaatagcccaacgttttggtcacgagtaccagataattcaccatggttctcagataaagcgaaaagacaaagtggtctatatttttacgcaagaacgcgtaaatgaacgagatgacctcaggaatattgatttattcattattgatgagttttacaagcttgctgatacaaaagatgaattatcgagaccacgagcttttgccctaaacattgcactaagcaagttgctcactgtatcaaaacagttttatatgattggtccatacatagatgcaattcaaggtatgagagcactaaatcgtgactttatattcataccttcggactttaaaactgttgctttgaatatcgaaaaatacgacatagcggcaaacaatacaacggagaagaacaaacaattagagaagatccttgattcatatccagaccaaacaataatctactgtaaatctgctggatcaatagcaaaggttattcgctttttaagttcattagagaaacagcaggaacttaaattcctcgcatcagccgatgactcattaaggaagtactatcgatggctcaagaagaactatggtatggattggggatgtactaaagctttggccaatggtatcggaatccatcatggctcattgcctagggctattcagcaaaagactgtagaactttttaattctagacaaataaaatacttaatttgtacatcaacaatgattgagggtgtcaacacttcagccaaaaacattgttatatatgataaccgtaacggtaaccccaaaattgatagcttcacacataaaaacatctcaggaagagcaggtaggatggggcaatatttagtggggaatgtattttgtttagaagagttacctgaacaaaagtcacaagtcgttgatctccctttagggcagcaagatgataactctcctataaatctattagctggaatacaaccagatcatctttccgagcagagtaatcaaaatctaattaagtttacaaaacagtctgatgtaccaatggagatcattcgtaagcactcttcatataacgttgaagtactagcaagtgcttacgaactaattacagagctatcaatctctgagatggaacaaatatctaccgttacaaaacctaaaaggtaccaattagaactgctgacgacgttcattaagcttgttgaaggtgcagttttgagcagacaaagactccattaccaagatagtgatgagttatataacaagttaagaaaatacatttatgccgacaaacattctgattatatcaaagaccaggtcggttatatttacggctcaagtgaagaccgagactatcgttcggacacaacagaccgagagttaaatatagtgcgtaacatattcaaacatgcggttgcacgagctctttctttattagaagatctactcaattatgaattcaagtctatcgaacatccggcaaaagctaacttaggctggcttgtccatgtatttgagaatagccatttaccttcatcattttcagctttagaagaaatgggaatacctatagaaactttggaaaaattagttaccgataagctaagcgacttagatatagacacgctaatccgctatatccgcatgtatcataaatactttgagaaactaaatcctgttgaccaaatgtttatcaaacaggctatttactag

SEQ ID NO: 59626 - DNA, 1734 bp, Vibrio crassostreae; identical to SEQ ID NO: 59624

SEQ ID NO: 59627 - DNA, 2178 bp, Vibrio crassostreae; identical to SEQ ID NO: 59625

SEQ ID NO: 59628 - DNA, 1617 bp, Pseudomonas syringae pv. tomato T1; identical to SEQ ID NO: 59400

SEQ ID NO: 59629 - DNA, 1800 bp, Pseudomonas syringae pv. tomato T1
atgcaaggcagaaacgtcgtactaagtgcctcgaccagcgtcggtaagagccttgtgattgatgctgtcctcgcacagggcaagttccgaaaggttgtagtgatcgtgcctacgatcgcgctcattgatgaaactcgccggcggctggtcaggcgctttcgtcagcagtgcaacatcatcacgcaccctagccaagtggcaacagacgcccctatcaatgtgtacttgctgacccaggagagggtgcttcagcgtgatgacctgggtgatgttgattttttcgtcattgacgagttctacaagctcgaccttgccagcgattctgacgaaaaaaatcgatctattgatctcagccttgcttttcacaagcttgcgaagctgaatgctcagttttatctactcggcccacacattcaaaacatccaaggcctggatgggtatgagtacaatttcattccctcgaacttctcgaccgtggcagtcgacgtgacgcactacaacctgcgaacgcgcggcgacacgcgaaaggataagcttcttgagctgtgctcgcagatcaactcccctaccctgatctactgccagtcaccggcaagcgcaaatcgggtcgcgcaatatttaatcgatgagggggacttctctgcgcttgatggcacccgtgaaatttcagaatggatcgcggataactaccatcctgcctggaacgtagcgaaggcgatttcgctaggcatcggcattcaccacggtggcgtaccaagggccatccagcaatattttgtgaagttgttcaacgagcgaaccattcgctacatcatctgcacgtccaccatgatcgagggagtgaacacgtcggcagagaacgtcatcatctatgaccgaagaatcaacaacagtccctttgattttttcaccttcaagaatatttccgggcgcgccgggcgaatgaatcaatacttcatcggtaaggttcatatgctggaagagccaccagaggagaagagcctcatagtcgagtacccaatcggcttgcaagacggggcgtcccctatgggactgctcatgaaactcgaacccgaatacctcaccgaccagtcgcggcagcgtcttgaggctgcctatgcgactcctcagctgtccgtcgcgacgctgatcgaaaacaggcacatcccagtcgaacgtcaggtcgaattggccgaccgaattctgcgagagctcgcgctgggtcgcgtatggctcacgtggaaaggtaatccagagcaaaagcaacttgagtatctctgtactctgatctatgagcaccttcctcatcggctgccggagtatggtatccattcagggctgcaactcgcttggcatatcaatgccctcagagcccagaaagacttcaaggcctatctccagcaagcgattaatgaggatggctccgaccggactcccagcgagtcgatagggcaacggctaaagctcatacgcaacgtcatttcataccgccttccccgagacatcatggcgctgagcaaaatccaagcggacgttttgacccgcacgggcatcgagccaggggactttggctttttcgccgaacagcttgaaaacttgttccatgatccgctgctcaccgcgttggatgagtacggtgtgccgacccagatctcctcgaaattcaaaggggcgatcttaccttcagaaaaccttacccaactactcgacaagttacgcgcatgggcacctagaatcgaatcagcaccgttgacacacttcgaaaaaagcatcgtaaggtgggctgtagacgaaatctaa

SEQ ID NO: 59630 - DNA, 1617 bp, Pseudomonas syringae pv. tomato; identical to SEQ ID NO: 59400

SEQ ID NO: 59631 - DNA, 2145 bp, Pseudomonas syringae pv. tomato
atgaaatacgacctcatcaaacagcagctagagaatctttacgatctcaacagtgacaaaaccggcctgctcatgggaatgagcctcatcgtgaacaaggggcatcccgaatgggagggccgtgacctggtcattcggtcgcttgacaagtttgagctgttcgatgaagtcgaacagtcgttgctgctcagcctagtacgtaccgttggactgttcccctacatcaccccgcatgtggagagcgtttcattccccgaccggttggcctatgaggttcatcgagtggaagggattgagaagggcatggtttttcatcgcctgcaggcacatgttttccatttgttgatgcaaggcagaaacgtcgtactaagtgcctcgaccagcgtcggtaagagccttgtgattgatgctgtcctcgcacagggcaagttccgaaaggttgtagtgatcgtgcctacgatcgcgctcattgatgaaactcgccggcggctggtcaggcgctttcgtcagcagtgcaacatcatcacgcaccctagccaagtggcaacagacgcccctatcaatgtgtacttgctgacccaggagagggtgcttcagcgtgatgacctgggtgatgttgattttttcgtcattgacgagttctacaagctcgaccttgccagcgattctgacgaaaaaaatcgatctattgatctcagccttgcttttcacaagcttgcgaagctgaatgctcagttttatctactcggcccacacattcaaaacatccaaggcctggatgggtatgagtacaatttcattccctcgaacttctcgaccgtggcagtcgacgtgacgcactacaacctgcgaacgcgcggcgacacgcgaaaggataagcttcttgagctgtgctcgcagatcaactcccctaccctgatctactgccagtcaccggcaagcgcaaatcgggtcgcgcaatatttaatcgatgagggggacttctctgcgcttgatggcacccgtgaaatttcagaatggatcgcggataactaccatcctgcctggaacgtagcgaaggcgatttcgctaggcatcggcattcaccacggtggcgtaccaagggccatccagcaatattttgtgaagttgttcaacgagcgaaccattcgctacatcatctgcacgtccaccatgatcgagggagtgaacacgtcggcagagaacgtcatcatctatgaccgaagaatcaacaacagtccctttgattttttcaccttcaagaatatttccgggcgcgccgggcgaatgaatcaatacttcatcggtaaggttcatatgctggaagagccaccagaggagaagagcctcatagtcgagtacccaatcggcttgcaagacggggcgtcccctatgggactgctcatgaaactcgaacccgaatacctcaccgaccagtcgcggcagcgtcttgaggctgcctatgcgactcctcagctgtccgtcgcgacgctgatcgaaaacaggcacatcccagtcgaacgtcaggtcgaattggccgaccgaattctgcgagagctcgcgctgggtcgcgtatggctcacgtggaaaggtaatccagagcaaaagcaacttgagtatctctgtactctgatctatgagcaccttcctcatcggctgccggagtatggtatccattcagggctgcaactcgcttggcatatcaatgccctcagagcccagaaagacttcaaggcctatctccagcaagcgattaatgaggatggctccgaccggactcccagcgagtcgatagggcaacggctaaagctcatacgcaacgtcatttcataccgccttccccgagacatcatggcgctgagcaaaatccaagcggacgttttgacccgcacgggcatcgagccaggggactttggctttttcgccgaacagcttgaaaacttgttccatgatccgctgctcaccgcgttggatgagtacggtgtgccgacccagatctcctcgaaattcaaaggggcgatcttaccttcagaaaaccttacccaactactcgacaagttacgcgcatgggcacctagaatcgaatcagcaccgttgacacacttcgaaaaaagcatcgtaaggtgggctgtagacgaaatctaa

SEQ ID NO: 59632 - DNA, 1392 bp, Pseudomonas syringae pv. maculicola
gtgaccgaactggatggcaccaaagcaaactcgtccttgctccacaaatcgctgaagtgcgatgtgcgcccaggccttgctcgcttccgaatcgtgaccaagcgcgacgtcgcgaagattctcgacggtttcaaaacggagctggacaagagggttctgcctgacaccaccacagcccgaggcaaagttctgctgcggaaattcaagacattcatctccccgcaaaatcggaatttcgcctacagggcagagaactcagtctggcaggtctacggtgatgtggaagcactggaagcggtcaacatcaaggccctttccaagcttgctgaggatttcgggaaccgtcccaacaatactcagatgcaggcaatttacgatgatttcttggagatggctgacaaggctgccacggccaacgtgaaaactgcagcatcgacgaagatcattctgcgggaaccggccctggcccacctgaagcagctattagagtcggctgatgacaagtcaacggcaacagccaaaccctataaaaagcggccagatcccttccttgtcgagtttcattcaagcaccgaagaaggtctgctgcactcattttccggctttgacgtacgctatgcgctgaaggcgtggcggcatgatggttttgctaaacatctcgtcgaatggctcccggaattttccctcaaagcgagcgagatcgtgaacatcctcgcgcacaatgccgaagccatcttggcacgatccatcaatgcgtttaccgacagcgaactgcctcgcgacaggctgatcgccgaactgatcctccacgccatcctgcgtagccgccaaaacagcgagcctgtcgcgtgcaaggtcttttacaaatcctcaggcaagctttccgagtttggcaacgctcacatcgtgcagatacctggccaggacgatcagttatggctcgggctcgcgcgcctgatccaggcaggtgccatggacgcgaccctggcacagatctgcggcgtcctagacgccaccatatcggagacggtgttgtcgtcggaacgcgaaatcattatcaacctgcgcgagccccttcaccatcaaccgaaagcggacgccttcaatcaggcactgcacaaaaactcgccagtcgatgacatgatgaacgtcctctgctttcccatcctgttgacctacgacagtcacgcactctcgtcaggttggctcgctgattacgtgaaccatcttagaaaggagatcgaggcccacttcagcaccttcaccaaacagctgccacagaacatcacgcaagtgaaggtcatggtcttcctcgtgccgatggaaagcatcgagaagctgatcaatgaattcaatacccggtgcaaaacacttggagacctgcaggcataa

SEQ ID NO: 59633 - DNA, 2142 bp, Pseudomonas syringae pv. maculicola
atgaactacgaaacgatcaagaacagcctggcgaacctcagtgatgaaggcgcttcaacagtcgatgtgttgcttgccatcaacgccatcgtcaacagaagcaacgctgagtgggaaggacgcgacctggtgatccgcgcgctcgacaagttcgcgctttttgacgtagtcgaacaatcgctcttgctcaacatggtgcgagccgttgggctctttccttacatcacgccacatctgagcaacatggccctgtctgaccgcttggcttacgaggctcacagggttgagcgcgtggaaccaggcatggtgtttcatcaccttcaggcccacgttttcagcttgatcatgcagggccgaaacgtcgtcttgagcgcctccaccagcgtcggtaaaagcttggtcatcgacgcggtacttgctcagcgccggttcaagaaggtagtggtgatcgttcctaccatcgcgctgattgacgaaacccggcgccgcttggtcaagcgcttcagagacttcaacctgatcacacaccccagccaggaagccgtgcccgacgtcaccaacgtctacctcctgacgcaggagcgcgttattcagcgtcctgatctggatgatgtggagttcttcgtgctggacgaattttacaaaatcgatttggggggcgataaggataagaacacacgcgccgtcgatctgagcttggcattccataagctcgcaaagaccggagcgcagttctacatgctcgggccgcacattcagaagatctctgggttggacggttacgagtaccatttcatcccgtccgactacagcaccgtcgcggtcgatatccagaatttcaatctgggcatgcgctcagaggagcggacacagaaactcctggaactggtcaggacgctggagtcccctaccctgatctactgtcaggcgccggcaagcgcaaacagggttgcagagtatcttatccaggatgccgggttgaccccggtgccagagacgcaggaaattgctgcatggatctccaagcattaccacccagaatggaacgttgccaaggcgatcgccctaggtatcggaatacaccatggcggggtgcctcgcgcgctgcagcaatacatcgtcaagctgttcaacgaaggcgtcatcaagcgaatcatctgcacatcgacgatgatcgagggcgtcaacacctcggctgagaacgtcatcatttacgaccgccgccttaaaacgtcgacgttcgactactttacctacaagaacatttccgggcgcgctggccgcatgaacaaatacttcatcggcaaggtgtttatgctcgaagccccgcctattgagcagggactgacggtcgaataccccatcggccaccaggatgaaacctcacctatcggcctgttaatgcaactggaaaacgaatatctcacggacatgtcgagaggccgtctccaagaagcgtatgccaacccggtgctgtcaccggccaccttgatcgaaaaccgccacatccctatcgagcgtcaggtcgaggtcgcgaaaacgatcatcactgaccttcctggcagccaggaattgttaggctggaaaggcattcctgagccgaaccaactgaactacctatgtgagctggtctacagcttggaaggtaagaacctgatggactatctgatctcgtccagctctcagttggcctggcacatcaacgagctccgaaatcagaaaaacctgccagcctacctgagcgaagcaatagaaaatcggtgggagaatgtctcagcgagcgaagcaatcaacctgcgcctgaaattcatcaggaacatggtgtgcttcaggttgcctagggacatcatggccattcacaaaatccaggtcgacgtgctggagcgagaagggtacgaacctggagacttcagcttcttcgctgagcagctggaaaacatgttccttgatcccctgctcaccgcactggacgaatacggaattcctacccagatctcgaccaagatcaagcacctgatcttgccatcggagcacctgaacgatttgctggcaaaactgcggttgcttgccccacggatggagcgcctccagctcaccagctttgagaaaggcctgatgcaatgggcggtcgctgaaatgtaa

SEQ ID NO: 59634 - DNA, 1617 bp, Pseudomonas syringae pv. maculicola; identical to SEQ ID NO: 59400

SEQ ID NO: 59635 - DNA, 2145 bp, Pseudomonas syringae pv. maculicola; identical to SEQ ID NO: 59631

SEQ ID NO: 59636 - DNA, 516 bp, Pseudomonas syringae pv. coriandricola
ttggctggtactgccgcgagcggcactgctgattacgcggagtcgattgcgggttttggaagcaacaaaaagcaatacctgcaagagtatgggctggcgcgcgatttggggaatctggacgcattgcctcaagcagataaggatcgtctgatggagtacctggatgtcttcaattcccctaacgcacccaagcgtgagcggtcagtcggtgtcatctgttactcggagtcccagcacttcgcgaacaaattgccggtagatgatggtgccttggataagcacgaggtgcactttggaaatctgtacgctaacgaccacaaacggcaccacaagaatgtaagtaatcagctggaaaagcatggcgtcgatgcgaacaaatgcatgctctatctggtagctgtacccgatgtcgatgagctaagagaattgttctatgactccttggggatcttgccggcgcagtccgatacggcgttaactgtcccatcgcctggggaggatgtgagcgatgagtag

SEQ ID NO: 59637 - DNA, 2631 bp, Pseudomonas syringae pv. coriandricola
atgagtagttttgcatcagcactgtctgcccgcatgatcaggaacgtcgattttaaaaaggcgctaggcgctctacagtccgctggagcagccaatacgctgccaagtaatatcgcaagatctcaagctgaccctgatatcgaggctttgggtaagctgctttactgtgcctcagtattcgcacagtcacctgtagaaggccatgtagcgttagcccaggctatcgctttcaatgcgatgctggttagcaaagaatccagcgttttggagcgatgctcatcagtcttgaccgaactcggaaatttcccgggcctcaaatatgctgagcttaacttcaagtcaaagctaaccagcctagcaggtatgattcaacgccatgtggttgagcatctcaatacaatcaatgtgcatggagaaaatatagccctcacagactaccaaaaaggggtatgggactctttggaggggggctcttcgctggcgatatctgcccctacctccgctggcaaatcgtttttggtaattgagcatctatgccgccgtgctgtttcgaccagcggcttcacgttcgtctacattgctccgactcgcgcactgctatctgaagtccatatgaagatcaaggcccgtttggcgagtgaccctgaaatccgtgtgacggatatcccgactttcgagcagatgtccaaacagatttttgtgctgacccaagagcggttccaggttcttctctctaccacttctgcgaggattgatcttgtggtagtggatgaagcccagaatctttctgatggggcccgagggatgatcctccaagactgcatagagcagtgtgttgagcgctacaggcgcgcacatgtcgtgatgctcgcgccaggtgcggaaggcttcaaggaagcgctcgaaagccttgggttacccgagatccgagaaatagccacgacagtctcccccgtcctccaaaacagaatcgttgtgactaagggtgcaagcacgagcgagctgaatttcaaactactctccccaaacggcacagcatcgattggctcgcttacatgtgacgtgggaatgtctacgcgtgagagtcgtttagctgcggtcgcgcttcaactcggtcacaacggagggtctttggtatatgccaaaactcctaccgaagccgcgtcgttagctagctcgattgcgatgggcgtaactgaccctgactcccttgggaagaatgatgatctggttgcatttatcaaggcgcacattcaccctaaataccatctcattcggatggttgagaagggtgtagctttccattacggacagatgcccgcattgcttcgtgaggcaattgaaaacgctttccgactaggttcgataaaattcttggtttgcactaccactttgtttcagggtatcaacctgcctgcacgcaatgttttcatcgatacacctgcccgtggcagaggtgataaacagcttctcgaaccagcccttctgtggaatttcgctggacgggcggggcgtatgggtaaagacatagtcgggaatgtatttttggtggattacgattcgtggagtgaccatcccatggataggtttacaaaattcaccataaaatccgccctaggcgaggtaattactaataacgcgcatgacgtcctaaaatttttaagagaggatgttttctccgcgaagcctcgtgacgagggtcgtaaaaacgctgttgcatctgctgggatgctaatatccaaagcaagacagggtagcgtgcagagttttctcgaacgagtggcgccagagttagatattctggactctcgtttgctttgcaacgcatctaaagccgcttcagaacgtttggagttaccgctcaatgttctcaatgccaattggactttagatctgtttgctttgaacggacttatgatttttttgaagggatctttggccgatggtagcatcgagcagatgattccacgtcaccccgctgatctgggcagtaaatcattcaagtattatcgagatattttcaacgtaattttcaaatacattaaaggttttgaagggaatttaggcggttacgtctcaagaatcgcgattcgatggatggagggaaagccttatccagtaatattaaagtttgagattgaggccaaagaggtagggattcagaaaaagcgtgacattgaaagtatgaatgttcgtaccgtcaaaggttacagggccaaaagcatcaaaccactcaatccaagcaaggtgatcaaagatacattcgatactatcgaggacgtaattcgcttccagttggtgcagatgggcaaagcctatattgatattttggcccacattatgactgaaaatggactgagccacagggtgccggagatttttgatttcgcgcttgcgttggaattgggagtcaataccgtcacagcgcgtgctttccttgagcttggcctatctcgtatcgcggcggcagagctgcagcgcatagtgcccaatagcgaactcgatagtgccgcagcccggcagatcattctggaatttgacggtacggcccacactttgagccaggtgatcatcgacgagatagcgaaggtgcgtgcggcgctactcagtagttccgtgacagcagattaa

SEQ ID NO: 59638 - DNA, 1617 bp, Pseudomonas syringae pv. tomato; identical to SEQ ID NO: 59400

SEQ ID NO: 59639 - DNA, 2145 bp, Pseudomonas syringae pv. tomato; identical to SEQ ID NO: 59631

SEQ ID NO: 59640 - DNA, 1617 bp, Pseudomonas syringae pv. tomato; identical to SEQ ID NO: 59400

SEQ ID NO: 59641 - DNA, 2145 bp, Pseudomonas syringae pv. tomato; identical to SEQ ID NO: 59631

SEQ ID NO: 59642 - DNA, 930 bp, Ethanoligenens harbinense YUAN-3
gtggagttatccaaaactgtaaaggacaagacattcgatgattactttacagaggtggagcattccgagacgatcagcggaatggtacgccctggttctctgcgccttttttgcctcaacgtcagaaacggaaacatcaaatcatccgatcttgagaaatttaccatgctcaacatcgggcagtatgtgttctctcgggcaaagcaggagaactatcggaatacaggcaatttcgaccttgtgacacagcaagccctgagagccatgagaaaaagcgccaaggctcgagacattgatgcaggagaaacgctcggcgagatcatggtctatgctgtcatggaagaaaagcttaatgctcataagctcctcagcaaaatcgaactcagcgcagatgctgcgcagtatgcgagcgaggccgacggcattcatttcctgtgcagggacggcaaaacgatcctctccaatcagatggtattcggtgcgtcgagcgtcactggagacatcaaggacgccattgacatcgcttttgagaagatatctcgtattgcaaatcacgaggatgaagagctgcttctcgtagagaaaacagcacttgatcgcttctatgaagaagacgacctgaaagtcctgaccagctacgttatcccggaggagcacaaaaacgctgcctacggtacatccttcggagtgttcctcggatattctcttggcctgatcccggacggctatgacgatgaccagttccgggaccgcatgcataagaaaatgattcgcgacatcaacgcgcacgaagaatacatagctcaaaagatacgcgatgcaaaactgcagaatcactcgttctatttcttcacgttgcctcttaatcaggccagggaggaaagtgacttgatcatgcagcatgttctggaaggagatgtcgacctatga

SEQ ID NO: 59643 - DNA, 2733 bp, Ethanoligenens harbinense YUAN-3
atgaccgttgaaaagagaacacttgggtcggtcatcttcgccggcatcgacagcaatccataccttggaacactgtatgctcggcttctgaaaggctatggcttgagtctcttcaacttgaatcaacgaagctcgacggagttgttcaacgccaaggagaaaaccgacattttacggtttgccgacattctctccaagtcgaatgatccagagaaggcagacgcgcacaagatatgggctcaggaaatagccatactgatgcatgagatgtatccgcaggattcgctcgtcaacctttacgccggagacgttttctcaagcgtcggtaaccacaagggactcgagcttgtaaacaaggactattctgagccgcatgcactggaagaaattttcgcacagttcagaggcgattacctcactatccccgcggaacctagccagcggttcttcggagaacagaagaacgcctatgaccatctgacggacgactgctttagctactccgcgcccacttcgatgggaaaatccttcattatgaggatgttcatcaaggacgagatcatgcacggggcccagaagaactatgcgctcatcgtccctaccaaggcgctgataaacgaagtccgggcaaaagtcatagacgatcttggcggagaaaagaatacagagaaggtcaactacctgaagctccataactacagcgtggtgacagcagcaagcgacatagctctagaggacgataaccggaacttcatccttgtcatgacgccggagagacttctttaccttctgatagcgaagcctcgctttgacctggattatctgttcatcgacgaggcccacaaactttcaggcaagaacagtcgagcgcctttctactacaaagtagtcgacaagctcgtgcatcgccagaagaaaccgcacttcatcttcgcatcgccgaacataccgaatccgcaggtctatctgagattgatgctcaatgcggaggaaggcgatgaagacgctcttgcaatcacatactcgccggttgttcagatcaaatttcttgttgatctgaagaaaggacgaatcgaggtttataacgaccacgcacttgaagatcagtgccgaatacttctcgccaatgtgcgcggcagcggtattgaagtgaatgacttcctgctggctatcgaaacacagaacaggaaactttccaaggaaaagcgtaagcagagcatcgtttactacaacggacgagacaaggccataagggccgcccactccttctatgagcggataaaaccgaatggcccgagaaatgatccgcttcttgaggccttgtcaaaggacattcaggaagaagtccatcaatggtactacctcgcagaaatggtacgttatggcattgcttaccacatcggttatcttccggcatcaataagggcacggatcgaggagctttttaaatccgggaacatcacggtaatgttctgtaccagtacgctgttggagggcgtcaatctcccggcggacaatctgttcatcatggagaacaagatattcctcagcgagatgaataccattgatttccgtaatctcataggccgagtgggcaggatcagcttcaacctctttgggaatgtctactttgtagcggaacgcaacagcaagataacgacagatgactatgtacgtatgcttgggcaggaaattccagagcagtcgctttctattgctactgatccgaatgtgctcaagaaggtcgagaaacagtatgtcgccgatattctcaaaagcgggaagtcggaaataccacgccgtgtgaacgctgatggcaaagctatgcagagcgaggaatcctatgagatgatgcgcagattcgcgactattcttcagggagacattgttcacgagcgggatacgctggtgcgtcgtgaattcaaagacttcttgacgccagccgatgaggagttcatccgggataccttcaaagacgccgaagtcaagcctgatgacgacatcaatacgtcggtagatcagacaacaagccttattgcagctatccgaagggagcgaaacccgctgcgttatccagatcttgttgatgggaagttcgtatatgacgatgtgcttgcttttctcgacgaacttgcagaagtgttcaactgggaggagtacgaggccggtacgctcggaaaaccatcactgcgcagatggtacgccgtgatcctctgccagtggatggacggcggcgggttgaagttcatcatggacagggctcttgaataccatcagaaccacccatacccattctggatcaacaagcatgggtctccgataacgtacaattacctttccgacgaccatcacaatgccgtattcggagacacgcttgaggttattgagaacatcatcctttacagcatttcgaactatttccttcgattctccaacgagtacaggaaaatcagaggagacgaggcactcaaccggaacaattggtatgaatacgtggaattcggtacgacgaatccgctgacgatcctgctgcagcgcagcggcttttccagagaatccgctcgctacataaaagagcaccacgagtatgtcataagggacggtagcacaggccagctgaaacttagccctgctcttgctcggtgtggtaatacggatgttcgtaatgaagtcatatacatacggcagaactcaccggagatttttgaagccgataataatgatgagggataa

SEQ ID NO: 59644 - DNA, 951 bp, Lentisphaera araneosa HTCC2155
atggacttcagtgatgatatttcaaaagcgatcagtcgactcgtacgtaaatcccctggtgatatttctgcatacatagatcacgtatgtcaatcacgagaagtcgatgggacaaaaacagaatcacattttcattttatccaacttgacggtaacaagcgtcctagagtatctgatttagttgattatatcgtaaatttgatagttgactattcgattcctagaagtgaaatagaaaaagctaaaaaagagctgatgacgacaggcagtactgcgagccttatgaaactacagaccaaagctaaaggcctttttgcagatgtcgtgaaaactggagaaggaggtgaactactgctgtatacacttgtccaaaaagttttgaatcttccacaactcatttgtaaaatgccattaaaaacaaattctcagcttcattataatggagctgatggtgtacatgtggattatgataaggaagcagattgccttgccttatattggggggaatcaaagttgtatgcagacttaggcaaaggactatcgagttgctttgaaagccttgcaccttttttaataagtgaaaacagtcagaagtctccacaagaaagagatattcaattaataagtgaccacctagacttagctgatgacaaattacaggatgcaatacttgattattttgataaagatcacaggaactttaacaaattaaattatcgaggtgtctgtttaattggattcgatgttgatcattatcctaataaaccaaaccagaaatcaattccagaattgcagctagagcttaatgagagggttgatagttgggtatcatcaataaaaacacaagtcaccaaacatacagatttatcgagttttcatatacatgcttttctggttccttttccctcagtagcagactttagagacaagtttcgagaggcccttagatga

SEQ ID NO: 59645 - DNA, 2535 bp, Lentisphaera araneosa HTCC2155
atgaaactcagttttcaagaaaaaattctgcaacgaagctcatttttggatcagtataaatccttattaatttcttcggctatagaggaatttccactatctaacactgatggctattgtgaaaacgcagttgatgttgattggcataatatgcttttttttgcaagtgcactcagtaaaagtgaacaccatgagcattgtgaaaaggctttacgaatatgccaagtatgtctagggtcttcccaagtacaacctgagcataaatatgccgcagctataattttgtgtgaactaagtaattccatgactttggagctggcctatcaacgtgatttactttcgagagattttgaatcgaatttaagcgcggtacataaaatgaatttatgtaaatcaaaaataaagttttcgatttgcgattcagctcaaaagatactgagtgttaatcgttttcaaaaagatgtctatgaaaactatatggctaatcaatgcctcagtatttcggcaccaacttctgcgggaaaatcttatattcttaaaaaggtgattattgatttaataactcaagagacgaataattataccattgtctatgtggttccaactcgagcgctgataagccaagtagaacaagaaatgaaagagttgttgcaagagaacctgattatagatggatatgtaagctctatacctaatgcccctgagggcgggaacaggttctccaaatatgtgtatgtttttactcaagaaagacttcactggtttcgatcttccaatactaatgtattaattgattgcttaattgttgatgaagcccataaaatagatgatggctctcgtggcttattactacaggaaaagatagaggaattaattactgaccatcccgacattagaatattatttagtagcccatttacctctaatccagaggtgttgtataaaggcctattaccaaccgatcaatgtaaacctatcaaaacagactttgtggctgttaaccaaaatttattttatttacgatcagtttacagaaagcctcgaaagtggatcctatcattagttaataaaaacgaccaagtcgatttaggtgaagtactttatgattcaagacctgacacagagataaaaaaaattggctttgcagtaaattactttgggaaaaatggaggtaatttagtgtacgtcaatactgcagatgtagcagaaaaagaggctattttactatctgaattgtatactgaaaacataattgatcaggaagtaaatgatttaatagatctatgctcaaatgttattcataaaaagtatactttaatgaaagctcttaacaaaggaatcgcgtttcattatggaagtatgccgatgttgattcgctctgaaattgaacgactatttgagctgggtaaaattcatactttaatttgcacgtctactcttctagagggtgttaatcttcctgcaaaaaatattttcattcggaaaccctcaagaggtgtaggtaaacccttgtcagcatctgatttctggaatttagcggggcgagcaggacgattagggaaagagtttcaagggaacattttttgtatagatccagatacgtgggttgaaaaagtacctttagaacgtgaaaaaaatattattgcacgtgccgttgataaattagaagaaaaatcagttaaagatgaaatacatttttacattgaacagtcattaacaagtaaatacccttttgatttcaaggctgaagcagcttttagttatttttatctcaagcgtttaaatggacgtttagatgcaattaatattgcttttttcaaggatgtattccagcgtgttgatgagctgatcacattaccacgaaaacacttagtaaatcaccctggtatatctcctataggtcagcaacggctattacaatattttattaattatgataaaaacattacggatttaatccctgcatacccagaagaagaagatgcgcttgaaaattatattaaaattgtaactaggataagtaaatttttatctggagataatgaagcaattgcattctaccatgcactgttaattgtaaattggttacgtgggatgccgctatcatacatcatcaaaaaaaaccaaacttactggactaaaaaagatccaaaaaaatcattagcgacagtcattagaaagtctatgcgagacattgaaacagttgttcgatttaaatttgttaagtttatatcttgctatgttgatgtcttgcaaatagcgtttcagcagaaaggaataaatgagcccatcgatgaactcaataacttcaaaatatggctagaattaggagtatctcaaacgacgcaaataaacctgattaatttaggcttatccaggcatacagcaattgagctctccaaattactcccgaaagatgacatgagcctaacagatgttaaaaaatggatgttagatcaggatttggaaacgctgaatttttcatcaatttatattcgtgaaatcgaattagtacgtaaagattttcatatctaa

SEQ ID NO: 59646 - DNA, 963 bp, Sphingopyxis granuli
atggggggccatctgtcgcagctgactgaaaccgatcttctttcgatcctgaccggtaatccggaagccctcgacgttcacctcacactggtcgaacgcgacatctcgatcgatggccacaaggtaaaggttcactgtcattgcctgacagttgacggaaatggtcgcgtccagccccaacggcttgccgagttcatgcgcaatgcagttgtcgactacgccatccctcgctcgaaggttgcagatgcaaagctccgcgaccagaaatttaacagcacggaggccatcgccgagcttgtcgagcgcgccaagcggtcgttcaccgacctcgcaaagacgggcgagggcggcgagatgctgctattccttctggcggagcgattccttcagctgcctcagattctttgtaagatggatctgaagacagacagccggatgcactatcacggcgcagacggggtctatgcaggtgtgacatctagcggaatactcaagctctattggggcgagtcgaaagtctacaaaagcgccgactcagccatccatgattgcctcgcctcgctagcgccctttcttatcgagccggagcatgaaggggccggacgcgaacgtgacctcatgctgctgagcgataaggctgatctcaccgatccggtcttaaccgacgcgctccggcgctactttgatcgctcttcggtcttgtctacacgggttcaatactgcggcatcgccttggtcggcttcgacgcgccgttttatccggcggataatgtgcaggcggtcgccgacgaaattgttgcggcgtcgctcgacgcgctgacgggctggcgggccaagataggcgcccgtcttttggctgaaaagctgagcgacatggaaatccagttgttctgcataccgctcccgtccgccgagggtttccgctcagcgttcctcaaatcaatgggactgaaaagcgaatga

SEQ ID NO: 59647 - DNA, 2610 bp, Sphingopyxis granuli
atgagtctcgcagaactacaatcctggctgcgcgacgagggaatacgtgatgacctagatgccatcacctggatgacagttcgcaccgaactcgacaatctgttgcccgaggcgaatgatgtagtgattgattggccgcgcctattgctggccggaagcatacttgcgcgctcggccgagcgatttgaccaagagaccgcgttgcggattgcaaccgccgctctttccttgagcaaggatcaggcaatccgcgacgccggggcggtcctgctcgggaagttatcaaactttcgcgccgtcacgctcgcccgccaacgggacatgttagcagaagatcttgaggggcggttgggcgtcgcgcttcggctggaagcacagcgacgcgagatggagcgctcaattcttgttgagtcgagcggcgcgtggcttcaagtcaacgaattccagcagcgcttttggaataacgcaaaggggcagaactggctctcggcgtccgcgcccactgcatctggaaaaacctttcttgtgctccaatggctaattgaccagatggccgtgggcagtgcggatattgctatctacctcgcgccaacacgagccttagtgtccgaaatcgaatcgaacatcgccaagattctgggaaaaaacgactcgatcgaagtctcatcgcttccactacgtgagaagtttgattctgcgcgtggcggcgatcggaggctgatcctagtcttcacgcaggagcggttgcaccttcttgcgaacatcctgggagatgacttcaaagtcgacctcgtgattgtcgacgaagcccacaagatcggagacaatcagcgcggcgtcattcttcaagacgcaatcgagcgtgcgacacgcgccaatcccaagctgaagattgtcttcatcagcccggcaacacaaaaccccgaagaactgttaaccgacgcccctcctgaaatcgagactgtggcggtggacagtgacgcgcctacggtgctgcaaaacgtaattgttgcagaccaggtcccccgaaaaccaaaactttggcagttggcggcccggcaaggagaagcccttcttccgattggaacgctcgaacttcccagcaagccagacgggttgcgcaagcgtctcgcattcattgccgctgcgatcggccagcgtggaggcacccttgtctatgccaatggggcaggggagtccgaggaagttgccgatttgatcagccagctgcttcctgcgatggtcgatatcgacccagaactcgcagctttagcggatttggcgcgaaaaggcgtgcatcctaattttcggctcgcgccactcgttgaacgtggtgtcgcctttcacttcggcaatatgccatcacttatccgactggagatcgaacgtctctttcgcgcgggaaagatccggttcctggtctgcacatcgacgctgatcgaaggcgtcaatctatcatgccgcaccatcgtcctgcgcggtccgcgcaagggcatggggcatccgatggagccgcacgacttctggaacctcgcgggccgtgccggccgatggggtgatgagtttcagggaaacattatttgtatcaatccgcaggacaaagctgcgtggccgaccggcgtaccccaacgcgccagatacccaatcaagcgcgaaaccgacgctgtgctggaatttggggacgaattggtcaactatctcgaccaccgcgatacgctcgacctagcatctcttggaccatccgatcagttcgagcaagtcggagcctatcttctgacgacttacatgcgcctcggatcgatctccggggcaagttttgcgaagcggcacgacgcagcttcgcttgcgagactcgaccgcgttttgggagatctggcgtccaagattgacatcgacgctacgctcgcggcccgccaccctggcgtgagcgcaatggggctgcaaagacttctggaagccttccgctcctactccggcgatgtggaaaatctgctgccggctgatgtcgccagcgtagacagcttcgaccgctttgttgcgatcatgggcaggatccacacccatctttttcccgcattcggccctgaaaatgtgaaccgtcgctacgcagtcatcgttgtaaactggctgcggggcctttcacttgccacaatgatacgtcggaatatcgaatggcatcaaagcgttggaaggagctatcggctacctgcccttattcgcgacacgatggatctcgttgaacagatcgcgcgcttcaaggctcccaaattcttctcagcttatatggatgtgcttcatatgcacctgcgcgagatcggccgcgacgatctgatcgagcatgacctcgatatcggaacgcagctggaattcggcgtctcgtcgcgaacgctgttgtcgctcatggaacttgggctttcccgcatgagcgcggtcgcactttacgaaaagatcgcgagggatgatctcagcaaaaacgactgtctagcttgggtcgctgaacgccgcgatcagctcgaagctatggatattccgctgataatcgttcgggaactgcgcgagcgattgctacccctagacgataatggggcagcagtcggagagcagatctag

SEQ ID NO: 59648 - DNA, 939 bp, Microbacterium hydrocarbonoxydans
atggttgacgaggcgacaatcgtcgaggagttcgttgcgttggcccgcggcaaagcgagcgctctgatcgacttcttgcccgcctttgaagaggccgtcaccgtgcccgatacttcgacgcttgttcgaacccacttcatcgctcacgatgccaatggagtgcctgcggtcgagaagctcgcgggagccatggctgccgcgaccttggacttctgcatccctcggtcaaagattcagcgagccgtagcagagctggaggagacaggttcgaccgcggccatagtgagcctgcaggagcaggcccgcgatttgttcgtgaagtcggaaagctccggagaaggaggtgaactcctcctcttcctgctcatggagcgggtgctgcaacgcccgcagttgatctccaagatggctctgaagacgaacacggcgatgcatgtccacggttccgatggcatccatgcgagcttggccgacgacggcaccttggacgtgtactggggagagtcaaaactctacaagtcaagctccgacgctttcaaagagtgctttgacagcatcgccccttacctccgccctagcggtgactccaagcgcaagcaggacctcctgctggtgcgtgatcatctcaatgtcacccagatcgaactggcagcacacctactggagtacttcgacgagacgaatccgaagtcacttaaagcacgatggaacggcgtgtgcctggtcggtttcgatcacgacaactacccgaacatcgcgattctcgatgacgcccagcgccaggcagtctcgaaagccgtgggccgatggcacaagactgttggaagccgactgaaggagttcgatatcgtcggcgtgaacatcgatctcttctgcatccctatgccggacgtcgctgatctccgcgctcgtgttctgaagcggatgggcgcaaaatga

SEQ ID NO: 59649 - DNA, 2565 bp, Microbacterium hydrocarbonoxydans
atgacctccatcaacgcactggaagacatcgtcttcgcctctcacaagttcagagacgtgctggaatccgcccgtagactgaccgtacgttcggagttcccgactgtggaatggtacgaggaactgcctccgatcgactggggattcgctctgctctacgccagcgcgatcacttcggcgcagtcagagcgtgctcaatccgcggtcctacggatcgccacggcgtgcatgttgtcctcggacgcggaggcagctcatcatgcggctgccgcagcactgctcgaacgcagtggcaatcacatggctgtcgagctcgcagagtcccgagaacgcttgccggcggacgcctggcaacaactgccgggagcactgcggctggaagtcgtccgaagccgaatcgagaactcggtccgtctctccgacggccgagtcctgccggtcaacccgtttcagggaaagttctgggacgcggtcgagacgaacgactggctgagcgtttccgcgccgacgtcggctgggaagtcacgcatcatccgagagcacttcctggagatcgctcgccgggccggatcatttaccctcgtgtacctggtgccgacgcgcgctctcatcgaagaggtatcccgtgacctacgacgggaagttccaccggacgtcggtgtcttcacaatgccctgggacccggacctcgccgactcctccaggacggtcctggtcgtcacgcaggagcggcttcacctcgtgttggagctgttgcagtctctgacggtggacctcctgttcgtcgatgaagcgcagtcgctcgccggcgacgcgcgaggtgtccttctccagcatgcgatcgagcgcacgattcgtcgcagcccagacgcccaggtgctcttcgccagtcccctgagctccaatccagagcttctagtggaggacgcgcccccgagtcggcgctcaagctcgttcgtgtccgagacggtgacggtcaatcagaatctcatctgggtcgaacacatcgaccggaagcctcagcgcagagccgtgtccctggtcgcggacggaaaccgtcacagactcggcgatctggtgctcgcgcaacgggcgacgagcgtgccgatgcgtgtcgcgttggtagctcatgcgctggcgggaagctcccccggaaacgtcatatacgtcaacggccccggcgaggccgagaaggttgcgaaggccgtctacgagcagctccccgcactgaaggaacccgatactgagctcgacaacctgcgcgacctcattaagaccgcggtccacaacaagtatctgctcgctgatgtcctcgcgcgccgcgtggctttccactacgggaacatgccactcgtgatccggacagagattgagcgactcttcggtgagggcaaaatccactacctggtgtgcacctcgactctgctggaaggcgtcaacctcccgtgtcggacgatattcatgcgcaacccgcagaagggcaccggccgaccgctcaaagaaggcgacttctggaacctggccgggcgagcagggcgttggggcaaagagttcgaaggcaatgtcgtgtgcatcgacaccgatgtcgacgggctttggcccaacctgcctcgtgtgcgaaagcgatcacagatcagtcgagcggtcagcaccggcctcgacgatgcgtcgggcctcctcgcgttcgtacgctctgcagacgaagtacatgacgacagcaccgcggaaagtctcttcgcgtacttgttctcgaaacacctcggaggcgagtccgtcgagaggctactcgaacgcatccctctcgagtccgagcggagcgagatcgcctcagccatcaccaatacggcgctggatctaacgatccccgtcgaggtcgtgactcggcacaccggcatcgctcctgtctcgatggaacggctactcgacagcttccgccgctccgggaagccgccgtcggatctcgaactccctctccccgaagaaccagattcgaaggcgcggttccaggaggcactggtacgcatcggcgcgacaatgaccagcgtcttcggcgcaccacggtcaggcgaagatcgccgcaagtggcaacttgccaacctcatcgtcaactggatgaagggcatgcctctggcacgcctgatcgatcaacggctcgcgttcaatgcctcactcacctcagcggtcgcgattcgagacgttatgcgagacatcgaatcgatcgcacgcttccacgcacccaaatacctcgcgtgctatgccgacgtactcgccgtgtactcaactgagctcgggctggaagccacggaccgccccgattatgcgatgatgctcgaacttggcgtctctcgcacgagtgaggtcgtactcatgtcacttgggctctctcggacagcgaccgtcgcgctcgccggcttcatcggcgtcgacgaatggtcacgtgcggaagccctggagtggctcgcggcacagaacctcgacgggctcggtgtaccggtgctgctccagcgcgaggtcgctgacgtgctcgaaatcgcgtcgcgccgcgcggagagcagcagcgcctag

SEQ ID NO: 59650 - DNA, 846 bp, Alteromonas mediterranea MED64
atgcaagccccagcacctttttttgaagtcagggtcagtaacctcgactgggacccaactcttatcggtttatgcgtaggttatgagctaggtttgtggcgagaggacgcattagtcgatcacctcatggaatggcttcccgaattttgtcttacttttgaagaaatcagtaatttagatgcaagtaatatggtttcaatgatgagagaagccgttaggaagctatatatctctggaaagtttgagagaagaggggagtttggggaagttctgttacatgctgctgttcgtcaagcttttagctcgattcccgcaatctcaaaaatctactataagtcagcactaaacgaaactgtgaaaggtttcgacgcagttcatgtcgtgcctaatgcagatgaactagagttatggctgggggaagtaaagttctataaaaatcttgatagtgcaattagagacgtggttgaagagttgcatgcacacttagaaaaggactatttgcgagacgagtttttgttaataaagggaaaaatcgacgataattggccctacgcggaaaaactcaagaagatcttacaccacaatacgagtttagatgaagtgttcagtaaagcagtaatacctgtattactaacatatgaaagccaaaccgtactgagccatacccagtgttcagaagattataaaaaggcttttcaagaggaattaatagcaagctataagaagtttactaacaaggaccttcctaaaaatatagcgattcatcttttccttgtaccgataaaagataaagctgacttaattaagaagctagatcaaaaactgaaaatatggcaagcaatatga

SEQ ID NO: 59651 - DNA, 1107 bp, Alteromonas mediterranea MED64
atgaacgtatctgaaacaattgcatccattaagaacctgaacgatgaatctactgaaaagtttaatctcttaaaaaaagtttcggatgcggtaaatagcgatagtaatcacccatcatcaagggagcttgtgttaaggctgcttgataaaagacattattttaacgagtacgtcgatattttggacagccttgcgagagaagtaggtttaatgccttatgtcgatgagtccagattagggttgaaagatagcgtcgcttacgaattttttaaaccacttaacgatgatggtgaaattgtctttcatagagctcaagcagaggtctaccataagctaatcgctggccagagcgtaatacttagtgcacctacaagctttggcaaaagcaaacttgttgactctattattgaactcaatagatataaaaacattgcgatcattgttccaacaatcgcactaattgacgaaacaaggaggaggctctcaagattttctggcttatataagcttatcacgcaggttagccaagaaccgtcaaacagaaacatatttatccttaccgcagagcgacttatagcttttgacgacttaccaaatattgatttttttgtaatcgatgagttttacaaaataggagctttggacagagacgaagaaagaactgttgcgttaaaccaagcattttacaagcttcacaaaatgggaggtcagttctatctcttaggcccaaacattcagcatatacctgataatttggaccgtgaccttaagtgcgtattttataatactcagttttcaaccgttgtgagtgaggttgagtttattcaagccgaagacaatgaatacgaagctctattgaatctagtgtcgcgcttggaaggtcaaactcttgtatattgcagatctcctaaaagagtaaacgatgttgccgaacaactattagcacttgaccttaatctcacagactcgggtttagaagatgcaagtgattggattggcaatcacttccatgagaactggatcttccctaaaacattgaaggaaggaattgccctacatcacggacgcttgcccagagccttatcacagctttcaataaagctttga

SEQ ID NO: 59652 - DNA, 954 bp, Enterococcus caccae ATCC BAA-1240
atgagtaaaaaaaataaaattcagaaagtcttatcttgtaaaatatcagaagctaatttttattcctatcatgttgattttgatatttgtgaaaaagacagcgtgcaacagaggattgatgactttgtacaaatcatgtgtgaagaaataccaagttttgcttttggcttccacagaggtgaaaatgttcctcaagatgagattttaaacactttagttgaggcagcaagatcgatatataagataacagaatacagagaagtagcagaaatgtataaaaaaggtgagtctattgatgataaaattgataataaatatttaagaagaggtgaatttggggaattatttcttcattcaattttaaaatatttatttaacactaatcctttgatagctaaaatccattttaaagattcattcggacatgctgtccatggcttcgattctatacatattaatactgaaagtatgactctttggcttggggagtctaagatatacacaagtggaataaatggggtagatgcactagcacaagatctttttgaacattttaatactgattattttaatagtgaatttaatataatatccaaaagaataacagattcatatgaaatgctggattctatgggatttgattctgaacattggattgaattgttgaatagatatacaagtctctccgagcaactaaacaatatagtaattccgatgttttgtgcgtacgaaacatcgacactggattcatatgaattagatttcgaaaaattttctaaagattttgaagatgaagtgtataaattgaaaaaaagatttgatgaaaaaagtaaggagcaccctcttataaataaactaaatattatagtgatattgatgcctttaaaaagtaaaaaagaaattatatcaaagttgcattcaaaattaactctgattcaagcattaggaggttaa

SEQ ID NO: 59653 - DNA, 2151 bp, Enterococcus caccae ATCC BAA-1240
gtgaattgggatatagtgaatatttatgaagtaaataaactagattttaatgagagtttttctcttgcaaaatacgtatcgaatttgtctttgtcaaatagaaatagttatgctagaaaaataataattcatatatacgaaatttgggataatgttgatgataatacaaaggaaatatggagtgatttagctgaaagtcagggtttctatccttatattaaagacagaatggataacacatctgaaattagacgttcttttcatcagtccgagtatattgataatatagtttttcataaagaacagaaaacattatcatatttgataaaaaagaagcaaaatttaattgttagtgcaccgactagttttggtaaaagtttactgattgaggagatagtcgcttgcagtaaacacaataatatattaattattcagcctacactagctttgattaatgaaactagattgaaattaaaaaaatataaaaaatataacatgatagttaatacttctcagcaagttgaagagaaaaatattttcattttaactgctgaaagagtaatagaatttcctaatcttcctaagattgattattgtgttcttgatgagttttataaaataagttccgatagagatgatgaacgatccgatgtcttaaacattgctataaaaaaaattttagatagacgagatacagcattttattttattggaccaaatattgataaaatttctaatggttttgagaaaaaatataatgctaaatttattaagacagattattctcttgtagacgcacaagtcgaattagtaaacatcaattacaaaaatgatgggaagcgcaaacaagaaatggaaagagaagaaaaactttttgaacttttatactgtaaaaaaaatgaacaatccattgtgtatacatcgtcaccagatagagcatttaggttggctacaaagtactatgaatttttaaaactaaataactatctggaaaaagaagagttattaccaataaatgaatggatttctgaaaatattaatagtaattggagttacaataggctgttattacaaaaaataggtgtccattccggaactattcccaagcacttaacacactccataattcaatattttaattataagaagctaaacgtattattctgcacctctactattatagaaggcgtaaatacctcagcaaaaaatgtatttatttttgataaaaagaaaggtccgaatgaaattgattacttcgatttttctaatataaagggtagagcaggtagattattagagcactatacagggaaagtttacgtttttcataaaattcctccaaagactgaaatagagttagatatgccattctatgatcaagaaaaaatatctgatgaaatattaattaactttgataaagaagaattatttcccgaaaatataaagaggtatgaagaactgatagagtatgataaggaatttttgccgataataaagaaaaatgctgtttctgtagaaggtcaaaagagaattattaatgatttatatgaaaagatacggacacaaccagagttagttttatggactggaaagccttctttcaaggctattaaatatatactgggtatttgttgggataatttattaaaagaaactgagactacaagaccaatgactcggaataaattgccagttgttgtgtttaaatatctcaatagttcttcatttaacgaaatattaagacaagaatatatatatataaaagagcaaaatccgaattggcaaactcaaaaaatactagatcaaactattagcaattgttaccgagaacaaagacattggatttcatataaagttcctaaatggctggatgttgttaattcattgcaaaaagaaatatgtaaaattaataatatttctaatgtaggagattattcttatacttcatctcaacttgaaaatgaaggcgttgatggaaatttttcgattttactggatatgggtgtccctgcaagtgcaattaaaaaaatagtaccaatgttatctgaagaattatctttaaaagaagtggtaaatatatcaaaaaaaattgctaactcgtctaatagtaatttattacaatatgaaaaagaaaaactaagaaatttgtaa

SEQ ID NO: 59654 - DNA, 954 bp, Enterococcus caccae ATCC BAA-1240; identical to SEQ ID NO: 59652

SEQ ID NO: 59655 - DNA, 2151 bp, Enterococcus caccae ATCC BAA-1240; identical to SEQ ID NO: 59653

SEQ ID NO: 59656 - DNA, 909 bp, Clostridium asparagiforme DSM 15981
atggaattaagtttaagaggaacagattttttaggctcatttgatttaatatggtcaaaggatttagatgagtataagaagaataaactgaatctatttgttcttaaaataaattcaaatgaatttgattatgatttattagttgatatgttgattgatccggttattgattattcaatttcaagacaagtgaaggaaaaatataaagatagagcaggtactctttccaaaaaagcacgtgaaaagtttgtcgaatataccaggaataatggcgagctaggtgaattattattattttgttttttagagtcacatttgggtgcacctaagattctgacaaaattagaattaaaaacttcgaccagccattatgtaaatggtgcagatggagtgcactttttaaaattggaaaatgggaattatcagttgatttttggagagtcgaagacatatgaagatatgagcagggcaatatcggatgcatttgaatctatttataattttaaaaatggcaaaaatgaaaaaggcaattcaaaaagtggtatgcattatgaaaagagcttaattagcgataacctttttaaagaatcgttttcagacgaagaacgagaattcttagaaagtttaatctatccaaccaaggagagaaagtttgatgttgatgatgcctttgggatttttataggatttgaagtaaatatagaaaaaaaagacaaagccatgccagcgccagatttcagaaataaaattaaagcgcttattattgatgaagtaactaaaagaataaagtacatacagaaaaaaatcattgactttgatttacaaggacataacttttatatatatgttttaccatttactgatattgatagcaaaagaaaaattattatggaggctataacaaaatga

SEQ ID NO: 59657 - DNA, 2547 bp, Clostridium asparagiforme DSM 15981
atgacttggttggagtccttggttagcagagctttaaacgatccctatttaagtgatttgacacgtaaattggaacttaagtatgcttatatttttctctatcaaagagatgatattgatttgactgataaagaatttaatgatgtattaagatttgctgatattctgtcgagaagtaatgaggctgtgggaagaaataaagcatataagataataagcctactctatgattcatataaagatgatccgcaataccaataccttgcaaattcgattttgactaagttgggaaactttgcatcattaaatattgctgttaagaacaatatggatgttgatacagtcgaatctatgctggaaaaagaaattaaaaagatatatcaaaaagttccttatagtgattatgtttttacagacccacaatatagactatttgaagcaatgaaagacagtaatcattttagtttttcaggacctacatcttttggtaaatcatttataatggatgcttttatacagtatataattaatgaaaagcatggaggagagaatattgtaatattagtaccaacgcgggctttgattaatcaggtgactgccagactaaagaaaagtatcaatagagaaagatatagagtgttagcccatccgattgttcctgctatttataaagaccgtggccttaaatatgtatttgtgtttactccagagagattgatatcttatctgggtgaaaaggaaaatccggttattaattatatgtttgttgatgaagcacaaaaaataatagctgaaaaggattcaagagcccctttgtattatcatgctattttattagctgagaggaagagtataaagttatattttgcatcacctaatattcccaatgcagatatatttcttcagttgttcgaaaaaagtttagacgaaaaaatggtaataaaagaatcaccagtcgctcaaaatcgtttttacatagactttgtgaaacatgaggggagaatgttcactgaaacaggtgatgatattatttttaaggatttaggaaaaaaggaagagcgatatgcaacaaaaatgttagtaaaattagggcataattgcaaaaatataatttattgtaatacggtagcagatacgatagattttgcgcgtgggttttcttcacagttaccagataagcaagatgaaagaatcaactcgcttatagaattaataaagacatatattcatagagattattttctgatagattgcttgcaaaaaggcgtggcgtttcattttggaaggcttccgcaacgcataagagaaagaattgagaaattatttgaagaaaaggttattgattacattttttgtacttcaacattattggagggggttaatttacctgcaaaaaatatttttatatttagcaatgcaattggaaacacgaaattttcagatatagatttttggaatctagctggaagagctgggcggcttagtaaagagttaagtggaaatattatttgtgtacgtcttgaagataaaagaaatagatgggataatccaacaaaagatttgcgtgtagtcaggaccagagagattgatgcggttcatccattggtaataaaaggacaaaaaaacttttataaaaatctggaaaaatctctggagtttaaagattttacaaagaccaattacagtaactctgaaaaagaagtatgggatcattatgccaatattgtatttactcatcaggcaaccaagacggattctatacttatgtctaattttttaaagaaaaatgaaaatggtaaacgaattttagacaaaatagaaagggataatcatataccaacatatatcatggagcaatgttcgaatataaaaattgcgtatcaaaatgatatatggaacagtgtgaaagagggagagaaagcttttcctaatgaggttaacgtagatacgtgttacgaagttttagaaaaaatgtataatttttataattggggagatgaggaatctaagggtagaaagccaatggttagacaaaagtcaagactgcattattttgcagttttgatgtatacatggatgaaatcaacacctctcaatatgatgataaccaatgtgataaattattataaaaggaaaggggagatatgggatcagaatggttatattccctttgattcacataataaagtgcacataaatatggttatcaacgatttgatttctgatattgataatatactgcgttttaaaattaaaaattatattttaaacttttatttaatagtagcagaaaaaaatggaaagaaggcagctggccccaattgggcagaatatttagaatatggaaccatggataaggatactatagaattacaaaatattggtttaccaagacatttggctgtacttattaaaaacgaatatatggaatacctaatgtttgaagatgaggctttagttgagataaatatggaagagttattatctcatattgatgatgaaaaatataaggaggaactgacagaattaaaagaaattcttgaataa

SEQ ID NO: 59658 - DNA, 1476 bp, Peptostreptococcus stomatis DSM 17678
ttgaaaaggatatgcttaggaacaataataaccttaatacatcaaagtcgcacacgcagtgcagacacgattaaatcagtgtgtggtggtatttttgcgacctttggattggatatcaataattacaataaagaattaccaagtcatttaaagagtggccatgatcctgtgccgggtgatctatttgcaaaggcaaggacaattgatattaatgaggtagcatctggagttgaacgttatattttaccgcttatacaccctgataagcataaatgtctattttgtgcaatcaaggatgttatccgagatgacacatacattactgatagtacgattattggaactatgccagggtacgagaaggaaaatattttgaagtatgattctttttatgaatctattactctagcaaatattttaatttttgctatcacccaagtagaaaatgacaagctaaaaacaaatattcgtgaaataggaaaagattatgtagatagttttttaactttaaaagagagtctttttttcttatcgcctacagttgaaaatgatcaagtttttccactgaagagaacattgaaggatccaatgtttgatagggtgtttctaaaagctactgatattacagtctctgcacttgctaatccgacccaagcttctgtgttctatatcgatccgacaaattgtaaatttaggtttagtggtttaaaagattttataattaataatgtcggaagctatgttttttctagagcacagataaagcgtattatcgatagaacaaagaatcctgctgctgtaggggcaaatgcaatgctgaaatttatgacagcatatggtacgaaggcggaaacagtacttggagaaattctactttatacatttatggagcaggaattagatgctccgaaaattatgagtaagattgaaattgatgaatccaatcgcaatatagttagtaaaagtgatggagtgcacttgttatcaattaataaatctggacaaccgtttcatcagcttgtttttggagcatctgatattattggagatttgggtatgtctatagatcgtgcctttgaaaaaatactgtcgattgaagctaatcaggacatagaattacgaatggttgataacacaacacaatggactatttatgatccagaagcaacaaagtatatggttgaacttatgactcctcaacgaaatggttcctacaaaccggatatggcttttggtgcatttctaggatataccattaatttagatcaaccagaaacggatagccaaaaatatcgtaccgctgtaaaggaacaactgaaaaaggacatagacagagtgcaaccatatattataaagaaaatccaagacaatgggctaagtggatatagtttttatttttatatactaccttttaatgatgcaccgcacgaaaaaactagtattattaaagaattacttacaggaggtggtatttaa

SEQ ID NO: 59659 - DNA, 2619 bp, Peptostreptococcus stomatis DSM 17678
atgaatcttgtaccaagaaataccacactcgcagaagcattgtatagagatattgaaaaaaatgagtacttacaagaaatatatggagatctcctttataattattcaataaatttatttcacagcgatagaagacaaagagatattcctattgctgatgctttacgttttgcagatcttttggcaaaatcaacatatccgatgactgcagatagagatcacttgtgggggcaagaaattgctattttactacgtctgctctatccggaagatgaagctgtgaagtattatttaggatcagtgctctcttcagttggaaattatcgaggcctaatgtcaaaaacgatggaaggctttcatagtgaagacttttttgacagtgtatattatgagtatgataaagaagaacatcgaattcctggaaaagagaaggaatatttttttaatgatcaaatgatggtatataaggggctaaaagaaaaattttttagttactcaggacctacatcaatgggaaaatcatttgtagttcaaacttatattcaacaacaaattgaaaatggatcaactgaaaattttgctattcttgtaccaacaaaagctcttattaatgaggtgaagagtaatatgataggagttttacaaggaaaacttaaagatttgaattatcgtgttgtgaccgcatctggtgatttggtgttgcaacaagaccaccattttattttcattatgactccagaacgtttacttcatatgttgattgaacgagaaaatatatgtatcgatttcttatttatagatgaagcacacaaaatatctagtcgtggtggaagaagctcttattattacaaagttcttactcagattggaaagatgcaacaacttccaacagtaatatttgcttcacccaatattcctaatcctgaaatttatatgaaagcaattccagggatagaaaagacacagatgaaaaagctaaaatcgaagtttgctccggtatgtcagtttaaatattttttaaatgtacctgagcgaggtggatactattacaatgattatagtaagaaattagagcgctgttataccttgccagaaggacaagaactttgtgacattgttgctatggtcgggtatgataaacaaaatgttgtatattgtagttctcgtaaaagtgttctagaacaggcagtaaagtatgctcaaaatataactcctaaagatgatagcgaactcatatcacttgctgcagagatcagaaaagaagtacatgacgattgttatcttgctgacttgatccttagaggtgttgcatatcatgtagggtatttgcctgcaaatattagacttcgtatagaaaagagctttgaaaaaggcgttttaagaactattttttgtacaagtacgctagtagagggagtaaatctccctgcagataatctttttattacaagttatcgaaatggtctcagtaatatggatgaagtagattttagaaatcttattggacgtgttggaagaatcaaatataacttgtatggaaatgttgtgcttttgaggctagacgataaacttaaaaccgaacgatataaagaattacttactaatgatgtgccgctacaagaactatctatcgaaattaagaataacacagattgtatgagtgcacttattaaggatcttactgatggcgatattgaaatgagtacttgtcatgaaaaagcaacggaaacagattttgaagcacttagaaagtttggtcttattttaattcgtgatttagcgaatggtgatagaactccagtttcgcaaaaatttgaagagtatcttacagataaacaaaaaagacgtattattgaaaacttcccaattgagagtacaagtgatgacatcacaatttcacatgatcaggcagataagttgcatgatgccatcatccaaggtcttcattatccagagataaatggagaaaacgatgaagtagattttgaagagttagttgattttatgatgaaactacgaagaattttcaaatgggatatttatgaaaaagaaactttaggtagacctggaactaataaatttgattcagtaatgaggtggtattctactattttacttcgttggattcgtggtaacggattacaagtattagttagcagtgcgatttcttttaaggaaaagaatccgaatacaggtgtatggtctggaaaatatagagttgatgaaatatataaccctaattctaagtatcataaaaatttagtaatagcagaatcattaagcgtaatagaaagtgttttgttgtttagtattgctaattatttcaggaagttttcacttgaatataaatcagtacatcaagtagataattttgataatgattggtatgaatttgtagagtatggaacgataaatccggacacaatatttttacaacaaaatggattttctagagaagcttctttgtttatacaaaaaccatcaaattattccaagtatatggtagtggtggaaagtgtaaagaaaataaaactaagcattttagaatgtggaaatataggagtagagactgaagctgcagatattcagtacaatgttccggaactgtttatagaataa

SEQ ID NO: 59660 - DNA, 1506 bp, Psychromonas ingrahamii 37
atgacctatcaaaataatattgtatctataaaagttggagcacctgagagcactgggtttgctttcaaaagtgcttgtggaaaaagcaagtatgttattacttcaaagcatagtatttgcattgataagccaagttgtaagcttatatcttcaggagtaaatgcatgtaggagttgtcctgcaaacattgataattcacaaattacaatcaaatttcaagatcgagaaccagttaaagctatagcttcttttaaatcagacaaatcagatgttgctctgttagaactagaaagtgaacaacctggcttagaattattgaagtgctcttttgatgatgctaatgattatttgatgtggaaacatgacaaagcttgtattctcttagataataagagagtaaaagaacagtcgtatgttttatataatttgaaaagttcaactttctctgattttttacctaagagtcaagttatacctgggtattctggaacaccaatattttcaattgacacaaataacactccaactattcacgcgattctgactgataacgaggaaaacaacgatattggtgcagaattaattactcgtgagctactccatgaactttccttaaaatcatctattacaataaactataactttagtttattgtctaaaaatataagtacttcatttattgatacttgttttgatttttattacgaacataatctagaaaataataataaaatcaaagtatattcacttccattttctgattctaacaagtttgatttatcaaaaattgttgactatttgactgaaaatatgagtagaagtgtatttccacccagagaagttgaattgtcgcaaggtgatcaaatgaaagtgtttgaagccttcaataaattcctatctgagcctcaagatatatatagtaagccagcattactacaaaatttggttgagtccgatcttttagccccaacgttatataaatcaacgaaacagaatgaattcagctccattcatatcagagagttccttcctgaaaaatttgaattcgtgatgactaaattctttagtgatagcgatcttgttgaagcggttgataaatgtgccaactccttaattgatgctaacaataatgcaagtggaagctccttgctacttgagcaaagcttcgttcagcaatcagtatcaattaaatatgcagatttaatttctaagttaatactgccagaaaatgaaatgcatgttgaatataactttggcttattaagtacttacagattagatattgattctgatgtctatagtgtaagaaacttgaatgataagaagcaagcgataaaagataacataatggttcacttaaaagataagcatgcaatgatttcttctatatttgatgaacatctatttatggggaaaacatgttatctgtacttgattccgatcaatgaggtcggagagttaaataaattgatgcatgctaaaatcaattcaaatataaacggttga

SEQ ID NO: 59661 - DNA, 2487 bp, Psychromonas ingrahamii 37
atgagtgctaatataactttaatagataaattaaccacagactcaattaaaagcgttcattttaatgctttatatcaaacactttcgattgcttacgcagatagcaagcttaaaattccgtcgtttataacatcaaaaaaaactgatgatttatgtagatatgcggatatctttagtctgtcagaagaatctgagtatagagtattagcttatcgtattattgtaaaattacttggagtctcggagaaaaagcctgctttgggtagtatggctaggtctattttcaccaagcttggcctgtttttttccgaatcaagatttgataaggatgaacatccgttgccttacgagcgtgaagttagcaacattctaaaaagagatagacagaagttgcctttcgggaatgaagtgtttacagactcacagtatgaagtttttactagtttaactgagcttgataactttagtttttcaggtccaacgtcatttggcaagtcatttataattagaagctatatatttgactgtatcagtaataaaaaaaatgtagttattttagtacctaccaaagtactcattgaagaatatataagggaaatcagaaagacaataaaagttgaaggctggggtaatgtaaatttatcaaagaatgcacaatcctatattgaagataagataaatatcttaattttaactcctgaacgattcaataatttaatttataccgacttagaactatcaattgatgtattggttgttgatgaagcacacaaacttggtgatgatgatgagcgatcaatgacatcctttaaagttattcaagaaactagaaaaagattgcctacttgtaaagtaatctttagttctcctgttataagtaatccttcagtattcttagaatcgtttgggctagatggtcgaaattcaattgaagcaatagaaggtccagtaacacagaatttgttttttatcgatttattgaataatagtagtcagttttataatgaagtaagtaaagaattttatacacatacaaaagagttgaaaattgaagatatgtttagcttcattcggagcgttacttctaaatcctcactaatctactgtacttctaaatcaggctcagtaagtgatgctgtattatttgctgaggacttacctttattaacgaatccaaaattagttgcagcatctaaaaatattaaagaattgattcatgaagagtatttcctttctgatttattgttaaaaggcgttgcatttcataatgctgacttaccaaaaaatgtacgaagtattatcgaaagtctttatcaatctcgtgaaatagcttacttgttttgcacatcaactttattagaaggtgttaatttaccaacaggtaatttgtttttaagatcgtttaaaactagaggcaaaattactaacaaaacaaagttagatttttggaatctagcggggcgtgccggaagatataccaaagagttagatggcaacattttttgtatgcgagacacttcaagtagttggggaaacatctcaactcttgttgagaaaaagaatgaagtgaaagctgacacatctgcattaaaacgcttaatgcgtggtcgaaagattattaatgtactaaaggatggtccattaaatgaggagaaacaagaaagaattatggatcaaatatctaacatgattctttcagactatatggagaataaacaaaaaaatcatccttcaagtttgatgaacttagtaccaaaaaagttccatagtggattatttaaagtgttagaggacaaacttagagatagtgggatcaatgaagtaccacggcagttatttgctattgggcataatatatccattgagcgacatataaacgttctttccgatattaaagaacagccagtaatattgagttcattaaacggtagcgatacttatccgttgtttgaaagggtctgcaaagtttataagttaaagttctcaacagctcaaattaataggctttaccgcattgctcaacaatggattcatggtttttcattaaaggatattattaataattctttggataattgttcaactgtggttatttatagaggagggcctatcgaaaacttcgaccggacaaataaggctcatgttaacgctataatcaatggggtcatctcttctatagagcatgatattggttatgaattggagttatacataaaccattattatcaacatctagttaactctttggggagcgagggggcaggtatcaatctttcaacctatctagagttaggaacaaatgacaagtttgaaatatcactacaaaattatggatttagtagatctgttgcatcagagctgatcaagttctataaggaatttataaaatttgatgatgagaacgttgttgtatctatcgacactgtaaatcttctcgcaagattaggtaagaatagtattgcttttacagaagttggtaatgtttag

SEQ ID NO: 59662 - DNA, 903 bp, Erwinia typographi
atgctactaccaatacgagttgataaacggtttttgaacttatttaagactgtacaaatagacacttgcccacagcaatcaacgttaaacttgcatatattgaatattgaaagcaatcaattcatatattcaaagttggttgaagaacttcgggaacttattattagttatgtacattctaataggcgaattgaagagtttaaacaaaactatcctgcttatagtcctaagccattctttgaagcaatacaaaaattccgaagttacacttcaaatgaaggtgaattgggtgagttgctcttatatgcctttcttgaggcaggattaaatgctcccaaactactttccaaaatggaattgaaaacggattcaaatgactatattaaaggttctgatggtgtacatttattagaaacaggcgatagtttccagttaatttttggtgagtctaagttgtatgccgatctgttagatggcgctcgagaggcatttgattctatagttgacttcaaggctaatggaatggggtttgaaagaggattaatagatacacatgttataaatgaaatggtttcagaagctggatatgaaaagataaaagaagttttgctaccctctggtaataatggaccggatctcgacctgtcatttggcatatttctcggattcgaactaccagttgataattccatcttagcattgaagaccaaagaattcagagagtgggtaaatgaatctgttaaagagcatgcttcacgtgttgttaaaaccatacaaaaaaagattatcaatcatggattatttgggcatgagtttcacatatatatagtcccttttacgaatatagatataacgcgtaagcagctaattaaagatatgctaactatagagggggattcatga

SEQ ID NO: 59663 - DNA, 2571 bp, Erwinia typographi
atgagtgaattaagctctaataatattcatttagcggctcgccttgcagaagatgcttttgcgagcccttattttaaagaaatatataagtatataagtgaattatatgacaagtttttatttgatcgtggagcgataaaaattcttgagctgtctgaaaccaataagatctcgcatgctttacgttttgccgatattttgtctcactccgatgttgaagtatatagaactcgtgcatttgaaataataagcaaaatagcagcattcaaaaatgatgatccatatttcaaatttataggttcagcggttataaatagaattggggtatacgcagctggaaaattaatatctgatggggtctcattacccttagatcgagagatagactccataataaaaaaatcggtacaaaaaacagatgacgatgggatatatttcacggacaggcaatatgagttgtatcaattattgaaaaacagttcaactattagctttgctggcccaacctcaatggggaaatcatttgttattaacgcctatattaaagagattacgtcgaaatataatgacaaaaatatagtgttgatcgtacctacaagagcattaataagccaaaatgcccttaagctaaaaaatgaaatggcgaattcggcatgctctaacagctatacgatagttaccacatcatatatgatcgatagcgaggttgatagcggttatatttttatattaacacctgaaagattggttagtcttataagtactatccctgaactaaagattgattatttatttgtggatgaggctcaaaaacttactactaagaatgactcaaggagtcttgttacgtattcggcaatagagcagactcttaataataatccgggcgcaaagctattcttctcatcgcctaacctatcaaatcctgatgtgttcaattctctctttaatcgttctaaatcaaaggtttatagaagtacagaaggtgccactgcgctaaatatgtattttattgatttattaaatgacagttttagtgttgtaaacacacacgatagaaaccttgaaaaaattgaaagggattttaacaagtataaaagtgcgaatgatttaatttataaattaaatcacaagaaaagtaagatcatatactgtggtggcgttgaaagtacccttgttagaaccagggattttatcaaatatcttaaaataaataacagagctataaagccgaaaaatatagagatatcagcacaaattagagagtttgttcatgataattatgaacttgctgaagctattaattacggtgttgcctttcacttcggtaatttgccacaatcgattagagatctaattgaacataacttcaaaataggaaatatagaatatctcttttgtacgtctacccttctcgaaggtgtgaacttacctgcgagatctgttttcattctaactcataaaaaaggccttagccctttagagcctgttgatttttggaatttggcaggcagggctggtcgattagctatggaattatcaggagatattttttgtattagggatgaagttaagatatgggataataaagcaatcaataacattctattatcagatagaaatgatatatcattgacgccaagtttttatattgaagacaaaaaaagattaaatgagttgcatgaaataatagctacaggagaaacaggaaagattaagaattctgaatttctgcgaacattaggtgatatgattagaattgatacgatgcgggatgagaaacatcttccgttaattaattattttcagcacagtggtaagccagaaatcgtattaagtgcaaaaaatagcactaaagatattaatctaccacttaatatacttctggcaaatagtcatattcctgttgactcacagtataatgcgtttaataaaataaaatcactcagtgttaatgaaataaaattgtcatggcagctctcatatgatgaaattaaatcgaagctgagcttgatttttgagctttatcagatagataagttcgcaactggtcaaaatcgtctatattctaattcgatcccttattacgcacttatactttctcaatggatgtatggtaatagccttcaagagataatatcaggggcaataatatacaagaaaaacaaaaccatttatataaagaatgcaccaattccttttgatagcaataattcatcacatataacagcattagtaaatgacacaattaaagatattgagttgcgagtggggtatttattgcagaattatatttcacattattgtcagctcttaacttatattcatcatggaaatccaggcgcaaattggtcacagttcatcgaatttggatcaaatgatcctatcgtgtggcatttgcaaatgatgggtttttcaagggattgcgcagtatacctcaaaaggaatttttcaaaacatttgaaaatgaacgttgagtctaacaagttagtaataaaaaataaatcaacaattaaggagtcggttaaaaaaaataaactttactcattggaaattcattcgcttttatga

SEQ ID NO: 59664 - DNA, 720 bp, Pseudomonas protegens Cab57
atgaaagtttggaatcttagcagcctgacagaaactgtttatgactggatcattgactactgcctttcacataaagagaaggcgaactttagtggtcccgaaagaggtctattcaaacacgcaagagccaattaccccgctaacgacatgaatgccttaggcgatttatttttgcatatcgctatacgtgactcatataagacaatccctatcatgaacaaggtcttcgacattaacaacaagaccttctcttgcactcatgttgtattgaatcttgatgacattgaattatggatcggcgcttcttcagttagcaccaatattgaggatgccgtgagctctgctattaggaacattgagcacataataaatttgaccacgctaaagcagcgattgtttatgcttacatcggaaatcgatgaatcctggccacatacagacaagcttagaagactggctaactctagtcttacaattgacgaacgattcgacaaaatcatcatccccgtatttttgatgcatgacagttcaatcattaccaattacgacaaaaattcatttattgaacttttcaacgagcgtgttcgagagtgtagaaatattcttgtcagcggaattagaccagatctaattgatctaataaatttgcggattttctattttcccgtttcggatatttcaattgtaaatgaggcgttagtaaaggagcttaattcatga

SEQ ID NO: 59665 - DNA, 2163 bp, Pseudomonas protegens Cab57
atgatctcttggtacgaagaatcaaaagccaatataagcaatccagagttcgatcaatgggatgacttcttgctatcgcttgtaaacgaatacaacagacacgagcagcagcacttaatacaagatattgttataaggtcattagagcgaaaaggcgagatagaaaactctttcattctagatcacttgctaggtgagttaggattatacccctatgttgaaaacacagataatacaagcaaggatttatttagacgcagtatcttcactacacctcaagatgaaaataaaatatttcatattcgccaagctgaagtatttcatagaatcataaatggcgagaacatcatcctgagtgcgcccactagctttgggaaaagcttaataattgaagcgctaattgcaacccgggaatttgccaatattgctattgttgttcctacgatcgctttgatggacgagcttaaaaagaagttgtataagtacagcgacacatataagattattactcagatcacacaaaaatcagaccaaaataatatatacatccttacccaagaaagagtacttgaacatatcgatctgggaataatagatttttttattatcgatgaattttacaaattagcacctacaataaaaaatgatgaacgatgtgatcgcttgaaccttgcctttaaaaaactctatgcgaaatgcaaacgattttacatgctgggccccagaataaatgggttagcggcggggattgaagacgaactcagatgcacctttttgaaatttgactcctacgctactgtggccactaacgaatttttctatccgatagttagtaaggggagagacgctgacaaagacctggaaagggatgccatacttttaaacatcttaaaatctttcggaaatgatgagcaaacagttatttattgtaagtctcccaaaagagctagttccttgatggtcaagctgcttaactccggactgctaaatcaaaagattcgcaatgaggatttttcaatatggcttggcgagaactttcattttgactggtcgttagttgaagggcttaaacacggtattgcctatcatcactcgcaactaccaagagcagttgcttcgttgatagttgactatttcaacacctcagacatcaacattattatttgtacctctacactcatcgaaggagtcaacactaacgccaagaatatcattatatatgatgactgcattactagaagaaccaagcttgatatgtttacatttaacaatattgcgggcaggtctggaaggatgtttgagcattttgtggggaatgtttatattcttggtgaaaagcctcaaaatgaattacctttcatcgacatgccgatcgtcacgcagagtgaaaacgcatctgactcactcctgctacatatgggtactgaagttagcggaccaaatagagaaaagataaaaggatactatgaacaggaagtcatccctatttctttaatactgaaacaccagggagttcatccaagtaagctcatcgagttcgctagtgccctaatcgagaagtgcaatacctggaacgttcttatgcgctgggatagcatatacccaactagcagtcaactaatgcacttatccaaaatcttattcaaatacttcaatgtgtcgtcaatgggtggcggcgccgtccgctccgacacacaattgcataaaaaaattattgatattatcaacaaggttgacgacagggtattaattatccaagaccaaaaattctgggctagtcgctcatctaactacaatattgacgatgcgatacaggctgtttttaacttcaagaaaaacctagtaaactacaacctccccaaaataatatatgcaataagtgatattcaagagctgatattcaaaagattctcctatccttttggcgattacaaaccttttgcttccacgcttgaaaacttctacttcccgccagctgtaaattcacttgaggaattcggaataccgattcagatcacaaagaagatccttgcgaatcataattttgacgacatgaacatagaccaatatataataaaactaaaggcgatctctatgaaaaacctgacatatcttactgaatttgaaacgcgtattttgaagcatgctctttcttacacatag

SEQ ID NO: 59666 - DNA, 846 bp, Cycloclasticus sp. P1
atgcataaaccaacagacttttttgaagtgcgagttcatgatttaagcctcgaccctggtttaacaggcctatgtgtcggatatgagctgggggagtggcgttatgatggcttagttgatcacttgatggagtggatgcccgagttctgtttaacttatgaagagatcacaactcttgactcaggcaacatgatctcgttgatgcgtgaagcatttaggaagttatatacgtcaggtaaatttaaaaaccgtggtgagtttggcgagttaatgctccatgctgcaattaggcaggtttttggttcattgccagcaatatctaagatttattataaatccgcagcaaataatacagttaaaggctttgatgcggttcatgtcgtacctaatggccaaaacttagagctatggttgggtgaagttaagttttacaaagatctaaatggtgcaattagagatgtcgttgaagagcttgatgatcatactaataaagattatttgagagacgagtttttattaattaaaggaaagatagattctagttggccgcatgcccaagagttagagcgtcttttagaccctaatgtcagtttggatactgtttttcagcaggtagtgatacctgtattgctaacttatgaaagtaatgctgttgatagcttttctaattgtagtgatgaatataaagctgtatttgaagaagagattgttaagaatcacggaaagtttgcaggcaaagcattgccaaaaaatgtcgtaattcaattgtttttagtgccattaaaaaacaaagaagaattagttactaagttggacgaaaaattaaagacttggcaggcgttgtga

SEQ ID NO: 59667 - DNA, 2106 bp, Cycloclasticus sp. P1
atggaagatctaatagcagagatatcctcattggggtctgactctacaaatcagtttgaaatattgagaatcgtttcgacagtaataaatgaagatgaaaatcaatcattttccagagagttggttcttagggttcttgaccaaagaaaacactttgaagagttcaatgagatcgtcgatgcgctagtaagggaagtgggcttgttgccgtatattgatgaagacactttgggtttaagagatagtttagcttatgagttttttaaaccaataaatgatgatggaagtatagtttttcatcgtgctcaggctgatgtatatcataagctcctttccggtgaaagtgtgattttgagtgcgccaacaagttttggaaaaagcaagattgtagattctattattgaattgaatcgatataaaaacattgctgtagtcgtacctacaattgctcttattgatgaaactaggagaaggctatctagattttctggtttatacaaaatagtaacgcaaataacgcaagagcctgcagatagaaatatctttatattaactgcagagagattaaatgcttatgaaaaacttcctaagatagatttttttgcagtagacgagttttataaaataggagccttggatcgcgatgaagaaaggacaatatctttaaatcaggcattttataaattatttaaaatgagtgggcagttctatctactaggtccaaatatccaacaaattccagataaccttgatcgtgatttgaaatgttacttttacaatacttctttttctacagtagtaagcgaggttcactacatacaacctggagaagatgagctagattctttgatgcatttgctagccgagttggatgggcagactttggtatactgtaagtcacctaatagagttaatacagtcgcacataagcttctggaaaggctcgacgtgatagaggatgttggtgttaatgaagcagcagaatggatagaaggtgaatttcatgaggaatgggtttttccaagatctttacggcatggcattgcgctgcaccatggaagattacctaggtcgttagcccaggtatctgtaaagctttttaacgactgcaaagttaaattcttgttatgtacttcaactttgattgagggtgtgaatacgtctgcaaaaaatattgttatttttgatcataaaataggaaatagtaaatatgacttttttacttttaataatattaaaggtagaggaggaagaatgtttcaacattttattgggcatgtttatattttcaatgcaccaccacaagaagaacttccatttgtagatttcccattttactcacaaggtgaaaatgttccagatagtttgcttattcagttagataaagctgatttaaaagaaacctctaagcaaagactaagcgaatactttgatcagaatacattgccaattgaattaattcgctttaactcagcagttaacccccttgaccaaataaacttagctaagaaaattgatgagttaggttctgaagatatttccaagctgatttgggatgcatgcccaaactacaaacagcttgaattttgttgcgatttgatatgggaacaccttgttagtagaggaaaagcaggggtagtttcacccaaacaattaactttgaaggttttttctctatataaagaccgaaaccttaaaaataggattgctgctgagcttgagccgggaaggtttcaggcaaaagatgctgacgaggctgtagaaaagatattagattttgatcgcaactgggcagggtatacatttcctagacttctaatgatattggatagcatacagcgatatattttaggacctaagtttggagctgttggtgattactctttctttgccgctaatgttgaatctttttttggaaaatcatctttaatagctcttgaagagtttgggcttccgatacaaattggagaaaaagttgatgcccaaataactatatctgaaaatattgatttagctatttcacaacttcgaggctatgaatatgatcaaggaatttatactcattttgaaaaacacatcattgatgatgtgaaggaacatatttag

SEQ ID NO: 59668 - DNA, 945 bp, Pedobacter sp. BAL39
atggcagaatccacaaaatcaaatcctgatgttttatcaggagaattggacgttagtcctgatcattatgctagcatcgtcgatcatattcaggaaaattgtaacattaacgacaggctacaggcctcatttcattttattaaatatcacgattgtgtcaatcgtgataatgatttcttaaaaacgctttccggataccttgttcaatattgtttttctaaacaacgttataaatcagccaacgtttttgaggtccaacaactgtttatagaggccagggataagttttttaatcctaaagactcagccaatggtcgaagtggtgcaagccggtcaggggagctaggtgaaatcgctctttattttcttttagaatcatatttaaaatctccgcagatcgttagtaaaatggcgctcaaaaccactggtggtgaaaattataagggttcagatggtattcatgtaggcattgtaaatgataaaaagtgttttttttactgtgaatccaagttgaataaggtaaaggataacgcctttagttcctgtatcacttcagttattgattttcacttacacaaaaaggatttcgagatatctgttgtcaataatcatattgaaatagaagacgttaatctgcggcaagcggttttagactttttaaacccttccaaacctaaaggagatgattggttagaagtaaatgcctgttttattgggttcgattgggcgaatttcatagatatcgaaaagtgccagcctaatgaagctctgatgaagaaactgacagatgatttaaaattggaaattgaaaccatcaaaaaacacattactgatactattatattccctactataaaacaccgttttttcttttttgtaatgccattcaaggatgtcgaaaatatgcgcaagaattttatgaaattgttgtatggagggaaataa

SEQ ID NO: 59669 - DNA, 2592 bp, Pedobacter sp. BAL39
atggagggaaataataaaatatctatttacgatgagttggctgtttcgattgttgtatcagagcggtttaaaatatatttgtcgctgattcgcaacgagttattgaatacattcgagcctgctaggcagcagaatgatataactagggaggatttgaaatttttattggaatccgcttctattttagcttgtgcaacttcggacgcacataaacaacttgcttatgctattgcggtaaacgtctataaccagttcaaatcagaatatgaggatattgatcgaatcgcctcttttctcctattgaggcttggtaattttccggggtttcagttacttaaaaacagggcagttgaacgagcattagaaaaggaaatggctgatattaatatcaatcagcaatatgaggtcatttcaaaaagcattgataacaaagtttccgtgaacggaactgatctttatctgacagattttcagcgagacgcatatcatagtctgagtattgggcaagattatagtttttcagcacctacctcagctgggaaatcttttttaatgattttgtttattatagagcagcttcaacagtccactgaacttaatattgtatatgtcgttcctacaaaagccttgatcaaccaagttaaaaatgatataagaagcgcctttaatcgctatgatattcagggcgttggggtgcattcttctacaacctcttttgaattaacggagttgcaaagcactccaactgataaaatcaaacatatctacatacttacccaggaacggttaagccacttattatcaaggcgcgatattccttttgttattaacattttgattgttgatgaggcgcaaaaagttggtgacggttaccgcggcgtattattggaaagagtgattacacaaacagcgcgcacttacccgaaagccagaattgtattttcttcaccgttagcttccaatcctgagtttttcaaaaaattcaagccagaattacaagaatcgaggaccaacaattcgccggtacatcaaaatgtactctttttgaatagtaagaaaaaggatacttttttgtcggtgttgcatgataaagtagaagctctaattgaagataacgaccttcaaaaaggatgtccaattgctaaacgcgcgaagatggcttattgggcatttcatttaggaaaaggacagtctaatattctctacggaaatggtgcgtccgaaactgaagagttggccaagcacctttccgacttactaccggatgtgcaagatgaacggatcgaagaatttgtcaattttattcgggacaatattcacggggagtacactttgatcagctgcttgcgtaaaggtgttgcgtttcattactcgaccatgccgcgggaattaaaggaaaaaattgaacttttattttcggatgaaactgttccggtaaattatttatgttgcaccagtacacttttggaaggtatgaacctgcctgcaaaaaatgtctttatcattgatcctaccaaaggccaggggaaccacatgggtaaatttgatttttggaatcttgcaggcagggcaggacgactgttaaaggatttttatggcaatatctattgtattgacccagactcttggaacgatgaaagttacatcccggaaagatctattgaaaactataccattgaaagttccactgataatgttttggtcgatagagcagtagatttaaccagctacctgcaagatgttgaccaaacttttccaggtaaagataaagagctattagaacaaacatcatctacttttttgattaattcgctgaatgatcccgccgataccatcggcaaatatcttaatgaccataagattacgatggaaagccagcaggtaacgactatcgaaactgctattaccggaattatcaatgaaaacgtgttacccgattatgtaatccggaagaatccgggcatcgatatgaggttgcaaaaccggctatttgcgtatttcagcactgtgcctaccagtgtctcggtgccggtttatccagcagcctttgaattttataattccatagttagtgtttatgacgctatcaatactatatttttggcttcggcagacacccgtatgattagacgttatgcattcgtttcttccgtctggattaaagaaaatcctttaggttacctgattcaagaacaagtaaaatatgaacaaaaagaaaacaagttttcatctgtaaataaatgcgtaaggacggtagtcgatttgatagatggtatactcacttataaatatgccaagtacaccaaatgctacaacgatattttggagcactatattcaaaccattaaggcggatgttaaactgatcaatttatcggcttatctggaactgggtgcatgtaacccgacaacgattagcttaatatctttgggtctatccagaacgactgccataagattacgcatcctgatcgggcgcaatgaccttgaccgcacggcatgtgttaattggttgagtcaaaattatacgcgatacaaaaaccgcttgccggtagtttgccaagatgattacgacaataattttaacgaataa

SEQ ID NO: 59670 - DNA, 720 bp, Stenotrophomonas sp. SKA14
atggaatcgctgccggatttctgccttacctacagcgagtacagccagatcggccacgagtcggcggtgcggatgatcaggaaggccgcaaagtcggtttacagcacggggaagttcaaaaacaggggcgagtttggcgagctgttactccacgtcattcttaaaacgacgatgggcaccctcccagccgtgtctaagatctattacaaggattctgcaaatgacacagtgaagggcttcgatgcggtacatgtcgtcccctctgaaactggacttgagctctggctcggggaggtcaagttttacgaagaaattggctcggccattcgtgatgtgacaaaggaactggagcagcatctgatggcggactacttacgcagcgagttcgtcgcaattcttaacaaggtcgatagagattggccgcatgggcggcaacttttagccttgctagatgaagggacgtcgctggaccaagttttcgaagctttttgcatccctgttctccttacctacgacggcaagacgaccgccgaccatgacgcatcttcagaagcatacagacaggccctggcctcagaaatgcgcgcgatcaaggaaaagttcgataggcgcgttgccagtgtcccccatcgcatccatcttttcttgatgcccctaaaaactaagaagatcttggtagaagccctgcatctgaagcttgaggcgatgaaggccctatga

SEQ ID NO: 59671 - DNA, 2121 bp, Stenotrophomonas sp. SKA14
atgacatcggacgttttccatttttccgacgccgcctccatacaggcggatcccttccgtgccacccaacacctggcgtccctcgtcagtcgggcggaattaggtgaattcgaggacacctcggttcagcgagctgttctgtatgcgctggagaacaaggccagcttcgggccatgcagcgtcatcgtagagagcttggcacgcgcccgagggctatttccttacatcgccagtgacgagatgagtgtccgagatgagctagctttggaggcacaccgccccattggcatggaggatgtggtactccacagaaagcaggccgaggtctaccagcggctaatcgatggtcaaagcattgtactaagcgccccgacgagctttggaaagagtctgctgattgatgcgctagttgcttcgggacgctaccgcaacattgcagttgttgtgccgaccatcgcgctgatcgacgagactaggcgacgtttagcagaacgctttgggcgcgagttcaagctgatcacacatcctacgcaggaagtgtctaccaagaacatcttcgtaatgacccaagagcgtgttttagacgttgacgaactacccttgatcgaccttttcgtcatcgacgaattttacaaactggatcctcggcaagattcggatcgtgctctattgctaaatcaagccctacatagactgctgaagactggtgcacagttctacatgctcggcccaagcatcaaggaggtctcagctcagctatcgaacgtgactggctcctcctttgtggacactgactacgcaacggtggtgaccgagcagatcaatgtcagcccgaaggatggtgacaacatcaaagcactcgtagaactttgccgagagctccacgactccaccctaatttactgcgcctcgcccgctagtgcacgacgagttgctacagccctagcggcagctggactaggagcgagggacccgaggctccagggcgcttatgattggcttgccaagcactatcatcccgattgggctgttgcccgcggcttcttaacgggcgtcggggttcatcacgggaaagtcccacgtgccgtagctcagtacgccgtccgtcagttcaatcgaggcacacttccgtttctcgtttgcacctcgacactgatcgaaggcgtgaacaccaaagcaaagaacgttgtgattttcgacaacagggtggcacagaaaaaattcgacttctttacctttaacaacatccgtggtcgatccgggcgcatgcttcgacattttgtaggcagggtatatctattcaacgtaccaccccaggaagacctgccacttgtagacatcccattggtcaatcaagacgatcagacgcccgactctcttctgatccagttagaccaagcattcctaagtccagaatcacaggcacgcgtgaaagcgcttcaggctgcgtccgtactccccctcgaagtcttgagaagcaactccggaatagatcctggcgcacagaatgctctagccaagcatttgcaatcagctggcagctatggcttcaagatgcttcgatggcaggccttcccagactatgagcaactgaagtatgcctgtgaattgatgtggaagttcttcgtgggaaaaaagaggcttggtggtggagtggtgtcgggaagccagctcgcatggaaagtgaagaacttagccaccgcgaggaacgtaaaaagcctgattttgcgtgagctggcagaacaagaatctccagatgcggatcgagcggtagaagatgtactagactttgtcaggacctgggctggatttcatttccctcgcctcctgatggcattggaccgcattcagcgcaccgtctatttgaattggccaggctccacaggggactattctctgtatgccgcaaaagtcgagaacatgttctcgacaagtggcttagtggcgctagatgaatacggaattcctctccagatcgcggagaaattgcgtccgcactttggcgaacatgacactgtagaccaggccattggtcaactgcggcagcttgacgttgcgagcgtagcattgctctccgacttcgaacgcgaactggttagagacgcccaggccggcctttga

SEQ ID NO: 59672 - DNA, 903 bp, Lysobacter defluvii IMMIB APB-9 = DSM 18482
gtggtggacaggtgctttctagacttcaacacgaagtcggggctgacgccaatcgatcggaaatttctgctctcgtttcttaatgatttcgaggacgggaagtggagagattccgcgttcgatgacttcctatgggacaacgtcgctcaaactgcactcacgcaagctgagagagagaacgcgatgctcggggatcgctctcggctacgtgaagcggcgaagaatcttcgcttgatcgacaaggagcccgaatcctccaaaggaagcgaaattgcggagataattctgtacggcttaatgcgtctccatttcggcgcgctgcctgtagtacccaaaattttctacaagcagaatgtaaacgacttcgcaaaaggagccgatagtgttcacatctcaatcgatggtgatgcatttctcctgtacttcggagaggccaagttttactcgtccattgagaatgcacgcttggactcggtcgtcgattccgtaaggaagtccttagagaccgataagctaaaaaaagagaacgcgatagtcacgagtttgcgggagctggataccttggatctcccgggtggcatggccgagaggattcgcgccgcgctctcaaacagagcgtccatagatgacattaaacccctgatccacgttccaattctgctgctgcacgaatgttccgtgacggcggcagcaaccctcaaggatcaggcttatctcgatgcgatcaccgatgtgcatcaagagcgggcgcagtcgtactttgagcggcaggttgccgcacttgctcctagcgtcgcgcgttacggcgagattacgttccacctaatcctgctgcccgttccctgcaagaagaaggtggttgaccgcttcttgactgaggccgcattgctgaagggggcttga

SEQ ID NO: 59673 - DNA, 2103 bp, Lysobacter defluvii IMMIB APB-9 = DSM 18482
gtggacgatcttctattcgcccgttgcgcgttgattaatcgacacctcgaactcggtgacgagcaggaggcacgcgacggggtcattcaactgctcgactactgtcaatcgcaggatattgctccgccccctgttttgaatgcattgacgaggatggtcgggctctatccgtacctacggactggcctttcatgggacgagcgctacctgctgtctgcattcagtgcagacgccgggagcggcgaagttgtcctgcacagagagcaagcaactgtccttagaatgttgctcgatggagccaaccttgcgctgagcgcaccgacgagttttggaaaatcattcatcgtcgatgctttcatctctattaagcggccacgcaatgttctgataatagtgcccactctcgccctggcggatgagacccgccgacgactccacgtcaagttcgggcgcagacttaaagtgattacagcgaccgaggaagagccttgcgaggccggaaacatattcatcttccctcaagagcgagctataagttactcggcgaagatgccagacctggacttgctaattgttgatgaattttacaaagcaagccgagagttcgacagggatcgatccgcaccgcttatacgggcaattctcaagtttggagcaaagtccaagcagcgttactacttggccccgaacattgcgtctctcagagagagtccatttacggaggggatggtttttcaccgcgtggactttaatacggtatttctacgaaagcacgaagtatatcacgcgatccagggggcgcaggcgaaaacaagtgcgctaatggaaattctccagaacgccggcgggaaaacacttgtctatgcagggacatatgccgcgatcaaagaggttgccacggcgctgcttgatcagtttgaaggacagggatccgagctattggaggaattccatcagtggctggttgaaagctatgggccaaactggctgttaccccgtctaatgcggcggggtgttggcgtgcacaacgggcagctacacaggtcaatcggccagatacagatcaagctgtatgaagatcctgacggaatccaagtccttctctcgacgtcgtcaatcatcgagggggttaacacgtcggcccagaacgtggtgctctggaagaataggaatggtgcctcacgacttaccgattttgagtaccggaacattatcgggagaagtggtcgaatgttccggcacttcgtcggtcacgtctttatcttggaggcgccgcccgccgaacaagtgaatcagctggttctggagctgcctgaagagctgctaggcctacccgacgttgaagaagactacagtcttaatgtggctcagaaagggcgcgccgacgatttcaggcgagaggtgtcccaactgctcggagggcgcgatgcggacgaagttttgcgcgatcacaacgttcagaccagtgacgcttccgtcatcaagcgtatattgaccgaccttcgccagaacccgcgcagctggagcgggctctcgtatttgaactctgaggatccgaaggagtggagatttacgctcttcagggtactttatcttgatcctggtgcatgggataccacatacaccaagttcgtcgcattcactcaggtaattgcaaagaactgggttagcaccattccagagttactcgaagagcttgcgggtttggatatagacctggacctatttttcaaacttgaaaggaacgtgtcttacaagttggcagcgctcgtcggggacgtaaatacgttgcagcaagctgtgaacccgggccgtcatgtggatgtttctgcgttcgtcgtgcgcgctgctcatgccttcttgccgcctacggtgtttgagctcgaggagtacgggttgcctcgaatgatctcgcggaagctccaagacgcaggcgtggtagattttgaggcggccgattgccggctcagctcagcgatccaagagattgttgaccagaggagcttggtccgggagatactggaggggttcgagtgttacattttcgactatttcctcagcggggtgatgcccgaatcagatgcaaacgatgccgagcactaa

SEQ ID NO: 59674 - DNA, 1620 bp, Pseudomonas tuomuerensis
atggttactactccccgtccatcaaacaaaggtgggccagcggctcggcaagggttcaaataccaggatcacgttgccgttagcttcatattgaaaatgctggccgacagcagctacgtgcagatcgaatgcgagacagccgacgacatcgtcgcggtgaagcagtcagcaggtagcactatgaatgaatacatccaagtcaaaaccaccgaaaaggatgggaagtggaacctgaaggaatgcacccaactggagaacaggaaacccgatagctctctgatccaaaagtcgctcaaatgcgacgtaaggccggggccagcctgttttcggatcgtctccaaacgtgatgtcgcgaaggtactggaggacttcaccgaggagctgcacaagcgtgtcaccccggacggggcaacggctcagggcatcaagctggccaagcgttttcccaagtcgatttcggccatgggtcggaacctgtcgtactgggccgaccacttcgtttggcaggtatgtggcaaggtcaacgctctggaatctattaacctgcgcctgctttccgaattgattgagttttatggggagaacccctcccaccgccagttgaaagaaatctacgcggattttctcggctgggcagatgacgcagcaactgccgatgtcaaaatagcaccgcaggacaaaatcatcccgcgtgccgatgcattggcccgactgaaagcgctgctggactcggcgtccaagcaagccaacaccttcgcgaaaccttacaaatcaaaacctgatccgtttctcgtggagtttcatacagccaccgagacggggctgcttcgctccatttctggcttcgacgtggagtacgattttgaggagtggcgcagcgatcagtttgcggagcacctggtgcaatggcttcccgaattttgcttacgtgctagcgagattgccaatttccagatacaccagctctccagtgcgctcgcgaaatccatcagcatgctggatcaaacgcctggctctcgcgaccgcttgatcgccgagctgattctccacgccatcctgcgtcaccgagaaaatagcgagccgatcgcatgcaaagcgttttacaccgtcaacggcaaactttccgagttcggcaacgcccacgtagtccaatccgagggtgaggcagaccagctttggctgggaatatcgcgaatgatctataccggcacgatggatcagacgctgaaagatatttgcaatgtgttggacgcgacgatttccagagccgcgttgaccgaagagcgcgagatcatcgtgaccctgcgcgagcctcaacatcatcggcccaacgccgaggcgttcaacaaggcgctacacaagaatgcaccgacccaggacatgctgaaggtgctttgctttccagtcctgttggcatacgacagtgaagtgttggccggcggctttctcgctgactacgcggcgaacctgaaaactgaagtgacgcagcattacaagaccttgctcagcaccttgccttcgaagatccaacaggttcgggtggtcgtgtttctggtaccaatggaaagcattcggcagcttgtccagaaattcaactccctgtgcagggctgctagctaa

SEQ ID NO: 59675 - DNA, 2145 bp, Pseudomonas tuomuerensis
atgaaatacgagatcatcaaacagcagctggaatcgctcggcggcaaagacagcgacaagactggacttcttgcaggcgtgacccagatcgtgaacagggggaaacctgagtgggagggacgcgacctggtgatccgtctcctagataaattcgcgttcttggacgaaatagaacagtcgcttttactcagcctggtacgcactgttggtctgttcccctacatcacagagcacgtcgagcaggtgtccgacgcagaccgcctagcctatgaaatccaccgggtcgagggcgtggagaaaggcctggtcttccaccggcttcaggcaaatgtgtttcacctacttatgcaagggcgcaacgtcgtgctcagcgcgtcgacaagtgtcggcaagagccttgtcattgatgcggtgctggcgcaaggcaaattccgcaaagtggtggtgatcgtaccaaccatcgcgctgattgacgaaacgcgtcgccggctggtgaagcgcttccgatcggtttgcaatgtcatcactcacccgagccaggaggcgaagactggcctcatcaacgtctacctcctgactcaggagcgggtgctgcagcgcgatgatttggacgacgtcgatttcttcgtcatcgacgagttctacaagcttgatcttgccagtgactctgaagaaaagaaccgctccgttgacctcagcctcgcctttcacaaactagcgaacctaggtgcccagttttatctgctgggcccgcacatccataacatccaaggtctggatgggtatgaatacaattttatcccctcgaacttctcgacggtggcagtggacgtgacctactttaacctgcgcacccgtggtgacgagcgcaaggaaaagctgctggagctgtgcgagcaactcacctcccctacgctgatctactgccagtcgcctgcgagcgcgaaccgggtcgcacagcttttgattgatagaggtaatttccctttgcttcccgagaccaaggacgtgtcggactggatttccagcaactaccatcctgactggaatgtggccaaagccatttctctgggaatcggcattcaccacggcggcgtaccccgagcgattcaacagtacttcgtgaagctgttcaacgagagaaccatccgctacatcatctgcacgtccacgatgatcgaaggcgttaacacctcggctgagaacgtcatcatctacgatcggcgaatcaacaagaacacctttgacttcttcacctttaagaacatttccgggcgtgctggtcgtatgaaccagtatttcattggcaaggtgttcatgctggaggagccgcccgaggaggaaaacctcaccgtcgagtacccgatcggtttgcaggacagcacctcccccattggactgttgatgaagctggaaccagagtacttgaccgaccaatccaggcagcgtttggaagtcgtctattcaacaccgcaactgtcctcctcaacgctgatcgagaaccggcatatcccggtagaccgtcaaattgaagtggctgacaggattcgtcgcgagctcgcaatcagccacatatggctgacctggaaaggaaatcctgagcagaagcagctcgaatacctctgcaccctcatctacgatcacctcccacacaaactgcaggaattcaatatccactccggactgcaactggcgtggcacatcaatgcgctcagggcacagaaggatttccaggtctacctccaacaagccattgatgaagaccccacagatcgcactccaagcgagtcgattggccagcgactgaagtttattcggaacgtgatctcgtaccgccttccacgcgacatcatggcattgagtaaaattcaagctgacgttttcacccgaataggtattgaaccgggtgatttcggcttcttggctgagcagcttgaaaacctgttcaacgaccctcttctcactgcgctggacgagtacgggattcccacgcagatttcgacgaagttcaaaagcgccatactgcccgccgagggcatgacccagctaatggtaaagctcaagcaatgggcaccacgactggaatactcacacctgagtcggtttgagaaaagcatcgtcaagtgggcgatagaggatatgtga

SEQ ID NO: 59676 - DNA, 1506 bp, Syntrophomonas zehnderi OL-4
atgtcattatttatctcgtacaatagagaacaaaaagactttgcagataagatagagtcctctgtccgcacagtttgtcctatcctgcgcgatacaaatgacattgctccgtggggtagtattgaggaattcatgaaccgtattcgccaagctgagtacgctgtacttctcatttcagatgagtatttgaaatctatcaattgcatgtatgaggcctgtcagttatacaaggatgttaattggaaagcccgcactatgtatgttgtgcttggaaatgccgatctgaatgtctacactgtagcaaatcacgaacgttacatacgatattggaatgacaaaaaagcaacacttgaagaacagattaagagcttgccggcagaaagtattgatagcattacagcagagataaagcgcgtaagcgaaattctcctgatgatcggtgattttctgaaagttatacgtgacactaacaatatgcaaccagaaaacactatagatgcaatcattagttttatcacaaccaagtctgtttctaaggaatcgcatttaagggagcaaactcacgatgcttcatcgagtgtgttgaaaaagacgcttaaggatgccggttttgacggtgttttcacagaagtgtcacatgacgaaaagctgggtttaataaacccttaccagttgcgcttgtttcaactgagcgtggttgacaatgcgttctctttcgatgcccttaagaagtttctattgaaaaacataggtcaatacatttactcgcgggaacgcataaagaagtttatgaatgatgatgagataacgctcattggtctgaaagcagtcgaattgttgcacgaccgttgcaacggcgatttaacttggcttggtgacgaactgggtgacctgatgctgtatgtgtttttggaacagatacttgatgctccaaaagtgttcagcaaatttgacaccccgtccgatgagttgttgacgaccggcaccagctgcgttcatttactgcagaccagcgcgggaatgccatcttttcagatggtgtttggcaagtctcgcatcgcaggagacccaagggatgcaatcgacgatgcctttatcacacttgaagcgataaagaatgacacttcacgggaaatccgacttgtagaaagcacagcgtttgacaaggagtttacaccggaagttgccaaacaattaaagaacatcatcataccaagcaaaggacaaactattgcccatgatactgcgtttggcgtgtttctcggttactcgttgggaatagaaaaaaaccgcccctcagcagaatttcgcgaactagtagcaaaaaaaatgcgaaaggatattcaagctcatgtctcctatatcatagataagattaaaactgcggggatggagcattattcgttttacttttattttttgccattcaatgaagcggatgaagacaagcaagagattatgaagtcccttcttggatttaagggaggggtgcaaagtggcggatag

SEQ ID NO: 59677 - DNA, 2613 bp, Syntrophomonas zehnderi OL-4
gtggcggataggaacattgtttcattaggtgatgtcatatttgatgatattgacaagaatccctatcttaatgagttgtatgagaatatcttatacaactattcgttgcgcctctttcaaattaagagtgaaaacaagcctgtaaatatttctgatgctctacgttttgccgacatattgtcaaaatcgcctgctgacagccatatgacttgggcacaagaaatggtcgcactattaaaggagatagagcctaataatccggaaatagatatataccttaattcggtactttcaaatacaggtaattatcaggggcttgaaacagctgagaataaaaaagttgccccgatatccgttcgccgtaatctgcttgaacgttttcatgaagaatacagtaaagaactcgtgtccattcctgctgagcctgataagttgttttttcgaccacaacgacaaatctatgaccgtctgacagagccatatttcagctattcgggtcccacctctatgggcaagtcctttattatgaggatgtttataaagaagcaagtacaggacggtatgaagttcaattacgctttgattgtacctaccaaagcacttattaatgaagtgtcgagtaaaattattagcgacctcggcgcactccttaaagaaatgaattatcgtgtcgttacatctgccggagcattggcactagaggaagaacataacttcatctatgttctcacacctgagcgactgctttatcttctgattcgccacaaggataaagatattgactatttgtttatcgatgaagcacacaaaatcacatccaaggacaagcgtagcaccttctattataaaaacatagatatgctcgctcagcgagaacgaaaacctcacatcatttttgcttcacctaatattccaaatcctgaggtctatctcaagttagttcctgaagcgtttgaagctaccgatctggattgcaataaactggctacaagtttttcacctgtaagccaagtaaaatacctaattgactgtgttgatggaggcatacatctgtttaatgaccgtagtagtcaactaatggaaatcagcaaagctgcaataaaagtgccgttcagcaatattgtctcccacttaggtaagggtgttcagactattatatacttcaactcaaaagacaaagctattcaagcagcaattgattatgcaaaatacgaacaggataaaaatgacagtgaactcgatgctgttgccagggagatcgcgaatcaagtccacaaggattattttctcgcaaaattaattaaaaaaggtattgcttaccacattggctatctaccagcttctattcgcatgaaaatagaaaagctgtttcgtgacagaaaaatcgtggcaatgttttgtaccagtacactcgttgaaggagttaatctgcctgctgataatttgtttatcactacttacagaaaaggccgtggacaaacaaaaatgactgccgttgattttagaaatcttgtcggaagagtcggacgcatcaattacaacctatatggcaatgtgttcttggttcgacttgaggagaatcttcaggtcaaagattttgttgagctacttgaaaagaaagtaccggaacagaaactctctcttgtcactgaactaaaacccaagcaaaaaaagcaaattgtcacatgcctgttgcaaggacacaccaacttggtaaaagaccaagggcaatcgcaggactcttttgatttgacaagaaagttttgcctaattttgctcagagacataatgaagggcagaaacagcattgtaagacgagagttcagcgaattcttaacaccggaagatgaaagcaaaatcaaggcgatatttgaaagagatgagataaaaccggatgacgatatcaatacatctgttgatcaaactaaaagcttatctgccaacattgcgtgggggttagagtatcccactattgatggagatggacgcacagagcatggtgagccacaagctttccttgagaagttatatgatatttttggttggggtaaatgtgaaagttccgaaactatcggtaataaaaaacgccttagttggtatgccgtcattctacgtcattgggttagtggcaatgggctcggaatgattatcgacaaatcgcttacctatgcacaaaatagccccaactacaaagtccgcattggcggtcaattaattccttataatcatcaatcaatgatgcacagaaacatcgtcatgtcggaaacacttcaagcgattgagagcgtcgttctgttcagctttgcaaactactttttgaggttttcagaagcgtacaagcggattcacggcattgaggatgacatgagcaacgattggtatgaattcgtcgaatacggcacaacaaacaaactgaccatattcctccagcggaacgggttttctcgcgagacagctctgtttatacggaagaaccggagcaagtatgtgatcggattagacgatagcagaccagtcaaaataaaaaaagacatccttaactgcggtaactttagtgtgatttctgaggttgagaatatgagcatcaataaccccgacttatttgtggattaa

SEQ ID NO: 59678 - DNA, 1506 bp, Syntrophomonas zehnderi OL-4; identical to SEQ ID NO: 59676

SEQ ID NO: 59679 - DNA, 2613 bp, Syntrophomonas zehnderi OL-4; identical to SEQ ID NO: 59677

SEQ ID NO: 59680 - DNA, 921 bp, Chryseobacterium oranimense G311
atgaaatttgaaattctactaaatgaaatttttgatgacgtcaaattagacgacactttaaaaatcaccaacaacaaatcagttcttggaataattaacgattttgaaaatggagaatggagatatgataaatttcaaaaattcatatggaacaacataaaggaaactgcattaagtcatagtgaaaggaaagcacttttggatgatggagaaggttcaattttaacagaatctgcaaaaaaattacgtttaattgagtctgttgatgcaattggaagaggtagtgagattgcagaaattgtactttacggaataatgaaaaatcactattctgcattgccaattgtccctaaaattttttacaagcaaaatctaaaagatgaagctaaaggttcagatagcgttcatattgttgtggagtcagaagattctttttcattatggtttggggaatcaaaattttataacagtatagaaaatgcgaggttagatacaattgttgcttctgtaaaagactctataagtctagataaaatcaaaaaagagaatagcataataacgaatttaagtgatatcaatgattttgatgaaatctctgaagatttgagaattaaaataaaagctagtctttcacaagaggaatcaattgacaacataaagccaatattaaacattccaatattattgttgtatgaatgtgaacaaacaaaacttggaacaagtttgaccgcagaatataaacaaggtattattgattatcacaaagacagagcaactcaatattttaagaaacaaattcagaaatgtgctgacgtacatttatatgaaaaaattaattttcacataattttatttccaattgcagacaaggaaaaagtcgtagataaatttattcaaatcgctaaagcttatagagattag

SEQ ID NO: 59681 - DNA, 2103 bp, Chryseobacterium oranimense G311
atgcaagaacaagtttttgacagatgccatataattaatggacttttaatcgataaccaagaaaatgaagcaagacaggagctcattaaattgttagattttcacaacactaatcaattagcttacaatccattagttaatcatttaataagagaaacaggtctttttccatacttggagttagaaacctctaattgggaagaaagatttatctataatgcctttaaagttgatgtcggcgaagaaaatcccttaactctacatagagaacaatcttttttacttaaaaagcttttggaaggaaaaaatattgctgtaagtgcaccaacaagtttcggtaaaagctttgtaattgatgcgtatattaaaattaaaaaaccaaataatgttttaataatagttccaacattagcactaacagacgaaactagaagacgattatataaaaaattcgctcacgagtataaaatcataacaacctctgatgttgaattgtcagataaaaacatattcatatttccacaggaaagagctatgaattacattaacatcgtggagtcatttgacattatgatagttgatgaattctataaagccagtagtaaatttgataaagaaaggtcgccaagtttaattagagcgatgattaaacttggagcaaaatcaaatcaaaagtattatttagctccaaatatcacgtcattagaaaacaatccatttacagacgatatggaatttataaggcttgattttaataccgtttttttagagaaacacgaactatacaatcaaatcaagaataatgatgaaaaaagcgaagtactcttagaaatcctatctaaaaataaaggaaaatctctgatttatgctggtacatattccaatattgatagcctaactattttatttcttgcgacatatgagccagttaaaaatgaacttcttgaaatgtttgcaaattggctttctaagaattatgatttcaattggagcttaacaaaattagttagtcgcgaaattggcgttcacaatggccgactacatcgttctttaagtcaaatccaagtaaaactatttgaagaaggagagggaatacgaaatttaatttcaacatcttcaatcatagaaggcgttaatacatctgctgaaaacgtgataatttggagaaatagaaaaggaagtgcaaaattggacgatttcacttataaaaatattattggaagaggtggcagaatgtttaagcactttataggtaagatttacattttagaacaaccaccagaagaaggcttaactcaattaagcattccctttccagatgaaatactaggagatttagaagaatcaaaatatgatggattattaactaaagagcaagttgcaaaattaaagttctataatgatgaaatggctgagcttgttggagctaaagtctatgaagaactaaaatcagaatccatttttcaatcgagtaactctgatttgataaaggctatagcaattgatttgactaaaaatcctgacgaatggaatggcttatattacttgaatgaatttaagcctgaaaattgggatagacttctttataaagtgataaagttacaaccaggaaactgggattgtagctataaaacctttgtcgaatttataaaaataatggcttacaattggactaaatctattcccgaactgctaaaagaacttgaagattatgatgttgggattgatactttttttctactagaaagaaatgtcacatataaattttcagcacttttaaatgatttaaatacgttacaaaaacgaattttaaaaaataagcaatatgatatttctaaattcataaagtggtgttcaaacgcatttctacctaaagttgtattccaacttgaagaatatggtttgcctagaatgatttcaaaaaaaattcacgaatctaaagttattgacttctatgatagtgatttaaccatacataaagtagttgaaaaatttaacgaaataggaaaagaaatgactattgaaaaaacaaataatttggacgaatttgataaatatattttgaattatttctttgacggaataaaaataatgaacgcctaa

SEQ ID NO: 59682 - DNA, 921 bp, Epilithonimonas lactis; identical to SEQ ID NO: 59680

SEQ ID NO: 59683 - DNA, 2103 bp, Epilithonimonas lactis; identical to SEQ ID NO: 59681

SEQ ID NO: 59684 - DNA, 906 bp, Bacillus butanolivorans
atggaattgagcttggcttcatctgattttctaaaagtatttaaacatcttgatactcatgaatttagtaaaacaggaaacaaaattgatttatttttatttcctataaactcaaataagttcgactataatagaattatcaatgaacttatggaaccagttgcagattttgccatctcaagaaaagtgaaaaattcatatgctaataaacctatgactctctcaaaagtagctcgggaaaagttccttgagtataaaaagaatactggggagctgggagaatttttattatattgttttttagaagggcatttgaacgctccgaaaatcttttcaaagttggaaatgaagacatcaacaagtatgtacgtgaatggttcagatggtgtgcatttcttaaaacttgctgatggtaattttcaattagtatttggtgaatcaaagactattaaagaattgggcggagctatgtatgacgcctttaaatcaatataccaattcaaaaatgaaattaatgataaaggtgataccaaaagtggtatcaattttgaaaagagattaattagtgataatttggatcatgagacctggactgaaaaagaaaaagaattcctaactaaacttatttatccaactagtgatgaagattttgaggtagatgatgcctttggtatttttattgggttccaaataaccccgacggatgagcagaaaagatcaagtaattcagactatagaaaagcaattgaagcaaatgttaaattgcaattaacaaaagaattaaagcatatagaaaaattgatagaaagatatgacctgttcggacattctttctatatatatgctttgccttttattgaacttgacaaagcccgagaagacataatgaaaggaataacaacatga

SEQ ID NO: 59685 - DNA, 2565 bp, Bacillus butanolivorans
atgagtttacttaaggaacttgcgaaaaaagcacttaatgattcatatttagaaacattagtccataaattagaaaaaacatatggttatcactttgtcggtaattctataaacaacccattaactgaaaaagagtatactgacctattaaggtttggagatatactttgcaggtcagatttaacagaggcacgaaatttggcatataaaatcattagtttgttatacaatttttatagcgaagataaattcttcaagatgcaagctgctactgtacttgtaaaattaggaaacttcccttctctgcaacttgcaattaatagtgaggaaattgatttagatgaagtaatggttgagtctattatcaaaaagacttatcaaattgctccagactcaaaaaatatttttactgacgctcaataccaagtttttgaggagttaaaagatagtaatcactttagcttttctggaccaacatctttcggaaagtcatttattatagaatcattcatcaaatttcttattaaagaaagaaatgcttctgataatattgttattcttgtaccaactagagcattaataaatcaagtaacaactaagcttaaaaaagaaatttccgaaccaaaatacaaaatactctcccatccaacagtaccattattgtataaaagtaaagggaacaaatatatttttgtattcacccccgaaagattaatttcatatttatcaaatgataatcctgcaatcaactatgtttttgttgacgaagctcaaaaactgataacccaagacgattcaagagctccgctcttttatcacgccttaatgctggctaaaagaaaaagtgtaaatctttatttttcttctcctaatattattaatagtgaaatattcctacagttatttgggaatagtaccgaagaaacattaagtgttactgaaaattctgtggctcaaaatagattctttattgactgtatagaaaagagagtaattatgttcgccgaaaacggtgaggaaatagatttaccgtatgactcctattctaccaatgaacataataatttaaagaatgctatcactttaatagggaataatgtccaaaatataatatattgcaatacagttgatgacacaataaattacgctttacaatatgcgaaaaatcttaatgataaaaaaaacactaatttgtcttctttaattgaattggttcaaacaactatgcacgaagaatattatttagtggattgtcttaaaaaaggaatagcatttcatttcgggggattaccacaaagaattagggaaaagattgaattattgtttcgtgataaaataatagataatattttttgcacttctactttgttagagggcgttaacctacctgccaaaaacatttttatattaagtaatgcaattggacttagaaagttttctgatgtagatttttggaacttagcaggtcgtgcaggaagattaactaaggatctaagtggaaatatagtttgtttaagaatagtagataagagaaatagatgggatagtccaaaaaaagacctaaaagttataaaagaaaaaaaaataggcaaggttgaatccattctaatgaccaatagagggaggttttatactaatatcggtaattcgattgttggaaaaccattcactcgaaaaaacgtctctgaaaacgagaaaaaaatgcttgattcctatggtaatatattggcttatcatgatttgtctaagactgattcgattttaagaagtatgttcattgataataataatgatggagcatcaatacttaacaaaattgattcaagaaaccaagtccctaatgatattttggctcaaagcatgaccattaagctacaatatcaaaacgatattgtagctttcgggaaattgttgcctcaaatacctttagaagtaaattatcagaattgcttagaaatattgaatatcctttataatttctataattggaagggtgaagaatcaggaggaactaaacctttagcgaaaaataaaaatattcttacctattacgcagtattaatgaactcatggataaattcaaaacctttaaatataattattaaagatgttattaaggattttgtatccaacaataaggaaatctttctaaacaataatcaatcggaactatttgattctaaaaatcgaatacatattaataaaattgttaataatgtggtatctgatatagaaaatgtattaagatttaaaataaaatattacttatctaattatattctacttattaataatataaataaaggtgaaggactccctatgagtaaagattggtcagaatacttggagtatggaactacggataaaataataattgaattgcaaaatttagggtttccaaggcatcttgcaacaattcttaaaaagaattatatcgattcttttattatccaagattataatataatagatttttctgaaaatgaattgaaaaatgcaattgataaagaaaagtattatgaagaatacattgagttatcggagatccttgattgggaaaagtaa

SEQ ID NO: 59686 - DNA, 978 bp, Geobacter sp. M21
atgaagtctttatggggtgaatgtgctttcattgtagtgaacttttgtggtatacagtggcgatgtgtgatctacgacaattccttatatgagatattatctatgaatacagaactgctattgagtaaaacaacggacattgtagacaaaattcattatgttcgccacgacttctcgttgctgcccaacaaggaccatctcggtatatgtatcaagcatgttgacataaatgagttaaggcaccagttcgtatcctcgttatgtgcctcaataattaaatttatatattgtgatgatggatacgaaaaattgaaaaaggaatttgggtcttgtgatgagcaaactatatctgggaaaatatatcaaaaagctaagcaaaagtttaggccatactcgaagcgagggcagttttcagaattgctcgtattcacgttactacaacatttctttaaagctgttccttttctaagaaaaggaagcatcacgactaatccagaaatggaacgtaatggtgcagatgcccttcatattaaatataatcccataacaaagaagtacgaactgtacattgctgaatgtaaaactaagaatgccttctcaggcgcattccatgagtgccttgatgatgctatagtccattataaaagaatgtttactgaattggaattatatatctatgaagattttatatctccggagctagagcctgtagtggctgactttttgaatggcaagcttgaaaatcttgagactaatctcgtgtgcttaatgacatatgagaacgaacaccctctcactgggggagtcggtaccttaaatgacgaaatgatggagtcactcttaacatcagcaaagaagatatcccatacagcggtaacaaagaaggtggatccatacattctaaatcgaattcattacattatgtttccagttaacgatttagaggccctcatcgaaactttcgaggacatgatatga

SEQ ID NO: 59687 - DNA, 1293 bp, Geobacter sp. M21
atgaaaagtataagtgatgttgtggagactgctgttgaaagatctttgaagggatttgcttttcagattgctgctattgaggattccccagtcgggctagataagagtgaagcactaagaataatcaggtggatagaggttcgttttagccagaagccaggggaggacgtaaagaacgaaattctgttcttagcacagcaccttttggagggatataagcaaaatcctgaattgaatggcatacccaattatgttggtaccgtgtttagaagattaggaaatgtcccggctctgacaatgattcctagttgttacaatagtgaaagtcaacagtttgaatcgtcaggcagtatcttttcagatatttctacaattaaaaccttgttgtctaatactattagggtagcaaacgccgaatacacactcactgctgatcagttcaatatatggaataccctcaacaattctacaaggtgttgtggtatctctgccccaacttctgctggtaaatcttttgtcatttcgctttatgtggcatcggtatgttctaggaaaaaaattaatgtggtatatctcgtaccgaccaatactttaattgatcaggtttcaaaagacttaaaagctttaatccgactgcacaatattgttggttacaatgtaaaaacccatatttcggaagacattagcctagagagccagagcgtaatattcgtaatgactcaagaacgttttgctgttggccaatcttatttgaaaaaaaatagaatttcaattgaaatagtaattgttgatgaagtacaaaatatagaaaaagtcgaagaagaatcagatgatagatcacacgtcttatacgaggtaataagaaatctttatgatgattttgctcccagtaaatttgttttatccggccctcggattggaaatattaaagagataaatgagttccttttctttgaacaagccgcttcttttactacatcctcttcacctgttgttagcctatcttattcattcaagctggacggtcttaaactgttcttacgagcacatacctcctttctagcgaagcatatacagattgaaattaataataaatatgtaccttataatgtttttgggtcaactacttatgacactgatgcatattcagtaattgatagaatagtaaatagtcttgaaagcaactctggtgtacttatattttcgcccacaaaaaaacaagcagagagtacatcaagcaatatttctgatcgtagacccccttcacactccaacgaaacgattgagtcctag

SEQ ID NO: 59688 - DNA, 1005 bp, Chryseobacterium aquaticum
atggctattgatttcagtaaattaattactattgataaaaattgggttactaacgagcttaatcatcactataccgaaaagataaatgataagcttaatgttagattatactcaataaaaccttctggaacaacaataaattctatatcattagcaagttcattgcttgatatactcccttattatttcaaatcaaaatttgaaattgataggattattaaaagagaagtatcaaaaactattacagcctatacaacagcatctgaaattgatcatcagttagaagtaagcaaaaaaatacatactagaacatatagagaagcaaaaagttttttcaaaaaaaagagctccgattctaaaagtgggaaatatggagaattacttttgtttggtcttgtcgaatctattttagattgtaaaatgattgcccacaaaataactaatcttacaaactatcacgatgaaattaaaggaggagatggaatttttatgggaaattataaattgtcaaacggaaatattgaaaccgcatatctgattggtgaatcaaaaatttggcaagattattcgggagcaaaaaaagatgctttagaatctattaatagattttatgattcaaaagttcaagctgattttaaaacattggagttttttattgctcaaaaagacattgaaaaagtggttgatgaacaaactgatattgatgaattatatgaaaggcttgaccaaaaatctgatttatttaaaagtcaaatagctgttcatccaatattgataatgtatgaaacaaaaagctataatacattaatgaaaaaagctttaaataattcggaattaaatactttaataaatacacaagttcagtcaaaactaaaagtaactcttgatagtattactaaaaaagttaaagaatttccagaacttgaaaaagtttttttagattttattttaattcctaccaatagtgtttctgattttaatgatacaatggataatctgatatga

SEQ ID NO: 59689 - DNA, 2661 bp, Chryseobacterium aquaticum
atgagtgataataattctttaatttttcaagcttttgaacatgaaactttgaataaggtcatatatgattataccttaaaattactatcaagtacatttgactctataaaatcaatagaaatcaatgatgatgaattaaaaaaaacaatttggttagtatccatcttagcgaatagtgacaatgatattcataaaagaaaagctcagttatttacttcactgctctttctaaacaataaagataatattgaaattctaaaagtttgttatgttttattttcaagactgggaaatttgaccgctacaaaatttttaaaaaatctatattctaaccacgatgaaaaccctgtagatttaaaatctgaatataattttggtgactttttaagctatgaattattatttgaaagagaaaacaaaattatttctttagagagtaattcatttttagttacagactttcaaaaagatttgtgggaagggcttaataatatttcggagatagctatatcagctccaacttcctctggtaaatcattcattattaagcaatatctaattaatgagtttttctataaaaatgaatttagagctctctatattgttccttcacgagcattaataaatcaggtcagtgaagagtttaaatcagaattaaacaatgatgttagagtgaaatcttcagttacagacgaaaatgaagtttttgataaagaaatttacatcttaactccggaaagatgtataaaaatactagacattaatattaagattgattttatttttattgatgaagtacaaggtatagaagatactctaggaagaggtttaacttttgaatatgtttttaatgaaatttctttaaagtttccctctgcaaaattcatttctgcaggtccaaatattattaatccaaataaaacatttaccgaaatttttgaaagagattgttcggctatccaaacaaaactttctcctgtatttcaattaaagattacattgaaaaataatcaagggagcaaatttgatattgttatacaaaccgaacgtggaacatatcaaaaatttactcaagattttaaatataattttaaaaataaaaacaaaggagaaacagttgctcaattagtaaaatatatagccccaaaagattcaaatatagtttttgtacatgatggatattatgctcaacaatgggctgttctatatgctaatattattgagaaagaagatgacttagatgaagaagtcaaagaactaatagattttcttacagaagatattcataagaaatattatttaattgaatgtctaaagaaaaaagtagcataccatcatagcacattacctgatattgtccgaaaagagattgaagaattgtatacgaatgaaaaattatctacaatttattgcacatcaacattattagaaggtattaatttacctgcaaataatttatttacttttcaaccaaagaaaaaaaatataccattgacaaaatttgaatttggtaacttaattggaagagctggtagaataaaatcttccctttatggtagtatttattatattcaaaatgacaatgataatcaattagcaagtgattattatgatgccgaatatgacaaagaaattgaagttttttcttcgaatgcaataaattctttagatgtcgatgatttaaacattcctactaatcaaattgacaaaggacaagacatagaaactaaaaaggctcagcaaatatctatttttttaaaacataaatatttaaaaggcgaagattacgctttaaagtatctaaaaaataaaaagttaactgaaaatgaaattagtattgcgatgggatatttacaaattactttaaatacaattgtaattccacgaaatgttctaatgaaaaatccatctattgacccaattttacaaaatcaattatatactaggataaaaaaagaagacttaagggaatgggtgataaataagaatagtaattttactaactatatagaatcagaaaaaattgaaagtctgccaattcataaaagaccattttattggcaattagtaaatatagtttcgaagttaaatgagatatttaatttgtttgatgaaggttttaaaaagcatagtcaaaaatggttaagtgctaagtctgtaagtttacaggcaaaaaaatggctaagtggggcaccaataggacaaatcattaaacaaaatattaattatttgtctggattagaaaatgattataaaattgattcagaaaatttagaagatgtaaataaagtaatcaatgatacaattcgatataattccaatataacaacatatctattgcctaaatatgtaaaagtacttgtagatattcttgatgaaattttaaccgatgagcaaaaagaagaatacaaacttactttaagtttaccaactatgctagaattaggaacacaagaaccattaattatccaattaatttcttcaggaattacaagaagcgtagcaatacaaatttttgatttatataataaaaatactacaaaggattttagagaaaaaaatgatattttaaaatggttatcaaaccaaaacgagattaaaggattaaaacccatttataatagatatttaaaaagaattaaagtcttaaataaaatataa

SEQ ID NO: 59690 - DNA, 918 bp, Synergistes sp. 3_1_syn1
atgagtgaagaactgcaaaagacaataaagagcgggaaattcgatagcgtgtttaccgaagtacctcacgcagagaaactcggcctgcgcaatcctgaacaattacgcctattccatctcaatgtgcaggacaataagttttcctccgatggactcattgattttctccgtaggaacatcggccaatatgtcttttcacgagcaaagattgaagaattccgtgtcgatgataatttagaaagtattgtaagcgaagcaatcagagttatcaaaaagaacggcacgtttgatgagcattctgttggtagtttcggtggcattatgctttatgtgtttttagagcaaatcctcggtgctccaaaaatcatgagcaaggtagaacttgctacgaatgctaagcaatacgagagcaaatgcgatggcatccacttgctttcattcggagaaaaatacgacacgccttattatcacatggtctttggtacatccagcgttacaggtgatatgcgggatgccattgatagtgcatttgaggcaatcataaaaattgaagcacaaggctcaacagagagaaccttggccgaaaacacggtgtttgccaaatcgtttgatgaggggactataaagcatattaaagacttgctcattccaactaaggggcggcaggctgcgtatgatactgcatatggtgttttccttggatattcaatcggtttggatggaagcaagtatcctgctgtagaataccgaaagattctggctgcaaagatgaaagtagatatccaaaatcacgctgcctacattgccgagaagatacataaactaaacctttcaaatcattctttctatttctatgtccttccgctgaataatgcggacaccgaccgagtagaaatgatgaagcaaattgtagagtga

SEQ ID NO: 59691 - DNA, 2661 bp, Synergistes sp. 3_1_syn1
atgagtgatcagttattacataatcttggtgatgccatcttcggagatattgatgagaacccgtttctcaatgagctgtatgagaacatactgtacaattacgccattacgaagtttgaattgacagagactaaatcactgaaagaggtggacgtttctgctgctctccgattcgctgatttgttgtccaagtctacgcatgccgagcataaggatcagcacaaaatgtgggcacaagagattattgtactcttaaacgccttgtatcctgatgatccaaatgtcagatggtatgcagggtctgtgttttcgaacacaggcaactatcaagcacagcaactcatgcaaagcgactttgatgaagcatccgcattagacggcatttttacaaaattcagaaatgattatctgaccatcccggcggctccggagatgcgctttttccacgcccaaaaggttgcatatgatcatttggcagatccgtatttcagctattctgggccgacatccatgggaaagtcatttattatgcgaatgttcatcaaggaacaaattgagcgcggtgttaggtgcaattttgcccttgttgtaccaacaaaggctcttattaacgaaatgcgcagccaaaccatcgatgacctaaaaggcttgctaaaagaacacaattacaaagtcgttaccgccgctggcgatattgcgcttgaaggcaagcataactttattctcgtgttaacccctgaacggcttctctatttgctcatcagtaaaccagaactaaacattgactacctttttatcgacgaggcacataaactctctggtcaaaatagccgtggtcctttctattataaagcagttgatatgcttttgaatcggccgaaagaaccgcattttatttttgcatctccgaatattccaaacccagaggtgtatctgcgactcctatccgatgagattgaatttaaggagaaccgccttcactcgacattttctcccgttgctcagatcaagttcattattgatctgaacgggcatgcagttagtgtttataacgatcacacggaagaactgtctaccatatgctcaattaagaagcaagacgccaccttgacagattttctatacatgtttgaacactataatcttgagaagccacctgaaaaaaggcaacagacaatcgtctattgcaatggacggacaaaggcaatagaaaatgctttggaatttgcaaaacatttgcctaacttaaatgacgatgacttaatcgccttgtcaaaagacataagcggtgaagtacacagcgactatttccttgcggagatcatcaagaggggcgttgcgtatcacatcggatatttgccttcggccatcaggatgcggttggaagatatgttccgtaaaggcaaaataacgaccatgttctgtacgagcacactacttgaaggcgtaaacctaccggcagataatctgtttattactgatacaaagatattccgaagaacgatgtcacctgttgattttagaaatctaataggtcgcgttggacgtatccgcttcaacctgtacgggaacgttttctttgttcctcaaggtgatcaggtgaaggagcaagactttgtaaacttacttaaagaagaagtgccggaacagtcattgtccatagaggccggccccaagggccttacaaaggctgaaaaaaagcatgttgttgccgctcttctggagggtaatattgaatttgaaaagcgcaacaaccagtctgaggaatcctatgtaatgatgcgtaaatttgcgctgattctaatacgtgacattatgcgtgataatgacagccttgtacggcgtgaattttcaagcctattatcttctgaagacgaggctcacattcgtcaaacattcacagaccctattgccgagccagatgatgatatcaatgtatcggtcgatcagaccaaaaatttaacagcagcgatagcttatggattgaaatatcctgacagagttaacggccactttgtttatgacgatgtagtcatgttccttgagaaattagccaaggtattcaaatggaagcagtatgagtacacgtctctcggcaaaaccggtccagatggtcagctttccttgctacgatggtatgcggtgattcttgttcaatggatggaaggaaccggattgagtagcataatgaaaaaagcaatcgaatatcgacaacagcatccggacaacttttggatcaataagtaccaaaaaacgatttataatgatacgatagaacacagaaatattgtgtttgctgatacgttggaggttatagataatatcgttctcttcagtatttccaactattttctgcgcttctcaaatgaatataagcggattcatcagatcacggaatttgagaataattggtacgagtatgttgaatatggcacaacaaatccactgaccattcttctacaacgcaatggattttcacgagaaaattcaacgtatataaaggcacaccacgaagattacatagtcgaatttccagacggaacgctacggctgaacagatcgattttacaatgcagcaatctgaatgtgcgcgaagaggcgcttagcattcaatataacatgcctgagctgttcgttcaaaacgataatgaggtatattga

SEQ ID NO: 59692 - DNA, 786 bp, Actinomyces massiliensis F0489
ttggggacccctcgcctcaagacgctggcgcagcagcttgcgaatcagatcgtcaactactgcatccctcggacggaaattgagaaggttggactactatctccagatcggcagattccggagattactcgcctagctaacgaagcggcacgcctgttcactcaaacccaggtcaagacaggggagggtgcagaactacttctatacgcgttgcttgagaaaggactccagataccgcaggttcttaccaagatgtctctaaagacgagtaccgagatgcagtaccacggcgctgacggagtccatgcgaagatccttgataacggagatctagttgtttactggggtgaagcaaaactctatgagtcggttgctaaagcgatgacggattgcatggacagcatcgagccgtatttgactggtgccgctcacgagcaggacgttttcctgatcagacactacgtcgacgctggaaacgcagaggtgacggcccgtctgctcgagtacttcaacgacaaatcgatcctttctgcgaatgtcgagatgcgtggcgcctgtcttattggcttcgtgcatgagaactatccaagtcttcctcgtgaagaagcatctgtgaaggccgaattggacgaagtcctcagtagctgggtaaaatccacaaagatgcgccttgagaatcgttctctgactaaacacgctatcgaaatgttcttctttccaatgccctccgtcgaggaatttcgaaaggcgatcaaggctgaactccggatcgaggtcaagtcgtga

SEQ ID NO: 59693 - DNA, 2082 bp, Actinomyces massiliensis F0489
gtgagtgtatctgcgccgacatccgcaggtaagtcgtacatcatccgtgagtggatgttctccgaactgcgagggtcgacgcctgtgcgacttgtgtacatagcacccaccagagccctcgttgaggaggttagccaggtcttccgatccaaactggatgacagcgtgggtgttcataccctcccgtgggaccctgaaattactggcttcgaacgacaggtattcgtcctcacgcaagagtgtcttcacctgctgcatcagcggttgtcgcagtttgcaccatcggtgatctttgtggacgaagcgcagaagatcgccgatggaacttgcgggatactgctaacgcaggtgcttgacgaggcccttcgtcgggacccaactgttcggttagtgttcgcaagtcctttgtcagcaaaccccggcgtactcctggatcccgcatcctcacaggagcgcaaggctgcgcttgtcggcgagacggtgacggtgaatcagaacctcgtcttcgtcaaccaggtccgtcggaagccgcgccgctatgcgctctcactcgtgtacgagggtgaggagcgggaggttggtcagatagagctaccccttgctccagatggcgttgggcagaaagttcctctcatcgctgccacgattggggacggctccacggggaatcttgtctttgcgaacggaccggctgaagcggagaagtttgcgagaaccatatttgatgctctaggcgaagacctcgcgatagagtcggatgctgtccaagaattggtcgacttttccaaaggcgtcgtgcacgagaggtttcagctcagcgagttcgccagacggggtgtcaccttccattacggtgacatgcctctcgtgctcaaggcgaaggttgaggagttgttcaagcgaggagaactcagatacctggtatgtacttccgcccttcttgagggagtgaatctgccgtgccgaaacctcttcctacgtgctccgcacaaggggaacaggatgcatatgcccatgccagatttctggaacctggccggaagagctggtagatggggcgctgagttccaagggaacatattttgcgtcgatacatcagatacgaaggcctggcctgagaagcccgggaggcgagagcggtcattgatcgtgcccgcggcgactacgacgctgtccaacgtagctagcgtgatcgaatacattgatcgtggcgcacacaaagccgatcgcgagacgcctccggagctcgaatcagccttcaactggcttgctggacgtttcatatttgatgggaacctgcttggacttcatggtgtcgccttaagggcggaagagaccgaccggattgctgaggcacttgggcgcgtgatgcgaactctccggcttcgcccagacctcgtgaagaagcatgcaggcatcagtccgacgtctatgcagcgcctcttggacgccgtcttggcgaacggtcaccccgaggaacttgctctcgttcctccaactagcgatgatgctttcgatgagtacaagatcgcgttggactatgttgctgagtacctgggcggatcgttcgagccggagtctcgtcgcttgtcgcttgcgcgcctcatcgttcactggatgagaggtgtacctcttagcgttatcatcgacaaccgcgcgaggtggcgacgcgatcaaggccaagaagtatcctatccgcgcctgatccgcaaggtgatggcggacgtagaggacattgcgcgttttgaggcgccaaggtacctatcctgctacgccgacgtcgtggcgcaagcggcgggagaacttggtcggcagatcgatgcggatgccgtcgatatcgagatgatgcttgaactgggagtgccacggccaaccgacttgtccttcatctcagttgggttgtcaagggctactactcgcgcgattgcggagtttgtgctggagccctcgctctctcctgcgcaatgcacagcttggatcgagaatgttgacgtggagcagcttgagcttcctgcgttcgccgcacgcgagatcatggctcaacgacaactattctccgagcgtcgctggcgagcaggctag

SEQ ID NO: 59694 - DNA, 942 bp, Bacteroides sp. 1_1_6; identical to SEQ ID NO: 59032

SEQ ID NO: 59695 - DNA, 2121 bp, Bacteroides sp. 1_1_6; identical to SEQ ID NO: 59041

SEQ ID NO: 59696 - DNA, 930 bp, Myroides profundi
atgctagaatttgatatacttattgatgattttttatacaaatatgatcctaaagaagaattagacctttgtaaaaccgaaaaaattttaagccttactaatgattttgaaaatggaaattggagatatactaagtttcaaaatttcatttgggataatattgctgaaactgctctttcttatagagaacgtgaatcattgattaataaaaatcagtcaattttagtagaatctgctaaaaaattaagattaacagatttaactaaagaccaaactggtcagggaagtgaattagcagaaataattctatatggtataatgaaacactattacaaggcgttacctgtagttcctaaaatattttacaaacaaaatgctcaagataatgcaaaaggctcagatagcgttcatatagtaatcgaaaacggaaatgatttttctttatggttaggcgaagccaaattttacaatagcattgaagatgatagattaagttcaataataacttctatagaaaactctcttgaattagaaaaactgaaaaaagaaaatagtataattacaaatttatccgacttagatgaattatttgaaaaagagtcagatgtttataatggaattatgaagcttttagctaaagaagcaacaatagatgatttgaaaccaaagttacacgttccaattcttctcctctatgaatgtccaattacaataaaatttaatgaactttcagatgaatgtaaaaaagagattagcgattaccatcttaatagagtcaaatcctatttttctaagcaattaaaaaagcttaaagaaaaagttcataaatataattcaatacactttcacacgattttacttccagtcccttctaaagatacaataatccaatcttttgttgagaacgttgtacattataaaaaacaataa

SEQ ID NO: 59697 - DNA, 2100 bp, Myroides profundi
atggatattttttctacttgtcatcaaataaatgacctattaatagcaaatcaagaaaatgaggctagaaatgaattaattaaattattagattttcatgaaaaagaaaatataaaatactcagaattagtaaatcatcttattagggaatcagggctatatccttatatagatttagaaactgcaagttggcaagataaatacatttatgaggtttttaaggctgatgtcggagaatacgaagaactcacgcttcatagagaacaatcagcattattgaaaaacctaattaatggtaagaatcttgctgttagtgctcccacaagttttggaaaaagctttgttatagatgcatatatttctattaaaaaaccacaaaatgtagttataattgttccaacaattgctctcactgatgaaacaagaagaaggctttataagaaatttgcgaataaatataaaataattactactactgaggtggaattgggagaaagaaacatttttatttttccacaagaaagagctataaactatgtgaataaaatagaaaacttagatattctaattattgatgaattttacaaagctagttcaaactttgataaagaaagatctccaacattagtaaaagcgattctaaagttaggtaaagttgcaaaacaaaaatattttttagccccaaacataagttcattagaggaaaatccatttactcaagatatggaattttatccacttgatttcaatactgtatttttagaacaacaaaaactatatgaaagtattagaggagatgaagagttaaaaagtgcttatttattagatataattagtaatataaataaaaaaactttgatatatgcagggacgtacgttaacattgataaattatccaacttattattagccaattttcagacaaaagaaacaaagctattatctgatttttcagattggctgagtaaaaactataattacaattggaacttaactaacttagtaaaacgtggtattggtatacataatggccgattacatagatctttgagtcaaattcaagtaaaagtttttgaagaatctgaaggaattgacaacttactatcaacgtcttccattattgaaggagtaaatacatcagcagagaatgttgtcatttggtctaataaaaatggacaagtaaaaattaatgattttacttataaaaatattatgggtagaggaggtagaatgtttaggcattttatcggaaaaatatatatactagaacaaccaccaatggaaaccgaaacacaattaggaattccatttccagaagaaattttaggagatctagatgaagtaaaatacgagaatgaattaactaaagaacagattgctaaaattattatgtataaggaagaaatggttaatgttctaggtttagaaacttttaaaaaattacaatctgaaaatatattccaaactagtgacagcgaactaataaaaaaaatagcaatcgacatgattagtaatcctgatgattggaatgggttaggttttttaaataatccttacccaaaatattgggatagattcttatataaaataataaacatagtaccttctggttgggatactaaacacagaacttttgtagaattcgtaaaaattttacgtaataattggtttaaatccattcctgaactattaattgaattagataaatttgaaattggtatagatgatttttttaaactagaaagaaaagtaacatttaaacttgcatctttagtaagtgacatcaatattcttcaaaaagaaattttgaaagacaaaaattatgatatttcaagattcataaattggagttcccatgcatttttgcctaagactgtttaccaacttgaagaatttggattaccaagaatgatttcaaaaaaaatacaaaaatcagggctttacagttttatagcaccagaattaacaatacataaagtaatagatgatttaaatagtattggattagaagtaatatcaagtatagatactttaatggattttgacaaatatattttaatatatttttttgatggcataagagtaaataaaaatagttaa

SEQ ID NO: 59698 - DNA, 957 bp, Burkholderia lata
atggaagagaaggattcgcggtcgactggcatggagcggttctttgctccccttatagggccaagcttcattgacgcgcgtgttcggcgtctgacgcggcataccgaagatctacccgaggtcagcgcgcattttctttacccggcgttccagaacgaccgacccgccatcgaggcactcgtcgatgcgctgaagtactgcatattgccgttctgcacgaccaaagaagagctggcgaaggcgaagcgggctgatgcggcgtttccgtatgggagcccggagattcagaggttactcgaaacagccaaacgccgattcatgcgcgctaccaagtccggcgagggcggtgaactcttgctgttcgcattcatcgagcattttctccaggctccgatcattctttcgaagatgcggttgaagacgagcaccaggatgccagtgcacggtgcggatggcgtccatgctcgttgggatagcaagaacaaccgtctggtgatcatcttcggggagtccaaggtccacgcatcgtgctcctcggcgattaaagccgccgcgaagtctgtcggagattttgcgaacaatgtcgacgatcgcaaaacgtatgaactgcagctcacgacggatcatatcgacctcgacggctttccggaaggggcaaggacggagctgctgcgctaccttcatccatttgcgacgcacgaggcgaatcggcgcgaagaccgcttcgcgatcctcttggcctacgagagcgctgcatatggggagctcgaagacgttgatagcgcagaattggcattcgcggaacgttatcgggaagatctcgaacacgtgttgcggcatgccaggtcgcacctgaaagagcacaaggtctcgctccggcatgtagatctgtttgtgtttccgttgcccaacgtcgggcagtttcggaaacagttcgaggatgcacttcgtgtctga

SEQ ID NO: 59699 - DNA, 2556 bp, Burkholderia lata
atgcacttcgtgtctgattttcgactgcaactcgcacgtgaggtagccgggcatccggacttcaaggtcgcgtaccaggaattgcaatggcatagcttggtttccttgctcggtcgaaaagcgaaactcgatgcggagaagtctcgcaagcttgtgcagtcagcgttgatttttgcgcagagcaccgacacggaccttcatatcgttgcccaagatatcgcgtactgcctggctgcgttgcaaatctcggccgaggcgaaagccatctgcgcgcacatccttgcgacactcggcaactttccggccggcgacttcgtttccggtgtcgcggccgcggttgaattcctgccatggcaactcgctgcgtccgagacggtgcggcgcgacgctaactcggtcgtggtgagaggggagacggttctcctcacggacttccagctgtccgtgtggagagagttgcacgagcaacagtacgtgagcgtgagcgcgccgacgtcctccgggaaatcgtttgtcattcagaccttcctgaaggacttcatctcgacatcggacagaaacttggatgtggtctacgtcgtgccgtcaagatcgttgatccacgaggtccaggcgaacatggcgcaagaattgccggacgtcgtggtgcagagcacgccgcgcgcgccgatcgagcacgcagtcagtcagtctcgggtgttcgtgttcacgcaggagcggctgcggactgcacttgaacaagaggattttgggctggacatcctcatcgtcgacgaggcccagcagattggcgacggcgcacgaggcattcttcttcatagctgcctcgaggaggtcatcaggcgcttccctgcgacccaaatacttctcatcacacccggcgcgcaaagtggcgcaccgatcggaaggctgctgcagctgagcgggatgacggacctgcagactcatttgaggccggtgcgtcagaacctcatctatgctgacttcgaggaggcaaggaacggggattatttgtcgctctccctgcaacagaaggaaggtgggcgactgctcattggtcgcctcaccgccaatgcgtgccacagcgacttcgagcggttgatcgagacgatccggttggttcgcgaccgtgggcaaagtctggtctacgcgtcgtcaaaagcccctgctgaggcgaccgcgattgcgctggcaaccctgtctgaaacgactgaggagatggacgcgcggttgggtgagctggcagcgttcattcgtcgccacgttcatcccgaatttgtactggctgactgtgtggagcgcggagtcggattccactacgggaacatgccgaccaacattacgaaggcccttgaggactatttcagtaatggcctgcttaacacgctcgtttgcacgtcgacgcttcttcagggggtgaacctcccggcgcgcaacattttcatctgtaacccgtacaaggggcacggtgttccaatgagcgtggatgatttctggaacctcgcaggcagggctgggcgccttcagaaggatacacacggaaacgtgttcctcgtgagttacgacaagtggaaatcaaagcctgcggatgagaagccggcaagcaatgtggttccagcactatccaaggcactgacgactgatcggcggcctgtcgtgacctatgccgaaaacccagaccacacgtccggcagcaagaagacggcgtttgcggagagtgtcttttcacgtctgctggtcgatgcgaaaagtggcgtgttgatggagaccatcaaacacgcggcccccgacgtagcacatggatcggtagcgaggttgattaatgccgttgagcggtacgtcgataaggtgacgctcccggtcagtttgctcaaacgacacggcatgatttctcccgttcgtcagcaacagatgttcaatgtactgcgcgctgcggtcgcagatggccgaaaagatgagctggtcccgctccacccgatgggaggaagtgaggcccgcgaacgtcttgaggtcattcttcagcatattcacaagtactttgaaggacgcgacaacaatgcgcatcgattctacggctggttctcgctctcatggatggagggccggtcgcttcgggacatcatagaaaaccagctcaggtacgcgcgggacaaggcacaaaaaaatggtcagcgtcgggaggtccccgcaggcgacattatcaagtatgttctgcgggagatcgaggagacgctccgattcaagtatgtcaaattcctgtcctgctacctggatctgcttcgtcatgccctgttggtggagggagaagatgaaatcgattttctgccgattcctctctttctcgagcttggggcatgctcaaagacgatggtgtcttgcatggatcttggcctttcccgaatcgccgctcgcgaggtgatggaccttctgaaaagcaaggacctcaacaccgtgattgtgcgaaggaggctgtcactgatgccgactagggcgcgcaacgagctctcgccacttgtcgtgcgcgaaatccagcgcctcaagttgtggcagcgttaa

SEQ ID NO: 59700 - DNA, 969 bp, Thalassospira profundimaris WP0211
atgaccgaagaaatacaaaaagatgaagattcgggcgatgttttcaacctgctatccggcacaatacggaagggcaaaaaagtcacggacgtccatttaagagagttcggggtgccgacgggaatcaaggatactaaaacgaggctacactgctaccgtctacaaatcgatgcgaacggaaaagttagatataagcctcttgcggagtttcttagagatagggttgtagattatgcaattccgcgaaagcgtatcgatgaagctaagaagtatcttgaagagacgaattctactgctcttctgtccaagcttgagagagaagcgaggggactattcactagtttagccaaaagtggagaaggtggcgaattactgctttttgcattcgcagaggctgtttttggccttagtcagatcatatgcaagatgagtctgaaaacgtctactgagatgcattatcatggcgctgatggagtgtacgcgcaaggaattgatggtgtaggacttggtatatattggggggagtccaagctatacggagattcttctgctgcagttcgtgactgtctaaaatcattagcaccgttccttcttgagccagatggaagtgatgccgcacggtctcaggatgtttttctaatcaacgagttttcgagcttcgatgatccgaagataaccgaaggcttaaagaaatactttgatcttgatgataatcattccctgcaagtgaagcactgcgggattgctcttattggcttcgactcagcagcatatttggaggacggtaagaataccgacaacgagaagcttgaagcagaactcaaagcgcagcttcccaattggatgaagcaaatcaagaaacgaataggtgaagaaaatatcgcctcttatgaacttatttttatctgtgttccgatgcgtactgtcgaggaatttcgaacatattttttgaatctcttggagagttag

SEQ ID NO: 59701 - DNA, 2412 bp, Thalassospira profundimaris WP0211
atggtggccgaagctgcagtttgtttttcgggtgaaccgatttatcaagatgctggcggtttaatccttgctaggctatccaaccacagggcggttcagttagcccaagatcgcgagttattgcggcctgaacttgagcatagaattggcaaaatggagcagctactccttactaggagacggttgcactcagagatttttcttaacgaaaaaaaatcaattctaggcaatagatttcagacggagttatgggcaaaactcgcctcatcacgctggctttccgcgaccgctccaactgccgctggtaaaacgtatgcagtcttgaactggttgttgctccagcatgcatctggcaatgcaaagtcttcagtattcattgcgcctactcgtgctctcgtttcggaggttgagcggcaactgaatcaactcaaattaaaccacggtttgaactctctcaaagttacctcattgccaatcaatgatgaggggtttcactcagaaccgttcattgcggtattcacccaagagcgacttcatatatttttgaatgcaggaaaagagccacattcttttgattacgcaatagtcgatgaggcgcaaaaattatcggatgagcgccggggagtaattcttcaagacagtattgaaagagttgttcgtgcaaatagcacatgcaggttagtatttttaagtcctcatagtgataacccggaagttttgctggaggaagcacctgacggagttgccacatcggtcgttccaagtaacacagccaccgtaatgcagaatcttttggtagcggagcaagtaagtggaaaaaccaaggagtggacgctttcacttgctaccgaagaggggaagaggccattaggttcgttttcgctgtatgacaggcccacttgtgtaaggaagcgcattgcgttcgttgctcttgcgttgggtaagaagacagtagggacacttgtttatgtcaatacggcagattcagcagagcgtgttgcagcgttaatctatgacgggctttccaacgacgtgtttgaagaggaccaagaactcgctgatctttctgagttctgcgaaaaagtaattcatccgaagttccagttggttcatctagtcaagcgcggcgtggctttccattatgggaatatgccttctcttcttagggaggaaatagagcgtctttttacttccggcaagattcgctttctcgtgtcaacttcaactttgatagagggggttaatctcgcatgccgaacgatcataataagaggcccaaagaaaggtctgcggcaagatatgtcgccacaggatttttggaatctagctggcagagccggtcgttggggagcagatttttatggaaatatcgtatgcgtggatgtgagtaagcgggaagtatggccgcgaggtcttccgaaaaagactgcttatcctataaaacgtgagactgatcaggtactcgaacagtttaatgacctctctgaatatctctctaaacgtgtggacatggaaaccgcgtctgtaaacggaaagcttgagcatgttgctgcgtatcttatgagttggcagtatcgggaaggttcgttgagggatgctccacccataaaaaagttaactaagaaaatggcgggcgaactcgaagagttaatcaagccgtctctagaagcgatcgacgtttcgcaagctattgtcgacgcaaatccaggcatttctattgttgctctccaaaggttgatgaatttctttcgaaacgatggaagagatgcaactttatttctcccaatcccaccggaagatagtgattcggtcgatcggtttgttgtcatatttgacataatcaacctttgcttggccccagtatttgctccggagaaacgtgttctcccgtgcgccttgactacatgggattggatgcgcggaagaactcttgggcagatgattgccgcgaggttaaagcgagaacgagctaaaccgaaatatcagtctgatgaggagctcccgtatgcaaggttcattcgagaaacgatggcttctgtggaagagatagcaagatttctcgctcctaagtatcttggggcatatttatctgtattgaggcaacattttcaagaaaagggtatttcaaaagaattcccggatgaatttccttacgatctatttttggaatttggcgtaagtacgagaactttgattagtttaattggtatgggtctttctcgaactagttcaattgagctgagtaattatatagtccgtagtgatttgggggagatggaggttctaaatatacttgttggcggggaatgggagggattggaccttcctgcacttgtaaaacgtgaaattcgtagggtaactgagcagaaaagactggagaattcattcgacttaaatgcggagaatagttga

SEQ ID NO: 59702 - DNA, 1032 bp, Flavobacterium cauense R2A-7
ttgttaaagagcataactggatgtaatatggcaattgattttgatagtttaatttcaatagataaaaaatgggttgatagggaattaactcatcattatgataagtatatcaatgataaactcaaagttcgtttgtatacaataataccatctgggacaactgttgattgtatttctttagctaatgcattacttgatttattacctaattattttaaaactaagtcaaatattaataaagaaattcaaagagaagttgataaaacaattaatgaaggtacaactgcttctgatattgaattgaaagagaaggcaattagtttaataagtggtagaaactatagagaagcagcaagatttttcaagaaaaaaaatccagattcaaaaagcgggaagtatggagaattaatgttatttggattagttgaatctatttttaattgtaagatgattgctcacaaaatatcaaatcttactaattatcatgacgaagttaaaggaggggacgggatttttttaggagattacaagataagaagcggaattgaaaaaccggcttatttgataggagagtctaaagtttggaaaacctattctagtgccaaaactgatgcattggactctataaatagattttatgaccccaaagtacaagctactttcaaatctttagagttttttattgcagaaaaagatattgacaagtttagtgacgatgaaatagatattgatgaattgtatgatagagttaatcctaattcaaaattatttaaaagtcaggttgcagtccatcctattttaattatgtatgaaaccaaagcttataatgatttaatgattaaagcttcagataatgtagaattagaaaagatgattagtgaaaatatacaaaaaaggatagactctactttggagaaaatttcagaaaaggttaaagaatacccttttcttgaaagggtttatttggattttatattagttcctacagatagtattgaaaatttcaataacactatggataatttgatataa

SEQ ID NO: 59703 - DNA, 2643 bp, Flavobacterium cauense R2A-7
atgaggaaactttcagttcaggcatataatcataatgttcttaatgaacttattttcaatctttcattaataatattgtcagagaaatttaactctattccaaaaataaagattgaggaagaagatttaaagaaaggtatttggatagcttcaattttatgcactagtaatgaagaatcacacagaagaaaaggacagcttttttcttctctattgttcttaaattttaaagataatattgaaattttaaagacttgctatattcttttttcaagattagggaatttaacagcaacaaagtttttagatgggttatatgaacaaaaagaaaaaaacccaatcaatcttaggtctaaatatgagtttgggagtttcataacaaatgagttgattcacgaaagagagagtagaataattgaagcatcaagcaactcctatttgattactgatttccaaaaagaactttggaaagcattagaaaaacattctgaaatatctatttcagcacctacatcatcagggaaatcttttattattaagcaattcattttaaatcaattttcaaaaacacaaagctttagagtattatacattgtgccatcaagagcacttattaatcaggttggtgaagaattcaaagctgaaattggcaatgatgttcatataaaaacatcatatgtagaagaaaatgaaatatcagataaggaaatttacgttttaactcctgaaagatgtgttaagtttttaaatagcaaattaaaagtagattttatatttgttgatgaaattcaaggggtagcagatatatttggtagggggttaacatttgaatatgtctataatgaaatccctcactgttttcctagtgcaaaacttattactgctggtccaaatattgattacccagaaaaaacttttaaagagatttttgagaaagaatcattttctgtcattacaaaattgtcacctgtatttcagtttaaaataataatgaagatactccagaattttcaatttgaagttgagctaaaaactgaaagtggtaaatctcaaaaatttattcaagatttaggatttgactcatctaaaacatcaacattagggtctactattgcgaatctggtaaaacacatagctccaaatgattttaatataatttttgttcaagatggtaatttagctcaaaattgggctttgaaatatgctcaaataactgaggatgttaatgatttagatgaagaggtaaaagaattaattgatttcttaaaagaagatattcataaaaaatattttttaatcgaatgtttacagaaaaagattgcttaccatcatggaagtcttccagatatagtacgaaaagaaatagaggagctatttgcaagtgagaaaataactaatattttttgtacttcaacattgttagaaggggttaatttacccgctaacaacctttttacgatgcagcctaaaaaggattctgagccattaaacaaatttgaatttggaaatctaataggtagagctggaagattgcaatcatcattatatggtactgtttattatcttgaaaaggagaatgataaaataaaagctagtgattattttgatgcagaatacaacaaagaaattgaaattttctcttcatatgccttaaatgagttggatattaatgatttgaaactaccaattaatttgattgaaaaggaaacagctacttctacatccacagcaaagcaattatccgtttttttaaggcataaatttttgaaaggagaaaatcatgctttgaaatatctaaaaagtaaaaagctaagtattaatcaagttgatttagcaatgagctatttaagagatactttgcggtcaatatcagtacctataattgtattaaataacaatccctctattgaccctattttgcagaatgagctttacgacaaagttgttaaatcaaatattagagactgggtgattaataaaaactcaaattacaatgaatttttaacttctgatgaaataattaatatatcatatcacaatagacccttttattggcaatttgtagatttaatagaaaggcttgattctatattctctataattgaagaaagtaaagtaaagtacaagaattgggtatcagcacgttcaatgtgttatcaatcaaaaaaatggttaagtggtgaaccaattggaaaaataatcaatagtaatattaattatttagagagcagagataaaattgattctaatagtatagatgatatcaatagcgttattaataatactataaaattcaattcaactataactacttatcttctgcctaagtatattaaagttttggttgatattttaaatgttgtacttagtgatagtcagaaggaagaatataaactaactcttagccttccaacaatgttagagcttgggacacaagaaggggctattattagattaatttcatcagggatatcaagaaatgttgctataaagatttttgatgtttacaaaaaagagacaactaaagaattcagagaaacttatgatatattagaatggctttcttcaaaaaaggaaataaatggattaaagcctatttataatagatatctaaataggcttaaagtattgaaaaatgattaa

SEQ ID NO: 59704 - DNA, 1041 bp, Flavobacterium cauense R2A-7
atgatatttttgttaaagagcataactggatgtaatatggcaattgattttgatagtttaatttcaatagataaaaaatgggttgatagggaattaactcatcattatgataagtatatcaatgataaactcaaagttcgtttgtatacaataataccatctgggacaactgttgattgtatttctttagctaatgcattacttgatttattacctaattattttaaaactaagtcaaatattaataaagaaattcaaagagaagttgataaaacaattaatgaaggtacaactgcttctgatattgaattgaaagagaaggcaattagtttaataagtggtagaaactatagagaagcagcaagatttttcaagaaaaaaaatccagattcaaaaagcgggaagtatggagaattaatgttatttggattagttgaatctatttttaattgtaagatgattgctcacaaaatatcaaatcttactaattatcatgacgaagttaaaggaggggacgggatttttttaggagattacaagataagaagcggaattgaaaaaccggcttatttgataggagagtctaaagtttggaaaacctattctagtgccaaaactgatgcattggactctataaatagattttatgaccccaaagtacaagctactttcaaatctttagagttttttattgcagaaaaagatattgacaagtttagtgacgatgaaatagatattgatgaattgtatgatagagttaatcctaattcaaaattatttaaaagtcaggttgcagtccatcctattttaattatgtatgaaaccaaagcttataatgatttaatgattaaagcttcagataatgtagaattagaaaagatgattagtgaaaatatacaaaaaaggatagactctactttggagaaaatttcagaaaaggttaaagaatacccttttcttgaaagggtttatttggattttatattagttcctacagatagtattgaaaatttcaataacactatggataatttgatataa

SEQ ID NO: 59705 - DNA, 2643 bp, Flavobacterium cauense R2A-7; identical to SEQ ID NO: 59703

SEQ ID NO: 59706 - DNA, 948 bp, Rufibacter tibetensis
atgacattcataaacccagtttccattgaaaagcttctgcgtgcaggaagcaatatggatgcttatctaaaagaggttaaaaaggaagtatctgtagcaggtacaaaggctgtggtacatttctatctaattaactttgatggaaatcaaagcccaagagtggctgacttagctgagttcctatcgtttaggctgctagactactgcattccacgagatgagatccaaagagcaaaggaggaagaccttaaaaacaattcaagtgtgcaaataactaagttaggtaagaaagctaaactcctactgactgatctagaaaaaacaggtgaaggaggtgagcttatgttgtatgctctagctcaagaatacctaaagatgcctcagttactttgtaaaatgccacttaaaacaagttcccaaatgcatgttcatggtgtagatggtgttcatgtaaagtttgatccaggaagtggttgcttagcgatatattggggcgaatctaagatgcatcagacttttggcagtgcagtagatgattgttttgaaagtgtagggaaatttttaagcaacacaggaggtagtggaactcagttccaaagagagttacagttgatgatttcaaatattgacttattggataacgatcttgaggaagcaatactaacctatcttgataaagaccatgttaactacacaaaggcaaaaaattgcgctgtttgcttagtagcatttgattacaaaaggtatccattgggtccaaatcaaactcaacttcaagacttattagctgaagcaattaaaaaagtagacaagtggataaagagagtaggaacgagcttagtagccaaggcaccactccatacttatgatattgaattattcattgttcctttcccaagcgttgatggttttagacaatcctttttagaagaactaggcttaaagtaa

SEQ ID NO: 59707 - DNA, 2547 bp, Rufibacter tibetensis
atggcatccaccctccctaatagaatataccaattacctagctttcagaggcaattaaagtctcttcttaaagagtctgttattgctcagtttgataacttagagaacactcaacaagtaggtgatgaggaaatagactggaataatttaatatcttgtgctagtattcttgcgcacgctgatgatcaagaatgcctggatgctgcccttagaatagctcaacattgcttacttaggacgaactctagcgaaatgcacaaagtgtcagctggagttattcttgacgtattaacaaataagcctgctttatcattagcactcaagcgacagttaataccatcagattacttagaacaagttccattttcattgaagcttgaaagtgcaaagagaaactttttaaacacgtatatcacccacaatgatgaattactttacttcaataagtttcaaaaagcagtttatgatgctacacaagagtcagacatagtaagtatctctgctcctacttcatctggaaagtcctttgttttatcaagactgatattagatgcgttgatggataaagggagaaggctgaatgtagtatacttagtccccaccagagctttagtaactcaagtagaaaatgagcttaggcacttacttattgacaatgatgttaaagatgtctttgtgagttcagttcctaagataacctttgatgttgagtcatatcgttctactatcttcgtatttactcaagagagattacattggttcaaagtaactagttcatcttttagattcgatatcttaatcgtagacgaagctcaaaagataggcgatggatacagaggcattcttttgcaacagaagattgaagagttggtaaaggaatcacctgaattgaaggtatatttttctagtccatttacgtccaatccagagttactattagacatcataaagactaacaacaccaaggctcctgttaagaaggactatgttgctgttaaccaaaacttgctatttgtttctcaaaagccaggcaaacctcagaagtatgatatggctttatgtatagatgatacaccaataagtcttggagaattcaatcttcccttcaagccaagcccagtatctaagatattaccttttgtggcctatagcttatccaatggcttaggagggaacttaatctatgcgaatggtcaagcagatgctgagaagtatgctgtacaattatatgggctttgccaagatatttctacttcagaagagataaatggattgattaaccttgtcatcaaggtagttcatcccagatacaagttagctcaaacactcagaagaagagttgccttccattatggcaatatgccattgatcgtaaagcaagagattgagagactttttggtcaaggggagattcattttcttgtatgtacatcaacactgcttgaaggtgtcaatcttcctgctagaagtatatatattaagaatccaaccagaggttcaaggcaaccaatgaacgaaaatgacttttggaacctagcaggtagagcaggtagacttggtaaagaattccaagggaatatagtatgtgttgatccttataaatggaataacataccttcaacaaacagaagcaaacaaactatctacaaggctattgacaatgttccattaacagagctcataaattacatagaggcaggcacaccaagaaagcttaataacaccagccagaatttagaatatgccttcacttactattttactaaagctctagataatgaacttgcctctacgttaaacccagacaaccctctatcagaggcacttgaatttgaattaggtaaagttcgaggttttgttgagctaccaagaagtgttatattcagaaaccctggagttagccccattgctcagcaaaatttgctaaactactttaaactgcatagcaataaggatgaattgattccagttgctcctgacagctacgatgcagtagatgtctcttatgagcgtattgtaaatctgattagtatgttcttaactggagactctgagaagatgtcaaagacctacgctatactagtagttaattggatgaagggtttaccacttcctaaaatgattgatgatagttataagtattggattaaggttcaaaagcctaagcctttagatggagtgattagagatactatggacctcatagagaactatgcaagatttaagttcgccaagtactcaaactgctatcttgatatacttcacttccatttagagcaggagaataacagtgacttaattgaggaacttccagatttaagtagttggcttgagtatggagtatctcttaaaactcagatctctctaatcgatttaggattgagtagaccaactacattagctctttctgagtacattccagataacaatttgacaagggaagattgtatactttggataaagagcaatgatattgatctgcttgggttgccaacagcaatggtaaatgagttaaacacactcttctctctcataagcagagagtaa

SEQ ID NO: 59708 - DNA, 948 bp, Marinobacter santoriniensis NKSG1
atggataaattgaaggcgattgattgggcaagcctcgtagcgggcaagcactcatggattgacgattatttcaaggtccactccgtgcttgaagacaagaaaactgtctgtcgtttcttttctttggacttttcaggcactcagcaagagatattctctctaacagagtcattggctgcatcaattgaacactatgttttcgatgagaagcagctagcgagcttccataaagagggaaaagttccattccaaaaggcaatgaaatttttcggaaagacaaatccagatatggatgggaagtatggcgaacttctcctgtaccttttgacagaaaaatttctccagacacctctcgtgagccacaaactatctcttatcacaaatacgaatgatcaagtcaaaggcggggatggtatctttttcggcgactataaagacgagttagcaattttgattggggaatccaagattcaccaaggagctgctggagccatggaggacgcgctagagtcactgaataggttttacgacaactatagttcgggacaactagggcatgaaatgttcatagctcggtcaaatatttccgagaatttttcatcattagatgatgccgagagcctttaccaagcgttctctcccgggactgatcagtacaaaggctgtgtgaaagcacatcctgttcttcttgttttcgaatcaagcaaaataagcaccattgaagagaaggcaaagaataaagacgaagcagaacagatgttcaacgattggcttactagcaggtcaaaagagatacaaaaacttctcggtgaaaaattaaataactactcagagctcagaaaggtgtacattgacgcgtttctaattccattaactaatgtatccaagttcaaacatgcgctctatcgagaaattcacggtatagactatgtgtcaagtgaaaaataa

SEQ ID NO: 59709 - DNA, 2595 bp, Marinobacter santoriniensis NKSG1
atgacgcaaatatatactcaggcagcacatcatgaagactttgttcgagtgtttgataagctattggaaaagctatttctcgaagacaaagtaacagataacgtacaggttgatcttgacaaagaagagatcaaaaaagctacttggctggcttcaatagctgctcttagcgacgatgacaaagaacgcaatatggcaaatgcgtttggggctctactgcatctgaccgataaagagaatgaaatatacaaacgcgcgtgctatatcctgcaatcaagaactggaaatttgattactagtagccatataccaaagctgtttcataaagaaaacactctcagcgaatatggaactcttctaaattttgagctcgcggcacatagggcgctattagagcaagagttttctgacgatactaaggtatttttcactgagtttcagaaaaagctctgggattctcttaactccggagagaatatagctatctcagctccaacatcggcaggaaagtctttcataattaaaaaatatattctggagattgtagagggtggtgcaaagaatatagtttttatcgtgcccacaaaagcactgataaaccaggttagcaacgtactaaagagccagcttcacgaaaaggcgcatgtatatacgacatacataactaatgaagaagatgatctggctactatttacgtgctaaccccagagagatgtttgaaacttctgcaagataaaaatgttgcttcaccagagctgatatttatggatgaagtgcataacattgaatctggctctagaggggtcatatttgagaatattttatatcgagtgacctctgcttggtcttctactcagttggtcgttgcagggccattcattagctcgctctctgacagcattaagaaaatctgtaacatttctattattgatcaccaaacaatgtcctctccagtttttcaagttcgatcggcacttaccttttttccgagcaagaaagtagccaggtataaaatatcgagcccaactgaaagaactatctcaggtgaaattaagctaaaaaaatcgctgtactccaagataaaaacaaacaaaggggaggcgctcgaagttattgcagatatgttttcacctgaggatcataatatttattatgcgcccaagaaaaatcttgcagagaaatgggcaagcaaaattgctcctgttattgcctcaaaaaatcctagaataattgaagctgccgattctagagtaaaggatcttatcgattttctatctgaagaagttcatccagattattcactcatacgaactctcaggcttggagttgcatatcaccatgcaggactacctgatattgcaaggcaagaagtagaggagctctattcagagtcgattatcaagaacattatctgcacatctactttgctgcagggggtgaacttgccagcagacaggctcatagtcataagccctaaagtgaattcggacgatatgcctgcctttgattttcttaatcttcttggtcgtgcgggcagagccaatactaaactttatggtgaaatatattgtattgatatcgttgatgatgaatggggaagcaggaagcttgaggctgaggtaaataaaaccgttgatacctcttcgaaccttttccttcacgaaaatgaggagcgattgtcactgatcgcagatatgtcaggcgcggagattcgggatttgacgggtgataagaatatttactctaacctgtcatacttgaggtcaatatttaaaaccgatagaaatcacttcgataggatcctgtcaaattcaggtattaaatctgagagcgtcgaacagttttctaaaaagctagagtctctttacaataatatgagtataccccgagaactcatatccaaaaacccattcatcgatcccgtattacaaaacaagcttttcgaagcgattcagtctcaagggatcggagaatggctgatcagcaagaagcccctgactaaaggtggtagtgatctagattatgtggctttccaggaaaaaagctattactttcagttgtggagtgtttttgaaaggcttgactcaattttcaatattgagtacgagcttaatagtaatggcttttcccaagataattacattaacattgggaggcttgtaagggatgctcatcgttggatgtctggaaaaaaacataaattttttattattgatcttataggtgaagggaatcatggtgagtcagaagttgataaggccgctcggagaattactggtcatatcagtaaaaacttaacttttatcgcagttaagtacctattgctttggtcggacatgatttcgtatttcctcagcgaagaagaaatcgaaaagaattcctatatcctcaacctaccttcgatgctcgaaatggggagctatgacccagttgttctagagctgatgagctgtgggataagtagatctgtagccctctcgatctctagcaaggttaagaaaatgaatacttctgctgaaaaagcacttgcgaaaattaacaaagaggcgcttccaaatatttttagaaggcatttgattaaggctgggtattag

SEQ ID NO: 59710 - DNA, 930 bp, Erysipelotrichaceae bacterium 5_2_54FAA
atgagcgaggcgttatctaaaacattacatggcgatttcgactcagtctttcacgaagttacacagccggaaaaggttgcgtggacgactgaaggacagctgcgcctgtttcatttaaatattagaaacaacaagtttaatccagaagagatgaaaactcttctatatcgtaatattggcgagtacgtattctcccgtgccagaattgaacgatttaaggttaccggagatgcatttgctgttggagcacaggcaattcgagttcttaataaaaatggtggtgctgacgttaaaggcaccggtgcagaacttggagaaatgctcttatattcctttttggaagaaaaacttaatgcacctaaattaatgagtcgcgttgaattatctactgatgctaagcaatatgcaagcacttgtgatggcatccatttgttgacaagcaaaacatctggtctgccatatcatcaggttgtgtttggagcatcaagtattgttggcgacttaacatatgcgattgatgctgcttttgacagcattcttgaaattgaaaacaacgaagataaagagctccatatggtggacaatgttatttttgaccgcttactgaatgaagatgaagtggagcttgctaaggaaatctttcttccatcaccgaataagaccacatcatacaatacgtcatacggagtttttctgggatatacgattggtcttgacccaactcggtatggcgtggctgagtttcctcaaattgttgaggagaaaatgcaggaggatatccgacgtaatatcgattatatattgaaaaagataaataataatttcctagggcagcattctttctatttttatgtgcttccatttaatgatgcggaggacgaaaagaaagcgattatggaagctgttatgaagggagatgttgacctatga

SEQ ID NO: 59711 - DNA, 2646 bp, Erysipelotrichaceae bacterium 5_2_54FAA
atgagtgaaaagaaatcattaggagaagctttattcgttgacatcgagagtaacgcttatctgaatgaattacatgaaaaaatactgtacaactatgctttgaagttgtttcagttagaaaagaagaaaagccctaaagaatttgaacttaaggatgcgttgcgttttgcagatttactttcaaagtctacacatccaacgagaagtgacatacataaaatgtgggctcaggagttgataatacttcttaatgaaattaattcagataatccgttagtcaaattatatgctgggtcggtgttttcaagcacaggtaatcatcagggtttacagctgattaattctgagtatgaaaacataaatacttttgagaagatttttgcacaatttaggaatgactaccttactataccagctgcaccggagatgaagttcttcaatgctcaaaaggaagcttacgaccatttatctgacccttgctttagttattcagggccaacatcaatgggaaaatcattcataatgagaatgtttattaagaatgaaattatgcacggttcgcaaaagaactatgctttgattgttcctaccaaggctcttataaatgaagtaagagccaaagttataaaagaccttgagaataatcttgaaaactgtaactatcgcgttgtgacagcggctagtgatattgctttggaagaggagcataactttattctggttctaacaccagagcgattattatatttgttgataagcaagccggatttacaggtggattatttatttatcgatgaggcacataagctttccggtaaaaatagccgtggcccattctactataaagttgtagatatgcttcttcaaagggaacaaaaacctcattttatatttgcttcacctaatattcctaatccacaggtgtatctgcgtttgatgaatgacatcattgagaatgatgatgaaagcaaacttgcaactacgtattcgccagttgttcaagtgaaattcctgatggattttattaagggtagtattgacatctataatgaacgtactaacaaaacgatacatatcgctaatgtaggaaaaggaatagacaaacttaataaaatgcttctattgtttgaaggcaagaatctaagattaccacctgaacagagaagtcagactattgtttattataatggcagaaccaaggccatagcagctgcaagagattttgcagattcacccggtgtaaatgataagaatgacccggaattagattctctatcacgagatataatgcaggaagttcatggagattattatcttgccgggatgattaaaaaaggtgtggcataccacatcggttatttgccagcttctatacgtacacgaattgaagagttatttcaaaaaggcaatattaccactatgttctgcactagcaccttgttagagggcgttaatctgccagcggacaatctgttcattacagataataagattttccgcagaaaaatgaatcctgtggattttagaaatctaatcggtcgtgttggacgtattagttataacctctacggaaatgttttctttgtatctgaagacaagtcggttgctgctgaaagttttatagatatgctgcaagcacctgttcctgaacaagaactatctattaccactaatccagatgttcttaagaaggttgagaagaaatatatagctgaaattcttaaaacgggtagttcagaaataccaagacgacgagatgaccaatcagatgaatcgtatgttatgatgcgtaagtttggtttaattcttcttcgtgacattatggaagaacgtgacagccttgtgcatagagagtttgctgattttcttacagtcgaagatgaagtatccatcagagagaagtttaaggaatccccgactttaccagacgacgatatcaatacatcagtagaccaaacaaagaaattgattattgctatcaaacaaggattaacatatccaccttgcaacggtagctttgtgtatgcggatgttatcgagttctttaataagctgtcggatatttttgattggcctatttatgaaaagtctactctgggtagcgaatcaaaaagaaagtggtatgcggttatcctttgccaatggatggaaggctcaggattgagctatatcatgaagagagctattgaatatcataaaaaccatcctgataattttagggtgtcagcatatcaaccacctacaacttataacgataggtcgaaggaacacagaaatgtggtctttgctgatacattagaagtgattgaaaatgttatcctatttagcatttcgaactacttcctgagattttcaaatgaatataaaaaagttcacgatgttaccgaatttgataataactggtatgagtatgttgaatttggaacaactaacccattaacgattctacttcagagaaatggcttctcacgagaatcagcaacttatatccgcaatcacaaagaggaatatgttgttcatgacggtagtggcggtgaattaaaattaaaaagctcgttattaacatgtggaaatacgagcgtaatgacagaagcggccaacataaaatttaatgtgccgggactgtttctggaggaggacgcctaa

SEQ ID NO: 59712 - DNA, 654 bp, Elstera litoralis
atgtatatccgcctcagagaagcggctattcgaatatatactagcaataaatataagagacgcggcgaggttggagagatcgcactacacgcgatctgccgcgagttttttggcacgataccgctcgcgccccgtgtgttctatctcacctcatcaaacgacgtcgtcaaatcctttgacctggctcacgttcgtatggttgaaggaagaagtgaactttggctgggtgaagcgaaattttatgaagacagcaatgccgcaaccaaagctgctatttcttcaatcacggaacatatcgacctaggcttccttcggaaccagaagctcattctgggccctcaagtatcaaaatcacttccgaactatcaagaaatcagagatattctttcaatccaaacttcgctagacgaactctttgaccgagcggtgtttccagtgctcgtcgctggcgatagttccgctacaaagaaaactaagagagttgatgacgactacacggcagccatcgaagcagagcttgccgctctgtacgacttgatcacgaaatcaggtctcatgactaaaattagggtcatgctgatctatctaccattggcggaaaagtcacgccttgctgacgcatttgacaatagactgaaaggcttgcagccatga

SEQ ID NO: 59713 - DNA, 1896 bp, Elstera litoralis
gtggtgaacgcgctcgctcgagccaccgggctgtggaattacatcgacaaggagattgcggactacgcagacttgcttctcgcggaaagtgttacgtccgaagagcttggaggtatcacctttcatcgtgaacaaattgaggccttaaacacgctgctgtcgggcgagaacctgatcttgagcgcgccgacgagctttgggaaaagtcttcttgttgatgcgctattggcctctggaaagtatcgtagagttgccattatactgcctacgattgcattgctagacgagttcaggcgccgccttcgccggaggtttcaggacaagtttgagttggtaatgcaccccgaagagcgcgccgcaggcgcggatgtcatttttctcggcacccaggaaaggttgctcaatcgcgacgacatcgggacgctcgatctgaccgttgtggatgagttctataagcttgatccgagacgcaaggatgagcgcaatgttgcgttgaacgccgctgtaaggaggcttttgctaaaatctcgccagttcttcttcctcggtccgaatatcgacgatgtcactgtaaccgtcgaagggcgttggaaatttcagttcctaaagacacgcttttcaactgtagctgttgatatatatgacttaggagaggttgaggacaaggaagctcgcctttatgaagagctgagacaagagcgcaattggccctcgcttgttttcgtctcatcgccagatcgggcaaacatgcttgcgggcactgctgccgataaattcaaggtgtcgcacaccgctgacgagatggccacttggatgcgggagaactatggagacaagtggccgctgattgcagtagtcaataatggcttcgccgttcaccacgcccgcatccctcgatccctagcatcccagatggtgcgcctgtttaacgcgaagacccttcccgtcctattctgtacctcgaccctgatcgaaggggtcaatactgcagcaaagacggtaatgatctacgataagaaaatcagtagggcaaactttgattttttcaccttttcgaacatcaaagggcgtgcggggcgcctgggtgagcatcgtgtggggcaggtttatctcttcaatccgcctcccccaccgcaagagactgaagtggcaccaacattgttcgacgacgaagaaaatgcctcggatgactatcttgtctttctagacgaggtagatctttccaaggacacgaatgctcgaatttcagtaatttctaacgagctggggctgtcaagggacgagctgcggattgcctcctcagtaggcttggagactgcggctcgcattcgccatcaggttttacagagtctgcacaatagcagtcttttaatttggagcggataccccgactacaatcaaatcgaagaggtcgttcgggtaatatgccaggtgaagagtgcccgcgattttggtgcgtattctgataaacaactcacgtttttgatttccgctctgaggggcgcccagaaaataaaggattttatgctcaattacaactcaagctacaaaggtgatccagaggcctacgatggtatattcaagtttttacgtgcatgtgagtatggcttgccgcaggtaatttcgctagttgcgctgtttgcctcgaagagggacgactccgtgaactacgacctatttgtgcgagaacttagccgctggttccgaaacgaggctttgagaagcttggaagaggaagggattccaattcaggttgcagagcgcttcgtaaaaaataatgacagcaaaaaaaccctgacaaagcgtttggaacaagctgtcctgggcgagtctggcttgctctctgatttcgaacgcaactggttggcctatgcactcgatctgaaactgacttag

SEQ ID NO: 59714 - DNA, 960 bp, Bacillus safensis FO-36b
atgaataagaaaaacaaagttcaaaaaattctttcatgtaaaatatcagaagctaattttcattcgtattatatagattttgatattggttcttcaggagagttaactcaacgaatagatgaatttgtacagataatgtgtgaagagttacccaattttgccttcggttttcataaaggtgaaagtatttctgtggatgaaatacttccagtattaatagaagctgcagcatctatctacagagtgaccaattttaaacaagtagctgaaatatataaacgtggagaaataatagaggatgaaatagatgataaatatcttagacgaggggaatttggtgaattatttcttcattcaattttaaaatatttatttggaacttaccctttaatagctaaaatttattttaaagattcatacggacatgctgttcatggatttgattccattcatattcaaccagatacaaaaactctctggttaggagaatctaaattatatactgatgggaaaagtggaattgatgcattagtaaaagatttgtttgaccattttaattccaattattttgaaagtgaattcaatataatctccaaaagaattgaagattctagggacactattgattcaaaaggttttaattctgaatattggatagaattattaaacaagtatactagtctttcggaaaaattagaaaatattgttatacctatgttttgtgcatatgaaacttctactttagattcctatgaaaatgattacgatacgtttgaaacaagatttgatgaagaagttagaaaccttaataaaagatttatggaaaaaggaaacaaacatcccctctatagtaaattaaatattattgtaatacttatgccagtaaagagtaaaaaagaacttgtctctaaactacataataaattatcaatcattcaatctttaggaatagggggatag

SEQ ID NO: 59715 - DNA, 2151 bp, Bacillus safensis FO-36b
ttgaattgggaagatataaatatttataatatcaataatttaaattttcaagatagcttttctttggcgaagtatgtttcaaatttatctttaagtgataaaaaaaatgaggcaaggaagatactaattcatattttagaaatttgggattatgttaataatgatacaaaagatatatggctagatatagctgagagtcagggcttctacccatacataaaagatagactagatattacttctgaaattagacaagcatatcattattcagaaaacatagaaaatatagttttccataaagaacaaaaaattctttctaattatttaaaaagaaaggagaatattgttgttagtgcaccaactagttttgggaaaagtttgttgattgaggagatagtagctagtaataagcataggaacattttaattatccagcctactttagctttaattaatgaaactagattgaaactgaaaaaatataaaaattacaatatgattgtaaacacatctcaaaaaattgagggtaagaatttgtttattttaacagctgaacgggttttagagtttaaaaactttcccaaaattgattattgtatattagatgaattttataaaataagttcaacacgagatgatgagagatcagatgtattaaatatagctctaaagaaaattttaagtaataaagagacagctttttattttataggccctaatattgactcaatttcttcaggttttgaggaaaattacaatgcgaaatttgtgaaaacagattattccttggttgatactagagtggaactggtgaaagtagactttaaaagtaacaaaccacgtttaaaagaaaaagatagaaagataaaattatttgaaatgctatttagaaagaaaaaagaacaatctattgtatatgtctcatcgcctgatcgagcaataaaaatagcaatggaatactatgattatttagaagagaagaagcttctagaaaaacaatcagtattaccaataaatgaatggatatctgaaaatattaatccaagttggagttataataaattattgttacagagaataggcgttcattcaggaacaataccaaaacatttaactcactcaattattgaatattttaataaaaagaacttagatgtacttttctgtacatcaactataattgagggagtaaatacttctgctaaaaatgtttttatttttgataaccgtaaaggttctaatgaaatagactattttgatttttctaatataagaggaagagctggaaggttattgaaacattactctgggaatgtgtatgtttttcattcgattcccaaaaaagctaaagttgaattagatatgcctttttatgatcaagaaaaaatttcagatgaaatattaattaattttaataaaagtgaagttaaagcaaaaaaccttgaaagatatgaagagcttactagttatgatgaaaggttattatccattataaaaaagaatgctgtttctgtaagtggacaaaaaaagattatagaaagtatattaaccacgctaagatctaatccagagctaattttatggactggtgaaccttcatttaaagcagttaaatatataactgatatttgttgggataacttattgaaggaaacagaaacaactaggcctatgacaaagaaaaaattacctgtagttgtatataatagcttaagaagcaagtcagtaaaagaatcattaaataaagagtacaaatatttaaaagatcaatttactaagttgacaaaacaacaactgatagataaagcaattagtaattattttagagaacagcgacattggatttcttataaagttcctaagtggcttgaggtcgtagattcattacagaaggaaatatgtaaaataaatggagtgtcaaaatcaggagattactcatacgttgcttctcaattggagaatgaaggggtagaaggtgatttttcagtcttgttagatatgggggtaccatctagtgctattaataaaattaaaaaccaattttctaagggaatagatattaaagaattaatttctgaagctaaaaatattgctgattcatcaaataccaatttaattgaatatgaaaaagaaaaattaaacgagctataa

SEQ ID NO: 59716 - DNA, 930 bp, Prevotella sp. C561
atgagcaataaaatttggaattttgatatattagttgatgattgttttgttaattttaatacaaaaaagcaagaaataaatccagatcataatgacaggttattatcagttgctaatggctttgaagatggcagttggagatatcgtcaattcaaagaatttgttttcagtaatattgcagaaacagctttgtctgcacaagaacgagagaaattaatagataatgattacggtaggcttattgaggctgccaaacatttacgacttgttgacaaagagcagaatggaaagggaagtgaaatagcggaaattattctatatggcataatgaagaaccattataaagccttatctgcaatacctaaaattttttataaacagaatgataatgataatgcaaagggctctgattctgtacacattgtaattgacccaaatggaggctttcaactttggttaggagaagctaaattttataattctcttgaggatgcgcgattatacgaaccaataaattctgttgaacaaatgttgcgcaaacctattatgaaaaaggaatgcggaataatgaccaatctcaatgaacttgataaacaaattgaaaaccaaacattacttaaaaagataaaagaatgtttcgatgagaatacttccattgacgaaataaaacccaaactacatatacctattcttttattacatgaatgccagataacagcaagtactactgaaatgagtgatgagtataaaaatagtattatttcttttcatagagatcgtgctcattcgttttttaagaagcagatcaacaagcttagttctgttcataagtattcggaaataaactttcatttgattctttttcctgttcctgataaaacaaaaatagtaaactggtttatttcacaagcaaaaaaatctcaaaaatga

SEQ ID NO: 59717 - DNA, 2124 bp, Prevotella sp. C561; identical to SEQ ID NO: 59033

SEQ ID NO: 59718 - DNA, 942 bp, Neisseria sp. oral taxon 014 str. F0314
atgtttaaatcagatgaagtaattgctgaagtcaagctacatgactcagtatatgcttattttgtagggtatgatattgataaaaagtatcgctggaaagatttaaccaatgttattatcaatgtacttcctgaatttgcgtatggtttccatactggcacaaatactgataattctaaacttatagctaaagtaatagatgcagcaaaatctctctataaaatagagggtttcctgaaagtttcacagatgattcaaaaagggcaaaagggtttagatgatgaaatcgaagataaatatcttaaacgaggtgagtttggggaactgatcctacatctattattacgtgatagatttaatactatcccactaatttcaaaaatttattttaaagactctattgggcatactgttcatggatttgattgtgtgcatattgaaaaggaatctaaaacattatggctaggtgaatctaaactttatataaatccgatgcgaggattgtccgcattaattaaagatttagatgaacattttaattgtaaatttttagaagatgaattctcattaatttcaaaaaaagtacatggaataggagagtattctgatcaatacgatgaacttattgaagatagaaattattggattaatttattgaattctagtaattacaaaaatacatttacaaagataaaaataccattaatctgtacttactcctccaatatttttcaaaaatataatgatgaggaggattcaagttttaaagaggaatataataatgaaattaacgaactgcaagagtatttttataaaaaactaaaccataaatggaaagataagctaaaaataatactaattctatttcccgttatggacaaaaacgaattagtgaaaaaattacatgaaaaaataacatacttacaaaaattaaatgattag

SEQ ID NO: 59719 - DNA, 2202 bp, Neisseria sp. oral taxon 014 str. F0314
atgaatgcaaatgaattaattaatcttttaaagattaaagataattttagttttaatgaaacattttctatttataaagaatgtgctaggctacttaatgaagatgaaccgacaggccaaaatttattgatttatattcttaactataaagagaaattttccttatcctgccaagatatcttaactgagctaattgaatctattggattttatccttaccttcaaaaggaaaatttaatttcaaagtccactactagcaatataagaatgtttacaaataaatctgattatttggaaaataagatttttcatgatgatcagaaacaaattctggatctaatttatgaaagaaaaaatctggtgattagtgctcctactagctttgggaaaagtattttaatacaagaaattgttgcatcagaaaaatttaaaaacttattgattattcaaccaacattagctttactagatgagacaagaagaaacttaaaaagttataggagcatatataatttaattacaaaaaccacccaagagccaaaggataaaaatatttttttatttacggcagaaagaactaatgaataccttctctttccttctcttgatattcttattattgatgaattttataaacttagtgctaaaagagatgatggaagaagttactcgttgaacaatgcatttttatcaattctaaaaaattatccaaaatgccaattttatttattaggtccaaatattgaaggaatatcaaatggatttgaagaaaagtatcgagcaaagtttattgcaataaatacaaagttagtttcatctgaaatacacaatgtatttgaagaatatccaaatcaatttggagataggggaataaaaaggcagaagaaagaagaagtattatttgaattattatcctcagaattaaaaaatgagaatacattagtttattgtgcttccccacgtaaagcacatgaattatctagaaaatatacagaatatattaaacaaaaaaaagttgaaatatcacatataacagaaaatgagacactaatcgaatggttaaataaatatgtatctgagtcttggagtctttctaattccttaagatatggggttgcagtccatgatggtacgatgcctaaacatctgctctcatctattcttgaattattcaataatgattcaattaaatgtattttttgcacatctactattattgaaggagtgaatactaatgccaaaaatgtcatctactttgatggatataaaggaaaacaaaataacaaaattgattattttgactattctaacataaggggaagagctggtagattaatgaaacattatattgggcatatttataattttgttgaacctccaaaatataataaattaattattgatataccatttcatgaacaaaatcctattcaagatgaagtactaattaatttagaagatgatgatattatatcaaaaaatacagatcaatatcattttatcaatagcctcggatcagagcaaaaagcattattctcaaaaaatggcacccctataaaagctcaaaagaatttatttgactattttagtattaactataaaaacaaatatagtttgcttaattgggttacttatcctacaaaagaacaaaaagacttttgcttacaacttatttgggactttttaactgaaaaagtagataagcagttcttttataataaatttctaaattttaatattcccttgtcaagatacctatatagtaaagatattaactctcttatcaaagatgatgtgcagtactgggagggcagagagagttataaagattatacaaaaggtcaattatatgattactttattcaacataattttaagttattacgactttacattcaatttaaaattcccaaatggctaaatgttttaaataatatacaaaaattttttgcatataaagagaatttattacctggtaattattctcaatatatcaaattatttgaaaataactttattcaagataatatttttattcttgaagaatatggtgtacctaatactgccttatacaaattaagtaaatttattcctgaaaacttgagttcggaacaggctattaatctaataaaagaaaaaaagctttacgaaagtgaaaatctattggaatatgaaaagcaaagattaataaacagcttataa

SEQ ID NO: 59720 - DNA, 942 bp, Parabacteroides sp. D26; identical to SEQ ID NO: 59032

SEQ ID NO: 59721 - DNA, 2121 bp, Parabacteroides sp. D26; identical to SEQ ID NO: 59041

SEQ ID NO: 59722 - DNA, 879 bp, Paenibacillus sp. D9
atgttagaagtattaaaacacagtaaaacatataaggttaacaaccaacagaataatttagaactatttatttgtcctattaatgcaaatcaattcgattatgcccgcatggtagaaagtctaattgaatctgtcgctgatttttctgtatcaaggaaaacgaaggagaagtatcaaggctctccaatgacattatctcaaaaggctcgggagaaattccgaaattataaagaaaataagggggagctaggagaattcctccttttttgttttttggaaggtcacctaaatgctccaaaaattttgtcgaagttagaacttaaaacatcaacgaacatgtatgtgaatggttcggatggtatacactttttaaagttaccgagtgggaattaccaattaattttcggtgagtcaaaattatatgatgacttaaccactggattacgagatgcatttcagtctataaatgattttgttaaggaagaaaaccaaaagggagaagggaaaagtgggattacttatgagaagtcccttctttctgctagtgttttcaaagaaacttggtcaactgaagaagaacaatttattgagcaacttatttatcctacaaatgataattcttttgaggttgatgacgcctttggaattttcgtaggatttgaagttgtgctcaatgccgatcaacgaaaattgcccaatgacaaatttagaactgtaatagaggatcacataaacgaggtcgttacaaaaaaaatcgccaatattgaaaaatacatagaggaacatggtctttttggctacaatttttatgtgtatacaatgccttttttagatattgaactatcgagaataaaaatactggagaatttaataaaatga

SEQ ID NO: 59723 - DNA, 2568 bp, Paenibacillus sp. D9
atgacatttctaaataaattagtagatagggcacttattgatccatatatgtcaactttaataaagaaacttgaaaagcaatatgctatccattttatgggtagtaatactgtgatgcaaagccttacaaataaagaatatttggatttgctcaggtttgctgatattctttgtcgttctgagaaatatgaagcaagaaacaaagcctataaaataatcagtttgcttcatgtcttttatagcgacgatcaaatgtttaagttacaagcatacaatgtgttagtaaaactgggcaattttccatcaatcaaaattgtactcggtgaaacagaggtgaaagcagatgaaatagttatagatcacattgttaaagaaacatatcaagccgctccaggttcgtctaatatttttacagatacccaatataaattatttgaaaagatgaaggatagtaaccactttagtttttctggtccgacatcgtttggaaaatctttcattttcgaatcgtttattaaatacttaattgaaaaaaagaatgggtcagataatatcgcgcttttagttccaacaagggcattgataaatcaagtatctacaaagttgaaaactgtaatagataacaggaaatacaaaattctaaccaagccaattgtacctttactgtataagcaaggagattccagatttattttcgtgttcactcctgagagacttatatcatatttatcagaaaataatccagtaataaattatttgcttgtagatgaagcacacaaattactatctgatactgacacacgtgctccattattctatcacgcattaatgattgcgaaacgtaaaagtataaatctttatttctcgtctcccaatgtaccaaacacggagatctttttacagttagtcgggaatagtgtagaagaaactctagcaataaaagaaaactcagttgcccaaaatcgcttttttattgattgcattgagaagcaagcactttacttttcagaatatggtgaggagctagcattagattatagtggatatgcttctgatccccatataaatctaaaaaatgccgtcgatcttttaggaaggaacaatcctaatatcatttactgcaatactaaagatgacactattcaatatgctctagaatatgctaggactttacctctcataaataattatgagcttgaacaattaactaatcttgttcaagaaactatgcatgaagaatattaccttgtggattgtttaaaaaaaggcgttgcttatcactttggcggactacctcagcgagttagagagaagattgagtttctttttcagaaaagggtaataaaaaacattttttgcacctctactcttttagagggcgtaaatcttccagcgaaaaatatatttatattgagcaatgctattggattaactaaattatcgaaaatagatttttggaacttagctggtagagcagggcgattaacggaagatttaagcggcaacatcatctgtttgcgtattgttgataaaagaaatcgatgggaggaacctagcaaagatcttcaaattgttaaagataagtcagttgaaaaagtatcgtctgttcttatgacaagtcaaggaaaattttatatcaatatcgggcattcaatcaagaatgagccatttacaagaaagaatgtaacggataatgaaaaaagaatgttagattcttacggtaacattttagcgtatcatgcactgagtaaaactgattctatacttagaagtaaattcatagatggtaatactcagtctaaagagataatcacttatttagaaaaactcaataaagttcctgaaaaaatcctttctcaaagctctacaattaaattgctttatcagaataaggttttatcatcttctataaacccaatggatattcctagagagactggatatggagaatgtttaaatttacttaataaactttacgatttatacaattggcaaagagaagaatcgggaggaagaaatccattagctagaaataagcatgttttagaatattacgcggtcttaatgagttcatggattaattctcagccagtaaatttaattataaaaaggaccatcaattattttgatgaaaacaataaagaaatctctattaataacggagaatttgttgcgtttcagaaagataatcgggctcatattaatcacatagtaaacaacgttatatctgatattgaaaatgttcttcgttttaaaataaaaatttatgtgaaaaactatgttgatttattaaggataaaacatcaagacaatgaagaagctgttgttattccaaactgggataattatttggagtatggaacaacggataatattattattgaattacaaaacataggatttcaaagacatattgctacttttttgaaaaataaatatcttgaattatttgttttagagaacggtgtaataagtgattttcaggaaaatgagctcaaagaaaaacttcaaagatcgaactatacacaagagtatgaagaaatttcaaacacattaggatggggttga

SEQ ID NO: 59724 - DNA, 900 bp, Bacteroides sp. 2_1_56FAA
atgttgattaaaacggatatttcgagtgatttcttaaacttatttaccaaaatctttgaaaatgaagtattggaaggtggtaataggttgaatgtttttatgttgaaaatatctaacaatcagtttaattatggtaatctaagcgaagaattagaaaatgcattaataacgtatgctttatctaggcatacatgtaatgaattaatagaacaaaagaagtttggaaatttagcttcacaagcaagagagaaattaagacgtgctaaaagtaacacaggagaattaggagaacttcttttgtattgcttgttagagtcgcacttacatgctcccaagctgcttacaaaattagaattgaaaacagcttcaaatgagtatgttaagggagctgatggcgttcatttgttaaagattgatgatgcatcatatcaaatggtttttggagaatcgaaactacatggagatttgaaaagcggaattatttctgcgtttgaatctatcaaaacaatgttagacaacgacctcgacaaaatgagatatgaagttcatttggtaaatacgaatttgttaaaagagacagtatcggaggactcgtatgaaatattaaagaaaatcttaataccaagtgagaatgatgaaaatctaaatcttgataattcttttggagtcttcctaggttttgacatttcaatgtcagatgatgaacgtcgtgttaataatgctgaatttagaactaatatatcggaaaaagtaaagtctagtataaataaaatagtgccgacaattaatgagctgttgaagaagaacgagtttatcggctacaacttttatttttacattttaccattttctgacttggataagactagatcagaaatcataaacaggttgaaaaaataa

SEQ ID NO: 59725 - DNA, 2559 bp, Bacteroides sp. 2_1_56FAA
atgattctggcagataagattgcacaagagataatgggtagcgagtattttcaatcgctttttgtgatatgtatggaacgttcatattatcaaatactgaatttatgtaaatcaatacaatataaagaaaaagagtataaagatttattgagatttgccgatttattatcagcatcctctttttctgaagctcgtagctatgcgtaccatattataactttcttaaatagttcatataagaatgaaccatattatagaatggtatctaaatctgtatattataatcttggtaattttccagcagttaattatttaactaaagaagattgtaatgaggctgtacttccattagataaaatgatacaaatagatgctaagaaagccttacaagaggttccaaattcagatggaatatactttactgatactcaatatgatttatattcggggttaagtgaatccagggaatttagcttctctggaccgacatctatgggcaaatcctttattataaaagcatttataagtagaataatacacaatagacctcctgaaaatttagcggtaatagttcctactagagctcttatcagccagtttactctcgaaataaaaaaagacttgggtatacaactggaacgtaataaatataaggttgttacaaattcaaatatatcagaacttattcttgaaaataatacaaatctaattctcgtgttaactccagaacggctgattagttttttgtctcaaaacgaaaatccttcaataggttttttatttgtggatgaggcacataaaatagcacaagacgatactaggagtataacaacatatattgctatagagaagacactaaaaaaatatcctacaaccaaactttatttttcatctcctaatgtctctaatccggatattctgttaaagttgttcagaaaagatgagcagaattcttttaaaacagaggagaccacagttgctcagaatctttttttctctgatttgagtgagaggaaattttcatatttttatggtaatgagtttcttccaatatccactaaaatcccggaaagtgccagaacggtaaatggctttcttgtaacttatgggagagatagtaatttggtgtattgtaatagtgtaagacgtacaattgcttatgctactcagtttgctaatacaatatccatagatgatgcaactagaacaaacaataaattaaagaaagcatctaaaattattggtgattatattcatcctgattactatttagcaagtatcataaaaaagggggtagcgtatcattttggcaatatgccacaattgatacgtaatctaatcgaggatttatacaagaatggagatataaaatatattttttgcacctctacattattagaaggcgtaaatatgcctacgcaaaatttatttatactcgataataagaaacatcggtcagaactcaaatccattgatttttggaatcttgcagggagagcaggtcgtatgtctcgagaattacaaggaaatgttttttgtataaaacataatgaatgtgattggaaaggaagcgcattttttaaaagtaaaaaagttgagcttatcccaactgtatacgaccggataaataaaaatttgaaaagaatagaaaatcaaattaagaataatgaaataaagacaggaacagaggaagaaaaaagaattttgcgttatatagccaatatcatttgtatcgatactttggaaccgaaaagtgggtatcaaagtccaattatagaagagctaataaaaagaaataagattcagatattagaattggccaaaagtaaaaattctaatattgaggtgccattttcgttattagactcaaatgagtctatcgacatcagtattcaaaatacagtatataaacagttgcttgaattacacgctgataaaaaacaaattacattatctggcaatgtggattatgagaattgtctaagaattcttgaaaggttttatcatctatataattgggagaaaacaaacattaaggaattgaataatgtgaatagcctaaagtattatgcatttattatgaatcaatggattaatggaataagtctcaatcaaataatatcagactctattaaatataaagagtccaatcaatcatttatacgactgccttctggtgctaatgagatatttagctcaagaaagaaagagcatgtgaatattttgataggtgagattattcgagatatagaaaaggttattagattccatttcgaaaaatatttcaaccattacttcttagtattgaagcatattttgggagaagataacgcaggtgataattgggctgtattacttgaatatggaactcgaaatagaattgtgatagcattgcagaatttaggcttgtcaagatataccgcaaatatagtgtatgataaatgtcgagcagctttaatagttgaaaatggtaagctaaaagggtttgagaagtctttaattttaagtatgcttcgacaaaattcattggaatatgacgaagtctacgaattattataa

SEQ ID NO: 59726 - DNA, 939 bp, Lachnospiraceae bacterium 3_1_46FAA
atggttaacagaattttcgataaaaagaatgtaatattactgaaagttaacgaagatgatttgaatacctttttagttgatatggatattgatgatgaaggaaatcccaaatattgcttggatgattttaccaaagccatatgtaatacaattccagaatatgtttttgcacaatatgaagatcccaatattcctcaaaatgacattgttgaaaagttaagagaagcggctcattgtatttataaaatcaaagattttcaattaatgaaacagtggtgtgtagataaagatattaatgcatataacgaattaaaaaggtctagtacagcaaaaagaggagaatttggtgagttgttgttgcatttgatattaagggaatttaagcatacaataccactaatttctaaagtttatttcaaagatagtgcgagtgtgcctgcacatggatttgatgcggtacatgtttccacgaatgaaaaaattttatggcttggtgaaagtaagctttatgatgatagtaaagaggggataaaagcattagtgaaagatttgaatgaacatattaatacagactatttaaatgaccagtttgtgataattaaaaagaatctggataataattctatacctggcagagaggaatggattgatacaataacgaattgtacaaagctaagcgacaaacttaatattataaacataccaatgctttgtacttatacacatgacatttacaaaaagttttctgatatgaatgatcctaatgcaatagcctaccacgaattaaatgtcagagagttaaaagagtattttgataaacagaacaaaatgccactaaaagacagagttaatattatacttatgctatttcctgtaaatgacaaaaatgaattagtcattaatttgcataaacgtctttggcatatgcagaatatttga

SEQ ID NO: 59727 - DNA, 2217 bp, Lachnospiraceae bacterium 3_1_46FAA
atggacaagacaaccgaaatcatattagaaattgaaaatgcagaaagaatctcttttgaacagagttttaaaattgtttcatattgcacacaattgttgtcacaacattcagcggaagcagaattatccgcgagaaagatagtaatacatgttctgaataattggggaaaaattgataaaaatttatatgtagtgtgggcggatttgattgaaacgttaggattttatccgtatattcaaaaaaatagttctgatttgaaaattatgtcttttgcagacgatgtgcgaatgagttattttaagtcagattttttaaagaatacatatctacataaagagcaaaagaaaatttctaattatcttttgtcagggaaaaatataattgctagtgcgccaacaagctttggaaaaagtttgcttatagaagaaatcgtagcttcaaaaaaatataaaaacatagttatcatacagccaacattagcattgttagatgaaactcgattaaaattgaagaaatatgccgatgattacaaaattatagtgagaacttcgcaaccatattctgaagacaagagaaatctttttctgttaacagcggaaagagtaatggagtatgagcctctacctcaaatagattttcttattatagatgaattctacaaattgagcctcagaagaaaggatgaccgggcagataccttaaacaatgcgtttttgaaggtggtaaataaatttcatcccagattttacttcttaggccccaatattgatggaataacagatggatttgcagaaaaatatgatgcaatattttataagtcagatttttctttagtagattgtaatgtaatagataagagtaatttaattaactggagtaacagcgataaacagattgataaggaaaaaatcacaattttgtgtgaactgttagatgagttgcgaaatgaacaaacgcttatttattgttcaactcctgcacgagcaaggcgtatggccaaagtatatttagaatatttgcaaagaatagaacgagaaaagaataatcaacttccattaatagaatggattaataaaaatgtctcgccggaatggagtttagctaaggaattacaatacggtgtggcaattcatgatggctctttacaaaagcatataggagcttcaattattaagtattttaatgagggacggttaaactgtattttttgtacctctacgataattgaaggtgtcaatactagtgctaaaaatgtaattttgttcgatgaaaaaaagggaggaaatgaaatagatttttttgactacagtaatattaagggtcgttctggaaggatgatggaacattatgtgggaagaatatttaatttttgtcacgttccggtgcagaagtctattgtaatagatatcccattttatgaacaagatccagaaatattgacaaatgaaatacttattaacataaaaaagaatgatgtaaagcaagaggtcagaaatcgttatgatcagattaatgcgcttcccgctgatttattaagtattattaaacaaaatggcgtttctgtaaatggacaaatcaggatttataacaaattaattagtgacttgaaatcaaaaagtgtattacaaaatattcagtggagccaattacctacatgggatcaaatgtactatgttttagaactggcagaaaataatctatttaactttgatagcaaaaggggcgtgttttcagtaaagcagcttgcaagatatttgaatatgtacagaacgaaaaagaatattattgatattgttaatgatatttataatagtaaaattgcgactgtaaagactttgacagatgagagaaaagcaagatattatgatgaagctgtagaaacagcatttcatatctacagacattggtttcaatttactgtgccgaaggcgtttagagttgtagatagtatccaacgtctgatatgtgaaaagagaaacattaaaccagggtcttatagctttttcgtacaacaattggaaaatgattttatacgtgagaatttatcgattctggtcgaatttgggataccaagtaacgctgtaagaagattggagaatgtaattccgtctaatctgtcagaggatgaagtcattgactttattaagaaaaatcgcagcaatataaaaaaatatttgttgccatatgaaagtgagcggttagaacagtgtatatag

SEQ ID NO: 59728 - DNA, 975 bp, Afipia sp. 1NLS2
ttggaatttgacgctctggcgaccgcactggcgataataaagaaggactggtcagtcctgtcgtcacgtatccatacggcagagcacgatatcgtcaccaatcacaaacatcttaacctacgtctgcactatcctgcgctccgggacgcccaggctacggtcgaagagctcgttagaacaattgctctctatctgacgcatttcagcctcccacggaagcaggtcgaggcggtttatgcgacgcaagagaccatgaagacagcgttcgaacggcatcaagcgatctcacgcttggagcaagaggcacgctcgctgtttatcagggcgagaaaatcatcacagcgcactggagaagccggcgagctgctactgtatcttcttacagagtggttactggacgcaccgcaaatcattgccaagatgtcactcaagaccaacgctcaaatgcccgtctatggctccgacggcatacatgtccgtttcgacgcaaaaactaatcgccttgttctcttctctggagaagccaaactccacagcgatattaccaaagcaatcgcgtctgcggtcacgtctatcaaaactggcttaagccgcgaaaagatgcagcatgagatcgaactcgtacaacgacacattgacttttctggcctcaatgagacggcgcgaacggcactccttcgctaccttgaccccttcgacgaggcttacaataatcggctcgaggtggtgacctgtctgatcggcttcgatttcactggttacgccgggcggtcgccaaacgaactagaagacttcgatataaatttcaaaacctcagcgactgccaaacttcgtgaggttgggccgatctttgcggaggctttaacggatgctggcctcaccaatcaaagggtagaactcttcttatttcctgtaccctcggtgtcggtactacgcgacctcttccagaatcagattggctggactcgcgattag

SEQ ID NO: 59729 - DNA, 2580 bp, Afipia sp. 1NLS2
atgcagccactcgctgacaaggtttgggctaatccccacttccatgccgcagcgagacgcctgcaaagggcatggctcgcacacgacatcggtgttggtcccgttgatcaccccggccttgaagaaatcgttcgcatcgtccgggcatcggccatcctcgcgtgttcgaaaaccgctgaccatcgcgaccaagcctatcgaacgataacatccgctttcgatctctatggtgcatcggaactacctcttgaccaagccacgcgcgtcgttttagcccgcttgggtaacttccctgccctagctacgcgtccctctatccgcgacgccatgccctccctcccagccagccttatcacagaggaactcatcgtttcggatcgccgaaccattacacgtcgcgatcgttcagttctgctcacccactaccagttcggcctctggcgtcgcttggttgctggagaacgagtggcggtcgcagcaccgacctccgcgggcaagtcatttgtactgcagaatttcattgccgcgcgcttggaggggtcaagtccccagacgatcgtttacatcgttccgactcgcgctctgatcgcgcaggtctccgctgacgttcgcaagcttctcatcggccatgaaggggcttcaagcgacgtcgatgtgattacgatccccgtagaggcaggacagcccctacccagacgcgccatctacgttcttacccaagaacggcttagaatgatgctgagcgcccatcccactttccatgcacagattatcatagtcgacgaagcccattcggtcggcgatggcgcgcggggcgtacttctgcaatggacagtagacgacctgttgcagcgtctaccgacgacccaactcctgtttgccagtcctggcattcggaacctcgacgtctttggacggatgttcaaccttgatgacataacgatcatgcccagcggcgacccgacggtcgcccagaactttctggtcgcggcgtttgatgacgcggaagcaggagacctgactgtccgctacgttgagcccgcacgtacactgactgagataggccgattggccttggcgcggcgctcggtcacccgtgtcgagaaactggtgaacctcgccatcagtttaggccagggcgcgtccaacattgtctacgcgaatggtgcaggcgacgccgagcatatcgcgcttgaaatcgcggcccgactcgatcgctcgcctacgccacgaaggcaggcactcgcccagctggcggcggagaccgtacattggtcatatgcgttggtggcatgcgcgaagaagggggtagcgttccattattcgaacatgccgacgcaaattcgcacggccgtcgaagaagcggtcatacggggcgacatcgactatctcgtctgcaccacgaccctgctccaaggcgtcaaccttcccgctaaaaacctctttctttgccgtcctgaaaagggcgaccgggtcccgctggaatcggtcgacttctggaacttagccggccgcgcagggcggctcatgaaagaattccagggcaacatcttcctcatcgactacgatcactggcgcaagaagccgctcgaccaccctcgcgacgcgaccgtcattccagcggtcgaggcgggcctcctacagaaaggcgccgaccttttacgcgtcatcgaacagccagagacccagcgccgtgagattgatcacatcgacgctatatttggccggctactgcaggagcatttctccggcacgctcacgaagatgttaagtcgcatcccttcgtacggcgacgcaacaccggattctctagcactccaaaaggcaattgccgaagcagccgttgacatcaccctacctaccagtgtgctacgcattagccctaacatctcgccgcacaagcaacaggccctttatcaaatactgcgcttgcgggccgaaagtacaccagcgagtgccatggccctcatccctaaacatccgagtgaccgtgacgcctaccaatcctacgccgacattctcgaaatctgccataagatcatcgagggccgacccgatacctcgcgactacatcgcttccttgcactcatcgcggtgttctggatgcgcggacggcccctaccacagatcgttcaaaatcaactgcgccgaaatcctgatcgtgaccgccgcgaaattattcgtgatacgctcgaacttgttgagaagcgggtacgataccaatgcgttcggctgttcagctgctacggcgcagtacttgccgaagtactccaagacgttaatcttccggatgctgtcaagacgttgccatcaattcccctatttctggagcttggcgcatcggacaaaacaacgctcagcctcatgtcgaacggactgtctcgtgccaccgcaacgcgtttaacgcctcgtgctccgtcacgtgacctggatgcagaagacgctatggattggcttcgccaagccccggtggagacctatcgccttccggcccttttgcttgaagagattttagagattcgaggtgacaaggctactgcgatgacaccagacgacaccgacagccgacgtaaagagtaa

SEQ ID NO: 59730 - DNA, 567 bp, Veillonella sp. oral taxon 158 str. F0412
atgagcaaaatacatactgagcatttaaaaaccaagccaaaggttcatactttttatattgggtttgatttagctgataatggtaagttaactcaaaataagtctaaattttatgatgagttatttttagatgttacttcattcgcatttggtgcaagcaatgtaatgagtcggattaaaactccacaagatattctcaaagttcaaagagaagcgtttcgtaaaatgtactatattcaagagatatgtgaggctcgtcagcactatcttgagtcggattgtgtcgaggataaatacttaaagcgaggagaatttggtgaactaatattatatcatttcttacatgagtattttgatgcagatgctctaatatctaaaatatactttaaggatagcgtggggctggcggcacatggatttgatgctgtacatgtggattcaaagaagaagatattatggttaggcgagtcaaaattatattcatctggagattctgctattgatgctttgatgaaagatctagaagaacatttcaatattaattttttgatagtgaatttactataa

SEQ ID NO: 59731 - DNA, 657 bp, Veillonella sp. oral taxon 158 str. F0412
ttggtagcacaaactgagccaagtattgtatatgttaaatctcctaatgaagcttataaattagctaaggaatatatggactatttagttgagcttgataaagctattactaatgatgatttagatgtatttgagtggattgatatgaatatatcgcctgattggcaattaaagacttttttgaagtatggtatcggctctcataatggggctttaccacgtcatattattagtacagagatagatctttttaatgagggaaaactacaagttctttttgcaactgtttcacttattgaaggggtaaatactattgctaaaaatatgattatttatagtcatcataaagggagtaattatatagatttttttgattttgctaatataagaggacgagcaggtagaatgaatagacattttactggtaatgtatatttatttatagatcaaattgaagatgaacagtttaccatagatgttccgagtattgatcaaaatccagtctctgatgagattctatttaatattcctaataatgatgtaaaaaatattgaaagaaagaaattattagaaactggacttaatgaggagattcaagacattattaaaaaaatcttatttctatcaatggtcaaaaggaactctataaatatataa

SEQ ID NO: 59732 - DNA, 1518 bp, Selenomonas sp. oral taxon 138 str. F0429
atggagtatcttggcgtaggctcttacgttagagttatgacatcatgcgcaatctctgccgcgcgtaagtttgatcccttttgcgagaaaatcttcttgtctttatgtgacgaaggagcaaaagtgttttcatataaaactgctgatggatctgaggtgacttattcgcccgctaacttcagtaagattcataatgcagcgcaaaatcttcctgccgaaatcatgcagatggctctacgaaaagacgcccgtgatattgaacgttattttattgcggaaatcattcctgcactagatgaggcgcgaaagaaaaacgccgttcttgctctgaaaaacatcatactaaaggatgataatataccagataccacacaacttggtacaatcaagagtctcaaaaaaatagaactcaaagataaaaatgtatttgtcctatccgagttcttaacagatatatttatctatgctgtcgccaaaacagataacaccatagatcctgcctttacaaaatcgatcaaaaaaaatttctatgccacctacaccccttatgtagatacaatttcattttatgaggcatccatgccaaaaacagttgcatctattcccctgaccagcataggaaaattcaatcagatttttacacctatatctagtgaaacactctctatttctgctaaccacgacctccagattttttgcttaaaatttgatgacttcgatttcgattatcaaggtctttggaaataccttcgcaataacattgggtattacgtctactctagagcgcagataaatcggtatgtggatgaagaggagatttcttcactttcttacgatgcgattgctcatatcaaggaatttattacaaaaaacaaacaggaacccgagactgaactcggagaattattgctttacgtctttttagagcaagttcttcatgcccctaaactgatgagtaatgttgaactaagtgctcataatggcattatttcaagcgaaagttccggcatacatcttcttactgcaaatgcagtgatcccatttaaccagattgtattaggagtatccatgctaaacagcagtatgaaggaaactattgacagagcttttgcggatgcacaaaggataaaaaacaggaagaaggatgaacgccgttttgtagaagctaccatcttcgaaggtgcgtttccaagggatgtttgcgagcaactcgaagctattattttgccttctgagactaacgtggaaaaaccagctacggcatttggtctgtttttaggttataccttggataatctaccagcaagaggaaagtccatcgatgtatatcagcgagatgctatcgcccaaattaagaatgacatcttgaacagcgtgccatatatcgagtccaaagtcatacaatatggtctcgatggatactcgctatatatctatttgctgccttttacggatgtagacagagataaaaaggatattatgaacaagctgctgcaaaccgaaggaggctccctatga

SEQ ID NO: 59733 - DNA, 2634 bp, Selenomonas sp. oral taxon 138 str. F0429
atgaataaattcagagatgtctccttcggggagtatctgttttcaaaaatagataacaataagtacctacaaaagttgtatcaaaatatcctcatcaactactcaaagagattattcaacttgagtgatccagaagatccccccgtaaatatcgaagatgcactcacttttattgatgtattatcaaaatcatctggtaccagtctgtctgatacacacaaaacgcgtgcacaagaaatgattgcacttctctatgatatgtatccccagaatgaagatattcaatattgcctcggttctgttcttgcgaccacatgcaattttctcggaatgaagcgcttaacacccgatttcaagagtgcctctcttctcgaacagatactcacgcactttaataggaactacctctccgtaccatcggatgaagaggccgcctttttccctgcccagaaggaaatatttgacagtctgtccaagccatattttagctattccgcacctacatcgatgggtaaatcctacatgatgcgtgtgtttattaagcagcagctcatgaaaggtacaaagaagaatttcgcacttctcattccgactaaggctctgataaacgaagtcacgaatgaattgatagacaacctgaccacacttttacaagaaacaaattatcgcatcgtaacttcatccggctcaatagcactcgaaacggaacacaactatattttcatactaacccaagaacgtatgctctacatcctgattgacgatcctgagctgaagatagattacctattcgtagatgaagctcataaaatatcttccagtgacaaacgaagtgttttctactacaaagtgattacaaaactggaagaacggcaatcaacgccccatattatattcgcctcaccaaatatcccgaatcccaaaatctttctcgatatcctctcaaaaaaagcctatttgagaactgaaaactcaactgcaacttgcaaatacgcccctgttagtcaagtgaaatacattgtcgatttatgggagcgtaacatacggatttttgactcgtatacaaaaaaatttctaaagttctatgagatgccccgcccatactcattgagtgaattgattgtttggattggcgatagaaaacacaatatcgtgtactgtaagtcaaaaaatgatgccatccagtttgcacgaaactacgctaaaacacaggaggtagttggtgataagaaacttcaatcctttgcagaagcaatccgcagagatgttcataaggaatattaccttgcagaattagtagaaaaaggcgtagcctatcacataggttaccttcctgcgaatatcagaatgcagctcgagaattactatcgcgaaggcctcataaagacaatattttgcactagcaccctgcttgaaggaatcaatctacctgcggagaatctatttattacaagctataagaagggcataagtcgtttctcagaggtcgacttcaagaatctgattgggcgcgtcggtcgtgcaaaatataatctatatggaaacgtctttgttgtccgccttgaaacccatgaagcagagatcgacttgaaaaattttgaaaacctgttgattgccgacgttcccccacagaagctctccattgaagccgaactgaaatcaaatcagaaagaatttattgtcaacacactgctatcgggtaacgtagaaatacataagaccccgaaagatcagagtgaggacaactatgatctgatgagaaaaacaatgctgatacttgtcggtgatatagtaaaccatcaaaacagtcgtgtcagaagggaattttccccatacctaacacctgaaatagaagagaaaatccgtgcggagttttccgtgaccggcaaaaaaccagatgacgatattaacgtgtcgtatgatcagatacagggtatcaaagaactcatccgcaacggactttcctacccgaaaatacatgacttaaaaggaggcgccaattatcaagaagcactcacctttctgaacaaactagccgttgctttcaagtggcgcatctatgagaatcaaacccttggtgccggcgaaggagaccattacagcaagctgacatggtataccgttctcttgcttcaatggatgcaagggtacgggttgagttatatcatcgaaagaagcatcactgattatgctgaaaaaagaagagaggtgcgtgtcgattataaagaaaaagaggtattcaacggctcacagaagcataaaaatattattatcgctgacacacttgaagcaatcgaaaatgtacttctgtttcgattatcaagctattttctgcgcttctcagaggaatatcggcgacagcatcccgatgatccatttacaaataactggtatgaatttatagagtacggcacaaccaaccacctgcggattctgttgcaacgcagtggttttaggcgagagtcaacggaatatatacggcgtcatgccgataagtatgtccgaggatcatcagacagaccgaaactgctaaagaggcccctgctagactccccaaacgaactggtaaagagggacactgaatatatccagtacaacataccagaactgtttttagacgaaggagaagaatga

SEQ ID NO: 59734 - DNA, 1482 bp, Selenomonas sp. oral taxon 149 str. 67H29BP
atgacctcatgcgctatctctgccgagcgcaagtttgatcctttctgcgagaaaatcttcctgtctttatgtgatgagggagcaaaagtgttttcatataaagctgctgatggatttgaagtgacttattcccccaccaacttcagtaagattcatagtgcagcgcagaatcttccaaccgaaattatgcaaatggctttacgaaaagatgcccacgatatcgagcgttactttatcgctgaaatcattcctgctctagaggaagcccgaaagaaaaacgcagttcttgctctgaaaaatattatagtgaaagataagaacatagcagataccacacaacttggcacgctcaggaatctcacgaaaaaggagctcatggataaaaatgaatttatcctatccgaatttttgacagatatctttatctatgctgtcgccaaaaccgacaacaccacagactcttcttttacaaaatccatcaagaaaaacttctacgcagtctacagttcaatgagagatacaatcacattttatgaggtgagtagaccaaaagcagttgctgcgattcctctaaccatcaaaggatcattcaatcatgtttttacccccatatcaagagaaacactttccatctctgctaatcacgatctccagatattttgtttaaagtttgatgactttgatttcgattatcacggtctttggagatatctccgtaacaatattggatattatgtctactctagggtgcaaataaatcgctatgtgatagaggaggaaattgcgtcccttgcttatgatgcaattgctcatatcaagaaattcattgaaaaaaacaaactgcaatccgaaaactcccttggagaattattgctctatatctttttagagcaagttcttcaggctcccaaactaatgagtaaggttgagttgaggaatcacaatgatttaatttcaagcgaaagttccggcattcatcttctcacagcaaatacagatgtcacattcagtcagcttatattgggagtatccatgctaaacactagtctgacggaggctattgacgcagcctttgcagatgcacaaaagctaaaaagcaggaagaaagatgagcgcagttttgtagaatctagtatctttaatggagcttttccaagtgatatatgtgagcaacttgagtctattattttgccttccgagtccgtagagaaaaaaccggctacggcatttggtctgtttttaggatatactctgggcgatatatcaaagagcggcaagtccatcaatatatatcagcgcgatgccatcgctcagattaagaatgatatcttgaataacgtgccatatatcgaatccaaaatagctcaatacggtctcgacggatactcactatatatctatttgcttccttttaccgacgtcgataacgataaaaaagatattatgaacaaactgctacaaaccgaggagagtaagacatga

SEQ ID NO: 59735 - DNA, 2643 bp, Selenomonas sp. oral taxon 149 str. 67H29BP
atgaacacattcagagatgtcaccttcggtgaatatctattttcaaaaatagatagcaatatgtatctacagaaaatatatcggaacatactcatcaattattcaaagaaattattcaatttgagtgagcaagaggagatgcctgtaaatatcggagacgccctcgcgtttatcgatgtactctcaaaatcatgtggtaccagtctatctgatatacataaaacacgcgcgcaagaaatgattgctctcctctaccatatgcatccccagaatgaagagattctatattgccttggttcggttcttgcgactacgtgcaatttcctcggaatgaagcgtttaacaccgcatttcgagagtgtttctcttctcgaacagacgctcacacactttaatatgaactatctctccgtaccgtcggatacgggagcctccttttttcctgcccagaaggaaatattcgacagcctgtccaaaccatattttagctattccgcccctacttcgatgggtaaatcctacatgatacgtgtgtttattaagcaacagatcatgaaaggtgaaaagaaaaattttgcacttctcattcctactaaggctctaataaacgaagtcacgaatgaattgattgacgacctgaccacgcttttacaagaagcgaattatcgaattgtatcttcatctggatcaatagcactagaaacggaacacaactatattttcatactgactccggaacgaatgctgtacattctaatcgatgagcctgatctgaagattgactacctattcgtagatgaagctcataaaatatcttcccgtgacaaacgaagcgcattctattataaagtgattgggaaactggaagaacggcaaacagcgccgcatattatattcgcctcgccaaatattccaaacccccaaatttttctcgatctcctctcaaaaaggactactttgaacggcgagatcagcagtacagcttgtaaatatgctcctgttagtcaggtgaagtatatcgtcgatttatgggaacgaaacatacgaattttcgactcatacacaagaaaattcataaagctgtatgatatgcgccaatcatattcattgagtgaactaattgtttggatcggtagcggaaagcataatattgtatactgcaagtcaaaaaatgatgccatccagtttgcacgaaactattccaaaatgcagcctgtgattggtgatacgaagcttcaagactttgcaaaagcaatacgcagcgatgttcataaggagtattaccttgcagagttagtcgaaagaggtgtcgcctatcacataggttaccttcctgcgaatatcagaatgcagctcgagaattactatcgtgaaggtctcataaagacaatattttgcacaagcaccctgcttgaaggaatcaatctacctgcagagaatctatttattacgagctataagaagggcataagtcgtttctcagaagtcgacttcaagaatctgatcgggcgcgtcggtcgtgcaaaatataatctatatggaaacgtctttattgtccgccttgaaacccatgaagcagagattgacttgaaaaattttgaaaatctattgattgccgacgttcccccacaaaaactctccattgaagctgaactaaactcaaatcagaaaaaatttattgtcaacacactgctatcgggtaacgtagaaatacataagacccccaaaaatcagagtgaggacaactacgatctgatgagaaaaacgatgctgattcttgtcggtgatattgtaaatggccgaaacagccgtgtcaggagggaatttgcaccgtacctaacgcctgaaacagaagagaaaatacgtgcggtcttttccgtaaccgataaaaaaccagatgatgatattaacgtgtcgtatgaccaaatacaaggtatcaaagacctcatccgaaacggactttcctacccgaaaatccataattcaaaacaaggagccgactatcaggaaaccctagcctttctgaacaaactcgccattgcttttaagtggcatatctatgagcatcagaccctcggtgccggcgaaggaaagcattacagcaaactgacatggtataccgttctcttgcttcaatggatgcgagggtacgggttaagttatatcatcgaaagaagcatcacagattatgctgaaaaaaaacgagaggtgcgtgtcgattataaagaagaagaggtatttaacggctcacagaagcacaaaaatatcatcattgctgacacacttgaagcaatcgaaaacgtacttctgtttcgattatcaagctattttctgcgcttctcagaggaatatcggcgacagcatcccaatgatccgttcacgaacaactggtatgaatttatagaatatggcacaaccaaccatttacggattttgttgcaacgcagtggttttaagagagaatcaacagaatatatacggcgtcatgccgataaatatgtccgaggatcattggaaagaccaaaactgctaaagaaacctctgctggactctccaaacgagctagtgaagagggacgctgaatatatccagtacaacgtaccggagctttttttagacgaaggagaagaatgcgatgtctaa

SEQ ID NO: 59736 - DNA, 909 bp, Tannerella sp. oral taxon BU063 isolate Cell 8/11
atgacgagtaaatttacactgttaatagacgactctctgctaaacctttctgaagagcaagatgaacagtatgagaagaaatatctcttaagctatttgaatgattttgagagtggagagtggcaatacaaatcttttaatagatttatttttgataatctctgcgaagctgcgttgtctgcggaagagagagaaaaactgccagtagaccgccaatctgatttggcaaaggctgctagtaatctacgttttagcgacgataatgggcaagggagtgagcttgctgaaatacttctctatgggattatgagacgtcactatggagctctacctgtagttcccaaaatctattataaacagaattctcaggataatgctaaaggtgccgatagtgtacatattgtaattgaagaagatcgtggctttactttatggtatggtgaatctaaattctataataacttagagggggcaatgaaagctgccatcaagtctgtaaaagatacaatcactgaggaaaaacttaagaaggaaaatagcatcgttacacaaacgaaagatttagatatactggttaaaaaccaagaaatgctaagtaggattaaatcaatgctcagctttaacacttctcttgatgaattaaagcctatcttacatatccccattctccttttgcatgagtgccgtattactgcagaacagaagcaaatgaactcagagtataagaaatctatgcaatctaattatcaggagcaggcgcaaaagttctttcgggagttgaatgcaaagtgctccaaaacatttctttataaagagattacatttcatttaatactcgttcctgttccagacaaagaccaaattgtccgaaagtttacaaactacgctcgtgcaatcaaagataattag

SEQ ID NO: 59737 - DNA, 2142 bp, Tannerella sp. oral taxon BU063 isolate Cell 8/11
atggaaaatctctttgaacgatgtaaagaaatcaacgatatgcttgttcaaaatcaggaacagcaagctcgagattcattgattatccttttgcaggaaataaaggataataagatagaatacacacctctaatcaatcacctgattagggaagttggtctgtatccatatattgatgaaaaaacagcagattggcgagagcgttttgtttgtgaggcttttaagattgacgttggtggtggaaaagaagtcactttacaccgggagcagtctgctattctctctgctcttcttgatggcgaagatttagccattagtgctcccactagttttggaaagagttttattattgacgcctttcttgagataaagaggccaaatactgttgtcataattgtaccaactatagcacttacagatgaagctagacgacgtctctacccaaagttcagtagtatctataaaatcattacaacgacaggggttgagctgggagagaggaacttgtttatctttccacaagaacgagctcttcaatatgtaggagaaatagagcatatagaccttcttattgtagatgaattttacaaggcggggaaaataaaaggaaccactaagcctcttgatgaacgtgcagctcaattaattgaagctatttctcagcttgaaaaaaaagccacgcagagatattttcttgcgcctaatatatcagagttaaaaaacaacccttttacaaaggggatgcgttttgagaaaatagacttcaatacagtatacaccaagatcatcaaagtgtatgaaaaaatatcaaaggacaaaaaagaaaaagagcttcaaaagtttgaatttttggaaaatatactaagttcaacaagcgacaagtctattatatacgtaaattcacactctggaattcgaattgttgcaaagaggatgtcggatttttgcatggatactgaccaatgttttataaatcaattctccttgtggcttaaggagcattatggagcaagctacatgcttgtaaatcttgtcaggaaggggattggtatacatagtgggcagatacatagatctcttgcacaaatacaaatcaaattattcgaacaagaaaagggattgagaaatcttatttctacatcttctctcatcgaaggggtgaatacttccgctagaaacgtaattatatggtcaaataaaaacgcaaattcaagattagactatttcacatacaagaatatcatagggagaggtggtcgaatgtttaaacactttgtcggtgaggtttatcttatggaatgtcccccggcagagactactcctttattggagctcgactatccagaccctttattagagaggatagatcctgaagaatattcaggaaagcttactcctgagcaaatagcaaagatagaggagaatgaaacagaaatggatcaccttctagggaaaggaggctatcgtcaagtaataaaagaaacagcctcacaaggtgtatctaaaccaatattgatagatgctattaggtcaatgagggataatcccaatgagtggagagctaaactcccatgtttattgaacgcaaatgccgagagatggaagagcgtacttttccttacgatgcctttattaaggaagatgaagcatattcaaggaagaaatacgaagatagtgcattttatccagattctctctgatagttggagcttatcaatccccaatctattaaagcggctaggaccagacagtattactatcgacgagtattttgaattagagaagctgataagtttcgattttgtctctctgctgaatagtatcaacgcaataactaagcgaatattggatgccaatatagatatttctccatttatagcaaaagtgtcgaatgcttttcttccacctttagtgtttgaactagaagagtatggattacctcgaatgttgagtcgtaagattcaatcctcacaagtaatcgatttagaaaaagagggtgtatccatcaatggaattctttatgaatttcgaaatataggagaagatagaattataaaagtcgctcggctgtctaaggtggatagatttattctatctcatttttttgatggcataactccagtcccttcatcagccacatag

SEQ ID NO: 59738 - DNA, 897 bp, Peptoniphilus coxii
atgagtcataagcattcaaataatatagaaatcaataataaattgcatatttactatataagttttgatttacttgataatggctatggtcaagtaaaagacaaattttataatgaattatttgatgatattcctgcttttgcttttggaacagatgtaatgaataagaaaaaagatgaaataggcttggttccaactgtaagagaagctatgaagaaaatatattctattaaagaaattcaggaagctagtagagaatatttggactctacatctacagaagataaatatatcaaaagaggtgaatttggtgaattattattataccatcttttacacgagtattttggagcagatgcattgatttctaaaatatattttaaagatagcgctggtagtgtggcacatggatttgatgcagttcatgtagataccaataaaaaaattatatggctaggagaatccaaactatataaaaattcatctacagcaattaatgaacttgcaaacgatgtagtaaatcattttaatgttaattttctagatagtgaatttcaaattattacaaatagaatacacgactctaaaattgattgtgacgattatattttaaaattgttggatcctaatacgaaaactctcaataaattagcagatattaatgtatgtttgtttgctgcatttgaaagtaatagcttagtcaactttaataaagataatttcgaaaaaacattaaaggaagaagtagaaaaattagataagaaaatgaatactttattaagtcaacacccatgggcaaattatctaaatgtttatttgttggcatttcctttagatgataagagagaatttgtatcttctcttcatcaaaaattaaaaggagggcagcaaatatga

SEQ ID NO: 59739 - DNA, 2136 bp, Peptoniphilus coxii
atgaatgatagtgttaaatttaatgctgaatatttgaaagattttgaatataattggaattgtactaaatattatacttctattattgacaaaactgatgcaaggaaatttttgataaatgtactagaaaattgggatcaagttaatgatgatgctaaatccatatggttggatttgattgaaagagctggtttttatccttattatattgataaaattgaaagcattgaaaattataatcaatctttgcaatctagtgttcgtagtgctttttttaaatcagattttttaaatggtatatattttcatgagcaacaaaaggaaattgaaagggcagttagtttaaagaaaaatgttgcagttagtgctccaacgagttttggaaaaagtcttcttattgaagaattcgttgccagaaaacagtataataacattttaataattcaacctacacttgcattaattgatgaaacaagaaaaaacatgagtaaatatttaaattattacaacattgttataaacaccaaacaaaaagctactgataggaatatatttatattgacggcagaaagagttcttgaatatgtaggtttgcctaaaattgatttttttattgttgacgaattttataaagttagtaacttaagaaatgatgatagaatagatgctttaaatatttctataatgaaaataatggattataaacctcaagccttgtttttaacaccttgtgtaaattcactttcagacagatttattgaaagatataatgttgttttttttaagacagactattcattggttaatactaatataatagaagttcgtaaaaataatagaccgctgaaaagtaaccaaaaaaagaaagaattatttaaattacttaaagaactaaaagaaccaagtatagtgtatgtaaaatcaccaaatgaagcgtataaattagccaatgaatatataaattatttaaaacctactaattttgctaatagtaatttaccagtatttgaatggatggatgaaaatatatctgaaaaatggaaacttaaaaaacttatgatgaatggaattggagctcataatggggctttacctcgacatatagtgtcttctgaaattgaaatgtttaataatggaattctgtcaattttgtttgcaactgtgtcgttaatagaaggcgtgaacactgttgcaaagaatatcttaatatacagtcaaaataaaggaagtaatcctatcgatttttttgactttgctaatattaagggtagagcgggcagaatgggaaagtactatactggaaatgtttatttatttaatgaggaattgcaacctgaagaattttcgattgatgttccttttgttgatcaagctaatatatcagatgagatattattcagcatacctgatgaatatgttgaagataaagataggaggaaactgttggaatcagaaataccaggagatttacaggcgataattagaaaaaatctaatttctgtggaaggacagaagaaattatacaattatattagattaaatattggtaatttatcttatttaaagtggagtagaattccttcatatgaagaattatggaggacactttatttggcgtataaatatttagacaataatgatagtgaaaagtttgcaaagtctcaagctataatggcgttggatattattaataaatcattaaaggaaacaatttttaaaagggaagaattcttaagaaaaaaaagatcaaataagaattttcatgaacaagctattgaagacgttttaaagtttgttagaaatgatgcgaattataaaattccgaagttgctttcagtattggattctattcaaaaatatacttttgaaaagaatagcaatcgtaactatggagattatagcatattcaattcattattagagaatgggcaaataggtgaagattttagatttttgatagattttggagtgccatcatcaggaataaaaaaaatagaagttcaattcaaaaaagataataaaacatataatgataatgtggaaataataccatggttgagccaaaatattaaaattttgaaaaatatattactggactatgagtatgatctattaaaaaaagctttaaatttttaa

SEQ ID NO: 59740 - DNA, 825 bp, Desulfosporosinus acidiphilus SJ4
atgttagatgatttgacaaaagcaatcataaatactattcctgaatatgtctttgctgattatgaaaacccagaaattccccaaacggatgtagttgagaaattgagagaagctgcccattgtatatataaaattaaagattatgatttgatgcgtagatggcgtttaaataacgataaaaccgctttggaggagttaaaaaaatcgagcactgcacgacgaggtgaatttggagaattgcttcttcacctattattgcgcgattttaagaacacaattccacttgtttcaaaggtctattttaaagatgcagccggaatacctgcccatgggtttgattcagtacatatttccccagatgagaaaatactttggttaggggaaagcaagttttattcagaaagtaaaaggggcttacaagaattattatcggatttaaataatcattttaaaaaagattatttgaatgaacaattcattatcataaagaaaaatcttgacaataactctattccacaaagagatgaatggatcaaaatacttagtaattctaacagattgaaagataaaattaacattattaatatccctatgctttgtacctatccccatgatatatataaattatatgacgatatgaataacattgctgcgataacttatcatgaaacaaacattagagagttgaaggattactttgacatacaaaatcaacatcccttaaaaagtcaattgaatattacacttatgttatttccgattcgtaataaaaaagagcttgtaactgaattacatgctcgtctttggcatatgcaaaatatgtga

SEQ ID NO: 59741 - DNA, 2202 bp, Desulfosporosinus acidiphilus SJ4
ttggaagaactcatttcagaaatcaacacttctgaaaatatatcttctaatagaagcttttatttagctgaaaaatgttcaaacttattatccagtggctctacattagacgaacaagaggcgcgcagaattgttatccatattttaaacaattgggaaaaagtgtgccatgagacgtataatttttggacggacattattgaggctttgggtttttatccgtatttagctaaaaataaggataacctaatattagaatcctctgccgatataattcgacagcaatattttttgtcggattatttagagaatacatattttcataaagagcaaaagaagttatctactaatgttttttcagataataatgttgtcgcaagtgcaccaactagctttgggaaaagtttacttattgaagaaattgttgcttcccataaattccaaaacattgtaattatacagcctacccttgctttattagatgaaacaaggctgaaaatgcgtaaatatagtgatttttacaagataattgtaagaacttctcaaccagcttcagaagaaaaggggaatttatttcttttaactgcagaaagagttatggaatatgagccgttgcctaaaatagattttcttattgttgatgagttttataaacttagcctacgacgtattgatgatcgagcagacacccttaataatgcttttttgaaaatcactaatcataataattgtaagttctatttattgggaccaaatatcgatgacattacgccaggttttgcagaaaaatataacgccgtattctttaaatcaaatttttcattagttgattgcaatgtcgttaatttatatgagcaaattactccaactacatcagatagagagaacgacaaaaataagcttgctttgttatatcccttattagattctcttggaaatgaacagactcttatatattgttcatcccctaacagagcacgtaggtatgcaagaggttatttagattatttgatttctaaagggacagcaccacaaaatgatttatcacttattgaatggattcataagaatattgctgatgattggagtcttgcaaaagaattagagtataaagtagccgtccacgatggttcgttacagaaacatatcggggcctcaattattagatattttaataagggattattaaattgcatattctgtacttcaactattattgaaggagttaatacaagtgcaaaaaatgttattctttttgatgatcgaaaaggaggacgtcaaatagacttttttgattatagcaatattaaagggcgttctggcagactaatggagcattatgtaggaacaatatataattttgtacagccgcctaaacaacgccagattataattgacataccattttatgaacaaaatccacaaattatttctgatgagatactcatcaatattttaccggaagatattgaagatagaacccgagcacgttatgaagaattatatcagatcaaacacgaattattggatattattaagaaaaatggtgtttctgttaatggtcaaatgaatatatactatgctttagagcgtgatattgatgttcaatataataacatcgcatgggcacaactgcctaattgggaaaagatgttttatatacttagtttagcggaaaataatctttttgattttagtgataagcatggtgttttttctgtcaaacaattagttcgatacctagatatgtatagaaaaaagaaaaatttaatggttattgtggatgatatatatcaagggaaagttaaaaacgttaaatatatgacacctgagcgtaaactaaagtattatgacgactcaatagaacaagcatttcatctttatcgacattggtttcagtttactgttccgaaggcgtttcgagttgttgatagtttacagcgttttgtttgtacaaaacatagtagaagacctggttcttatagctattttgttcaacaactcgaaaatgattttattagagataatttatctattctaacagagtatggtattcctgcgagcgccgttagacaattagaaaaaaatgttccacccgacatagatgaagatgatgtatttgaatttattcgtaggaataaaaaaactttggcaagaaatctgcttaggtatgaattagaaaagatagatgaatgtttataa

SEQ ID NO: 59742 - DNA, 942 bp, Desulfosporosinus acidiphilus SJ4
atgatggcaacaagaaatttcgataagaagaatataattctacttaaaattaatgaatgcgaacttaattcatttcttgttgacatggatattgacgattttggcaaccccatatacatgctagatgaattatcgagagctattataaatactataccagaatatgtctttgctcattacgagaatcctagtattccccaaaatgacacagttgataagttgcgcgaggccgctaaatgtatttataagataaaagaatatgaactaatgagaaaatactacttagaacaagataaaagtgttctaaatgagatacaaaaatcaaagaatgcaacacgaggagagtttggagaattattattgcatttgattttaagggatttcaagggaacagtacctcttatatccaaagtgtttttcaaagattcacatggtgtccctgctcatgggtttgattctgtgcatatatcaccaaatgaaagcactctctggctaggcgaaagtaaattttacactgatggtaaaagaggtatcaaggaattactaggtgacttatcaaatcatttcaaaaaagattatttagacgaacagtttattattgttaagaaaaatcttgaaaacaacaatattccacaaagagatgaatggattaaaaagttatgttcctgtaataagctgagtgataaaatcaacattgtgaacattcctttgttatgtacatatacacatgatgtttataaactatactctgatatgaatgaccggaaagcaacagtttatcacgaaaataatatccggcaattaaagaaatattttgatgataataatgatcatcccctaaagagtcgcctaaatatagtactcttgcttttccctgttaaaagcaaaaaagaactaatgattaaactccatgaaagactgtggcatatgcaaagtatgtga

SEQ ID NO: 59743 - DNA, 2205 bp, Desulfosporosinus acidiphilus SJ4
atggaatctatatttaataaaattgacaattcgaagattcttgattatgaggatagctttgatatagccaatcaatgcgcaaaattactattttctgattcaagtgcagatcaaagtgaggttcgtagagttgttattcatgtgttggataactgggggaaggtatgtaaggacacttaccccttatgggcagatattattgaatccttaggattttacccttacattgaaaaaaacaaggagaatctttcacttagttcttttgctgaccatattaggggaaaatactatcagtctgaatttttgggcgatacatacctacataaagaacaaaaaaggctctctgattatattttgtcgggaaaaaatgttatcgctagtgctcctacaagctttggcaaaagcctattaatagaagaggtagtagcttcaaataagtataagaacattgtaattatacaacctacgcttgcattacttgatgagacccgattaaagatgctaaagtacaatggtcggtataaaatgattcttagaacatctcagccgccttctaaagacaagggaaatatttttttgcttacggctgaacgggtaatggaatacgaggaactcccacatattgactttttaataattgatgaattttataaattaagccttagaagagtagatgatcgagctaacaccttaaacaatgcgtttttaaaaattgtaaataaatataattgtaaattttattttcttggtccaaatattgatgctatttcgaatggttttgccgaaaaatataatgctgtattttataagtctgatttttcgttagttgactgcaatgtgattaatttatatagtaaaataaattggacaacatcagatcagcagaatgataaacagaaaataaaactattatgtaacctactggatagtcttaaagatgaacaaaccttaatatattgttctacccctgcaagagctaggcgatttgcgaaggcttacttagaccatcttatagaaagtagtgatttgactcaaaattcacttccattaatagaatggatagataagaatatctcgtcaaaatggagtttatcaaagggtctgcagcaaaaaatagctattcatgatggttcgttacaaaggcatattgcaacatctattattcggtattttaacgaaggaaagttgcgctgtattttttgcacttctactattatagaaggagttaatacaagtgcaaaaaacgtggttttgtttgacggtaaaaagggtggtaaggatattgacttctttgattatagcaatataaaaggtcgttcgggacgcttaatggtacattacataggtaaaatatttaatttctgtgtgcctcctgagaaggaaactatcgttattgatataccttttcatgagcaagaccctaacattattactgatgaaatccttgtcaatataccatctactgatgtaaaaaacgatacttttgaaaggtataaagagctccatagcattatgccagaattattagaaataattaaacgtaatggtgtttcaatttatgggcaaatgaacatctactatgcattagaaagagatattaatacttcgatgtattacaatattgcatggtctcaagctccaaattgggataaattatgttatgttttaggtcttgcggaaaagaatctgtttgattttgagagtagacatggtgtagtttcagtaaagcagcttgtaaggtatatcaatcagtatagaaagaataaaagtataatggacattgtagatgaaatttaccagagtaagttaaaaagagtaaagcaagtaacggatgagagaaagataaagtattttgatgaagccattgaacaggcttttcacatatataggcattggtttcagtttacagttccaaaggcactgagtgttgttgatagtctgcaaaggtttgtgtgtaaacgacaccgaaaacatgcgggctcttatagttacttcgtccaacagttagaaaatgattttattcgagaaaatctatctattcttgttgaacttggagtgccctctagcactataagatttctagaatcgaagattcctgaaactttagatgaggatggtgttattcaatatattaaaagtcaacaaagcgtattggcccggagcttgattgaatatgaaagagagaaactgaagcagtgcttttga

SEQ ID NO: 59744 - DNA, 894 bp, Chryseobacterium sp. BLS98
atgattgagaagaatattaaagatgattttttagatttattttataatgacttgtgcaatgaagcgcttgaaaataataatacattaaatctttttactttaaaggtcaaaaataacgcatttagctatgacgagcttataaatgaacttggaaacaaactttgttattttgctctctctcgtaagcaagttgatgagttaaaacaagcagataaattcaatgatcttgtaaaaaaggcaaaagctaaactgaaacatcatgctgataacgagggtgaacttggcgaaattttattatactgtttacttgaatctcatttaaatgctccaaaaatccttaccaaattggaattaaaaaccaattccaatgattatgtcaagggagctgatggtgtacaccttttaaagctctcagatacagactatcaaatcgttcttggtgaatcaaaacttaactctgatatcagtaaaggtgtatacgaggcttttgggtcaattagcaaatttctaaaatccacatcaaagttggagtttgaaattgacctaatcaatagtgaactcgttaaagaggcttatgatcagacaacttatgaaatgctaaaaaggatcataattccgagtgcaaaggaggatgatacatatctggattattccttcggaatatttttgggctttgatattcccattacagatgacgaaagcaaacttagtaattcagacttccgcaaaaatataagagagaagatcaagaaagaagtacttaaagcgaagaattcgttaaatcatcagctaaagaaaagcgactatacagggtatcagttttatatctatgtcattcctttctcagaccttcaaaataaaagaaaacatatcattgaaaaaatagttgagtga

SEQ ID NO: 59745 - DNA, 2553 bp, Chryseobacterium sp. BLS98
atgaaaattatcgataaactgactgaggatattttgcgagatgaatacttcaatgctttgtttaataaatgttctttgataactgcgcaaaacctgttcaaaaaatcaaacagggttcaatttacaacaaaagagttgagggacactttgcgttttgcagacattttatccaactctaaaaattctgatgcgagaaatagatcttatcaaattgttgcctctctgaatcaagattacaaagataacgaagtgtacagaacagtatcaaaagctatatttagtaaactaggtaattttccggcgattaattatttggaaaataaaaacaaaaatattgcacttctcccaatttttagggaaattgaaaccgaatctaaacgattgatacagcaggctccggatggaaacggaatgatttttacagacacgcaatttgagttatttaataagctgtccaaaagtaccgagtttagtttttccggaccgacttccatgggcaagtcttttatcatcaaatcttttatcaaaaaggtgataaagaacagtccaccagaaaatatcgtaatcattgtacccaccagagctcttatcaatcaatttttttctgatttaaaaaatgaacttcatgagcttctggacacttataaatataaaatctttattaattcaaatgtatctgatattttaactgaagaaaaatacaattatatttttgttttaaccccagaacggcttcttagctatttgtcacaagatacaaatcctccaataggctttttatttattgatgaagcacacaaattagcaaatgataaagatgcccgtagtgttacgacttattcggctattgaaaaagttcagaaaaagtatgggaatgttaaattgtatttttcttccccaaatgtttccaaccctgaaatatttttgagactgttcaatagggatatacaaaattcatttagaacaggagagtctcccgtatctcaaaatatttattttgttaaccttgagactaaagaggttgagtcttattccaataattcagttttaaagttgcaggacatacttgatgatagcaaggattattcaattacaaaatttatcaagtttattggagctgataaaaataatctcatctattgttattccaagaggaatacggtgaataaagcaattgagctttcaaagttacttccaagaattgagcagagtgaacttgttgagcaggcaataaaaaatattaaagaatacatccatccggaatattatttagttgattttatagaaaaaggagtggcatatcactatggaaaattgccccagttgataagaaatttgatcgaagatttataccaaaaggaagagatccgttatgtattttgtacttcaacattactggaaggagttaatatgcctacacagaatatttttattatagataatagaagtggttcgaaaacaactttgtcaccaattgatttttggaatctttctggaagggcaggaagattgacaagagagttagtgggaaatattttctgtgttcagtatgaggattttaaatgggttgacaaggatgttttgataagaaaggatattaaactgcagcctaccattctgactaagattgatcataatcttaaaaaaatcgaaaaggcacttaaaaatgaagagataaaatctggttctgaagtagagaaagaaatattaaaatatattgcgaatataattaaagttgacactttagaaactacagctaattataaaagtccaataattgataagttaattgaagataataagcaaaagctcatcgatttggcgaagcaagggattattaattttgagattccaaagtcgatcttgaagttcaatcaaactatcaattttgatattcaggaaagaatttacaaagctgtatcaaaatcaaaaaaaagtatattacctaacagtggagctataaaatatgagagtatccttaaagtattgatcgattttcacagattatattcgtgggataaaacagaaaagaagctggcaaatgtaaacagtttaaaatactacgcggtgctgatgaaccaatgggtccaggggttttctttaagccagataataagtcaatctatcgactacaatcatgataatggatatcaggtagaagttgattttagagtgtatgaagtatttgataagacaaatagaaggcatataaatgctctaattgagaagcttatcgatgacattgaatatgttcttcgctatattctagaaaagtatttcaatcattactatcaaattttggtggctattataggagagagcaaagccggagataattgggcaacactcttggaatatggaacacaaataccacaggtgatagctttgcagaatatcgggttgtctaggaatactgcaattaaaatttttagacaccatagaaagtccttgatattgaaagataataaactagttggtgtaaataaagcacttttactaaatgaatttagatcaacatctctagaatttgaagaaattaaaagaacactataa

SEQ ID NO: 59746 - DNA, 909 bp, Clostridium sp. HGF2
ttgagcagtattgatattaacacaacaattaaggccggaaccattgattctgtttttaaggaggttacgcattccgagagcctcggtttgcgcaatgctgctcaactgcgccttttccatttgaaacttgatggggatacatttacaaatgacggcttgtataagtgcttgaggcgtaatattggttattacgtttattccagaagtcggatagcaaaattcaaaagggaagatgacgaagccagcattaatcttgaggcaatgcaactggttaaggagcagtgtcagaaagcacctgaacactttggcaatatgctgggagagatacttctttatgctttttttgaagaaaagcttgaggcgcctaagatattcagcaagattgaacttgataccttgactactgacactatttatgatggcgttcatctgcttaaaattgatgacgagtctttccagatggtttttggaacatctaatgttgaaaatcaaattgatgcagcgattgataatgctttttcaaagatacaggcaggcctcaatcaaccgaagaaaggaattccattagttagtgaactgatatttgcacaaaatgccgattctgtgcttgcagataaattggaaaagattataacaccatctccggatgcaccagaagttgattcagcatatggaatatttctttgttattctttaggactttcaaaagaaaatcgtacagttcaggagtataagaatttagtggagcaaaagatggtaagcgacataaaatatagtttgcctaaaattaaaaaatatattactgattgcggattgtcgtcacgttcattttatatctatgcggtaccactggatgatgcaacagaagataagacgacaatcatgaaaaaagtgactggaggtgtctaa

SEQ ID NO: 59747 - DNA, 2649 bp, Clostridium sp. HGF2
atgaaaaacagcgaaatcaccttcggtgaagtattctttgaaaatatagaaaataatgagtacttgattagattgtacgaagatattttgtataattatgccattaaagtgtttggttataatagaagacttaaaaagaatttgcccatcaacgatgcactgcgttttgcagatattctttcaaaatcaaatcacagtacaaaggctgacaaacataaggtatgggcacaggaaatcgtgaccatgctaaattttatatatcctgataatgaagatgtttcttatgtagctggttcagtactgacaatcgtaggaaattatcagggacgtaatatcataaagtctgaatttgacggttcagatgctatggaaaaactttttcttgaatataagaagaagttctacacaattccgtcagcaccagataagcaatttatggttgctcaaaagtctgcttatgaccattttgaaaattcatattatagctattcagcgcctacatctatgggaaagtcgttcataatgaggatgttcattaaagaagaaatcctaagtgattgtaaacataatttcgcaattgttgtaccaactaaagcgctgataaatgaaatcagaattaaaattaccaaagaggatttaggtgaaattttgcatcaaaagaactaccatgtagttactgccgcaggtgatgcagcgctatctaattggaaagataaagagcgaaattatatctttgttatgacaccggagcgcatgctgtatctaatgataaatgagccggatattcaaattgattatctgtttgtagatgaggctcataaaattacaggtgcagataaaagaagtcctttctattatcaagttgtgaatatgctgtccgaaagaatgcataggccgcatataatctttgcatcacctaatgtgcctaatcctgaggtgtttttagatactattccagatgtgcagtctgcgaatgaacataaattgcagacatcattttctccggtttcacaaccgaaatttattattaatctgattaacagagaagtaagcatttataacgagcacaatgacagcaatattcctattacatcgattgcacttgacgatgctgatttaatagacgttttgcttagatttgaaaaagatgaaatgaagaaggaaagaccatttattgtatattttccttcaacgagaaaaacggtagttgctgcacgtgattttggtgcaaatcgcattcctaaaacaaattgtcaagaactgatggagctcgctaaagacataaagaatgaagtccacggagattactacctggcagacttggtttctaaaggagttgcgtaccatattggttatcttccagcttcaattcgtcaacgaatagaagagttgtttaaagctggaaagataacagctttattctgtacaagtactcttgttgaaggtgtgaatcttccagcagataatctttttattaccgattatagaaacggacagaaggatatgcgacctatagatttcagaaatcttgtgggtagagtaggaagattggaatttaacctttatggaaatgtgtttttagttgcgacttcagaaaaagcgtcagataagttcgaaacattactttcgaagccggttgataaacaaacgctttctattgagaagggattaaccaaacctcagaagcaaaacgtaatcaacgttttattgcaaggagatgttgaatttcctaaacatccgcagaagcagacagaagattcatatgacttaatgagaaagtttgcgattattcttttgaatgacattatggctaatagagagagtcgtgttcgtaaagaatttcaaaaggttatgaaccctggtgacgaggatttgatcaaggctaaattttctaaccggcaacagcacatgagggatagtgatattacagtatctgttgatcagagcgaatcgttatatgaggcgatagcgaataacggtttagagtttccggcaattgacagtaatggacggtataatgccgatgaactatgggctttcttattgaggattgctaagatttttaaatggaaatcttacgagtcatatacacttggcgcccctggaaatgacccagacaaatatagttcattatcttattatagagtaattcttggacagtgggtttccggacatggactacaacagattatttcggaggccataagatataagaaaaataatccacatgaagctatgtttattgatggcaaaaaagtggattataaagaaggttcagagcataacaatattattatttccgaagtattatctgtgattgataaaataatcctgtttaagctttcaaactattttttgaaaatatcaaatgcttataaggatattaagggaaagccagcaccaaatgattggtacgagtttgttgagtatggttcaacaaataagcgttcaattgaaattcaaaaatatggcttttcaagagaatctgctctgtacatattacaacacgaagcagaatacgtttataaatcagaaacagagctaaaactcaagaaatcgctattggaatgtcttaacaagggtgttaaagcagatgctgagttggcttggtataatacaccggaactgtttctggaggaggatgcctaa

SEQ ID NO: 59748 - DNA, 930 bp, Methylobacterium sp. AMS5
atgactagcgtaaagtttgacacgcttatagacgagtctttgtcaaaaatcacaactatttcacaacttcaaaacctattgaataaccgactactgagtcttgcaaatgacttcgaagacggtaaatggagatacaataggtttcagagctatttatgggataatattgcccaaactgctctgtcagagcaagagcgcgcagctttgtacgaccagagtcattccagtttagtagcagccgcacagaacttgagactgacggacaaagatgaaatcggccaagggagtgaaatcgcagaagtctttctctacggattgatgaaaaatcactacaacgcgctacccgttgtccccaaaattttctacaaacaaaatgccaaagataatgcaaagggagctgatagcgtacatatcgttcttaatgcaaacgaagacgacttcactctgtggtttggtgaggctaaattctacaattccattgctgactctcggctagattctatagttacttcggtatataccagcttaggcactgaaaaattgaaaaaagaaaattcgataataaccaatgtgtcagacatcaatcatctagatatacctactgccctgagagacaaaattaaggcctcattgagcaatcaaatttcaatcgatctgctaaaacctcgaattcatgtgccgattctaatattgcacgaatgcacaaaaactgcaggttgcaatattctttccctggagtacaaaaaatcaattgtagctcatcatacagagagagctgggtcttattttgtaaaacaagcgtcaaaattaacaactctacacatgtacgacaaaatcaactttcatattatcttgttccccgttccaaacaaaaaacttatcgttgacgcatttactagcacagctgctttctacaaaggggtcgtataa

SEQ ID NO: 59749 - DNA, 2121 bp, Methylobacterium sp. AMS5
atggacgtatttgacgtctgttccgaaataaacgatctactcacggaaggaaatgaccttgcagctcgcaatctattaataaaactccttagcacaattgataagcaaaaagaaaattatccacaggtcctaaaccagctgattcgatcgactggactgttcccttatatacagcttgagaatgcatcatgggaccaaaagtttgtccataaggcattcgccgtcgacgtggggaaccgtactgcgactcttcaccgtgaacaatcatccgttttatccagactactcggcggcaaaagcatcgcggtaagcgcgcctacaagcttcggaaaaagctttataatcgatgcatttattgcagcaaaacgcccaaatatagttgttattattgttccgaccatcgccttaatggatgaaacccgacgtcgtttgtataagaagttttcgcgcgaatataatatcatcactgttactgatacccctcttgagcaacgcaatattctaatattccctcaagagcgagcattcggatatgcggataaattgcctaatatagaccttcttgttatagacgaattttacaaggcaagtgttgcgcacgataaggaacgcgcaccatctcttatcaaagctattctaaaactttcccgtaatgccaaacagagatactatcttgctccaaatataaaaaagcttgcggacaatgttttcacgcgggacatggaatttattgagctcctcgattttaacactgtttttctagaaaagcatgaccttcataaagagatcaaaggagacgctggccggaaaaaagatgcgctactggaaattatatcgaaaagaactgagaaaaccctaatttacgcaggatcatactcagaaatagataagatatcggagctggttatcaataatatggacgtaatcgacagaccacacacaacacacttcgcgcactggcttcgcgtgaactatcaatccgagtggtcggtggcagatctcgcggagcggggagtcggggttcataacgggcgaatgcaccgctgcctgagtcaactccaaatacgtctcttcgagcatgaaaaaggatttgatagtattgcctcaacttcttcgatcattgagggagttaacacgtcagcgcagaatgtaatagtctggaagagcaaacttggacgcaataatctgaaggattttacttacaaaaatataattggccgcggcggtcgaatgtttaagcattttattggccacatttacttacttgatgctcctcccgtcgaagaaaatactcagctcgacctttcatttccagatacaattctaggaagtcttgatgaaaaccaagataaagacaaacttactgaaaagcaaatagaaaggatagttgaatacaaaaatcagatgtcggatattattgggggagaaaattttgcacttttgaggaagaaaaatgttttacaagatagtgattcagatttcttgctgactctggcgagaaatctaaaatctaacccgcaggattggcgcggatttggatatttgaattctgacaatcccgccgattgggaaagaatgctctataaagttgttggccttaagccgtcagcatgggattcatcttggtcaaatgttgtttcagccaccaaatctttatcttttaattggagtatggacatacctcaaatattaagcatgctttctcctcacggtatcgatattgaagacttcttccagcttgagcgcacaataagttttaaactagcggctctgttaaatgatgttaatgagctgcataaaatcattgtaaacccatcgatcgacattgggggatttgttggaaaacttagccatgcttttctacctccagctgtttaccatcttgaagagtatggtctgccacgaatgatctccaagaaaattcatctttctgggcttgtaaatttcacaagcgatgaagttgaccttcgtggtgcactcaaaatatttcgagcaatcggattagatgggatactcaagactgatggcttgagcaaatttgataggtacgtaattagattcttttttgatggaatacttcctgaaaatccaccggattttgctgtgctggatcagaaatag

SEQ ID NO: 59750 - DNA, 888 bp, Cellulophaga geojensis KL-A
atgatagaaacaaatgtcaaaaacatctttttagacctgttctatcacgatatagaaaatttagaattagccaaatcaaataaggttaatgtctttacattaaaagtgaaaaacaatgcatttgcatatgatgaacttgtgaagctcatatcaaaccaactctaccattttgcattatcaagaacagaggttcaaaaactaattgatgctaaggaatatgcaacactagtttctaaggcacaagataagcttagacgttattcatcaaatgaaggagaactaggtgaaattttgctttattgtttattagaatcacatttaaatgcacctaaaattctaacaaaattagaaattaaaactgcaaaaaacgattatgtaaaaggagctgacggtgttcacttgttaaaggtaacagaaacagattatcaattaatatttggagagtcaaaacttaattcaaatttaaaaacaggaatatatgaggcatttggctcactatctaaacttttaagtgaaaataaaattgaatttgaaattggtttagtaaatagtcaattaatcaaggaaacagctaatcctgaattatatgaatttcttaaaaatgtaattattccaaatgctcgtgagaataaaataagtactgattattcttttggtatatttttaggttatgatgttggaataacggaagaagaaagtaataaatcaaatagtgaatttagaactcatatcagacagaaaattaagcaagaagtagaaaatttaattgattcaataaattttcaaataaacaaatcagaatttactggctataattttcatttgtatattatacctttttcaaatttagcagagaaaagaaaagaaatcattcaacagttaacttaa

SEQ ID NO: 59751 - DNA, 2574 bp, Cellulophaga geojensis KL-A
atgaccataatagaaaagttaacaaaagatgttttgaatgatgaatatttcaagttaatatttagtaaatgttctttaatatcagcagaaaataacttaaatattgagctctctgacaatattttgactaataaagaattaacagatgctttaaggttctctgatatcctctctaattcaaaaaattcagaagcacggaataaagcatatcaaataataacgtacttaaatcatcaatttaaaaataatgagatttacagaactgtttccaaagctgtttattcaaaattgggaaattttccagctattaactatttaactaactacaatgcaaatattgcaacattgcctttttttagaagcatagaggttgaggcaaaaaaagtcattcaaaaagttcctgattcagaaaatttcgtttttacagattcgcagtttgagttatattcgcaactaagcaacacacttgaatatagtttttctggaccaacgtcaatgggaaaatcatttattatcaaagcttttataaaaaaagtaatgagaaatagtcctcctgaaaacttagtaattattgttccaacaagagctttgataaatcaatttacacttgacttaaaagacgaaataagagaactttctgaacaatataaatatcgcattcttacaaattcgaatgtgaatggtttcataggtgatgaacctcataattacattctaatattgacaccagaaagacttattagctatttatcacaagataataatccaccaattgggtttgtatttgtggatgaagcacacaaattagctaatgaaaaagattcaagaagtgtaacaacctatacagcaatagaaaaaacaattaaaaagtatggtaacataaaattgtatttttcttctccaaatgtatctaatcctgaagttttcctcaaactatttgaccgaaataaaccaaataacacatttaaaacaaacgaatctccagtttcacaaaatttgttttttatagatttattgagtaaaaatgttgaattgatacaaaaagacaataatgtcaatattgaaaactcaaatttatttcaagtagttaattctacaactacacttattcaacatttaggcttcgataaaaacaacttgatttactgtaacagtaagtctaaaactatttttgaagcgaatgagttttcaaaaatagttggtaaatttcaattgagcgaagctttaaaaaaagcaataaaacaaattaaagaatatattcatccgcaatactacttagctaatctattagaacataaagttgcttttcattatggaaaacttcctcaattaataagaaatcttgttgaagatttgtataagaaagaggaaatacaaaatgttttttgcacttcaacattacttgaaggtgtaaatatgcctactcagaatatttttattttaaatggaaaaaatggtcgtaaacctttatcacaaatagatttttggaatttatctggaagagcaggcagattatctaaagaactctatggaaatatcttttgtgttcaacattcggattggttatgggaaaataaagagatattgaacaaaactgagataattttaaaaccaactgttttaactaaaattgatagaaacttacgaaaaatagaaagtatacttaaaaaccaaaaaataacaggatcaaaagaagaacaagcaatactaagatatatcgcgaatattataagtgtagatactctagagataaaatcaaattataagagtccattaatagagaaactgattgaaaagaaaaaagataaaataattgaacttgcaaattctaaagttaaagattttgaaataccatcatacattctaaattcaaatcaatcaatcaacttaactattcaaaacaaagtttttaatcttataaaaaaagcacataaacaaggtaaaaacataaaacttattagtaatcatataaattacgaaatatgccttgacacacttaaaaacctatacattttgtatgaatgggataaagcagaaaaaaaacttaataacgaaaaaagcctgaaatattatgctctattaatgaaccaatggattaatggttttggattaaatcaaataattaaaatgtcaatagaacattatgaaaacaacagaagtttaattcatttaggttacattgataataaacctaattttattcaatatgagaaaggcaacgtagatcacatcaatgccttaatagaaaaaattatagaagatatagaatatgttcttagattcttgtttgaaaaatattttaatcattattaccaagttatttctaatattttaggagaagattccgcgggtgaaaattgggcttctttacttgaatatggaacacaaaacagaattgctatagcacttcaaaacattggtctttcaagacatacagctttagctatttatagaaaatgtaggcgcgctcttaatgtagaagaagacaaacttaaaagtataaataaaaatttaatattatcagagtttaaaaacggaacacttgaatatgacgaaataaacagaattctttaa

SEQ ID NO: 59752 - DNA, 909 bp, Porphyromonas sp. KLE 1280
atgatgaagactaagtttaccttaataattgatgatatacttagagattttctccctggagataagtttctattgagctatctgaatgatttcgagggtaatgagtggaggtatgggcatttcgtgagcttcattcttgataacctttgtgagactgctctctcaaagatggaacgcgataagttacctacttcgccaatgtcggccatgagtaaggctgctaagaatttgcgcatttctgatgaactagaaaaaagtacatctggattaggtagtgagttggccgaaatcctcttgtatggagtaatgcgtagtcactataaggcccttccggtagtccctaaaatttattacaagcagaatgttcttgataatgcgaagggcgcagatagcgtccatatagttattgaaaatgatgggcgtttttctctgtggtatggcgaggctaaattctatacagacctggaagaggctatgagatctgctgtatcttcggttaaggatacgatttcggatgataagttgcgtaaagagaatagccttgtcacttcaatgagtgacatggagaagttagtcctagacaaagagctttttaatcgtataaatactatgctaagttcggatacctctcttgatcggataaagcccatcttgcatatccccattttgctattacatgaatgtcaaatcacagcaggattcagtcagatgactccagcatattgcagtcaaatgaagtcgttctatcaaagaaaagcacatgcattttttgaaaggctccatcagaaatgtgttgatgtgaatggatatgagaagattacattccatctgattcccttccccgttccgagtaagcctcgtgtagtagagaagttttataagaaggcgaaggctttaagagaagattaa

SEQ ID NO: 59753 - DNA, 2139 bp, Porphyromonas sp. KLE 1280
atgatagacgtttttgataattgcaagcagattaatgacctcctatttcaaggtaaagagcaggaggcgcgagatgccttgattattttacttcaagagctgaaggataatcagattgaatataccccattagtcaatcatctaataagagaagtcggattatatctctacatagataccacgacttcagattggcaagagcggattgtttttgaggcatttaaggttgatgctggatgtggagatgaaataactcttcaccgagaacaatctgcggttctatctgccctcctgaaaggtgaagatttggctataagtgctccaacaagctttggaaagagcttcataatagatgcatttgttgctatgaagcagcccaataatgttgttatcatagttcctacactagcactgacagatgaaacaagaagacgcctatatcgtaagtttggaaaagattataaggtgatcacaactacaggggaggagctgggggagaagaatttgtttgtgttccctcaagaacgagctcttatgtatgtagatgagattgctcatatagacctcctcattgtagatgagttttataaggcggggacgatgcatgggaacattaatgctttggatgggcgtgccacacaattaatcgaagctatttcgcttctagggagaaaggcttctcagaaatactttcttgctcctaatatctcggaactaaagggtagttcacttacatcaggaatgcgttttatgaaggtagatttcaatacagtatatacgcacgttgaaaagacgtatgatagtatatctggagataaaaaggaaaaggaaactcagaagtttgcacacttaaaacgtatactagagactgtggaaggaaagtctctcatatatgtgaactctcattcaagccttcagaaggtcacagagaagattcttgagtttgatatcgatatgaagacctgcggttttcttggcctattttctctgtggcttaaggaacattacgagaagagttatgtgcttgctcatcttgtgagaagaggagttgggatccatagtggacggttacatagggctttagctcaaatacaaattaagttatttgagcaagaaggaggcctgaaaaatcttgtatctacgtcttctttaattgaaggtgtaaacacttctgcaaggaatgtaattgtatggtctaataagaattcaaacactaagtacgactacttcacgtacaagaatatagttggaagaagtggacgtatgttcaagcattttgtaggagaggtgtatcttttggaggcgccccctcaagaaacgttcccttgtttagagcttgattatccagatgtccttttagaaagaatcgatccacaagattactcgggccaacttacatctgaacaaattgcaagaataaagcagaatgaggaggagatggatgctatcctaggacagggtgaatatcgtaaaattatgaaagagatagcttcctatggtgtctccaaggcagtattggaagatatcattgaagagatgaaggggcatactggtgaatggaatagtaagcttcgtggattgttagactctaatcccaagaggtggggtaacccattgtatcttatgatgcctcttttaaggaaggtgaagcatttcaaaagacgagataaagccatcgtacattttattcaagctctatctagaagctggactcaatcaattcctgagattttgggaaaagtcgctgttgacggtattaagattgagattgaggagtattttgatttggagagaatggtaagttttgattttatttcattgctgcatagtatcaatgctgtggcaaaaagagtgttaccttcgaatgtagatatatctcctttcatagcgaaggcttctaatgcatttcttccgcctctagtgtttgtcttggaggagtttggtctacccagaatgctaagtcgtaagattcaaaatacgggaatactagacttggaaagaaatgatatttcaatcgatgaggttttggatgaattcaaattgatcggggagaagaaaattattgagattgccgatctttccgaggtagatcagttcattttatctaacttctttgagggaataacgtctactccttaa

SEQ ID NO: 59754 - DNA, 942 bp, Peptococcaceae bacterium CEB3
atgatgcaaaaaaagacgtttgacaagaaaaacataatacttctcaaagttgaagaagatgatctgaattcttttctaattaatatggacattgacgataatggaaatccattatatcaattggatgatttgtcgagagctattataaatactatccctgaatatgtgtttgcaaattacgaggatcaagaaattccacagactgattctgttgaaaaacttcgtgaagcagctcgaggtatttacaaaatcaaagactatgatttaatgcgtcgctggtatttagataacgaacaagcagcatatgatgaattaaagaataccggcagctcacggcgtggtgagtttggagaactattattacacttgttattgcgtgatttcaacggcaccattccgcttgtttcaaaagtgtatttcaaagatgctgctggtgttccagcgcacggttttgacgctgtgcacattactccagacgatcaaatattatggttgggtgaaagtaagttttacacagatagcaaacgtggtattcgtgaattgcttgctgatctttcctctcattttaagagagaatacttggacgaacaatttcttatcataaagaaaaatttacagaataattctattccgcaacgagatgaatggattgaaacccttaacggatgtaccaagttaagggatcggctgcaaatgataaatatcccgatgttatgcacataccctcatgatatttatacatgcttttctgatatggatgatgcagaggccatatcttatcatgaagcaaatgttcgtgaactcaaatcgtattttgccacccagaatacgcatcctttgaaaagccaattgaacgtaattttattgctctttcccattcgtgacaaaaaagaactcgtcaccaagctacatgaacgtctttggcatatgcagaatatgtga

SEQ ID NO: 59755 - DNA, 2199 bp, Peptococcaceae bacterium CEB3
atggacgatattatctcaatcattgatatcaacgaaagtgtttcatatgaacaaagttttgatatcgctcagcgttgttcaaagttgctttcaagcggtaacgaagagcaagaagctcttgcccgaagagttgcaattcacattcttaataactgggcaaaaatccccagagaaacttattcgctatggaccgatatagttgaagcaatagggttttatccgtacttagaaaaacacaaagcaacaatgcaggttcaatcattgtccgatgaaatacggcaaaagagttttttgtctcattttttgagtgaaacatatttgcaccgagagcagaagaaactatcggattatattatggcgggtaaaaatgtaattgcaagtgcgccaaccagctttggaaaaagtctattaatagaagaaatcgtcgcatcggggaaatataaaagtattgttattattcaaccaacgcttgcgctgttagatgaaacacgacttaaattaaagaaatatagtgaccgttataaaattatcgttagaacgtcacaaccagccgttaaggataaaggaaacctttttctccttactgctgaacgtgttatggaatataatgcgcttcctccaatcgagttgcttattattgacgagttttataaattaagcctaaaacgaattgacgggcgagctaatacattgaataatgcctttttgaaaatagtaggaaactgtaactcgagcttctattttttaggtccaaatatcgatgggattaccactggctttgctgaaaaatataatgccgttttctataaatcagatttctcattagttgattgcaacgtaattgatatgacatccaaaatagaccacagtaaaacaggcaaagcattggaagaagaaaaaatcacacatctttgttcactacttgattcgctcaaagatgagcaaacgctggtttactgtgctactcctgcacgcgccagacgtttcgcaaaatcctatcttgattatttagtttccaagggtgagtcgtctaccataaacctgccattagtagaatggatcgatagcaatatttccacagagtggagtttatctgaagaattacgtcacggcatttcaatccatgacggttctttgcaaaagcatatcgggacttcgattataaaatactttaatgatggtttactgcattgcattttctgcacatctactatcattgagggtgttaatacgagtgcaaaaaatgtcatcctctttgacgggaaaaaaggtggaaaagacattgatttctttgattacagcaacataaagggacgatcaggtcggttaatggaacactacgttggaaatatttataatttcgtggcaccacctccaaaagaagctgtgttgattgacattcctttttttgaacaaaatccggtttcggatgaaatacttgttaatatcccagagagcgatatacatgacgatatgctatccagataccaagagttgcatcaaacccaatctgaattattggacatcatcgagcgtaatggtgtttcaatagacgggcagttaaatatatattatcaactggaacaggacgtaaatacttccaagtataatgatattgcatgggctcaaatgcctaattggaatgagatgcaatatatattggggttagcggagaatgaattatttcacattgaccatcacggtattagctctgtcagacagttggcactgtatttgaatcagtacaggacaagtaaaaacattatgtacattgtcaaagacatctacggacataaaatgagcagtgttcagtcaagtaccggagagaaaaactcattaaaatactacgacgaagcaattgaacaggcttttcatatttatcgtcattggtttcaatttacagttccaaaggtatttcgagtgattgatagcttgcaaagatatgtatgtgaaaagcatggccgtagagccggttcatacagctattttgttcaacaattggaaaatgattttcttcgcgaaaatctttcgattcttattgagtttggtatccctgcaagtgcagttcggcagttagaggtggaaatcccaaagggaatgacggaagatgagataatccagtttatcaagaaacacaagaaccgtttaacggcatcgtggttgcagtacgaaaaagacaagctcgatcaatgcttatga

SEQ ID NO: 59756 - DNA, 912 bp, Corynebacterium epidermidicanis
atgaacacagctctcccgaccacactgcccaatatcgatcttgcctcggtattcacagaagtaactcttgatgagcaacttcagctcaacagtgatggttcagggctgcgcttatttcatctccaagtacgcaacaacaaattcgattacgcgagcctagaagatctcctcatgaataggcttgggcattttgtgctctccagagcccagattgcccaatacgaaatagaaggaaaccttgggtcgattggactacaggcgtcgcgttttctgcggcggcccgagaaccaagaacttaaggaaaatgcgctcggtaacttcatgctgcacgcgtttctagaattggcgttgggtgctccaaaactgctgagcaaaatagaaattgctgaggtttcaggaaccagacagattctctgtgacgccgtccatttgcttgaccaatcaacgggatcgaaactgcgagcaaaccttatttttggcgcttcgaacgtagtgggagacttcggagataccgtagacctagcgctagaacgggcggtggcaatcgctgaaaacgaggatgcggagtgcaagctggtagatcaaaacattctccagcagcgtttcgaacctaagactaccgagtaccttaagaacctcttactcccaactgcggctaacagcgccaactacgacgttggatttggtttgtttcttgcctacgacctaggccttgatccaacgctctaccagcgtgaggaatttccacaggtgatggagcaaaaactcaaacaggatctacgcgcacacatcggtcacattcgtgacgagatccaaaaccgcggcttaggaatctaccctttctacatttacaccctgccaatgaatgacgctgaatctgaccgcgtcaccatcactgaggcggtgctgtaa

SEQ ID NO: 59757 - DNA, 2637 bp, Corynebacterium epidermidicanis
atgacacagaacaaaacaggcacactgggcgacgaaattttcgcaaacatcgagaacaacgaataccttatcgcgctctacgaacagcttctcgagcactacggccacaatacgcttggcaaggaatcactgagacttggtgataagcagctcgatgatgtactccgatttgctgacttactgtcaaaatccactcatccagaacgccgtgaatatcaccaggtgtgggctcaggaaatcgcagtgttatgcatggaactctactgcgacaacccaatcagctcaccatatctaacctccattttccaagctgtgggcaactaccaagctcttggaagactagagaaccaagctctgcctgacctctttgagcaggcctttaacgagtttcaatctgactaccttacggtgccaggcgaagaggacaagaaattcttcgcaccgcaaaagcgcgccttcgacgctttcaagaatgatgccttcagcttttctgcacccacatcattgggcaaatccttcctgatgcgcaccttcatcaaagaccgcatgctcaaaggaggcaaggaaaacttcgcaattctcgtgcccaccaaggcacttatcaacgaaatgcggtcgcggttcatcaacgaactgggtgaagaactcgaagccaagaactatcgcgtcgtagcctcaggtggggacatcgttcttgaaggcgagcacaacttcatttttgtattgactccagaacggatgctttaccttctgatcaacaagcctgacacccacctcgattatctctttgtggatgaagctcacaagctctcaggcaagagcaagcgagccccgttttattaccaggtcactacgatgctgctccagcgtcctgagccgccgaggttcattttcgcatcacccaatatcccaaacccaggagcattcctttcattgctccagtctgcccctgaaagtagcgatgctatgcggacgaggttttcgcccgtatcgcaattcaagttctttgtcgaccttcaaactcaaactgtctccgggtacaaccaccggacgaaacaaacacagcatctttctactctgaatggtatttcaagcgttgaagattacttgttgcacttacgtcaactttcgttagaaaagaagcgcgagcagaccatcgtctatcacgggtcgaaacaaaaggccgttgaaaacgcgcgccatttcgcctcactactaccgaaaatccacgacgatgatcttcaaactctcgcagctgacattcgccgtgaagtccatgactcctacttcttggcagagctcattgaaaaaggcgtcgcctaccatgtaggacatctgccagcttctgtgcggctgcgggttgaggagcttttccgcgaaggtaaaatccacacaatcttctgcaccagcactctacttgaaggcgtgaacctaccagccgacaacctagttgtcacaagccacaaaaatggtcgcagcaacctcaatgagattgatttcaataacctgataggccgagtaggtcgcattgaattcaatctctttggcaacatctactttgtgatgggtgaaggattcagcgccaaaagcactgtcgagaaactgctcaagactgatgtgcctaaccaacagcttgcagtaagcgaagccagccttccaaacaaaatcaaagaagccatcgtgtgcgcgctcaaggaaggacgcatgcctgaacccactgacctgggtaagggagagcaagcagaaatggctcgtaccttttcaatcattcttctgcgcgaccttaccgcaggaagagagagcctagttacgcgatccttccaggaactattaacccctgatactagagcgaggattttagaaaaattccgtgactcctaccaatcgcaacaggatgacgacattaacgtttctgttgatcaacatgaatcgctagaagctgctgttaaggcaggtctgagatttccccatattgatagagacacaggccgcccgaattacgacgatactctggggtttcttcaacgactggcacgtatttttaagtgggacaaatatgagagcgccactatcggtcgaacaaataattcagggttcacctcattgcgctggtacgcagtaattcttatccagtggatcgaaggtaacggcctgaacaggattctgaaggaatctattgactatcagcgcaagaaccccgataagttttgggttaactacaggcaggtgcgatatttggatacgcctttacacaagaacatcgtgtgcaacgatacccttgaagccattgagaacatcatcctgttcagcttcgccaactactttctgcgagtctcaaacgaaatcaagaagcaagagggcaaggaagtgattgagaatgactggtatgagtatgtcgagtacggtactaccaataccagcactatcacgcttcagcgcatggggtttacgagagaatcagccacatggattagaaagcatcatgctggcaactacatgtttcaagataaggaaacgggtagcacctacctcaacccggcgctcctggatgctgagaacctcagtgttcgccgtgaagccaacgagattaagttcaacgtcccgaagtcattcggcatgccttatttcctctggtag

SEQ ID NO: 59758 - DNA, 942 bp, Bacteroides sp. HPS0048; identical to SEQ ID NO: 59032

SEQ ID NO: 59759 - DNA, 2073 bp, Bacteroides sp. HPS0048
atgatgcagacgaatgatatatataatacatgtttagatataagtaatgttctaaatgctggtgatataagtaatgcaagatccaaagtaattacattacttcatgagattaatggtactaacaataattcatatatggaattagtcaaccatcttattcgtgaagtggggcttttaccgtatattgatacatatactgcatcttgggaagatcggtttgtatgtgaagtttttaaagttaatattggagaaagaaaaccttgtgtcttacatactgctcaatcacaggtattaaagaagttattagaagggaaaagcgttgcggtgagtgctcctacaagttttggtaaaagttttgttattgatgcatttattgcgattaaacaaccaattaatgttgtaatattagtacctacggttgctcttgcagatgaaacaagaagacgaatttgccgaaaattctctcatcaatataaaataattacaacaacagatgtagaacttgcggagaaaaacatattggtatttccgcaagaaagagcttttgcctatatagataaacttccttcaattgatattctaatcgttgatgagttttataaggcaagtacaaattttgatcttgaaagaagctccactttactcagttcaatggtagaactcggaaagaaagctaaacaaagatattatcttgccccaaatatccatgaaatagaagaaaatgtattcactgaagggatgacatttctgcgtatggattttaagaccgttgtaacgcatgcatggcggttatataaaagcagaccaaagaatgaagataaacagagttttaagacacgtaaacttattgaattaataaatacaggtataggtaaagctttgatatataccggcacatataagggaattgaagaagtaacaacaattcttaacagaaatttatataataaagactctgaactgcttgctaatttttctgattggctggaatgcaattatggagaaaagtatattcttaaagatttagtcaaacatggtattggtattcataatggtcagctacatcgttctcttagtcaaattcaaataaaactatttgaagaacagaatgggttagattatttggtatcgacctcgtctataattgaaggagtaaatactcaagcagagagtgtcgttttatggtcaaataagaacggggctcataagattgattattttacctttcgcaacatcattggacgcgcaggcagaatgtttcgttattttgtaggtcgtgtctatatgcttgaagagccaccaagtcaagaaaatactaaattgagattagagtttcctgatgatgtagtaaaaaaacttgatggaaatgaccccggtataaaattgaataatgaacaatatgtaaaaattcaacgatatcaagatgaaatgatagaacttcttggaacggatatttggcatagaattgaaagaataccacaaatcagaagttgtaaaccatcaatgttaaagataattgcggaaaaattgaaaactgattccaattggccaacaaattgcgatgctttacaaaacaataatacatgggaatggagggatgctttaggagatatcatagaaattttggaatatcatcgaaaaggacatttacggtattatgcatgtgcatgtagtaatggatggaaaatgactataaaagagctatataacacagtaaaagattatggtattacatatgaggatatatttacatttgaaagatatgtatcctttaatctctcatctattattgcggtaattaatattatacgtcaagaactttatcctaattcctcaaatatcgccaattttgtatataaagcatcaaatgcctttttacctaaaattgtatttcaacttgaagaatacggattaccgaggatgattagtaaaaagatacaaaatgcaggtcttataaatcttgaagacgattctaaagagattacaatcgttatacaggaatttaacacgataggaattgaataccttgaacaaaaaatacctaatctccattcatttgacaaatatatttaa

SEQ ID NO: 59760 - DNA, 906 bp, Haemophilus sputorum HK 2154
atggattatccaaaacatccagaaccttttttagaactaaaaattcataatcttgattcaaccccgccaatatctgctctgtgtgcaggctatgaatgtggagagtggagatcttctcaattagctgaacatgctatggaatggttacctgaattctgcctaactgctaacgaattgaaaagtatcacttctagtaatgctttaaaaatgattagaaaagctgcacaatcagtgtaccaaacagataaatataaaaaccgtggcgagtttggtgaacttttcttacatataatattacgccagatttatagttctattcctgctatcagtaagatttattttaaagacgcagttaataatactgtaaaaggttttgatgcagtccatatcattaatataaaggatacaaaggatacaaaggatacaaaggatacaaaggatacaaaggatacatttgaattatggctaggagaagttaagttttataacaatgctagacaagctatttatgatgtaataggtgaaattcaggagcatactaaacaagattatctaaaaaatgaaaagatgctgttattgaataaaattgatatcgacccaaaatcacctttttatcctatcttatcaaaattacttgctcctaatacatctttagatgaattatttgattgtgcctgtattccaattcttatcacttacgatagtaaaactttaaagaaacacacaaaaacaactaaagaatttaatcttgaattagaacatgaagtaatgaaagtttttgatgattttaaaaataaaatatcaaatctaactataccaattaaacttcatgtttttctattacctcttcaagaaaaatcagtgttaattaaaaaattagatgaagaattaaaaaggttacaataa

SEQ ID NO: 59761 - DNA, 2127 bp, Haemophilus sputorum HK 2154
atgtttacaagaaatgatatagagaagattctcaaaaatagtaatcctattaatgttgatactgcatttattattcttcaatcaatgtattacctagcaaatactaataatatagaagataacagcactcaacagcttcttcttagaattttagatagaaaagaggaatttaactcttttagtgatgctttaaatggccttgttcgtcattttggcttatatccttatttagacactgataatattaccataaaagatgcttttgtaagggagctacatagaccatctctattgacagaaaataactcaggtaatgaagggatagtcttccacaaagtacaatctgaaattttccaacatctaataaatggggaaaatattatactaagtgcgccaactagttttggaaaaagtactttaatagattctttaattgaaagtcaaaaatttgaaaatattattattattgtgccaacaattgcacttattgatgaaactagaagaaggatatcctctctaaaaacagaacataaagttattacacatgcttcacaggaaaaattatcgaaaaatatctttatactaacacaagaacgagcaattgactttcctgatcttcctaatttcgatctttttatattggatgaattctacaaattagatcctcgagaggattccgaaagagcgatgactttaaatcttgctttctataaattgtataagaaatccaaacaattttatttattaggtccaaatataaacaacatacctaatggattacccgaacgcttccagtgtaaatttattaaaacagactattcgacagttgtgactgaagtaatccatatccatcctcaaaaagatcattttgatgaattgataaatttatgtaattcaattaaaggttcaacactaattttttgtgcatctcctaataaagcaagaaagattacaagactacttactgaaaaatgctcgcagttaaaagataattatctaaataatgaagccaactggattgcagaaaattatcacccagactggactttagttaaaggattaagaaaaggtattggtatgcatcatggaaaaattcctagagccatagcatatttatgtgttaaaaatttcaatgaagaaaagatacaatttttagtttgtacttcaacgttaattgaaggagtaaatacaaaagcaaaaaatgtaattatttttgataacaaaattgccagaaataagtatgatttctttacttttaataatataaaaggtcgctcaggacgaatgtttaaacattttattggaaatgtatatttgtttaataaccctccccaagaagaacttcctctagttgatattcctattttttctcaagatgaatctaataccacggattctcttttaattcagcttgataaagatgatatgacaatggagtcttggaagcgtattcagaagtatcataaccaatctattttaagtattgatacattgcgtagtaattcaggaataaacccagattatcaaattgagctcgcaaaatatttattggaacatcaatatattttagaaggattaagttttatctcaaatcctagttacgaacaattggaagtattatgttgtttaatttgggatcattttattcattcgaaaagctattctgatatttattcaggaaaacaactggcatttaagttaaatcagctaaagcataaccaacttaaagagattatattaaatgaaataagccaaggtattgaggctgatgatgctgtagaaaatacattaaactttatcagacagtgggctcaattccactttcctcgatttgcaatggctgtttctcgtattcagaatgaattagcagagagattaggaatagaaaaatcagattactctttcttttgtactcaagttgaaaacctatttaaagatccagccttgatcgcattagatgagtatggattaccattgccattagctgaaaaaatagaaaataaattaaacccagaagggaaattggatattgcaatagataacttatctaaattagaccttgagcttttaaataatctaactgcctttgaaaaaaagctcctccaagacgttaaaaattatatttaa

SEQ ID NO: 59762 - DNA, 894 bp, Methylophilaceae bacterium 11
atggagaaaaagcttcaatcccaattaaaaaatgccgatgaaatcaaacagattcttagagaggtagaattcactcacactttgagtgatggcactgctgtaaatactctccttgtatacctccctataaaagatggtaaatcttcccacgatgaattctttgatgaaatcaaaaaggggatacttaccaattttgttctttcatgtaaggaaattgaagaaaagctgggtttgaaaaacccgagaagcccagaaagcctctttaaaaaatcagtaaattttcttcatactcataccgcccaaggtgatctcggtgaactgattttgttcactcttatggatgtttacatcggcgcacctaagttaataagcaaaatttctatgaaaggggctgcaggcatgtctgcccttggagcggacgctgtgcatggtcagtatatagatggcacattcaaagtattccttggggagtcaaaacttcataagaaatttaaacctgcggcacgtgctgctgctaagtccatgaaatctgcacaagataaatacaagcatgaactgaacctgatagacagtaatttagacttcccaggcatcacccccgaaaccaaagccgaactcatggaattattagatccctgggcagataatgatttatctgacgttatccactctccttgcttcattggcttcacacagccggagatcatgactgatgaagtacagtttatagagaaatataagggaaaagctactgattacattgaagacttttatttaaagctccaaaagaaggagctgagctgtgacaaaaccattctgttgatgcttccatttacctgtttaaaacagctcactgcggaatttattacttatatgggtattgccaatgagtga

SEQ ID NO: 59763 - DNA, 2508 bp, Methylophilaceae bacterium 11
atgagtgaatttttccaaactctatctgaaagaataatcaccaatgaaggttatagccaaaccaagcaactactatttagttcatatgtaactgatttgattggtgcaaccaagattctggggaaaagcgatattaagaaattagcggacgccgcacaaatatttcataaatcaggactaaaagactacaaagatgaaggtgcagtcttaatggccatgctgctagacctgtacggtaatgaccatccagggttaattccaatcgctaatattttatttgccagcagcggagatttccccaatattgatttgttgaccgaacgttatccaaacattgattaccgatacagttttgatttgcatgctctaaatgactttagacgtgatctcaatactgtggaggaaatgaagttcacattaactgatttccaaagagtcctgtgggagcatctagtctcaggtgaagatgtcatcacttctgctccaacctctgcaggtaaaacacatatcattttgaattacctacttgataacgtaggtaaaagtgatggtgcatttgctgcaattgtcgtgccgacgagagcactaatcactgaagtggcaggcaagctatatgaactaatcaaagaacaagacctcggaaaagacattgagatatgtactgttcccagagatggtcagttccgcgcgaagaccttcttcgtaatgactcaagagagattgcatgaggtcatgcttaagggtgatatcaacttcaactacttattcatagatgaagcccataatattactgatcaaagcagaggcgtattacttcacatcacaatagagaaagtactagagaatagcctccctcagatcatcatcagtatgccatctgatagttatcaagactccttcagcactattttcaaagaggtcaaattcaaaaagcaaatcacgaaacactcaccagttgccaagatattaatgaatgtagataccattggtactaacctgaaagtatctttgtttaacgaaaactgctctcacaccattcctaagggttttaaagggacaaaattcgttgatgttgtttttaaattaggccaagggcagaacaacatcattttcagaaataggcctgattattgtgaagatatggctgatgaccttactgagctagtagagcatgaaattccagactacaccccacactcatctcaagtagaggctgcagactatgtcgaaaatttcattcatgaagattacagtcttgcagataacttaaggaaaggcatcgcatttcattatggccctctaccaagctcagtgcgtatcatggtagaaaacctagttaaaggcggccatatcaatttcattgcctgcacaagtacgcttgcagaaggcgtcaacttacctgcaaaaaacttatttcttgaaaacccaatgcaaccggtatttggtgaaacctcaaaaccactagaggacgtaaaactgaataacatcactggcagagctggcaggatgttaaagcacttttctggtaatgtttttcttttcaatcataacaaatgggctgttcaagattactttgatgagaaagttgatgaagagaaaaaaatcccaacctacttcaaagcacttaatgaagagttggacagtgtgctttcagctttaactggcaattatgacaactctcaaaatgatcagtacaaacattactcgattgccaataagcttctaagagagtttgccagtgaaaatttgtccaataccattgatgctgatgatcttgaattaacctcacatgcacgcaagttgcttgttgatgctgttggaaaagcacatgctaatctcaaggtcccgacattcaccttagaatccaatccaactgtgggttatatccagcagaataatctgtatgaatttttatcaagcttagactctttagaggcttggacacttcctcacccaatgtcgcctaaattacgtgagactcttctttctgtttgttacaagctaaatgagttttatatttatacgccaaaggaaaatgactcaattgaatttgtgtgcctgattgccagaaaatgggttcgcggagatagtctcaaagaaatcattaaagaccaaatccagttcaatgaagaaaatgatatttctggtagcaccaactccgccatcagaaaaataatgaaaactatcaatactgatgtgatgtttcgattagcgaatgcgctacgttgttatcagcttctgcttaacaacgttcgtgcagatagaggactggagctttccaaagctaaccttcactcctatcttgagattggagcctataaagatcgtgtagttagcctaataaacttaggagcatcccgggaagcagcaattgaaattgatgagttactggaaccatcggttgaaatcaaaaactctgctgatttaatagaactactaaattcaaatgcactagatagaattcataccgtcactcggagagagttaatcggtctactcaaacactaa

SEQ ID NO: 59764 - DNA, 900 bp, Elizabethkingia anophelis
atgagaaaaactctactcgatttaattgagaatacaataattcatcaatacgatttaccaaattccacagctggaatttcaaaaactatattttctattgatgacgacaaatgtttcaaaacaaccaataacaatgatttttctgaaataatctataattctatcatagaatattcttttaatgaatttgagattgatggcaaagattatgataaactacattatattgccttacaaacaaaattaaagtacaaccctactgctgacttaaaaactaaaataaagtatggctttttgggagaagtaattttgtttagtgttttgtatacacttttcaaatccaagccccttatagcaagaggatatttctacaatcctttggaaaactcagaaacaaaaggttacgattcttatcatttaattgaaaatgctggacaaaccgaattatggtttggagaagtaaaatttcataacaattataaagccggaatcaaaagtgtatttaaaaacatagataaagccatttcagacaattatttacaaacaaatgttttttctatttccaacgaactaaataacctacaatggaaaggttcgaaaattgaaactgtaatagaaaactggaaagagaatccacatttatcaataatagatgaaataaagaaacataatatgaaattggtttatccggttatgcttttatatgaagaagatggtgccggatatgatgaaagtataaaaaatattccaacgcatattcaagcagaatattcatcaactaaatatagcctttcaattccatactccatattttttattttaattccgatgaaagacgttaagctaattaaagaagatgtaattaaatggatagaatcaaagaaaccactgatgtcataa

SEQ ID NO: 59765 - DNA, 2292 bp, Elizabethkingia anophelis
atggatagaatcaaagaaaccactgatgtcataatacaacttaataagtttaaatcgaaacaaattactgatgatgcttttgtaaggtctgtgtgtgattattttgatgctattaagtcagaaactttgaatcagtctgatttaaaatttcttaaatacatttcaaatgtagcaggaatcccccattattatgaccagttaaataagtttaacaataccgctgaaatagaggattttaatctaaatacattttcttcactgctgtacgaaagtacactacatacatcagaaacgagaaaagtccataaatatcagatggacattttaaatcaatttgttccaaatcaaagaaacagattttttctttctgcaagtacatcttttggtaagacgcatatagtttttgaaattatcaaaaagatgaactatgcaaatgtggttttaatttttccaacaattgcattgttatcagaaaatttagaaaggctaacttctgatgaagcttactcatattttagacaaaaatataagattcatacactaagtgaagtaacagaatttggagacaataatttattcatttatacaccagaacgctttttatcatttaaggaaaaaaatccgagcacaataatcttcaattttgcttttattgacgaagtctataaaattgataacgaatatattttagacgaagaagtcagagaaaatgaaagagatgtagcatataggctatctgttttttatgctttagaagacaatgtagatgtacttctggcaggaccatatattgaattctataaacagaaacaaggtaattataatggttcttttgacaactttctttcaaaaaatggaataactcttttaaactataaccaatttgagattgtaaacaaggcgtatagtgatataaaaaccaaaaaacatgttgaagttgacaacgaactacaatttgattttcaaacaaatagtaagactgataggttaattgaaataattagaaacataatttcaatcaaagagaacacaattatttactgttctacaagagcctatacagagagttacgcaaaaagtattttagactcgggagctctcgataagcattcaaatacaagctattcagactttatcacacatatttctaataattttgataaagattgggtggtggtaaaagccttgcaaaaaggtattggtatccatcacggattagttccaaaatacatacaaaaggaaattatttcgctttttaacaacgataagttaagcgttcttttatctacaacaacaataacggaaggagttaatacttcagcaaaaaatttaattgtacttcatagtaaaaaaggcgacaaagagcttaaaaagttcgatgctaagaatattgcgggacgagcaggaagatttctacaccactattctgggagagtaattgtattgcaaaatgatttcatgaaagcaattgatgcagaacccgaaggaattaagcataaaaattatgacttacaggctcctaaagatgaaattgatttgttttattctaacgatgaatatctttcagaagctgataaaaggaaaaaaatagatattaagacagagcaagacaaaagaggaattcctgatgaaattttcaatctatataaagtagttagtagattcgataagattacaatttatgatgaaatcataaaactaaatgcagttgaaaatgaaagcattaaaaacttaattaaagtactaaattataggatggacattgattatgatggctttcaaaccattctaaaagtcattcgtccgattgtaaaaaactcaaagcttcaatttttaatagactataaaggaactaatgaatattcaacgttaactcatttaactcatttttatttagaagatggctttttaggctcagttagatataaaatgaacactatgtctgtagataaagccatttctgaaacagcagaatttgtatataatactttaaaatatcaggttgttaaatatctgggagtttttaatattatgtatcgctttattcaatctcagaaaacaaagaaaccatttgatgaagttgcaggaattgacaaacttctggttaaacttgaatataatgcattaaccgataatggaagaatagcaagtgatttcggagtaccatcgaatgtacttgattattacgaaagtgatgacaaccgaagaaagtcagaaatcaaatcaaaatttgataattacgagaaaagcatatttgataaagttgaaaaaattataaaaggaagtgattaa

SEQ ID NO: 59766 - DNA, 900 bp, Elizabethkingia anophelis; identical to SEQ ID NO: 59764

SEQ ID NO: 59767 - DNA, 2292 bp, Elizabethkingia anophelis; identical to SEQ ID NO: 59765

SEQ ID NO: 59768 - DNA, 978 bp, Burkholderia sp. BT03
atgaacagaaagtcgtctgtctccgatcttgatgtatcgaagcatatccgccgtttaattgggcctcacctggttgaagagcgaatcaggcgcctgacggccgatgtggggcgcgacgcgaaattcaacgcctacttcctctatccagcatttcgaaatggcaagccaacagtagggccgctcatcgaaatgctcgtaggggagataaccgcgttctgtatcgcaaaagaagaaaggcggaaggcaaaactcgcggacaggaatcttccttacgatgcacctgccatgaatgcgctggccaggagagccaggaggctttttatggatgcgagcgagaatagttcaaggtcgggagatggcggagaacttctgctgttcgtgcttatcgagcattttatgaaagcgccgattatcttgtcaaagatgcgcctaaagacgaatacaaatatgcctgttcatggatcggacggtgtgcatgcattctgggacgacgagaataatactttggtcaccgtgttcggggaatcaaagttgcacaaatcgttcgcgagcgcagtggcggacgctgcagaatctgttgaggagttcgtcaaaaatatagatggtcgctacgatcacgaacttcttttgaccatgaatcacatcgatctggatggattcccagagagtgtgaagcagcatttaataaaatttctgaacccgttcgaaaccgatgagggaaatcgtcgtcgcgagcgatttgcgcttcttttgggtttcgatgcgaagcaatacaatctagttgcctcgttgaacctacatgaagccgaagagcgattccgaaaactgtacgaatcggtggcgaaaaaggcgattcagacggcctccaaccacctgtcgaagcggggtatcgatctggaaagtgttgatgttttcatgtttcctatcccttctgttgacgattttcggaaacgatttgcgagcgcgctaagtgaataa

SEQ ID NO: 59769 - DNA, 2550 bp, Burkholderia sp. BT03
gtgaataatttcggaaacgcgttggcgacccgcgtagcccaaacgtcgcgattcaaagctgcatacgaggaactgcagcgagcgagcctctcggacgtcataggaagcaaagcacttctgaatgtcgagacggttagtaagctcgcacgatcggccctcatccttgcgcaagcgagcgatgtgaagaactggactctggcgcaggatattgcgtatgctttggcatcattgtccttgacgggagagcagcgacaattgtgcagtcacgtccttgcgacgttggggaattttccggcagccgattttctgcttccagcatcaacgagcaggacgcttccgtggaccctgcagctggatgaagggttgcggaaggaggacaacacgatacaggtattggggaaagaatctgttctcacggatttccaggcagacatctgggacgggttgaaccgcagccgttatcttagtgtttccgcaccgacctccgctggaaaatcgtttgttcttcaggcattcattcttgatgcgttagagtcatacgatgggtttcaggacatcatttatctcgttcctacgcgctcactgattcaggaggtatctgcgtcacttggcaaatcgctcgcgccactcggtgagaaagtggttgtgtcaagtgtgcccatgatcgacgacgagctgaatcatgcgcagtcacgcgtgcttgtgttcacgcaagagcgtttgaggacggcacttgaccgctctcatctcgagcctgcgatcatcattatcgacgaggcgcagcagatcgcagatgaggaaaggggtatgctgctgctcaattgtctggaggagataatcagacgttcgccaggtgtccgtctgctcttcattacgccaagctcgaaatccgccgcatccatgaatggtcttcttgacctgaagcgcatgttatcgattcagagcgatctcaagccagttcggcagaacctgatctacgttacgtttcaggccagagctaaacagatatcccttcggttacatcgcccagggcttgaaccgctcgatatcggagcttatacagcaaagcgccggtttctttctaagaacaagcggttaatagatgcagcgatagaacttggagggggcggccagagcctcgtctacgccggcggcccggactccgccgagaaaatcgcgttagccatttcagagcatatgaccgaggcgactcttgcgaacgccgatctcgagactctttctgagttcgtcgctgaacatgtgcatccagattatgcgctggtggaatctgtcctgaacggggttggatatcactatgggcatatgccatcagcgatttctacggcagttgaacaatatttccgcgataacaaattgccatatctagtttgcacctcgactttgctgcaaggcgtcaacttgccagcacggaatatttttctacacaagccgaccaagggtaagggtaatccgattagcggaagcgacttctggaacctggctggccgggctgggcgtatgcagaaggacacgcacgggaacgtgttcttggttgaatacgaggattgggagtcgaagcctgtggaggagaacgagcgccaagaggttgtttcttcgctttcccacgctttaaagtcacgacagagcgaaattattgattacgcgcgcgatccaaagcatccatcgggtaccgatgattaccagtttgttgagagcgtcttctgcaggcttttcacggacgcgaagctcgggcgattcgatgagacggtccggcgagcgacatttggcgaaatcatgccggacgtggccgagttgaggcgagcaatctttgagcagcttgaccgtgtaacactcccgattgacgttatcgcgaagaataatctgatttctccagtccgccagcaagcattgtttgatttttttgacagctcgctgaaaggcggtagatatcgacaccttattccgcctcatccgatgagagaaaatgcagcggaacttttgacggccgtgatgcgaatctcacgaatctatctcgagggcgtagagaacaagctggaaaattttttcggatggttctcgatccattggatgaatggcacagggctgaagaacatcatccagatgcagatcgactatgaaatcagagcgaggaaggagaagggcgacgagacgcccgtgaactcgggcacggtaatcagagaaacactgaagagtatcgataaatttttgcggttccactacgttaagtatctgggatgttatatcaatattctccagtacgcgcttgcctcgcgtgggatcccggctgcctcggaaattccggcgattccgctttttcttgaactaggagcatccaatcctgtcatgatccaggcgatgagccttgggttgtctcgggttgctgcaaaagaggtgagtcggttgttcccgtcgtcgcctggcgccccagcattgcggctccggttgcgttcgatgagcaaggaggttcaggggcggctgccgcggctggtgcttgcggagctccagaagtttgggctagtccgtgcttag

SEQ ID NO: 59770 - DNA, 828 bp, Pantoea sp. GM01
atgatctttcttgaaaatgatgcaatggcagaagtttctcttttttatttgccctttaaaactggccatagtgacttcacatatttttttgaaattattaagcaggagatactcctaaattttgcatttaagtgtagtgaagttgaaggtaaaattgggtctgaagatcccacggaagtggaaaaattatttaaaagagcaattagacgcttcagtaagcacacggcaaaaggtgagttgggagagttaatcttatttacactgttagatgtatatttagaagcccccaaaatactaagtaaactgtctttcaaaacaagccgtcgcgttgcagtttttggagctgatgctgtgcatgctcaatatgttggcaatgatttattcgtctactttggtgaatcaaagctccacaaagactttaatggtgcagcaactgacgccgttatttcaattaaatcggccagagagaaattcagagatgaattcgatttaattgaaagccatcttgatttccctaatatgacagatgatctacaagatgatattcttgacttcattgacccatattctgaaaatgatcatggaaataaaatactttcaccttgctttattgggtttgtagattccaattcattctctaattcaaccaatgaggatgagttttttgaaagctatattgatctggctaaaagatatacagttagttattttaacaaacttgtagcccaagggattgaaataaaaaaatcttcactattgcttttacctttttcatccactgatgaactcgtccagcaattcattgattacttaggcattcaagaatga

SEQ ID NO: 59771 - DNA, 2532 bp, Pantoea sp. GM01
atgaataacttttattataaactagcgaaaaaaatcaccaactcggatggttacattaaagacaggtctttattatttaagtcatatattaacctaatggttggcgatagtgtcagaattgataaagtcactgtgaaaaaattaatttccacctcccagatattttattactcagatgatgaagtattaaagaaggaaggtacagtaattttatcaatgttgattgaggtttgtgctataacatacaatgacattattccaattgcgaatcatatatattacaactcaggtgactttcctaatataagtttattggagaaaagatttccagacatatcgtttaattttaacttatatacagaaacggccaggcatcttcgcttagaagctaatactgtccaacagttggcttttccattgacaaattttcaaaaaaaactttgggatgaacttcgtaacggtgaagatgtaatttctgtcgccccaacttcagcaggaaaaacgcacattatccttagttatctaattgaggagataatttctagtgacggagcttttgccgctattgtggtcccaactagagctttgattaccgaagtttcatcgaagatttatgggatccttcaggaaaagaggcatgaggataaagttgaaatttgtacaattcccaaagatgagcaatttcttgataaaactatttttgttatgacacaggaaagattatatgaaattctgcagcgaggtgatatttcatttaactacttgtttattgatgaggctcataacatatccgatgaaagccgtggagtgctcttacacattacgctcgagaagttgttagaagatagttcccctcaaattattataggcatgccctcacctcaatatgtaaatagtttttcaagtgtatttagaggcatttctttttcgaaaagaattacatcgcattcaccagtttcgaaaattctaatatcagtaactccaaaaagtagaaatcttgttattgagcgtaaggatacgggtgataatattattatacccaaaaaattcaacggaactaaactttctgatattgctaaaaggcttggcggtggtcaaagtaatatcatttatagaaaccaaacgaactcatgcgataatactgcagatgaaatagctaagctgattgaagaagatgtcaataatcctagtcttgaggaagctgcagagtatatcgagagctttattcatgaggagtatagtttagctaataatttaaggcgtggtgtggcctttcattatggaccattaccaacctctgttagagtattggtagaaaatttggtcaaagaggggcttgtaaactatattgtttgcacaagcaccttagccgaaggtgttaatttaccggcaaaaaatctttttcttcacgatcctataaaccgagtcccatataaaccgtctactagattggaagatgtaaaaataaataatatcacggggcgagctggtaggatgcttgagcatttttctgggaatgttttcttgatcgagccagagaaatggcagtatacagattattttgatgaaacagaaaaaaaggaagacaaaatccctacatattttaacctcatgaataaaaatatgagtgatatcatttcagttttaagaggtggcgcggctattgaggaaagtgataattataaattttatacagttgcaaacaagcttatcaagagtttctcaagtgatgaactccacgaaacgttttcctccccagaaataacccttaataagtcagacattgaagaattgagaaagtccgtaaaatttgcaattgaatcaataaaagttccccagtttgttttagagtctaatcctactattggttacattcagcagaacaaaattcatagttttttaagtaacgttgataacctcagtctttggtctttacctcatcctaaatctgatgaactatatgatcgtctgcttaaaatatgcgacaaattaattgagtttggcatatttaatcctacagattcatactcctcatcctacattgctatgatttcaagaaaatgggttaaaggatttagcctcaaagaaatgattaatgatcaaattaattgggatttaaatcataaaccaacaaaatcaaaggttaaggatgatgaaagttctgggggtaatataaattcatcagttagaaatataataaaagtaataaataatgatattagattcaagctttcaaatgcagtaaagtgctatcaattgctccttgcagatgttgcgaacttgaaggggatagaagttccttccgtgaagttacattattttcttgagattggagctagcgaggagcgtatgatgtcattgttgaatttaggtctatccagggaggcagcaaaagagctacatgataaactcccaagaggggttagtattacatcgataagtgaccttgaaaaggtgcttgagaactttagccaaaatagcctccatgccattatgattaaagagataaggcatttaattagccgtggctaa

SEQ ID NO: 59772 - DNA, 900 bp, Pantoea sp. YR343
atgataactaaactcgcccctcaattagtcaatactcacttaataaaagacattctaaaaagggttgatgtttcaattattcttgaagatggtcgtcgggttgataccctgctaatttatctgccatcatttaatggtagaacaaaccaccctgaattttttgatatgatatcaaaggaattacttcatcactttgcgcttacatgccaagatatagaaagaaaaataaagcgaaaaggggagcaagcagccagcatcctttttgataaagctttaagcaaattaagccaacagacagcgcatggtgaattaggtgaattaattttatttactttagtcgacgtttatcttgaagcaccaaaattattaagcaaagtgtcattaaaaaccagccctcaaatgccagtgtttggagccgatggtgttcatattcaatatgtagataacaaggttagaatttatttaggtgaatcaaaactctatacgacattcacccaagcagccaccaaagctgctaattcaattcaaaaagcaaaagctaaatatctcgatgagttcaacttaatagacacatatttagatctacctcagttagatgatgatgctgaggaagaattattgaacattttggatcctttcgaaaatacaaacattgaagatcacattcattcaccatgcttcatcggcttcgcagaccaaaaattaattgaagacaacgctgttaatgatgattttatacaatgctatataaaattggcctttaatcatataagtgactactacaataaattagaaaaaaaaggtgttgatattaccacatccactttgatgatacttccatttagcaatgttgatgaactagtttctgagtttataacccatcttgggataaaaaaatga

SEQ ID NO: 59773 - DNA, 2538 bp, Pantoea sp. YR343
atgagcgaattctacactaagctttcaaacagaataatttcaaacgaaatttatgcagatagcacctccgaactttttggtaattatataaaaacattaattggtgagagtagcaaagtaagtaaagaattggcaaagaaaataacaactacttcgcaaatattttataaatctaataatgatgaaattaaaaaagaaggtgctaatcttcttgctatgttgattgatacttgcgctgaagagtacccagaaataataccaatcgccaatcatattttcacatctactggtgactttccaaatataaggcttcttgaggaaagattccctaaagtaaagtttaagcataattttctatcagaagctcaatttgacttcaggcggtcactgaacaatgtagaatctctgaacttggtgctaactgattttcagaagaatctttgggatgatttacaagatggtgaagatgtcataactgttgcccctacttcagcaggaaaaacacatatcatcttaaattacttattagagagtgttttaaatagtgttgatggtgcctttgctgtggtcgttgttcccactagggcattaattactgaagtttcttcgaaaatatacaaccttgctaaggacagggatcgagagagtgaaatagaaatatgtacaatccccaaggatggaaatttttcagataaaacgttttttgttatgactcaagaacgactacatgaagtcctactccggggtgatattagctttaactatctattcattgatgaagctcataatatttctgatgagagtcgaggtgtacttcttcatttaacacttgaaaaggttctggataatggcacacctcagatcattattgggatgccatctccacaatatcaaaatagcttcactagtgtctttgataacattattttcaaaaaagaaataacaagccactccccagtttctaaattagtaatgaatgtgaaacctaaaggaagaaacttagaaattgaaagaatcaactcacgagataagattacaatagcaaagaaatttaatgataaaaaattagctgatatcgtttataggttaggaaaaaaccaaagcaacataatttacagaaatcagactaattattgcgagtcagttgcaaatgaaatagctgaaagaataaagtcaaacgagaataatgatgctcttactgaagcatctgaatatataaagcatttcatacatgaagactttacattagctgctaatcttatgaaaggggtggcttttcattatagcccactaccaacctcagtaagagtcatggttgaaaatttagctaaagatggacatgtgaaatatatatgttgtaccagcacattggctgaaggtgttaatctaccagcaaaaaacctctttattcaaaatccattctttaaaaagaaatttggaaaaccagaacgacttgaggatgtgaaaattaacaacatcacaggaagagctggtcgaatgcttcaacatttctctggtaatgtcttcctaattgaccaagaaaactgggcatttgatgattacttcaccgaaacagataaacaaaaagaagaaaaaatacctacttatttcaagttaataaatgacaaaacgtcggatgttaaactagctctttcggggcagtaccctggagatgatgagcaatataagttctattccgtagcaaataaactgattaaagcacatgataacggaagtcttgatgttactctctcggcaccagagataaatctcgacaagagcacaattaatgcgttaaaagttgatattgaaacggcttttttaaatttgaaagtttcatctctcgttcttgagtcaaaccctactataggttatatacaacaaaataaagtatttgagttccttactagtgggattgacttgcatgaatggtcattgcctcatcctaaatctgaggatttatttgatagaattttaaaaatatcgagtaaacttgctgatcacggtgtattcctgccatcgggtagttataccacgagatacatttgccttatatctaagaaatggatacaaggaaatagtctaaaagaaatgatctctgagcaaatccattgggataaaaattcaataccagatggaaataacgatgatggtgatgaggatattaaagaggttaaggttaataggtcagttcgtaatgttataaatgtgatcaatagtgatgtgcggttcagattatcaaacgctataaaatgctattacacactatttgttttagcatcaagaataatgagatctgatgctcagtcagtcaagttacattattttttagaaatcggggcttgtgatgaaaggatgatggatttgctcaatcttggcttatcgcgcgaagcatctaaagaaattgatgagaaattaccttcgaacatttcaattaagagtcttggtgatctcattgatttagtaaaatccgaaagaatttctcaaattcatgttgtgattagaaaagagattgagcacttaatcaatcgagcttaa

SEQ ID NO: 59774 - DNA, 915 bp, Bradyrhizobium sp. YR681
gtgctctccggcgaccccgaagctctggatgttcatctgtcgctcgttgaccgagacgtcgtcatcgacggataccaggtcaaaattcactgtcactgcctcactgtcgacggcaacgggcgggtacagccgcatcgtctcgcggaattcatgcgcaatgcagttgccgattacgcgatcccgcgttcgcaactcgccaaggcaaaggcacgcgacaccaaattcaatagcaccgaggccgtcacggcgctcgtcgaacaggcccgccgttcgttcacagaccttgctaagactggcgaaggcggtgagatgctgctcttcttgctggcggagcggtttctcaaactgcctcaggtcctatgcaagatggatctgaaaactgactcgcgcatgcactatcacggtgccgacggtgtctatgccagcgtcacccctgaagggatgctgaagctttattggggcgaatctaaaatctacaaagatgcggccaccgccatcaaagactgtctggcgtcggttgcgcctttcctgatcgagccggagcacgaagacgctggacgggagcgcgacctcattctcttgagcgacaaggctgatttgagcgatccggcgttgaccgaggcgctcaaacgctacttcgataagatgtcgccaatgtccaaacgcgttaaatattgcgctgtcgccctcgtgggctttgatgctgccttctatcctggcggcagagctcaagctattgcggacgaaatgaaagaagcggcgcggatcgaactcaagaaatggagctcaacgatcggaacgcgcctgaagaaagaaaaactggagcaggttgaagtcgagctattttgccttccactgccgtccgccgaagacttccgggccgcgttcctaaaggcgatggggcagaccgtatga

SEQ ID NO: 59775 - DNA, 2607 bp, Bradyrhizobium sp. YR681
atgagcctgaacgatttgcaaggctggctcgttgctgaaggtctgcgcgaggccctcgatcagttgaccctacatactgtcgtggctgaactggacaatattgtaccgcccaccgacaaggcagcctcattcgactggcctcggcttttgttggcaggaagcatactcgcgcagtcggatcagcggacctatcaagacgcagcgcttcgtatcgccactgcggcaatcacgctctccgacaatgaggccatcaaagattccggcgcggttctcttaggaaagttatcaaattttcgtgcagtttcgctcgcgaccgaacgcgggttgctcactgccgacgttgagggacggctcgggatggcgttgcgtatcgaagcgcagcaccgccagatggatcagtcgattctagtccaatccagtgggcgatggattcaggtcaatgacttccaacagcgtttctggagccaggctgacaattaccaatggctttcggcatccgctccgacagcatccggtaagacgttcttggtcttacaatggctgatcgaccaaatccgatcgaccgagatgcatgtcgctgtctatttggcgccgacaagggcgctcgttgctgagatcgaagcaaatctggtctcactgctcggagcccgcagcggcatagaagtctcgtcgcttccgatacgggaaaagcacgacaaagcccacgaaggcggttcacgcgctatctttgtattgacgcaggagcgcatgcacctgctggctaacgccattggcggcgccttcaaggtcgacctgctcgttgtcgacgaggcacataagatcggggacaatcaacgcggcgtcatccttcaggatgccatagagcgcgccagtcgttccaatcgcacgcttaagctcgtcttcatcagtcctgccacccaaaacccgcaggagcttcttgcagacgctccggaaggagctcacaccgcgtcgtttgaaagtgacgttccaaccgtgcttcaaaatctcatcgtggccgagcaggtgccgcgtaagccaaaactatggaaattgtcggcacgccaacacgcgtccttgttgccgcttggtgtggtccagctcggcagcagcccgggctcgctaaagaaaaggctggcattcatcgccgctgcagctggagagcgcggcgggacacttgtctacgcaaatcgcgcctccgattccgaagacatcgccgatctcatcagtcagctgataccggaagtgccatctgaccctgaattgcttgagcttgcagatttggcacgcaaaggcgttcacccacgctacaggctcgcgccgctggtcgagcgcggcgtagcctttcactacggcaatatgccgtcactcatccgctcggaggttgagcggctgttccgctcaggcaagattcgattccttgtctgcacctcgacgctcatcgaaggcgtcaatctgtcttgccgaaccattgtgctgcgcggcccaagaaagggcgtcggacatccgatggaagcgcacgatttctggaaccttgccggccgtgctggccgatggggtgatgaattccagggaaacatcatctgcattgatcctcaggacgcacaggcttggcctgatggcgttcccgagcgggctcggttccccatcaagcgcgaaagcgacgccgtgatcgagcaaggagagagccttgcggattatctggaccgccgagcaacaactgatttagccgagttcgaggatcccaaccaattcgagcaggtcgcctcatatctgctcgctacatttttacggcagggatcaatcgcacaatccagcctcgccaagcgccacaatccggcgatcatcgagcggcttgaagcgagccttgccaatatcgccgcgcagatcgcggtaggtgcagatattgcggcccgacatccgggcgttagcgccttgggcatgcagcgcctcctcgaggcattccgcaattacaaaggtgatgtcgaaaatctattgccggccgccgtcgatagccaggatagctatgatcgcttcgtgacgatcatgcgtcggatcaaccagtatttgtttccggcgttcacgccagacgggatcattccacttcacgctctgatcgtcgtgcaatggctaaagggcttctctctgtctcgaatgatcgagcggaatatcgactaccaccgtaggaacggccgatcattcaagctgccggttctgatccgcagcacgatggagatggtcgaacaaatcgcgcggtttcgggcgccgaagtatttgtccgcctatgtcgacgtactcaatatgcatctagctgcaataggacgggaagacctgatcgatggtgatgtcgatataggaacgcagctcgaattcggcgtttcttcacggaccttactgtcgctgatcgagctcggattgtcgcgcgtgagtgcggtcgcgctatacgaaaagatcgcgcgagatgacctcaacaaggaagattgcattgcttgggtaagagaacgcgacgcgcagtttgagggcatggacattccggccatcatcgttcgcgagattcgcgccaaactgctgcctgaggccagcgcaggggccgccgcgtcaacatcctga

SEQ ID NO: 59776 - DNA, 948 bp, Kosakonia sacchari SP1
atggatagtgtagaaaagctcaaattgattgactggaaagagttaatcgttaataaacatacttggattgaatcaagattggtaaatcacccctcagatactgacgccaagattgtatctaggatctttaccatccctttcagcggtgttattcaagagcatcagcctttagttgactcgatggccgatgcaattgaacattacgtatttgataaagaggctttaagtaaaatgaaggccgagggggtcactccctttagaaaggctgctcagttcttcggcgacacaaacccagttaaggatggcaaatacggtgaattgcttctctatatcctgtcagaagctatactaaatacaccaatggtttcacataaaatcactagcttaagtaacttaaatgatcaagttaaaggtggtgatggtgttttttttggcgtatatagaaataatttatcaatattaattggtgagtcaaagatttataagagttttagcggcgcattggacagcgcattcgattcgcttgatcgattcactagaagctataccaatggtgctctagggcatgaacttttcatggctagaactaatgtttcaaataattttgactttgagactatggaattaatatatagagcttttactcccggagatgaaatttattctgagtgtgttaaaactcatccggtcttacttgtttttgaagataatgaaataaagaaaattgaagagaaggcagttaataagtccgaagcggaaaatctttttaatgtatggcttaccacaaaaaaaaaggcaatcaaagctgcgattgatgagagattagcgaaatatccaaacgtgaaaccatgtttcttggacttctttttaataccaatgacagatgtgggggagtttaaaaaatcgttgtatagggctatccatggaatagactataaagaaaattaa

SEQ ID NO: 59777 - DNA, 2658 bp, Kosakonia sacchari SP1
atgagtgagagcactgcgaccacagcgattaatcataaagactttacaacggtttttaattccttaattgaacatctcttcttgaggaaccgaggagaaggacaaaaaatagatctttctgatgaagcaattaggagggctacttggcttgcttcattaggttcgtcaggcaatgaaaatgataagaatatagcaagtgcttttggtactctactttatttgtatgatatgaacaatgaattatatataaaagcctgttatgtcttgcaatctagagcaggtaatatagtttcagcgaagcatctggcaggtctctttgatgaagaaaattttttaaagcattttagcgtctcactagattttgaactggtaaatcaaaaatatttacttgaaaagaaaattccaggtgaaaatccaatttattttacgcattttcaaagggatttatgggataaactagagaatggtgaaaacgttgccgtatctgcacccacttctgcaggtaagtcatttgtaatcaaaaaatatatttatgagcatgtactaaaaagtaatcatggctattttgtttatgttgttccctccaaggcactcataaatcaagttggcaacgagatgtcacgagaattaaaagatattgctattgtgatgacaacttacaagcccttggaagaagataaactaaaggttgtatatgtattaacgcctgaaagatgcatgaggttattggatgaaaaaaataacaaggagcctgagatagttttctttgatgaaatacaaaacattgaggacaacagtagaggtaatgtttttgagaatattatttatagaatgactagtctgtggaggtcaacgcaatttatcatggctgggccatatataaataatttacatgaatcacttggtaaagttgttgatattaatttggtcgaacaaaaaacttcagcaacacctgttttacagttaaaagtaattctaacagttcataaacaaaagaaaagcgttagttataaactaattagtcctgttggagaaacagtattaggtgaatacaacattggtaaggctctatatagcaagctcgcctcttcaaaagggacagctctaagatatataacttcaattttggactctaaagagcaaaatataatatatgctcctaaaaagaatttggcagaaggatgggcattagctatatcaaaaacagatgatgaagaacttgaggataatgagtctgattttatatatgacgaaagaatagaggatttatgttcctttttagagagggaaattcatcctctctattcccttgtaagaagtttaaaaaaaggtgttgcttttcatcatggtggtttattagatgtggccaggcttgaagtagaggatcttttttcggatggggtaataaaaaacttagtatgtacttctaccttattacaaggggttaaccttcctgcagatagaatgatcgtaatctcacctaaaattggagattatgagttatctcactttgatttcctaaatttaattggtcgagccggtaggattaatacatcgttatatggggagattttttgcatacaactagttgatgaagaatgggctgagggaaaaattgattcaaatgaaataaaagaaatacaatctgcagttctaaaaaaactgaatgagcatggcgaatctgttgttagttatattgatatatatagtaatgatataatagataatcaaggtgattataaggctatcaatttagcgtcatatttgagaagccaatttttagttgatagattgcattatgaaaaaataatagaaaactcaaatctgacaacgaaccaaattagagtaatgactaacaggcttgaggctttagaggatgatttaaagatcccaaaagatattctttataaaaatccatttattgatcctttattgattgatcaactatattttttggttgagactgaaggtgttaataactggcttatggacaggtatccgggaaccaaatctggttcgtcggattttaatgtagacttcaaagatatgaattactataaccaatataaaagcataattgtgcgcatgaatgatatttttaatattgaaacggaaatcaactttaaagaagatggcataaccaggaagacaaagcattatgtttcaattttcaaattaattaatgactctcacaaatggatgcagggaaggaattatagatattttattgataatatggttaagattaaattaaatagtaggaatataactgttgactataaaaaaattgatggtattactaattttgtaactacacacattaatactaatcttacatttattttagttaagtatctttcactatggtcggatgttataagttcttttatgtccgagaatgaacgtactgaaaaagctttttttctaaatctttcatcaatgttagaaatggggagctatgatccccaagttctggaagtgatggcttatggaataaatagaagcactgcaattgaattattgagaaacgaaagaataagagatggccaaacaacagagcagtttttatcacagtacaatttagaaaaactttcaccattacaccggaagtacttgcaaagggcaggttttggttcttcaagaacaaaaaataattag

SEQ ID NO: 59778 - DNA, 882 bp, Citrobacter sp. KTE151
atggcaaccactgtaaatttatccaatacagatgatctcatgaaccatttgcattggtttgaacaaaaaattcaaaaacctgcagcaaaatcgcatcgtggcgtagccatcaattatttggatttgagcgagcgaagagattcttttattcgagaattaaaaagcacagcatccagctgggtctattccaagaatagatataatgcaattcttaacagagaattgacatctaggaatcaagatttccaaaatgcaataagctaccttcatgaaatcatgtcattaaaattcaggaaaggctgtcctcaagggcaatatggcgaactgttattatttaattttatacagcatttttttcaagcagctccattattgagaaaaatgcccataacgacaaacccaggattagaaagacatggcgctgatgctatacactatctagataatggtgataagcaaatattttttttgggtgagtcaaaatgctatgaatcaaaatacaaatttaacgaagcactatcttcatccgtaagcagtatatttaattcaattcaaaatatcgaaaatgaattactgctttatagatatgatgattttattgaaccagaactacaggctattgcagataacttattgaaaggtaagctaaaagaccccatctttgaatttatttgtttgattgtttatgaagaaaataaaaacacacaagctcctagcgccccggagataagaaaaaaaattgaagaatgcgttgaagacagatggaataaaacacattcaaacttatatgatagttttaatttagcatatattagtagaatacattacatcgtgtttccgtcatggtcactatctaatttattaaataatttcgaagggtga

SEQ ID NO: 59779 - DNA, 2481 bp, Citrobacter sp. KTE151
atgaatgatagaagtataattttaagtttactatctttcgaattagacgatttcgcaattcgtcttaacttaattactggagaaagaaaaaaattaaatagagacttattgataaatgcactaaatttattaaacaagatagccaacagcactaacaacgatgacaacagacaattggcaatgataaccattgctttgatttggacgcattgtaatgagaatgataaagatactttaaggcagatactatccccaacattatcttatatcggcttttcacccagcaataagatgatggatgaatcgttaaaaaacgatggtgtttattcctattatggaagctattttgataaattaaaaattatcgcagatgaattaaaaaacaaaataacgataaaccaaaaagattatattttaacagaatttcagcatgatctttgggaagccatagataataacaaaataattggaatttcagcacccacatcggcgggaaaatcattcctactatatttaaaaacaattcaattattaggaaaaggcgcaacaaaaattgtttatgtcgtgcccacgctaagcttaataagccaagtcactacagatctatctaatctttttaaagatcacaatattagaggagtagatatacttaactcatttgaggagggtaaggaaaattttgtctatgtattaacacaagaaagagcaatctcagtattctcacaagaaagcattgacagcctagatttattaatagtggatgaaattcaaaatatagagcgagctgacagcgagaataatgatagagcaaaaatactatacgatgtcctaatggatgttagaactgatgtagaagtgagtaaaataatcctcagtgggccacgcttgaaaaacattggaggcttgagctttgacatttttggtgagatttctgaagagaaaaaaacagatgtccctcctgtattaagtctcacatactcagtatcaaaaaaaagtgatatctattacatcaatcagtattcaccattttcatcgctgcccatttccactccaatacaaaatgtcgatttgataaaaggtataggggcatcacagtacaattcagcattcaactcttatttgcatagcatacttaaaaaattaaatgatgatagtaatataattttctctccaacaacgagacaagctagaaaatcagcaaaagaatactgcgaagtattccccatgattgccactactaaattagaaagcctttccttatatcttaaaaactctgtccataagcactatgaacttgccgagtttgttaattatggtgtagcttaccataccagtagaattccaatgcatgtacgtaaaagtattgaatatgcggtatcgcagagctacataaaaaatctcttctgtactacaactttaatgcagggggtaaatctacctgcgaaaaatataatcataagaaaccctaatttatttgtacgcaaagtcgaaacttcagtgatgctatccccttatgagtttgcaaacctacgaggaagggcaggacggctacttacagactttgttggcagaacaattgtgctggatgaaaattcatttgaatcacatagagaagaaaatgaaacattattctcgaatgaatataaggaaatcaaaacaggctatcacgatctatacttgcgggatattgactacattaatgaaaaattggatgactcttctttagtatttacaagcaattcaaaaagcattattacttacatccggcaaatgttcttcaggcatggtcatgaggggatttcaagattaaataatgttggcatatttttagacgaattctatataaaaaaaataatatcaggacttgaagatatttcagtgccacggcaaatagttatgcaaaatagatactgggatccttttgatttaaatgaattgtatttatttataacaaaaactaacatgcacattccttcagccatatttaaggctgacctttgcgatgtttttctgtcatggcttaaaataatgagagacaattttaattattacttcacgcgctatattggtcaagttcatgacgaaaaatttttgttcggaatagcaaaaagcgctgagggatgggtaagagaaaactcactatgcgaaatattagagaacaggtttccaacttacaataatgaattacatgaaaatttagataaggaaattgataaattaacgaaacatgttagttttggcttacctatgttattaaaacccgctgccgatataagtgatagtagcagtgttatatcgcaaatagaattaggtttgtatagcgagatatctcgatacttgagtgacagaggcgttcctagggaaaccgcaattaagatcagaaaatatcattcagaaaacaagttacaagctttagatcttaaaagggctgtaattgaattaaatgaatgggaacttcaacatatttctcatttattgtag

SEQ ID NO: 59780 - DNA, 906 bp, Streptococcus sp. GMD1S
atgagccattgccattctgaacataaagaaattagtaataatgttcatacattttatatcggatttgatttagatgattttggcaagatttcacaagtaaaaaagaagttttatgacgaattgtttgacgacattgcttcttttgctttcggatcacataatgtaatgaagagaatcaaagaacctcaggatatttctaaagttcagagggaagcattgagaaaaatgtataatataccagaattacaagaagctagtaggtactatcttgaatcagatttagtagaggataagtatcttaagcgtggtgagtttggagaattgcttttatatcatctgctacatgaatattttaatgctgatgctttaatttcaaaaatctatttcaaggatagcatggggctaccagcgcatggttttgatgcagttcacgtagattctgataatcaaatcttgtggattggagaatctaaattatattctgaatctagttctgctattgatgctttgatgaaagatttagaagaacattttagaatatcattttttgattctgagtttgttattatagaaaatcgtgttcatgatagcgacatagaacttgatgattttatgaaaaaattaattaatccccaaacaaaagttttagataaacttgctaatatcaatattgcattatttgctggatttgatagcaagtcattgcaagagtttgaagatgaagagtcatttaagaaaaaattagaatcagagattaatattttagaaaaaaaagcgttaaaaaaaatagaagagcatccgtggaatgagcatttaaatatttttttatttttatttcccattgacaacaaaaaagaatttgtcaaagatctacatttaaaattaaaaggggcgcagcaaggatga

SEQ ID NO: 59781 - DNA, 2133 bp, Streptococcus sp. GMD1S
atgaaaaatattaaagaaattctaaaatattctgagttaaaaaattatgaagaaaattttgaacttattaaatatatttctagtattattgatacatctgatgctagaaaagtaataattcatatcttagatatttgggaaaatgtaaataataacgcaaaagaaatgtggattgatttgattggaagagcaggattttatccgtattatattgaaaaagtttgtcaagaagagcaattaactctgtcacttcaggatcaaataaaaacagaattttttaaatctgattatcttccaaatatatattttcatcaacagcaaaaagaaatagaaatagctttatccaatggaaataatatagctgtaagcgcgccaactagttttggaaaaagcttacttatcgaagagattgtagcaagaaaacaattctgtaatatcttaattatacaaccaactcttgcattaattgatgaaacaagaaaaaaactatcaaagtataaaggagattataatttaataattaatactcgtcaaatagttcttgagaaaaatatttttattttaacagctgaacgagtgttagaatttccaaatcttcccaatatagatttttttgtcattgatgaattttataaaatttgtaatcgtctaaatgatagtagaattgattctttgaatgttgcgttattaagagttatgaaacataatacccaagcaatgttcttaactcctactgtagattctttatcggaggctttccgagaaaggtataaagttgctttttttaaaacagattatgctttagtaaatactaatgtcatcgaggttaggaatagaaataataatttattatctggtaactctaaaaaaaataaattatttaaaatgctatataaacaagaagaatcaagtattgtatatgtaaaatctccgaatgaagcctataaacttgccaaagaatatgtagactatttacgcaagaataagattgagactgaaaataaaaaattagatatatttgaatggattgataataatatatctcctaattggcaattaaaagaaatgttagaacatggtgtaggggcacacaacggagcactcccaaggcatgtagtaacttcagaaattgatttatttaataaaaagaaaattaaagtactttttgcaacggtttcattgattgaaggcgtgaacacagttgcgaaaaatatgtttgtatatagtcaacataaaggtgataataaaattgacttttttgattttgcaaatatacgtggtcgggctggtagaatgaatgaacatttcactggaaatgtttatgtgtttattgatgaaattgcagatgaacatctcactattgatgtacctagtgttgatcagaatcctgtgtcagatgaaattttaattaatatttcaagtaacgaagtgaaagatattgaacgaaaacagagattagaagatggtttagataatgaaatcttagaaattattaagaataatcttatttcagtagaaggtcagaagtctttgtatcgctttatagaaaaagagcaaaaaactggtggaatagattatttaaggtgggatggtatacctagttatgataaattatggcaaactctttacttaggatataaatttttgaaatcaaatgatagaatcggttttgtacaaagtagagctgtaatgtcgcttaaatttgtcaatctatcattaagaaaagttattgaagaacagtataaatactatttgtctgaaaaaagaaaagatcctttaaatagtgccattgattttgttttgaaatttcaaaaaacagaagctgggtacgaaatacctaaaattttatctgtgattgattctatacaaagacatgtattcgataaattaggtttgcctgctggggactattctgtatttgcctctttattagagaatgaacagattgatgaaagattacaatttttaattgattatggtgtaccaagctcagctgtaaaaaaaattagaaatatacctgataatcttattgaagattctcatataatacaatatctaagaagaaatttatctcttataattaggaatttgattccttatgaagcaaatttattagaagaagcaatacggtag

SEQ ID NO: 59782 - DNA, 906 bp, Streptococcus sp. GMD2S; identical to SEQ ID NO: 59780

SEQ ID NO: 59783 - DNA, 2133 bp, Streptococcus sp. GMD2S; identical to SEQ ID NO: 59781

SEQ ID NO: 59784 - DNA, 906 bp, Streptococcus sp. GMD4S; identical to SEQ ID NO: 59780

SEQ ID NO: 59785 - DNA, 2133 bp, Streptococcus sp. GMD4S; identical to SEQ ID NO: 59781

SEQ ID NO: 59786 - DNA, 948 bp, Thioclava dalianensis
ctgactccagtacttccagaagacttggttaatatagtttcgggcgatccagaagagttgggtgttcatctccagcttgttcaacgggacgtgctcttgaaagattgcgtggcccgtctccactgtcattgcctgactgtggatgggaacggacgcgtcaagccggagcgccttgcggaatttatgcgcaactcaattatcgattatgccgtcccgaaatcgcggttggatgatgcgcgggcgcgggacgccagattcaagtccggaagcgcggttgcagccctgcaccacgaggcaatcggcacctttacggaccttgccaatactggcgaaggcggcgagatgctgctcttcctactcgcagagcgctttctcaaggttcctcaggtgctctgtaagatggacctgaagaccgactctcacatgcactatcatggtgcggacggcgtctatgcttccgtaaacgaaaacggccttctcaaacttttctggggcgagtcaaaggtttatggcgaccctacagcggccataagagattgccttgcgtcacttgcccctttgctcgtggagacggaccacgaacgcgctgatcgcgagcgggatctcgtgctcctcagcgacaaggccgatctcagtgatccggaacttacggccgcattccggaagtatttcgaccgaacctcaccgctatcgaacagggtcgaatattgcgggatcgcgcttatcgccttcgatgcggatttctatccgaaagatgatgcaaaaggcatcggggaggacatcctgaaggcggcgaatgacgaaatggaaaaatgggtgaagaatgtaaagaacagactatcggtggagaaactcgacaaattcgacatccagtttttctgcgtgccagtgccttcggcggatgggtttcgcgcatcgttccttaaggcgctgggtatcaaaaaatga

SEQ ID NO: 59787 - DNA, 2622 bp, Thioclava dalianensis
atgaaagataccgaactctttgattggctgacgggtgaggcgcttcgtgatgatattatcaggttgactcagatcacagtggcgaccgagataacaaatctggacgcaatccatgaatccgctgacccaaagaatagctttgactggcagcagcttcttttggccggaagccttttggccagatcaaccgaacgaacgcatcaggaggcggcgctgcggatcgcaaccgctgccgtcacactcgaaacttcgccggaagtgcgggatgcgggggctgtcctcctcgaaaagctgtccaatcgcaggtccgtcgagctggcaatacggcgaaaccggatcgctcccgatcttgagggcagactgggcgtgtcgatgcgccttgaagccaacagaagacgtttcgaggactcaatactccttgaatcgagcggaaaatggataggcgtaaacgattttcagagagaactatgggcgggcgcctcttccggcgcgggctggctttcagcgtccgcgccaaccgcgtccggaaaaacttacctcgttttgcagtggctgctcgatcacgttcgcacaagcaagacaaagatcgccgtttacctggccccaacccgggctttggtgagtgagattgaactcagtctgaaggagctatgtcagtcggacaccggcatcgagatcacgtcgctaccgctgacggaagtttatttctcatccacgacgggagacaagaaagccgtcttcgtattcacgcaggagcgtttgcacctgcttgtcaatcttctcggggaggacttcagtgtagaccttctcattgttgatgaagcacacaagatcggagacaatcagcgcggtgtaatactgcaggatgcaatcgagcgggtgtctcggcagaacccgatgatgaaggtcgtgtttgtaagtccttcgacacaaaatcccggagaactgcttgaggatgcgccgaacgatatgccaaaaacgtcggtcaataccgatatgccaaccgttctgcagaacgtgatcctagccgagcaagtgcctcggaagcccaaggagtggtcgctggaccttgtctggggcgattcacccataccactgggcacgcttaaactgtcgaacaagcctgcgggcctgaaaaaaagactggcgttcatcgcagcggcggcaggcggtcgcggcggcacactggtttactgcaacggcgcggctgaagcggaggacgtcgcgctccttatcagccagttggaaggctcggagaagacagatgatcaggaattgctggacctggctgatctggcccgcaaaggggtccaccgtaattatcagctcgcgccgctggtcgaacgtggtgtcgcttttcactatggaaacatgccctctctcatccgcaccgagattgagaggctgttccgcgacggcaagataagatttcttgcctgcacctcgacgctgattgagggagtaaatctctcttgcaggaccatcgttgtgcgcggtccccggaagggccgtgggaacccgatggagccgcacgacttctggaacctcgcgggacgggccggtcgctggggaaacgaattccaaggcaatatcatctgtatcgatccaaaggatgagaaagcatggcccgtcggcgtgccgaagcgctcacgctacccgatcaagagagagactgacgtcgttatatcttccaccgatgaactggctgcgtatcttgagaacagaaacatcgactctttggccgatcttgcgcaaggtgaagaattcgaacaggtcggggcttatctcctcaatacctatattcgtcttggtacgctttccgatgccgcatttgcgaagcggcattctccagatacgctccggaaactcgatagaagcctcgaaggtatttcggcgctgatcaatattacgcaggatgttctagtccgacatccaggcgtcagcgcggtgggcctgcagcgtttgctggaagcttttcgaaagtacgaaggcaatatcgaaaatctgctgctcgcgccttcggaaagcgtcgatgcgtacgacaggtacgtcaccgtgatgcgacggattaacgcgaatttgtatcctgtctttctgccggacagtctcattcccctgcacgcgctcgtggttgtcgagtggctgaaaggattgtctttggctgcaattatcaggaagcgtatagagtatcagcagcgaaacaacagatcgttcaagcttccagtgctcattcgcgaaacgatgagcatggtggaagagacagcaagattcaaggcaccgaagtatatttccgcctatatggatgtcctccgcctgttcttgactgaagccgagcgcgaggacctgattgatgaagactttgacatcgggatagcgcttgagtttggcgtctccagcatcacgcttctctcattaatggaactagggctttcccgcatgtctgcggtggccttgtatgagaagattgcgcgcgacgatctggacaaggaaggttgcctggcctggattaatgagcatggcccgaatttcgccggaatggacctgcctaaccttatcgtcagggaaacgctgcaggtatcgggccttgatgatccggaagcgggccacgaattcagcgaatag

SEQ ID NO: 59788 - DNA, 909 bp, Flavobacterium sp. F52
atgaaagacagtctaaaaaagctaatagacaagacacttatattagagtataaattatcccattctactttgggcatagataaaacttgtataactcataaagatttgaatgatgattgttataaaaatgttgatgctgaagatttaaataggattatttatgaaagtatcttgtattatgcatatgatgaatttcaattactggacggagatcatcaaaaaatgtttatcaaagcatttaatactaaatttaaatacaattatactgcaactgatttagcaaaaagaagattaggtatttacggtgaggcattattatgtactgtacttcatcacttttacaatacaaacactttagtttctagaggatatttctatgacatacaaaaaaaatcagaagtaactggatatgattctttccatttaattcaaaaaggcaatgaaattgagctttggtttggagaaaccaaattttatgaagattgtgaagacgcgatcgatagtgtttttaaaaacatagaaaaggcaatttcagatgattatttagttaatacgaactttacaacaattcttcaaaaaaaaggtaatattacagataagagctcaaaactttataaaatacttgatcactgggaaaaatgcataattgattcattagcagacgagttaatcaaaaatgaaataaaattagtataccctattcttgtaacgtttaacaaaattaataacgattataatgaaacgattaagaccgcaattaagcatattaatgataattataatcatataaaatttgatcaaataactatcgaacactcaatattttttattctgattccaattgatgacgtaaaatcatctaaagaaacaattataaaatggatagacaagaaagaacccttaatgtag

SEQ ID NO: 59789 - DNA, 2409 bp, Flavobacterium sp. F52
atggatagacaagaaagaacccttaatgtagtaaaagcattaaattcatacaatagcggtaacttaccaatgcacaaactattagatgaagtttgtgacttttttgatttcattaaagatgaagaacttgacgattcagataaaagattcttaatttatttgtctaataaagttggagttcctcaatactatgatgttttagataaatttaactctagttatacttcttcgattgaggatgaaaacattggcttgagtactttttcatcattattttatgaatcctcattattcaccgatgaagattcaaagctacacaaatttcaaatggatattcttaatttatttgaaactcaaaagcaaaacagatattttctatcggcatcaacatcgtttggaaaaacgcatttagtttacgaagtaataaagaaaatgaaatatagaaacattgtattaatatttccaagtattgcattactgtcagaaaatctatcgaaaattaaagaaggtaaaattgctttccctattgattataaaatccatacattaagcgatatagataccgattatggattaaataatattttcatttttactccagagagattcttatcctttttagacaaaaataatacatctttattaatagactttattttcgttgatgaagtttataaaattgataatggatatgtcattgatgatgaagcgaaagaaaatgaacgtgatgttgcctatagaatggcaatattttatggactatcacaatatacaaatgtagatttattacttgcgggaccatacattgaaatatttgaaaaaaaatcacctggatacaacccttcatttgatttattcttaaatgacttcaaaataaccaaacttttaagaaatgaatatgaaattgtcaaggttagtaaaacagaaattgaaaatgtaaaagcagaaataaatattgatggtgtaaattttaattttacaaaaaagaagactaaaagagcaagaatgcaggaaatcttggatcgaattctattagaagatgaaaacgcaatagtttattgtaatacccaagccaatgctgaaaaagtagcaaatgaatatgaaaggtctaatatagacacagatttctttcaggcatttattgatcatttaaaaaataaatatgacaacaggtgggttgtaattgaatccttagaaaaaggaattgcagtacaccatggtgttgtgccaaagtatattcaaaaagaaatcgtgaacttgtttaacacaaaagagtcaaatgtaaatatactaacttccacaactacaataactgaaggtgtaaataccactgctaaaaatatgattgtttacaaaagtgaaaaaggagctggcactaatggaaagcccttattaacctttgatgcaaaaaatattgctggaagagctggacgatttatggaacattttaaagggcgtgtaatttctctagaagaagagtttcttaatgtaataaatgaagttgggaaccaaattgagcataagaattatcaattattaaatgaaagaaaagaaattgatgatgagatgactcctattgaatatctaaatgaaacaagtaaacaaagacttgcagaaattaaaactttacaagaagacagagagattccagaggaaatactatcgcaatttaaagtaattagcaaaagagataaaataaaaatatatgacgctattaataatctaaatgctgaatctcataaaagaataaatactttgattcatgatttaaattctgggccatttttagtattaaatcaaattggctttcaagaaatattagatattataaaagaacttactattgaaaataataatttatattttttaattgaacgaaaatacaatactaagaaaggagagacattctcagtacttattgcatctctggttagttacatctataatggatatgaaggcgtttacaattacaactttaataggctcatggataatattaataagagagctgaagatgctattaaaaaaaataaattatttgacattgaaaaggaaactaggaatgcagtcaattccgctatgagaattacatcaactttagtttttaatacatttaaatatcaattagtaaaatacattggagtttttaatctaatgtacaaattttatatttctaaacatcaaaataaagattttgcagatgtaattggtattgataagttactcgttaaacttgaatataatgcatttactcccgaggcaagaactgctagtgattatggtgtcccacaaaatattataaactattatgactcaaataacgaatctgaaagaagaagattattagatagttttgataattatgaaaaacaaatataccaaaggataaaaaaaataattgaagaataa

SEQ ID NO: 59790 - DNA, 909 bp, Propionibacterium sp. KPL2000
atggcgggtacaggaatcacgccgacgttgaagggagccaccttcggcgacacgttcatcgaagtgcaacaccccacctcgttggggctgctcaacagcgaacagctgcgccttttccatctctccgtgcagaacaaccgcttcaactacaccgacttgacgaaattcattcgccgcaaccttggcagctatgtgttctcgcgagccgagatcgaagactatcgacgttccgacgacgttgagagtattgccttggaggctgtcgaacggattcgagcccaacaaggcgacggcggcctcggcgagatcctgctgtacgtgctcctcgaacagatcctggaagcaccaaaggcactcagcaagatcgagttggaacgcgccgccgggcaggtgaccagtcggtgcgacgcgatccacgtgctcgcccctggcggtcaggccccgacgaactgtctcgtcttcggcacctccaacgtcgtcggcgacatcgaagatgccatcgaccaggccttcgaccgtgtcgtggcgatccgcaacaatcaagcgaccgaatgccagcttgccgagcagaccatctttaccaagaccactgacccggccacggcgaacacgatcaaagatctgcttgtgccccaacgtggagcaaacacgggatacgacaccgcgttctccatgttccttggctacaacctcggtcttgctcccggtaactactcgaacgaggcatatcgggctcaactcgatcagaagatgcgactcgatatcagccaccacgcaagctacatcacctggcagatccaggatcggggcttgagcgcgtattcgttctacatctacgtgttgccgctcgacgacgtttccgtagacccgggcgagatcatgacccgcgttctgaacggaggcgcttga

SEQ ID NO: 59791 - DNA, 2646 bp, Propionibacterium sp. KPL2000
atgactaacggacaagtcaacatcggcgacgtggtgttcaacgacatcgattccaacgagtttctgcgtgagctctacgccaacttgctgcacaactacggtctttaccgcttgaagctgaccgggtgcgctcccttggacgtcgatcttgaagcggcactgcggtttgccgacctcctgtcgaaatccacccatccccacaagcgagacgtgcaccgggtctgggcacaagagatcgcactgttgtgccaaatcctctatccggagaaccgctacacgaaagcctacgtgcctgcaatcttcactacgctcggcaactatccggggcttcggcaacttggggcgacaagtgacgcggggattctggccgccgcttttgaggcctaccaatccgaatacctgaccgttccgggtgtgcaggacatgaagttcttcgccccgcagaaaaagatttacgaccggcttgctactggcgagttctctttttcagcgccaacatccctgggcaagtcgttcatcatgcgcacgttcatcacttcgcaggtcaaagctgagtcgcgcgcgaactatgcgatcatcgtgcccaccaaggcgctgatcaatgagacacgttcgaagctcatcggagaactcgaagatgaacttgagcggcacaactaccgcattgtcagtgcagccggtgacatcgtgctcgaaggccagcatcatttcattttcgtcctcaccccggagcgcctgctctacctgttgatcagcagaccggatctgcgattcgactacgtctttttcgacgagtcacacaagttgtcgggtaagaactcgcgggcaccgttctactaccagaccgtcactctgcttcaggaccgacccaacccgccccgcatcatctttgcgtcgcccaacattcccaacccggaggtcttccttcggctcgtgagcccagcgagcgagtcccacaaggacaaggctatagcgaccaggtactcgccggtggtgcagttcaagtacctcgtggatatggacgagcgccaagtcttgacctacaacgactatgcccaggagttcacacacttagcaagcctcaccgatgagagcgtgacctcagcagctctgattcaattccttacgcagtcaacgccgaccgcagaggggagacgaggtcaaacaatcgtcttctatgctggccgtcagcgagccgtggaggccgccgaggaatacgcgcgacgactgccgctgctcaacgaccgtgacttggatgcgctggctaaggacgtagagcgtgatgtccatgaggattactacttgtgcgacctcttgcggaagggaatcgcctaccatatcgggtacctgccaccggccatccgcgagcgcatcgaggatctcttccgtgcgggcaaactgaccacgctgttctgcaccagcacgctcctcgaaggcgtcaaccttccagctgacaacctggtcatcacgaccaccaaaatcggtcgtcccaacatgaccccggtcgacttcaaaaacctgatcgggcgcgttggccgcatcgagtacaacctctacggcaacgtcttcatcatcaccggcgaagggctcgcaaataagagcaccaccgaatcgctcctgcaaactgagatccccaagcagaagctatccatcgagaccgactcgaaagtcatcagtaagtcgatgaaagaagggatcgtcgactcactcagggaaggaaacgtccagttcgccaagggcgacgaatcctacgaagtgtacgaaatgaagcgcaagttcggcttgatcctcctgcgtgacatcgcccagggacgtgacagccttgtccggcacgaatttgcgccattcctcgatggagacaccgtacgtgccatccgagaagcgttcgttgagcgcgccgacaaacaagacgacgacattaatgtgtcgatcgaccaggccgaatcactgaccgatgcgattcgagccggactgaaataccctgcgctttccggcgacggaaaattcaactacgacgacacccttacgttcctcgaacgacttgcccgcatttttaagtggggcacctacgattcgcagacgctcggaaagacctccgaagacggaagccggttcaccctgctgcgctggtacgccgtgcttctcaaccagtggatggaaggccacgggctacgctcgatcatgaaccgcgcactcgactaccgccgccgcgaaggaaccatctacatcctctggaagggaccagttgcctacgacgacagccccgcgcagcgaaacatcgtcttcggggacatcctcaaaaccatcgaagatgtcatcctgttcagcttgtcgaactacttcttgaaattctccaacgaatacaagactttccacggcgtcgagcagttcgacaacgactggtacgagtacgttgaatatggaaccaccaaccccctcacgatcctgctgcagcgcttcgggttcacacgcgaaagctccacctacatccgaaacagtctgcccaactgcctccgcaaggaagaagaccagtacttcctcaaccccgccctgctggagagccccaacgtaaacgtacgcaaggaagccaacgagatcctgttcaatgtgcccgaagcattcacgtggccaggatcagtgttctaa

SEQ ID NO: 59792 - DNA, 909 bp, Propionibacterium sp. KPL2005; identical to SEQ ID NO: 59790

SEQ ID NO: 59793 - DNA, 2646 bp, Propionibacterium sp. KPL2005; identical to SEQ ID NO: 59791

SEQ ID NO: 59794 - DNA, 924 bp, Acinetobacter sp. ANC 3789
atggaatttaatatagtagtttcagatgactttatagatatatgttcgaatgaaaaaattttaattaaagaaaataaaaaagtactttcttttttaaatgactttgaagatggtaagtggagaacgagtaaattcaatagctttatatgggataacattgctgaaacggctttaaattaccaagagaggaaagctttatttgataaaagtcagcaaaagatggttgcagctgcaaaaaatctaagattagcaagtgagagtgatgaaatagggcggggcagtgagattgcggagatcatgctttatgcaataatgaaaaattattataaggctttaccagttgttcctaaaatttattacaaacagaatagtcaggataatgctaaaggtgctgatagtgttcatatagtagttaatggagatgaatatagcctatggttcggtgaggcaaagttttttaatagcttaaatgatagtaatttttaccaaataacaaattctttgtataatgcattgcaaactgagaagttgaaaaaagaaaattccataattctaggagttcgagatctacaatattctggcttagatgaggatcttattggtagaataacaaaagatttatcctcacaaaatagtattgataatatcaaaaaaattataaatgtaccaattatgattatacatgagtgtgatataacgaaaggtgaaactacttataatgaggactatatagatgcaatcaaaaaaatgtatcgagataaagcaaattcatattttattaaacaatttaataagttaaatgaaatacatttatataatttgattaattttcatttgatattatttcctgtacctgagaaaaagagaattgtagataaatttgttaaacaagttgaattttataaagaagaggctgaagattaa

SEQ ID NO: 59795 - DNA, 1917 bp, Acinetobacter sp. ANC 3789
atgattaaggataaagcaacatggcaagaaaagttcttactggaagcttttactgtggatattggtggtaaagaagttgtactgcatagggaacaatccaaattattgtctggattattagatggaaagaatttggctgttagtgctccaactagctttggtaagagctttattgtagacgcttttttacagttgagaaaaccaaatacagtaatgatgattgttccaacgattgccttagctgatgaaataagacggagattacagcctaaatttggtaaaaattataaaattataactacaacagatattgaattagccgaaaaaaatatattaatcttgcctcaagaaagagctttaagctatcaaggtgtagtagatcatattgatttgttaatagtagatgagttttataaagctagtaaacaagaaaaagatagtagaagtataagcttgcaaagagcaatgcttgagtttcaacaaattgcaaaacaaagatattatttagccccgaatataaatagccttacaagcaatatatttactaagggaatagaatttgtaagtattgattgcaatacagttgctttggatattgatcatacctatgaaagaattaataggaattttgataaaaatacagctttattcgaaatattaagtaaagcagatgggaagactttgatctatgttaattcgcacgcatcattaaatgatgttcttaccttgctttcagaaaataaagatccaatagatcatgcttttttaactgagttttcaagatggatcaaaaaaaattattccagtacatggagattaggttatttaatacaaaagggagtttgtacttataatagtaacttacatagatccttatcacaaatacaattaaatgtatatgaaaatgattttcctttagatgtaatggtttccacttcatcaattattgaaggtgttaacaccagtacaaaaaatattattttatggagtaacaaactaagcacatcattattaagttttttcacttataaaaatattatgggtagaagtgggaggatgtttaaatattttattggaaaagcttttttattagaaaagcctccagagaagactgacttggaattagatttggtacttcaagatgaagcatctttaatggttgatgacgagtatctcagagaggaattgagtaatgatgaattgcaaagaattattacatttaaacgtgaaatggcaaatttgcttggggtaaaatattcagatttaattgccttacaggacttagatgcatcagatgcttctacattacaaaaaattggccatgcaatattagtgaagaaatttagctctaagaaattgaatttattaaatgcagattctaatttttgggaaagccctctaaaagatatacttttaaatgtcaggcctgcaggtctgggtgggtcatatacagatattattcattatattttagtggttaaagataactggactaaaaatattccagaattattattagaattggaagattatgatttgggtattgatgagttctttaaatttgaaaaaattatttcttataacctagctagtattttgaaatcgtttgaaactgtttataataaaaagtatggtagtcaattaaatattagtggttttattgatagactttcacatgtttttcttcctaaaaatgttttctatttagaagaatatggattaccaaggtttatttcaaagaaaataaatgactttaaattgatagatttagaaaataatgaattagaaattaatgaaattatagatcattttcttcagataggatatgaaagaataattgatcagattgataatttagatttatttgatgagtatgttttaaaaacattctttacaggtatagaagtcaaaaagtaa

SEQ ID NO: 59796 - DNA, 1416 bp, Lactobacillus mellifer
atggtgaaactaaaatttgggagtttgctatctggtttttgggcttgctctaatatgacgcaatgtgcagcctgtgatcacttatttaaattagttaattctaattatgatgtacaagagggagttgctacgaaaatgaaaaactgtttagcttctttacctcgtgatatagcacaaaaaatttattatattgaagaggatgatgaattcgttgaaaatattcaaaatgatattgttcctctaataacaaagccgttgccttttattgcttttattatcgattgcttgagaaaagatagtagtttaaatgatgacaagtcaattggaatgaaatctaaaaggtattatttaaagtgtaaatcctttgatctagcaaaaactatagcagactttttattctttaccattatacaaaatgataatcgggattcagaaacacacgaatacataaaacgtctttctaaatcaaaaattaattcctttaatacaaaaggattgtcattgataaaagcgagcagtccaccaaaaaattttgatcttacatcttctaatgataattttgattctgtatttgaagaagtttgtgttggtaatcttaacatcccaaatcctaataatattcatggctttaaattgaaaaataatctatatgaagcagattacacacagttaattgaattactacaaaataatatttgtaattacgtttattctcgagctgagatagatcagctaaaaaaacacattgatttcgcagatgtccaacgaaaaactttattagcggcttccaagctaaatatccaaagcagtactttaggggatttgttaacttatctttttattgaaaacgaagagaaagcacccaaattaatgagtaaaatcgagtttaataattacaaaaatgattttgatggcatctacctaaagaaaattaatgatagttatcagattatattaggagcatccaaaatacattcttcgatccacgatggcatcttagacgcagtagaaagaatccgtacattgatttcacaatcgtttcatccttctgtattggtatcagattttaattttaatagaagattttctgtagatgatataaaagcactgaaacaaatatttattcctatgcatcctcaatatgagcttgaggttaagggatttggaattttcatagggtattcgatgaatttatcgtgcgatattaattcgctatccagtaaagaagcgcggatagcaattaattctcaaattcatgaagacttaaaaagtacaatttttcaattaaataaagctattgaggacagaaaaattcagcagtattcgtactatgtttatttattaccatttaatgatgcggtaaatacaagtaagaaaataatggaaaaggtattaggaaaaaatgaaaacaactaa

SEQ ID NO: 59797 - DNA, 2595 bp, Lactobacillus mellifer
atgaaaacaactaatcgcatagtaatgcaagaattttttggagatataatgtcaaataaatatctaaaagttcttttttctaaacttttagatgaatattcaaataaagtttttggtaaagatttccaaatagatctatcagctaaacgtgatttgatgcgttttgctgatttactagcccattctagaatgcttaaagaatctagctatcatcaaaatttatcacagcaaattatttttatgttagaaaatatatttgtcgatgatatttctatccaatttgttaagcaaagaattctattttcattaaataattattcttttccaaataaggaactacataccacacaatctggagatgcacttctcaattatttggtaaatagttacaaaaaagatgaattaaaaattcctggttcagagaataagatttttataggtgatcagaaagaaatttacgataaaatgtcgagaaacaacctaagtttctctgcacccacgtcaatgggaaaatcttttctggctagaacatatattaaaaatgaaatattgggtaataaaaaaaataattatgcatttgtcgttccaaccaaagcattaatcaatgaaatatcaagtaaaattatcaacgatttggggaatggtttatctcaaaaaaaatatcgagttattagatcagttggtgagctgaacgggtataaccaaggtaatatttatcattatatatttgttatgacacctgagagactaatgtacttacttatatcatttccaagtatagatttgccatttgtctttattgatgaagctcaaaatatctccaaacatgatgaaagatctgctttttattacaatctaattgacatgttggaagtaaaacattcccgaattgcatttgcagcacctaacatacctaatcctgatatttatttagaattaataagtaacaatgataaagaaaaggatgctaggagcatagaattctcaccagtagttcaaataccatttgttatcaattttatagataaaacaattaaaatatataattccataaatgagcactttcaagcattaaataatataaaagaaaatacgttgtttgatctaattgattccttttcttatctgtcgaataatacaactcaaaatcttatttactgcaataaaattgataatactattggcctatcagtgcagtatgctgaaaaattagaagataaaaatgatgttgaattggataaactagcatcagatataaagagtgaaataaatgaagattattatttagccgatttagtaaaaaaaggggtagcttatcatgtttcctttttgcctaaaagagtaagaataagaatcgaaaaagagtatagatcaggtaaaataaaaaatcttttttcaactagtactttgatggaaggagttaatcttcctgctgataatttaattattacaagtaataaaaaggggaacgccaacctaagccctatggattttagaaatcttataggtcgtacgggcagattgaatcattctatgataggaaatgtgtttttagctataatgccagaatcattttctgggaggtctaatgaacaagactatgtggaattgcttggatcatctaacgaaaaacagaaattaaatacagatcttttaactaaaaatgtagtattgctagtgaaaataagtcttttagaaggagatcttacattgaaagtatttcacaagctttctaattggaaatataagactattagaaagtttgtactgcaatatcttaatgatattcaaaatagtaggcaaagcattgttagaaaaaaatttcaacattatataacacatcaagaggaacaagagatcctaactaaattatatgaaaagtataacgataatttcgataatgatgtaaatatttctactgatcagaccagtaaattaaagttaatgattaaacagggaatgagatacccacgatttgatgataatgaacaacttaattatcaagaggttctgaattttcttgatcagatggattcaatatttaattggaaacagtatgagaaaggtagaattggtaatccaaataagcgccgttggtatgctgttatattaattcaatggatatcgggagtcggcttaagaaatattattaataaagcaatcgaatataaacgttataatcctaaaaacgctatatatcacaatcaaaaatattatgattttaatgattctaagtcgcaaaaaaatattgttattaatgatacattaaatgttatacagaacgtattactttttgactttgcgaattatttcctcagggtatcgaaagaattaaaacattatttaaatgtaaaaaacttggacaatgattggtatgagtttatcgaatatggaactcacgacaagttcaggatttggttacaaaaatgtgggtattccagagaatctgcttactatatagaaagacatccagaatttttttataatgataatatgtcatattatttaagcagtatgttgattgatgttgatgatgctaaccttagagatgaaactagggatattatgtacaatcatcctgaaatttttatataa

SEQ ID NO: 59798 - DNA, 948 bp, Mangrovibacter sp. MFB070
atggaaagtgtagaaaagctcaaatcgataaactggaaagagttaattacgaacagtcacgagtggattgaatcaaggttggttaatcatccttgtgatagtcaagctaagatagtttctaggatttttactatcccattcagtggagttatacaagagcatcatcacttagtggaatcaatggctgatgctattgaacactacgtttttgataaagaagctcttgctaaaatgcaagcggatggcgttaccccttttagaaaagctgcacagttttttggggatactaatccaatcaaggatggtaagtacggagagttgctcctttatatcctatctgaggctatacttaatacaccgatggtctcacataaaatcactaatttaactaacttaaacgatcaggttaagggtggtgacggtgttttcttcggtgtgtatagagaaaatctttcaattttaattggtgaatcgaaaatatataagagttttagtggtgcgctggaaagcgcatttgactctcttgacagatttacaaaaaattatactagcggtgcacttggtcatgaacttttcatggctagaactaatatatcaagtaattttgattttgaaactatggagttaatttataaagcatttactcctggtgatgatatttactctgagtgtgttaaaacacacccggttctgcttatatttgaagatgcagaaattaagagcatagaggaaaaagcaatcaacaaggcggaggccgaaagactgtttgatgcatggcttactaaaaaaaaggaagcgataaagtcagacatcgatgcaaagttaatcaaataccctaacgttaaaccttgcttcttagactttttcctaatacctatgacagatgttggtgagttcaaaaagtcgttgtatagagctatccacggaatagattataaagaaagttaa

SEQ ID NO: 59799 - DNA, 2661 bp, Mangrovibacter sp. MFB070
atggctgaaagtactgctacaacagcaataaatcatcaagactttacaagcgtttttaatttattgattgagcatttgtttttgaaaaatagaggtaaggaagaaaaatataaaatatctgatgaaatgattaggagagcaacttggcttgcatcacttggatcatcaggcaacgaaaacgataaaaatattgcaagtgcattcggtactttgctctatttatacgacacaagtaatgaactgtatctcaaagcttgttatattctgcaatctagagctggtaatatagtctctgctaagcatttagaaggtctttttagtcaagggaatattattaaacactttagttcatcattggattttgaactcacaagtcaaaaatttcttcttgaaaaaagagtttctgataataattatatttattttactcattttcaaagaagtctgtgggacaaactagaacgcggtgaaaacgttgcagtatctgcaccaacatcggccgggaaatcatttgtaattaaaaggtatgtctacgatagtgttatatctgcaaatgatggttacttcgtttacgttgtaccctcaaaggcgctaataaaccaagtcggcaatgaaatgtctagagagttaaaagacatagctacagtgatgacaacctataaggactccgaaaatgatgatttaaaaatagtatatgttctcacgcctgaaagatgtatgcgattgttaaatgagaatagtaacaaagcacctaaaatagttttttttgatgaaatacaaaatttagaggataaaagtaggggtaatgtttttgagaatgttatctatagaatgacaagcttatggcagtcaactcaatttattatggctggcccatacataatcaacttacatcattcactcaataaaattattgaccttaatctagttgagcaaacaacttctacaaccccggttttgcagttaaaagttgtacttacagtacataaaaataagaaaaccgttaattataaattaataagccctgttggggatgcggtattaggtgagtatgatataggtaaagcattgtatagtaaattatcttcatcaaagggtgcagcattaaagcatataacttctattctagatgctgatgaacaaaatataatatacgcacctaagaaaaatttggctgagggatgggcgctggcaattgctcaaactgacaatgaagattcggagttagatgaagataatactgatttagtatatgattcaagaatggagagtttgtgttcatttttagaaaatgagatacatcctctgtattctcttgttagatgccttaagaaaggggttgcatttcatcatggtggcttattggatgtggcaaggctcgaggtcgaggatcttttcgctgatggtgcgattaggaatttggtgtgcacctcaactttactacagggcgtaaatcttcctgctgatagaatgattgtaatatccccaaagattggtgactatgagttatcccattttgattttttaaatcttattggccgtgcaggtagaattagtacatctttatatggtgagattttttgcattcagcttgttgatgaagagtgggctgaagataagattgagtcgaatgaaacaaaggagatacaatcttcagttttaagaaagctcaatgaatatggtgagtcagttgtaagttacattgatgtctacactaaagatattgttgatgctcaaggagagcttaatgctgtcaatcttgcctcctatctgcgaggccagtttttagtagacagagagcattatgagaaaataataagcaactccagtcttactactaatcaaattagagtgatgacgaatagattggaggcgttggaagatattttaaatgtaccgaaggatataatatataaaaaccctttcatcgatcccctcttgattgatcaactttattttttggttgaaagcgaaggtgttaataaatggatgattgataaatatcctagagtcaaatctggagtggcagatcccaatgctgaatttcagcatatgaattattataaccaatacaaaagcataattttacggctgaatgatatttttgagatagagaaagagattaattataaagaagatggcgtgtcaagaaaatcaagttatttcgtttctatctttaaattagtaaacgactcacacaagtggatgcaaggtagaaattataggttttttatagatgacatggtaactaagaaattaacaaataaaggcatttcagttgattataagaaggttgacgggattaccaattttgtaactacacacattaatactaatttgacattcattttggttaaatatctctcgctttgggctgacgtagtaagctcatttatgtctgaggaagaacgtacgttgaatgcatttttcctcaatctctcatctatgttagaaatgggtaattatgatcctcaggttttagaggtgatggcttatggaataaatagaagtactgcaattgaattattgaaaaaacaaaaaataaaaaatgagcaaaccacttggcaatatttagtgcaatataatttggataagctttcaccattgcatagaaaatatttgcaaagagcaggctttgggtcttcaaagcctgcacaatga

SEQ ID NO: 59800 - DNA, 921 bp, Paenibacillus sp. FSL R7-269
atggaatgggaaaagttagttcaaattgatgaacaatgggttagcgatcatttggtaagacaacacaacgcggaagatacaaaaataaaagtacgaggatatagtatcaagttttcaggaaatattctggattttaatgctatttcaacctttgtagctgagtcaattcataaatttgtttatagtccagggaaaataaaagaacttggtgaggtcaaggctgtattacaatctcagaaatacttcggaaaaaagaatcccgatactgacgggaaatatggagagctattactttttttattagtagaaagcgttctaaaatgcccaatggttgcttataaaattacaacattatcaaacccaagagaccaagttaaaggaggggacggtatctttcttggggattatgaatatcagcctgataaataccattcggcatgtctcataggggaatccaaaataatggacggattcgctgctagtgttgacaatgcattagactctttggatagatttcataatgaaaaatcatcatcacaatttagtgccactgaatttatggttgctaaacagagtctaagtggtgatttagatatagattatgtatatgattgtcttacgccaggttctgaggcttttcagaaaaacattttagttcatccagtttttctgatgtacaatacgagcagtattgataccattgaaaaaggagctctgactcagacaatggcggaagagttaattaaagaatattttgttgatagaggaaatgaacattttcgtcttatacaagataagataactaagtgggaaaacctacaaaaggtttatttggacttttttattatcccagttaataacgtcagaaagtttagaaacacagtttattatcaaatacacggggtacagtatgaaggataa

SEQ ID NO: 59801 - DNA, 2661 bp, Paenibacillus sp. FSL R7-269
atgaaggataatttatgtgaacaggcctacgatcatgcaatatttagcaaggttttagatacaatgctttacaattacatagcgaaaaactttaatggtacaagcaaaaaaattgatatgagtgaactaaagaaagctggttgggtggcctctattctttcagatagtaaaacagatatacataaacaaagggctcagatttttgcatccttgttgtatttattgtatagcgatgatgttaattgtaataaaatgagctacataattttctctcgaactggaaatttattggcaactaaatttttatctgtactttatgattccaattcacacaaaaatctgtcacatataaaatttaaacatgaattcggaacaattcttgattacgaagttggactcaaacgtgatgaaaatactatagaccttaaccaagaatcaattgttacaacagattttcagaggaaactttgggaaagtttacttggacagaataatgtttctatttctgctccaacatcaagtggtaaatcatttatcatccaaagttatataaaatataagtttgatatattaaaaaaattcaacgtattgtatatcgttccttcaaaggctttattaaaccaagtaagtgaacaatttcgaagaatattaaataaagaaataatgattaaaactgcctttattaatactcaagtggactacgacaaccctaagtatgaaaaagtaatgtatgtacttacaccagaaagatgcttgaatgtgctttatcaaaagaatgattctttttctccagatttcatttttattgatgaaatacaaaacattgaagatgaggaaggaagaggggttcttttagaatatgttttgaatgacttaagtaaagcttggccgaaaacaactatagttacggcaggccctaatatatcaaatagtgacactttgttttctaatatattcaataaagaatgtgttgagaatgaaacgagtttatcacctgtattccagataaaggccattgtttcccctgattttatttataacaatcttgatctaaaagtgacctctttacaagaaaaagctcaaggactaaatatttcattgccagttgattttaatgttaaacaggtcgcggattccaattccggcactttaatgtctaagattgtaaaaaggatagccgatggagaacaaagtattatttactctccgagaacggattttgctgagaaatgggcattggtgcacttaaattctttagaatccaaagctagtaatgctcttagagaattaattgattatttaaaagaggaaatacacccaaaatattacttagttaaatgcttagaatatcgtgttgcatttcatcatagtaaattaccggaacttgttaggaaagaaatagaaagtctttttgatagtggagagatattgtatttatactgtacctctacattaattcaaggggtaaatttacctgctaagaatttgttcctaatttaccctaagaagaggactgatgaattatccccatttgaatttggaaatttaataggtagagcaggaagaattaaagattcattatatggctcgatatattttgtagcaaagaataactctgataagatcatagcagaaaaatactttgcagaaaattatcaaaaagaagtggttttggcgagtactaaatcattaaaaaaggatggtttcatagaaaatgaattgaaggacagggcgcttgatgtaactagaaacaagagtggccatacaattactttactgaaacataagtacttaagtggtgaaaatgagttggaaacttatctgaagaataaaggcttagataagtcggaaattgcattaataatagatgaacttgaatcacaacttttcaatatagagctaccgtatgaggtattaaaattaaatccttctgtagaccctatgttacaaaataagttatatcaaattatcaaagaagaaggaattattaattgggttatttcccctaattctaatttctataagaaaattagaaaagtagatttagaaaattatgaatttaaagatttgagtttttattggcagttttctatattgtgcacaaaaataaatgacgttttcgaagttacaaaagagacatacttcaaacataacattaaaaaattatatatgggtaatatttcacactttgggtttaggtggcttcaaaatatgagctttagggaaataattgaggaggatattaattactatgcaaatgttcgtgaggagatagatgctgagaatgagaatgatattaataaaagaattaataatgtaatgaaggttcactcaaaagttatcacatttaccttggtgaaatactttaaggtattggctgatattttagcatactcattgtcagaagaagaaaaggagaaatataaattaattttatccttacccataatgcttgaattaggaacaatggagcctattatgattcaattaatatcgttaggtattaacagaagtgtggccttaaaagtatttaatgagtttaaaaaggaacacaactatctggaaagggatgttattgaatggctctttacaaaaggttctaatcttcaaatgaagccgatctatataaaatatttaagagaactaggttatattcgttaa

SEQ ID NO: 59802 - DNA, 909 bp, Paenibacillus sp. FSL H8-237
gtgattgatacaagtccattttctaaaaagatgttagaagtgttgaaacacagtaaaacttacaaagtcaacaatcaacagaataatttagaattatttacttgtcccattaatgcaaaccaatttgattatcatcgtatggttgaaagtttgcttgagtctgttgctgatttttcagtatcgagaagaacaaaagagcaatatcaaggatcaccgatgactttatcgcaaaaagcacgagaaaaatttagggagtataaagaaaataaaggtgagcttggtgagttcctacttttttgttttttggagggccacttaaatgctcctaaaatattatcgaaattagagttgaagacatcaacggaattgtacgtcaacggatctgacggaatacattttcttaaattgccaagtggtaactatcagttaatcttcggtgagtctaagttatacgaggatttaactgatggattgagagatgccttcttatcaattaacgattttttgaaagaagagaatcaaaaaggaaaggagaagagcggaataaggtatgaaaaatctcttctttccgctagtgtatttaaagaaacttggagtaaagaagaggaggattttattacacaactcgtttatcctactaataaacaaccgtttgaagttgatgatgccttcggtatatttataggttttgaaatagagttggagaagtatcaaagaagattgcctaatgacaaatttagagatatgattgatgatcatgttaataaaattgtagaaatgaaaattgcaaacatagaaaaatatatcgaacaacatgagttatttgggtacaatttttatgtgtatacaatgcctttccttgatattgagatttctagaactaaaatactggagagtttaataaaatga

SEQ ID NO: 59803 - DNA, 1479 bp, Paenibacillus sp. FSL H8-237
atgacacttttaaacaaacttgtagatagagccctacacgacccctacatgtcaggtctgttgaataaattagaaaaacaatatgcaagctatttcataagtgggaaggttaagatacataatcttactgaaaaagaatacttagatttgcttcgttttgctgatatactttgtcgatctgaaaaatatgaagcaagaaatatagcatataaaatagttagtttacttcatgtattctataatgatgatcagatgtttaaattgcaagcctataatgtattgattaagttgggtaattttccatcaattagaattgtattaggcgaaactaaagtgaaatcagatgaagttatgttagatcaaattattaaagaaacctttcaagcagcgccgggttcaaataatgtgttcacagatactcaatacaaattatttgaaaaaatgaaagacagtaatcactttagcttttcaggtccaacatcttttggaaagtcttttatttttgaatcattcattaagtatctgattgaaaaaaagaatggctctgataacattgcgcttttggttccaacaagagcattgataaaccaagtctcaacaaaactaaaaaatgtaataaatgacaataagtataaaatattaactaaaccgatggtacctttgttatacaagaaaaatgaaagtaaatttatttttgtgttcactcctgagagacttatcgcgtacttatctgaaaataatccagtaataaactacttattagttgatgaagctcataaactattatctgagactgatactcgtgctccactattttaccatgcactaatgattgcgaaaagaaaaagtataaatctgtacttctcatcaccgaacgtacccaataccgatatttttttgcaaatggttggtaatagtgtggaagaaactctgagtataaaagaaaactcggttgcacaaaatcgtttctttattgattgtattcaaaaaagagcactatacttttctgaaaatggtgaggagaatgtactagagtacaatggttacgcatctgatcctcatactaacttaaaaaatgcaattaatatattgggagaaaagacaccgaatattatctactgcaatactaaggatgatacaattcaatatgctcttgagttttccaaaactttacaaaaaagatctaatagtgagctaaaagaattgattaatcttgtagaaaatactatgcatgaagaatattatcttgtggattgtttgagaaaaggtgttgcttatcattttggtggattgcctcaaagaattagggaaaaaattgagctgctctttcaaaagaagattataaaaaatattttttgtacttcaactcttcttgagggcgtaaatcttcctgcgaaaaatatttttatccttagcaatgcaattggactaacaaaattatcgaatggaatctggtgcaccaaaataccgattagataa

SEQ ID NO: 59804 - DNA, 855 bp, Ralstonia sp. GA3-3
atggagggggtatacggcgacaagccgcaacgtttgctcacgcaactctttccgattgccggggcgccacctggaagcagtttctgcgctggattcgaactggagcagtggcggtgcgacgcgctcgcagaccacttgatggattggatcgcagactacgcgcttgccgaggacgaactggctgtccggcacaccaacatgtatgtacggctcaaggaggcagcggcacgagtctactccagtgataagtatcgcaagcggggagaagtcggggagatcattcagcatgctatctgtcgcgacttcttcgatacgattcctttcgcgccgcgcgtcttttacttaacggcatccaacgatgtcgtcaaatcgttcgacatggtccatgtacgctatgtcgacaagacgaatattgagctttggctcggtgaagcgaagttctatagctctggggcggaagcggtagcatccgcaatcgaatcgatcagagcgcacatcgatgccggctttcttcggaacgagaagctcctgcttggaccgcaagtctccaagaccattccgaggcacgaagaaattcgccgactcttgtcccggcagacgtcactcgatgagctgttcagcgcggcggttttcccggtatgtatcgcgtgcgatagcgaagcggtcgccatgcgcgacagccaaaaggcgcagtattcggtggacgtgcaggaggagatggaggtcctgctcagcaagctgcgcgcgtccggcctaacccaacacatccgaatcgttttgatctacgtgccgctaggttccaaagagctcctggcggacgcctttgatgcgcggctgaaggggttggcacgatga

SEQ ID NO: 59805 - DNA, 2064 bp, Ralstonia sp. GA3-3
atgcagggcggtgctttgaagaaggcagtcttccaggtcatgcgtgacgccgcactggcgatcaatgagtctggcgaggacgatccagcgctgctggaggttgtgccccggttggccaaccttatggcgaccagacaagagcttgagtcctttcgcgaagtctttagttcactggcccgcgcgacgggcttgtggaactacattgacaaaagcaccgcagacggaccagaagcgctcatcgcagaagcggtgacagttcccgagctggataacgtcaccttgcatcgtgagcaagtcgcagccctcaacggcttgctttccggacagaatctgatcctcagtgcgccaactagctttggaaagagtcttctggtggatgcgctgctcgccacgcgaaagtatcgacgcatcgccatcgtcttaccgaccatcgcgttgctggacgaatttcgccgccgtattaaaaggcggtttggagacggtttccacgtcgtgatgcatccgagcgatcagtcgaccgacgcgcccacgattttcctggggacgcaggaacgtctcatcaatagagctgacctggggaagctcgatctaaccgtggtcgacgagttctacaagctcgatcccgctcgtcgcgatgagcgcagcgtcatgctgaacgccgctgtccacaagctgctcggtcgttcccgccagttcttcttcctgggccccaatattgacggcgtgaaagtatcgggggatggccgctggaactttaggttctttcgtacgcgtttttccaccgtcgcggttgataccttcgatttgcaccatgtcgaagacaagcgagggcggcttcttgaggaactcgcagaggatgagcattggcccgcgctcgtgttcgtgtcgtcgcctgataaggcgaatcggcttgcggtggaggcggcacaggcgatggcggtatccgacgagagcgccgcatttgcatcgtggctggccgacaatgtcggcaccagatggcctttggtcgaagccgtgaagtatggattcgcggttcaccacgggaggctgccgcgagcgattgctgcgcaaatggtgcgacttttcaatacgcgagcgcttcccgtcttgttctgtacctcaaccctgattgagggcgttaacaccgccgcgaagaccgtattcattttcgacaaggcgattaacagggcgcgatacgatttcttcacgtactcgaacatcaagggtcgggcgggacgtcttgggcaacatcacgttggaaaagtgtttctcttcaacaagcctcccgagcaaatcgaaacagaggttgctccaacgctttttgctgatgaggacgatgcgccggatgattacgtcgtgtatctcgacgagcccaagagggctgatgtcgtggacaatcgcgtcggcgctcttgggaatgcgctgggcctgagtcctgttgaacttcgccttgccgcgtcgattgggctggatgatgccgccatactgaaagaaatggttgagagatcgctacgacagggacgcagcctagtttggcacggagttccgaagtaccaggatctcgtcgcgctcacaacggtaattggatcggtgcgcaagccgtcaagctttgggttgcgaaagatgacacagttgccgcttttcatctcccgcctccgcgctatcaaatccatgcgcgatttcctgcgctggtacgacgagagctatcagggcgatctggaacagtacgacaatgtgttcaaattcctacgcacatgcgagtacggactgcctcagatcgttgcggtcatcgaactcttcgccaagaagctgcgtccggaggttgactacagcgtcctcatccaaggcttgagtcgatggttcaagcctgaggagctcaaggatctcgacgaagagggcataccgatccagatcgcggagcgcttctatactcacggtgatacccgccaacacgtaatccatcgactgacccaggcggtcagacagtcaaactccgcaatcactgctttcgagcggcaatggctgattggggcgcttgaactaacggtctcgtctcggccgtaa

SEQ ID NO: 59806 - DNA, 900 bp, Polaribacter sp. Hel1_85
atgagaaaagcattagaggatttaattaaaaagtcgattgtctacaaatatgatttgccatatgtagtaggttcagttcctcgaacaattttctctacgttagatgataaatgttatgctgtttcggacaatgattctctaataaaaataatttataattctatcattgattattctttcaatgaattagactttaccgaaagagaattagaagatttacatactatcgcatttcaggaaagaataaggtatgatgaagatgattcagatgcaacaaaacagaaatacggtttttttggagaagtaattttacattcaattttaaaggtcttttttggtactcaaacatttatttctaaaggttatttttacaatcctttagaaaattcagaatccaaaggatatgatgcatatcatttaattgagcatgattcgaaagttcatttatggtttggcgaaacaaaatttcatcagagttatacacaagctgtaaatgatgtattatctaaaattaaaaattcgttatcagataaatatcttagtaaaaatctacttgcattaagaaaaaacaaggacaatttaaatttaaaaggctctaaaattgagaaaattctaattgattggacagaaaatccaaatattaaaataattgaagaaataaaacaacattcaatagaattagtatacccagtaatcattctattccaacagaataaaaaaggttatgacgaaagtattaaagcaataccaaaatatatcgaagaaaaacataagttagagaagtacgacttatcaataccatattctgtgtttttcgtttttctgccagtagaagatgtcaaattggttaaatcagaagttataaaatggatagaatcaaagaagcctctaatgtcataa

SEQ ID NO: 59807 - DNA, 2292 bp, Polaribacter sp. Hel1_85
atggatagaatcaaagaagcctctaatgtcataataggcataaataaataccgtgaaaatcaaattgaagattacgatttgattaaaatcgtgtgcaaatattttgatgacatcaaagatgaggagatatccgaagctgatttaaggtttttaaaatatatttcgaacacagttggtataccgcatttttatgacttacttgaaaaatttaacaatgaaacagagataaataattttgacttaaacactctctcatctattatttatgagagtactttaaacttaacttcaaccaataaggttcataagtatcaaaaagagattttagaactgtttaaaccaaatcaattaaatagattttttttatcagcaagtacatctttcggtaaaactcacattgttttcgagataattcaaaaaatgaattatgataatgtagttttaatatttcctacaatagcattactttctgaaaatttgcaacgccttacttcagaagataattacaaatattttttagataaatattccattcatactttgagtgatatagaagatttagatgacaaaaatttattcatttatacaccagaacgttatttatcttttatagaaaaacgagaagaagaaatagattttgattttgcttttgttgatgaagtttataaaattgacaatgattatataatagacgaagaagtaagagaaaatgaacgagatgtagcttatcgattagcagttttctactcgttgaaaaaagatgttgacacattacttgcaggaccttatatagatttttcaagaccaaacgataataactacaatcgttcatttgatagatttttagaggtaaataatattaaattaatagattacaataattatgagattgtaaataaaacctacaatgatattaaatcaaaaaagaactactttatagatgatgatttagaacttagttttgaaaaaacttcaaaaaatgatagactcattgaaatagtacaagctattagcaacattaatgagaacacaattatatattgctattcaagaaattcggttgaatcttacgcaaaaactcttattacatctaaaatttttgaaaaccataatagtggtgattatgtagattttttaactcacatctcaaacaactttaataaagaatggacattaatcgaagcacttaaaaatggaattggtattcatcacggcttagtaccaaaatatattcaaaaagaaatagtttcattattcaataatgatttaattagagtcctcatttctactacaactattacagaaggtgtcaatacatcggcaaaaaatttaattgtattacacagtatgaagggaactaaaccactcaaaaaatttgacgcaaaaaatatcgctggtagagctggtcgatttctgtatcattatagtggtagagtaattgtactgaaaaatgattttatgaaggctatcaatgctgaagctgaaggaataaaacacaaaaactacgatttaaattccccaaaagatgaagtagatttatattatacagacgatgaatatcttaccgatgaagacagattaaaagttgaagatattagtagcaaacaaatagaaaggaatattcctgacgaagtctttcaattatataaagtagtaagtcgtttagacaaaatcgtaatttatgatagaattaagttattgacagatttagaaataaatgcaattaaaaagttaattagattcataaattttaaaatggatattgactatgatgggtttcaagtagttttgaatattatagaaccaattgtaaaaaatcaaaaactaaaatttctaattgaatataaaggagaaagtggtcaatattccactttgacacatttggttcacttttacttgactggcggttttagaggttcaattaattttaaacttggaaaaggcagtactgtcgacaaagctatctcagacacttccgaatttgtttataacactttaaaatatcaagttgtaaagtatttaggtgtatttaatataatgtataaattttatcgttttcaagtaacacaacagccgatagatgaagtaagtggtcttgataggttattaaccaaattagaatacaatgcatttacagaatctggtcgtattgcaagtgattttggagtaccaacagcaattgttaattattatgaaaattccgaaaattctgaaaacattaaacaatcatttgatgattatgaaattgagatatttaaaagagtggaaaaaatcataaaaggagaaaactaa

SEQ ID NO: 59808 - DNA, 1050 bp, Bacteroides sp. CAG:144
atggaattcggattaagaacaattttagacgaaagaatcaacgaaagcaatctaaaagcttattgtgttcggtttgacttcggattatgccaaatcgaagcttttgccgaaatattgctagatgcgttagttgactatgcatatggatttcatgctggcattttagaacaatatgacagaagagtacttaaagaggcagctaagtccttatataagattcaagggtttgttgatgctcaaaaattatacttagaaaatgattctgttcttgaaatatctgaagatgaaaaaagtgaagaacagaaaaaatatgaagaacaaattcaaaaaaaaggagaatttggagagctcctgcttcacacttatttaagagattatttcaatactgtgcctcttttatcaaaaatattcttaaaagacacagatgggtttacagttcacggtttcgatgcaatacacatagggaaagacctaaccgatgagtcgaaagattctctttatctgggcgagtcaaaaatttattttcgttcttcgggaaacagtggcgcaagtggggtaaaagatttagcaaaagatattgaatgtcattttaaaaaagattttttatatagggaattttcattagttgctaagaaacaacataatttccttcctttatcagattattctgataagaacacaatctctcagtatgaagaattcctaatgaataaagaccaatggattgagaaattaaggaatgtcagtcagatgaaaatgagtctaagtacgctacttgattctgtaacaatccctttattatgcacatacgaatctgacctatttaaacatttttcaaccatagatggagatgaattcaaaaatgaatatgaaaaggaggtgcaatcacttcaaaaagtgttcaataatcaaataggaaagataaagaaggaatgtggagaacctattagaacagatttgaatataattcttattctccttccgatcccttcaaaaaaagaattagtaacactcctccacaagaaaatctgggcacaacaaaatgcataa

SEQ ID NO: 59809 - DNA, 2202 bp, Bacteroides sp. CAG:144
atgcataatatagacgaatatatcaagtatttagaagaatcaagcatcattgacttctcaatttgtttcgaaatggcggaaatgtgttctgctaaaatcgattcagatcctgctttcagcagacgattgtgtattaatgtgttgaataattgggcaaaaattccagaaggatgtagaataatttggaatagcataattgaatcactaggcttttatccttacatacagaaagaacagattaaactagatagtctttctgaagaaatgcgttatggcatgtctgaatcacattttctatcaggcaaattccaccatgatgaacaacgaagaattatcagtaaaatctttgaaggtaagaatataattgttagtgccccaactagtttcgggaaaagcctcttgatagaagaaatcgtcgcaagccttaaatataaaaatgtagttattattcaacctactttagctcttcttgacgaaaccagaaaaaaattatcaaaatattcaggaaagtataagattatcatccgaaccacacaagaaccatcaaaaacaaaaagcaatattttcttgttcacagcagaacgggtatgtgaatatctatattttgagaatgttgacttcctcattattgatgaattttataaattaagcggtggcagagatgatgaacgatcatcagcacttaataatgcattttataaattattaaagttacataatcctcaattctacttactcggaccaaatattgataagatatctgatggctttgctagaaaatacaatgctatattctataaaagcaattattctttagtcgattcgaatgtggtagatatatacaattcaatctcagacgaatcgagtaaaaatcgcgagaaaaaactgtttgaattgcttatctccttatcaaaagaacaaaccattatatattgctcatcacctgatagagtaagatccttatctaaaaaattctataattatattcgtgagaacgaaaagaacgagaatgtgatcaatttgccgataattgaatggattatcgaaaatttatctgcgaaatggtctgtaaacaatattttaaaatgcggaataggtattcatgatgcagcgttgccaaagcacatcacaacttctattatagattatttcaatagcgataaattaaaatacttgttttgcacatcaaccatcatcgaaggtgtaaatacaagtgccaagaatgtaatatactatgatgcaaaaaaagggcacgatatccctatcgattatttcgattattctaatataaaaggcagagcaggacgtatgatggtgcactacattggaaatatctataattttaatgtaccaccagaaaaagtagaaattaatgttgacataccattctttcagcaaaatccaataaaagatgaagttttaatacaattagatgaaaatgatgttaacaataaacaatctaatcagtaccttgagattaaaactatttctgacaaagaaaaagaggttattagaaggaatggtttaagtgtcaaagggcaattacatattttaaaccaactaagaagtgatattcatagtaaggccaattttatatgttggaatggcacaaaacctaaaaaggtatatcttgattatatcttaaagttggcatgggataaccttctgtcagaatctgagtcaaagactattactttcaatcaattgtcttacttgacccatgcgtatggagtatgggaaacgcctataaaaaaattaattgaagataatgtcaaatacaaaataaataagtataaagaaagtcatccaaacgatgaaatagcagaacaaacattaatcggatacgaagatcaatctataaaattaatattacaagttgtacgccattggttcgaatataaagttcccaaatttttatcaacaattaattcacttcaagagattgtatgcaatgaaattggcatacaacctggtgactattctcaatttgcaagtattattgagaatggctttattccgatccatttaacactactagcagaatatggtattcctcactctgcaattagaaaaatttccaaatttatacctgcagctattgacgatgaaaatttgatattgtatatcaaagatcataaattacatttaattaaatctttaattaagtatgaacaagataagctgagcaatttatttacctaa

SEQ ID NO: 59810 - DNA, 1569 bp, Clostridium sp. CAG:265
atgcatagagtagtaaagattaatgtaataggcaatataggtacaggaatgcttatttcattaaaagatgatatgaaacatgatgtgattttaactgtgtgtcatatttttggagaaaataatgaagatgaatgggaaatgtgggaggttggaattgatgacattagtgtaacttcagattactatgatactgaatttgaagttacagatgttttatataaaaatggagatgctgaaaataatgattttgcattaatttatataaaaaagttcaaaaaagatatagattatgaaaatccatatctacctaaagatgaagaatgtattttaaataaaactgttactatagaaggatatgctagagaaaaagaaaataatgcatccagggttatagagggaaatatatataattttactgatgataaaaaaactttttatagggttaattatatggaaaaggatcgtgttaatgatttaagtagtgtagaaatgaatagaggaatgtcaggagctcctgtatttttaaaagatgaaaatgatatttttgtgggaatgcaaaaaatggtgtctagcacaaagtctacagatggaatattaggtgtttttacttataaatattgtttagtgcaaattaaatcactttataaagtggacttgcctttaataactaaagaaaaaaatagattaataagaaatgattcattgtttagatttatacatgttattcagcaagaatttaatattaaacctaactcaaaaaatcatataggcgcaagtatagaatataaagatattgaggaattaagaggacactttttaaatgaattaattgatacaatgattgattgggtatactcttctgataggtttaaagaaatattagccaagattgttgaagatggtaaaagtgaagtagcggcttattctcaaatacataataaaattcataagaagtttagaagagaaattgatggaaagttatctgcgttaggtcaaattggagagttattattatcacatttcatacaaaggtatttaagagcagtgcccatcttgagaaaacaagaaataagagcagtatcttctattgaacatatatgtaaaaatgcaatacactataagaaagagaatggtaaaaatataattatacttggagaagcaaagatctatacaagtaaatataactttaatgaagcttttaaagaatcaattgacagcattttaaagacgtataaaaattattcagatgaaaaagaattatatattcatgaagactttgttgataaagatatgaatgatatagctgaaagctatttgaatggtacaatggtaaagccacaagtccatttagtatctattactatttataatgaagatcaacaaatagatattatagatgaagatgaaataaaaaaacaaatagatggtattattaaagaaagatatagtaagtttagtgatgattatattgatgtaggaaaatatcccatattaaatagaataacatacataatttttccagtatgggagatagaaaaattagcattacaatatgaagaattattataa

SEQ ID NO: 59811 - DNA, 2532 bp, Clostridium sp. CAG:265
ttgaaagagtggttagagatagaatattatactattgctagcaaggctaaatttataaataagcaggttgaagtagatcataaattaattttaaaaactattagatgtttagattatatgactactatgaaagaaaagccttctaaggaatatattattactgtaattgcgctaatgtgggaatatacaaataagcaagaatatgatttgaagaactttataataaaaatattatcaagaataggatattcaacgtcggcaatagtaattgataatgaatttgataaagatgaatgtaagttttttaaacctaaaagtgtttttgacatgttttcattaactgctgagcaaagtgttaacgaaatttctgtaaaagataaaacgtttctattaactgaatttcaaaagagtatttgggatgctatgaatgataataaaattataggaatttcagctcctacatctgctgggaaatcatttgttattttattaaaatctatatctaaaatgattaaagagaatttagatatagtgtatatagttcctacactgagtttgttaaatcaagttatggaagactataataaaatgctgaaggttcttggtattaaaaactacagaatatctaatagctttgatttaaattctttagatagcattaatacaatatttgttgttactcaagagaaagctttgtttgcattttcgaatgagaagaaaaaatttgataagaaaattattttaatttcagatgaaatacaaaatatagagaggataacaaatgatgatgatttgagagctaagatattatttgatacattgattgaatttaaatataaaaaaaatataaatcaaattattatagctggccctagaattgaaaatattgataagttaggagagagcatatttggaaaaaatactaaggaattaactacagtagtaagtccagtattaaatttaacttatagcattagaaaggtaaatgatgactactatttttgtcaatattgtgcattgagcgaagatacttataaaaagaaaatcgaggatgattcattaataaagtgttatggaatagatgattataatgatcaatatttaaaatatttaaatacatttgtaagtaggataggcaataatgaacaaaatattatttttgcgcctacatctaaaaaagcatgtgaaatagcgtgctatttgtctgaagataaaaaagaaaattgtgttagtaataaattaaaggaactaataaaatattatgaagatacgattaatacaaactatgcaatgtgtaaatctttagaagcaggtgtagcttatcatcatggaaaattgcctatgaatgtgcgtagaactctagaaaaagccatatcggataaggaaataaataatgttgtttgtactactactttaatgcaaggaatgaatatgccagcacaaaatgttattattagaaacccacacttatatgtaagaaagaaaaaagattctggtgaattatctagttatgaaatggctaatttaagaggaagagcaggtagattattaaaagattttattggaagaacttatgtattagatgaaagtagtttcgaaaatgttgaaggatataatcaaatagatatttttgaagatgttactactactcttccaagtggatatggagaaaagtttatggaacatagggatgatatcacaaatactattcaaagtatgaattttatagattccactatgattaagtatggatacctagttgcttacatacgtcaatcagtattacgatatggcattaactcacaaaagcatttaaaagaggtcggaattgaattaacagttgaagaactggataataccatcaaaaatttaaaaaatttgaatataccaaaagatatttgttataaaaatagatattgggatccatttatattaaatgaaatttatattaatagaaatgaatttgttaataaactacccataatgcctaataaaaaaggtgctaagtataggttagagaaattaatgaaatggataagagataataaaaaaactcactttatgtatgaaaagtatgttccacaattgtatcgtaaaggaaaaatgagatctatgttgtgtagcaattgcatagattgggggaaggaaatagctctcaatgatattctttgtggtgatagatatgaaggtgaacaggcaagtgagaatatagatcaaacaattaatttactagaaagagtggtttcttttaatattccattattattaaaaccaatatttgatatagtagattctgataacttatttttaacgtgtatacaaactggagcatataatatatccactagaagaatgattgaaataggaatcccaagagaaactgctatatacttaaatagagagttatttactaatgtaagaatggataagattgaagaggaaaaacgtgatgatataattatgaatattattaaagaaaatattaattcattaccatattggattaaagtacaattagagtttatgatataa

SEQ ID NO: 59812 - DNA, 1428 bp, Clostridium sp. CAG:568
atgatcttctcaataggaatactggctcagatcatcctatcggtgagccgtggtctcaataatggtgaatgcatcgattccctcatctcctccataactggcacttcagatttctcctacattgaaagatcaagatacactagaatcctgagctgcgaagagaacctcccgaccaagataaaaagggatacaaacgacattgagaaggtgctaggaaagacaggattgagagatatagccaccaatctggagaatcgattctcgatgaagatggatagctttggcagacttaggatcgtcaaggctatcatctggtgtctttccaacgaatcgtgccagcttggtgacaaaattttccgctggtcgggaaaaactagaaaagaagtgatatcgacaaaggctatattagacttctgggctttcttagccgaagcgttaacctactgctaccaaatagataacaaacatgccgaaaactatgggttcaagatagtcgatcacatagaagagatagaaaaggcagtccaaacaacggttgctgagaaggctggtagagaaccataccttcttccaaagagtgaggtcgataaagtctttcatttggagtcgacaaggtctatcggtaaatcccatatctgcattaccttccacgtcctagatgatgacggggactctttcgattattccaagttgaaggcatttatcagccgtaacataaagcgatatgtctttagcttcgtcaaaatggacgaaattgaaaatgctgaaatggatatatcccagcaggcgaatgccgacatctcaaaaatagttcatgagaagaaatacgatttctccaaagaaatgggagatatactcgttttttccttctgcgaaggactaaaaggatatccgaaaatcctcactaattatgaagtccttaaaaaggacctaacgaatgaatacattggaaattacggcatgcattttcagcttagagatgataggctcatcctaataatgacctcctcttcaatgcaaacgaagctcagtgatgcggtcaaggaatgtattgaaaggtcaaaaatcatggcgagggaaaagagcgccgtgaagggacttctctctcctgcactgcttaagcagacaacagatgaagaaacagcatcgaaactgaccgaatttctgctcaatggtgatagtaacagtgccaaatatggttacaccttgttcatcggctatagctttgatagttctcacggttctttgaaagagcagatagagaaagatatggcagaatgcgtccaataccttgaatcagaaatccaaagcgattcaaaaatgacaatgagagagatagatatctacctcgtcccattcaatgatgctgacgaggatccccagaggatacttaaggatgttttggggttaccaaaggagggaatgtaa

SEQ ID NO: 59813 - DNA, 747 bp, Clostridium sp. CAG:568
  modified_base (726)..(732): a, c, t, g, unknown or other
atgacattgattgatcgaatacttgacaacatctcaaagaacgctgatgccaaatctgcaattgatactctttttaggaaatatggcgaacaagttctaaatgaatctaccattgatatttcagaggacgaaatcggcttatgcctccgcattgctgacatattttcaaaagttcccaatgaatctgacgattctgagcattaccactcattagcgcaagaaataatctatatgctcaagtgcctgcttcctaatagaaaagatgtcgatttagttagcgatagtgttctttcatctctttcaaattatccagtcagaaagaatatgggattaagcgaagaggaaaaaaactatggtcttcttcgtctcatcggtgaaaaaataaagatgggcagccttgagatccctggagaaaaggggaagttctttctgcttcctcagaaaatagcctacgatgggttcaaaaatagaagcttcagctattctgggccaacctcgatgggaaagaccttcttgatgaccaccttcatcaagcagaggatagatgagggacacgatggtaacttcgctatcatcgttcctacaaaagctttaataaatgaattgaagggagaagtcatccgtgaattcaaaaatgagattcttgaaaagaattatcgagttatctcatcagccaatgatcttcagctggaggcagaacacaatttcatattggtcatgactccnnnnnnntcatattggtcatga

SEQ ID NO: 59814 - DNA, 357 bp, Coprobacillus sp. CAG:698
atggatcaaattttcgataaagaagaagctgaacttcttaaaggttatattcttcagaaaccacgaaaacctacagaaactatttttggtatatttattggatacactattacttatgatggaacatcagatacaaatgatgtatacgctaaaaaagtaattgaagaaaatataaaacaggttatggaattaaaagcttatataataaaaaaaattaaggaatacagaattagcaattatgaatttaatttttattttttaccatttcataatgcagcgcgcgatagaaaagtaataatgaaatctttaacatctggaaaatcaaaacttgaatggggagagattagaaatggataa

SEQ ID NO: 59815 - DNA, 2595 bp, Coprobacillus sp. CAG:698
atggataagcataatttatcatattatttacttgatgaaataaataatgatttgttttttaggaaaaaatacaatgatctgttagtcgcttattcaaaatcactatttaataactgttttgaaatatatgaaaatgaatatgctatgttacttcgttatgctgatatattatctctttctgataatgaaaaacatcaaaatatggcacaacaaattgttattttgttatcatatttatttcctaatgaaaaagaagtgagtttttttaagcatagtatatatataaatgtttcaaattttgcatcagttagttcctttaatgttgaaaatgaacaatactgttatgctgacatattaaggactatagaaatagaatctcataaaataatgaacaaaattcctaacacagataaagagttttttgatgctcaacgtatagtttttaatgaaatagaaagtaatcaattctatagtttttctgctccaacttctatgggaaaaacttttgtaatcacaaattatattcataataaaataaagaatggaagtaaagacaattttgtcatagttgttccaacaagagcattactttttgaaattgcaaataaagttatacatgagttttcagatgtcttgggtgttggtaagcataaaattgttactgcaattgcgtcactgcaaagcaaagagcgttttatagcaatactaactccagaacgattttattatgcacttttaaaacacccagaatttcaatatggttttgtgtttattgatgaagcacataagatttctgataaagataagcgaagcataatatattataaaatcttggatatgctgaaagagagaaacaatgttaggatttatttttcttctccagttattccaaatcctgatatttatcttgaattgacaaatttttattcattgtctactaatgatgcgactggacaagcatttgaattttcaccggttttgcagaataagatatgcatagatttaacaaataaaaagtacagtatttataataacctatcaaatgatattgttgaatgtggtgatttgcctagtgagattactaataaaatgtctgctttgctattaataggtaaaggaaaacgaaatcttgtatatgtgtcttcggcaaaaaaagctattaattatgctatgcaattgagtaaattggttttactagatgaaagtaaatgtgacaagaatgaattagagaaagttgcaaaacttattgaacaaaaaatacataaggaatattatttagcaaaactaattaggaaaggaattgcatatcatataggcgcattaccggctgaaatacgtttaaatattgagcatctcattagagataaaaaaattcaatattgtttttgtacaagtacactactagaaggtgtaaatgtaccaattgataatttatttatatttgattacaaaaaggcaagttcaaaaatgtctaaaattgacgcttttaatttgatggggagagtaggacgaattactcttaatgaacttggtaatgttttcttgtttataggtgaaaaaaatgaaaaaacttactatgaacaagttctgcttaatccacttccaaatcaaacattgttaccttctgatgctttaaaactacatcataaaagcgatattgtaaaaattttacttgaaggcaaaactaatcttttgcattctgacgaaaaatttaaagataaaaaatttaatgaatcaacatatgaatatgccacaaaatgccttaatatgcttttgtatgatatttgtagccaaaatgatagctatatcgtaagagatttccgaaaaaataaagtattatcaccacaaaatatcattgatattagagaacgtttcaaatcaattgtaagtaaaaatgatgatattaatttatctgctatgcaaaagaaatccttatatatagagattaaagaacataatttaaattatcctgattcatttgtttatgatgattgcttagaatttatgagaaaattatctcgtatatttcaatggaatatttatgaaaaaggaacattaggaaaaggtgaaagtattaattattatactgttatactaattaaatggatgcaaagtagtgggctttgtgaaataataagagatactattaaatattatcaaagtcatggtggaaatttagttttttacgaaccaatatatcatttagaacaatatgatgattctgaaaagcacaaaaatcaattaataaacgatgtaatgacagatcttgaacaagtaattaattataagttatctatttattttctttgtttgtcggaagcaatagtggaaattcatgggaaagatgctttaataaatgattggcacgaatatgttgaatatggaacttgtaatgaatatataattttattgcaaaaatatggttttttgagagaagaagcacttgtgcttctaaaatcaatatataaagaatatataaaatgcgaaaataagtcgattcatattagtaaaaaaattttagaaatgacgaatgatgaattgaattatagtttaaaaacggttctaataaattaccctgaaattttcgtagactaa

SEQ ID NO: 59816 - DNA, 948 bp, Eubacterium sp. CAG:841
atgactgatttaaaaaacacatctttttcggatggatttggtatattcaataaagtgtatgatgtcgaatttgacatcgttaataaaaacagacttagacttttcatgctgaatacagagaataagctttttaactatgatgagttgtaccaatatcttttgtctaatataaccaagtatgtttttgatcgtagaaaaaatgccgaaattgagaccaatcctatcaaaagaaatgcggctaccttagaggcactcagtcatttcagaagtataacatccgaacaagataagggggcaggtggagaactgggagaaattttgctatatctatttttagaacaggatatgaaagctcctaaattgtttagtaaggttgagcttaaaacaagtgccatggactatattaagggtagtgacggtatacattttaaatttagagaaacattagatgggaaaaagatactacaattggttattggcgaagccaaaatacaaaataatttagatgacggaataaaagcagcctttatgtcaatcaatacatatttgacccaaaatattcaggatagaaaccttctagatactcatttgatgaaccaattagtcgatgaagaagaggcaaaaattcttaaggagtatattctatcagttcccagaaagaaaaaggaaacggtttttggaatttttgttggatatagtctggaatacaaaggcggtggcgatacttcagacgaatatgataaaaaagcgattgaagagaatattaagcaggtctttgagtacaaaagcaaaatcataaattatataaacaaatatagaattagcaattatgaattcaacttttattttttgccgtttcacgatgctatgcgcgatcgaaaagcgataattgagtcacttacttgtgcaagtcctcatttgaaatggggggatattaagaatggatag

SEQ ID NO: 59817 - DNA, 2592 bp, Eubacterium sp. CAG:841
atggatagtttgtcgaatctaattttgaaaaacattttagaagatcaagaattgcaaaaaacatatgagagcttactaaccaattatgcaaagtcattattggaaaatataagttttgaatttaatgacgagcacagaattttattaaactacgcagatttactgtcattatcagatgaagaaaagcataataacattgcacaacaaatagttattattttgtcgcagcttttccctcaaaatgatgaagtgaaatttgtaaaagaaagcgtatatcaaaatgtctcaaattttgcatcatattcattacttaaaaagcgggggatgctttcaaacgctggatatgagtttttaagagaattagaagttgaacaacatagaatagaaaatctcgcacctgatgcagaaaattctttgtttgacacccagaaacaagtgctaagcgggcttcataggaatcagttttatagcttctcagctcccacatcaatggggaaaactttcgtaataaagatgtttatcaagaacaaattacggaatggtaattatgaaaacttcgttatagtggctccgacaagggcattgctatctgaaattgcaaacaacttaattattgatttaaaagatgtattgggtctaaacaagcataaggtaataacaaatattgccgctgttaactctgaagaaaaatttattgctgtattaacgccagaaagactatactactcgcttcttaaacaatctgatattcgattaagttatatttttattgatgaggctcataaaatatctgacaaggacaagagaagtgttatatactacaaaattttagatatgctaaaaggaagatctgatgcaagtatttactttgcgtcgccaattattccgaatccagacatatatcttgacttaactgatttttatacacagtctgataatcaatctgctgggagagcttttactttttctccagtgatacaaaataaaatatatttagatttccaaggtaatgagtattctgctataaataatatttctggcagtataatttcatgtggtagtcttgctggttttagttctgataaaatgagggctttaattaccctcggaagagataaatgtaatttgatttatgtttcttcggccaataaagcggtagattatgcaaatcaattaatggacttgctcgataaagataacacagattcggatatatacaaagaattagatagtgtcgcaaggcaaatagaagaaaaaatacatgaaaaatattatttggcaaacttagttcgtaaaagaatagcttttcatataggtgctttgccggcagagattcgttctcagattgaacaacttctcagaaaaggatatatcagatattgtttctgtaccagtacattattggaaggtgttaatgttcccgttgataatctattcgtttttgataataaaaagggttttgccaagatgtccataatagatgcatttaatctgatcggacgagccggaagagtaactctaaacgagtttggcaatgtatttttgattgttgaaaaagttaatcagcggaacttctataacgatgttttgcttaaacaattgcctgaacaatctttattgccgaaagaggcattgagtaaccggcataaacggtatattgtcgagacattgctggaaggaaggacaaatcttcttcaggaaggagaaaagtacgctgaccatagtttcacggaaataacatatgattatgcaagcaagtgccttaacatgctgttacatgatttgtgttcaaaaagagatagttatatagtgagagacttcagaaaaagtggtgcgttgcaacctcaaaatattatagatattagaaatatgttctcaaatatagtgcaagaggacgatgatatcaatgtttctgcaaagcaaaaggagtcgttatatagagcaataagacaaagcgatattaactatcctcgatccttagagtaccaagattgcttatcttttcttagaaagttatcggagatttttcaatggacggtttatgaaaaagacactctgggaaaaggcgacagactcagttattatgcggtaatacttacacagtggatgtctagcaaaggtatgcacgaaataattcgcggagcaatcgataactatgagcgaaatcgcgggaaacttatttcatatgatcctgtttatcatctggaaaattacaatggatccatcaagcacaaaaaccaaattattaatgatgttatgaaagatattgagcatgttatcaactataaattttctatgtattttcttagattttctgaagccattattaaagtgcgcgggaaagatgctttggttaatgattggtatgactatgtggagtatggaaccaataatgatttggttattgaccttcaaaaacacggctttacaagagaacaagctctacgattgcttagacctccatataatgtgtatgttaataatgctaatggtgaagttgctattgatctgagaatagaggattatgtttccggtgagttgaaacaagcaattgaaatcgtaaaaattaattatccagagatattcaattaa

SEQ ID NO: 59818 - DNA, 939 bp, Ruminococcus sp. CAG:579
atgagcgaatctatttcagcgacaataaaaaatagtggattaaccttggacagcgtttttgtagaagttcagcattccgagggactcaatctgcccaaagctaatcatatccgcttcttccacaccgcaatgcgtggaaacagattgtcgacagataatttacaggtatttttgcgtagaaaccttgcgcgttatgttttctccagagcacagcttgagaattatcgtataaatgatgacctcgattctgccgtatccgaagctatgcgcatcatggctgaaaacggcggatcatctgccgagggaacaggaaatatgctggatgaaatccttgtatatgcgtttcttgaggagaaattgaaagcgcccaaacttatgagccgcgtggaattatacacggaaatggcacaattccgcagcgagtgcaaaggaattcatctactatcaccgagtgatttgccccaaaacacaaagtttcaaatggtctttggtgcatccaatattgtggatgatgtcaaaacagctatcgaccgtgcgtttgaaacaattagcaagattgactcccatgagagtcgcgaaatattaatggtacagaaaacggttttagatcagttcttcaaccaggaagaggttgccctgcttagtgatgtcctcattccgcaaccaggaaagccggaaacatatgacacggcatacggtgttttcttggggtatcaattgggcttgaaccctaccgggcgcggcgatgattttgaggctcttgcagagcaaaaaatgctctgcgatatcagagagcacgcaggttatatctcagagaagatttccgcagcaggattgacaggacactcgttttatgtatatattgtcccattcaatgatgccgaacaggaaaaaacacaaattatggatgccgtattgagaggaggggctccgatatga

SEQ ID NO: 59819 - DNA, 2673 bp, Ruminococcus sp. CAG:579
atgaaccagcacgaaaaaatgcgacttggagatgtcctcttccagggaatagacgaaaatgattacctgaatgagctttataagaatatcctttacaactatgcgattacggtgctccaaattaccaacattaaacaactgcgcggtgttaatgtggatgacgcattgcgatttgcagaccttctttcgaaatcaactcatgtagaaaaggctgattctcacaaaatttgggcgcatgagattattaccatgttgcttactttgtacccagatgatgaagttgtacactattatgctgggtctgtattgacaagcacggggaactttatgggaagaaaactcgtgcaatcacagtatgttgagcctaccgtgatggatgaactgttttctacattgagcgacttgtaccttactgttcctgccgctcctgaaaagaagttctttcagcaacagcgaaaggtttacgagcatttggatgatgcgtgctttagttactcagcgcccacgtctatgggaaagtcgtttatcatgcgtatgtttattaaagaacagatattggccggtaaaaagaagaattatgcgctgattgtcccgaccaaagcacttataaacgaagtgcgaagcgaaatcattcgaaatgacctcgaaaacttgttggatgaaaatcagtatcatgtggtttcttctgctaatgatatggccttagaaacccaccccgatcataattttgtttttgtcctgacaccggaacgcttgctttatctgcttaatgacaaaccggatttcgtgctggattatctttttatagatgaggctcataaaatgacagggcgcaacagcagagcaccattttactattcagttgtggatgaactaagcagacgaactgcaaaacctaagtttatctttgcgtcacccaatatacccaatccacaggagtatttgagccttttagcttctggtgaatacgataagcaaaacgctattgcttcagcattctctccggtggttcagtttaagtttcttgtaaatctgaaaacgaagcagatttacatatataatgaccatctgaaaactctggagtacatctgctccataaatgccaatcccgaagacggcgtcattccgctcatggggctgttctataaaaacagtggcgaacgcacaagcagaatgattgcgtattttagtagtaaggataaagccatcaatgctgcacttacatttgcagagttacagaaacagattgatggtggaacccaaaagcagatcgatccggagcttgcagaattggcacgagatgttcgcaaccaagtgcatagggactatttcctggcaggactcttggagcaaggtattgcatatcatataggatacctgccgtcggcgattcgtatgaggattgaaaaactcttcaaagacgaaaagattacggcgatgttctgtacaagcacattagtcgaaggtgttaatttacctgcagataacctgtttatcacaagctattacagcggacgtgcgcagatgacggacgttgattttagaaatctcgttggccgagtcggtcgaatacagtacaatctctccggcaatgtattcatgatcagcgatgagacccgaaataataaacaggacgtataccttgataaattgaaatcagggattccggatcaacatctttctttggtgcaggatttgaagccaaaacataaaaagcgaattatagaaatccttttaagcggtagttcggttattgacaaatacaacgacgaccaacccgaagaagaatacatcatgatgcgaaagtttggccttattcttctgaaagatatcctgcatgataatgacagtctgattcaacaagaattcagaaagtacatgaaagacggcgatgaagaaagaataaagaacattttttctcagtatatccctatcatcgatagtgatataaacatttcgctcgatcaaactcgaaaattgcgtgcagctatttcggcagattccacattcgcctatccattgccagagccgaatggcagcttcaacattgacgaagtgtttggctttctaatccgattgggcgatatttttgattggaaacggtatgagtacagtactcttggaaaatgcgatgaggatggtgactacactaagctccgttggtatgcagtcatattggttcaatggatggaaggcaagggcctaaactatataatgcggcgagctgtggaatatcaagaaagacaccccgaaaagttctggatcaacaggtatacgaagcagtattacgacaaaaactcgttggaacacagaaatattgtatttgccaatacgctggaggtaatagaaaatgtaatcctatttagcatttctaattactttttgcgcttttccaatgaatacaagcgtgtccacggcgaaaaatcacttaacaggaataattggtatgagtatgttgaatacggcactaccaatgaagtcaccattcaattgcagcggtatggtttttctcgtgaatctgcaacttacatcaaggcacactcacagtactttacggttgatggtgaagggaatgttcatgtcaaaaacgatttggaaaactgtggagacaacgaagttgtgcagcaaattccagacattcgcttcaatacaccggagttgtttgtggaataa

SEQ ID NO: 59820 - DNA, 945 bp, Ruminococcus sp. CAG:624
atgaatataaataatacttcatattcagatggtttcggtatatttaacaaggtttctgaagagaaaattgttaactgtcaaaacaacactctaaggcttttcatgcttaataccgaaaataagctatttaattatgatgagctttatgaatatattcttccaaatgttgtgaaatatgtgttttcgcgcaaaagactagcaggcatcgaagatgatccacagaaacagatgactatcattctggaagccttaagtcatttgcgtcccattgaaaatgaaaaagataaaggtgcaggtggagaattaggtgaaatcctactataccttttcttagaacaggatcttaaagcaccaaagctttttagcaaagtcgagttaaaaactaatgctcaagattatataaagggaagcgatggtattcattttaagttcagaaaaaatgcacaaggcgagccaattatgcagcttataatcggtgaagctaaaataaaaaatgatttaaaagaaggtataaaagaagctttcaagtcaataaatacttatctaacctcaaatatacaagataggaatcttcttgatacccaccttatggatcaatttgttgacgaagaagaagccagaataattaaggaatatataaccgctataccgcgaaagccaaaagaaaccgtttttggaatatttataggatatagcattgaatatagcggcacctcagatagcaacgacgagtacgaccagaaaattattgaagaaaatataaagcaagttctcaatttacgtcaggaaatcattaaccaaatctcaaaatactcagtaagcaattatgagtttaacttctattttctaccttttcatgatgctatgagagatagaaaaaccataatgaagcaattaactagaggtatgccacatttttcttgggaggatatcagaaatggataa

SEQ ID NO: 59821 - DNA, 2595 bp, Ruminococcus sp. CAG:624
atggataaaactttagctgaatatttgttccctgacattgaaaatgatcaattcctaaatagccaatttcaagaattattgattgattatgcaaaatcgattgtcatcggcaaaagaactgaatatacaaatgagtataagtctttgttaagatatgccgatgttctttcgttatctatctacgaaaaacatcagaatatttcacagcaaattgttatcttactatctcatttatttccaaatgagagtgaggtagaattttttaagcgcaatatttataaaaatgtgtcaaattttgcctcggccaatattcttgagaaagacaaagtccccaatgaacaacttgaagtattaagacaactcgaaattgaatcgcacaaaataagcaataatatcccaggaaccgataaacaattttttgatacacaaaaaattgctttaaatagcctcgaaaagaatcagttctatagtttttcggcacctacctctatggggaaaacttttataattactaactttatccgtaaaaagctaaaaactggaagtcatgataatttcgcaatcgtcgttccgacaagagcgttactttcagaaatagctaatggaattattaaagaatttgccgatttgcttggcgaggggcgacataaggttgttacgacaatggcttcagtgcagaaagatgaaaactgtatagccatactgacaccagaaagattatattatagcctgcttaagttacctgactataaatttaactgtatatttatagacgaggcacataagatttccgatacggacaaacggagtattatctactataagattcttgatatgttaaaaatgcaagaagatataagtatatacttttcgtcgccagtaattcctaatccagatatttacctagaattaacaaactactattctcaaccagacagttctgcaaatggacgagcatttgttttttcaccagttattcagaacaagttgtatatagacttgagtaatagtacttttgcaatttataatagcttttctaaagcgttaataccatgcgatactcttccaacaactattactgacaaaataagtgcattgttacagttaggcaaagataaatgtaacttaatatatgtctcttcagccaaaaaggcaattgaatttgctatgcaattatgtcaagtcatacctgatgattcaataacgatagaagataaatctgcacttgaatttgcagcaaagcagattgaaaagaagatacataaagaatattatcttgcacaattagtgagaaaaagagtcgcatatcatataggtgctttaccagcagaaataagagctcagattgagggcttaattcgtaaaggcattattaagtactgtttttgtaccagtacgcttctcgaaggcgtcaatgtacctgtagataacctttttatctttgataataaaaaagcacgttcaaaaatgtctattaccgatgcttttaaccttatggggcgagctggacgagttacgcttaatgaatacgggaacgtatatctcattgtcgaagataaagatgttaagaagtattacgatgacatccttttgaagcctcttccaaggcaagagcttttgccatcaaaggcaatttcaaagaagaataagaagtatatagttcaaacgcttttatctggaaggacaaatctacttgaaataggcgacaaatacaaggataaaggattcacagaaacaacatatgagtactctgcaaagtgcttaaatattttactacatgatatttgcagcaataatgatagctacattgtaagagattttaaaaatgatcaagccttaactccgcaaaacatcatagatatcagagaaatcttcggagttattaccgaaaaagatgatgatattaatatttcagccagacaaaaagaatcgttatataaagcggtacgtgaacagcatcttaattatccctcatctattgcatatgatacctgtgtagactttttaaaagaattatccagaatccttgattggaaaatatatgagaaggattcattaggaaaaggagaaaaaatcagatattatgctgtaattttaaatcaatggatggaaggaaaaggacttcatgaaataataagaggtgctatcaaacactatcaaacaaacggcggaagtcttgtttcatatgagcctaattatcatcttgaaaaatataatgattctacccaacacaaaaaccaggttattaacgaagtaatgaaagatattgagcaaataatcaattataaattctcaatgtactttcttagattatcggaggcaattattgaaatccatggagaaaaggctttggtaaatgactggtatgaatatgttgagtacgggacaaacaataactccgtgataattctacaaaaatatggctttctgcgagaagaagcattagagctgctaaaacctcctctacttgatcatattaaattcgagaaacaaagagtaatcattaagaattcaattatggatatagcatcacaggatttgcaagataaaattgcgacaataaagattaattatcctgaaatcttcagtgactga

SEQ ID NO: 59822 - DNA, 1620 bp, Pseudomonas sp. FH4
atggactcaagcaatgcggggggcgtagcagccaagcttggattcttgtatcaggactgtgcggcggcgcttttcgtaacccagatgctactcaacaagaagatccaggctgtcagatgcgaagttacagacgacatcgatatcctatacgatacgcatactgagttcgttcaagttaagacttctgacaagcctcgctggtctgttagcacggttacaagtcgtactcgtggagctgataaaaagcttattgccaacagttcaattgtgcacaagtcaatgcagtgtgcattcacgcctattgagaaatgcaagtttcggatcttatctcctagagactgtaaagcgccactcgactacttagaaattgagctctcaaagcgagacggtaagcctggccgacaaagcctgatcgatgagctcgacgtaaaattgcgaaaatatgttgcgccagcaggcaattctatatccgactgggttgactcttgttcttgggaggttatacctagcttaaggcaagtagaacttacaggtcttagtaatatcagaaatgctgcccttaacctgtatggcgtaattctaagttcggattcaatggttgaaagtatctgggttaatattttagtagctatgactaaaagaagtgcgctcgataggcgtgtgtacgttgaagatgacaaaacctaccatagagataattttcttgcttggttcaaggcagaggtcttattttatgatcgcggaaattctcattgcaaagtttatgttcatcgcaaactgccagatatattaattcaacttcaggcgccttttttaagtccgattccaaccaggaatgggcttgccctacatcagcgttatcagatggggcagtaccgctatgagcacatcgcgaagaatatttgttgttggtttgacgagctcctgttgagaccaggtgaaattgccgacttcatcagttcgactgctacggaaaaatacaaattattgaggtcacgtctcgctgataatgccagagaccttgagcggtttcttggaaatgcattgctgcattcggtcatgaggctaagacataacagtcagcctattccggctaccctctaccttgattctaaagatgaaatgcgggtttttgaaaatgttcacatcgtacagcgtgctaagggaggtgatgagttatggcttgggatcagcaagttaacaaaagccaagacgttatcacaggttttaaatgatcttagagatacactgtacaatgatattgtaagcggtctggatggagtgagagaaaaggttctggatgtcaaggaagactcatatctacttaatcacgatatcgatgatattctagataccagcaattcgtttgaagatcatttggaacgccttcgatttgtaatttttttcggctatgagtcaagtttgctcactattcctgagactaaaggtcatgaggctaacctgtaccaggaagcttatgacctcttcgttgattttatttccgatatcaccaagagtccggaatattcacaatttaatttcgagctctatctctatcctgccccaagctttgacgatttatgtgggttggtggaaaagaaaatgagggatgacatgtga

SEQ ID NO: 59823 - DNA, 2190 bp, Pseudomonas sp. FH4
gtgaacaggatttacgacactgctcggcttctgctcgaaacagaaggaacatcagcatttagctatcttcatgctgctgacaagctgttgtcgaatcccgtttcattgcatatgggtagggatttagttatccgagccttggacgctaggctgaagtttacgaactacacgcctttgcttcgcaacctggtacgcaagtctgggctgtatccgtatttgaagaaagagttccaagaggtaacggtcagcgaaaaagcggctttagggatctatcagactcctttttcggatgaaattgttttccattcaatgcagtttcaagtttttgaactgcttcgatctggacgcaacgttgttctaagtgcaccgaccagcatggggaagagcgcaattgtagattcgataattggcttgggaatagtgagtagagtggttctagttgttcctactatcgcgctagccgacgaaacgcgcaggcgccttcaggagcggttcggcgaattctatcaaatcatccatcacagttctcaggaagcgaatggtgataaggtgatttacgttctcacgcaggaaagggttaatgaacgacaggatattatcggaattgatttcttcgtaattgatgagttctacaagcttgcatttcagcagcgggccagtgggaagatagactatgaaaatgagcgagttatcgaacttaatatcgctttgagtaagctgttgaaggcatctaagcagttttatatgaccgggccttttattaacagtgtgacaggcttagcgagtctcggcttcgagtataccttcatctcctccgattttaataccgtggctttggatgttgagtccttcgacctgtctcctaatgatgaggaaggtaaagaggaagcggttctctctattgcagacctgtgtcgtggtgaagcgacaataatttactgtaaatcctctgctgttgctggaggagttgcaaggtctttagccaagcatgggtttggtactgagtttcatagccctcatctcgactgggtcgcccaagagtacgattctgattgggattattgtgtcgctctacgaagcggaatcggtcttcactttggggggttgccgcgtgctttgcagcagtacactattgatctttttaatcagggaaaaattaactaccttatttgtacttcgacgataatcgagggggtgaatacgattgcaaaaaatgttgtgatacatgacaacagggatggcaattttagcattgataaattcacacatggcaacatcaaggggcgcgctggtcgcatgggtgtccatttcgtaggaaaggtttattgcctagagtcgattccccaggactcattcaaccaagaggtggatatccctctcggaattcaagatgatacgacgccaatgaatcttctagttggcgttcagcctgagcatcttagcgattactctcagtccagattcgaacgagacgaaaatatcgatgaatttggtgtggacttgttgaggcgccatagctcattcactctggaggcattcagagagttgtattcttatgttgagatgttatttgaggaatcctttcagtccaccatcttccattggatgccttcaggtgagtttctcaatgttttggctgaggcacttacgaggttccaatccggcgcgcttcgccgagtgcggatcccaaccaagaatagttcggttatccatgcaaaactcacaagttatctgtatacccctcagtacgcagaatactttaagtcacagattgttcagtcgaaggcgcgcttagagaagggcgaggtcgataatctttccacatgtattaatgatgacctcaaggtggtggtcaatattctggggtacacagttccaaaactactcggtattcttgaggatgtcgttaagttgcatgctaagaggcgtaatattaatgcgaagattgattattcaaaacttcgtggggtttttgaacattaccacctcccatctggcctggctggcttggaggaaatgggcgtgccggtacagacgctccagaggctcaacactctcatggatgcgcctcatgacctagatgtggatgagatggctcaatacctaagaaacaacgaagaccgttggcgtggcttgggcactgtggatcgttcctttttgacgaggacgctttatccaagctcgagatga

SEQ ID NO: 59824 - DNA, 780 bp, Mesorhizobium sp. LSHC412B00
ttggttccgtgccctcagttcgatggccgtcagtggcggtttggccgcctagctgcgcacctgacagactggttgccagagtttgcgtttaggccggacgacctgccagatcgtatcgagaatacgtcagaggttcggcgcctaatggagcgtgctatagcgcacctttattcggaaaaggccgggccaagtcgcggcgagttaggtgagttactgcttcacgtctgctgcaggcagttctttggcacttttcctgcggtctcaaaactattttacaaaacctcgtccaacgaagtggtgaagggtttcgacctagcccatgtgcgcctttccgaagaaggagagatagagatatggctaggagaagcgaaattctaccgcgacggcaaacaggccgtgcgtgctgccgtaaagtcggtcaaagagcatcttgatcgcggatttttgcagggcgaaaaaataatgcttggtgggaagatttctaagttcacacctggttatgagcgactccagtggatgttcgacgtagatactccacttgatcaaatattcgatagaatagtagtgcctatattggtgacttacgacagcgagtcctgcttggattttcaaggcgaagatagctacaattctcaacttgaggcggaggttctcgcgctggacgacgaggtcaatagccgcaacatcgcggttagtgtcgtcaagatcatgataccaatgaactcgaagaagctccttcaggacgaattcgatcgacgcatgggattctatcgaacatga

SEQ ID NO: 59825 - DNA, 2118 bp, Mesorhizobium sp. LSHC412B00
atgaggcgacaggagctagaagcggttctcgcagcagatggatccgatctcactggtatttttcgaaaagcatctgcgctcggtcgctatatattggagcatggcgccgccgaggggtggttgaaccaacacattatcgcactccacgctgccgtattagattttccggccttagaaagtcttctgccagtgacgcaagggctgctgcgagaggtagggctttttccgtacctggagagcgctgagctagactggcaggacgcaatagcaagagagagttttcgcccgtctggtgagctagcttcaggctatctatttcatagagaacaggctcacgcttttgacgttcttgcgctcgggcagaatctggtccttagcgctccaaccagcttcggaaagtcgtttctagtcgacaatctcatcgacgttcgtcggcctaggacagtagtgctcgttgtgccaacgttagctctgttggacgaacaaaggcgtcgattggataaagcgttcggcagagcctacagaatcatccatcgaaatgaccagttgctctccgaagatatgggaaacatcctcgtattgacgcaagaaagattgagggacagaacggaccttcccaagatagacctgctcataatcgacgagttctacaagctgaatgccgatattcaggacgcccgcagccgctgcctgaatattgtgttcagtcggtatgcgccgagggccaaacagatatttctgctagggccaaatctggactacgacgtggatctggggaggattttcgctaaacggatagattcagatgccaccaccgttgctaccattattcacgactttagccatgagtcgttcaagcgcaaacgccttgccgcgctactcgcagaaaggtcaatggagaagtcgttggtgttctgcaagtcgccagcttcggcccgaaaacttgcagaatccttaatccaagaaggtattgggtacgacctcccttactgccggcagctgggcgcatggcttgctgagcattaccatcccgattgggtcgtcgcatcagcgcttaaaataggtatcggaatgcaccacggcgccatgccccggagcgtgtctcaacagattcttcgtgcgttcgaggagagtgatcttaacatcctaatttgtacatcaacacttatagagggagttaacacgaaggcagagaacgttttcatattcgacgataagatacggtcgaagagatttgactatttttcctatagaaatatctctggacgagcgggcaggtttagaaagtacatgatcgggaacgttttcttgttcaacgaacctcccgatcccgaggcttatcagttggacattccgagcttggcagaccctgccgacctaagcgacgacttcctcattggtgtcgatggtttcgcccacgacgattcattccgcgatcgacgtgcccggcttgagacggatctcgatcttcctgctgagttaatagagcagttggctacttttccaattgcgtccattcgagctgtagcagacaaagtaaaggaacggctcagggccggagatcagcgagtgttgtggtccgaccgagcaggctatgaggagcttgccgcaacgctcgcaatgggatggcgtccctttgcgaaagattcgtcgctagtctccgccggtcaggctgcgttctttgcgttccggatgctaggtacaggtgggcgcataagggattacctcaataggatagttcagtcctctaaaccggaaggggtgcaacgcgaaattgaccgcgcgctccgcgcgattcgtgaagtagatttctacgtgccatccgtgctctcggcgctacaacttctagtgaatcatttcgccatgcgggtcgaacttccccaggtcgattacctgacgatggccgagactatcgaaagccattttctcccacggcacgtgaagggtttggaggagatcggaattcctatcccgttgggaatgaaggtgcacggttacctaggaggagatcatgatctcgatgaagccataactacactaaggtcgcttcgggagcgagactacatcgacggcggccttacacagttcgaatatcggatgattgccgcatcagtctag

SEQ ID NO: 59826 - DNA, 942 bp, Mesorhizobium sp. LSHC420B00
attgcgtcgatgtccaacgatttcagccacttaaaggctctcataaaaaccctagaacatacaatccaatgcaccgacaaaaatgttcagattcgagcccactatcttccttttaggaacggaaagccgtgtacaggagaattgctcgataacattagaggttacatttgcaattttgctatgagccgctcggagatcgacctggttcacaaaagcgctgcgacgttctcccctcaacaaatgatgattgcttataataaactgagagatgatgcggcagacttatttataaaagcgcaaaaatccacaagccgcaatggcgaatgtggcgagctaattttgtatctattgatagaatggatactcgaagcgccccaaattctggccaaaatgtcgcttaagaccagcgggcaaatgccggtccatgggtcagacggaatacatgtaaaatacgatcccgctactgacggtctaatctttttttggggcgaggcgaagtttcatgcaacgatatcaggagctatgagcagcgcggttacgtcaatatccagtacacttaaatatgacaaactgaaagaagacataaatcttgtcagacgttacatcagtttctcagggttgtctcctggagatcaaactaaagtggtcgaatttcttgatccgctcagccaacagtatcagaagaagacggacgcctctgcgtgtttaatcggtttcgatttcgacggatttgcgaagctaaaagactgcgattcggcgacattagagctgcgatttagggaactgttggaggaggctttgaaatccgccgctgcaagcctcgcctcgaacctagaggcggcaggcatttcacatcatcgaatggaggtgttctttataccagtgccttccgttgaggatttgaggattgaattccagaaccgtattggttggaaatcgtga

SEQ ID NO: 59827 - DNA, 2553 bp, Mesorhizobium sp. LSHC420B00
ctgatagataaagtctggcaaaatccggtgctagcacaggctctcggtgcattggagcagaactggctcgtgcagacgcttcatttggaacggtctccgcctgttgcgataagcaaggccgatgcctgccggtatatcgaggcggcagcaattttggcttgctctgagttggccgctcagagattggctgcttatagaattgcaacctacacttacgatctatttcgaggtgagatcgacggcctcgaagcgtctgtgagggctgtcttaactcggcttggtaattttccaagccttgcgaccgagccggggatcaattcggccttatccaaggcctcttgggcgattgctgaggaggaagtcgttaggcgggcagcaaatgaggtagaaatagccggagcggcagtagctttaacagattttcaggtgaccctttggcgcgctttgtccaccggagaatctatcgctatttctgcgccaacctccaccggaaaatcctttatacttcaggccttcattgctcagagcttgacaaagcggcctttattttctgcgtgttacatcgtccctacgagagctctgataacgcaggttcacggggatctttctgatgcgctggcagcggcaggcctgtcagatgttgaagttgttaccgttccgctggaggaaggcgatccgctccctgaaaaggctgtctatgtgctcacccaagagcgccttcaactgctcttactaaaccatccgaccaagaacgtggatttcctggtaattgatgaggcccattcggtgcaggacggggatagaggaataatactgcaatccgcaatcgacgatatccttattcgcggtccatccgttcagctcctgtttgcgagcccgactgtatcaaatcttaacgttttttctgggatgaccggccgaaaggacgtttccattcaagccaccgagcaggtcacagtttctcagaatttcatcaatatgacggtcacttcaccaaagcttggccgggtgaaggtctattcgcaatccgccagcgggggtgctgaggttggcgtcgcggaaattgggcagcaactttcctctcgtgttgagtgcttggttcatatcgcgcagaaatttggtgcggataagcagtctatcgtctacgcgaatggccaggctgatgctgaaaagatagcctttcagatatccgatctccgttccgagagtacgccggacgggcagtcaggagacttggatgcgctggccgagttagctaaagaggctgtccaccctaagtatatcctggcgctcacagtgaaaaacggcgttgcatttcactatggaaacataccaactgtactgagaaacgccatagaacaatcttttataagtggagcgctgaggtatatcgtatgcacaagtacgttattgtcgggcgtcaatcttccggcgagaaacctctttatgtgcttgccacagcgcatgaagggagttgcgctggaatccgtggatttttggaacctggctgggagggcaggtaggttacgtcgcgagttccagggcaatatttatttaattgactacgacaaatggacacaccagccgcttgccgcacctaaatcagcaaaaattgtgccagcaattgaacataccattcatacgcgcactaacgatttggatgccgtgattcaagatagtcagttcttgatgccgggcacttcagatgcagggcttgagacaatttttgtcaagcttcttgctgactacaagcgcggtcgtattggagtaactctggatcgggccaatgttgcccgtgacgctcccctaagggagcaactggagaactctctcgccatagcagatcagcttgtgccgctttcagctgacgttattgccgcttcgcctacaatctcagctcatcgacaacagcggttatacgacagctttgttggaataattgatggaggaggggaactcgccgcgcgagaattattattaaagcatccgagagagacgaaagctttcgattcctacgtggctgcgctggcgctatgtcatgggacacttctgcgaaggaccggaagtattaaacagaataggttctttgcgttgatgctccttaaatggatgcagggcatgtcgatttccgaattagtcgacggtcgtacgagcttttatccaaatgagaagatcgataccacgatacgcagtacgctcgatttggtagagcaggagctccgctttaactatgtgcgtgcttttggctgctacaacgcgcttctcagtgaggcgcttaaagttagcgggcacggtgaactgtgtaagagcatgccgtcaatcgcgctctacctagaaattggtgcttcggataaaactatgattagttttattgcgcttgggttatctcgtctggcagccaaaaacctgaccaatatttgtccgatcaagacgctggatgtcaagaacgcgcgggcttggctttcccgccaggatttggagatattgggcttttcaacttacattcgtagtgaagtcaatttggctttgaagcgctcttccgtgacaggttga

SEQ ID NO: 59828 - DNA, 810 bp, Mesorhizobium sp. LSJC265A00
gtgcatgaactggtggagttggcttggcttcacctgacatcattcacgctaacgcggaaggaaatcgacgcggtaagggcgcttcaatcgaccctgccgtttgaagactttctgatcaaaacgacccagctcaatgacgccgccgccaagcttttcatcaaggcgcacaaagcgacaaatcgaaatggcgaagctggcgagctgctgctctatctgctgaccgaatggattttaggagcaccgcaattcatcgcgaagatgaccttgaagacaaatccgcagatgcctgtacacggtgcggacggtgtccatgttcgctattgtccggagaccgcgcggctcttcctctattggggcgagtcgaaaatgtatggcgatgtcggtgcggctatcattgctgccgcagcatcgatcgcaaaatccttagagcccgacgagcaaggccacgaactccagcttgttcagcgaaacatcgatttcacaggactaggaaccgaagcaaaggcagcgctgctgcgatacttggatccccatgaggaagaatacaacgaacgtaaggatgttatcacctgcctgatcggttttgattttgatggctttcaaaaggcgcgcgctgccggtgaccagggtgccgaagatgccttccgagcactggcgaaagaggaactcgcagcggtggcaccgaaggtctcagccgcgctcaagacggctggactgggctcccaggacgtggagctgttcttctttccactcccagccgttcaggaatttcgcgatctctttcaggctcggattggttggcttccgtga

SEQ ID NO: 59829 - DNA, 2535 bp, Mesorhizobium sp. LSJC265A00
gtgatacaagagctggccgacaaggtttgggataacagaggcttccacgatgcagcgcatcgcattgagctcgcgtggctaaccaaagagatcggcggcatcgaagatggccatgccgacatcactgacgctacgcggttgatgcgttctgcagccatcttggcttgctcagaaacggcagatcatcggcgcgcggcgttccgagtagcgacatgtgcctacgacttgttcggaaccggccaactgcctctggaccaagccctgcgcatggtgctcacgcgcctgggcaacttcccttccatcggcacccgcgcggacgtggcgtccgcgcgggtgaggctaccgctggtacttgcggcagaggaaatcgcatcagctgatgcccatgaggtgacgatcaacggacaaacggtgctgttgactgacttccagcagaggctgtggctgaatctcatgcaaagccgccgcatcgcgctggcggcaccgacatccgccggaaaatcctttgtcttgcaggggtatctgtcggcgctcttcaacaatgagcagccaaagtcgatcgtctacatcgtcccgacccgcgccttgatcgcccaagtggccgaggatctgacgatccagtttcggggagtggaacaagatattcccgacatcgtgacggtcccggtcgatgctgaaaccagcctcgctgtacgcgccatctacgtaatgactcaagagagggtgcaactcgcactcggcgcccatcccgacttcagcgccagcgtcataatcgtagatgaggcgcattcgatcgcagatggatcacgcggcgtgctgctgcaatgggtcatcgacgatctactgatccgcaatccggcatcacaaatccttttcgccagcccagcgatccgcaatctagatatttttggccggttgtttggcttgaccgacgtggtcgagttctcatccatagagcctaccgttgcccagaacttcttggttacgaccgtcgagtcggccaccaagggcaagcttgtgatccataccgctggtgacggatcgagagcgctgcgacaagtcgcaacgctgcagctagggcgaacggtcgcgagccgtacagaaaagctcgtccacatcccggcggtgcttggacgtgggcattcaaatatcatctacgcgaatggtgcggctgaagcggaaagcgttgcgcttcaactcgctgagctgatgtccgaccgcgagccgaccgaagcacgcctcgctctatccgacttggcgaaagaagctgtgcacgccagctatgccttggtcgaatgcgtcaaacacggcgtagcatttcactattccaatattccgacccagctccgacgagcaattgaagcggcagtgtcgtcgggcgaggtcgaccatctcgtctgcacgagcaccctgcttcagggtgttaatttgcctgccaagaacatcttcatgttcgctccggagaaaggtcggaccagagcgttggagtcgactgatttctggaaccttgccggtcgcgctggcaggctcaagcgtgagtttcagggcaacatcttcctcatcgactatgacaaatggaagaagaagccgctcgacggccccaaagattcggttgttaccccggcgattgaaagcagcctcaacgaacatcacgaccagttaatgaccgtgatttctggcgcgccgacaacgagccgtagcgatgaaacggatctcgagacaaccttcgtccgtctctacaccgatttcaaaggcggtcatcttaatcagacatttgaacgggcgggcgttcagccagacgacatccagtcaagcctagttgaagccgcgcttgcagcggctagcaagaaactcactttaccggcagcggttctccgccggagtccgaacatctccgcccacaaacaacagcggctttacgaccggctgaacgcaaaaatcgctcaaggtgccgatgtcgcacggaccctgattccctcgcatcctcgggagagtgaggcgttccaatcctacgcgaatattctggaattgtgccatgaaatcattctcggcatcgacacttcgaaaaacctgcatcggttccatgccctgattgcgcgacgatggatgcttggcatcccactcccacagatcattgacgggcaaatatcgcgaaatgcctcgaaaccggttcgaacaacgatcagaagtactctggatttaatcgaaggtgatatccgtttccaagctgtccgtctgtttggatgctacagcgcacttcttgtttacgcactcgacagcgcgggcttcgtggagatggtatccagcattccatctttaccactctatcttgagatcggcgcatctgacaaaaccatgatcagcttcatctctttgggattatcacgggtcaccgcgatgaagctgaacgaaatgtctgctcggaaagaccttgataaggctggcgcgctgcagtggctgcgaactcggccgcttgaagcgctgggcctttcgcccctcttgcttgctgaggtgcgggcgatcgcagttgcctag

SEQ ID NO: 59830 - DNA, 909 bp, Chryseobacterium gallinarum
ttgaaattagaatcaactataaacgaaacatttttagaactcttttacaatgagattgaatgtgatgttcccgacacgcattctaaactcaatttgcatattctgaaaattgagaacaatgaattttgttatcctgaattagttaaccatttaagaaaccactttatatctttttctctttcaagaaaagaaattcaagattttgagaaggacaagagatatggagaattatatgcaaaagccgcttcaaaatttcgcgattacaatgtgaatgacggagaagcaggagaattattactattctgctttcttgaatctcacttaaaagcacctaaaattctgacgaaattggaaataaagttatcttcaaaagattacgcaaaaggttctgacggagttcatttactgaaagttgcggacaaagactatcagttgatttttggtgaatcgaaactgtatcaaagtcttacgacttccataacaaaagcatttgaatctatacaggattttcttacaagaacaagcaacaatattaatgacgaaattggtttaatcaattctcaactttgtaaagaagcattcgatgaagacctttatcagttccttaaatctgtcataatgccaaaagtcaatgcagaagagcctatcacaaaaaataatgcttttgcgatttttgcgggatttgaaattagtccaactgatgatgaaaggaaattaagcaattctgattttttaaaaacgataaaagagcagattaagaaggaagttgaaggaaaaatggagcatattaaaaagaaaattgaggagtatagcttacacggatattccttttatgtgtatgtatttccttttatgaagttagacgaaacacgaaaagatattattaagaaaatcacattggcagaataa

SEQ ID NO: 59831 - DNA, 2580 bp, Chryseobacterium gallinarum
atgattgaaagattagcagcagatgttttgcaggacacatatttcacagctttatatactaaagctgcgaaactgtttgttaataactttttttcagcagctgaatccgaacaagattttaatgaaaaagaattaaacgacttgcttcgatttgcggatattctatcaaattcaaaaaatccgacatcaagaaacaaagcgtatcagataattacactattaaaccaaaaacataaaactaatccttactataaaactttctctcattcagttttagccaaattggggaactttccagcaattgaatacctgaaaaatgaagatgaaaatatttcggaattaccatttgaaagagatattgaaaagaaagtaaaagaatttattcaggctgttcccgatacagaagatttaatttttacggattcgcagtttgaactttacactaaaatcagcaattcaaaacattttagtttttcgggaccaacttcaatgggaaaatcgtttattatcaaatcatttatcagaaaagtcgttggtaataaaccgcctgaaaacattgtgataatggttccgacaagagctttgataaatcagttttctattgacctgaataaagaactgaaagtgattttggaacattataattacaaagttgtaacaaatagtaatgttcctgaatcaccctcagaaagccagcaacgatatattttcgtattaacacctgaaagattgttgagctacctgtctcaaaaaaacaatccgtcttttgcttatttatttgttgatgaagcacacaaacttgcagccgacaaagatacaagagcagttactgcatattcagctatttcaaagtcattgaagcaaaacaaaaatctcaatttgtattttgcttcgccaaacgtttctaatcccgaagtttttttgaagctattcaaaaaagacgaaaccctaaactataaaaccaaagaaacacctgtatcacaaaaccttttttttgttgatatgacacgaaaaaaggcaatacattatttggacacagaacagtatcattttgaacctgatattgtcaaaaaatcagaaagtatttttgatattctttcttcattaggtagtaatacaaataatattgtgtattgtagttcaaggtttgaagcggttgataaagcagaaaaaatgtttgactattttaatcaacaagaagcgacaaaatcaagcaatgtaaaaaaggttatccgacagattaaagggtatattcataaagattattatttagccgattttctaaataaaggcgttgcatatcattttggcaatcttccacagattatcagaaataaggttgaagcattgttcaaggaaagagaaattggttatgtattttgtacttccacacttttggaaggcgtaaatatgccggcaaagaatgtattcattcttaacaataagaacggaagtaacccttttcagcctattgacttttggaatcttgcaggtcgagcaggcagattgagatatgaactatcggggaacataatttgtctaaaagaaaatgacaaggtttggaaaacacctgaaaatcttttggaaaataaaacagatatttctttaaatccgtctgttgaaaattacattgacaaaaagctaaaaaagatagaacagctactgaatgacaaccctgatataaaaggcgaaactgaaactataaaagagatattacgatacatagctaatattatcagcattgacacgcttgaaattgaaaggtcaaattacaaaagcgaaatcatcaataaacttattcaggataacaaacaggaaataattgatttagcaaaaaagaaaaacggtaaaattgaagttccgtcatcggtgcttagtacaaacaattctatcaaattaaaaatacaaaacgaagtatttatcgctttacaaaagcaaaaaggcaatcctgcaactataaaattacctgcaaaggttgattatgaagtttgcaaagaatggctgcatagactttatgatttattcaaatggcatacagaagaaaagaagtttaaatcaaaagcccagcttgattattatgctatgctaatgaaccaatggatgaatggcgtttcactgaatcaaataattagtcagtctgtttcatattatagtgaacataaaaggacaatacaaattggttatgttaatggaaagccgtattatccaacatttaatgggagcaagcaacatattaatgttcttattggaaatatcattgatgatattgagtatgttttacgttttttgttagagaagtatttcaacaattattatgcaatgttagttgcaattttaggagaagagaatgcaggagtaaactgggcgacattccttgaatatgggactcaaaattctattgtaatcgcattgcagaattatggattatcccgacattcggctgattatctatttaaaaatttcaaagattgcttaaaaattgaaggcgataaattaattgacatcaatatcctaaagctaaaacaacgattggacaaagaagcgattgaatatgatgagataaattctattttgttttaa

SEQ ID NO: 59832 - DNA, 948 bp, Enterobacter sp. MGH 38
atggacagtgtagaaaagctcaaatcgataaactggaaagagttgattacgaacaatcacaaatggattgaatcaaggttggttaatcacccttgtgagagtcaagctaagatagtttcaaggatttttaccatcccattcagcggagttatacaagagcatcatcacttagttgagtctatggctgatgctattgaacactacgtttttgataaagaagctcttgctaaaatgaaagcggatggcgttaccccttttagaaaagctgcacagttttttggggatactaatccagtcaaggatggtaagtacggggagttgctcctttatatcctatctgaggctatacttaatacaccgatggtctcacataaaatcactaatttaactaacttaaacgatcaggttaagggtggtgatggtgttttcttcggtgtgtatagagaaaatctttcaattttaattggtgagtcgaaaatatataagagttttagtggcgcgctggaaagcgcatttgactctcttgacagatttacaaaaagttatactagtggtgcacttggtcatgaacttttcatggcaagaactaatatatcaagtaattttgattttgaaactatggagttaatttataaagcatttactcctggtgatgatatttactctgagtgtgttaaaacacaccccgttctgcttatatttgaagatgcagaaattaagagcatagaggaaaaagcaataaacaaggcggaggccgaaagactgtttgatgcatggcttactaaaaaaaaggaagcgataaagtcagacatcgatgcaaagttaatcaaataccctaacgttaaaccttgcttcttagactttttcctaatacctatgacagatgttggtgagttcaaaaagtcgttgtatagagctatccacggaatagattacaaagaaaattaa

SEQ ID NO: 59833 - DNA, 2658 bp, Enterobacter sp. MGH 38
atggctaaaagtactgctacaacagcattaaatcatcaagactttacaagcgtttttaatttattgattgagcatttgtttttgaaaaatagaggtaaggaagaaaaatataaaatatctgatgaaatgattaggagagcaacttggcttgcatcacttggatcatcaggcaacgaaaccgataaaaatattgcaagtgcattcggtacattgctctatttatacgacacaagtaatgatctatatctcaaagcttgttatattctgcaatctagagctggtaatatagtctctgctaagcatttagaaggtctttttagtcaagggaatattattaaacactttagttcatcattggattttgaactcacaagtcaaaagtttcttcttgaaaaaagagtttctgacaataattatatttattttactcattttcaaagaagtctgtgggacaaactagaacgcggtgaaaacgttgcagtatctgcaccaacatcggccggtaaatcatttgtaattaaaaggtatatttacgatagtgttatatctgcaaatgatggttacttcgtttacgttgtaccctcaaaggcgctgataaaccaagtcggcaatgaaatgtctagagagttaaaagacatagctacagtgatgacaacctataaggattcagaaaatgatgatttaaaaatagtatatgttctcacgcctgaaagatgtatgcgattgttaaatgagaatggtaaaaaagcacctaaaatagttttttttgatgaaatacaaaatttagaggataaaagtaggggtaatgtttttgagaatgttatctatagaatgacaagcttatggcagtcaactcaatttattatggctggcccatacataataaatttacatcattcactcaataaaattattgaccttaatctagttgagcaaacaacttctacaaccccggttttgcagttaaaagttgtgcttacagtacataaaaataagaaaaccgttaattataaattaataagcccggttggggatgcggtgttaggtgagtacgatataggtaaggcattgtatagtaaattatcttcatcaaagggtgcagcattaaagcatatcacttctattctagatgctgatgaacaaaatataatatacgcacctaagaagaatttggctgagggatgggcgctggcaattgctcaaactaacaatgaagattcggagctagatgaagataatactgatttagtgtatgattcaagaatagatagtttgtgttcatttttagaaaatgagatacatcctctgtattctcttgttagatgccttaagaaaggggttgcatttcatcatggtggcttattggatgtggcaaggctcgaggtagaggatcttttcgctgatggtgcgattaggaatttggtgtgcacctcaactttactacagggcgtaaatcttcctgctgatagaatgattgtaatatccccaaagattggtgactatgagttatctcattttgattttttaaatcttattggccgtgcaggtaggattagtacatctttatatggtgagattttttgcattcagcttgttgatgaagagtgggctgaagataagattgagtcgaatgaaacaaaggagatacaatcttcagttttaagaaagctcaatgaatatggtgagtcagttgtaagttacattgatgtctacactaaagatattgttgatactcaaggagagcttcatgctgtcaatcttgcctcctatctgcgaggccagtttttagtagatagagagcattatgagaaaataataagcaactccaatcttactcttaatcaaattagagtgatgacgaatagattggaagcgttggaagatattttaaatgtaccgaaggatataatatataaaaatcctttcatcgatcccctcttgattgatcagctttattttttggttgaaagcgaaggtgtcaataaatggatgattgataaatatcctagagttaaatctggagtggcagatcccaatgctgaatttcagcatatgaattattataaccaatataaaagcataattttacggctgaatgatatttttgagatagagaaagagattaattataaagaagatggtgtgtcaagaaagtcaagtcatttcgtttctatctttaagttagtaaacgactcacataagtggatgcaaggtagaaattataggttttttatagatgacatgattactaagaaattaataaataaaggcattccagttgattataagaaggttgacgggattaccaattttgtaactacacacatcaatactaatttgacattcattttggttaaatatctctcgctttgggctgacgtagtaagctcatttatgtctgaggaagagcgtacgttgaatgcatttttcctcaatctctcatctatgttagaaatgggtaattatgatcctcaggttttagaggtgatggcttatggaataaatagaagtactgcaattgaattattgaaaaaacaaaaaataaacaatgagcaaaccacttggcaatatttactgcaatataatttggataagctttcaccattgcataggaaatatttgcaaagagcgggctttgggtcttcaaagcctgcataa

SEQ ID NO: 59834 - DNA, 930 bp, Tepidicaulis marinus
atgtcgatggctggactaacatttcagatattagttgatgacacgcttgccggagttacgtcgacctcccaactcatcggcgtagtaaataaacgtgtgctgagtttgatcaacgactttgaggatgcggagtggcgctacccaaaatttcaaagttatttgtgggataacattgcccagaccgctctgtcggaaaaagaacgatccgctcttgtcgaccaaagtcacagctgccttgtcgccgccgcccagaatcttaaactcacggataaagatgagatcgggaaaggcagcgagatcgccgaggttttcctttacggtttgatgcggcatcgcttcggcgcgctgcccgtcgtcccaaagattttctacaagcagaatgttcaagacaacgcaaagggtgcagacagcgttcatatagtcgtcgacggcgacgattttacgctgtggtttggagaggcaaaattctacaattcgattaccgacgtccgtctcgattcagtcgtggattcagttatgaattcactatcaacagacaaactaaaaaaagaaaacgccattataaccagcgtagctgacctcgatggcctctcaatcgcggcgaatctccgttccaagatcaaggccgcgctggataatagggactctatcgataacttgaaatccaagattcacatcccaattcttctactgcacgagtgcccgatcacgtcaaatacgaaagatttgaccgacgcatacaagatcgagattgccacctttcacaagaatcgtgcagacgcctattttctcaggcaaatcgcaaaatccaagtcagttcacaagtatgacgatctaaacttccacctcatcctcttcccagtccctaacaagaagaagatcgtcgatgcttttgttcaagccgttgccttctacaaggggcaaaaatga

SEQ ID NO: 59835 - DNA, 1333 bp, Tepidicaulis marinus
atgatggacatttttgacgtttgccacgaaatcaatagccttctgacgctgaagaacgaggtcgccgccagaaatctcctgatacgcctattagcgaatctcgaccagaccaagacaccttacccgcaagtcgtgaaccacatgatccgtgcgacgggattgttcccctacttgcaactcgcgaacgcttcgtgggaccagaaatatgtgcactacgcgtttgaggtcgatgtcggtcggcgcaaggcgaccctgcaccgtgagcagtcaagcgttctctccaaactcttagacggcaagaatatcgcagtgagtgccccgaccagcttcgggaagagctttatcatcgacgcctttatcgaggctaagcagccggacaacgtggtgatcatcgttccaaccatcgccctaatggatgaaacacgccgtcgtttatttaagaagttttctgaacactacacaatcataacggcgccagatacgccacttgggctcaagaatatcctcatattcccgcaggagcgggcctttggctatctatccgctctggagaagatcgatctgctggttgtcgatgaattctacaaggtgagtcagaagcacgaccgcgaccgtgcacccgcgctcatcaaggcaatcctgaagctatctaagaaggcgaagcagagatattacctcgcaccgaatatcaagaaactcagtgataatgccttcacgcgcgatatggagttcttggagctcctagacttcaacacggtctacctcgacatcaaggagccctacaaggaatttgggggcgatgcgaccaagaagggagaaaaattaatcgaacttatttctccaggcactcagaagtccctgatctacgcaggcacctactccgaaattaagaaaatcgctgatctcgtcatagcgcgaattgaccccgtggatcgaatctacaccagccatttctccacatggctacggcaaaactaccaatccgactggctactggctgatttggttgatcgggcgattggcgttcataatggtagcatgcacaggtgtctgagccagctacaaatacgacttttcgagtatgaagatggcttcgacagtattgtctccacatcttcgataatcgaaggtgtaaacacgtccgcacagaacgtgatcgtgtggcgaagcaaattaggcaatgccaatctcaaggacttcacttacaaaaacatcattggccgaggaggtcggatgtttaagtacttcattggcaatatctatctgctggacgctccgccgaaatccgaggacacccaattggagattgagtttccagaggaaatactaggta

SEQ ID NO: 59836 - DNA, 1035 bp, Bradyrhizobium diazoefficiens USDA 110; identical to SEQ ID NO: 58538

SEQ ID NO: 59837 - DNA, 825 bp, Bradyrhizobium diazoefficiens USDA 110
gtgttagtttcggagatcgagaccactctccaaggtcttctcggcaagaccaagcgcatcgaggtgtcgtcccttcccctccgtgacaagtacgaagcggcgcgcgctggaggcgcgcaagtaattctagtctccacgcaggagcggctgcaccttctcgccaacgtgctcggcgacgcgttctcaattgacctgcttatcgtggacgaggcgcacaaaatcgaggacagccaacgcggcgtgatcttgcaggacgccgtagagcgggctagccgtgcgaactcgaagctgaaggtcgtattcatcagccccgcgacacagaacccggaggcattgctaacggacgcgcccgacggtgtgcagactgtcgccgtcgacagcgacgctcccaccgttctccagaacctgatcgtcgcgaaccaaaccccacgcaagccgaagctctggaacctgaccgtccgacagcagggttcgacacttccagtcggaacgctccagctcgcaagcacgccagcgggacttaggaagcgcctcgccttcatcgccgcagcggcgggccagagaggcggaacgctcgtctacacgaacggcgccggagagtcggaggatgtcgccgatctggttagccagctcctgcctcagcctggctcaatcgatccggagcttgcacagctcgccgacctcgcccggaagggcgtacgccccaacttccgccttgcaccgctcgttgaacgcggggtcgcgttccacttcggcaatatgccatcgacgcggcatcgtggcgcttcgagagactggccgccgaaatggacccgagccgcatga

SEQ ID NO: 59838 - DNA, 873 bp, Bradyrhizobium diazoefficiens SEMIA 5080; identical to SEQ ID NO: 58540

SEQ ID NO: 59839 - DNA, 825 bp, Bradyrhizobium diazoefficiens SEMIA 5080; identical to SEQ ID NO: 59837

SEQ ID NO: 59840 - DNA, 858 bp, Tamlana nanhaiensis
atgaatattgaatcattaaaaacctatacagaaaatcaaatttttaagtttgaatatagttcaactggaaaatttattaaaaattcatttcaccttgattatcttaaaaataaatacagagaaactgatttaataagtttgattagagatactgtaccctattttgccctaactgaagaagaatttgaacagttagaatctatagaccaaacaagaattgcttggtctagaatttccaaagcaagaaaggataaaaaaggagattatggagaactacttttattccttatactactcatatattatgatgctcctaaactagttactaaagttcgtctaaggacttccatgaatctacaaataaacggttatgattgtgcccattttaccatagaaaatgatgagcctgtactatggattggtgaatctaaattttatcaagatttttcttctgcccttacaaaatcaatttcttcattaaatgaccactgtaatataatatctactacagatgaactttctatactgaagccaaatatagaaataaacaaaaattcgcatgaagattttattaaattacaatccttatttaagggtaaatctatagatagaataaaatttaaagttccagtattattaacctataacagtaaatgcattaaaaataatgatgatatcagtgataaatttaagacagaactaagagaagaaatagacaacttatataatactatagaaactaaagatattcaaactgatttaagaaatgtggatttcatcttttttttatttccatttgacgcagtatcctatgtgaaagattcattggaaaacattgaaaacgccctaagaacatga

SEQ ID NO: 59841 - DNA, 2259 bp, Tamlana nanhaiensis
atgagttccaaaaacactttatctctggttttaaactctgttgagttaaatccacaagtaatagcattagttgaaaaattaagaaatgaaaatgaacttgattttcaagaatataagctattacttgaaggcacttattctctattaaactcaaaagatgaagactcttataatttaggcttatattcaatatgccatgtatgtgaatttttacctaatgataattttttgcttcaaatactaaatgactgcattgtttcctcaagaatttttctatataaagaaatgttaccaatactagaaggtgtaaaagaatcttttttagacttatatataaaaagcttttatacattagaaactggtactatccttactaaagaccagaaaaaaattctaagcttattcaatgagcacaaaaaaatcattattagtgcacctacttcatttgggaagtcaagaattatagaagaaataataataaataatgattaccacaatattgctataatacttccaacaatagctttattgagtgaaacatatcttagatttaatgtaaacagccatataaaagaaaactataatctgataaattcacttggacttgcagatacaatagcaaaaaataatcgaaatatattcattcttactcctgaaaaaatggatatgcttttggatgaaaagcctgaattaaaaattgatttctttgttatggatgaaatttataaaatccaagatgatgtagacaggaaaagtgtattctcaaattgcttatacaggctaagtaaaatggataatcatttttacctaattggtccttacttcaatgattttagcccaaatttcagaaaagaaactgaatcttattttaaaaaatttagttcagaaattgtgcaaaaagacacttacagcctttataaaatggaaaaaggggaagagtatgttatcagaaacaaaactctcaaaaagaaagtaaaccataaattaaatttgagagacattattaaatctgtagatggacaaactatagtctataattatagaaaagattatgttgaaagcctttcaaaagatataattgcaattttaaataaacctgatgaagatgaaactagctctgatttaatagagtatatttcagaatcaatatctgctgaatggtctcttgtaaaagcgttaaaaaagggagtagcttttcatcatggctcagttccaagatatattcaaacagaaataattgattcattcaacagcaaagaaatagatattattgtttgtactactaccataactgaaggagttaacacttcagcaaaaaatgttattttatacagcaacgcacttggcaaaaaagataaccttctaactggtttcgaagttaaaaatataaaaggaagagctggtaggtttagagttcactttattggaagagtattctattttcatgaggtaaatgaaaatgatagagacattattttaatagattattacgataaagaagaattaagcccagaagacgtaatacagattgacaaagaagacttaaaagataaaaatctagaaacaagagaaagactagaggatttattggctaaaaataaagtccccctatctcttttgaagcaaaacaaatacatacctatccacaaacaaataggtttaattaacttcttaagggctaatcctattcatttagtactagcttattttgagggtacacaccctgacaaagaccaactaagtgaaattttcaacctttcaagagagcatttatttaatgaaagagattacaatgataaagggttcagatattgggaactaagcagattattaaaatactatgtataccatactccatcaattaaacaattaattaatgaacagactaacagtgaatatatagattcaaaaataaggtctgcttttaaattaataactcattatttcgagtttgcatttcctaggtactttagagcctttgaaaatttatacaattttgtctatagagaatatcatgataaacccgatgggggtattagtctcaagtatttaataaccctacttgagtttggatttgttaaagaaaatgaaatagctttaaaagaagctgggttacctaatgatattattagaaaagtttctaataagttttctgattgcaattcattagaagaagtaaaactaaaatacttatacaacccaaatattatctcaaacttatctgagtttgaacaaaagatttttaggcgatatatttaa

SEQ ID NO: 59842 - DNA, 897 bp, Veillonellaceae bacterium DNF00751
atgagtcataagcattcaaataatatagaaatcaataataaattgcatatttactatataagttttgatttacttgatagtggatatggacaagtaaaagataagttctatgatgaactttttgatgatattcctgcttttgcgtttggtactgatgtgatgaacgagaaaaaagataaaattggtttagtacctactgtaagagaagcaatgaaaaaactatatacaataaaagaaattcaagaagccagtagagaatatttaaattctaattcaacagaagacaaatatatcaagagaggagaatttggagagttacttctatatcatcttttacacgaatactttagagccgatgcattaatatctaaaatatattttaaagatagtgtgggtagtgttgcccatggatttgatgcggttcatgtagatgttaaagaaaaaattatatggttaggagaatctaaactatataaaaatcctaaaacagcaattgatgaacttgcaaaagatgtagagaatcattttaatgttaattttctagacagcgaatttcaaataattacaaatagaatacacgattctaaagcagcttgtgatgattttattttagaattattagatcctaatactaaaattctcagaaaattagccaatattaatgtatgtttgtttgctgcatttgaaagtaagagcttagtcaactttaataaagataatttcgaaaaaacattaaaggaagaagtagaaaaattagataagaaaatgaatactttattaagtcaacacttatgggcaaattatctaaatgtttatttgttggtatttcctttagataataagagagaatttgtatcctctcttcatcaaaaattaaaaggagggcagcaaatatga

SEQ ID NO: 59843 - DNA, 2136 bp, Veillonellaceae bacterium DNF00751
atgaatgatagtgttaaatttaatgctgactatttgaaagattttgaatataattggaattgtactaaatattatacttctattattgacaaaactgatgcaaggaaatttttgataaatgtactagaaaattgggatcaagttaatgatgatgctaaatccatatggttggatttgattgaaagagctggtttttatccttattattttgataaaattgaaagcgtcgaaaattataatcaatctttgcaatctagtgttcggagtgctttttttaaatcagattttttaaatggtatatattttcatgagcaacaaaaggaaattgaaagggaagttagtttaaagaaaaatgttgcagttagtgctccaacaagttttggaaaaagtcttcttattgaagaattcgttgccagaaaacagtatagcaatattttaataattcaaccaacacttgcattaattgatgaaacacgaaaaaatatgtgtaaatatttagattattataatattgttattaacaccaaacaaaaagctacagatagaaatatttttattttgacagcagagagagtacttgaatatgagtctatgcctaaaattgatttttttattgttgacgaattttataaagttagtaatttaagaaaagatgatagaatagatgctttaaatatttctataatgaaaataatggattataaacctcaagccttgtttttaacaccttgtgtaaattcactttcagacagatttattgaaagatataatgttgttttttttaagacagactattcattggttaatactaatataatagaagttcgtaaaaataatagaccactgaaaagtaaccaaaaaaagaaagaattatttaaattacttaaagaactaaaagaaccaagtatagtgtatgtaaaatcaccaaatgaagcgtataaattagccaatgaatatataaattatttaaaacctactaattttgttaatagtaatttaccagtatttgaatggatggatgaaaatatatctgaaaaatggaaacttaaaaaacttatgatgaatggaattggagctcataatggggctttacctcgacatatagtgtcttctgaaattgaaatgtttaataatggaattctgtcaattatgtttgcaactgtgtcgttaatagaaggcgtgaacactggtgcaaagaatattttaatatacagtcaaaataaaggaaggaatcctattgatttttttgactttgctaatattaagggtagagcgggcagaatgggaaagtactatactggaaatgtttatttatttaatgaggaattgcaacctgaagaattttctattgatgttccttttgttgatcaagctaatatatcagatgagatattattcagcatacctgatgaatatgttaaagataaagataggagaaaactgttggaatcagaaataccaggagatttacaggcgataattagaaaaaatctaatttctgtggaaggacagatgcaattatacaattatattagattaaatattggtaatttatcttatttaaagtggagtagaattccttcatataaaaaattatggaggacactctatttggcgtataaatatttagataataatgatagtgaaaagtttgcaaaggctcaagctataatggcgttgaatattattaataaatcattaaaggaaacaatttttaaaagggaagaattcttaagaaaaaaaagatccaataaaaattttcatgaaaaagctattgaagacgtgttaaagtttgttagaactgatgcgaattataaaattccgaagttgctttcagtattggattctattcaaaaatatacttttgaaaagaatagcaatcgtaactatggagattatagcatattcaattcattattagagaatggcgagataagtgaaaattttagatttttagttgattatggtgtaccattatcagctgtgaaaaaaatagaagttgaatttaacaagtgtaataaagaaaactatgataacatatttatattacaatggttgaagcaaaatattaatatatttaatagtatattactggaatatgagtataatttactgaaaaaatctttaaatttttga

SEQ ID NO: 59844 - DNA, 921 bp, Atopobium deltae
atgagtccaattctcaatttctcaaatcaagggaataaccttagctctatatttactgaagtaaaacatagcgaaagcttagggcttgtaaatccggaacagcttcgcctcttccaccttaatgtaagtagcaacctgtttaattttgcaagtttaagcaactatctaataaatattgtaagcgaatatgtgttttccagagcacaagtagaaaaattaagccagtcatccaatccacgctcaattggcatacaagctctaagaataatgaagaaaaacggagctgctgatgttagaggaacaggaaatgagctaggagaaattttactctatgcttttttggaagatattctcggagcaccaaagttattcagtaaagtagagctgaacgcctcttctacttcgtttggcaaatcaagcgatgcagtacacctactaacactagaaaacacaccattcccttgttatcaaacaatattcggttcttcagatattgctggggacatacgttctgctattgaccatgcttttactactatcgagaaggtggagcatgatataaaaagagttgattctatacttgtagatagtcatatttttgaagaggcttttgatactaaaactgctgaaaaaataagaaatattatgattccatcagccaatactaagatggctaacgacatagcttatggcgtctttcttgggtattccttgggattaaaccctcaaagtagatctaatttggattttcttaaagctatggacgcaaaaatgcaaaccgatattaaacagcatgcatcttacattgcaaataaaataaagcaatttaatcttggcacacactccttttacttttatatcgtcccattcaatgatgctgaaaaagataaaaaagaaataatggaagatttgctaatgtaa

SEQ ID NO: 59845 - DNA, 1770 bp, Atopobium deltae
atgagcgatgataaagttaaattaggcgaaataatatttaattcaattagtgaaaacgaatatctaaataggttatataaaaaagcactgctctcttacgcacgaaaaacgctaagcatgcccattgataactcttcactaaatagcaccgaagtccatgaccttttacgatttgctgatttactctcaaaatcaaatcatgcaacaaaatatgaagaacataaaatgtgggcacaagagattatcgtgctactcaatttcttattccctgataataagaacattaaagcgtttggtggctcagtattttcaaatactgacaatacacgtggcattagcattttgaacactgattttgaggatccttttattctaagtagactattccaagaatacaaaaagtcgtatctacgcattccttaccaagaaaatatgcactttttctctgctcaaaaacaagcttatgaccatcttaatgataaatattttagctattccgcgccgacatccatgggtaagtcattcttgatgagaatgtttataaaggaacagatagcaaatgaaagtcatcaaaattttgccatcattgtgccaactaaggcattaattaacgaggtgtctcaaaaaataatacgagaagatttgaatgatctgctaagtaagaaaaactataaagtaataactgcctccacagatattgccttagaaggaaagcatgattttgtttatgtattaacgcctgagcgtctcttatatatgctcatcgctcatccaaaccttaaaattgattatctatttatagacgaagcacataagctctctgctaaaaatggcagagctcctttttattataaagtagtcgatatgcttaggaaacgtaaatgcccaccaaagtttatctttgcatcccctaatatacctaatccagaagtatatttacgccttttaaccgatataagtgaaggaaatgtatcggcattaaaaacatcattttctcctgtaacgcagattaagtttttgcttgatcttaaaaacaagaaaatgtctgtttataatcagcattccaagaatcttatcgaagtggcggatgtcaaatcaggaaatatacaacttgaagatttcctacaaatagttgaatcccaaaataggtccagtgatattcctaatcatcatcaaactatcgtttatttcaattctaaaagtaaagctgttaatactgctaaaaattttgctgatagattaaatgacttaaacgataaagatctcaatgctttatctaatgacattgctacatcagtacacaaagattattatctagctgacatcatcaaaaaaggtattgcctatcatattggctatttaccttcttcaattcgtatgagaattgaagatctatttcgtgctggtaaaattacgaccctattctgtaccagtacacttctcgaaggcgtaaatcttccagctgataacctattcataactactaaaaaagtatttactcggaaaatgacacctgtagactttaaaaatcttataggccgagtaggaagaattgaatataatctttatggcaacgtcatatttgttacagaatccgacgacaaaagccaagcatcagaatacgtagatatgctaaaaactgacgtccctccacaatcgttatcaatagaagctggtgctggtattcttacaaaaccagaaagaaaatatatcgttaatacgcttaaatctggaagcgttgtaatcgaaaaaagaaaaaatgggaagtag

SEQ ID NO: 59846 - DNA, 1629 bp, Novosphingobium barchaimii
atgccgctcatcagccttatagatcccgaaacagcatcggacgctggcggtgtcgcgggtaggcgggggcagaagttccaggatcatgtcgctgctagcctcgtcatcgacatgctggtcgagccgacgatcgtgcagatagaatgcgagacagcggacgatgttaccatccgacggatggtggacgcggtggaggcccatgagtatgtgcaggtcaagacgaccgacggtgactccaaatggagcatgcaggagcttctgcagcgcaccgacagtcgggaaggcacgtcaatcgccgagcgttcactcgcctgcgatgcccatgacgccgttcccagcttccgcctcgtcaccgtccgcgagcccagatcccctctggtccatttcaagattccgaggggcgagcgatccagccgcgcgtccctcatggcagcagcaaccggcccattcgagaagaagtttcccaagttcaagtcgccgaagggacgaacgctcgccgactgggcgaagcagctgctctggcaggtcgagcccgatatggagaagctcgcgggtcataaccggctgcgactgctcaaactcgccggcaatcatggagagaggccccacgtcaccgaaatagagaccagctacgccgacctgcttggaatggtcatcgacgccggtgacgcctcgcgagttcacgctcctgagaagaagtgcatctcccgcgccaccgccaccacatggtggaggaaacaaatcgcattgttcgccgcggagactcgacgaaccatcaaggtctatcgggtccggtccgaggagttcttttccgaattccaccgcgggaccggcacatcggacaatcgaacagtttccggctgggatgtggaattcgacggcggcgaatggagatgccgcgaactcgtcgaccacctgcttgactggattcccgaagttgtgctcccgcctacggtcctcgccaatctgaaccaactcaacgcacgaagcctgctgacacgcgcagttgaggcatgcgaagcgcatggcggcctacgtgccagggaagtgcttgccgagctcatgctgcacgcgctgctgaggcaccatcaccgttcggaaccgatcgcctgcaagattttccatatgaacagcggtcgcctcgttttcggcagcgcccacgtggtgctggatgatgccggcgatcagctctggctcggccagagcaggctgacgaccgtcacggatcgagaaagcatgcctgcagcggtggcggaagcactcaggtctggccttgaccgcgaaattctgcgccgcgaacggaagataattctgcagctgcggcatccggctcacctcagcgagcacaaccttggccggtcgatggctgccaacggtaagatagacgacctgctgtcagttctgcacatcccactgctcatcgcctacgacagcgacgtactcgcggaaggattcactcaggactatctcaacggcctcaggcaggaagccaacgagatgtccgcagccattcaggcagaactggacaccgatctacgcgacttcaaaatccacatcttcctgataccgatcgaatgcgcagataccctcgccggcctcttcgaaactaccctgaaggctgaccagtga

SEQ ID NO: 59847 - DNA, 2112 bp, Novosphingobium barchaimii
atggccttcgacgcgcttcaaaccatcagcgctctcgccaacgacgtcgccacgcaaccggccgcccgggacctcgtgatccgcatgctggccgcaaaggacctgctgcgggacgacttccacccgctccttgaaggtctggtccgttccgtcggcctgataccctataccgatccggacaatgcccgatcattggacgaccactacctcatggaagcccatcgagcgccgatcccagacgagaaagactactttttccatacgctgcagttgcaaatctaccgcgatctcgttgccggcaggaacttggtgctgagcgccacaaccagcgtgggcaagagcatggtggtggacgcggtcatcgcttccggtctctacaacgtaatcgccataatcgtcccgacgatcgccttgatcgatgagacccgccgccggctgggtcgccgtttcgcccacacccacgaggtcgtcacacacccgacgcagcaaaccgacttcagcaggccggttatattcgtcctcacacaggaaagggcactcgcgcgcaaggatctggacaaagtagagttcttcgtcatcgacgaattctacaagttggaaatcgacgagaaggagcctgagcgttctatcgacctcaatctggtctttgcgcgcctcgcgggtcagggtgcgaagttctacctcataggcccacatgtcagcggagtgacgggcattgcagcgcgttacaatccggtattcgtgccgtcggaattctcgacggtggcactcgacatcgttcagttcgatctccctgagaaaggggatgcccgcaaggagaagctcgtcgagctatgcggccaactcacttcccccacgctcgtctactgccagtcgcctccccgagcgacatccttggcggagtatctgcttgagcatggcgatttcggaaaggtcgcatctacgcgcgccgcagtcgaatggctacgacgcgagtatccagaggaatggatcctcacaaaagcgctggagtatggaatcgggatacaccatggtaacgttccacgggcgatccaacaatatatcatccgcgctttcgactccggtgagatcaagatcatcatctgcacgaccaccctcatcgaaggcatcaacacggtcgctgagaatgtcatcatctacgatcgacgggtcgagaacacaggctttgacgccttcactttccgcaacattgcaggccgagccggccgcatgcgcaagtatttcatcggcaaggtcttcgtcctcgaagccgcaccgccggatgagacgatgtccgtggagatcggtgtcggcctgcagaacgaggacacacctgccgcactactgctggagctggatgacgaggacctcgcgccgatctcaagacagcgcgtcctggacatcgaaagggaaagtcctctttcgatggagacccttcgactgaatcggcatgttcccctcgaccgacaatatgccgttcacacacatatcgtccgcgacctacttaatctggaggatgccctcgtgtggtcgggcattcctaagcccttccagctgctgaaggtgtgcgagattatccacgatcatttcgatggttacgccctgagccgctacggcgtcacgtccggaatggggttgaaggccgaactggatcgattgcggcttgcgaagacgttcaggtcctacatagaccacaggatcgcaaaccgccccttcttccaatctgtaagcgaatcggtcgaacaggccctcaaattcatgcggcgctacgtctcctacacatttccccgaagcctgctggcgatcagtaacatccaagccgaggttctgacgcggagcggacgggcaacggttggcgactattctatctttgcatccagggcagcaagcctttttatgaattccagtcttttcgcactcgacgaatacggagtgcccccggaaactaccaagcggctgaaatatgcaggagatggtccagcgacgctgagcgaggcagtcgatcttctttttctggcggctcaggatccggaatccgacctccatccgttcgaacgctctattgtagaagacctgatgacgacgatgccgccaaggccgatcaccttatag

SEQ ID NO: 59848 - DNA, 918 bp, Alcanivorax sp. 97CO-5
atggaattcgaaatattaattgattgctctttttcagagataaatttaaatcaatcattggccccaatagataaaaagttcactacaagctttctaaatgatttcgaggatggccagtggagatattcgaagtttcagagttttatctgggataatattgctgagacttcgctttcatttaaggaaagggagtctttggttaatcattccctgctcgtagcagcagcgaagaacttacgccttacagactctgataaagaagatattggccgagggagcgagcttgccgaaatcgttctttacggactgatgaagcatcactatcaggcacttcctgttgtcccaaaaatattttacaaacagaattcacaagataatgcaaaaggtgctgacagtgttcatatagtggtggagtctaatggtgatttctcgatatggtttggcgaagccaagttttataacaatattgaagatgcacgactgtcaagcattgtcacctcagtagaaaactcactcaaaacagacaagctaaaaaaagaaaattccataataaccaatgtccaggacttagacgagcttttaattgataaagaattaaaggaaacaataaaaaacacgctttctaacaaaagctctatagatgatttaaagcctagattacacataccaattttgattatgcacgagtgtgaaataaccgcaaaatcgactcaagttgatgagcgttacaaaagtgaggttctgtcctttcattgctatagggcgacaagctatttcaataagcagataaagaagcttaaaggtagcgtccatctatattccgacataacgttccacataattcttttccctgttcctaacaaagacaagatagtcgatatgttcgtgaagaatgtcgaacactacaaggatcaataa

SEQ ID NO: 59849 - DNA, 1140 bp, Alcanivorax sp. 97CO-5
atggatatctttgaaacctgtagtagcatcagcgatcacatccaaagtggagatgatttgttggcgagaaatgagctaataaaggttctgcattttcacaaaaaagagggtgtttcctattcccctctcgtgaatcacctaattcgtgaaaccggactttatccgtatctcgatcctgaaacgtcgagctgggaagatagatttgtctatgaatcttttaaggttgacataggctttgagttgcctgtcaccttgcatagagaacagtctctgctactaaaaaaattactggaaggaaaaagtctagcagttagtgcgccgaccagtttcggtaagagctttgtgatagatgcttttatatcaataggtaaccctaagaatattgttattattgtgcctacaatagctcttgcggatgagacaagaagaaggcttcaacagaagttttctggtgattacaaaataatcacgacaactgatgttgaaatttctgataaaaacatttttatatttccacaggaaagagcggtttcttatattgacaagctagattctatcgatgttctcgtcatcgatgaattttacaaagcaagtgctgagcatgataaagagcgcgcaccctcgttacttcgagctatgattcagcttggaaagatatcgaagcagaaatattttcttgctccaaacatatcgactcttaaagataacccgtttacgagagatgtcgagtttattcacttagacttcaacaccgtatttcttgaaaaacacaacctttatgaagagattgggaatgatgttaccagaaaaagtgcggcacttttgtcattgataaaggataggcaccaaaaaacgcttatttacgcaggaacttacagcaacataacccagatatctaatcttattatagataagttgcctcctcgtaaaggcggaattttaacagatttttctagatggctatcaaagaattacgccagaaactggcctttaacatcaatgattgatcggggttttggtgtacataacgggaagcttcataggtcattaacgcaaatacagataaggcttttcgaaatcgaggacgggttaaaaggcattgtatctacatcttctattgaatcgccaccagtttgctag

SEQ ID NO: 59850 - DNA, 909 bp, Gynuella sunshinyii YC6258
atggaactaagtatcaaaagcagggaatttctggatagctttgaccatataaattcgaaggtgctggataagtatggaaaaaataagctggatttgtttgtgctaaaaataaatgcaaatgagtttgactataactcgttatcaaatcgtttaactgacccagttatagaatattctttgtcaagaaaggtacgagagcgttattctgatcgccccggaacactgtccaggaaggccagagaaaagtttctggattatcttaagaataagggtgaattaggcgagcttcttttgtattgcttcctcgaaactcatttaaacgctcctaaaattctttccaaattagaactaaaaacatccacgggtcattacgtgaacggtgcggatggtgtgcattttttaaaactggatgatggaaattatcagcttatttttggtgagtccaaaacgattaaatccctgacaacagcattaaccgatgccttcaagtcaattgatgaattcaaaaggtgtattaacgccaagggcgatgagaagagcggtttgccgtacgaaaaagctctagtgagcgacaatttggagaaagaggaatataatgatgaagaagcagattttatccgttcaatcatttacccaaaacgggataataactttgaggtagatgatgcgttcggaatatttgttggttatgaaatttctataagcgcggaagataagcgccttcccaattcagggtttcgtcttaagattcaagatcaggttaagtctgaagttgaaaaatcttttgaacacataaaaaataaaatcgaagaccacaaactctcaggtcatcacttctatatatacgttttgccgtttacaaatttagaagatagccgccaaaaaattcaaaaagagatcacagcatga

SEQ ID NO: 59851 - DNA, 2538 bp, Gynuella sunshinyii YC6258
atgagtttttttgacaaactatcggcagaagtattgaaagatgagtattttatagacttgttcataaaggcagagatgttgtctgcgtcaggattttttggcacagaaaaaatcattctaggtgctaaggaatatgttgatttattgcgatttgcagacattctttcgcgcgcaaaaaattttgaggcacaaaataaagcctataaaacagtgagcctcttgattgatgactataagagcgacgacctctttaagagatttgctcactctatttttgtcaagcttggaaacttcccagcaataaggtttttagaagacaatgatttaggttctgatgataattcgattgaacttgtttttgagaaaagtcttaaggagatatatcagaaatctcgtagcaaaaacctgatcttcaccgatgaacaatatgagatttttagcaatctaaagaacagtaaccattacagcttttcagggccaacatccttaggaaagtcttttattattaaagagtttataaggtatttgatagaggagaataattgcaatgaaaatatcgtcatccttgttccaacaagagcattgataaatcaaactttgctacagttaaaaaaggaattctatgatattgagacctataaaatcctttctcacccaactgttcccgaatcttttagatctggagaaaaaaagtttatttttatttttacgccggagcgattaacagcatatctggcggaatttagtaatcctaaaattgggtatttattcattgacgaggcgcaaaaaatcacgtccccaaatgatacaagaagtccgctatattatcatgcaattctacaagccgaaagaaagagtattaagctctattttgcatcgcctaatatccctaatccagaagtgttcctacagctttttgagaagagtgcagaggaagcaaaaagtgtaaaaagttctccggtttctcagaatagatactttttagattttcttgataagcgttgtttaatgttttcggatgtagcggatgagcaaaatgtaaatgttgatttcagtgatgatgatttttatacgtgggtcaaacgtttaagcaagcgtgatgcaagtatcatatactgtaatacaaagagcgacaccgttgaatatgccttgaaattctcaaaaactttgccagataaagaggataatcggattgatgaagttatatccgttatcgaggagcatctgcataaaaaatattttctaattgattgccttaaaaagggtgtggctttccattttggaagccttccgcaaagaatacgagaaagggttgagcagcttttttccgatagaggcatagattttgtattttgtacctcaacattactagagggcgttaatcttccggctaaaaatattttcatacttaacaatgctattggcctaaccaaattttctgatattgacttttggaatttggctggccgtgctggaagattaacacaagagctttcaggcaacattatatgtactcggattgaagacaagaaatacagatggaagaaccctgaaaaagacttagacgtagtaaaaaacagacaaataaagcctatagagcctttagtgaactcaggacgagggaatttttataagaatattgaagcgtctctttcaggaaaagaatttacgaaaaaatcggctactgcaaacgaaataaatatttggaatcactatgcgaatatcgctctaattcatgaaattcgttcagacgaatctcctttaaggtcaaattttctagaaaggaatgataacgcgaaggttgttttacaaaaattgaagaaggaaacattggttcctgaaaagattctttcgtcatattcaatgattaaatctaaatatcaaaatcacatttttcaaagcgaagatttggcatctaaaaaattgtcatcaaatatcagctatgaatctgtcttagaaaagttggagcttttgtgtgatttttattcatgggaaacggaagaagtgacaggcagaaaaaagctccttccttcaagagatattctaaaatactacgcagtgctcatggctaactggatggactcgcagcctttaagctggatgatttctaactcgataaaatatcatgaaaaaaccggagtgatttgggaagataatcaatcagtgccgtttaattcgaagagccaaaagcacattaatatagtcatcaataatcttatatccgatgtcgataatattcttaggtttaaattgaagaattattttagtaattattatgacatattggcggagaaattaggcgacaaaaacgctggtgaaaattggggcgagtttctcgaatatggcacgaatgactggcgtataattgaattacaaaacatcggaattccaagacatttggccaactttctacttgaaaaccacagtgagttttttgtttttgagggtggttcgttgttaagcatcagaaaagaatccttgatagaagcgatggatgaaaactctcctgaatttaaagagttggtggaggtaatttag

SEQ ID NO: 59852 - DNA, 909 bp, Geomicrobium sp. JCM 19039
atgaaaataagcaataattctttgaatattactaaagcaatgcgacaagtatcaacctcacaaattcctgtagaaaataatttgcaagtattcatttttcctatctcttcgaatcagtttgaccacaaagttgctgcaaatcatttattagaatcggttgctgactttgctctatctagaaaagccaaagaatatattggaaaaacaaactatatgaaattatctaaagatgccagggcaaaatttaaagattggagacaaaacacaggagagctaggcgaatttctactcttttgctttttagaaggacatctacaagctccaaaaattctatcaaaattagaattaaaaacatcaagtgagatgtatgtacatggtgccgatggtcttcactatttaaagttatcaaatggtaattatcaattaattttcggagaatcgaaattacacaaacaacttaacccagctattcgtgatgcatttaaatctatccgggatttcaaggagtcagtgaacgctaaaggaaatgaaaaaagcggaatttcttttgagagaagccttatgtctagtaacttagacagagaaactttttccgaagaagaaaagacatttctccgtagtattgtttatcctactccaggtgaaagttcatatgatgtagatgaagctttcgggattttcatagggtacgaagtggagtttgaaaatgaacgaaaaacactttcaaatattggatttagagagcatgttgaaacagccataaaagaagagatagaaacgcaaaaagagaatgtagcaaattacatcgaaaagtttgacttatatggccacatatttcatatttatgtgctccctttctcaaaacttgatgatacgagagaaatgatgctaaaggagttattaagttaa

SEQ ID NO: 59853 - DNA, 2562 bp, Geomicrobium sp. JCM 19039
atgaatttttttgaagaattaaccgaaatggcactaaatgatgagtatcttaaatcgttaatctataaagcagaaactatttatgggcaaacgatcttcaatagtgatgagctcaatcaaatctttaattcaaaggaatattatgaccttttacgatttgccgatatattatctagatctaaaaaacctgaagctagaaatactgcattaaaaatcatcagtcttctatacgaactagaaggttataagaatgataatgactttaaaaatttctcagaaagtgttttaacgaaattaggtaattttccatctataagtattgttggttcgaatcatgaagataacaatgacgaagagattgagattgataaaatactcaaaagtaccatgcaacaagcaccgaattctaaatatatttttacagacgctcaatatgatgtttttgaaaaaatgaaggacagtaatcattatagcttttctggatcaacatcttttggtaagtcttttatatttgaagcttttatgaattatattattgatgagagaaatgcttctgataatatagcaattcttgtgccaactagggcattaatcaatcaagttactataaaattaaaatctgagataaaaaataaaaaatataagattgtatctcatcctaaagtacctctactctataaaaatgaaggtaatagatttatttttgtattcactccagaaaggttaatatcgtatttttcggattctaataatccttctataaattatttatttgtagacgaagcccataaactattaagtgataaagatcaaagaacgccacttttatatcattcgctaatgcaagcgaaaagaaaaagtgtaaaattatattttgcttcaccaaatataccaaatacggaagtgtttttgagattatttgggaatagtatagaagaaagcacttcaataactgaaagtcctgtagctcagaatcgtttcttcattgattgcattgataaaaaagctgtaatgttttcggattttggaaaagatatccctctcaatggtcttaaatacactaaaaatgaagtagaaaatctaattgaggtagtcaataaattgggagccgataagcaaaatattatctattgtaatacgattgaatataccgttaaacatgccagagaattttcatcgcacttacaaaataattctagtaagagaattgaagagctaattgcccttataaaagaaagtgtccacgatcaatacttcttgattgagtgcttaaaaaagggagttgcttttcattttggaaaaattccacaacgcataagagaaggaattgaatctctgtttcgaagtggagaaattcgttttctattttgtacctctacccttcttgagggagtaaacctaccagctaaaaatatttttatattaagtacaaaaattggtatgaattatatggatgaagtgaacttttggaatttagctggacgggccggtagacttgctaaagatttaagcggaaatatattttgtgcaagaattatcgaccaagaaggctactggaaaaaaactaaggaaatagaaaaagtaaaaaacaaaaaaattactgagatcgaatctccattaatgaaaaagaatgacaaaaatttatataaaaatattagtaattctctttctggacaaccatttactaataaaaatttatcagctaatgaaaaaaaatatataaatatgtacggaaacattttagtatatcatgacatagtaaaaagcgattcgattcttcgtaaccgattttttgaaaagaataaggatgcacgaattactttagagaaagtgacttctactatcaaagttccagattatattattgctcaaagtgctaatataagaattgatattcaaaataaaatattctccactgaatctactgatcaattaccggaaggaactgattataaaagttgcttgcagatgttgaatattctatatgatgattatgaatggcaaaaagaagagagcattggattaaatccattagttaaaaatcgagaacaccttaattattatgctgtattaataaactcctgggtaaattcaaaacccttaaaaatcattatttccaatacaatcaaatattttgatgaacatgataaggatcttaatattcgtgctaatcaatatgagacattcaacaaagaaaatgccactcatattaatatactcattaacaatcttatttccgatattgaaaatgctattcgatttaaaataaagagttatgttaataattacattctccttctagtagaaagaggggtcgaagttaaatcaaattggtctgacttcttagagtatggaaccattgacaggtttattatagaaattcaaaacatagggtttccgcgtcatttagcaacttttttgaaagaaaattatccccattgttttcagtttgtagaaggagaaattacagaatttgatactcataaattaaaaaatgagataaacacagaaaaatacaaaaatgagtttaatgaactatccaaattactagaatggacataa

SEQ ID NO: 59854 - DNA, 948 bp, Rhodovulum sp. NI22
ctgactcaagtacttccagaagatttggttaatatagtttcgggcgatccagaagagttgggtgttcatctccagcttgttaaacgggacgtgctcttgaaagattgcgtggcccgtctccactgtcattgcctgactgtggatgggaacggacgcgtcaagccggagcgtcttgcggaatttatgcgcaactcaattatcgattatgccgtcccgaaatcgcggttggatgatgcgcgggcgcgggacgccagattcaagtccggaagcgcggttgcagccctgcaccacgaggcaatcggcacttttacggaccttgccaatactggcgaaggcggcgagatgctgctcttcctactcgcagagcgctttctcaaggttcctcaggtgctctgtaagatggaccttaagaccgactctcacatgcactatcatggtgcggacggcgtctatgcttccgtaaacgaaaacggccttctcaaacttttctggggcgagtcaaaggtgtatggcgaccctacagcggccataagagattgcctttcatcacttgcccctttcctcgtggagacggaccacgaaggcgctgatcgcgagcgggatctcgtgctcctcagcgacaaagccgatctcagtgatccggaacttacggccgcattccggaaatatttcgaccgaacctcaccgctatcgaacagggtcgaatattgcgggatcgcgcttatcgccttcgatgcggatttctatccgaaagatgatgcaaaaggcatcggggaggacatcctgaaggcggcgaatgacgaaatggaaaaatgggtgaagaatgtaaagaacagactatcggtggagaaactcgacaaattcgacattcagtttttctgcgtgccagtgccttcggcggatgggtttcgcgcatcgttccttaaggcgctgggtattaagaaatga

SEQ ID NO: 59855 - DNA, 2622 bp, Rhodovulum sp. NI22
atgaaagataccgaactctttgattggctgacgggtgaggcgcttcgtgatgatattatcaggttgactcagatcacagtggcgactgagataacaaatctggacgcaatccatgaatccgctgacccaaagaagagctttgactggcagcagcttcttttggccggaagccttttggcaagatcaaccgaacgaacgcatcaggaggcggcgctgcggatcgcaaccgctgccgtcacactcgaaacttcgccggaagtgcgggatgcgggggctgtcctcctcgaaaagctgtccaatcgcaggtccgtcgagctggcaatactgcgaaaccggatcgctcccgatcttgagggcagactgggcgtgtcgatgcgccttgaagccaacagaagacgtttcgaggactcgatactccttgaatcgagcggaaaatggataggcgtcaacgattttcagaaagaactatgggcgggcgcctcttccggcgccggctggctttcagcgtccgcgccaaccgcgtccggaaaaacttacctcgttttgcagtggctgctcgatcacgttcgcacgagcaagacaaagatcgccgtttaccttgccccaacccgggctttggtgagtgagattgaactcagtctgaaggagctatgtcagtcggacaccggcatcgagatcacgtcgctaccgctgacggaagtttatttctcatctacgacgggagacaagaaagccgtcttcgtattcacgcaggagcgtttgcacctgcttgtcaatcttctcggggaggacttcagtgtagaccttctcattgttgatgaagcgcacaagatcggagacaatcagcgtggtgtaatactgcaggatgcaatcgagcgggtgtctcggcagaacccgatgatgaaggtcgtgtttgtaagtccttcgacacaaaatcccggagaactgcttgaggatgcgccgaacgatatgccgaaaacgtcggtcaataccgatatgccaaccgttctgcagaacgtgatcctagccgagcaagtgcctcggaagcccaaggagtggtcgctggaccttgtctggggcgattcacccataccactgggcacgcttaaactgtcaaacaagcctgcgggcctgaaaaaaaggctggcgttcatcgcagcggcggcaggcggtcgcggcggcacactggtttactgcaacggcgcggctgaagcggaggacgtcgcgctccttatcagccagttggaaggctcggagaagacagatgatcaggaattgctggacctggctgatctggcccgcaaaggggtccaccgtaattatcagctcgcgccgctggtcgaacgtggtgtcgcttttcactatggaaacatgccctctctcatccgcaccgaggttgagaggctgttccgcgacggcaagataagatttcttgcctgtacctcgacgctgattgaaggagtaaatctctcttgcaggaccatcgttgtgcgcggtccccggaagggccgtgggaacccgatggagccgcacgacttctggaacctcgcgggacgggccggtcgctggggaaacgaattccaaggcaatattatctgtatcgatccaaaggatgagaaagcatggcccgtcggcgtgccgaagcgctcacgctacccgatcaagagagaaactgacgtcgttatatcttccaccgatgaactggctgcgtatcttgagaacagaaacatcgactctttggccgatcttgcgcaaggcgaagaattcgaacaggtcggggcttacctcctcaatacatatattcgtcttggtacgctttccgatgccgcatttgcgaaacggcattctccagatgcgctccggaaactcgatagaagcctcgaaggtatttcggcgctgatcaatattacgcaggatgttctagtaagacatccaggcgtcagcgcggtgggcctgcagcgtttgctggaagcttttcgaaagtacgaaggcaatatcgaaaatctgctgctcgcgccttcggaaagcgtcgatgcgtacgacaggtacgtcaccgtcatgcgacggattaacgcaaatttgtatcctgtcttcctgccagacagtctcattcccctgcacgcgctcgtggttgtcgagtggctgaaaggattgtctttggctgcaattatcaggaagcgtatagagtatcagcagcgaaacaacagatcgttcaagcttccagtgctcattcgcgaaacgatgagcatggtggaagagacagcaagattcaaggcaccgaagtatatttccgcctatatggatgtcctccgcctgttcttgactgaagccgagcgcgaggacctgattgatgaagactttgacatcgggatagcgcttgagtttggcgtctccagcatcacgcttctctcattaatggaactagggctttcccgcatgtctgcggtggccttgtatgagaagattgcgcgcgacgatctggacaaggaaggttgcctggcctggattaatcagcatggcccgaatttcgccgggatggacctgcctaaccttatcgtcagggaaacgctgcaggtatcgggccttgatgatccggaagcgggccacgaattcagcgaatag

SEQ ID NO: 59856 - DNA, 912 bp, Novosphingobium sp. KN65.2
ttgacgggagaccccgaagcgcttgacgttcatctttcgctgattgagcgagacgtcttgatcgacgggcacgctgtcaagattcactgccattgcctggccgtagacgccaacggccgcgtccaaccgcaccgccttgcggagttcatgcgcaatgcggttgccgattatgcgattccgaggtctcaactcgcgaaagccaaagcacgcgaccagaaatacaaaagcaccgaggcggtcaccgccttggtggaacaggcgaagcggtcttttacggatctcgcaaagactggggaaggcggcgaaatgcttctcttcctgctggcagagcgatttctcaaactcccgcagatcctgtgcaaaatggatcttaagaccgacacgcgcatgcattatcacggggccgacggcgtctatgcgggcgtcactcctgatggcgtcctgaagctttattggggtgagtcaaaggtctacaagaacgtggcgtccgccatccaggattgcctatcctcgcttgcgccgtttctcgtcgagcccgagcatgaagacgccgagcgcgaacgcgaccttatcctgctcagtgacaaggccgatctgagcgatcccgtgctcaccgaagcgctgaagcgctatttcgacaagacctctacccagtcccggcgcgtccaatattgtggcgtcgctttgatcggcttcgatgccgaattctatcccggcggcggcgcgaaggtgatcgccgaccaactcactgaagccgcccggctggcactggtgacgtggcgcaagaagatcggggagcgcctccagaccgaaaagcttgaacagttcgaaattgagttcttctgccttccgcttccttcggcagacgaatttcgcaaagcctttctaaaagcgatgggggtggcggtatga

SEQ ID NO: 59857 - DNA, 2613 bp, Novosphingobium sp. KN65.2
atgagaatcgccgatcttcagagctggctcctcgatcagggcatcgaggacgaactcgaccaactcactcgacacaccgtgcgcggcgaaatcggcaatctcgtcccggagcccgatggcgtggcgtccccggttgactggcagcggctgctcctcgccgccagcgtcctcgcccgctccaacacacgctctcaccaagaggccgcgctccggatcgcgaccagcgccgtcacgatgtcgaaaagcgccgccgtcatcgatgcaggcgcagtcctcctgggcaagctctcaaactttcgggcggtggcacttgccggcaagcgcgcgttgctcgccgatgatctggatggtcggctcggaatgaacctgcggatcgaagcccaacaccgacagatggaacaggcggtccttgtcgaatcgagcggacgctggctgcaggtcaacgattttcaacagcgcttctgggagaaagccgccgtcaacggctggatatcggcgtcggcgccgaccgcgtcgggcaagacgttcctcgtcctccagtggctcatcgatcaaatgcatgacggcgccaagcgcgtcgcggtctacctcgcaccgacgcgagcgctcgtcaccgaaatcgaaaccaatctggagctgctgctcggcaagccgggagcgatccagatttcctcgctaccgctaaccgagaaatatgatgccgcgcgcctcggcggcgcgccgctgattctcgtctttacgcaggagcgccttcatctccttgccaacctggtcggcgacgacatcgcgatcgacctgctcatcgtcgatgaagcccacaagatcggcgataaccagcgcggcgtcattctccaagatgcgatcgagcggatcggtcgcgccaatccggcactcaagctggtcttcatcagccccgccacccagaatcccggcgagctgctggccgatgcgcccgatggaacggcgacagcgccggtcgacagcgacgtgcccaccgttctccagaacgtcatcatcgccgagcaggtgcctcgcaaacccaagctctgggatctgtctgtcgtgaaggctgacggcaagcagttgatagggaggctgaagcttgccagctcgccgaccggcccaaccaagaagctcgccttcattgccgccgccgccggcgtgcaaggcggcacgctcgtgtatgcgaatcgggcatccgattccgaggagatcgcggacctcatcagccagctgatcccgaccagcgcgatcgtggacacggaattgctggagctggccgacctgacccgcaagggcgtgcatccacaatatcggctggcgccgctcgtcgagcgcggcgtggccttccactacggcaatatgccgtcgctcattcggctcgaaatcgaacgcctcttccgggccggcaagatccgcttccttgtctgcacctcaaccctcatcgaaggcgtgaatctgtcgtgccggaccatcgtgctgcggggaccacgcaagggtctcggcaatccgatggagccgcacgatttctggaatctcgctggccgcgccggtcgctggggcgacgaattccagggcaacatcatctgcatcgacccgggtaattcccaggcctggccgcacggtgttccggcgcgcgcccgctatcccatcaagcgcgaaagcgacgccgtcatcgagacgggcacgggcctgagcgattatctcgatcacagggtctcggccgatctctcggaacttccggaggccgatcagtatgagcaggtgggtgcctatctactcacaaccttcctgcggctcgggtccattgccgaggccgggttggcaaagcgccacgacaaggctctcatcgctcggctcgacgcgagccttgctgccatcgccgcccaaatcgaaattggcccggagatcgccaatcgccatcccggcatcagtgcgcttgggcttcaacgcatgctcgacgccttccgccggtacgaaggcgaccccgagaatctcttgccagcgccggtggacagcgaggacagctacgaccgcttcgtcacgatcatgcggcgcatcaaccagaacatgtttccggctttttcgcccgagggtctgatcccgctttacgcccgcattgtcgtccagtggctcaagggcttttcccttgccatgatgatccgacggaacatcgaatatcatgtccgcaacaaacgggactacaagctgccgacgctcattcgccagacgatggagcatgtcgagcagatcgcccggttcaaggcgcccaaatatttctccgcctacatggatgtgctccatatccacctgcgtgcgattggtcgtgatgaccttgtcgaggacggcctcgatatcgcgacgcagctagagttcggcgtatcttctcgcacgcttctgtcgctgatggagctgggcctgtcgcgcatgagcgctgtcgccctctacgagaagatcgccagagacgatctcgacaaggcccaatgccgagcgtgggtggccgaccgcctcaatgaatttcccggtatggacatcccggccatcattcttcgcgagattctcgaacgacttcatcccgacgctgaaagccaaaccacgccaagcgcttcctga

SEQ ID NO: 59858 - DNA, 909 bp, Spirochaeta sp. JC230
atgctttttgaagtattgctaaataatcaggtaagaaacattgcaccatattttgaattacgacttatagaaaatgatcatttattaagtataattaatgactttgaagatggaaaatggcgatataaaaagtttcaaaactacatctgggataatattgctgagacaacactcaactataaagaaagagaagcgttagtaaatcaatctctgctaacggctgctgcaaaaaaccttcgactttctgataaggatgatgcaacaggtgaaggtagtgaacttgctgaaatattgctttatgcattaatgaaggatcattataaagctcttcctgttgtaccaaagatattttataaacaaaatacacaggactatgcaaagggttcagatagtgttcatattgttattgaagataatgaagaatttagtctttggtttggagaagcaaaattctataattcagtagataattcaagactttcaagaattgtcgaatcagtaaaaaattcattaagaactgataaactcaagaaagaatgtagtatcatttcgggcgtttctgatattagctatataataggtgataatattgctgagaaagtcaaagctgtattatcttatcaaaattccattgatacaattaaagagttaatccatgtccctattcttcttctttatgagtgttctattacaaaaaccgagtctgttttaaccgaagaatatagaagaaatataaaagaactgcatgttgatattgcaaaaagatacttttctaaacaactagagaatatatcagatatctttttacatgaaaaaattaaattccatttcatactatttcctgtccctgataaagaaaatattgtcagtaaattcatcgaaaacgttgaattctaccgaggtgattaa

SEQ ID NO: 59859 - DNA, 2097 bp, Spirochaeta sp. JC230
atggaattatttaactattatcaggaaataaatgatctacaagagatcggggaagaacttaaggctagaaatgaattaattaaagtactagatatgcatgagaagcaagacatcaaatacaaccatgttattaatcatttaatacgaagatctggattattcccatatattcaaatagagaatgcctcatgggaagatagatacatctatgaggcatttaaagtaaatattggcaaatctgaacctgcaatattgcattatgaacaatcaagaatattaaaaaaacttcttaatggtgatagttttgcagttagcgctccaacctcgtttggaaagagtttcataatcgactcatttattgcaattaaaaaaccagaaaatgtagtaattattgtaccaacaattgcactaacagacgagactaggcgacgtcttcaaagaaagttttcggatgaatacaaaattataacgaatactgatatacaactttcaacaaaaaacatatttatttttccacaggagagagcaaataattatgttgataaactatcgtcaatagacctgcttattatagacgaattttataaagcaagtttggcatttgatagtgagagagcccctgctcttgttagagcaataataaaattgggtaaaatatcaaagcaaaagtattttcttgctcctaatatctctaagttaaataagaacccagttaccaaagatatggaatttgttcatttggattataatacagtatttctcagagttttcactttatataaagagattaaaaaagatgaggaaaaaaaaggattatatctattaaagatacttgataagtatacagggaaaactcttatatacgcaggaacttatacaaatattgataaggtttcgacattaataattgataagcatttggatagtggttctgaattgctagctaattttgaaaaatggctaataaagaattacgatcctaattggatacttccaaaacttgttaaaagaggtgcaggaatacataatggaagattgcatcgatcattatctcagatacaaattcatttgtttgaacaagtaaatggactaaattgtattatatcgacttcatcaattattgaaggagtaaatacgtcggctgaaaatgttataatatggaaaaataagaatggaacatcagggatcaatgattttacatacaaaaatattattggaagaagtggaaggatgtttagacattttattggaaatgtatttgtacttgaaagccctcctgatgaggagcagactgaacttgacttagaagttccaaatgaaattataaatgagatagatgaagatattcagagtgaatatctcaaagaggaacaagtaagaaaagcggtggaatataaagatgaaatgatatctatgcttggcgcagaaaggtataaaatacttaagaaagaaaagattatacaatcaagtgattcggaacttatcttaagtattgttcaagaaatatttgaggatcaagaatcttggaggagattgtcatacttaaatagtccagatcctgatcaatgggacacaatgctctataaagttattaacctcgatcccggaaactggggaacaagatatagttattttgttggctttataaaagcactatcaaataattgggattcaactattccagatttactacggtctgttgaatacatggatttagggattaatgaaatatttcagctagaaagaacgctagcatttgagttttcatctcttcttcaagatgtgaatacaattcagaagatcataataaatgaaccatcaatagatatatctccctttatatttagaatctctcatgctttcttgcctaaaaatgtttatcagcttgaagaatatggacttccaagaatgatctctaagaaaatccatgaagcaggtctgatagatttagagaacggcgaaattgaaataaacacgataattgaaaccttcaagaaattgggatcagggagaataaaaagtattaaatcgcttgataactttgataattatgttgttgattatttttatgaaggaataatcattaataaaaattaa

SEQ ID NO: 59860 - DNA, 924 bp, Listeria newyorkensis
ttggggaaactaactgagcatcatttgtatgaagatatcaaaacacagtgttttcatattgtttttgacttaaatgataatggtgagatattgcaagatgaagatggatggtgtgaggaaatatttgatgaaattccgaattttgctttgggaaaggcaaaagcacaggagatatctcagaacagtcccagaaaagctgtaaaacaagggatgaaattattatataaagtaaaagaggttcaagaagctagtattgagtatttgggcagtgaaaaagcaaaggacccagaagataaatatttgaagcgaggtgagtttggagagttgatactatattatctattggataaaaaactcgacaagcctcagttgatatcaaaaatttattttaaagatagctataattcggttgtgcatggatttgatgctgtacactttgatagagcgactaaccaactttggttaggtgagagtaaattttataaaagcaaacagtccgctttaacagcgctctctaaagatttgagtgatcattttaatgtagagtttttcaatcaagaatttacaatcattaataatcgattcgctgatttgaatattcaaaatgatcatataaaaagcttaatggatgagggaactagatttctgtcaaggttagtaaacataaatgcttgcttttttgcattatttgatagtagtgttctagaatctttttcgtatgaggaagggacagatgagcctacagaagcttttttagataggctggagatactagtaaaagatgctagagaaaatttcaataataagattgagagctttcagaacaaagagaatttaaaaattcatctcttcctatttccagttcaaagtaaatatgatttagtaaaaaaacttcacgaaaaattaaaaaaggagcaggattaa

SEQ ID NO: 59861 - DNA, 2067 bp, Listeria newyorkensis
atgaaaacactattacaagactacggagaaagttttagattagcaagcgaaatttctatgaatcaagatacagagaaattaatttatgtagttgaaaattggcagagcgttaatgaagctatcaagcctatttttaatgatcttattgagagtttcggattctatccatatattaagaaaattgataatttagatactgcggggcttattagaaatgaataccataaatccaataatctgatcaactcagaaaatcaaaatatcacatttcattttgaacagaaacttctagaagaaaaaatttcgaataaaaaaaatttgttaatttccgccccaactagttttgggaaaagtcttctaatagaagaatttgtagcacggaaaaaatatgctaatattttaattattcaacctacattggctttaattgatgagactagaagaaagttaaaaaaatatgctgatttttataatattattgtaaatacgaaacaaagcttattagaaagaaatttgtttattcttacaagtgagcgagtactagatatttattcggaaataaaaaatattgacttattcattgttgatgaattttataaaatatctaatcataaaaaggatgggagagccagtcaattaaatatagccttttacaaaataatgtctaaagagccacaacttttgctactaacaccaaatattgacaatgtgaatagtgaatttattgataaatacaaattagaattttttaaaacagagtatagtctagttaaccaaaaaatacaaaaagtgagctttgtaaaaaatcaaaagaaagaagcgttgttcagactgttgcaagatttagaagagcctactatagtgtatgttcaatctcctgcacgggctgaaaaattggcaaaagaatatatagaaaaggttacgactactgttaagaagagttttcctatttttgaatggattgatgaaaatatttcaccaaattggatgttaaagaattttcttgaaaatggtattgggttacataatggtcagtacccacgccatattgtaaattcacagcttgattattttaataacaacaacttagatgtgatttttgccactacatcactaattgaaggtgtcaatacagttgcgaaaaatattattatttttgaaatgaaaaaaggggacaggcgcgggactcaaagtattacatactttgattttaataacataaaaggaagagcgggtagaatgatgaaacactacacagggaatatatactattttgataacccgccagagaaacagacggagaatcttgatatccctattattgaacaagacgaaggattacaaagtgaagttttagtgaatttagagaaagatgatataaaagaacaaagaagagaggactataatctattagtaatgaatatatccgatgagttattagaaatttttaaaaagaattattatagcgtagagagtcaaaaaaaactatactcttatctaagctcgaataaagtatatcttaatgaactactatggtccactccaactccaaaatatgaagttttagtaagaaccttagaaataatcacgcagcagttggatggtgagagcggtaatacacataaatttttggctcaaaaatgccaacaagtaatgcgagataatctgaggctagcaatttcaaatgaagttctatatcaaaaagggcttcaggcgaacaaaaataaacaagatagagaaatagaaaatatgtctatttctgttattttgaaattcctaaagagccaagcgaaatatgaaattcctaaaaaaatgaaaattttagaaagcattgtgaactatctttctttagacgaaaaagcggattactcagcttttattgcattactggaacatgaaggtattgatgaagaattaagtgttttattggattttggagtcccagcttcagcactaaaaaagataggaattgctccaaatagtgatgttagcacgtacattaaacaaaatttagatagttttggatttaatcaatacgaattagatatcgtcaataaagcattctaa

SEQ ID NO: 59862 - DNA, 882 bp, Vibrio sp. J2-31
atggattcatcattaaaagacaggattaaaaatcaaattttcaagtttgaagctaaccttacaaactctggggaagaagactctgtttatactctcgactttgaatctggaaggtatagacaacgtgaactagttggtctaatcagggatatagttccatttttcgcgctgacagaggaagagattaaaacgatagataggtctgattggaacagacaaagttttactcgagtttctgatgcgaatgaaaattcaaaaggtgactatggagagctcctattgtttgtgttattgagttcattttatgctgtaccaaagtttgttacgaaagcgagacttagatctacaactagagagcaaattaaaggctttgattgcgctcatttttcagttgataaagggaaggtagttctgtggttaggagaggctaagttccataaggacttgtctggcgcgatctcttctgcatactcctcccttcaagaccatctaaatgatagtgaacgtattaaatcagaattaaagcttttaggcggagaaattgaaataaataagactttagactcagatacttataatttacttaaaagttacgtatcaggtggaaggtctttagataaagttgacattactgtcccagtactaattacttacgatagtaagcatattaattcatgttcagttgaaaattgtgctgatatagaactagatgatttcaaaggtaaactgaaaacggaaattgataattgctttggcaagatttataaaaaaaattggccgatagggaagagtattaaactagtattcattattgtaccacttgagtcagtatcagagatgaaaggacagattaacattgttgaacaagcaatgaaattttag

SEQ ID NO: 59863 - DNA, 2223 bp, Vibrio sp. J2-31
atgaataattatattgttgattgtcttaaaaggttagataacttagagcttcaagagatcgaaaacttattaataggtgtttataggaatttagactctactgatgataatgattacaatacttgtctttcagcgatttgtcacatcgcaaacttaagtataaaagatgtgatgattcaacaattattacatgattgtattattaagtctcgaatattcttatatgataacttgttggaaataaatgatgaaacatataatccaaattattctatccaagatatggttttaaagaatatatatacaagtggattaaccaacacgaccttgactcgccctcaaaaagaaatattttctgcgtttcaaacttcaaaaagattaatagtaagtgcgccaacgtcattcggtaaaactagaatagttcgagagataattgcgcataatgaatataaaaatatagcattgataatgccgacagtttctttgttatcagagcaatatcaagatatcaagaatgctactgatggttatgtgatttctaagtcatcaaaagtagaaattgatgaaagtaaaagctatatattaatattaacaccagaaaggatgagcgcatttttagaagaaaatccagatttcaaggttgacttctttgttatggacgaaatatataaggtagattataagttagatgacgacaggttcagggttttttctgacattttatatagattagcgaaaacggatgcagatttctatctaataggaccttatattacagattttagtcaaaagtttagagataagtttgacgttaaaatgctgagatatgatactgaaatagtacagaaagattattattcattagattttgaaactgagagaagaactcacttaatagaaaaatcaaagattaaaataataaaagataagtttaaaaatctacttaggatcgtgtctgaagagtctatagacggaaaatttttgatatatagataccaaaaacaatatgtggaagataccgctaacaaatttgtcaaattgtggccagtcaaagagtataacaaagagttagttaactatttggaagataccgtttcttcaaattgggatctcattccatgtttgaagcgagggatagcattccatcatggtgcaatgccacgtcacgtacaagatttaattgtagatgaatttaacacgaaagagccatcgggaattgactatctcttctgtactacgtctttaactgaaggtataaattcagctgctaaaaacgttgtgctttttgataagaagataggtgctggtgaatcattaaaaactcttgaccgaaaaaatattgaaggaagagccggaagattcatgcagcatttcataggtagagtttttcatctcgaacaaccagaagatggagacctggaaactagcgttgaagttgagttttttgataataatgatcctgccatagagtctttgattcagttagaggatgatgatattgacgatgatttttcagaaagatatgaaagtcatctcaaagatattgatatgttaaatattcctaaccaagtacttaaagagaataagtttgtaaatgtagatagtcaaattgaattaataaatcacttaagaacattgccaagcttggaaaaatactactttgaagaacagataccttcaaaggagtatttgaacaatatattaacgacgatttataatttcttatttacacaaaatgatataggtaggaattttgatggtgaagtagggcagtctatattgataggattaacaaaatactatgtctactttagcccatcattcaaagttctattacagagtgatacagttcaaaatgcccgaaaaaaagagaacgctagaattagatatgtttttgacttaatgtcaaaatatttcgaatttgtctggcctaaatatctaaaatcgttccaaaatatatataactttgtagccaaagaacgttctcaaaaaccgatagatgtttctatgcttatagcaaaattagagtatggtactactgagaaccacgaaattattatgagggactcagggcttccaaatgagattgttaaaaaaatttctcatcgtttcaaaggttgtgagaatttcgaagatgttgtcataaaagcgaatattataaagccatatttaacagatgaacttcgtccaattgagatgagagtactaaataaatatctataa

SEQ ID NO: 59864 - DNA, 1458 bp, Erysipelothrix sp. LV19
atgaaacgattatgttttggtacacttatgcacatattgtatcaagctcgtaaccaaaaagttacgaatgatttgttgtgcgatgccatcttttcttcttattctcaaacaacaaattcttttgatagttccttgcctggacatctcaaaagtggccggaataatgtaccaccagatgtgattgccgctgctagagatacatcatttgaagatgcagagagagtatttgaaaataaagtagtaaaattaataaaagatagtaagcgtgaatcggtagttcgtgctattaaagaaattttgcgtgaggattcaaatattcaagatcaaactgtgattggatatattaagggctatgaaaaaaataacatcataaataattctacatttagcttatctgctcttttggcatccgtattttactttgcgataattgaagttaaaaaccaagaatgtaaaaaagcaataaaagaaattgataaaagttatgtagagtcttttgacctatctgatgagcagatttattttgaaagtgcaaaagctgaatctcaaatccctttacataagactttacatgacccgacttttgagagggtatttgaaaaagtgtcctctataaatatatttggtttatctaatccatccaatgtacatatatacggtgttgacgctaataattgcaagtttaagtttagggcgctaaaggaatatcttgtggataacataggaaactatgtattttctagagcgaaaacaaacagacttattacttcaaagaaaagttatgctataggttcacaagctttagttaaatttatgcaagcttatggagcctctgcagaaacggtcctaggagaaatgctcctttatgtatttatggaacaagagctaaatgcacctaaaataatgagcaaaatcgaaataaatgatctgggtagaagcatcgaaagtaaaagtgatggggttcacctacttgctataaatgataatggccagctattccatcagcttgtctttggagcatcagatgttcatggagatttagccatagcgatcgaccgtgcattcgataagattattgagattgaaagtaacagtgacactgaattaaagatggtggagaacaccacgcatggaagtatctatgattctgatacaacaaattatatggttaatcttctgatacctaataaagctagtgtagcaaaaccagatatggcctttggtgttttccttggttatacactttcgttaggctacacagaaactaataataacaagtatcgtattgcagtcaaagaacagatgaagagagatatttctgctctaaagccgtatattgaacagaaaatttttgataacggtatgagtgggtataatttttatttttacgttgtgccctttaatgatgctccattagagaagagcagtatcatatcggaaatgcttgatgggaggtag

SEQ ID NO: 59865 - DNA, 2616 bp, Erysipelothrix sp. LV19
atgcaaacaccaagaaatcagactcttgccgaagcactgtatagagatattgacaagaatgattatttgaaagaaatatacgaatcattgctttatgattattcaatcaatctgtttaagttaagaaaacagcaaaaagaaataaatataaaagatgcattaagatttgcagatttgttagcaaaatccacccttccagataaacgtgatgaacatcgcttgtggggtcaggaactcgtgattttgttaagtattgtttatccagaggatttagcagtaaagtattacctcggttctgttctttcgacagttggtaattatcgtggcttgaaatccacttatattgagggatttcaaacttctaatgtgtttgatggtttgtattttgagtatgataaatctaggttacaaataccaggtgaagagggcagttatttttttcatgatcagaaagatgtgtatgatggattaaattacaagtactttagctattctggacctacttctatgggaaaatcatttgtcgtacaaacatatattaaacaacaaatagaaaatggttcaaccaagaatttcgctattcttgtacccactaaagctttgataaacgaagtcagaagtgaaataattggaagtcttcaagaaaagctaaaagagacaaattatcgtgttgtcagtgcatctggagatattgtattacaacaagaacacagcttcatttttgttatgactcctgaacgtctactgcatatgatgataggcaagccacagataaaaatagatttcctatttatagatgaggctcacaaaatatctgatagaggagggcggagtacatattactataaagtgattgcacagctatctaagatgaaggaaatgccaacagtaatttttgcgtctccaaatattccaaaccctgaggtatacctcagtttgataccaaaaatcaatatagatgaagtgaaaaaactagcatcaaaatatacaccggtatgccagtttaaatattttctagatttgtgcgaaggtcaagcttatttttataatgattattcaaaatcattatcatctataggaaaaataccacaagaagatgagctgagtgatattgttaatcgagttggatccacacaacaaaacattatctattgtaattcgagacaaaaagttgtcgattatgctgtacaatatgcaagcaaacttcctattaaagatgatgagaaacttatctcattagctaatgatatccgtaatgaagtccataatgattgttatcttgctgatttaatacaacgaggcgtagcatatcatgtcggatacctccctaccaacatccgattaagaatagagaagagttttgttgatggtattctaagaacaatattctgtactagcacacttgttgaaggagtaaatctaccagcagacaatttatttattacaagctatagaaacggaaattctaatatggatgaggtggaatttagaaacttagtaggacgtgttgggcgcataaaatataatttatatggaaatgtgttcttgattcgcatggaggacagacttaaaactcagaattatattgatttacttcaaaacgatgttccaaaacaagagatttccattaacttaatagataacaaaaaatatttaagcttggtagttgatgatttagctcgtggtgatatggaattgactaaggttcgtgaagcagctacagaaaaggactttgatgctctacgtaaatttgcaatgatttttaccaaagatattgcagaggataatattacacctatacgagaagctttttcatcgctattagatgaagaaagtgaatataaaataaaagaaaactttcctgtcgaaaagacaagtgacgatatcaatttttcatacgaccaaattatcaatttaagagagcttgttgaaagtggacaagaatatccaaaattaacaggagaaaatgatgaggttgattttgaagaattagtcgatttcctcatgaaacttcgaaaggttttcaaatgggatatttatgaaaaacgtacgataggaaaatcaggtacctatagagaggactctgttgtcaggtggtatgcagttatcctattaagatggattaggggcaatggccttagtcagattatataccatgcacttaaatataaagagaaaaatccaaattcaggtgtatgggttggcaatatgaaaatggctgatgtttataataagaactccaaatcccacaaaaactatattatttctgaaacacttggtgtaattgaaaatgtccttttatttagtatctcaaattattttaggaaattttccctggaatataaggatgtacatcaagtagatcatttccaaaatgattggtatgaatatgtggaatacggtacaacaaatcctttgactatttttcttcaacaaagtggtttttcacgagaatcttcaaaatatatagaagaaccaactaatcagaataaatatttaatagaagttgatggtgaaatacaaattcaccgttcgatactgacatgtggtaatgtcggtgtagaaactgaagcacacgatatacaatttaatatgcctgaattatttatagattag

SEQ ID NO: 59866 - DNA, 924 bp, Brevundimonas sp. DS20
atgacggggctagtgtttgacgtccttatcgacgatgcgctgtccaacattacctcggctgaacagctcaagggtctcgtcaaaaagcgagttcttagtctggtgaacgacttcgaggatacgaactggcgctatcccaagttcaaaaattttctttgggataacatcgctcagacggcgctatcccaaagggagcgcgcctcgctcgtcaatcaaagccatagcagcctggttgctgcggccaagaacctacgtctgaccgacaaggatgaggtcgggcagggcagcgagatcgctgaagtcttcctgtatgggatcatgcggcaccaatttcatgcgctgccggtcgtcccgaaaatcttctacaagcagaacgttcaggacaatgccaagggcgccgatagcgtccacattgtcgttgatggagatgacttcacactctggttcggggaggcgaagttttacaactccatcgaggactatcgcctcgacgccatagtagggtccgtcctggcgtccctttcgacggataagctcaaaaaagaaaatgcgataatcaccagcgtgtccgatttagacggactgcagattgatacaaaattacgcggaaatattcgagccgcgctcagcaacagagagtcgatagataaactcaaatctaaaattcacattccgatcctaatattacatgaatgcggcgaaacggcgaaatctacggatctgtcgtcctactataaggatacaataaagttatatcatcaatcaagggcggaggcgtacttttctaagcagatggcaaaggctagtaacgtccataaatacgacgacgtcagctttcatatcattctatttccggtgccggacaagaaggtaatcgtcgacgcttttatgaaaactgttgccttctacaaggagcagggatga

SEQ ID NO: 59867 - DNA, 2088 bp, Brevundimonas sp. DS20
atggatgttttcgaaacctgccaggagatcaacagccttctcaccgcgcataatgaactagcggcgcgaaatcttctaattcgtttgctggccgacctcgagcaagccgggacgccgtatccgcaagtcgtgaaccatatgatccgggagactggcctgtttccctacctccaactcgatggcgcgccttgggacgtcaaatacgtccaccaggctttcgaagtggatgtcggccgtcgggtcgcaactttgcaccgagagcagtcgagcgttctggcaaagctcctggacggcacgagcatcgctgtcagcgcgccaaccagcttcggtaagagcttcatcattgacgcatatatcgcggctaagaaacccgacaccgtagtgattatcgtgccgaccatcgcgctcatggacgagacgcgccgacgtatattcaagaaattctccagagattatacggtgataaccgcgccagatacggcgctgggctcaaagaatatactcatttttccgcaggaacgggcattcggatatttggaccttctcaacaagatcgacctacttgttgtcgacgagttctacaaggcaagtcaaaagcacgataaggaacgcgcaccctcgctgataaaggcgatattgaagctctcgaaaaagtcgaagcagaggtattacctagcgccaaacatcaagaagcttggagacaacgccttcactaaaggcatggaatttatcgaattacttgacttcaatactgtatatctcgcgataaatgaccactatacggatatcggtgggaatgaaaaaaagaaggccgaaaaattgattgaactgatctcggctggagatcagaaagcgctcatctatgcgggaacatacgctgatattaagcgagtttccgatcttgtcatagatcacatgccgaaagtggataactcttacactaacaatttcgcgcaatggcttcgtgataactataagccagactggatattggcggatctcgcggaccggggcgtcggcgttcacaatggacgcatgcatcgttgcataagtcagcttcaagtaaagctttttgaatacgataacggcttcagcaatattatctcaacttcttcaataatagagggcgttaatacatctgcagagaatgtagttctgtggagaagtaagatcggaaagaacaaccttaaggattttacatacaaaaatatcattggtcgcggcggccgtatgttcaaatattttgtaggaaatattcatctacttgacgcacctccagcggctgaagacgctcaacttgagatcgagttcccagaggaaattcttgggaccttggacgagacggatgacgccgaccagctgactgatcgccaagtcgagaaaatcatcgaatataaagttcagatgtcttcgattgtcggtgaagaaaatttcgctcggatcaagcgtcaaaacctgctccacgacagcgatgcggattttttactgcgacttgcaacggacatgcgaaactctccagaagactggaaagggttcgccttcctcaattccaacaactcgtccaactgggaaagcacgctgtacaaggtgctcaagctgaagcccaatggctgggaggcgccatggagcaacgtcgttaccgtaaccaaggctatcgctaacaattggaagcaggatctctctcagatcatccgcgctttagaagattcagggatcgatatcgaggaatttttcaagctcgaacgggcggtgactttcaagctatcggcgctgctaagcgatacgaacgagttgcataagttgatcatcaacccgtccgtggacgtctccggctttgtcggccgcatgagccgcgcgttcctgcccagcgctgtctaccaccttgaggaatatggtctcccacggatgatctccaagaaaatccaccgtgcaggcctcatcaacttcgaagaccctgacgtggaccttctagttgccttggagcggtttaagcagctagggcagggaaagatcctcgcgacgcagtcgttgagccggtttgaccgctatgttgtcaaattcttctttgacggcatcaccgtggactga

SEQ ID NO: 59868 - DNA, 855 bp, Aquabacterium sp. NJ1
gtgactgcgtacgcaagcgttccggagcggctacttacatgtctatacgactcgaaaaatgaccaagagagtcaagcgctgtactgcgcggggttcgagttgcagcagtggcgatgcgatgctatggccgaccacatcatggagtggttggctgactatgcgcttgccgaggaagaactgaacgtcaagcacacaaacatgtatgtgcggcttcgagaggcagcctcgcgcatctatacaagcgacaaatacaagagacgtggagagcttggtgaaatcgtcctgcatgcgatttgccgcgacttctttaagacgataccgcttgctcctcgcgtcttctatctgacggcctcgaacgacgttgttaagtcattcgacatggcacacgtcagatacttgggcgagggggcctttgaactttggctgggagaagcgaagttctttcaagacgccggagaagctatggcttcggctatcgaatccgtcaatgcgcacattgatgcgggctttctaaagaacgaaaagctacttcttggaccacagatctcaaggaacattcccaactacgaaggcatacgggcgctgttttctcccaacgcccccatcgacaagctgtttcagaccgcggcttttcccattctcattgcatcagatagcaaggcagtcgcgaacgggaagtcccatgatgattcctatatcgccgacgcacgtgccgagttgaccaagctggagacgaagctcaaagcatcaggtctgcgcgagaaaattcgaattctgctgatctacctgcccgttaaatcaaagaatgacttggcggcagccttcgataagagattgaaggggatccaaggatga

SEQ ID NO: 59869 - DNA, 2082 bp, Aquabacterium sp. NJ1
atgaacatctctcaaagtgaatggcagagtctgccaagtcttggatcattggaacttaaaaagcaggtattccttatcctccaaaaggccgcgaccgctgtccaggaaggtggctcagacgacccgcatctgctcgaggtcgtacctagacttgctggtctactcgagtcgaggcctgagcttgatggtttcgcagaggcgctcagcgccctcgcccgtgcttctgggctttggaattacatcgacaaggaaagagcggccccttctgaccttcttcttgccgagtcagtcacagttccggagttaggcggcatcactctgcaccgagaacaggtggctgcgctcaacgatctgcttgctggccgcaacctgatcctgagcgccccgaccagcttcggcaaaagcttgctcatcgatgccctattggcctccggaaaatacacccgagtcgcgatcgtcttgccgacaatcgcactccttgacgagttccgcaggcgcattaaacgcaggtttggcgaccgcttcgacctcatcatgcatccaagtgacgagactaaagatggtcgcccaaccatcttcctcggcacccaagagcgcttgatcaacagaacagaccttggaaaagtggatctgaccgtggtcgacgagttctataagctcgaccccaaccgaaaggatgaacgaagcatcacactgaacgctgccgtgtcaaagctgttgaaccgttcaaatcagttcttctttctcggcccgaacattgacgacgttaggttctccggagatggtcgctggaagttcgagttcctgcggacccgtttctccaccgtggcagtcgatacctacgacctgggtgccgtgcaggacaaagaggccaggctccttgacgaagtcggtaatgatgagcattggccagcccttgtgttcgtctcttcgccagacaaggcaaacaaacttgctgccaaagccgctgaagcgatggccgtttctgactccagcgcagccttcgcagaatggttgtcagacaacgttggtcccggttgggcgctcgtcgaaactgtacggtttggcttcggtgtacaccatggcaggctgccacgggccatcgcatcacaaatggtgcgaatgttcaatcaatctgacttgcctgtcctcttctgtacgtccaccctaatcgagggcgtcaacaccgctgcaaaaaccgtcttgatcttcgataaaacgatcaaccgcgctgattacgacttcttcacctacgccaacatccgaggtcgtgctggacggctcggagagcaccacattggacaggtctatcttttcaatcaaccgccggacgtcgaggagatggaggttgcgccaacgttgttcgcagatccagacgatgctcctgacgactacgttgtgcaccttgatgagcaggactccacgaagaatacggatcagagagtagccacgctcaagatgaacttggggttggacgctgcgggcttacggctggcggcatcgatcggcctcgaggacgcgcttgcaataaagcacgagatattgaaagagatacgggctggctctcggctcgtttggagtgggatgcctcgctatcctgacattcaagctgtcgtgaatgtgatctgcacagtccggagcgcaaccaagttcggtgcgttgacgacgcgccacctgccattccttatcaactcgctgcgtatggcgccgacgattcggcagtttcttctcgattacgataaagagtaccgcggcaagcccgaggcgcatgacaacgtgttcaagttcctgcgggcttgcgagtatggtctgcctcaacacttcgctgttgcggagctgttcgtcaaacaacatgacccaagtgcggactacagtctgtttatcagctctctgagtcgctggttcaaggcagaagagctcaagaacttggatgaggaggggatccctatccagatatcggagcgcttcttcgaaggtgaaagcagagaagcgctatcccaaaagctgcttgacctcgcacaacagaaatcggatcagcttaccccttttgagcaatcctgggtcctcgcagctctcacctag

SEQ ID NO: 59870 - DNA, 891 bp, Methylomonas denitrificans
atggcattggccaataatgatataaaaattctgctatcaaatactagtgcattgatcaatcacgtatattggtttgagcaagatatatcagagccacatgcttcatcacatcgaggcatatcaattaattatgtggatataaaagaaaaaagagatgaattcatacgcgagcttaaaagcacgattcttaattggatatactcaaagagcaaatacaacgccatttatactgatgaattattaaaaagaaacaatgatcatcaaaatactaacgcatatttactgcaagtagttgatcaaaaattcaggaaaggccatccgcaaggtcaatttggggagctactactttttaactttattcaattcttcttttcagccccaccgttacttagaaagatgtctattacgacaaatccggctttagaaagaaatggtgctgatgctatacattatactaagcgggacgaaaatgacgtatttattattggtgaatcaaagtgctatgaatcaaagtacaaatttaatagtgcacttgaagcttctgtaaaaagtattgttaattcattcgaagaccttgataacgaattgatcctttatttacatgatgattttgtcgatccagttctgaatgtaaaagcgaaagaatttaaagatggaaaatgtgagcatgctcgttttgaattggtatgtctaatagcttataacgagacatttgatatagatggcgatagcgaaacagcaataaagaaaaatattgaatcatgcttacaaaaccgatggagtaacactagtaaaaccctttataatggtataaagcaatcaataataagtagaattcactacatcatttttcccgtttgggaacttgataagcttcttgaagagttttga

SEQ ID NO: 59871 - DNA, 2421 bp, Methylomonas denitrificans
atggaagcacttgctgtattaggtgagttatcaaattctgatgaagagtttcatcttcaggtttccatattgattattgcattactatggagttactcgcccgaatataacaaggatcagcttagacaaattttaacacctgttttatcaaaaataggattttctccaagcgtctttttaattgataatttttttaaaactgaaagggtctactcatcaattggtagctattatgataaattaaaaatagttgctaatgacctagcaaacaccatacacataggtgaaaaagagtacattttaacaaaatttcaggcgcaactatggaaaaccatgcaagagtcaaatttgctaggaatttcagctccaacttctgctggaaaatcattcttaatatatctcaagatcgtcgatttaattttagatggcgcatcccggtttgtatatatagttccaacgctaagtctaatcagccaagtcacagctgacttatcaaaactattaaaagaattcaaagtatacaatatagatgtcttgaactcttttgaggaaacttgcgaaaattttatctatgtagttactcaagaacgagcattatctatattctctgacaaagatataggaactatagacttatttgttattgatgagatacaaaacatagagcgcgttgccaatgaaggtccagacaggtcaaaagtattgtatgacgtacttaaagacgttaagtacaatcatgatgtatcaagaatcattcttagcggacctcgactgaaaaatatagctaatcttgggtttgaaatatttggagaaatatctgatgaagaagcatcagagtcgccgccagtccttagtctcacatattccatatcaaaagacaaaaaagcatactatttaaaccagtattccattgcatttgactatccaattcaaataaaaatcgcgaatactgaaacgatatatggtattggtggctcacaatataatgaaaaatttagcaactatcttaactcgattgtcgaaaaactgaatgactcaattaatattattttttcaccaacctcaggtcaagcaagaaaatcagcgaatagttattgcaatgctataaaaataaatcaatcggctcagaatgagaatgttaataacgatttggccgattatgtaagaaagacagttcacccttgctatgatttagcagatttattgaaaaatggaatcgcttaccatacgggtaaaacgccttcacatataaggaaaagcttggaaattgcggcaagagaaggccttctgaaaaatattttttgcacaaccaccttaatgcaaggagtcaacttaccggcaaataacattattatcagaaacccctatctatatactaagaagcgtggtgcagaaatacatttgtctgcatatgaatttgccaatctacgcggacgcgctggcagattacttattgatttcattgggcgaacagttgttttggacgaaagctgctttattgaaaatagcgaatttcaagatgagtctaggctgttcgatgatgaatataaggaaatcaagacgggatacgataaaatctatcaagagcaccgtgatgagatagatacagctttattgaatgatgaaagggttgctgaatcctcatcgaaacaccttttaacccatataaggtatatgctatataaatatggcgatcaaggagaagatagattaaaagatgttggattaaacatagatgattctattctgcatgcggcaagaaataatatttcaaatattaaagccccaagagactttatattgaaaaatagatactgggacccaattgatttggcttatatttatggcatttacatagataacgctaacaagcttcctcgctcagtatgggctgcaaattttgcaaacaaaattttgaattggctggaaatcatgagagatgaaatgccttattactttgagcgatatatcggcgtttttgataatagatacctttacggagtagcaaaatccgctgaacaatgggctcgtgaaaagccattacaagatatgttgattgataggttcgggaccactgcttatgaaggaattgacagcgatattgatgcagaaatagaaaaaataaatagcaaggttggttttggtctatcaatgcttttaaagcctatttcagatattgatggcgatgaaaacccaataatttattcaattgaaaacggagtttattcaaatatttcgaaatactttgttgatagaggtgtccctcgggaaacagcgattcgaatatcgaaattggtccctaacaagtatttaaaacagagagaacaagctattgatttgaagcaagtatttcagaacttggattactgggaaaaaaaacatgttgaacatttaattaatgaactcgatgctcagcattag

SEQ ID NO: 59872 - DNA, 987 bp, Sulfuricurvum sp. PC08-66
atgagtacatttagctctgaaaatgtgataaataggcatattaataatgctgacttaaatgtctattttgttgggttcgatggaggtatatatcgtgattcacacttaactgattacataatggacgcattggtggatttcgcttatggttatcatacaggtatattgaaaacatacgatagacgtataatggttgaagccgcaaagtcattgtattcaattgatgaatttaaaagtgcatttcaaaagtatgtcaccgaagattcagagtttgatgattctagttcagataagtatctaaagcgtggagaatttggggagctaattctccatcttttgttaagagatttttttgaaactgtaccattgttatcaaaaatacatttcaaggatagctattctatgacagtgcatggatttgatgcagttcatgttggaaactttaacggagcggatagtttatttttgggtgaatcaaagttataccaaaacgggaaagatggaatagatgcgttgatgaaagatattgaagagcatttcacaaaagactatttaaataaagaatttacaattgttggtaagcggtcttcagactttaaatattttgacgagatttctgatttgaatacaaaaaaagcgtatgaagattttttaacaaaaaaagatgattggtttaacaaaattaatggcttacagtcaggcaagcaaaagctcagtagcttgcttagctcaaccacaattccacttctatgtacatattcatcagaaacatttacaaagcacaatgacgaaacaacacaagaatttcgtgatgaatttgataaagaaattaatcaattaaaaacttattttgataaaaaatttgacatacacacttctgcaatgggagcgaatctcaacattattcttttgctctttcccgttcctagcaaaaaagaacttgttcgattattgcacacaaagctagaagcacagcaaagggcataa

SEQ ID NO: 59873 - DNA, 2292 bp, Sulfuricurvum sp. PC08-66
atggaatttaaagaacaaatatatagtagtgagtcgcctctatctgttgagatgagttttgatattgcgaatcatattacttcgcttgtcttgactgataaattagaggcacacaaactaattatttatatacttgacaattggcacaaaataccgacagaaacccataaactctggacggatattattgaaattgttgggttttatccgtatgttgaaaaacaaaatttagatttaaataattttgcaggcgaactacgaaaagcgagacatttgtcaaagtcaatatctggcagaaaagtatattttcatgaaaaacaaaaagaattagatgaatacattaaatcgggtaaaaatatcattgtgagtgcgccaacaagttttggtaaaagcttgttgattgaggagattgttgcaagtaaaaaatatcagaacatacttatcattcaaccaacacttgcattattggatgaaactaggaaaaaactaagacagtattcggaaaggtataagattattttaaggacgtcccaagaaccgtctgatgacaaagggaatatctttttattcacatcggaacgagtattggaatatcatgaatttcctcaaatcgactttcttgtattagatgagttctataaacttagtctgacaagagatgatgagagagcagagcatttaaataatgctttttatactatattaaaaaaacataacccgcaatattatctattgggaccaaatattgaagaaatttcatctggttttaaagaaaaatataatgcagaatttctatcatacgattataagttaatagaaacagaagaaattgacctatctaatactaaagacgaggaaaaggaaaaggtattatttgacaagctacttaaatttaaaaatgggcagaatattatctattgctcctctccaaaccgtgttatggaattgtcaaacaaattccataagtacttacttcaaaacaaaattattgaagaaataaatataccgctaattgaatgggcaaaaaataatattgacaaaaattggtttttaatcagaatacttagtagtggtataggtattcataatggtgtcatgccaaaacatattaacacttcaattattgattactttaatacaaaaaaaattaattatttgttttgtacatcaaccataatagagggggtaaacacaacagctaaaaatgtttttgtatttgacaagacaagaggaaataataagcaaattgatttttttgactattcaaatataaaaggtagagctggtagaatgatggagcattttattggtaatgtttttcactttcacccaacaccagaaaaaaaagaaacaaaggttgacattcctttttttgaacaaaacgaacaaagctttaccaaggaaattgaaattgcaatggatgatgtagatattaaggataaaaatagggagcaatacagacaattaaaagcgcttaacgatgatgagcgtagcctattaaaacaaaatggtctttctgttgatggacagctggaattgctaaagttattaacagacgctgttaaatccaagaatgaattatatggctggagcggtgcgcccacatatgaacagttaaaaaacattttaaatataggctggaagtatctactaaaaaaaggagagtctagaaatggaatgaacccaaattatcttactttgcttgtttgggaatatgctagaggaaaaacatttaaatcattgcaagaaaaaattcaaactcaactacttgaaaagaaacttgccatggattccagcgaaggagtgaaggcaataaaaatacaagaagaatacaaaaaactaaagaagtctgataaaaaacaatttagagaagagcataaagacgaatttacgcatttaaagtattatcaagattatcaaaataaatcagacgacgatatattgcaagagagtatcgttactacatttcaaatactacggcattggatacagtacaaaatcccaaaatggctaaatgttataaataatatacaacaatacgttgccataaaacaaggcattaaatcaggtgaatattcatggttcgcctcacaactagaaaatgattttgttgcaagcaatttatcaattctcaaagaatatggggtgccaaaatcggcggtaaataaaatatcaaagcatattgatgataacgtaaatgaagaagatgtgttgcaaatgataaaacgaatggcaaaaaactcaaagggtatgtttgatttgtatgaacttcaacatattgatgaaatataa

SEQ ID NO: 59874 - DNA, 909 bp, Sulfuricurvum sp. PC08-66
gtggagctaagtattcaagactatgcgtttttagatgcttttgataatttaggcagttttacaatagatgagcatggaaaaaataagcttaatttatttgttttaaatattaatgcaaatgaatttaatctaaaaagattagaagaattattaattgatcccatgattgattattcgctttcaagaagtgtaagagaacaatacaaaaacaaacctgccactcttacaaaaaaggcaaaagaaaagtttattgattatgtaaataataaaggggaattaggggaattattgctttattgttttttagaaacacatctcaaagctccaaaaatattatcaaaactagaattaaaaacatcgacaagtcttaatgtaaatggtgcagatggtgtacattttttaaaacttgaaaatggaaattatcaattgatttttggagaatcaaaaactattgctagtttaactgatgccctgactgatgccttaaaatcaatagatgaatttaaaggagaagtgaactataaaggaaataaaaaaagtggattgccctatgaaaaaagtcttataagcgaccatcttggaaaagaaacttttacgaaagaagaaaaagattttatttcaaaaattgtttatcctaaaaaagaaaatgattttgaagtcgacgatgcttttggtatttttataggttacgaaatcacaatagatgaaaaagataaaaaactacaaaatgaagattttagaaaaaaagttcaaaaacaaataaaagaagaagtaacaaataaatttgctcatataagaaaaaaaatagatgaatttcaattgtatgggcataatttttatttatatatattaccattaactgaattggataaaaacagaaaagcaattatacgggggcttcaatcatga

SEQ ID NO: 59875 - DNA, 2550 bp, Sulfuricurvum sp. PC08-66
atgagatacattgaagaactcgcacaacaagctttagatgatgaatatttacatgagcttttttttaaaatagagcaaattcaagccgaaacattttttcatattgaacctcaggacttagatgaaaaagaattgtttgacttgttgagatttgcagatatattatctcgttctaaaatagatgaagctaaaaataaagcatataaaatcattagtttattgtttgataaatatagtagtaatgcagtttttcaaacttttgcgaactctatattagtgaaacttgggaactttcaagctttaagttttattgaaaaattctcaaacactgaatcaaaattaccttatgaaatattgtacgaaaagtcattaaaagaagtttttcaaaaaatttcacatagcgaatttatttttacagatagtcagtatcatattttcgaaactttgaaaaatagtaatcattttagtttttctggaccaacttctttgggtaaatcatttattatcaacgcatttatacgacatttaataacagaacatagaggtacggataatctcgtaatacttgttccatctagggcattgataaatcaaacggtaaataagctaaaacaagagttcaaagatgtagaaaattacactattttagctcatcctagcgtacctgtaatgtttagaaaagagaacagtagatatatctttgtatttacacctgaacgattaatagcatatctttctaaaatagataatccaaaaatagattatttatttgttaatgaagcacataaagttattgcgccaacagacacaagaagtcctttgtactatcatgcaattttacaagctgagagaaaaagcattaaattattttttgcctctccaaatgttgaaaatccagaaatatttctacaattatttgaaaaaagtcaagatgaaaagattgtaataaaatcttcccctgttgccaaaaatagatattttttagatttgattgaaaataaatgcttgatgttctcagaactaaataaagattataagttagacatgaattttagcaataatgattttttcttctggttaaaaaagttaggtaataatgataaaaatattatttattgcaactcaaaaaaagataccatttcgtatgctttagatttttcaaaaaatcaaccaataaaaaaatcaaataatttagaaagtgttaaagagttaataaaagaatatttacacgataagtattatttaattgattgtttagataaaggtattgcatttcattttggtaatttacctcaattaattcgtgaaaaaatagaatggctttttgaagaaaaagaaatagattatttattttgtacatcaactttacttgaaggtgtaaacctacctgctaaaaatatttttatacttgcaaataaaatcggattatctaaatttactgatgtagatttctggaatcttgcaggtcgtgcggggagaatgacgaaagagatgtctggcaatataatttgcgtaagagaaaaagaaaataaatggaataatcaaaaagaagatttaaaagtagttagaaataaaatttctaagccatttgaaccgttaatgataaaaggacaaggaaaattttttgagaatattgaagcatctttgacaaataaagatttttccaacaaatcatcttcgcaatctgaaaaagatatatggaattattatgctaatttaattcttatacatgagataaaacaagatgattctgttttaagaacaaactttataacaaaaaataaaaacgctttgaaaattttacaggaacaaaaaaagaaaatttcagtacctgaaaaaattttatcagcatcatctatgataaaaccaaaataccaaaatgagatatatcaaagttcagatacacaatttttatcatctgatttcaattatagtgtgattgttggtgtattacaaaacttggcagaatattataattgggaaaatgaagagacaggtggcaaaaacccactttataaaccgtctgaaaaaataaaatattatgctgttttgatggataattggatgaagtcaaaaccattaaaaatgatcatttctaacactataatatattacaaaaataaagggcaaatttgggaaaatggaagctatattcagtttaactataaagaaaaacatgatattaacaaagttattaatttagtaatttctgatatcgacaatgttttgagatttaaattaaaaaactactttgaaaactattacatgctgttaaaagaaaaacttggcgcgttaaatgcaggtgcaaattgggctgactttctagaatatggaacaactgatagtaagattatagaattacaaaatattggtattcctagacaccttgctcagtatattttagagaatcatgaaagctgtttattatttgaaaatggattacttcagtcaattaataaaaacaagttacatcagaattttgacatagaatctaatttgtataatgaattttgtgaattatttggatttgataaaaatacaactaattaa

SEQ ID NO: 59876 - DNA, 948 bp, Sedimenticola sp. SIP-G1
atggataaattgaaggcgattaactggtcaagcctcgtagctggcaagcactcatggattgacgatcatttaaaagtccactccgttcttgaagaccagaaaacagtgtgtcgattcatttctctggacttttcaggtactcagcaagagatgctcgctctaacagaggcactggcagaatcaatcgaacactatgtttttgatgaaaagcagctagcatgcttccacaaagaaggaaaggttccttttcaaaaggcaatgaaattcttcggaaaaacaaatccagatatggatggtaagtacggagaacttcttctatatcttctgacagaaaaatttctccagacacctcttgtaagtcataaactatctcttattacaaatacaaacgatcaagtcaaaggcggcgatggtattttttttggtgactataaagatgaattagctatcttaattggggaatccaagattcaccaaggagctgctggggccatggaagaggcgttagagtcactggatagattttacgacaactatagtaccggtcaactaggacatgaaatgttcattgctcggtcaaatatttcagagaatttttcatcattagatgatgtcgagagcctttatcaagcatttactccaggtaccaagcagtacaaaggatgtgtcaaggtgcacccagttcttcttgttttcgaatcaaatgtaattagtgctatcgaagagaaggctaagaataaagacgaagcagagcagatgttcagcgaatggctaactggcaggtcaaaaaagatacaaaaacttctaggtgacaaattaaatgaatatacagagctcaagaagatatacatcgatgtatttcttataccgttgactaatgtatctaagttcaaacacgcgctctataaagaaatccacggcatagactatgtatcacataaaaaataa

SEQ ID NO: 59877 - DNA, 2595 bp, Sedimenticola sp. SIP-G1
atgacgcagatatattctcaagcagcaaatcatgaagactttattcgagtgtttgacaagctattggaaaagctatttctcgaagataaagtagcagataatgtgcaaatcgatcttgataatgaagagatcaaaaaagctacctggctcgcttcgatagcagctcttagtgatgatgataaagaacgcaatatggcaaatgcgtttggagcactgctccatcttaccgatagagaaaatgaaatatacaaacgtgtgtgctatatcctgcaatcaagagctggaaaccttattaccagcagtcatatacccaaactcttccataaagaaaacacactcagcgattatggaacgctactaaattttgaactggctgcacatagagcgctgctagagcacgaattctccgatgacacaaagatctttttcactgagtttcagaaaaagctatgggagtcccttaactctggagagaacatagctatctctgccccaacatcagcgggtaaatctttcatcatcaaaaagtatattatggagctggtagaagttggtgcaaagaatatagtttttatcgtgccaacaaaagcactgataaatcaagtaagcaacgtgctaaagagccagcttcacgaaaaagcgcacgtgtatacgacctacatagctaatgaagaagataatcttgccactatatatgtgctgacgccagagagatgtttgaaacttctacaagacaaaaatataactccaccagaattaatattcatggatgaagtgcataatattgaagccggttcgagaggggttatatttgagaacatattatatcgagtaatctctacttggacttctactcaacttgtcgtcgcagggccattcataaactcactttcagacagcattaagaaaatctgtaatgtctctattattgatcatcaaactctatcctctccagtgtttcaggttcggtcagcacttactttttttccaaacaaaaaaatagcccaatataaaatatcaagcccaactcaacgaataatctcaggtgatattaagttgagaaaatcactgtattcgaagataaaaacaaacaaaggggaggcgctagaggttattgcagatatgttttctcctgaggaccataatatttattatgctccaaagaaaaaccttgcagagaaatgggcaagcaaaattgctcctgttatcgcctcaaagaaccccaaaattattgaggcggccgactctagagttaaggatctaatagatttcttatctgaagaagtgcatccagattactcactcatccgaacccttaggcttggagttgcatatcaccatgcagggcttccagatattgtaaggcaagaagtagaggaactctattcggagtcaataattaagaatattgtttgcacatctactttgctgcaaggtgttaacttgcctgcggacagactcattgtcataagccctaaagtgaattcggacgatatgccagcctttgattttcttaatcttcttggtcgagcaggcagggccaacactaaactttatggtgaaatctactgtattgatattgttgatgatgaatgggggagcaagaaacttgaaaccgaagttaacaaaactgttgatacatcaactaatattttccttaaaaaaaatgaagatcatctatcagttattgccgatatgtcaggagatcagatacgcgaaatgacgggtgataaagatatttacggcaacctatcttacttgagggcaatatttaaaaccgacagaaatcacttcgacagaattctatcaagctcaggggtttcatcagaaaacgtcgaagatttttctaagaaattagaatctatgtacgaaggtatgactatacctcaagaacttatagctaaaaatccgtttattgatcctatcttgcaaaacaagcttttcggggcgattcaagccgaaggcatagaaaattggctgattagtaggaagcccatgaccaatggtggtagagattcagattctgtggcgttccaagaaaaaagctattactttcagctatggagtatcttcaacagactcaatgatattttcaatatcgaatatgagatcaatggtgatggttatgcgaaagacaactacattaatataggaagacttgtaagggacgcccatcgttggatgacaggaaaaaaacataagttcttcattcttgatctcattggtgaaaacaataatgatgagaaagaagtcgataaggcagcgcggagaattactagccatatcagtactaatctgactttcattgcagttaaatatctcatgctctgggctgacatggtttcatactttttgaacgaagaagaagttgaagaaaatgcctatattctaaatctaccctcaatgctagaaatggggagttacgaccctgtggttttagaactaatgagttgtggaataaatagatctgtagcactttcaatctcaagcaaaatcaagaagatagattcttctgcagaaaaagcgctttcagccattaataaggaaaaacttcctaacatctttaaaaggcacctgatgaaggctggatactag

SEQ ID NO: 59878 - DNA, 504 bp, Lactobacillus sp. wkB10
atgtctgatggcattcattatttaaaattgcataacccggatagatatcatattattttcggtgaagcaaaaatgtataaaaatttatcaaaaggttttaaaagtgcatttaaatcaattgcagatcaccaatctggtaaagaatttgaaaagagtttaatttcctcacaaattgaaaatgagtttatagaggaagttgataaaaaaatgataaatgctattttatatcctagtgattctgaaataaaaataaaagtttcggatgcgtttggaatctttattggatttgagattgataatactgaagggcaaaccaaaacagaggatgactatgagaaatgggtgaagaataaaatcgtttcaatcgtaaaatcaagaactgcaacaattgaaaaatatattactgaaaataaattagttggggataatttttacgtatatttgatgccgtttattgatttggatgaatcacgagaagagattacaaaaggggtgattgaatga

SEQ ID NO: 59879 - DNA, 2520 bp, Lactobacillus sp. wkB10
atgaaaaagccagcaaaaaagtcaacaattatccaagaacttaataatcaagcaattaaggacaattatttatataaattgcttaggaagattcaatatatatatggggcaaatttgtttgataaagatactgaagaacttagtgaaaaggagctttttgacatactgcgattttctgatattttgtcgagatctgaagaatctttgaatagaaatatagccttgaaaattatttcaacactttttgatgatcatcgtaatgaagaagtgtaccaattatttgctcaaaatgtcatggttaaacttggaaattttccgtcgctcaaattgttagaaaattccgaaattaaatttaataataaagaaattgcgtttgaaaaaatattaaaggaaatttctcaaagaacatctgtgaatgaaatggtttttacagattcgcaatatgaaatatttaatgagattaaaaattccaatcattatagcttttctgcggggacatcttttgggaaatcatttcttttttctgaatatgtaaattggattattagggaaaaaaacgcaagtgaaaatattgcgtttttagtaccaacaagagctttaattacacaggtaacagaagatcttgaaaataatatcactgataaaaagtacaagatagttattaatcctgatattccgacaatttttagtaacaataaatttatttttgtttttactccagaaagattggtttcctatttttcaaaaagtactaatccacccattggtacaatgattattgatgaagcacaaaatgcaatatcagataatgaacggtcacctattttttatcacgcaataacgctggcggtacaaaagagcgtcaagttatattttgcttcacccaatattccaaaccctgaaatttttttggagctagttggaaattcaacgctcgagtctaaacatgttttagatgtaaatgtcgctcagcaaagatatttcgttgacttcaactcaaataagtaccggatctattatgatttcataaaaaataaagaatatgatgaaagggatttgaaactgtcggattttgatgatttattagtaaaaatgacttttggaactcaatctattatttattgtaattcagttaggtttactgtcgaaagagcacaaaagttatcacaacgggttagaaaaagtgaagataaatcccttcataaactctcaaaatttattaaggagaacattcatgataaatattacttggcagagttgattgaaaaaggaatttcattccattttggagcgttgcctcaagagattcgtaaaaaggttgaagcactatttaaacaaggtaaaataaagtatttatttacgacttcaactcttttgcaaggagttaatttaccagcaaagaatgtattcattctgagtgacaaaattggtatgtcaaacttgactgactttgattttcttaatttggcagggcgagcaggaaggctgtctaaagaactatatggcaacatttttgtgattcgattagatcaagcctccaaaatcgatgaactttttaaatttaataaaatgaaaaaagttgctagtaaagttttatcaggacgaggtaatttttacacaaatattggaaatatacttgaaaataaagaaatgacgaataaaaacatgccagcaaagcaacgaagagagatagcggactatgcggcaatacttacctatcaactaaaacgaaatgtaccatcgcaactagttgataagtttaatcaaaagaatagaaactccaaaaaattaatcaaaaaaatgaaggatatgaatattccagaagatgcattaatggtctctaccaccataaagcctttataccaagaaaaagtgtttgttttagaaaacccccatatgtttaaatctgattacactgttagtgaatgtcaagagatattaaaggctttgaattcaacttataaatggtccgaagaagaagacgggcgatatctgggaaatgaaaaacgatttggatattattcagttttgatgtcggagtggattcaatctaaaccgttgaatgtcatgatccgcagtacaataaaatatcatgaaaaaaataaagtcaaaattgcaataaacggcaatccaaaaagtcaagaaattttttctataaataatacatatcatataaattatgttataaatgaattgtttaaggatatagaaaatattttgaaattcaaagtcaaaaattacgtagttaattacttaaagcttaccaatcaagatgattctgaatggcaaaattatttggaatatggtactaatgataaatctattattgaactacaaaaaattggttttgatcgtactatagctatggaattaagtaatcaattgaaaaaaaacgttgactttagaaagaactttgaatttaacgaagagggcgaaattaaaagaattgatactgaaagtattcttaagtcaagtattacttctgaggctaaaaatcaaataaagaagttacttaaataa

SEQ ID NO: 59880 - DNA, 897 bp, Veillonellaceae bacterium KA00182
atgagtcataagcattcaaataatatagaaatcaataatagattgcatatttactatataagttttgatttacttgatagtggatatggacaagtaaaagataagttctatgatgaactttttgatgatattcctgcttttgcgtttggtactgatgtgatgaacgagaaaaaagataaaattggtttagtacctactgtaagagaagcaatgaaaaaactatatacaataaaagaaattcaagaagccagtagagaatatttaaattctaattcaacagaagacaaatatatcaagagaggagaatttggagagttacttctatatcatcttttacacgaatactttagagccgatgcattaatatctaaaatatattttaaagatagtgtgggtagtgttgcccatggatttgatgcggttcatgtagatgttaaagaaaaaattatatggttaggagaatctaaactatataaaaatcctaaaacagcaattgatgaacttgcaaaagatgtagagaatcattttaatgttaattttctagacagcgaatttcaaataattacaaatagaatacacgattctaaagcagcttgtgatgattttattttagaattattagatcctaatactaaaattctcagaaaattagccaatattaatgtatgtttgtttgctgcatttgaaagtaagagcttagtcaactttaataaagataatttcgaaaaaacattaaaggaagaagtagaaaaattagataagaaaatgaatactttattaagtcaacacttatgggcaaattatctaaatgtttatttgttggtatttcctttagataataagagagaatttgtatcctctcttcatcaaaaattaaaaggagggcagcaaatatga

SEQ ID NO: 59881 - DNA, 2136 bp, Veillonellaceae bacterium KA00182
atgaatgatagtgttaaatttaatgctgactatttgaaagattttgaatataattggaattgtactaaatattattcttctgttatagacacaactgaagctagaaaatttttaataaatgtactagaaaattgggataaagtaaataatgaggctaaattaatttggttggacttggttgaaagagcaggtttctatccttattatattgataaaattaaaaatattgaaaattataatcagtctttgcaatctagtattagaagtactttttttaaatctgaatatttaaatggtgtatactttcatgagaaacaaaaggaaattgaaatagcaattaatttaaagaaaaatgttgcggttagcgcacctacgagctttgggaaaagcctatttattgaagaatttgttgccagaaaacagtataacaatattttaataattcaaccaactcttgcattaattgatgaaacacgaaaaaatatgtataaatatttagattattataatattgttattaacaccaaacaaaaagcgactgatagaaatatttttattttaacagcagagagagtacttgaatatgaggctatgcctaaaattgatttttttattgttgatgaattctataaggttagtaatttgagaaatgatgatagagtagatgctttaaatatttctataatgaagataatgaatgataaacctcaatctttgtttttaacaccttctgttaactcgctttcagataaatttataaaaatttatgatgtggaatttttcaagacagattattcattggtgaatactaatattatagaagttcgaaagaacaataaaccgtttaaaagcaaagaaaagaaacaagaactatttaaattgcttaaggaactaaaagaaccaagcatagtgtacgtaaaatcacctaatgaagcatataagttagcaaatgagtacatagactacttaaaaaatgttgatgttgtgaatagaaatttaccaatatttgaatggatggatgaaaatatatctgaaaaatgggatcttaaaaaactcatgaagtatgggattggagctcataatggtgctttaccaaggcatattgtttcttctgaaattgaaatgttcaatgaaggaattttacaaattttgtttgctactgtatcactaatagagggagtaaatacggttgcaaaaaacatattgatattcagtaacaaaaaaggtgttagagtcatagatttttttgattttgcaaatatcaaaggaagggctggaagaatgggaaagtattatacaggaaatgtttatttatttaatgaacagcttttgccagaagatttttccatagatgttccttttattgatcaaaatgatatttcaaatgagattttatttaatatacctgatgattatgttgaagatagaaatagaaagaaaagtttagtgtcaggaataccagaagaattacaaactataattagaaaaaatttgatctctgttgaagggcagaagaaattatataattatattaaatcgaatgttaataatttgtcgtatttaaagtggagtaaaattccttcatttgaagatttgtggaagacgctaaatttggcatataaattcttagaaaataataataatgaaaagtttgcaaagttacaagcattaatgtcattagatattgttaataggccattaaaagaagtaatttatacaagaggagaatatataaaaaaaacagattcaaataaaaattttcatgaaaaagctatagaagatgttttaaagtttgttagaaatgatgcaaattataaaattcccaaattactatcagttgtagagtctattcagagatatgtttttgaaaatattcataatggtatatctggagattatagtatatttagttcattattagagaatggcgagataagtgaaaattttagatttttagttgattatggtgtaccattatcagctgtgaaaaaaatagaagttgaatttaacaagtgtaataaagaaaactatgataatatatttatattacaatggttgaagcaaaatattaatatatttaatagtatattactggaatatgagtataatttactgaaaaaatctttaaatttttga

SEQ ID NO: 59882 - DNA, 1008 bp, Flavobacterium sp. 316
atgtctataaattttagtgatttaatttctattaacaaaaaatggtttaataaagactttaatcatcattatactaaaaatataaatgataaattaaaagtacgtttatatacaattaaaccatctggaactatagttaatagtaactcactagctgaatctctttttgacattttgccagattattttaaatctaaatatgaaattgaaaaagaaatacaaagagaaatagataaaacaattgatgattatactacagcaactgatattgaacagagagaaattgccttaaaaaatgtatctgttaggacatatagacaagcaagtaatttttttaaaactaaaagtgcagattcaaaaagtggaaagtatggtgagctattattatttggcatagttgaagcattattgaattgtaaaatgatagctcataaaattaccaatttgacaaatgttcatgatgaaattaaaggtggagatggtatttttatgggggaatatactttagcatctggtattaaaaatacagcttatctaattggagaatcaaaggtatggcaaagttattcaggtgctaaaaaagatgctttagattcaattaatagattttatgatccaaaagttcaatcaacatttaactcattagagttttttatagcaaaaaaagatataaacaaagtctttgattctgataacattgatatagatgaactttatgacaggcttgaccctaaatcagaattatttaaaaaacaaatagctgttcatccaatattaataatgtatgacactaaaggttataataacttgatggtaaaagctgcaaacaatgaggaattaataaatttaataaataatgatgttcaatctaaattagataaaacattagatggtataaaaaataaagtaaaagagtattctgagcttgaaaaaatatatttagacttcatattaataccaacaaatagtgtgaaaagttttaatcaaacaatggatgaattgatttaa

SEQ ID NO: 59883 - DNA, 2658 bp, Flavobacterium sp. 316
atggaaaaaagtaatcttacaactcaagcttttaaacatgctattttagataaactaatttataatttaactctaaaattattatcaaaaacatttagctctgtagtcaatataaacatagatgaagatgaattaaaaaaaggtgtttggcttgtttcaatactagcaaatagtgaaaaccaaatatatcaaagaaaagctcaactatttacctcattgctttttttgaataatcaagaaaatatagaaatccttaaggtttgttatatcatattttcaagactaggtaatttaacagctacaaaatttttaaaacatttatatgatcatgatgaatcagatccaattgaattaaaatcaaagtatgattttggagattttttgacaaaggaattaatttatgagagagaaaaaaaaataatagaatcacagaataaatcttatctaataacagaattccaaaaagagctttggcaaggtctaaaattaaatagtgaaatttcaatatctgcaccaacatcttcaggtaaatcattcataattaaaaaatttttagtagataaactttttaatgaaaaaaaatatagggtactttatattgtaccatctagagctttaataaatcaagtaagtgaggattttatttctgaaattaacaatgaaatacacattaaaactacttatgtagaagaaaatgaaatatttgataaagaaatttacatattaaccccagaaaggtgtataaaaatattatcaagtgatttagaaatagattttgttttcatagatgaaatacaaggcatagaggatattggaggaagaggtcaaacatttgagtatgtttttaatgaaatttctagtaagtatccaaaaacaaaaattgtaacagctggacctaatataactaaacctgaaaagacattcttagaaatttttgaaagagaaagttctccaatttcaacaaaattatctccagtttttcaagtaaaacttactttaaaaaatattgaaaaaggaatttttgaagtaatagttcaaaatgacataaataaaaatcaatcatttagacatgattttaattttgatttttcaaagctaaaatcacttggagaccaaatggctcatttagtagacaaagttgctccagatgattttaatataatttatgttagtgatggtgatttggctcaacaatggtcaataaagtatgcagaagtaaaaaaatcagagtttaaattagattatgaagtacaagaactaatagactttttaaaagaggatatacataaaaaatattttttgattgaatgtctaaaaaaaggaattgcatatcatcatggtagtttacctgatatagttagaaaagaaatagagacactatatataaatgaaaagataaaaacattattttgtacttcaacacttctagaaggagttaatttaccagcaaataacctatttacatttcaacctaagaaggataattctccattaactaaatttgaatttggaaaccttattggaagagctggtagattaaactcttcattatatggtacagtttattatttagaaagatatgatgacaaaattaaagcttcagaatacttaaatgttgaatatgaaaaagaaatagaaattttctcatctaatgccttttcagattttgaaatagatgatttaaaagttgctataaaggatataaataaaagtgataagtcaaaaacaaataaagtcagacagttttgtgtttttttaagattaaagtatttaaaggataaaagttttgtagaaaaatttttaactaagaaggggttttctttgaataaaatagatgaagtattatctgtattagacaagagtttatctaatattaatttatcttatgatgtattaaagaaaaatccaactattgacccaatacttcaaaatgaattatatattgcaattttaaattccaacataactgattgggttattaataaaaacagtaattacaatgaataccttgattctaatgaagttagcttaatgccaaatagtgaaaaaccattttattggcaatttataaatcttattgaaagattagattcaatatttgatataaaaagtgaagcattaatcaagcacaatagatgggttactcctaattcactgagtgttcaagcaaagaaatggttagcaagtttacccattggtcaaataattcaggaaaacataaaatatcaatgttctgaaaaagttaaggaagaattcagaaaaaatcaagatagtcttaaggatattaattcaatcattaatgatacaataaaatacaattcttcaattacaactcatcttattccaaaatacacaaaagtattagctgatattttagaagttattttaagcgataaacaaaaggaagaatataagctaacattgagtttaccaacttttttagaacttggtacacaagaaccaatggttattcaattaatatcagcaggagttacaagaagtgttgcaatacaattaaataaaatatataaaaagaatacaactaaagaatatagagataataatgatatttggaaatggttgtataacagaaatgaaatacctgaattaaaaccaatttataatagatatttaaaaagattaaaaattattaattag

SEQ ID NO: 59884 - DNA, 1620 bp, Pseudomonas helleri
atggactcgagcaacgcgggcggcgtagcagccaagcttggatttttgtatcaggactgtgctgcggcgcttttcgtaacccagatgctgctcgacaagaggatagaggccgtcaggtgtgaagtcactgatgacatcgatattctctatagcacgcacaccgagttcgtccaggttaagacttcagataaaccgcgctggtctattagcacagttacaacccgtgctcgcggtgcaagcaataaccttattgctgatagctccattgtccacaagtccatgcaatgtgcatcggcccctcttgataagtgcaagtttcgaatattgtctccacgggattgcaaggatcctctagattttctagaaatagaaatttcaaagcgagatggtaagtcgggtcgacaagttttaattgatgagctttccagtaagcttaaaaactatgttgcgccggcaggtaacactgtgtctgattgggtggactcctgctggtggagtgtaatacctagcctgagggaaatagagcttacggcccttaacaatataagaaacgccgcgctgagccttcatggcgtcatccttagcgcggaatcggttgttgaaagcatctgggccaatatcttaatcacgatgactaagaagagtgcgttagataggcgggtttatacggaggatgataaaacctatcatagagaccattttctcgcgtggttcaaggctgaagtattattttatgatcgcagcaactctcactccaaagtatatgtacatcggaagctgccaagcgtattggtgcaacttcaggcgccttttgaaagcccagttttgactaggaatgggctagcgctgcaccagcgctaccaaatgggtgagtatcgctatgagcatatcgctaagaatatctgtcattggtttgacgagctcctgctaagaccaagcgagattgctgattttatcagctccagtgccacggaaaagtacagggttttaagggcgcgacttactgatagcgctaatgatttagagcagtttctcgggaatgcattgctgcactcagtaatgagattgaggcatgaaagtcaacctataccggccacgctttatctcgattcaaaagatgacttgaaggtttttgaaaacgtccatatcgttcagcgaaacaagggcggcgatgagttgtggctcggagtcagtaagttaacaaaggcgagaaccgtatcccaagttttaaatgcgctgagggatgccctgtatgatgacatagtcaatggcctggatggagtcagggagaaggttctcgatgtaaaagaagattcctacctcctgaatcacgacgtcgatgagattctggatacgagcaattcgtttgaagatcatctggaacgcttcaggtttgttgtcttctttggctatgagtccagcttgttgaccatcccggagacgaaaggtcatgaatctagtctgtatgaagaagcttatgagctatttgtggagtttatttctgacctaaaaaaaaatcccgtttatgctcagttgaatatcgagctgtatatctaccccgctccaagcttcgatgacttgtgtgatttgctggcaaagaaaatgcgagatgacaaatga

SEQ ID NO: 59885 - DNA, 2193 bp, Pseudomonas helleri
atgaacaggatctacgacagcgctcgacttctgcttgatacgaatgactcctcagcgtttacctatcttcgagccgctgacaagcttttgtcaaatccagtttcattgcacatgggtagggatttagttatccgtgccttggatgctaggccgagattctcaagctacacaccgctactgagaaaccttgtacgcaaggccggattgtatccgtacctgaagaaagagtttcaggatatctcagccagtgaaagagcggctttaggtatatatcaaacacctttctctgacgaatttgtcttccattcgatgcagtttcaggtgttcgagttgcttcggtctgggcgtaatgttgttttgagcgcaccaaccagcatgggtaaaagtgcgattgtagactcgataattgggttgggattagtgcgtagggtggtgctggtcgtgcctaccattgctttggccgatgagacccgccgacgtcttcaagagcgatttggccagtcttaccagatcattcatcacagctcgcaggaggctagtggtggaaaggtgatctatgtgcttacacaagagagagtcaatgagcggaaagacattgtagacattgatttctttgttgttgatgagttctacaagcttgcgtttcagcagcgagccagtggcaagatcgactacgaaaatgaacgtgtaattgaactcaatatcgcgttaagcaaacttcttaaggcctctaagcagttttacatgactggccccttcatcaatagtgttactggtttggctagtctcggcctagagtacactttcatttcctctgacttcaatacggtagcgttagacattgagtccttcgacttatcccctaatgatgatgtaggtaaagaaagggccgtccttgcaatcgcgggtcagtgccgtggtgaagccacgataatttattgcaagtcctcggctattgctggcggggttgccaggtctttagctcagaatggatttggcactgaattcaacagtcctcatctagactgggtggctcaagagtatgattcggactgggattactgtgtagcattgcgcaatggtattgggctccattttggcggattgccacgtgcattgcagcaatacactattgatcttttcaatagaggcgagatcaattacctcatctgcacctcgacgataatcgagggcgttaatacaattgctaagaacgtcgtcatatacgacaatagagatggcatttttagtatcgataaattcacgcacgggaatatcaaaggtcgtgctggccgaatgggtgttcatttcgtaggcagggtatattgccttgaatcgattccccaagactcgttcaatcagggagtagatatcccgcttggcatccaagatgatacgactccaatgaacctcctggtgggcgttcagcctgaacatcttagtgattattctcaatccaggttcgaacgggacgagaatgttgatgagtttggcgtagatctgctcaagcggcatagctccttcagtttagaagcgttcagggaaatatattcctttgtggaaatgctttcggaaaccgatctgcagtccgcaatttttcattggatgccatcaggtgcgtttctggatgttttggccgtagcgctgaccaggtttcaagcaggagccctccgcagagtacgtattccaaccaaaaatagctctgtgattcatgcaaagcttacgaattatttgtacacttctgagtatgcggaatactttaagtcccagattgatcaggcgaaggggcgtttggagaaaggtgaggtcgaagacctatctacttgcattaacgatgacctcaaagtggtaataaatatttttggccatactgtgcccaagcttctgggtgtccttgaagatgtggtgaagttgtatgccaaaaaacggcatattaacgtcaagatcgattactccaggctacgtggcatctttgagcattaccatctcgccccaggccttgcaggcttagaggagatgggtgtgcctgttcagacgcttcagaggctcaatacgctcatcgaaccacctcaagacctggatgtggatgagatggctcagtttctacgagctaatgaaactcgctggattagtttgggcaccgtagatcgttcctttttgacgagaacgctctatccgaacctgagaagatga

SEQ ID NO: 59886 - DNA, 828 bp, Parcubacteria group bacterium GW2011_GWB1_45_9
atgaccaacttaccaagcgacattactgaaagagcaaaaaaccttattttcaaatttgaattcggcggattcgattttaaaaatattgacggtggccagccgtatacgctcaactacgaacagaaaaaatataggcaagacgaattggtatccctgcttttttcggcactgccttatttcgctttaacagaagcagaatatagtgaattccacgaattaaagaaatctccgagctattacgatcaaactgcaataaatcggattgttaagccaggcaagaaagcaggagactacggagaaataattttattccttttgctagagcttttttatggttcgaaaaaactggtaacaaaagttttttataaaacctcaaacagtcttcccgtcttcggatctgacgcgactcacttcaccaaagaagatggaaaaattacactttggtttggcgagtcaaagttctatcaaaattttaccgatgccttagatgctgcgtttgaaagcatcgacggcttcttaaagacaaaaatcaagggggaggttgaatttttaacaccgtctcgagtcgaaattaacaaaaacacagacaaggatctgcgcgatgaggtaatcaaactgattgatggcaaaccatctctagatgatgtgcccattaaagtacccgtgctaattacttatgagttggctgagttaaagaattttgacgatgtcgctggtagtcattttattgaaaaaatgaaagcggaatttgaatctcgttatcaacagatacagtcaaaaaactggcaaaaacaatataaaaatgtaacgttcgttttcaggacgtga

SEQ ID NO: 59887 - DNA, 2271 bp, Parcubacteria group bacterium GW2011_GWB1_45_9
atgaaggaactagaatctaaaattaagaagagtctcagtcggataaaaaccggggattctttctcggatcgggatcttgttatttggctgaaagatgtttacaagctgctagacaatgacaacgaacaatcttacaacctatgtcttgcaagtatatgttttatcgccgataggaatccatctgatccaatggttgttgcgatactcaatgaagcgataataaagtcacgcatttttttgtatcgagacatgttggaaaagcagagctccgggtttttagaaaataatcccataagttgtgttagcgagtttacgaagtggttttacacggatccaatctccggaaccgtgctaactaaatcgcaaagagaaataagcgagttatttaaaaaacagaaaagattggtgattagtgccccgacgtcatttggaaaaacaagaattttagaggaacttatattgaacaataactatggacatattgccattgttgttcctaccaacgcgttgctttcagagaattatcaccgcttaaaaagaaatttactaatttccgacaaatacggaatcatctactcgtccaaaataggccgcaattttgatctgagtgggaatatgatttttattttaacgccggaaaaactacttaacttacttgatgaacatcaaattacctttgacttttttgtttttgacgaattttacaaaataagcaaagatttcgagtccggcgaaagcggagactacgataggaggtacaaagtatttcagtatgctctatacacgcttgtgcaaaataccaacaccgatttttatatgatcggcccgtacatagataaattcagtaaaaagtttttggaaaaggaaaacgccgtgttcaaggagtacaaagtagaaatcgtccagaaaaggattttcttggaaaaaagcgccatcgataagcagctgggtataaatcttctaaaagataaaaagaaaagcgcctataaagtactcgataagttacgagagcaagatcagctaaatctcatttatgtgccacggcaggaaacggctgaaaaacttgccagggcatacgccgaacatttagatgattccggcatagatttgtcagagaatgtagagctcaaggatttcatccggtatataaaagacaatatttctccggaatggaatctaattcgcgctctcaaaaaaggagttgcattccaccatggtggcataccgagatatattcagacggagataatttcgttatttgaaaagagaataattcacagcctaatttgcacgacgactttagcagagggcgtgaatacgtcagctaaaaatgtggttgtttacgaggcaaagaaatccaaggaaaatctgacgacatttgatcggaaaaatatagaaggcagatcgggcagattcaacgagcattttataggtaacgtcttctacctgtctaagcccatggatcaagaaagggagacgggcgttgattttgagttatacgactcgccaaacctcaggcaagaagatgtcatcttggttaaaaacgaagacttatccgcagataacttaaaaaataaagaacaagctctttccaagctacaagagaaaaacattccccagggtttaattcaaaaaaatcgttttattaacattgataagcaaatcagtcttatagaatcactacgaactgacctagatctaccttttaaagaaatcaaaaataataacgaattcataaataataaagatttgtgcgatctacttttccaaaatgtttttaaattagcaaataccgatgatcgaggcgcatggaacggctatacatttaagcagctctcttggcttgccagaagctacatgttcagtccatattttaaaactctggttggccataagctttttgagagtagtaaaaatatagacactcgcattagaagggcgttgaggctcatgagccagcattttgaatttcttattcctagatatatgcaggtatttcaggaaatttataactttgttgcaattgaaagaaatgctcggaacattgaactcgggcgcgtggtgagtttattggaatacgggactgctgatcaggttgagattttattgcgagatactggtttgccgctagaaattgttaacaagattaaaaaacattttagggggtgcgaagacgccaatgcgattttggcaagaagaaaagagaaagatggagaacttaggaatgagcttgatgaatttgaattacgattaatggataggtacctgtga

SEQ ID NO: 59888 - DNA, 882 bp, Parcubacteria group bacterium GW2011_GWD2_42_14
atggctatccctggcacacaagagttgaatacagatggacaagtaaatgttcctgaggatgagagactcttctgtttttgcattgaagaacttgcgtcggagacttatttgaacgattttctgactggtttgaatgatttcctaccctcatatgtttttgatagaaacactcttgctacacatgaagcaagagtgagagatggaacaagcacaacaactcctattgatagagcacgtgaatttttacagcgaactcaggcaggtagagcgtttgactcaggtgaattaggtgaattacttttacatctctttgcaaaagaagtgcttggtgcacacaagttggcctcaaaaattcagtcgagaggtgataatcggacaactatacctggtagagataatgcatatgcatggatggatgaagaagataatgtttacatgttggttggtgaggcaaaacttaaaccaaactccaacgatggtcttcgagaggctcagggtgatttaaatcatttttggcagactgctagaattgaacatgaaattagtttagcctcaactcatatacgctcagagatgactgaagagaacctagctatgtatgaagctttctttatagatgataatgaggcacaccagagattgcgatatagaaatattgtgtttgtcggttacaaccataattctcttcaaaatcttaggaatcaaactattgacgatgaggaattcatccgcctaacgagtgaagatttgcagagatgtttaactaatcaacaaacactcattagtgaaagtccacatcatggcatatattgctttctgccctttgagtcggtagaggcggctcgcactgctttcgctcagataaatggattggttgtttaa

SEQ ID NO: 59889 - DNA, 2673 bp, Parcubacteria group bacterium GW2011_GWD2_42_14
atgcctcctcttaactcaattacacaattgtccagtcaaatcctagaaagtgaagcttttataaatagatttctacaacttcaaacttatgctggacaaagcagattatctttcgacattactgacctatctgatgcggtagtaagtaagttgctatttcaaggttcggtcttggcaatgagtgatgatgttccgcataaaaaagtatcacagaaaatcaatgcacttttgttcgagacaaaggcagatcaacctttagttaatctttccattcaaattttatcttcacgtcttggtaactatcctgtaatcagtgaggactctgaagtatttggtgagcagaatattgttcgcaaactaaatgacggtgctgatgtgattgaagtgctcgatccagaaattctaggcagtttaagttttgaagaagagcaggctcgtctgctaattaataaccaagtttttcactttaatctttatcaaaaagaaatacttgatgagctggcggataaggcactggtcagcttttctgctccaacttcgtttggtaaatcatttattgttagacatcacctagcacgagaatatgcagagggtcgcacaagtaaggttctgataattgtgccaaccaagtctttgattgacgattttcatgagagtgtgtcaagccttaaaaggcgactcggactagatttctctatttacacccacgcacgttcagttgaagaggttccagagagaagtgtgtttattttgacgcaagaaagattatcgttcctgattgaaaaaaatccagattttgttaggacatttcaaattgtttattgtgacgaggcccagtacatttcaagaggatatagggggtttgtgttgagaagtgtgttacgtagagttattgatttgtgcggtatattaggtgttaatggaaacacacaatatatctttagttctcctttgataaaaaatccagaatactacaaagaaagattttttcctgagttaacagaagatcatttttttcacaaagaggtcctctattcgccagtggagaaaaatattcatttcgttacaaaggggagtgttgatttttcttattctctacttaatgactcttcaaatcaagaaggatttgctgaaaaaattcaagagttgggaaacaggactttcccacagcagcttagaggtaataataattcggttgagaaagaaattgaaagaaacattcacgttgtactgaattctaatctaggttcggggacaatcctctatactactagcccgttaaaaacgcatgagtatgcacataaacttgccgaaatattaccagaaaaaaatattctcaatcagagagagattttagatatcacacaatatattagagatcattatgatgagagttttggtttgattgatcttattagacgtgggataggtctccactacggtcgcatgccaattggtttgcggcgagcaatggtgcgtctctttgaaaatagaacaattgattatcttgtttgtacctcaacccttcttgaaggagtaaatttgcctgcaaagaatatttttctattctcaaataagcataacggaaatactaagcacactgctttgtcattttggaatcttgttggtagagcaggtagaattacatttggtctttctggaaatatattttgtgtaacacaaagaatggaagagtttagagaattgttcgagaaacaggactcagagatagttgatccagaaacagaagtttcagacaatcagaccagaagaaattatgtattgtcttcgtttttggaccaagagaaaagatttgattatttacgttcaagaagcagaagtgacattgagtatttaatttacgaactactaactgtcaacaatattgaagaaatagttaacagatttaagttgccagaagaagagagagtgtctcttatgcagtcaattcaaatagaaaaagactcccttcaacttcctgttaatgtgttaaggaaaaatccaggtattgatcctcggctacaggattcactactaactttattggaagggcttacacaattacaacttcgtacactgtgcgaaatagcagcgaatcctttagctgttaataaacttagtcttaagcacattcttgaaaaaactggagaaacattacaatggccacaaaacggtcaatttgatgaggttgatacgaccgctggaagaatttcccaatggcttcacgaactatctattgctcaattcattcagcaggcattgagacaccatcaagatgcaaccccaattgaacgagttgaaaaggcattaagagttgttgataggctcgataaagatctttcttataacgctccgaaatatatcaaatgtttttatgatttagttttatatgatgctcaacggagagggatgcaggatttggatacctatgaagagcgcatcgagtcatttttattttcaattgagtctggcgtctcttcttttattggtcgttttttatttgaaagaggtgtttcaaggccaatcgctattaaaacaaactttctggtagaagagttggcaggtggacctgttaatctcacattcttcgagagagaagacgtagttagagcgttaagtgaaggtttgtcgcgcattgcttttgatgagttgatggaacatttaaatgcctag

SEQ ID NO: 59890 - DNA, 957 bp, Burkholderia sp. LK4; identical to SEQ ID NO: 59698

SEQ ID NO: 59891 - DNA, 2556 bp, Burkholderia sp. LK4; identical to SEQ ID NO: 59699

SEQ ID NO: 59892 - DNA, 1449 bp, Rheinheimera sp. KL1
atgactgcgggggccttggacgattataagctcgatagtatctacattttacaaacgttatctaatgatggacataccaagcgtggtacatgcttttctgtagctaaggatttgttactaactgctagtcacgtggtggagggtgctaagctaattaaagtgtatttaaccagtgatgtttttgctgctggacagcatattgaagccgaatgtatttaccgaaatttagatatcgatatcgcaatcttgagacttcctaaagacgctacaagcagcgttttagagctatattccacaagtgtgagcttagatagtgagttgaaaatttgcggatacccagttgagaaagaacattatccagccccgatcaaagttaaagttacgaattcatttgagcatatgacaagccgtcaatacagctttgaaatttctcagtctgacactgttagcaagtacagcgggatgtctggttctccagtgctgtataagcattactgtattggcattttacttgtacagcagtcgactaacactttgtatgctttatcaactaaggatttattaagtgatatctcaattcgtgagaaaatagaagcttatggtgccaatattattgttcaagagggaattgattacaaagcaccaccttgtcctttgtcaccatttaagtatgacatatactgtaatgccgaacatccaaatataaaaggtgtagatattggctttacaatgaaacaatggaacttaggtgattttgcagagtctgtatatgattgggttgttgattattgtttgtcatataaagataaagcaaatttcaaaggaagcgaaaggcggctctttaagtatgctagagccaattatccagagaataatttgaatgcactggcagatctctgcttacatatagctatacgggaatcatattcaacaataccaataatgaataaggtttttgatataaacagaaaaacattttcgtgtactcatgccgttttgaattttgatagcatagaattgtggataggagcatcatctgttagtgccaatgttgaggaggccgttagtgttgtagtaagtaatattgagtatattttgaatataaaaaatattaagaacaggttgataatgcttactactgaaatccatgattcttggccccataaagaaaagttagaaaggcttgctaattcagaattagaactagaagaaagattcgataaaattattatccctgtttttattatgcatgaaagcgaaataatcacgaaatatgaaaaagagaaatttaaggaactttttttagaaagtatccagaagtttcgttatttatttaaattagaggctaataatagactagacaacttaattgatttgcgaattttttactttcctgtttctgatttgatagaggtcaatactgcattgcttaaggagttaaattcatga

SEQ ID NO: 59893 - DNA, 2172 bp, Rheinheimera sp. KL1
atgagcgattggtatcaaaatgcaaagacacttcttaatgatgagttttttactgattgggatgattttttattatcactggttaatgagtttaatcgccactccaaccaaccattggttcaagatatcgcaattagggcacttgaacgaaaaaacgatatgcctaatggatttatcctaaatcacattttaggtgagttaggactttacccatatgtcgataaagaaaatttcacatcaaaagatgactttcgtcgtagtatcttcactactccacaagataaatctaagacttttcacatccgtcaagctgaagtttttcaccgtataatgagtggtgaaaacataattcttagtgcgccgactagttttggaaaaagccttataatagaagctgtagttgctagcgatgaatttaataatattgtaattgttgtgcctactatcgcattgattgatgaattaaagaagaaactatttaaatataagaataaatataaaattgtaacacaggtatcacagaaggcgagtgctaggaatatttttattctcactcaagagcgggtattagaatatgacagccttcaaggtgttgatttctttataatcgatgagttctataaattagctccagttagtcaagtcgatgaaagatgtgatcgactgaatttagcattcaaattattgtactcaaagtgtagtcgtttttatatgttaggcccgaagattaatggattggtatatggaattgaaaatgaattgaggtgtacttttttaaaatttgatacatattccactgtcgcaaccaatgagttttattacccattaaaagttacggggagagattcggtagtagatgttgagagagatagtatattatattctattttgtcctctatcggaagaaaagaacaaactgtaatatattgcaagtctccacatcgagtaagctctttaatgtgtcggcttttgaaaaatggtattttaactccagataattctaacaatgatcttgcgaattggttagctgaaaattttcatagtaaatggtctttagtcgaaggggtaaaacatggcatcgcttatcatcatgctcaattaccaagagctgtaagtgctcttattgtcgatctgtttaatgattcaaaaataaatattcttatttgcacttcgaccctaatagaaggcgtaaatacaaatgcaaaaaatataataatatacgatgactgcattacaaaaaggactaagcttgatatgttcactttcaataatatttctggtaggtctggaaggatgtttgagcattttgtcggtaatgtttacatttttggtgaaaaacctcaagttgaactcccattaattgatatcccggtgataacgcaaagtgaaagcgcatctgaatctttgttgctaaatttaggtgatgatgtttatgaagaaaataagggtagagtgaagaaattttatgaacaaaaaatacttcctatgtcgttacttattaaacatcagggaatagatccaaacaaactaattcgattcgctgagaagcttattgagaattgcaattcttggaataaattgatgtgttgggatggtatttacccgacatctaaacagttgcagcatctatctactattttgtttgagaattttaatgtatcttcaatggggggcggaaccgtacgctctgctagtcaattgaatagaaagttgatcgatgtaataaatcaagtagatgataaagaattgatctgtcaagattatgaatactggattgaaagggataataattatagtgttgatgacgctgtgcaagctgtcttcaattttaagaaaaatctcgtaaactacaatttacccaaaataatatatgcgataagcgatattcaggagattgtattccaacggttcgagtattcttttggtgattttaagccttttgcttcagcgcttgagaatttttattatccagctgctataaattctttggaagagttcggaataccaagtcaagtcgctaaaaaaatcgtagtctataatagaaacaaaatcgaaaatatagatagtattgattcagtcattgattttttgactacgtcaggtcaaagctcctatggcgaactatcagagtacgaattgggcttcatgaaaagagcactcgcctatatgtga

SEQ ID NO: 59894 - DNA, 900 bp, Chania multitudinisentens RB-25
atggataaccatcttcagccacagctaaaaaatcctcacgaacttaaaaatgtgctgagagaggttcctgtttcttatgaattatcagacggtagagtgataaaaactttattagtgtatttgcctactaaggatggggtaagctatcactcaacattatttgaaaaaatcagagaaggtattttatacaacttcgttttttcatgtactgaaatacagaaaaaacttggagttgatgataataaatctgctgagaaactatttgagaaagccatccggaaaataagtcaacatacagctaaaggtgagttgggcgaattattattgttcacacttctagatgtttattttaaggcccccaaaatacttagcaaaatctcattaaaaacaagtcgaagaatgccagtatttggtgcagacgcagttcatgctcaatttcatgatggaaaattaatgttgtatttaggagaatcaaagcttcatgcggattttaagtctgcggcaacaaaagccaccaactcaataaagagtgcaaaagaaaaatatgtagatgagtttgatttattagacagttatattgacttccctaatattaaccctaaactagaagcagagctattggacttacttgatccattctctagcaatgacatagcaagcataatacactcaccatgctttattggatttactgagccaggaattatatctggtgcagaatcagaagatgagtttctcaaaaaatacacagacttagcatgtgattatatttccgactttttcggaaaagccgaaaaacaaggggtggatattaatgaaacaacattgctaatgcttccattttcttgtgtggacgttttagtatctgaatttatagcttatattggaatagagaaatga

SEQ ID NO: 59895 - DNA, 2508 bp, Chania multitudinisentens RB-25
atgagtaatttcattaacaaactagccatgagagtaattaaaagtgaaggatataaagaggcaagtaaatctctattcagttcatatgtattaaattttaccggtcaagaaagtaaatttgatagaaaagaaattagtaaattgatatcatctgctcaaatattctacaagtctgaattagaagaaataaaaaaagaaggggcaatcatattatcaatgcttttagatatctgtgctgccgataaccaagacttaatacccattgcaaatagtatattttcaaactcaggtgatttccccaatattcaattacttactgaaaaacacccgcaattaaacttcaagtataatttttacactgaagcacaaatggaattcaggcaaagtttaaatacaattgaagaacttgattttcctttaactgactatcaacgctcattgtggcatgatctctcttccgataaagatgttattacagccgctccaacctccgcaggtaaaacgcatattatattaagttatttaatgaaaaaaataactgatagcgatggtgcttttgcggctataattgtacctactagagcattgatctctgaagttgctggtaaaatttatcaactcgcccaagaaagcaataatgagaatgaaattgaaatatgcacggttcctaaagagggatattttggagaaaaaactttctttgttatgacgcaggaaagattgcatgaagtgttacaacgcggtgacgtctattttgattacctttttattgatgaagcacataatatcacggataaaaataggggagtattactgcatctcactatcgaaaagatgcttgaagatagtttccctcaagtcattgtaagtatgccttcaccaagttatcaagattcgtttacttcgatatttaaagatattgagtttaagaaaaaattaacacaacactcacctgtggcaaaaatagtaatgtcagttgttccaaaaggtcaagagttaataatatctagacacaattcgtctaatgttaagcatattaaaaaaggatttactgctacacatctagcagacatagtttataaattaggaaagggtcaaagcaatattatttatagaaataaaactaactattgtgaagatcttgctaatgaaatatcaaagcgaatagtggaaataacaagagaccctcttttagaggaggctgctgattatgttgagaaatttgttcacaatgaattctcattagcagataacttgaggaagggtgtcgcattccactacggccccttgcctagctccatacgtataatggtagaaaacttagcaaaaagcgataatattaaatttattgcatgcactagcaccttagctgagggcgtaaacttacctgcgaaaaatctttttttgaaaaaccctcttcaaccaattatgaacaaaccatctgaacgaatagaaaatgtaaaaattaataacattacaggaagagcgggaaggatgctgcagcacttttccgggaatatttttttaattgaaccagatagctggacatataaggattattttaatgatgttcaagaagaagaggaaaagattccaacttatttcaaatcattaaacgaagagttagatagtgtgctcttggccctcaaaggctcatatgcacataatgaaaaagatcaatatagattttacactatcgcaaacaagctaatcaaagagtactcaagtcatagcttaaacaatacattaagtgcaaaagaactaactctcaatgaaaaagagcgtgacagtttagtcaaatatgttaaatctgcctatgatgaccttacagtagcatcatttactttagaagcaaacccgactataggctacattcaacaaaacaaattattcaactttcttagcgagcaaacacattttgatgaatggatattacctcatcctagatcagttaatctttatgatgttcttttaaaagtaggtaataaactaaaagaatttggcgtatatacacctaacgaaggctattctttagactatatatgtgttatcacgaaaaaatggattcagggtaatagcttgaaagaaataatatctgaacaaattgattgggataaaaaaatggcttatgataataataaaagtgctcctagcattaatacctctgtaagaaacgtcatcacagtaattaataacgatgttcgtttccgcttgtctaatgctcttcgctgctatcaggtcttactcactaacattttacttagtagaaaagtagatttatcgagtgttaaactccactatttcattgagattggtgcttgtgatgagaggatgatcaaccttataaatatgggattgtcgcgagaagctgcgaaagagattgacagtaaattacatgctagtgtgcaaattacctcaacaaaagatctattagaattgaatctatctggaaaactcgagagtattcatacgattactaagaaagaactgcttgggttgcttacttag

SEQ ID NO: 59896 - DNA, 903 bp, Enterobacter sp. GN02174
atgttactaccaatacgagtacataaaagatttctggatttatttaaaactgtacatattgattcttctccacagcaatcaactctaaacttgcatattttgaacattgagagcaatcaatttatatatccaaaattagttgaggaattaagagaattaataataagctacgtacactctaacagacggattgaggagtttcatgaaaactattctcgatacagtcctaaacctttctttgaggcaatacaaaaatttcgcaattacagttcaaatgaaggtgaattaggagaacttcttttatatgcttttcttgaagcaggtttgaatgctcctaaattactttctaaaatggaactgaaaacagactctaacgactatatcaaaggttcggatggaatacatctattagaaacagatgatagtttccaattaatatttggagaatctaaactatacgcagatcttttagagggagccagggaggcatttgactcaattgttgattttaaagccaatggaatgggatatgaaagaggattgattgatacacatgttataaatgaaatggtttcggaagacggttatgaaaaaataaaatccatcctgcttccatcaggcaatgacggacctgaccttgatttatcatttggcattttcctcggattcgaattaccgattgatagctcgatactatcaatgaagaataaagaatttagagagtgggtaaatgagtcagttaaagatcatgcctcacgtgccgtgaagacaatacaaagaaaaattaaaaataacaatctgtttggacatgagtttcatatatatatagttccctttacaaatatagaaacaactcgtaagaagttaattagagatatgctaaccatcgagggaaatctatga

SEQ ID NO: 59897 - DNA, 2571 bp, Enterobacter sp. GN02174
atgaatgaattacactcaagtaagaatgttcatttagcagctcgccttgcagaagatgcttttgaaagtccttacttcaaagaaacatacaaatacataagaactctgtacgacgagactttatttgactggctctcagaaagaaaattagagaaaacagacaatattaaaatcgcacatgctttacgcttcgcagatatattgtctcactcatctaaagaaatatatagaacatatgctttcgaaattataagcaaaatagccacattcaaaaaaaacgacccttattttaaatttgtaggcttggccgtaattaatagaattgggatatatgcggcagaaaaattaatatctgaaggagtaatattacctttagacagggaaatagatacaatagttaagaagtcagtgcaaaaaacagatgaagatggcatatattttacagacaggcagtatgagttatatcaattattaaagagcagtagtacaattagctttgctggcccaacgtcaatgggaaaatcatttgttattaacgcatatataaaagaaataataacaagtagaactaataaaaacatagcgttaattgtccctaccagagcattaattagtcaaaatgctcttaagctaaaaactgaaattataaacacttcaagtattaattcttataaagttgttacgacatcatatatgttcgatagcaacaaccctaaaggctatattttcattctaacacccgagaggttggtgagtcttataagcactataccagaactcaagatcgactatcttttcgtcgacgaagctcagaaattaacaactaaaaatgactccagaagtcttgtaacatattcagccatagagcaaactcttaatagcaatcctgatacaaaactatttttttcctctcctaatctatctaatcccgatatttttaactcattatttagaagaaaaaaatcaaaaacctataaaagtacagaaggtgctactgcacaaaatatgtacttcattgatttgattaaaaaggactttagctttgtcaatacacaggaaagaactttggagtcagtagaaagcgattttagtcagtttaaaatcgctaacgatgtaatttacaaattaaatcatggaaaaagtaagataatatactgcggtggtatagaaaatactcttgagagaaccagagaatttattaaataccttaaaaaaaggaaaaatttcaaacgccaaaacaccgaaattgcagcacaaattagagagtttgtgcatgataattatgaacttgcagaggcaattaactatggtgttgcctttcactttggtaaccttccacaatcaattcgtgatctgattgaacatcatttcaagatgggtaatattgattatcttttttgtacatctacccttcttgagggtgttaatttacctgcgagatctgtttttattctaacacataagaaaggtataagtcctttagagtctgttgacttttggaatttggcaggaagggctggtcggttagcaatggaattatcaggggatattttctgcattaaagatgaagaaaaaacctgggataagaaagccattgacaacattctattatctgacaaaaacgatatttctttaataccaagtttttatatcgaagacaaaaaaagattaaatgaattacacacaataatttctactggagaaacggagaatattaaaaactctgagtttcttagaactttaggagatatgattcgaatagatacaatgagagaggaaaaacatcttcctttgatcgattatttcagtcgtagcgataaaccggaaataatattaagtgccaaaaaaagcactaaaaatattaatatacctcttaatattctcttggcaaatagccatatagctattgattctcagcatcatgcttttaataaaataaaatcgatgactattaatgagttgaaattgccatggaaaccaacatatgaagaaataaaatcaaaactgaatctaatctttgaaatctatcagatagataagtttgcaacaggacaaaatcgtctctattctaaatcgatcccttactacgcggttatactttctcagtggatgtatggaaatagccttcaggaaataatttctggagcgataatatacaagaaaaataaatacatttatattaacaaaataaaagttccgtttgacagtagcaatccttctcacataacagcattagttaacgaaacgattaaagacatcgagctacgtgtaggctatcaattacaaaactatatatcacattactgccaacttatgactcatcttctacatggaaatcccggtgcaaattggtcacaattcattgagtttgggtcaaacgaccctattgtatggcacttacaaatgatgggattttcaagggatagtgcagtataccttaagagaaatttttcaaaatttctaaaaattaatactgagtcaaataaactaacaatatcaaataaatcaatcattaaggattcaatcaaaaaaaatagactttacgctttagaagtccaatcgctgctgtaa

SEQ ID NO: 59898 - DNA, 948 bp, Marinobacter subterrani
atggaaaaattaaaggcgattaattggccaagcctagtagctggcaagcattcatggattgaagatcatttcaaagtacactccgttcttgaggacaagaaaaccgtttgtcgattcttctcactggacttttcaggcactcagcaagagatgctttctctaaccgagtcactggctgaatcaatcgaacactatgtttttgataagaagcagctagcgagcttccacaaagaaggaaaagttccattccaaaaggcgatgagattcttcggaaagacaaatccagatatggatggtaagtacggagaacttctcttgtatcttctaacagaaaaatttctccacacacctcttgtgagccacaaactatctcttattacaaatacgaacgatcaagtcaaaggcggtgatggtattttttttggtgactataaagatgaattagctattttaataggggagtccaagattcaccagggagctgcgggggccatggaagacgcactagagtcactggatagattttacgacaactatagttccggtcaactagggcatgagatgttcattgctcgatcaaatatttcggagaatttttcatcattagatgatgccgagaatctttataaagcgttcaccccgggcactgaacagtacaaaggttgcgtcaaggcgcaccccgttcttctggttttcgaatcaagtaaaattagtacgattgaagagaaggccaaaaataaagacgaagcagagaagatgttcagcgaatggcttactagcagatcaaaagaaatacaaaatcttctagatgacaagttaaataaatacccagagttaaggaagatatacatcgatgtatttattgtgcctttgactaatgtatctaagttcaaaaacgcgctctatagagaaattcacggcgtagactatgtatcaaatgaaaaataa

SEQ ID NO: 59899 - DNA, 2595 bp, Marinobacter subterrani
atgacgcagatatattctcaggcagcaaatcatgaagactttgttcgagtttttgacaagctattggaaaagctatttctagaggacaaagtaacagataatgtacaggttgatcttgataatgaagagatcaaaaaagctacctggcttgcttcgatagctgctcttagtgacgatgacaaagagcgcaatatggcaaatgcgtttggagcgctacttcatctgaccgatagagaaaatgaaatatacaagcgtgcatgctatatcctccaatcaagaactggaaatctgataaccagcagccatatacccaaactcttccacaaagataacactcttagcgaatatggaacgttactaaacttcgagctggcggctcacagggcactgctagagcatgaattctcagatgagacaaagatttttttcactgagtttcagaaaaaactctgggagtcccttaactccggagagaacatagctatctcggccccaacatctgcgggtaaatctttcatcataaaaaaatatattctggagctagtagaaagtggcgcaaagaatatagttttcatagtacccactaaagcactgataaaccaagtgagcaatgtactaaagagccagctccacgaaaaagcgcatgtatatacgacctacatagaaaatcagaaagatgatctagctactatctatgtgctaactccagagagatgtttgaaacttctacaagataaaaatgtggcagcaccggaactgatgttcatggatgaagtgcataatattgaagctggttctagaggagttatatttgagaacatcctatatcgagtgatctctatttgggcttctacccaaattgtcgttgcagggccattcataagctcactttcagatagcattaagaaaatctgtaatatctctattgttgatcatcaaacactctcttcaccagtgtttcaagtccgatcagcgcttactttttttccaatcaaaaaaattgctagatacaaaatatcgagcccaactggacgaactctatcaggcgagattaaactgaaaaaatccctgtattcgaaaattaaaacaaataaaggggaggcgctagaggttattgcggatattttttctcctgaggaccataatatttattatgctccgaagaaaaatcttgcagagaaatgggcgaacaaaattgctcctattatcgccttaaagaacccaaaaattatcgaagcagccgattctagagttaaagatttaatcgatttcttatctgaagaagtgcatccagattactctctaatacgaactctcaggctcggagttgcttatcaccatgcagggcttccagatattgcaaggcaagaggtagaggagctctattcggagtctattatcaagaatattgtttgcacatccaccttgctacagggtgtgaacttgccagcggacagactcattgtcataagccctaaagtgaattctcacgatatgccggcctttgattttcttaatcttcttggtcgcgcaggcagagccaatacaaagctttacggtgaaatctactgtattgatgttgttgatgatgaatggggaagcaagaaacttgaagctgaggtaaacaaaactgttgatacatcttcgaaccttttccttcagaagaatgaagatcacctatcagaaattgctgatatgtcagaagatcagatacgtgatatgacagatgataaagatatttacagcaatctatcatatttaaggtcgatctttagaactgatagaaatcacttcgataggattctatcaagctcagggatttcgatagaaagcgctgaagatttttctaaaaagttagaggctatgtacaaatgtattactatgcctcaggaacttatagcaaaaaatccgtttattgatcctattttgcaaaataagcttttcgaagcgattcaatccgaaggtattggaaattggctgattagcaagaagcccatgaccaaaggcggtagtgatttggattacgtaacgttccaggaaaaaagttattactttcagctatggagtgttttcgacaggctcaatgaaattttcaatatagaatatgaactcaataacaatggttatgcgaaagacaattacgttaatataggaaggcttgtaagagatgcccatcgttggatggctggaaaaaaacataaattcttcatcctcgatcttatcggagaaaacattaatgatgaggcagaagtcgataaggcagcgaggagagttactagtcacatcagcactaacttaacgtttatttctgttaagtaccttatgctctggtctgatatggtttcgtacttcttgagcgaagaagaaattgaagagaatgcctacatcctaaatttgcattctatgcttgaaatgggcagctacgaccctgttgttctagaactaatgagctgtggaataaacagatctgttgcactttcaattgctagcaagatcaagaaggtagggggttctgctgaaaaagcactcgctactatcaataaagataaacttcctaacatctttaaaaggcatttgatgaaggctggatactag

SEQ ID NO: 59900 - DNA, 963 bp, Bacillus sp. TH007
atgacatcacaaatcccaactcaagaagattacttgaagggataccttaataaaatgatacgaggtgacggatctgagttagatgcatatgttagtgcggtggaaaaaggaaaaattgtagaggatactcatgccaccgcaagatgctacatgataaatttcaacggacaagattttcctagaagtaaagatttaggaaaagtactagtagagtatttattggattattcaattcctagacatgagattagaaaagcccaatctaaagattttgaaatgaatactacaaaacatattgcagcccttcatcaaaaagctcgcaccttatttactactgtcagtaaaacaggtgaaccaggtgaggttttgttatatctaatgacacaaagcattttaaaattacctcaagccattgcaaaaatgtcacttaaaactagtagccaacttcattataatggtgccgatggagttcacttaggatacgattctaaaaatcagaagttgaatatttattggggtgaagcaaagctatatcaaaatcatggagaagctattaaaaactgttttgaaagcttagcaccttttttagctgctgatggatcaaatcgagttagagatctagacttgttaacttctaatttatctacacttgaagaagattttgcgaatgcattaataaattatcttgatcctgaccacccttcatataattcgttagaattcaagggagtatgtttaataggtttcgactacactaagtatcccaaaaaacaaaggttaaaaaaacaacaacaaattttatctgaaattttaaaagatctcgataattggataaataagttgaaaacagctattaatagtcatctagatctaaacaaaatggttattgaaatattcatcataccatttccatctgttagtgaatttagatctgcttttttggaggttttgaatagtgattga

SEQ ID NO: 59901 - DNA, 2544 bp, Bacillus sp. TH007
gtgattgatataacacaactagctactagaatttataatttaaatggattccaaagaatgtttgaaccattattaaagttgtctattcaatcccaatttactcaaattaaaaatcaaaatgagtgtatagatttgccatatttattaaactgtgccggtattttagcagattcaaatttggcagaacatttagatgtagcatatcgtattgcacagtttggaattcaacaagaggatgatgaattagctgttaaaagtgcattgattttagaaaaaatgactaatcatccaagtattgaattagctattaacaagggatatattggagtagattatattgatcaattacccttattaactaaattagatctcatgagaaggaatatcaaatattctttatgggatgagacagaaaataaactagtgaatattaacaaatttcaatatgatgttattgagaaaagctataatacgcagttactttcaatttcagctcccacttctgctgggaaatcatatatattattaaacattattaaagaaacacttttgaataaagctcaaacaactatcgtatatgtagtacctacaagagcacttattagccaagtagaatcagatattagaaagaaattaaggatgcctgaatttcacaattccttcattacatcaatgcccataatggatgaacttttagagggatatgataagagagtttttattttaacgcaggaacgtttacaatggtttattaatgaaaaaagagattttaatatagatttcttaatagtagatgaagcccaaaaagtaaatgatggttcgcgtggtgtaatacttcaaaatgtagtagaagatttaatctatgagaataaagacattaaagtgattttctcaagtccattgactgagaatcctgaagtttttttacaacctctttacgaaatatcatcaatgaatactgttcaaaaagagctaatacctgttaaccaaaatttattgtgggttaatccaatatatcgtaaaccaagggaatgggaaatgaaactatgctttaaaaatggcacctacgatattggaaagtttaacctaaaaaacaaaccaaaaaatacaatcgaaagattaatttatatagtctattctttaggtgataattctggcggcaatttagtatacacaaagattccttctgatgcagagaaagcagctgaaaaattatatgaaatgttacccaacgaagagtccctagatgcggaattaattgaattaagaaagttaatacaagaagttatttcaacacggtatagtttatgtaaactgataaccaaaagcattgcatatcattatggtaatatgcctttgatagtaaaatctgagattgaaaggttatttaaagctgggaaaattaaatatcttatgtgtacatcaactctaatagagggtgttaatttacctgctaagaccatatttataagaacacccaaaaaggggaacactattccatttacagaagtagaattttggaacttagcaggacgtgctggaagacaaggattagaatttcaaggtaatattgtatgtattgatactaacgataattcagtttggagtaatcctccaaaaatgagggataagtataaaattgaattcttcaccaaaaaaattatcaaagaaaaattccacgaattagtagaatatatatcaaaagatgcattcaaggaagatatatataatttggattatgaacatacaatttcatatttattaaaagtttatagcaagaaccaatccttgattactaaaagtttgtcacaattaataaatgaggatcaaattatacttttagaaaaaacattagaaaaattaatagaagaaatagacatcccaaatgatatactctttaaacatagtggcgtaagtcctttggctcaacaaaagcttaaaaattttttccagaaaaatgttgatattttggatatgttggaacctattaatcctacactccctgatgcgcctgatagatatgaattaataatacatatcattcaaaaggttatacctttcgatcatgtgaatagagctagatatttagcgtttctggtgactgattggatgaaaggactgccattaaattatctcatatctaaaaatcagcaatattgggataaaaatggtggtaagaatccacaaagagtaattagagacacctttaaggatattgaagaattcgccagatttaaatttataaaatatatttcatgttataaggatattttgaatatggtgagacaacaaaataatttagacatttcagatgatacagacatgcttaaattatggttagaactcggtgcttctagcaagaccgttatttcactaatcggaataggattcaatcgttcaacagcaattgaaattgcccaacaaattgattctgaacatctaaatagaaacgaagtcttggattatttattaagaattgataccacagggcttaataagattgtggagcgagaagtagcgcaagtaattgatttttataattga

SEQ ID NO: 59902 - DNA, 861 bp, Clostridium sp. C8
atatggacaaaaggtattgataattataacaggaataaaattagtttatttcttcttaaaattaatgctaatgaatttgattatgatttacttgtgaacaatttattagagccaatagcagattattctatttcaagaaaagtaaaggaagaatattgtgataaacctatgaaattgtcaaaaaaagcaagggaaaggtttgtaaattatgctagaaataatggagagcttggagaactattattatattgttttttagaaacacatttgaaggcacctaaaatattgactaaattggaattaaaaacttctactagccattatgttaatggtgctgacgggatacattttttaaaactacaaaatggaaattatcagctgatttttggagagtctaaaactatagaagaccttacagccgcaatttcagatgcatttaaatcaatttatgaatttaaaaacgagattaatgaaaaaggaaatagcaaaagtggtattaattatgaaaaaggactgattagcgataatttaattaaggaaactttttcagatgatgaaaagcaatttttggaaaagcttatatatcctaaaaaagatagtaattttgaagttgatgatgcatttggaatttttgttggatttcagatacaagtaacagatgaagataaaaaaatgcctaatgatatgtttagggataaaataaaaaaacagattgaatttgaagtgaataaaagattagaacacataaataaaaaaattgatgaatataaactatatggacataatttttatatttatgttcttccatttacagaaatgagtgagaaaagaaaaaaagtaatggaggaattaacaaaatga

SEQ ID NO: 59903 - DNA, 2547 bp, Clostridium sp. C8
atgaagtggatagagtcattagctcaaaaagcaatacaagatccttattttaaggaactattagaaaaaattgaaacaaaatatgcatataaatttttaaaagtttattttaatattaatttatctgaaaaagagtataatgatattttaagatttgcagatatattgtgtaggtcagaaagtgcagaagcaaaaaataaatcatataagatagtaagtttgttatatgagttttataaagaagatgttcagtataaactttatgcaagcaaaatattaaccaaacttggcaattttccatcattgaaattagcaattggtgaagaaaatgatttaggaactactgaaattattttggagaaatacactaaacaggtatttcaagaatcaccttttgaaggtgtaattttcacggatccacagtatagactttatgaagaattaaaaaagaataatcactatagtttttctggaccaacatcttttggtaaatcttttataatggaggcgttcataaattatattataactgaaaggtgcggagttgataatgttgtaattttggttccaactagagctttaataaatcaagtatcaaacaaattaaaagcacaaataaagaatgaaaggtataaagtattatcacatcctatagtgcctattatttacagaaaaaaagagtataagtatatatttgtgtttacaccagaaagattaatttcatactttgccaacagagataatccaataataaactatatgtttgttgatgaagctcaaaagattatttcgaaaaaagattctcgatctccgttatactatcattcagtattgcttgctgaaagaaaaagcgtaaagttgtattttgcttctcctaatataccaaatgcagaagtttttttacaattatttgagaaaagttcagaagaaaaaatggttatagaggagtcgcctgtatcacaaaatagattttttatagacctgataagaggaaatgtttcatttttttcagagtatggaaaagagattgatttgataacaggagatatttataatagggcaagtttaaatgatattctatcttatttaggaaaaggaaatcaaaatataatttattgcaatactgttgaagatactattgattttgcattatcttttgcggaaagattgcaggaatctagagatgaaagattggatgagataattgatctaataaaaagatatgtacataaggattattatttaattgattgtctaaaaaaaggaatcgcatttcatttcggaagattgccacaaagaataagagaaagaattgaaattttatttaaagataaagcaattgagtatatattttgtacatcaactctattagagggtgttaatttaccagctaaaaatatttttattcttagtaatgctataggacttactaaatttacagatatagatttttggaatttggctggacgagctggtagattaaatcaagagctttgtggtaatattatttgtttaagagctgttgataaattaaacagatgggataatttggataaagatttggaagttgttaaaactaaaaaaatacaaaaagttattccaagcgtaatttcaggtgaaaagaatttttataagaatatagcattatctttacaaaataatgagtttactagaaaaaatgcatcacaaacagaaaaagatatatggaatcattatgctaatataacatttatacatcaagctacaagtaatgagtcgttattaataaataagtttttaaagaaaaataaagaagcaaaacaaattctagaaaaagttgaaaagcaaaacaaaataccacaatatattttagagcaatgctctacaataaaaccaatttatcaaaatagcatttggaatatggatgacaaagaaatattatttttagatgacaatttgagtgttgactcgttaaaattagcattaaataagttgtatcaagtatataactggggcaaagaagagtctggaggacgcaatcctttggtgaaagatatatcaagattaaattactttgcagtattaatgcataattggatgaaaggtattcctttaaatatgatgattataaatttaataaaatactattcagaaaaaggtgctatttgggatcaagatcagtatgttaattttaatagaaatagtcgtagacatataaatattataataaataacttgatttctgatattgataatgttcttaggtataaactaaaaaattattttttaaattattatcttattatttctgaaaaatataaagataagaaacatatttctaattgggccgaatttttagaatatggtacaacagacttatctataattgaattgcaaaatattggactaccaagacatctatctttatttattttagaaaactatagccaatgtttaacatttgaagatggaaaattagtagagtttgatgagaatcttttaaaaactttaattacagaagaacataaggaagaatatatagaattaaaagaatatttaaactggtaa

SEQ ID NO: 59904 - DNA, 1617 bp, Citrobacter sp. MGH103; identical to SEQ ID NO: 58646

SEQ ID NO: 59905 - DNA, 2190 bp, Citrobacter sp. MGH103
atgacagagctctatgaacaggcgaaaaatagtctgcagggtgaggacttctcatctttcaattacctgtttgcgattaacaagctgttgtccaatcctgtttcgtatgacttgggacgggatttgatcgtacgtgctctcgattcgcgcgagcgattttccgagcacaccacaattttgaaaaatatggtgagaaaatcaggtttgttcccgtaccttaaaaaagagttcactggcctgacaccggacgacctgagggtacttgatctataccggacgccattctcggatggttacgttttccactcaatgcagttccatatattcgatctgctcaagtccggtcaaaacgtggtactgagcgcgcctacaagcatgggcaaaagtgcaatcgtcgattcgttgctcggcatgggaacgttgaagcggctcgttctggttgttccgaccgtggctcttgccgacgaaacccgtcgccgactgcaagagcgattcggtgaccgatatcagattatccaccacagttcccaagtgtgcaattccgatcaggccgtctacgtgttaacgcaggagcgagtgaacgagcgtgacgacatcatcgacattgacctcttcgtcattgacgagttttacaagttggcgttccggcaactcaaaagcgggaaagttgatcatcaagacgagcgagttatcgagcttaacattgcgttgagcaaactgctcaaggtctccaggcagttttatctgactggaccattcgttaacagcattcgcggtctcgaaagacttgggtatccgcatacttttgtttccaccgacttcaacacggtggcactagatgttcagacgttcggcatcaaagcgagtgacgacgaagccaagctcaaagcgctggcgaaaatcgcgcacgcgtgcgtcggtgcaacaatcatctattgtaagtcaccaactgttgccggtcgagtggctcgcgagctgatcaggctcgggcatggcactctgactgagagtcctcatattgactgggtcagccaagagttcgatgccgactgggattacacggtggcactcagaaacggtatcggcttgcattttggcgcgctgccgagagcgctgcagcaatacaccgctgaccaattcaatgcaggaaaactgcgcttcttactttgtacctcaacgatcattgaaggcgtcaacactatcgccaaaaacgtcgtgatctacgataaccgcgatggacctcgcagcattgacaaattcacccatgggaacatcaaagggcgcgccgggcgcatgggcgttcacttcgtcggcaaaatcttttgcctagaggaaatcccggaagacagcctcaatcaagaggtggaaattccgcttggtattcaagatattgataccccaattaacctcttggccagcgttcaaccagaccacttgtccgagttttcacaggatcgctttgatgaagtcttcataaacgagcgtgtttctatcgaacttgtgaaaaagcactcatacttccgtgtcgagcaactcgaagtgctgcaaagcatgttcgagatgatggacgacaccgaatttgcctcgctggtgtttcactggactcctgcaacaaacttcctcaagacctttgcaaagataattgccagactggttccctctacgttcagtcgcaatggagtccctgttaatcctactgatgtcatggtcgccaaacttgcctgttattcaaacgctgcaagctattcggaatatctgaaaaaccagattgatcgcgcacggcagtgggtgtctgaagaggaaaaacgctctctttccatcgccattaacaatgatttgaagctcatcaccaatactttcggttacaccctacctaaggtgctcagcttaatggaggatgtagtcaaataccatgcattgaagcgaggtatccgcagcaaagtcgattacacgcatgtcaaaatgacgttcgagaattttcatcttccgccaggtgtaagtgccttggaggagattggcattcccattcagacgttacaccggctggtagatttgctggaattttccgaccaagctgatgtggatgggttgtgccagtatcttcgggatactcaggacgtttggagtcgaacgattgggtttgtggatcagacgttcatcaggcgcgcgctcggtattgaacaacattga

SEQ ID NO: 59906 - DNA, 918 bp, Enterobacter sp. BIDMC87; identical to SEQ ID NO: 58614

SEQ ID NO: 59907 - DNA, 2031 bp, Enterobacter sp. BIDMC87
atgaacaatgagattaccagtgctactgacaatgatggcgaacatgtggcgcatgtattttcaaaatgcaaagaaataaacgaccttatcaactcagataaggaggatgaagccaggaatagtttaatccttcttttagattatcataaaaaacataaaatccattatacgcctttagttaatcatctcatcagatgcacagggttgtatccttacattcaggctgaaacagcagattggaatgaacgattaatctatgatttattcaaagttgacgttggtttaaacactccaatcactttacacagagagcaatccttaatattaaaaagattattaaatggtgaaagcttagctgtaagcgcaccaacaagttttgggaaaagcttcattattgatgcttttatatcattaaacaaaccgactaatgttctgattattgtccctacaatatctcttacagacgagacccgaagaaggttgcataaaaaatttgctgctgaatataaaataattacaactgctgacgttagcatttctcaaaagaatatatttatattcccacaagaaagagcaattagctacttagataaaattaatgagttagacttattaatcattgatgaattttataaagcaagtgagaatcatgacaaggaaagagcacctgctttattgaaagcaataatgaagttcacaaaaattgcaaagcaacgatattttttagctccaaacattagcacattgaaaagcaatcctttcacaaaaggaatggaatttttgaaattggatttcagcacagtatttttagaaaaacatgacctatcaaaacaaataaatgaggatcctcaaaaaaaatcctcatttcttttagatatccttgaaaacacagcaggaaaatctttaatttacgctggaacttattctaacatcaataaaatatcagcagcaattctcaacaatcataaaaaaagcgaggttaagttattgaaagaattctctgattggttgagattgaattattctcaaaaatggatgcttgcagatattattgaaaagggaacgggcattcataatggacaactacatcgttcaatcagccaaattcaaataaaactatttgaagaaaataacggattaaaaaacttaatatcaacttcttcaattgtcgagggagttaatacagcagcagaaaacgtaatcatatggcaatcaaaaaatggaaaccgcaatctgaaagacttcatgtataaaaatatcattggcagaagcggaagaatgttcaaacacttcgtaggcaagatatatttactgtctccgccaccaaaagaagaagataacgaattagatcttacaatacccaatgcacttgtcggcgatattgatgagacggagtttaaaaacgacctaactccagaacaaatttctgccatcatagcttataaagaagaaatgcaatcattattaggctttgaaacattcaatagattacaatcagaaggtgcattcaaatctaatgatccatttctaatcagagatattgctgtggatatatcaatgaatcctagcgattggttaagcatttcttaccttaattctgaaaaccctgaaagctgggattattttttatataaaataattaaattaaaaccggccggatggggagttgagtataataaatttgtttcttatgttaaaattgcaagttataactggaaattaaccatccctgaaatattaagaaaactctcaaaacacaacattacgataaatgaactctttgaattagaaagaaatcttacattcaaattatcttcattactgaatgatgtaaatgtattgcttaacgagctaatcccaaatagaaacacagacatatctccatttatctataaaacttcaaacgcatttctccctccaattgtttatcaattagaagaatatgggctaccgcgcatgattacaaaaaagattgatgatgctttaaatcttgtgacctgctccccgttgattagtacaccccgatgttag

SEQ ID NO: 59908 - DNA, 837 bp, Shewanella sp. Sh95
atgaatcagatctactggttccagcaaaacataagctacccagcgggagcctcacacagaggtgtctcaataaaatatgttgatatacaggaaagacgctctagctttatacgtgagctgaaaagcacggcattaaattgggtttactcgactgaaaaatataatcagttattcgctcaagagatgcaagcaagaaatggagatgttcaaaacacttgctcctacctaatgcaagttgctgatcataagttcaggaagggatgtcctcaaggccaatatggagagcttcttctattcaatttcattcaacatttcttccgtgcccctccactattaagaaaaatgtcattaaccacaaatcctggtttagaaaggcatggtgctgatgcgattcattatcgtgaagacaatataagtcaatgttttatccttggagagtctaaatgctatgaatcaaaatataaattcaatgaagccttacaatcttcagttaatagcatagtaacttcttttgaaaacattgaagatgaattgattttgtaccaactagatgactttatagaccctaaccttcaagaaatcgcgaggaagctaaaagatggcactttggcttcgcctcgctttgaattagtttgcctaatagcatatgaagagactcaaaatattgatggacatagccaagctgagattcaggaaaatattgaagagtgccttgcttaccgatggaaaaacgtgaataacaacctatacgcatcggttcgttctccgattatagagcggattcactacgtagtttttccaacttggtcactcagtgacttacttaatgaattttaa

SEQ ID NO: 59909 - DNA, 2505 bp, Shewanella sp. Sh95
atgaattttaaggtgtatgagcttatgacagatagaactatcattagggaattacttgaaattgagctcaataactttgcaataaaaatcaatttaattaattcagaatataaaaatataccttaccatctttgcattgcagctcttaaccttctcaaagatatttcgaataaagatgattcagatttaaatcgacaaattgccatctgcattatttcactactttggacgcattccgaagagtctataaaggataatcttagacaaataattactccaatcttgtcaactatgggcttttctcctagtgcgatgatgctcgacaaacaactacaagaagcgggtgtttattcgccaataagcagttatatagacaaattaagagtattaattcatgatagaaaaaaccaaattaatattggcaaaaaagtatacacgcttactggatttcaatcagagctttggcgagctattgaggataataaattaataggtatatctgctccaacttctgccggaaagtcattccttatatatcttaaattaattgacatgctaaaacgaggtgctcgcaaatttgtttatgttgtaccaacattgagtttaattagtcaggttacagcagatatatcaaagctaatgcgtgagcatgaaataataggcattgatgtattaaactcgtatgaggaaggattggatgagttcatatatgtagtgactcaagagagagctatttcattattctctgaatcaagagttagcaatttaaatatgcttgttgtggatgaaattcaaaacatcgagaaggtggctaatgagggagaagaccgttcaaaagtattgtatgatgttttgattgacgtacgaaatgatgctgatgttgacaaaataatcctaagtggccccagactcaaaaatattggaggcttaggctttagaatttttggacagatatctgaggaaatgcaaactgactccccaccagtattaagccttacctattcaatatccgaaaagaaaggaacttatctactaaacctgtattcaactctttttgacgtgccactacaaaaggtaattgaaaactctaatcacattaatggactagggcaagtacaatacacacagaagtttaacgaatacctacacaagactatctcttgtctatcagatgatgtgaatgttgttttttccccaacatctacacaagccaggaaatcggctgaacagttttcaaaatataaaaatccatctgaaagcaatgtattacagagtttatctaattacctaaaggactccgtccattctaagtatgaattagcaaaaattgtaaagtctggcgtagcataccatactggaaaaactccaatgcatgtcagaaaaagcatagagtatgctacctcttcacaatatattaaatatcttttttgcaccacaacattaatgcaaggagttaatcttcctgcaaaaaacgtaataattcgcaatcccaatctttttactaaaagaaaacaagagaatatcagcttatctgcttacgaatttgcaaacttaagaggaagagcaggaaggctactaactgatttcataggtagaactatcgttttggatgaaggttcttttagtgcagcaaatgaggaaagtagcagtccttcactatttccagaagaatataaagacattcgtaccgggtatcaagatatctatgcaatgcattctgatttcgtagacgatattttatatggagatcatgtagttgatggagcaccatcgaaagctctgattacacatataagacaaattctatataggcacggtaaagagaaaggaacctcacgtctcaaggatgttggaatttacttaccaccagatcttgctataaatgtgatggatggtctagataaattaaaagttgaaagagaacttgtattagctaatagatactgggatcctgtcgaccttgagaaactaactcaaatataccacgctcaccatcagcctctcgcaacaaatgtttttgaaccaagcatgtatcaaggttttttgcattggatgacagtcatgcgctcggaattcccttattattttaatcgctatcttggaaaagtcgacaatgacttatatatgtacggtattgcaaaaagtgccgagaattgggtacgagaaaagccactcaatgaaatattacatactagatttagctccaatgaggaatcaattgatgacaagatagattcggaaatagaaaaattgggtaagcatgttagctatggactgcccatgcttttaaaaccaattgcagatctagggcgacaaaattcaagtataatatccattattgaattgggcctacatactcctctggcaagatatctttcagatagaggggtacctcgggaaaccgcaataaagatcagcagacttcattcatcgaaaaatgagtttaataaaggtagagtcagacgaatgttaaattattgggagcttcagcatgtccagcactga

SEQ ID NO: 59910 - DNA, 1617 bp, Pseudomonas sp. RIT-PI-r
atggtgagtattccaagcccttcaaataagggtgggccagcagctcgacagggtttcaaataccaggatcacgtcgccgttgcgtttattttgaagatgctgcgtgacagtacctatctccaggtggaatgcgaaactgctgatgacatcgttgcggtttctgagaatgctggggagactgtcaatgagtacattcaggtcaagaccacagaaaatgataagaagtggaacctgactgaatgcatcaccttggagaagcaaaaagctgactcctccctgtttcagaaatcattaaaatgcgatgtgcggccgggcatagcctgcttcagaatcgtgtccaaacgcgatatcgcaaaggctctggagtatttcgccaaggagctgagcagacgggttactcccgatctagccacccagcgggggctgacgctggccaagcagctaaagaccgtatctgccagagggcgtgacttttcctattgggcagacaacttcgtctggcaggtttgcggtgatgtttcgtcgctggaggcaacgaatctgcgtgttcttgcagaggttatcgatctgtacggagagaccccttctcatcgccagcaaaaggatatctacgatgccttcctggcttgggccgacgatgctgcaactgctgatgtaaaaaccgtgcccgagaagaaaataatcagtcgtatggcggccctctcgcgactgaaagctctacttggtgcagctgcccagcactctgccgcctttgctaaaccctacaagaccaagcctgatccgttcttggtggagtttcacacgaccacggaggacggtttgctacgtactctttctggctttgacgttgattacgatttcgaggaatggcgatcccaacaactagcggagcacttgctgcagtggctgcctgaattctgtttacgtgcgagcgaaatcgccaatttccagatacaccacacgccaacggcgttggcgcgatcaatcaacacgttgacccaagccgccgtacctcgagatcgattgattgcagagttgatattgcatgccatcctgcgaagtcgggaacacagcgagccaatcgcatgtaaggtcttttacgcggtcaacggcaagctttccgagttcggcaatgcgcacatcgtccagaaaccgggtgaagcagaccagctatggcttggtttgtcgcggatgatttccaacggaacgatggatcagacactgaaagaaatttgcgatgtgctcgatgccaccatctccagagcagcgctaactgaggagcgagagatcattatcacgctccgcgagcctcatcaccacctacccacggccgaagccttcaacaaggccttgcaccgcaatgctcctgcgcaggaaatgctaagtgtgttgtgcttcccgatcctgctcgcctacgacagcgacgcgttgtccgaggggtacctgtctgattatctggccaacctcaagacagaggttacccagcactacaatgcgctggccaatacattaccgtcaaagatcaaacaagtccgggtagtggtcttcttggtgccgatcgagagcatccaccagctcgttcagaaatttaatgtgctctgcaaggctgctagctga

SEQ ID NO: 59911 - DNA, 2145 bp, Pseudomonas sp. RIT-PI-r
atgaaatacgatctcatcaaacagcagctagaggacctttacgatctcaaaggtgacaaatccggcctgctcatggggatgagctctatcgtgaacaagggtcatcccgaatgggagggccgtgacctggtcattcgggcgcttgacaagttcgagctgttcgatgaagtcgaacagtcgttgctgctcagcctagttcgtaccgttggactgttcccctacattaccccacatgtggagagcgtttcgttccccgaccggttggcctatgaggttcatcgagtggaagggattgagaaaggcatggtttttcatcgcctgcaggcacatgttttccatttgttgatgcaaggcagaaacgtcgtactaagtgcctcgaccagcgtcggtaagagccttgtgattgatgctgtcctcgcacagggcaagttccgaaaggttgtagtgatcgtgcctacgatagcgctcattgatgaaactcgtcggcggctggtcaggcgctttcgtcagcagtgcaacatcatcacgcaccctagccaagcggcaacagatgcccctatcaatgtgtacttgctgacccaggagagggtgcttcagcgtgatgacctaggtgatgttgatttctttgtcattgacgagttctacaagctcgaccttgccagcgattctgacgaaaagaatcgatctattgatctcagccttgcttttcacaagcttgcgaagctgaatgctcagttttatctactcggcccacacattcaaaacatccaaggcctggatgggtatgagtacaatttcattccctcgaacttctcgaccgtggcagtcgacgtgacgcactacaacctgcgaacgcgcggcgacacgcgaaaggataagcttcttgcgctgtgctcgcagatcacctccccgaccctgatctactgccagtcaccggcaagcgcaaatcgggtcgcgcaatatttaatcgatgagggggacttctctgcgcttgatggcacccgtgaaatttcagaatggatcgcggataactaccatcctgcctggaacgtagcgaaggcgatttcgctaggcatcggcattcaccacggtggcgtaccaagggccatccagcaatattttgtgaagttgttcaacgagcgaaccattcgctacatcatctgcacgtccaccatgatcgagggggtgaacacgtcggcagagaacgtcatcatctatgaccgaagaatcaacaacagtccctttgattttttcaccttcaagaatatttccggacgcgccgggcgaatgaatcaatacttcatcggtaaggttcatatgctggaagagccaccagaggagaagagcctcatagtcgagtacccaatcggcttgcaagacggggcgtcccctatgggactgctcatgaaactcgaacccgaatacctcaccgaccagtcgcggcagcgtcttgaggctgcctatgcgactcctcagctgtccgtcgcgacgctgatcgaaaacaggcacattccagtcgaacgtcaggtcgaattggccgaccgcattctgcgagagctcgcgctgggtcgcgtatggctcacgtggaaaggtaacccagagcaaaagcaacttgagtatctctgtactctgatctatgagcaccttcctcatcggctgccggagtatggtatccattcagggctgcaactcgcttggcatatcaatgccctcagagcccagaaagacttcaaggcctatctccagcaggcgattgatgaggatggctccgaccggactcccagcgagtcgatagggcaacggctcaagctcatacgcaacgtcatttcataccgccttccccgagacatcatggcgctgagcaagatccaagcggacgttttgacccgcaggggcatcgagccaggggactttggctttttcgccgaacagcttgaaaacctgttccatgatccgctgctcaccgcgctggatgagtacggtgtgccgacgcagatctcctcgaaattcaaaggggcgatcttaccttcagaaaaccttacccaactactcgacaagttacgcgcatgggcacctagaatcgaatcagcgccgttgacacacttcgaaaaaagcatcgtaaggtgggctgtagacgaaatctaa

SEQ ID NO: 59912 - DNA, 870 bp, Paenibacillus sp. A59
atgaatcatgtccacatatttaatcaaagctttaatttgttacctgacaaaaatcattttggaacatgtattaattatgttgatttgcaagaatttcgcgaagaatttttagaggagctagttaatacaatttgtgaatgggtttatagtgacgaaaaatctaaatcaataataaatgatgtttttattaaagaagagaacagaacagttcagaatgctcaatcaaaattaagaaaaatcgctttaaagtattttagagatcgtgatgatagagatttaaatcttcagggtcaatttggtgaactcttgctattcaacttcgtccaacatttttttcgtgcggttcccttgttgagaaaaatgccaatcactacttctacaggtcatgaaagattcggttctgacgcaattcattataaatacgaaaatggaaaaaatctgatttttcttggtgagtcgaaaatttatacgagaaactatagattcaggcaagcttttgagaaatctgttacaagtataatatcaacatatgcaagtcatagaaaagaattaggcttatatacctatgatgattttttagataaacaactagttgaaatagcgagacagtataaacgaggggtgttgaaaaatactgagattcatatggtttgtttagttgggtataatgaaactggtcatattggtggtgatagcgaagatgccattaaagctaacattgaacgagttttaatagataagtgtaataatttagataaagctttttttgatggagtaacgctacctcttcttaatagaataagttacatactattcccggtctgggaactcgataagcttgtggaaagctttcagagtgaaataagatag

SEQ ID NO: 59913 - DNA, 2538 bp, Paenibacillus sp. A59
atgagtattagttatttagtagaaaagcataatcttgaaataataaagagaatgttacttgttgagcatgaaaatattgcataccaacttggcttaattaatagaccaccagcagaattagaagatgaagaattatcagaagttgtaggattaattgatgagttatcaagggaagaggtagaagaatcacaaaaattaacaacacttttatgtgcattactatggaagtataagaaggataaatggacaggtttaagagaattttttttagtggttctttccagaatcggattgtcacctacagctaatatggtcgatgatgagtacgaccttgaatcaagaaaacataatcgacttaatagtcttatttctgaaatagctgtagccataaataaattgaaatacgaagtgactattggaagagaaagtttttcgcttaccaaatttcaaaaaggtttatgggataaaattgattctcatgaggttataggggtctctgctccgacctcagcagggaagtcatttactattctcttgaaatcaattgaaatactaatgagtcagggagggactttagtatatattgttccaaatctgagtttagtatcacaagtttcctcagattatagggggatgttaaataagttcggcttaagtgattataaaataatgaatacatattatgaaggagcagacaatactaaaacgatctatgttttaacacaagagagggctattggggctttcgctcataaagataatccatttgctaatttaagattgttagtagttgatgagattcaaaatatagagagagcctcaagtgaagatgaagaacgttcaaaggtgttatatgactctttaattgagtttagaattaactcaaagccaaataaaataattatttcaggcccaaggataaataaaatacaaaatgtagccgaagaaatatttggcgaggaagcagcagaagaagaaactacacaatctcctgttgtgaatatcacatattcaattaacaaaaaaggtgaagtgtattatttaaaacagtattcggatgcattagatgagccaactgcaattgtaatcacaaatattgaaaatattaatggactaggccaaaaagtttataaacaaccatttcacgattatctgaaatttatattaaaaggtcttggagaagattccataaatataatcttctctcctactactacgcaatcgcgtaaaacggcgttgtcgttaataagtgaatatccggaaagcaatcgaaaggaagttataaacttaattaagtatatagaagccaccgttcatccgaattatgatgttgttaagaccttaagaagaggagtggtctatcatcatggacggctaccccatcatgttagaagagttattgagaaagctgtaagttataaacttataaataatattgtttgtactactacattgatgcaaggagttaatttgccagctcagaatgttattataagaaacccaaatttatttattagaaagaagcaagatttatctccaaaattgtcaaattacgagtttgcaaatcttagagggagagctggcaggctattgaaagactttattgggaggacattcatcttagacgaaggttcctttattgatgaagatgagcaattgacatttttcgatgatactgttaaagatctggagattggttattctgaacgatttaatcaaaataaaaaagcaataattaattgtcttgaaaataacatatcccctagcagcgaaatgaaatattcttatctattgccatatataagaaactgtgtgttgaagtatggaccgaaatcaaaaaaaaacttggagacggttggtataaatttatctgaggatactttgaactcagttagtaggaatcttgctaagttagaagtacctattgaagtgtgcatatcaaatcgttactgggacccacttgtcctagataagttgtataaacaaagacatgcgtttaatcttccaataaccacaagggatcagaatgttgttcacaaattatttagtgctataactcttatggaaaaaagttataaatattattttgtaaaatatctaaatattgataaccctgatcttattcaatctttttgtataaatgcagataaatggttgaaggaaactccgctgagtgagattttagatactccatatcattcaaatccagataatattgagaagacaataagtaccttgcagaatactgtatccttcaaactaccagcacttttaaaaccgatttttgatattttacaccctgaaaataattttttatcatttgttgaaatgggagcatatagaattaaaacgcgaaggttaattgaaatgggagtaccgagagaaactgcaatctatttatcaacatacttgttacagaaccttaatgataacgacgaagatttagagaaaaatattattagtaagttgaaagctaattatatgaaattagatttttgggtgaaagcacagttagaaaccatcattccaatgatgtag

SEQ ID NO: 59914 - DNA, 981 bp, Pseudomonas sp. TTU2014-080ASC
gtgacagcagacgtagaaaactatttcgatgcactacttgagccggttgacggactggaaaacgtcctcaaggaagtttctgcctcgccacccctcaagcaacctcgattgctatttgtccgatttcgagagcacgagccgcaaactaatgagtttgtggagcttttatctgaccacctcgtagactacgcgatacctttgactaagcgccagcaagcaaatgctcaaggtgctaaatctaatacgggcggcagcatggctgctgcatctagattgaggcgcgaagcaatccgtttgctggtcaaatacagtaaggaaaactctagtcgttatggggagattggggagttgatctcctatgtagttgctgttcacttccttcgtgccggccaagtaggcgctaagatggccctaaagacatcttcagaaatgcccgtccatggcgctgatggactacatgtcagagcgaaccctgacggtacagtgacattttttttgttagagtcaaaaataactccaagcgcggcggatgcgtctcgtgaaatggtcgattctgtatcggaatttcaggctgatcggggcaggcgactgaacgagctccgtcttgtaagcgatctatcaaatcttgaggcactacaaggggaacagcgcgaagccgctaaatctttcttcaatgtctattcagggaacggaaaccatctcaagcgcagagatatacacgtaggaagtctcgtctttagcgaagaggcctacaatgagaagctagaacgagatgctgaacagcccatcacaattcacgaagatcacttcgagtctcaatattctaccaagcaccctagattccaaaaaaatctaaccaaccaagcagcggctaagaatgtggatcttggcggttgcatagtcttcttggttgcagtgcccgatgtctataagttgaaacggatattcgccgagctgaacaatgaacacatttgcgactga

SEQ ID NO: 59915 - DNA, 2649 bp, Pseudomonas sp. TTU2014-080ASC
atgaacacatttgcgactgaagtagcacgagatatacgtcgggaagaagcattctggactgacctggctgagcttagagcagtaggcattcgttcaacactttctgcagccgctcaagctgcggaagtaaaaggccccgagctagagggcgcgactgtagccagactcctcagctccgctagcatttttgcccaggccaacgatgaacaaagtcgtgacttagcccaacaaattgcagttttttcctcccttgcttccaatgatgaagcagtgcatcaggctgtagtgcatgtaatgtcagatttggggaattttcctggcctgaacaagcttgagcaggcgacagccgctgtcgaaaatttccaagcatatatgcggcgacatctgcttgaagaaatcaatactgttgaaatggcaggcaagagagtctccctaaccgagtttcagttggatgtttggggtagcttaaaatctagcattgcagcagcgatatcagcgcctacctccgcaggaaaatcatacgtagttctcgaacatttgtgcgagcgagcaattacggaagcaaactttaccgctttgtacattgcaccaaccagagcgctactgacggagatacaaggaaaactagagaaacgtttgtctcaagtctcctctgagcttcgaattacgaccattccagttcttgatccctcgaagcgccctaaacaaatttatgtcctcacccaagagcgagtgcagttgttgctctcgaccgtagacctttctggagttattgatctagtagttgtggacgaggcccaggcgatgggtgatgacagtcgcggcatgatattgcaggatgtgctagagaagataaaaatatccaaccacaacgctcgcttcctgtttctagctccaggtgcaagcgggtttcagcttataggagatagcgttggattacctgaaatagaagttaaggaaacttcactatctccggtggttcagaatcgcattaatgttcgtttctcgatgcaaaatgaaaatctcgttgagctagagcttgtcacgccaaaaaaacttgagactattggttcctatgttttcaagcgcggctttgcattgaaggaagatgctaagctcgcggcggtagcccaagagtttggagtatcaggccgatccttagtctatgccacaggcgcagccaacgctgaggcattagcaggcctcattgccctcaatcgagaatctaaaactacagaagcgctgcgcgagctatcaaaattcatcaaacaacatatccacaaagattactctctggcggagtatgtactgaagggtgttgctttccactacggcagcatgcctagtttactgcgcgaagggattgaagatacgtttcgaaaagaagatttggattacctttgctgtactacaactttattccagggagttaatctgccagctcgaaatgttttcatcgatacacctacaagaggaaacaaaggtgagcctctcgacgaggcagcactttggaacttcgctggtcgcgcaggcaggctcggagaagaggttgtcggaaatgtcttcttggttaattatgaaaactgggaatctcagccgcttaccgagcgaaaaccattttcagtaaaggtcgctttcaaacaaacgatagaagatgagtttgaatcggtagtcaaggtccttgagttcgcagccactgaagcgcaagacggatctgttcgtctaggtactgacgagcgaataaccgccgcggcgggtctagtgctctatcgttccgctcaaggaagtcttggtgctcttctaggacgccccagtctccagctcactgacgcgcaaaaaataacactcaaaagttctgctgagagggcactgttggagctaggcttgccagagcaggtgctgacaagcagctggatgatcgaccctatagcattgacgagtctgttgcagcgattgcgtcaaggagtgaaaaaaggagagtttgaaaaactgattccagtaaacccctcctctgactcatacaaagtttacaatggcataattcgtcgattgtacaagcatttaggaggtttgactctttcaggggaggagggccaaagagctcgcggatttgttaatcatgtaactgttactgctttaagctggatgagaggtgagccacttacgcagttggtcagggagtcggttaaatatcacttaaagaaagcatctgaagcctctaaaaaaaatcgcaatcaagcgataattgacgctgcgattagaaatatgtttagcctggtcgagcagacaattcgctttaggttagtccagtgggccaaggcatatgtagatctacttcgttttgtgttggcagaggcagggcggagtgatctcattggtcaagtctacgatttctccctagcgttagagctaggcatatctaccgaaactggtcgttcactggttgagcttggtctttcgcgcattactgcctctgtaattgcttcattgataaccgactcgtcattgacgccggagcaagttaaggagtggattcgtaaccaaccaaatgtgcagttgcttcaactatccagcctcgtaatcgctgaactacgggctaagcagcttcttactccagaggctgaattagaggtagggactgaggattag

SEQ ID NO: 59916 - DNA, 1641 bp, Methylobacterium sp. GXS13
gtgaagatcgatcgtggtccggggggctgggtgacgaagggttcgacgggggcgtccgacgcaggggggatcgcggcgcggcgcgggttccgcatccaggaccacgtcgccgcgaggatcgcgctggagacgctgctggatccggacgccgtcaggctggagtgcgagaccgcggacgacatcgtggtccggcgctccggggcgggcgggctaatcaacgagtacgtgcaggtcaagaccacggaagccgacagcaagtggaacctgactgaactggccgctcggacgaaaggccggaagggaagttcggtctgcgagcggtcgctgttatgcgacacggacggcgacacggcctggttccgcctcgtgaccaccagggccgtgtccgccaagctggtgccgttcacgcgtgagaggggacggcgggacggcgaggcggcgttcgaggcgttggtcggcaacttcgcgaagaagtacaaggacacgaagtcgaactcgggccgcacgttggccgactggtcgaggcacctgctctgggaggtcgaggcggacgaacgctccatccacgcgcgcaacacgaagaccttgctgaccctcgcccagggccgcggcctcaaccccgcgttcgacatggtcgagggcgtctacgagcgattggtgagcaagacccgatcgatgggtgacgcgccgtcgagcgagatcgccgacaaggcctggacccgcgccgacatcatgacttggtgggaggagcggctggcggagatgcgcgctgatgcggccgaccacgtcaaggtctaccaaatcgtcaacgtgccggcctttttctccgagctctgcgcggtggacgacggcgccgtcaagcgcgccctctacgcctacgacgtcgagtacgacggtaacgtctggcgcatggacgagctcaccgagcacctgctggactggctgcccgaggtggcgctgtcgccgcggattctcgcgacgtacaaccacctatcggcgcggcggctgccgggcgaggcgctcagggctctggagcgccgcggaccggtcgacgtcccgggcctcatcgccggcctcatgctgcacgcgatcctccggcatcactttggggcggagccgatcgcttgccggatcttcttcctggtggggggcgcgatgcgctcgacgagcgcgcacattgtccccctggcgggtggcgatgagatctggctggggcgttcgcgcctggtcgcagccgactcgcaccgcgcggtgatcgacgaggtgctcgcagagctgcgcaccgcggtgacgcgcgacgtgctgatggaggaacgtgacatcatcatccagctgcgcgagccgcgccacctgcgcgccgataccctggacggcatcctcgtctcgaccggcaagacctcggacctgctgagggtcgtccggctcccgatcctggtggcctacgacagcgcgacgctgggcgcgggcttcaacgccgcctacctcacgctcctgaagcgagaggtccgggacgagtacgatcaaatcaaggctgggatcgacgacgagctgcgggacgtcgaggtttccctgttcctcgtcccagtcgagtgcgccgcgacgttggcgcggaccttcgaggcgcgcctgaggaggcgatga

SEQ ID NO: 59917 - DNA, 2169 bp, Methylobacterium sp. GXS13
atggagatcagcctcatccgggaatgcctcgccgagccggcgaggctcgccgaggtgcggttcccggtcttccgggagatcgcctacctcgcgaaccacgagcggaccgcagcgctcgcccgggacctcgtcatccgcctgctggcggtcaagcacacgctcccgaaggactacggggcgctcctcgatgccctggtccgcgaggtcggtctgttcccctacgccgacaggaccctgcaccgcagcctggaggaccagatcctgatcgaggcgcaccgcgtccacggggtcggggaggagcgcttcttccacagcctgcagctgtcggtgttccaagagctcgccgccggccgcaacgttgtcctgagcgccccgaccagcgtcggcaagagcctcgtcgtcgacgcggtcctggcgacgggccagcacagacgcgccgtcatcgtcgtgcccaccatcgccctgatcgacgagacccgaaggcggatcaccgcgtccctgggccggacccacgacgtcatcacgcatccgggccaggccaggcgcgaggacgggcggccgacggtctacgtcctcacccaggaacgggccctgggacgcgacgacctcgacgacgccgacttcctcgtcatcgacgagttctacaagctcgacatgagggacggcgacgacgacgagagatccatcgacctcaacgtctgcttccacaggctcgcggagaagggggcccaattctacctcataggaccgagcatcgcctccgtggccgggctggccacgggataccggcacgtcttcatcccgtcggacttctccaccgtctcgctggacataacgtatttcggcctcaagcaggacagctcggaccgggcggccaagctggtcgagctgtgccgcgagttgacgagccccacgctggtctactgccagtccccgcgcagcgcgcgggatgcggcgcggaatatctacctcggctgcgagctgcccgtctgcgaggcgaccgcggacgccgtccgctggctggagcgccattacccgccggaatgggaggtcatccgcgccctggcgcggggggtgggcgtccatcacggcaacgtcccgcgagccatccagcaatacatggtccgggcgttcgaggaggggagcatccgctacctcgtgtgcacgtcgacgatcatcgagggcgtcaacaccgtcgcggagaacgtgatcgtcttcgacaggcgcaggaacacgcggaccatcgacgatttcaccttccgcaacatcgcgggccgcgccgggcgcatgaaccggtatttcatcggcaaggtcttcgtgatcgaggaggcggtcgccgagggggaccatacggtcgacctgccgatcggggcgcaggacggagcgacgcccctgtccctgctgttggcgttgcctaccggcagcctgacgccgggttcgcgggatcgcctcgcggaagtgttcaggggctcgcgcctcgccgaggccaccatccgcgccaatcggtacgtcccagtcggcgcgcagaacgccctcgcggacgccgtctcggacctgttcgaccgggatccaaggctcctccagtggcgcggcgtccccgactcggcccagttccgcgccgtctgcgacctgatctacgaccacgtcgaccagggcaccgtcctgaggcggcacggcatacacgccggcgaccagctccaggccgtgctgaccagcctgatggccgccggcgatttcggcgcgttcatcgcccgacgcgtccaggagcgatggcggggcaccagtgtaagcgaggcggtcgagggcgcgttgtccttcctgcgcaagtacgtgggtttcacgttcggccgacagctgatggccgtgagccgcatacaggccgacgtccttgcgcgccgaaagcgcggcgcgcccggtgactacgccctcctcgccgcgcgggccgactccctgttcctgcccgccggcgtcttcgccctggacgagtacggcatcccggccgagatcgcgtcgaagctgatggcggcttggggggaggtcgccgacgtcgacgaaggcttgcggatgctggcggcgctggacctggagcggctggacctgcagccgttcgagcgcgaagtgatacgccacgtgcgcaaatccctgccgtcgcgcgcctacgaagcttga

SEQ ID NO: 59918 - DNA, 954 bp, Erythrobacter sp. YT30
ttgtcgacgatctcaccagatgacctgcaagagattatcgcgggcgatcccgaagaattggatgtacatctgagcctgatcgaaaaggatttgactgttgatagctgcagtgtgcgcattcattgtcattgcctgaatattgatggaaacgggcgggtcaaccccaagcgacttgcagaattccttcgcaacgcgattgccgactacgcaatacccaagagtcgaatgcaagcagcacgtgagcgtgacgcgaagttcaaatcttcaagcgccacaaccgctcttcaccacgaagctgtctcgactttcaccgatctctccaagactggagaaggtggagaaatgctcctctacatcctagcagagcgcttcttgggattgcctcaagtcctttgcaaaatggacttaaagacagattctcgcatgcactatcatggagctgatggagtttacgcgagtgtttcgaacgaaggtttattgaagctcttttggggagaatcgaaagtatatggcgacccggcgaccgctattcgagactgcctgaattctcttgccccatttttgctggaagaagaccatgaaggttcatctcgcgagcgcgatttggtcctccttagcgacaaggctgatctgaatgatcccgaattgacagcagccttcaggaaatacttcgacaagacttctactcaatcaaaccgagttgaatactgcggtgtggcgctcgtcggattcgatgctgacttttaccctggaaaagacgaaaagggagtagctgaagacattgctaaagcagcgaaagctgagatgacgaaacgactcggaaatgtttccaagcggattcttgaggagaagctgcaacatttcgatattcagttcctttgcgtgccgatgccgtcagctgaaggttttcgtgcgagtttcctagaagctttgggtctgaagcatgaagagtga

SEQ ID NO: 59919 - DNA, 2607 bp, Erythrobacter sp. YT30
atgaagagtgaggagctatttgactggctgatcgatgaggctctttcgagtgagatcgaagcggttacccagatcacggtggcattagagatcgacaacatcactgaagttgaccgggaagaagatggcgagcggaccttcgattggaatcgcctgctcctagccgcaagcattttggccaagtctcaaacgcggaaacaccaggaagcggctctgcgcattgctaccgcggctatctcgctgtcggccgaaatcgaagtgagggacgccggagccgtcttgttagaaaagctgtccaaccatagggcagcgaagttagccgaagaccgagaacttgtgaaagcgaataggaatgagcggctcggtgtttcaatgcgccttgaagcgcttcgccgcgagatggaggattcggttcttgtcgaaaccgatggttcttggttgaccgtcaatgactttcaacaaaagctttggtccggtgccaagacagaagacacatgggtttcagcctccgcaccgaccgcatcgggaaagacattcctgatactgcaatggctcaacaattacgttcgcacatcagaaagccgcgtcgcagtttaccttgccccgacgcgagcactggtcacagaaatcgaaagcgagttgaagacccttctcaaggataccgaaaacgtctcagtccattcgatacccttggtcgaaaagtacaccgaggctcgagcgcaagacaagaaagtgatattcgtcttcactcaggaacgcctgcacctactgataaacatgctcaaagagaattgtctgatcgaccttttggtcgtcgatgaagcccacaagatcggagacaatcagcgcggcgttatcctccaggatgcggttgagcgaatttcaaggatcaaccccgccttgaaggctgttttcgtcagcccagccacgcaaaacccagaagagcttctaaccgatgcgccagatggcatagctcaatcatcaatcgacagtgatacgccaacggtccttcaaaacgtgatcttggcggagcaagttaggggcaagccaaaagagtggacactaaacttggtgcgagaggaaagcgacctgccgttgggggtcttgcatctcgataacaaagctggaaccgtaaagaaaaaactagccttcattgccgccgcagctggggagcgtggcggaacgctagtctactgcaatggagcggcagaggccgaagatgtcgccctactcattagtcagctactcgacgagcaagatgataaagatcaggagcttcttgatcttgcagatttggcccgaaaggcagtccatcgagattaccagctagcccctttggtggagcgcggcgtagcctttcactatgggaacatgcctgcgctcattcgaatggagattgagcggttgttcaagagcggtaagatcaagtttctggcctgcacttccacgctcattgaaggcgtaaacctatcgtgcagaacgatcgtggtcagaggcccccgtaaaggtcggggccacccgatggaacctcacgatttctggaaccttgcagggcgtgccggccgctggggcgatgaatttcaaggaaacataatttgtattgagccaactcacccaacagcctggccgatgggcgtgcctggaagatcgcgctatcctatcaaacgagaaacggacgcggttctagggcagaatgaggatttagcctcatatcttgaagcacggctgtccgacgacaacagcaacatctcgaactcggatgaatttgaacaagttggtgcgtatctgataaacacctatttgcggctcggctcactttctgcggcaccgttggcgaagcggcatagcgcagaaaccattgaacttctcgaatccaaactcacgcagatagcagatgaaattgaccttccaatcgagttggcaatccgccatcctggcgtaaacattattggacttcagcggttgttggaggcttttcgtgcttacaagaacgacccctcaaatttattgcctgtgccgtccgaaagcgttgacgcatatgatcgcttcgtaacgatcatggagcgggtcaatgtgaacgtcgtacccgtttttctgccgcctggtctaattccacttcattcgttgatcgttgtcgagtggctcaaggggtattcccttgccacgattatccgaaaccgcatcgactatcaaaagcggaatgggcgctcataccggctacccaatctcatccgtgagacgttggaaattgttgagcaaacggcgcgcttcaaggcccccaaatacctgtcttcttacgtcgatgtcctcaaccatcatctcgttgaagttgagcgctccgacctgatcgatgaggaattcgatattggtgttgctctagaatttggcgtctcgagtaaaactttgctgtcacttatggagctggggctatcccgaatgactgcggtcgaactctatgaaaagattgctcaggatgacctggataggaacggctgcgtgagatggatacaaaggtatgcacctgaattcgaagggatgaatgtccctaatctcatcaccaaagaggtattagagaaggtgccattggcagacacaactaggaactaa

SEQ ID NO: 59920 - DNA, 948 bp, Sphingomonas sp. Leaf9
ctgtcgacgatcactgcgaccgatctcgaagccgcgttgacgggagatccggaggcgctcgacgtccatctcactttgatcgagcgggatgtgatcgtgaccggacagtcggtgaaggtgcactgccattgtctggcgattgacggaaacggacgggtccagctaagacggctggccgaatttatgcggaatgcggcggccatctacgccctgccgcgctccaagattgcagaggcaaaagcacgcgatgcgcggttcaacagcaccgaggcggtcgccgagctggtggagcgggcgaagcggtcgttcacggacctcgccacgaccggtgagggcggcgagatgctcctgtatctcctcgcagagcgcttcctcaagctcccgcaaatcctctgcaagatggacctcaagaccgatagccgcgtgcactaccacggtgccgacggcgtgtacgccggaatcacgtcggaaggcgtgctcaagctctactggggggagtcgaaggtctacgcgaccccggccgcggcgatctcttcgtgcctcgactccctggcaccgtacctcatcgaacccgaccacgaagggtcggaacgcgaacgcgacctcctgctcctcagcgacaaggccgatctcaccgacgagcgcctgaccagtgcactcaggaagtacttcgaccgctcctcgccgatgtccaaccgagtgcggtactgcggcgtcgcgctagtcggattcggcgtgccgttctatccggcggagggggcgtccgcgcttgccgacgagattgccaaggcggcgaagacggcgctcgtcgaatgggtcggcaaggtcggtgaaggggtggtcaagaacaagctcgagaccttggagatcgagttcttctgcgtgccgctgccatcgtcccaaggctttcgggacatcttcctcgaagtgatgggcctcgcgaagtga

SEQ ID NO: 59921 - DNA, 2625 bp, Sphingomonas sp. Leaf9
gtgagcctggccgacctgcaggcctggctgctcaaggaaggggtcggagacgagatcgcggcactgacccggatgacggtgcgatccgaattcagcggcctcgccgtagacgacggtcccggtcccgaagacttcgactggcagaggttgatactcgccggcagcatcctcgcaaggtcggaacggcggggcgatcaggaggctgccctccggatcgccgtgtccgccgtctccatggtcgaggacgcgcaggtccgggacggaggcgccgtgcttctcggcaaactctcgaacttccgatcggttgacctggcggtcgatcgcgggctcatcgccgggaggttggacgaacgtctcggcctgtcgttgcgcatcgaggcgcagcgccgggaaatggaccggtcggtgctggtagagaccaccggacgatggatcgaggtaaacgagttccagcagcgtttctggaccggagcatcgacttcggcatggctctccgcctccgcccccacggcgtcgggcaagaccttcctcgtcttgcagtggctcgtcgatcagatggggacaggcggttcaacgatcgccgtctacctcgcgccgacccgagcgctcgtctcggagatcgagtcgaacctcgaaaccatgctcaagggccgccccggcatcgtggtgtcgtcactgccgctcaggacgaagttcgacgccgcccgctctggaggctcgcgcctcatcctggtgctcacgcaggagcgcatgcacctgctcgcgaacgtcctcggcggcgacttctcggtcgatctgatgattgtcgacgaagcccacaagatcggcgacgacgggcggggcgtcatcctccaggacgccgtggagcgcgccacgcggctcaatccgcgcctgaagctgatcttcataagtccagcgacgcagaaccccggcgaactgctcgccgacgcgccgcccgacgtccagaccgtcgccgtcgacagcgacgcgccgacggttctgcagaacctgatcctcgccaggcaggagaaggggaagccgcggcgctacgcactcgccgtcaggcgtggcgacgcggaggtcgaggtcggcgttctccagcttccgagcacgcccgcgaccttctcgaaacgattggcgtttgtcgccgccgcggcaacgggtgcgcggggcggaaccctcgtctacgccaacggcgccgccgaggccgaggacatcgccgacttcatcagccagctgcagcccgaggcggatctcggggacgtccatccggagctcgccgcgctggctgacctcgcgcggaagggggtccacccgcagttccgtctggctccgctggtcgagcagggcgtggccttccatttcggcaacatgccctcgctgctgcggcttgagatcgaacgcctcttcaggtccggcaggatccgcttcctagtgtgcacatccacactcgtcgaaggcgtgaacctatcgtgcaggacgatcgtggtacgcggaccccggaagggcaagggcaacccaatggagccccacgacttctggaacctggccggtagggctgggcggtggggcgacgagttccagggcaacatcgtctgtctcgatccggagaacgtaacggcatggccgagcggtgtgccgctgcgcgcccgctacccgatccgccgcgagagcgatgccgtcctcgacacaggacatggcctcatcaactatcttaccgcgcgcctggaaggcagtcccggcgagctcgacggcgtggaggagttcgagcaagtgggagcgtatctgctgacgacgttcatgcggctgggatcgatcgcgaaggctgacttcgccaagcgtcacgatcccgcgttcatagcgaagctggacggggtgctcgagacaatcgccaccgccatcgagatcgaaccagcgctcgcgtcgaggcactcgggcgtgagcccgataggcatgcagcgcctgctggagacctttagacgctatccgggcgaaccagagaacctcgcgccggtggacgttgccagcgacgactgcatggaccgcttcatcacgatcatgcgcaggatcaacgcgagcctgtttccggctttcaccccggacaagagggtcgcgctctatgcaatcatcgtgctgcaatggctggagggcaagtctctcgcgaggattatccgccgcaacatcgcgtggcatgaggatgtcggtaaggactaccagctaccggccctaatccgggacacgatggcgctggtcgagcagatcgcccgtttccgcgcgccgaagtacctgtcggcatacgtagacgtgctccatctccactacctcgagatcggtcgcgaggacctaatcgaccacaacatggacattggcacccagctcgagttcggcgtgtcgtcacgtacgctgatctcgctgatggagttgggcctgtcgcgcatgaccgcggtcgcgctctacgagaagatcgccagagacgacctcgaccagacgcaggcgcttaagtggatggccgatcgctcggaccggctcgacggcatggacctgcctgtggtgatcgtgcgggagcttcgggaaaggctaaccctcgatgacggcgtggaaccctccaatcagacaacaacatga

SEQ ID NO: 59922 - DNA, 948 bp, Sphingomonas sp. Leaf11; identical to SEQ ID NO: 59920

SEQ ID NO: 59923 - DNA, 2625 bp, Sphingomonas sp. Leaf11; identical to SEQ ID NO: 59921

SEQ ID NO: 59924 - DNA, 948 bp, Sphingomonas sp. Leaf62; identical to SEQ ID NO: 59920

SEQ ID NO: 59925 - DNA, 2625 bp, Sphingomonas sp. Leaf62
gtgagcctggccgacctgcaggcctggctgctcaaggaaggggtcggagacgagatcgcggcactgacccggatgacggtgcgatccgaattcagcggcctcgccgtagacgacggtcccggtcccgaagacttcgactggcagaggttgatactcgccggcagcatcctcgcaaggtcggaacggcggggcgatcaggaagctgccctccggatcgccgtgtccgccgtctccatggtcgaggacgcgcaggtccgggacggaggcgccgtgcttctcggcaaactctcgaacttccgatcggttgacctggcggtcgatcgcgggctcatcgccgggaggttggacgaacgtctcggcctgtcgttgcgcatcgaggcgcagcgccgggaaatggaccggtcggtgctggtagagaccaccggacgatggatcgaggtaaacgagttccagcagcgtttctggaccggagcatcgacttcggcatggctctccgcctccgcccccacggcgtcgggcaagaccttcctcgtcttgcagtggctcgtcgatcagatggggacaggcggttcaacgatcgccgtctacctcgcgccgacccgagcgctcgtctcggagatcgagtcgaacctcgaaaccattctcaagggccgccccggcatcgtggtgtcgtcactgccgctcaggacgaagttcgacgccgcccgctctggaggctcgcgcctcatcctggtgctcacgcaggagcgcatgcacctgctcgcgaacgtcctcggcggcgacttctcggtcgatctgatgattgtcgacgaagcccacaagatcggcgacgacgggcggggcgtcatcctccaggacgccgtggagcgcgccacgcggctcaatccgcgcctgaagctgatcttcataagtccagcgacgcagaaccccggcgaactgctcgccgacgcgccgcccgacgtccagaccgtcgccgtcgacagcgacgcgccgacggttctgcagaacctgatcctcgccaggcaggagaaggggaagccgcggcgctacgcactcgccgtcaggcgtggcgacgcggaggtcgaggtcggcgttctccagcttccgagcacgcccgcgaccttctcgaaacgattggcgtttgtcgccgccgcggcaacgggtgcgcggggcggaaccctcgtctacgccaacggcgccgccgaggccgaggacatcgccgacttcatcagccagctgcagcccgaggcggatctcggggacgtccatccggagctcgccgcgctggctgacctcgcgcggaagggggtccacccgcagttccgtctggctccgctggtcgagcagggcgtggccttccatttcggcaacatgccctcgctgctgcggcttgagatcgaacgcctcttcaggtccggcaggatccgcttcctagtgtgcacatccacactcgtcgaaggcgtgaacctatcgtgcaggacgatcgtggtacgcggaccccggaagggcaagggcaacccaatggagccccacgacttctggaacctggccggtagggctgggcggtggggcgacgagttccagggcaacatcgtctgtctcgatccggagaacgtaacggcatggccgagcggtgtgccgctgcgcgcccgctacccgatccgccgcgagagcgatgccgtcctcgacacaggacatggcctcatcaactatcttaccgcgcgcctggaaggcagtcccggcgagctcgacggcgtggaggagttcgagcaagtgggagcgtatctgctgacgacgttcatgcggctgggatcgatcgcgaaggctgacttcgccaagcgtcacgatcccgcgttcatagcgaagctggacggggtgctcgagacaatcgccaccgccatcgagatcgaaccagcgctcgcgtcgaggcactcgggcgtgagcccgataggcatgcagcgcctgctggagacctttagacgctatccgggcgaaccagagaacctcgcgccggtggacgttgccagcgacgactgcatggaccgcttcatcacgatcatgcgcaggatcaacgcgagcctgtttccggctttcaccccggacaagagggtcgcgctctatgcaatcatcgtgctgcaatggctggagggcaagtctctcgcgaggattatccgccgcaacatcgcgtggcatgaggatgtcggtaaggtctaccagctaccggccctaatccgggacacgatggcgctggtcgagcagatcgcccgtttccgcgcgccgaagtacctgtcggcatacgtagacgtgctccatctccactacctcgagatcggtcgcgaggacctaatcgaccacaacatggacattggcacccagctcgagttcggcgtgtcgtcacgtacgctgatctcgctgatggagttgggcctgtcgcgcatgaccgcggtcgcgctctacgagaagatcgccagagacgacctcgaccagacgcaggcgcttaagtggatggccgatcgctcggaccggctcgacggcatggacctgcctgtggtgatcgtgcgggagcttcgggaaaggctaaccctcgatgacggcgtggaaccctccaatcagacaacaacatga

SEQ ID NO: 59926 - DNA, 951 bp, Pseudomonas sp. Leaf127
ttgtcaaccatcactcccaacgatctcgaatctgctcttacaggagatccagaagcgcttgaggttcaccttgagctcgtagaacgtgacgtactcattgacggacatttggtcaagattcactgtcactgtctttcggtggatggtaacggccgtgttcaaccacgccggttagcagagttcatgcgaaataccgttgctgattatgcgatcccacgctcgaagctcgctgaggcgaaagcgcgagatcgtaggttcaatagcaccgaggcagtcgccgagctcgttgagcgggccaaacgctcgtttactgatttgacgaacaccggcgaaggtggagagatgctgctgtttctgctggcggagcgcttcctcaaactgccacagattctctgcaagatggatctcaagacagataatcgtatgcactatcacggcgcggatggagtgtatgcaggggtgacaccggaaggtatcttgaaactctactggggcgaatcgaaagtctacggggatgcaagttctgcgattcgcgactgtttcaattcccttgcccccttccttatcgagcacgaacacgaagaggcggaacgggaaagtgatctgatactcctgagtgacaaggctgaccttagtaatccagcactcaccgatgcgctcaaaaagtattttgataaatcgtcggttatgtctaaacgggttcagtattgcggtgttgtccttgtgggtttcgacgcaccgttctatcccaaaggcgatgcgaagggggttgcggaagagatcgttaaggcatcccgcgcggaattgactagttggagtaaaagcatcgggaatcggcttaagctcgagaagcttgagcagatggaaatcgaggtgttctgtgtacctctgccgtcggccgaaggtttccgcgccgcattcctcaaagcgatggggattaaggacgaatga

SEQ ID NO: 59927 - DNA, 2601 bp, Pseudomonas sp. Leaf127
atgagcctcgccaacctccaatcgtggcttctccaagaaggtattcgggaagatctcgatgcggtcactcgattcaccgtgcgcaatgaacttgataatttggtgctcgacctttccgcaccgacagcttcggttattgattggcctaggttgttactcgctggcagcattctggcgcgatccgatcaaaggggcgatcaagaagcagcgctccgaattgcaactgctgcaatttcattgacggacaatcaggcatttaaagacgcaggtgctgtacttttgggcaagctctcaaacttccgggctattgcattagccactgatcggggcttggtagaatccggccttgacggacggttgggggttgctttgcgcctcgaagctcagcgtcgtgaaatggaccgttccatcctggtgcaatctagcggcgcctggctacaagtaaacgactttcagcaacgcttttggatcaatgctgccggtgaccgctggctttcggcatcagcacctacggcctctggcaagacgtttcttgtacttcagtggctgatcgaccaagtgattacgggcgaaactcgggtagcggtctatctcgccccaacccgcgcgctggtctccgagatagagaccaacctcaagggacttctaggtaataccgagctaatcgaggtgtcgtctcttccgcttgccgataagtacaaagctgctcgcactggcggcgcgcgagtgattcttgtgttcactcaggaacggttgcaccttctcgcgaatgtgctcaatgatgtgttctctatcgacctacttattgtggacgaggcgcacaaaatcggtgataaccagcgtggtgtaattttacaggatgcggtagagcgggctacccgtgcaaatcctaagttgaaggctgtgtttttaagcccagcgacccaaaaccccgaagagttgcttatggatgcgcctgttggtgtgcagaccattgctgttgatagcgactcctccacggtccttcagaatctgatggtcgccacccagatgccgcgaaaatcgaagctctggacgcttactcttcggcagcagggttcgacacttccagtaggaacacttcagctcgcgagcacgccggatggactaaaaaagcgccttgcgtttatcgctgcggctgccggagagagaggtggtacgcttgtctacacgaatggtgctagtgaggcggaagatgtcgcggatctgatcagccaacttttacccaagcttggattcatcgattgggagctctcacagctcgctgagcttgctcggaagggcgtgcatcaggatttccgccttgcacctttagttgagctaggggtcgcgtttcactatggcaacatgccatccttgcttaggctagagatagagcgactatttcggacagggaagattcgcttccttgtatgcacttcaactttgattgaaggcgtgaacctgtcgtgtcgcacaatcgtggtgcgcggacctcgcaaggggaaggggcacccgatggaaccgcacgatttctggaacttggctggacgcgcgggccgatggggtgacgagttccaaggaaacatcatctgcatcgatcctgaggataggcaggcttggccctctggagttcccagccgcgcacgctatcccattaaacgggaaagcgacgctgttctcgaactgggtgacagcatggcggactatctcttgcgtcgtggacaatcagatctgtccagcatcgaagatgctgatacgttcgagcaggttggcgcctatctgctcactaccttcatgcgacttggttctatatcagcagcaagcctcgcgaaacgccatgacgctgcgtcaatagcgaagcttgacgaggctctcagtgccttggtgacgcagattgaaatcaacatagatttggccgctcggcacccaggtgtgagcgcagttggccttcagcgtcttctcgaagctttccgctcctacgaaggtgatgtcgaaaacctgcttccggccgaagtggcgagtaatgacagctacgaccgatttatcactattatgacgaggatcaacaaacacttgtttctcgccttcacccctgagaatcgtatcaggctttttgcgttgatcatcttcaaatggctaaagggttactcgttggccaggatcatccgcgatagcatcgaatggcaccaagacgtaggcaggtctttcaagctcccggagcttatccgaagcacgatggagctagtagagcagattgcgcgctttaaggcgccgaagtacttttccgcttatatggatgtgctgcatctgcatcttaacgagattggccgtaaagacttgattgatgacggtttggatatcggaacccaacttgagttcggcgtttcatcgacgacgcttctttcgctcatggagctcggcctttcccgaatgagcgcggtcgctttgtacgagaaaattgcccgcgacgacctgaacaaagagggatgcgtattgtggatctccgagcgtgtagggcaacttcatgtaatggatatcccagccatcatcattcgcgaggtacgcgaacgtctcgcgctacctggcgacgttgccacataa

SEQ ID NO: 59928 - DNA, 939 bp, Chryseobacterium sp. Leaf180
atggctacacccttcaattcagaaaatataattacacataaaataaatgaaacagggttaagtacttttcttgttggtttcgacattgatgataaaggtatttctcaatatagattaaacccgctaattcaaaaattgtgtgatgtaatccaagagtttgcatttggttttcatgaaggtgattctacagacaatacaaaaacatattctaagttaattgaagcggctcaatccatttataagattgatgcatttcaaaaagtcaaagatctatatgaaaacaatggatcaattacagacgacgtagaagataaatttttacgacgtggagagtttggagaattaattttacatttgttacttagggactttcataatacaattccattattatcaaaagtttactttaaagattctttagggcatgccgtacatggatttgacgcagtacatatagagcccactacaaaaacactttgggtgggagaatctaaattgtatacaagtggaaaagccggcttaaaagcattaattagagatattgaagaacacttcaaaagtgattatctaacttctgaatttatgcttatatcgaaaaagcttacccaaatagataatattcctgataaagattattggttagatttaataagtaaatcaaagaagttagttgaacaactaaatacgattaatattccgctattatgtacgtatcattgtgatttatttacttctcacacagatgagaataatcatgtttttatagacgaatacattaaagaaatgcgattgttaaagacatattttgatgataataacaatcacgctttaaaatcaaaactaaatataatactaattttatttcccgttcaaaataaagtagaacttgttaaaggtttgcataataaactttcattaatacaacaattaggcgaatga

SEQ ID NO: 59929 - DNA, 2271 bp, Chryseobacterium sp. Leaf180
atgatagaagatttacttttagaaatagagtctaaagacagtttcaattacgaagagacattcactctttataaaaaatgtagtgagctaattattgaggatgagattacagctcaaagattagtagtaaacattcttgccgagaaaaataaatttgacacgaatttaaatctaatattaactgatttaattgaagctgtcggcttctacccttatcttgaaaaggaaaatttacccttggattcaactgatgcattaatacggcaagtctatcatcattccgataatttgaataagtttttacatgaagaccaaaaacatttgttgtctcttttgaattctgataaaaatgtcattgttagtgctcctactagttttggaaaaagcttattaattgaagaatttgtcgcttcaaaaaggtttaaaaatatagtaataatccagcctacacttgctttacttgatgagacacgtagaaaattgaaaaagtatgatgaaaattataagctgattgtaaaaacatctcaagttacttcgatagaaaaaggaaatatttacctttttacagcagaaagagtcaatgaatataaagaatttatcgatgtacacttaattattattgacgagttttataagcttagttctaaaagggatgatgaaagagcggattccctgaataatgcatttcactatattttaaaaacttttaaaagtaaattttacttgttagggccaaatattgatggtatatcaataggatttgaagaaaaatataatgcaatattttataaaacacaatcctcacttgttgatgttaaaacgattgatttatatacctcaaataaggaaatttttgataaaacgactcaccacagtaaagatggctacaaggaggcaattttagtaaaagagaagaaactatttgaattactgttgcaaaattctgatgagcagtcgataatatactgttcctcacccaatagagtcagatatttatctcaaaaattttgtaattttatacttaataaaaatattgagagaacaaattctgatttggacattgttgaatggattagtcaaaacatatctgaagattggagtttaatatccttattaaaaaacagtatcggaattcatgacggtgcattacaaaagcatattacaactacaataattgactattttaataaaggaaagataaattttcttttttgcactactacaattattgaaggagtaaatactagcgctaaaaatattatattttttgatagcacaaaaggagtaaatacaaaaatagattattttgattattcaaatataaaaggacgtgctggtcgtttgatgatccactacacgggaactatttacaattttaaccccattcctccaaatgaacaaattctaattgatattcctttctttgaacaaaatcctatttcagatgaaattttgatacacttagatgaaaatgaaataaaagatattgattcaacccaatataaaaaaataaagaaaattccatctgaagaaaagggaatcatcaaaagaaatggagttcaagttgatggtcaattaagcatttttgacgcaataagagatgatatatccagtaaatatcatttaatctcttggaatagaactccagagtatgaacaactaaaatattgtttaaatttaggatggaaatacttactgaaaaaaggtgaatcgaagtcattaggaattaatagacttattaataaaacctttaactatggattacaccagagcttaggtagagtaatatctaatgatattgattatattattaaatcagttgaatattacaaaaaacacataaactcggaagatggagaaatcaatacgaacatgtttaattttgggaaaagatattctgtattttcggagcaagatattttagaagaagttatcatgactaattttcaaattcaaaaacactggtttcaatacaaaattccaaaatggttatctgtgttaaattcaattcaagaatatgtgtgtgctgaaaaaggtttaaaacctggaaattacacttattattcaaatctaatagaaaatgaatttttaagggaaaacttagcaattttatccgaatttggaatccctagttctgcaatacgcaaacttgagaaattaatagcacatgatatctcacaagatgaagtgataaaaattatcagaaatagtaaattatataataacaacatttttattgaatacgaaaagaacaaactaaaagaaacataa

SEQ ID NO: 59930 - DNA, 927 bp, Rhizobium sp. Leaf262
atgtcggtgaaagttgattttgaagtattagtggacacttcactgtccactgtttgctcgtcggagcaattaaagacagctctgaacaagcgatttatcagcctcatcaatgattacgaggatggcaaatggcggttcgcgaaatttcaaacctatctctgggacaatatcgcgcagaccgcgctttctcaacgcgaacgggattctcttgcgggtaaaagtcattcacagctcgtagaagcagccaggaacctgcgtttctctgatgctgatgaagttggcgagggaagcgaaatcgcagagatttttctttatggctttatgaaagatcactttggggctttgcctgtggttcccaaaatattctacaagcaaaacgctcaggacaatgccaaaggcgcggacagcgtgcatatcgtcgtaaaggatgacgattttaccctttggttcggagaggcgaagttttacaactcaatagaagataagaggctcgacagtatagtcacctctgttttgaaatcgcttcagactgataagctgaagaaagaaaacattatcgttacaaatgtgtctgatatttaccagcttccgatcggctcagatttacaggctcgaatagttgcggcaatccggccgaaggagtcgattgataaactgaagagcaggataaacgtcccgatcatgattttgcatgagtgcgacatcacgtctaagaatatagatctgacagatagctatagaaaattaataagttcccatcatatggagcgcgttgaagcgtactataaaaagcaactagcgaaatcaacatctgtattcaagtatagtgatgttaaatttcatgtaatactatttccagttcctaataagcaggcaatagttaaggcgtttgtgtccggagtccaattttataagtctcagggatag

SEQ ID NO: 59931 - DNA, 2100 bp, Rhizobium sp. Leaf262
atggatgtttttgacgtctgccaagaagtgaatgaactgatattttcgggtgaccaggtttccgcccgaaataagctgattgctcttttggccgaacttagtgcagagaaagctgagtacccagaggtgctgaactatcaaatccgcgagactggcctctatccctatctgcagactgatcacgcatcgtggcagcagaagttcataatcgaagcgttcaaggtggatgtaggccgagctcatgctactctgcatcgcgagcaatcgttggtgctttcccatcttttagagggtacggatattgcggtcagtgcccccaccagcttcgggaagagcttcattatagatgcctttattgctgcgaaggagccagaaaatgttgtgctgatagttcccactattgcattaatggatgagacacggcgccgcgttttcaaaaagttctcagataagtacaacatcattacgacgtcggatatgccacttggcaaacgcaatatcctaattttcccccaggaacgcgcgttcggttacctgaacaagctgagcaccatcgaccttttgatagtagacgaattttacaaagccagcgcagtacacgataaagatcggtcgccgtcgctcgtaaaagctattttgaaactgtccaagatagccaaacagcgctacttcctcgccccgaacattaaacggctcgaggaaagtgtttttacacgcggaatgaagttcattgagctgcttgattttaatacagtatttcttgaaatatttgaaatttataagcatataggaaaagatgaggccaagaaaagcgaagagttgcttaaaataatttctcctcggacttcaaagtccttaatatatgctggatcatatccgcaaattgataaagttgccaaccttgtagttggaaatctgggagttctcgatcggccgctattgaaccatttttcacgatggcttgccgataactatgatcccaactggcaattaacaaacctcgtgcgccgcggagtaggagtacacaatgggcgaatgcatagatcacttagccagatacaggtcaaaatatttgaatcaaagcatggtttcgacagtataatttcgacatcctcaattattgaaggggtgaatacatctgctgaaaacgttataatttggcggagcaaggttggcagcagcaatctaaaaaactttatgtataaaaatatcatcggccgaggcgggcggatgttcaaacacttcgttggtaaaatataccttcttgaggctcctccaaaagatgaagacgcccagcttcaaattgatttccccgacacgattttgggcgacattgatgaggaattgcaccgtgaatccctgacgcacgaacaggtccagaaaatcgttgagtacaagagcacgatgggcaacatccttggacctgatgaatttgcgcgcttgagcaagagcaacgtgctgcaaaacagtgactcagatttcatcatgcgggtcgctgagaatatgaaggcacagcccgaggaatggcgtggcttagcttacctcaactccgataatcccgaccattgggatcgattactttatttgatcataaatctcagcccggcgggatgggatgtgaaattcagtaagcttgtctcctttgtgaaaattctctcgagaaactggcgccgggaaattccggatctattgctggagcttgatgatgagggaattgacgtggagttgttctttcagcttgaacgtacggtaacgttcaagctcactactttgttgagcgacgccaatgaacttcacaaggtcatcgtcgatcccaatgtagatgtgtcaccttttattgcgcgactggggcatgcgtttttgcccggcgccgtttatcagctagaagagtacgggctaccaagaatgatttcgcgaaaaattcatcggagcggcgccatgaatttcaacgatccaagccttgatctgcccaccgcgataaaagcttttcagtcgataggcttggaaactatcagcaaaatacctagcctttcccgttttgacgtatatgtactgaagttcttttatgaagggatcactcaggatccaatcaagagttag

SEQ ID NO: 59932 - DNA, 1620 bp, Methylobacterium sp. Leaf399
gtgacagacggctctaccgacgcgttgcgagcatccgacgccggcggcatttccgcccggcggggcttccgcatccaggaccacgtcgcggcgaggatcgccctcgagatgcttcaggacccgacaatccaccagctcgaatgcgagaccgccgacgacatcgtcgtccggcgtggggcggccgcggcgcgcgtgagcgagtacgtacaggtcaaaaccacagagtcggacggcaagtggaatctcaaggaactgacggcgcgcgacaagggcaggaagggcacctccatctgcgagcggtcccttctatgcgacgctggaggcgatgagccatggtaccgaatcgtgactacccgagcggtgtcggccaagctggtaccattcacgcgggaccgggcgcggcgctcaggtgaggcggcgttcgaggcgctggtccaggccttcgccaagagatatcccgatgtcaagtctctctccgaccagacgctcgcccattggtcgcggaacctgttgtgggaggtcgaatccgatgagagggcgctggaagccaggaacacgacgacactgcttaggctcgcgcatggccacggcctcacccccgcgttccacattattgacgaagtgtacgcacggctgacggcgaagacccgcgcgatgggtgacgccgcctcgagtgaccccgctgagaaggcgtggcggcggtccgattgcgtggcatggtgggagggcgaacttaacctgatgcgtgccgccgtcgcggcgcacgtcaaggtctaccaactggtggacgccccgagtttcttctcggagctctgcagcgttgccgacgccgccgccaagcgcgccctgtacgcctacgacgtcgagtacgacggcgacgcgtggcgcaaggacgagttgattgagcatctcttggactggctgccggaggtggcgttgccgccccgaatgctggcgacattcaaccacctgtcggcgcgccggctgcccggcgaagcgctcagggctttggaccggcgcgggccgcccgatatgccgcgcctcgtcgccggcttgatgctgcacgccatcctacgccaccatttcggggccgagccgatcgcgtgtcggatctttttcctggtcgcgggggagttgcgatctacgagcgcgcacatcgttccgctgcccggcggcgacgaaatctggcttgggcgctcccgtctggtcaccgctcagtcccatcgggcagtcatcgacgaggtgctgtcggaactgcgcaccgcgctgacccgcgacgtcctggtcgaggagcgcgacatcatcttgcagctccgcgaaccccgccacctccgagccgacaccctggacaggatcctaagcgcgaccggcaagacctccgatctgctgcgggtcatccggctgccgatcctggtcgcatacgacagtgataccctgagcgcgggcttcaacctcgcctacgtgcctctcctccaggcggaggtccgggacgagtatgagaggatcaaggcccgcatcggcgacgagctgcgcggcgtggaggtgtcgctgttcctcgtcccggtcgagtgcgccgggacgctcgaacgggacttcacgacccggctcagggggcgttga

SEQ ID NO: 59933 - DNA, 2166 bp, Methylobacterium sp. Leaf399
atggaaacggacctgatccgcgcttgcctagccgacccagacaagctcgccgctcagcgattctcgatcttccgggaggtcgcgcggctggccaacgacgagcggacggtggcgatggcccgcgagctcgtaatacgcctgctggcgcacaaggccacgctgcccgaagggtacaacgcgctgctcgacgccctggtgcgcgaggtcggactgttcccctacgccgatcacgcgaagggccgtgacctggaggaccagattctcgtcgaagcgcaccgcgtgcatggtgtcggcgaggagcgcttcttccacagcctgcagctctccgtgttccaagagctcgtcgcgggccgcaacgtcgtcctgagcgcgcccaccagcgtcggcaagagcctggtaatcgacgcagtccttgcgacgcgccgacacaagcgcgcggtcatcgtcgtcccgacgatcgcgctgatcgacgagacgcggaggcggatcgcctccacactgggccagtcccacgatatcattacccattcgagccagacgcggctggaggacgggcggccgacggtctatgtcctgactcaggagcgcgcgttgggacgcaaggatctcggcgatgtcgacttttttgtcatcgacgagttctacaagctcgacgtgcgcgaggaggacgacgagcggacggtcgacctcaacctgtgcttccatcacttggcgcggcagggcgcacagttctatctcataggacccaatatctcgtccgttgggggattggcggccgactacaggcacgttttcatcccgtccgacttcacaactgtcgcgctcgacatacaacacttcaacctgcggcagcgcggcgaggagcgcgtcgggaaactggtcgagctctgcggcacgctggccgggccgacgctcgtgtactgccaatcgccccgcagcgcccgtgacgcggcgaggcatgtctacgttggctgcgacctcgggacctgcgacgcgacgcgggacgcggcggactggctagcgcactattacccgccggaatgggaggtggtccaggcgttgcgacgcggcgtcggcatccaccacggcaatgtgccacgcgcgatccagcagtacatggtccgcgccttcgagcaggggaagatcaagattcttgtctgcacgtccacaatcatcgagggcgtcaacaccgtcgccgagaacgttgtcatcttcgaccgccgtagaaacacgaagaccatcgacgacttcacgttccggaacatcgccggacgcgccggccgcatgaaccgctacttcgttggcaaggtcttcgtgctagaatcggcggtggagcccggcgaccatacagtcgatctgccagtcggccgccaggacgcggcaacccccctgtctcttcttctcgacttacccgaggacagcctttcagaggtttcgcgcgaccggcttgcccaggcattcggcggctcgatgctcgacgcggcgaccatcagggcgaatcggtacgtcccggtcgagcggcaggacgcaacctgcgcggccgtggccgagatcctcgaccgggaccccggcctcctccggtggcgcggcgtgccctcttcgccgcagctccggacagtatgcgacctaatttacgaccacatcgaccgcggaaattcgctacgccggcacggcatcttcgcgggcgaccagctccaggcggcgctcacggccctcatggcggccgacgacctcaggcaattcgtcgaccggcgcgttcgtgaacggcgcgacgacgtcggcatcagcgaggccgtcgaggccgcgctttcgttcctgcgcaattacgtcggctacgccttcggccgccagttgatggccttaagccgcatccaagccgacgtcattctgcggcgcgaacgcggcgcccccggcgactacggcctgtttgccgcgcaggccgactcacttttcatgccggccggcctcttcgcgctcgacgagtacggcgtaccggccgagatcgcttcgaagctgatgagggcctggggtcgcatcgacgacgtagaccagggcctgcgcatgctcgcgggcgccgacttcgacgcgatcaacctgcatccgttcgagcgcgagctgcttctcgcagtgcgcacgtacctgccatcacgggcctacgcccgatga

SEQ ID NO: 59934 - DNA, 894 bp, Chryseobacterium sp. Leaf404
atgattgagaaaaatatcaaagaagattttttggagttattttacaatgatctctgtaatgaagcacttgagaataacaatacactcaatctttttacgctaaaagtaaaaaataatgcctttgcctatgatgaactgataagtgaattaggtaacaaactttgctatttcgcactttcacgaaatcagatcaaccaattaaaaaaggatgacaaactaaatgatttagtcaagaaagcaaagtcaaaattaaagcatcacgctgacaatgaaggtgaattaggggaaatcttactctattgtcttcttgaatctcatcttaacgccccgaaaatcttaacaaaattagaattaaagaccaattcaaacgattacgttaaaggtgccgatggtgttcatttgctaaaagtcagtgactcggaataccaactcattctgggcgagtcaaaattaaattctgatattggcaggggtatatacgaagcctttgggtcaatagacaagcttttaaagtcaacatcaaaaatggaatttgaaattgacctaatcaacagcgagcttgtgaaagaggcttacgacgaggatagttatgagttgttaaaaaaaattattattcctagcgcaaaagaggatgaaacttatcttgactattcttttggaatttttttaggttttaatatagagatcagtgctgatgaaagcaaattaagcaatagtgattttagaaaaaatatcagggaacggataaaacaagatgttattaaggccaaaaactccttaaacttccagcttaggaaaagtggatattccggatatacattttacgtttatgccatacctttttcagatctgaaaaataagagaaaacacataatagaaaaaattgtcgaatga

SEQ ID NO: 59935 - DNA, 2553 bp, Chryseobacterium sp. Leaf404
atgaaacttattgataaactaacagaagacattctacaagataaatatttctgtaatctgttttataaatccttacaaataacagctgagcatatctttaaaaagcaaaccagattaattcttactaataaggaacttaaagatcttttgcgattcgccgacattttatcaaattctaccaattctatttcaagaaataaagcataccaaattatatcagcccttaatcacgattacaaagataatgagatctatagaacaatttcaaaagcaatctttagtaaattagggaattttcccgcaataaattacttggaaagtaaaaacaataatctagcaacccttcccctttttcgagagatagaagcagaaactaaaaaattaattcaagtggctcctgatggcaatggtatgatctttacagacactcaatttgaattattcaacaaactctccaatagtcaagaattcagcttctccggtcccacatcaatgggtaagtctttcattataaaatcatttataaaaaaggtaatcaaaaataccccgccggaaaatattgtaatcattgtcccaacacgtgcgctgatcaatcaatttttcgttgatcttaaattggaactcgatgagttattggaaatttacaaatacaagatttttataaattctaatgttacagatattctaacagaagaaaaatttaattatatattcatcttaacaccggaaagattattaagttacctatcacaggatacaaatccttccataggatttgtatttgttgatgaagcacataaactagcgaacgagaaagactccagaagtattacaacatattctgcaattgaaaaggctcaaagaaaatatggtaatataaaattatatttttcttcacctaatgtttcaaatcctgaaatatttttaaagctatttaacagagattttaaaaattcttttagaactgatgaatctccagtttctcaaaacatttattatgttaaccttattaatcaagaagtagaggcccatacaaacaattctattattaaattagataacatcctaaatccaaacaatgactataatcttattaagtttataaaatttattggaaccggtaagaataatctcgtttattgctattcgaaaaaaaacgttttggaaaaagctaccgaattgtctaaatcgctaaagaaaattgaccaaacttctcttattgaaaaagccattaagaatatcaaggactatattcatcctgaatatttcttagtcgattttattgaaaaaggaattgcctatcatcatggtaagttgcctcaactaattcgcaatttaattgaagaactctaccaaaaagaagaaattagatatgtattttgcacttccacattgctggaaggcgtcaacatgccaacacagaatatctttatcatcgacaatagaagtggatctcggacgattttatctccaattgatttctggaatctttcaggtagagcaggaagattgacaagggaacttgaaggtaatatattctgtgtacaacatgattctttcaaatgggataatacagatctacttcaaaaaaaggaaattaccctacaaccgacaattcttacaaaaattgatagaaatcttcaaaagatagaaaaggcgctaaaaaatgaagagataaagacaggctcagaaaccgaaaaagaaatattaaaatatatagccaacatcatcaaagttgatacgttagaaactgatgccaactacaaaagtcctataattgataagcttatcgaaaagaataagcaaaagattattgatttagcaagagcgggggtgatcaattacgatattccaaaatcaattttaaaattccatcaaaccataaattttgacattcaagagaagatttataaggctgttcaaaaatcaaaaaaaagtatattgccaacaggaaatgatattaattacgaaagtatcttaaatgttctcgaaaatttccataatttatatgcttgggataagactgaaaagaaattgtccaataaaaacagtctcaaatattacgcagttctcatgaaccaatgggtgaaaggctttccattaagccaaattattagccaggcaattgactataatcatgacacatctcaaaaaatcgaagttaactttagagaatttgaaacttttaaaaaatctaacagaaggcatattaatcttcttatagaaaagatcattgatgatattgaatatgttctaagatttttattagaaaaatattttaatcattactatcaaattttgttcaatattgtgggagagcaaaaagcaggtgagaattgggctactttattggaatatggtacgcaaatccctcaagtaatagcacttcaaaacataggtcttacaagaaatactgccattaagatttttagagatcatagaaagactttagttttaagagaaaacaaattgataggtgttgataaagctcaacttttaaatcagttcagaaggtcatctttagagtacgatgaaatcaagagatctctttag

SEQ ID NO: 59936 - DNA, 924 bp, Caulobacter sp. Root1472
atgacgggactagtgttcgacgtccttatcgacgatgcgctatccaacatcacctcggctgcgcagctcaaaggtttggtgaaaaagcgcgttctcagtctggtgaacgacttcgaggacgcgaaatggcgctatcctaagttcaagaactttctctgggacaacatcgcccagacggcgctgtcccaaagggagcgcgcctcgctcgttgatcaaagccatagcagcctggtggctgcggccaagaacctgcgattgaccgacaaggatgaggtcgggcagggcagcgagatcgctgaagtcttcctctatgggatcatgcggcaccaatataaagcactgccggtcgttccgaaaatattctacaagcagaacgttcaggacaacgccaagggtgccgatagcgtccacatcgtcgttgatggagatgacttcacactctggttcggggaggcgaagttctacaactccatcgaggactatcgcctcgacgccatcgttgcgtccgtcatggcgtccctctcgacggacaagctgaaaaaggaaaacgcgatcatcacgagcgtgtccgatctggacggcctgcagatagatccaacgttacgcgaaaatatacgagcggcgcttagcaacagagagtcgatcgataacctaaaatccaaaattcatattccgatccttatcctgcacgaatgcgatgacaccgcaaaatccaaggattcttcggacgaatataaggcgcagataaagctaactcatcaggatagggcggaggcgtactttgccaagcagatggcaaaggcgagcaacgtccataaatatgacgatataagctttcatatcattctatttccggttccgaacaagaagggcatcatcgacgccttcgtcaaaactgtcgccttctataaggagcagggctga

SEQ ID NO: 59937 - DNA, 2088 bp, Caulobacter sp. Root1472
atggaggtttttgaaacttgccacgagatcaacaaccttcttaccgcccgcaatgaacttgcggcgcgaaaccttctcattcgtttgctggctgaccttgagcaagccggaacgccgtatccgcaggtcgtgaaccacatgatccgggagaccggactgtttccctaccttcagctcgatggcgcgtcttgggacgtcaaatacgtgcatcaggccttcgaggtcgacgtcggtcgtcgcgtcgcaaccttgcatcgcgagcagtcgagcgttctggcaaagctcttggacggcacaagcatcgccgttagcgcgcccaccagctttggcaaaagcttcatcattgatgcgttcattgcggcgaagaagcccgacaccgtcgtgataatcgtgccgaccatcgcgctgatggatgagacgcgtcggcggatatttaagaaattctccaaagactatacggtgatcaccgcgccagacacagcgcttggcgcgaagaatatccttatattcccgcaggaacgtgcgttcggttatttagatcttctcaataagatcgacttgctcgttgtcgatgaattttacaaggccagccaaaagcacgacaaggagcgtgcgccttcgttgatcaaggcgatattgaagctctcaaaaaaggcaacgcagaggtactatctggcgccaaacatcaagaagctcggtgaaaatgcgttcacgaaaggcatggaattcattgagcttctagatttcaacaccgtatatctggatatcaaagatcactacagcgcaatcgcgggggatgaaaagaagaagggcgaaaagctgattgagctgatttcggcaggggatcagaaggcgctcatctatgcaggcacctacgctgatattaagagagtttccgacctcgtcattgatcacttgccaaaggtggataacccgtacaccaaacctttcgcgcaatggcttcgtgataactataaacccgattggatattggcggacctcgcggaccgtggcgtgggcgttcataacgggcgcatgcaccgctgcataagtcagcttcaggttaagctcttcgagtacgataatggcttcaacaatatcgtctcgacatcatcaattatcgagggcgtcaacacctccgccgaaaacgtcattctatggcggagcaaaattggaaagaacaatctaaaagacttcacctacaaaaacatcatcggtcgcggcggccggatgttcaaatatttcgtgggaaacatccatttgctcgatgtgccaccggtatcggaggacgcgcagcttgagatcgaatttcccgaggaaattctcggcactctggacgaagccggtgacgccgagcagttgactgaccgtcaggttgagaaaattatcgagtacaaagttcagatgtcgtcgattgtcggcgaggagaacttcgcgcggatcaagcgtgaaaacctgctccacgacagcgatgccgattttctactgcgtctggcgacggacatgcgggacaccccagaagattggagagggttcgccttcctcaattccagcaattcgtccaactgggaaagcacgctgtataaggtgctcaagttgaagccgaatggctgggacgcgccgtggagcaacgtcgtcaccgtaacgaaggccattgccaacaattggaagcaggacctctctcagattatccgctctttggaagaatccgggatcgatatcgaggaatttttcaagctcgaacgggcggtaaccttcaagctgtcggcgctgctcagcgatacgaatgaattgcacaagttgatcatcaacccgtccgtggacgtctccggcttcgtgggccggatgagccgcgcgttcctgccaagcgcggtctaccacctggaggagtacggtcttccacggatgatctcgaagaagatccaccgtgcaggcctagtcaacttcgaagatcctgacatggacctgctggtcgccctggagcggttcaagcagcttggggaggaaagggttctggcggcgcaagagctgagccggtttgatcggttcgtcgtcaaattcttctttgacggcatcaccgtggactga

SEQ ID NO: 59938 - DNA, 882 bp, Nocardioides sp. Root240
atgggtgacgcttccaccaccctgagcgtcttggtccacgacttcgcgtgctcaccctcagtaaccgggttgtgcgcagggtacgaggacggaacgtggcgcctcgagcatttggcgcgcagcatcgtgaaggccatccccgagttcgccctcacgtactccgaactgcagcaccttgacggcgacacagccgtggagatgcttggccgagccgtgcgaagcctgtactcaacagacaagtacgaaaagcggggcgagttcggcgaggttcttctgcacctggtgctgcgagaggtttttagcacaatccccgccatcagcaagatctacttccaggacaacgacaaccatgtcgtgaaggggttcgatgcagttcacgtcgtcgcatcatcggacgaccttgagctttggctcggcgaagtcaaattctacgacaaccgcagcagtgccgtctccgcggtcaaggcagagttgcatcagcacacggacggcaactacctccggcgcgagttcgctgccattaccggcaagatcgacccggcatggcctcatggcgaccgtctaaagctgctgcttcacgaaaacacctccctagacgacgtattcgaccggattgtcattcccgtgctgctcacctacgacagcccagtcgtcgccgatcgaatcgtgcagctctcgacggcgaccgaccgaggcaagagcacggcaagtcggtacgccgaggacttcgagaaggagatcagagacggcctttccacgttcgccgagggcattccgaccggtgtactgatccgactcatcctcgtacctctccatcaaaagaaggcgctcgtcacggaactccacacccgcttgaagagcatccagcgagccacccaatga

SEQ ID NO: 59939 - DNA, 2046 bp, Nocardioides sp. Root240
atgtacaacggccgagaagccgacggccgcgaatcactgatccgggtcctcgacagacgcgaactctttgagccgctcgaagcgatgatcaacagtctgttggcccgatacgggctctatccgtacatggccggcgttgacgacacggcaaccacggcagacgcgctcctctacgagctccatcgtccgctggactatgacaacgacgtcgtcctgcaccgagtccaggccgacatctaccgacggatccttgacggtgaaagcatcatcctcagcgcgcccacaagcttcggcaagagcttggtgctcgatgccgtggccgcgtcaggccgtttcgaaaatatcgccgtcgtggtgccaacgctggcgctcatcgatgagacccggaaacgtctgtcacgtctccgcgacacctacaaggtgatcacacacccatcccagacgctcgatgagcgcaacattctggtgatgacccaggaacgcctgctggacgtcgcggagttgccgcgcctcgacctcttcatgattgacgagttctacaagctcgacagccgcaacgaggagaacaggcccgtacttctcaaccacgcgctacatcgcctgatgacgcacagccgcgccttctacatggcgggacccaacgtgcgtgacctcgcggccgccctgccagctcagttcactgcgacgttcacatcgaccgacttcaagacggtcgtgtcgaacctgcgggtcatgcccaagcccgctcgaggcgacgagattgccgcgctcgtcgaagtgtgccgcgagctcgagggaccgactctgatcttctgcagctcccccgagaaaaccaggaaggtcgctgaggccctcctgacggcaggtctaggcgaccagagcccagaaatggcaccagtcgctacatgggtagccgaggagtatcacccagactggctggttgcccgcgccttgacgaacggggtcggcatccatcacgcccggctgccgcgctggctcgggcagtacacggtcggggcgttcaacagcggcatcctgcagttcttcgtctgcacctccaccatgatcgaaggagtgaacacttcagcgaagaacgtcgtcgtgttcgaccacaagatcaagaacagaaacatcgactacttcacctactccaatatcgccggtcgatcgggtcggatgcgtcagcatttcgtgggcgaggtcatcgtcttccgtgaaccacccgcggaggaactgccaatagtcgacgtccctgtgtacaaccaggcttccgacacccctttgagccttctcatacagctcagcgacgaggaactcactgaggagtcaaagcggcgccttgaggggatgctggccaatgcgacacttccgctggccgtactccgcgagagtcgaggcattgatcccgaacgccaactcgcgcttgctcgtgaaatcgcacggatggcgcccagcgaggcagttctgctggcatggaacggctacccaacatgggaagagctgctcgcatgctgccaactgatcgtgactcacctaagacccatcagaggacgcgagaacggggtctcaagtgcgcggcagctaacgttccgtcttcggctggcacagacgacacaaggcgacgttcgacagctggtgaacaatgagctcagcggcacgagctctacgactcgcgacgatccagacgcggccgttgaagaagtgctcggttttctacgccagtgggtcgggttcgacatgccccgcctcttgtcttgcctgcaacgagtggtcaaccacgtgctcccgcagcgcggtattgcccgacgcgccaactactcgccgtatgtcgcagcctgcgagtcgatgttccttccagcccacgtcgccctccttgacgagttcgggatgcccccaagcctcgtcgacaaactacgacctcacctgcctccggctggctccgggatcgacgccgtccttgctgagattcgacgactcgacgtcaagtccctccaactcgaccagaccgaacagtcattgttcgacgagctccgtcgaaccatctga

SEQ ID NO: 59940 - DNA, 939 bp, Massilia sp. Root351
ttgactatcaccgcaactgatctcgagtccgcgctcacaggagatccagaaacgctggatgtccatctcaccctagtgcagcggaacatatcaatcgatggccatctggtcaaaattcattgccactgtctttcagtagatggaaatggccgtgtccagccccatcgtctggcggaatacatgcgcaacgctgtcgctaactacgctattcctcgatcaaagcttgatgcggcgaaggctcgcgatatcaagttcaacagtacagaggccctagccgagctagtggaacgagccaaacggtcgtttaccgatttggccaagactggcgaaggcggagaaatgctattgtaccttctggcagagcgatttttgaaattgccgcaaattctctgcaaaatggatttgaagacggattctcgcatgcactaccatggtgcggacggcgtatatgctggcgttactgaagaaggaattctaaaactatactggggtgagtcaaaaatatacgagaacgccgctgatgcgattcgggagtgccttaggtccctcgcaccgttcctgatagaattagatcacgaaggtgcggaaagggagcgagatctttttctgttgagcgacaaagcagatttgagcaatccagagcttacagaagcccttaggaagtactttgacaggtcgtccagaatgtcgaagcgcgtgaaatactgtggtgttgctctagtgggcttcgacgctccgttttaccccaaacaaagcgaccaagcggtagcggaggaaattgttaaagcatccaacgtcgccctatctggctggagtgccaagatcggtgaacgactcaaactggagaagctgaatcaaatggagattgagttcttatgcatgcccttgccgtcagccgaagggttccgcgaggcattcttggcagcaatgggaaactag

SEQ ID NO: 59941 - DNA, 2613 bp, Massilia sp. Root351
atggatcttgaaaatcttcagacttggcttcttaacgaaggcataaaagatgacctaaatgatattaccttactaaccgtccgcactgagatagataatttattacccgacgaatcaactccacttatcagctcgttggattggcctcgactaatattcgcgggcagcattcttgcacgatctaatcgacgtaacgatcaagaagcagcgcttcgaattgcgactgcggcaatttcgctggccgacgatctttcactgagagatgctggtgcagtacttctcggaaagctatccaatttccgtgcagtcgccttagctaccaatcggcatatgctggcagctaatttagacagccgcttgggtatcgcccttggtcttgaagctcaacgcagagaaatagagcgatctatcttagtccagtcaagtgggatctggctacaggtgaatgactttcaacagcagttttggaataatgctactggcgaacagtggctttccgcatcagcgccaacagcttctggcaaaacttacctagtgcttcagtggcttatcgaccaaatggtgaccgcaagggcgcaggtagcagtctatatagcaccgactcgcgcgcttgtatctgaaatagaagataacctcaaagagcttgttaataaattaccgcctggaacagatcaagttgatgtgtcatcgctgccttttcccgatatatatcgtacggcaaagtcaggaaaaactagggcaattctcgtcttcacacaagagcgattgcacttgctagcaaatgtacttgggcctgcattctctattgacttactaattgtagacgaggcacacaagatcggtgataaccagcgtggggtaattctacaggacgcaatagaacgcgtaactcgtgcgaatcctaagctcaaagctgttttcataagtcctgcgacccaaaacccggaggaactacttgctgatgcaccgctgggcgttcaaactgttgctgtcaacagtgactcatctacagttcttcagaacttgattactgcaactcaagttcctcgaaaatccaaactgtgggcgctgaacctaaagcagcaagcattagatattccgctcggcactctacaacttgcaagtacgccagcaggaatcaagaaacgactcgcattcattgctgcggcagcaggcgaaagagggggaacgctggtttatgcaaacggagcaggagaagccgaagaggtagctgatttaatcagtcaactgctcccagcacctgaatccattgacatcgagaatgctcaactagcagagctcgcgcgaaaaggtgttcatcaagggttccgactcgccccgctggtggaacgtggtgtcgcctttcactatggcaatatgccttccttgctacgtcttgagatcgaacggctattccgttcggggaaaattcttttcctcgtctgtacctcgactctaattgaaggtgtgaatttatcttgccgcaccatcattgtacgtgggcctcgtaagggtaagggtcatccgatggagccccacgatttctggaacttggctggccgagctggccgatggggacacgaatttcaaggaaatattatttgtatagacgctgataataaggatgcttggccaaacggaattcctagtcgcgcacgttacccgataagacgggaaagcgatgtagttctcgacctgggagacgcgatagtagactatctttcaaagcgtagccaaccgggcctctccagcaatgaggaaaaagagcaatttgagcaggtcggcgcctacttacttacaacctttatgcgactcggctccatagcaagcgccaacatcgcaaagcggcacgataagactttaatcgccagactcgatgaaggcttagcagttttggcgcagcagatagaaatcgatgtagacctcgcatctcggcaccctggagtaagcgccgtcggccttcagcagctcctcgacgcatttcgaaattatattggtgatgtggaaaatttactgcccgcagaggttgcaagtaatgacagttacgaccggtttgtaacgattatgcgtcgagttaatgaacatttgtttgtcgccttcacccctgactcccggatcagactatatgctctagttgtggtcaagtggctaaagggatttagcctcgctagaattatcggcgatagtattgattggcaccaagaagtgggccgggcatttactctcccggaattaatccgcgacacgatgcagcttgttgagcagatcgcacggttcaaagctccgaaatacctatcggcctatatggatgtgctgcacctgcacttacgagaagtcggacgtgaagatttaatcgatgagggattggacatcggaacacagcttgaatttggcgtttcgtctcgaacgctgatttcccttatggaacttgggctttcacgcttgagcgccgtagctctctatgagaagattgcacgcgatgatatgaacaaagatgagtgcatccaatggatctctgaccgcgtggatcactttacctcaatgggcattcccgcactcatcatccgtgaagtgcgggaacgcctcaccctgtctagcaacatctccacttaa

SEQ ID NO: 59942 - DNA, 1503 bp, Bosea sp. Root381
atgttggaagatcgacgcatcgagcaagtcgaatgcgaaaccagcgacgacatcgtgttacgctgggccgtcgatggcaatcgacacatcgaatacgttcaggtgaagagcaatgacgtcgaccgatggacgttgggattgctcacgaagcgcgacatcgccgcgagtccgacgtccatcgtcgaaaaatccctgctctgcgacaaggggcccgaggtcggtcgcttccggatcgtcacgaggaacggcgtccacgccattctggctgcgctgacggtgccggtctcgaagcgcggccagaacgatctcgacgatctggccgggcggttgatgaagaaatacgcgacggtgtcgggccgcgggtcggacctggaatattgggcgcgaaacgcattctgggaagcgatgtcgtcggaggacgaccttcgcagcaagaacctctggcagatctcgcgactttgcgacggcgatggctgttgccttcgaccggaacagatcctcgcgatctatcgggacatcctggagctcgttgaacgagcggccgccgcagaccggcgggtgtcggcggacaagatcctgacgcgcgagcgcatgcgcctttggtggcgcgaccgtcttcacgcactgatcgcatccaggccggggagcgcccttccctatcggatcactgcaccgcaattcctggtgaagttgcacgagttcacggatcctacccggccgcgcgccaccacgggctacgatgcggaatacgagcgtaagcaatggcgatcggcgcagcttgccgcccatctggtccgatgggtccccgaactcgtcctgaaggcgagcgagatcgcgcagaccaaccatctaacgcttgcggaccggacaggccagggcctgcgcaggctgcgtgaacttcgtcaccgcggtgtcgagcggctgctcgcggaaacactgctgcattcgatccttcggaccttcttcgacagcgagccgatcgcctgcaagctgttctaccgcacggaagcggcgtcgggcgtggtgaacaacgcccacatcgtccagcaccacgaaggcgaccagatctggttgggtcgcacccatgtcttccgcggccccgatcccgacgcgctgatcgaggcggcctgcgccgaactcgaggatgcgctggcgacgcctctccttcgcgcggagcgcgagatcattctcgaactgcgccagcccgaataccttcgcagggacgacgtggagcaggcattggagaacggtgcaccgatcgaccgcttcctgcgaatccttcgtttcgtgattctcgtcgtctacgacagctcggtcctcggtgccggtcactgtgatgattaccggacccggctcgtcgccgagttgaccggacacgggaatgcctaccatgcacggcttcccagcagcgtcgaggaaatccaggtccatctcctgctggtgccggtcgagtcactcgatgcgctgacgcgggacttcgaggcggcggcgggcatgacgtga

SEQ ID NO: 59943 - DNA, 2136 bp, Bosea sp. Root381
gtgagctacgatctcatcagggcggagcttgacgctgcggacttcggagcggaccgcatgttcgcggcgctccggggcgccgcgcgtctggcgaacaatccggcgacgctgggcgaaggccgcgacatcgtcattcgcctcctgtcgaaggtttcgctctgcggcgaattcgagcgccggatcctgatctcgctcgttcgcaccgtcgggctgttcccctacatgaaggagcagctcgcggtcgcggaggacgacgacctgctcgcctaccagttccattacatggccgagctcgacgtcgtcttccatggcttgcaggcgaggatctacgacctgctcatgtcgggatcgaatgtggtgctgagcgcgtcgacgagcgcaggcaagagtctgctgatcgatgccatgatcgcgtcggggaaattcaggaaagtcgtcatcatcctcccgacgctcgcgctgatcgacgagatccggcgtcgcctgaccgggcggttcggacggcggcgccagatcatcacccagccctcccaacaggcggcggctggggcgaagtccgtctacgtcctgacgcaggagcgtgcccgcaagcgcgacgacttggacgatgtcgatttcttcgtgatcgacgagttctacaagctcgacatccgcaagggggacgacgacgagcgtcgggcgatcgaactgaacctgtgctttcacaagctggcgacgaggggtgcgcagttctacctgctcggacccaacatccactcgatccggggattggaccggcacgaggtgcatttcattccctcgggtttcgcaacggtggccgtcgacatcgtccatcacgacatgtcgatctcgaaaccggagaggctggagcggctggtcgagatcctcggcggcaagacggggccgacactgatctattgccagtcggcggcttcggccgcgacgatcgccgagcatctgatcggcaacgagatcgtcgaaccgcccgcggccacgatcccgaccgccgagtggttgtcggagaatttccacgccgaatggatcgtggcgaaggcggtgcgggcagggatcgggatccatcacggcgcgctaccgagatcggttcagcaactgatggtgcggctcttcaacagcggtgcgatcagattgctggtttgcacctcgacattgatcgagggcgtgaacacggcggccgagacagtgatcatcttcgatcgcaggaagcgaagcaccttcgatttcttcacctacaagaacatacaggggcgagccgggcggatggggcgctacttcatcggcaaggttcatgtgctggagaagccgcccgcggaggaacccttcgtcgtggaatacgagatcggccgccaggacgacgagacgccgatggaactcctcctccagttgccggaggaggacctcacggaggattcgtccgagcgcatcaagaacgagctcagccgcagcctcctcgccgaggagacgatccgagccaacgcctcggtctcggtcgagatccagaacgacatcgcccgggagatcgaacaccggctgaagcagggttcggaattgtatggttggagtgggttgcggtgcagccacccgcagctcgccgccgcctgcgagctgattgtcgggcacatacgggctccgggtggcttggccgaacaccgggtcttttcgggatcgcaactcgcgttcaagctgcgtcaactcgagtacgatggattcaagtccttcctcgacgcgttcgtgaaggaggaataccccaacagcacgctcggatcgcggatcgaggtggtgctgaggttcgtccgcagggtcgtctgctatcagttctcgcaggacttgatggtgatcgacagaatccagcgtgacgttgcgctgcggctgggcgtcgccccggggaactacgggctctatgcggagcacgccgagaacctgttcatgcccgcctccctgaacgcgttagaggagtacggattgccacttcagatcgtgcgcaagatcgcgaacgcgctggcgcctcacgaggatttcgacggggtcctgacacggctgaagcgattggacagcggcgagctcgatctgacgcaattcgagcgggactggctggtcgatacgcagctcgccatctga

SEQ ID NO: 59944 - DNA, 852 bp, Rhizobium sp. Root564
atgaacgtctatgcggaaaaaccagagcgcctgctcactcaaattgaattgggttcggcaatcctttcacaaagtagctactgcgcgggctttgagctaaaagcatggcgatgcaacgccttagctgaccacttgatcgaatggattgctgattatgctcttaaagaagaggagctttccgggtcgcatggaaatatgtatatacgactgaagcaagccgctgctcgcatatattctaccgaaaaatatgaaagacgcggtgaagtcggtgaaatacttttgcatgcgatatgccgtgatttcttttcgacgataccacttgctcctcgtgtgttttacttgacctcttcaaacgaagtcgtgaaatcatttgacctggtacatgttcgtccacttggcgaagaaactttcgagatatggcttggcgaggcgaaattctacaaggacgctgatgacgctatacgggccgctattacctcagtagaatctcatatcgatcaaggtttcctgaataatgagaagctgatcctggggccacaaatctctaaggacgtaccgcattgggcggaaatacggaagattctatcgtccaggacgtctttggatgaattgttcaaagccgccgttttccccatctgcatcgcttgcgatagcgccgctgtcaacggccacgaaattcactgcgagtcctattcagccgctgtgctgaacgagatcgatagcctcaattcgaaactggtgaactccggtctcaaccaaaagatcgcgattcagcttatctacgtccctctagcgtcgaaggatttgcttgccgacgcgttcgataaacgcctgaagggactttccccatga

SEQ ID NO: 59945 - DNA, 2088 bp, Rhizobium sp. Root564
atgacattgccgcgcccggactggcaaacgcttggtgcccttcgtggtgctgagttgaaaggacaagtattttccatccttcaacgcgcatctttggcgatacaggaggccgaactggatgaacctgcacttcttgagttcgtgcctcgtctcgctgacgttatcaatgagcgaccagagcttgaaaccttcaaggagccttttagcgcattggcgcgaagcaccggtctttggaactacattgatcgtgattatgccgacacttcggacgcccttctggcagaaagcgtcacgatctcggagcttggcaacataactttgcatcgagagcagatcggtgttctcaacgatatccttgcaggaaaaaacgttatcttgagcgccccgaccagcttcgggaaaagccttctgattgatgccctgttggcaaccggtcgataccgtcgcgtagcaattattttacccactattgccttgctcgacgagttccggcgtcgcctgcgccgacggttcgaagacaccttctcgattatcatgcatcccggagaagtggtctcgaaagatcatgcggctatttttcttgggacccaggagcgtctcatcagtcgtgcagaccttggtgctcttgatctgacagtggttgatgagttctacaagctcgatcccgaacgacaagacgaccggagcgtcacgttgaacgctgctgtataccgattgctgagcaaatcgaagcagttcttttttctggggccgaatattgacaacgtgcggatcagcaacgacagcaaatggaagttcgaattcatacgaaccagattttctacagttgccgttgatacattcgatctcactcgtatcgagaataagcaagaccgtctatttgaggagatagctgaagaccgaaattggccagcgctggtatttgtatcagctcctgataaggcgaacaggatcgccaaagacgccagcaaagagattgcagtttctgacgacagttctgattttgcggactggcttaacgataacgtcggatcgaattggtcactggtgaaaacggtacgttttggattcggcgtccatcacgggcgaattccacgagccatagcatcgcagatggtccgaatgttcaacgagggcagtctacccgtcttgttctgtacgtcgaccctcattgaaggtgttaacacagccgcgaaaactgtcctgatctatgacaagaagattaataggacgagcttcgacttttttacattctcgaatattcgtggtcgcgccggtcggctgggccaacatcatgttggacaggttttccttttcaatgctcctcctgcgcgagaggaaatggaagtgtcgccgaccctttttggggaagatgatgaagcgccagatagctacgtcgtctacctcgatgaacaggacacgaatgaggaaacggaattacgcgtagcaaatctccgcgacgatctaggtcttgatagcgaaggcttgaggctagcggcaagcgtcggcctagacgttgctcacgctctccggcgggaggttgctgcggagttccacagaggatcacgccgattagcgtggtctggttatcctgactacaagtcaatactcgctcttgtcgagattgcgtgtaccacaaagcgaccacgtgaattcggcgcggtctcggcttcacagctcacgctcttcatcagtcgcctgcgtcaaaaccgcgagttaaaaggtttcctactctggtttaacgacaacttcagaggagaggatacagaattcgataacgtcttcaaattcctacgagcatgcgagtatggtctaccacaggttttcgcccttgttgagctattcgctaaagcctattggccgcagaccgactacaatctctttctgcgagagttgagccgctggttcagagcagaggaactcaagaacttggacgaggagggtatcccaatccagatttcggagaggttctatgcgcttggtgatgatcgtgcgtcgttgctgaagaagctcaaagatgccgtcaaagacctctctgatgagttgtccgtttttgagcatcgctggttgaccgcatcgctcatttag

SEQ ID NO: 59946 - DNA, 951 bp, Pseudomonas sp. Root569
ttgtcgattatcactcacgcagatcttgagtcagctctcactggaaatccggaagcacttgatgtccaccttacgcttgtggagcgagacgttcttgttgatggacatttggtaaaaattcactgccactgtctttcagtggatggaaatggccgagtgcagccgaatcggctggccgaatttatgcggaacgcggttgtggactacgctattccgcgctcgaaactcactgacgccaaggcgcgcgataacagattcaacagcactgaagccgtagccgagctagtcgaacgagctaagcgttcgttcaccgacttggcaaacaccggtgagggcggggagatgttgctttttctgctggcggagcgattcctaaagttgccacagattctttgcaagatggatctcaaaacggactcccgaatgcactatcacggtgctgatggagtgtatgctggggtaactgcagaaggaactttaaaactatattggggtgaatcaaaagtttatggggatgcgagtgctgcgattcgcgattgcctcagctctctctccccttttttgatcgaggctgatcacgaggagtctggaagggagcgcgacctaatgcttcttagcgataaggccgatcttagcgatccagtgcttaccgacgcgctcaaaaaatattttgataagtcctcagtcatgtctaaacgagttcagtactgtggtgtagctcttgtagccttcgacgccccgttttacccgaaagacaatgcgaaatctgttgccgaagagatcgttgaagcttcacgtaccgcactaataggttggagcaaccgtgttggcgaacgactcaaattggagaagctcgaccagattgaaatcgagctgttctgtattcctctgccgtccgcagaaggtttccgtgctgcattccttaaagcaatggggattaagcaagaatga

SEQ ID NO: 59947 - DNA, 2601 bp, Pseudomonas sp. Root569
atgagcctcgccgacctacaatcgtggctccgcctggaaggcatacgagaagacctcgatgcgattactctgcttactgtgcgtaacgaactcgacaatctggcagctgatacgtcgagatcctcagccgagccttttgattggcccagattattgcttgctggcagtatcctcgcacgatcagatcaaaggagcgatcaagaagctgctcttcgaattgcaacagctgctatctctctaacgaaggatcaaacgcttcaagacgcgggcgccgtgttaatgagcaagctctccaatttccgagctattgtgctagccacggatagaaacctattgaaagctgatctgggcggtcgactgggtgttgcattgcacctcgaggcgcagcgtcgcgagatggacagttccattctcgttcaatcgagcggtatctggttgcaggtgaacgattttcagaaacgtttctggacgagtgcaaccggtgatgggtggctttcggcatccgcgcctactgcctctggcaagacattcctcgtacttcaatggttgatcgaccagttaattgcgggcgagacacgtgtggcggtttacctcgccccaacccgcgcgctagtttccgagatagaaaccaatctcaaggcactcatcggtgataccggtttagttgaggtgtcttcacttcctcttcctgataagtacaaagttgctcgtgctggcggcacgcggctgattctcgtattcactcaagaacgtctacatcttctcgccaacgttctccacgatgaattctcggttgatctgctcatcgtggacgaagcacacaagatcggtgacaaccagcgcggtgtgattttgcaggatgcgatagagcgagccacacgcacgaatccaaagatgaaagctgtgtttatcagtccggcaacccaaaacccgggcgaattactcacagatgctcctctcggtgtagagaccatcactgtcgatagcgactcctccacagtacttcagaacctcatagtagcaactcaagtacctcggaagtcgaagctgtgggcccttactcttcgacagcctggttcagcactcccactaggtactcttcaactcgcgagtactccggcagggcttaagaagcgcctcgcgtttatcgctgcagctgtcggtcaaagaggtggcaccctcgtttacgcgaacggtgcaggggaggcagaggaggtggctgatttgatcagccagctcttacctaagcttgacactgtcgaccctgagctttcacagctcgctgaacttgctagaaaaggagtgcatcaagactttcggttgggaccactcgttgagctgggagtggcattccattatgggaacatgccgtcattaatccgactggagatagaacgactattccggttgggcaagattcgtttcctgatctgcacttctactttgatcgagggtgtaaatctgtcttgtcgtacgattgtggtgcgtgggccgcgtaaaggaaaaggtcatccaatggagcctcacgatttctggaacctggctggtcgcgcaggtcgatggggtgacgagtttcaaggaaacattatctgtattgatccagaagactcgacggcttggcctactggcgtgcctaatcgttcacggtatcctattaagcgcgaaagtgatgctgtcctggagctcggtgacggcatggcagattatcttgccagacgaggactaataaacgcctctaatcttgaggatgcagataagttcgagcaggtgggtgcttacttgctgactacttttatgcggctcggctccatatcagcggctagccttgcgaaacgccatgatgcggcgtcgattgcaaagctcgatcaagcgttggcgatactagcaaagcagattgaaatcgatgtcgagttggccgctcggcacccaggggtaaatgcaattggccttcaacaccttcttgacgcttttcgtgcttaccctggtaatgttgaaaacctgctccctgctgaagtcgcgagtaacgatagctatgaccggttcgtcacgatcatgcagcgagtcaacgaacacttgtttcttgcgttcacccccgagtcccgcgttaagttacatgcactaatcatcgtcaaatggctacaggggtactcgctagccaggattatcagcgatagtatcgaatggcaccaaaacgtgggtagagctttcaaactgcctgagctgatccgaggaactatggagttggtggagcaaatcgctcgattcaaggcgccaaaatacctttcagcctacatggacgtattgcacttagatctcaacgaaattggccgaaaggatcttattgacgatagtttggatatcggaacacagcttgaatttggtgtttcttctatgacactcctctcgctgatggagctcggcctctctcgtatgagcgctgttgctttgtacgagaaaattgctcgagacgacctaagtagagaggggtgcatggaatggatcgccgagcgtatagataaattccaggcaataggtattccaggcatcatcattcgcgaagtacgcgaatgcctcaggctgtctgataaagaaaataaataa

SEQ ID NO: 59948 - DNA, 870 bp, Pseudoxanthomonas sp. Root630
atgctgttcgtcagattcagggaggacgagccccagcttagagagttcatcgacgtactttccgatcagctggtcaactacgtcattcctcttgcgaagcgtaaggcagccaatgctgctggggcccagtcatcgactggcgctgacaccgcgctacatactcgacttcaaagagaggccactaatcttctgatccgctatcaggaggagaacaaggctcgatatggggaagtcggagaactaatctcttatgcggtagcggtaaggtttctggacgcaccgcaaatcggctctaagatggctcttaagacatcttcacagatgcccgtgcatggtgttgacggccttcatattcgccttgaagacgacgggaccgcgaccctgtttctgctggagtcgaagctctcaccaagctcttcagacgcgacgcgagaattctgcgactcggcttcgaagtatcagaaagacgcttcagcgcgtaagaatgagctgcggataatcactgacctatccaacttggattcgcttccggagccgctgaggagtgagatcaaggattactttgacccctatgccgaatctggcgccagtctcaaacgcagagaacgtcacgtgggaagtttgaccttctccgagtcaagctatgcgcagagaattcctgtagaacaaggtcagagtatttcggcacatgaggaccatttttcctcactttacgctgagaagagtgagcagatatccaagcttttggcgaagcaggcgctggcgaagggactggatctcgcgaagtgcgaagtgttccttattgcagttcctgacatcaacggattgaagacggcattcgcagaggcaaacagtggccatattcgctaa

SEQ ID NO: 59949 - DNA, 2112 bp, Pseudoxanthomonas sp. Root630
atgagcgccatgagtgccgcgaagtttactgctatctacgtggcgcccacccgcgcacttctatcggagattcaagaaacactcgagcggcagctggaagcaattagcgacagcattcgagtcacgaccattccggtttctgatccgttaaatcgacagcgacaggtttatgtactgacgcaggaacgacttcagctgctgttgtccacgatgagccttacgaatgaggtcgacttgatcatcgtggacgaggcacaggccattggtgacgatggtcgtggcatgatccttcaagacgcgatagaaaagcttagacgagcaaatcccagcgcgcgggcacttttcttggcgcccggagtagaaggattcgaagacttaggcgctgctgtcggaattgaagacctgagtattcgcgaaacaggcctatctccggttgttcagaacagaattatcgtcaactttgactatgccgacgaaaaacggctcgagctagagctgatcgctgcggatggaagtaacgagaggattggcttcttcaattcgagccgaggatttggtgtttccgaagacaagcgactggcagctgtcgcgctcgagcttggccaaactggaagatccttggtctacgctaccggagccgctcgtgcggagacattagcccggcagatttccaataattcgagcgacaggcagacggatgatgctcacgctcaagcacgcgaaaagctggctaagttcatcgagaaggatgttcacaagtcctattctctagccaagtttgttagaaacggggttgcgttccactatgggaacatgccgagccttctcagggagggcatagaaggcgcgttccgcgaaggccatctggatttcttgtgctgcaccactactctctttcagggcgtgaatctccccgctcgcaatgtgttcatagacacaccaacgcgcggcaacaagggcgagcagttggatgaagcgtcattgtggaactttgccggccgtgctgggcggcttggtcgcgatgtcgtcggaaatgtgtttcttgtggactatcacaagtgggacacacacccgctttctactcgaaagcgtttcgccatcaagatcgcatttcaagaggccgtaaatcaggatctcgaggcgatcattgatacgctgcagagcaccgcagatttgcgagtcccaatcgagaagcacagcgctcggactgcctctgcctctggtcttatcttgtacagagcctcccaaggagacttggcgaagttgcttagccgtccgggcctcgatttagaccctagtcaacgcgagagaatcgagaagatagcgaaacacgcactggaggcgctcggcctccccacgagtgttctagccgcaaactgggttgtagatcctctttcgcttgccagactgctgaatcggcttcgcacaaagattgcgaagggtgatttcaagaacttgattcccgtcaatcctgcattcgacggctacgaggtttacaacgcaatcatacgtaggatgttcaagcacctcggacggatggagctttccggcccgaatgctgaaggcgcccggcgatacgcaaatcatgtaaccgcgaccgcgctcaagtggatgagggggctacctcttagccagcttgtcggcgaatcggttagatacgctcgcaacaagtctggggaagctcgaaagaagcccgaggaacaagtggttgatagcgccatccgatccatgtttgagctgatagagaaggtaataaggttcaccctcgtccagtgggccaaggcttacgttgacttgctcaggcttgcgcttgaggaggcgggccacaccgctcgcgcaagtgagatctatgatttctctcttgctcttgaactcggtgtcgccaccgatactggaagagccttggttgagcttggcctatcacgaatcagtgctgctgctgtggcgagcatcatcttggattcgaaattgagtacctccgaagtaaaggcgtggattcagagccacactcttgagctagagtccagtctttcagggctcgtgcttggagaactcgtcaccaaggggctactgattccaacaaccattcccgaagccccagcggttcgctga

SEQ ID NO: 59950 - DNA, 882 bp, Nocardioides sp. Root79; identical to SEQ ID NO: 59938

SEQ ID NO: 59951 - DNA, 2046 bp, Nocardioides sp. Root79; identical to SEQ ID NO: 59939

SEQ ID NO: 59952 - DNA, 948 bp, Enterobacter sp. 50588862
atggacagtgtagaaaagctcaaatcgataaactggaaagagttgattacgaacaatcacaaatggattgaatcaaggttggttaatcacccttgtgatagtcaagctaagatagtttcaaggatttttaccatcccattcagcggagttatacaagagcatcatcacttagttgagtctatggctgatgctattgaacactacgtttttgataaagaagctcttgctaaaatgaaagcggatggcgttaccccttttagaaaagctgcacagttttttggggatactaatccagtcaaggatggtaagtacggggagttgctcctttatatcctatctgaggctatacttaatacaccgatggtctcacataaaatcactaatttaactaacttaaacgatcaggttaagggaggtgacggtgttttcttcggtgtgtatagagaaaatctttcaattttaattggtgagtcgaaaatatataagagttttagtggcgcgctggaaagcgcatttgactctcttgacagatttacaaaaagttatactagtggtgcacttggtcatgaacttttcatggctagaactaatatatcaagtaattttgattttgaaacaatggagttaatttataaagcatttactcctggtgatgatatttactctgagtgtgttaaaacacaccccgttctgcttatatttgaagatgcagaaattaagagcatagaggaaaaagcaataaacaaggcggaggccgaaagactgtttgatgcatggcttactaaaaagaaggaagcgataaagtcagacatcgatgcaaagttaatcaaataccctaacgttaaaccttgcttcttagactttttcctaatacctatgacagatgttggtgagttcaaaaagtcgttgtatagagctatccacggaatagattacaaagaaaattaa

SEQ ID NO: 59953 - DNA, 2532 bp, Enterobacter sp. 50588862
atgattaggagagcaacttggcttgcatcacttggatcatcaggcaatgaaaccgataaaaatattgcaagtgcattcggtacattgctctatttatacgacacaagtaatgatctgtatctcaaagtttgttatattctgcaatctagggctggtaacatagtctctgctaagcatttagaaggtctttttagtcaagggaatattattaaacactttagttcatcattggattttgaactcacaagtcaaaagtttcttcttgaaaaaagagtttctaacaataattatatttattttactcattttcaaagaagtctgtgggacaaactagaacgcggtgaaaacgttgcagtatctgcaccaacatcggccggtaaatcatttgtaattaaaaggtatatttacgatagtgttatatctgcaaatgatggttacttcgtttacgttgtaccctcaaaggcgctgataaaccaagtcggcaatgaaatgtctagagagttaaaagacatagctacagtgatgacaacctataaggattcagaaaatgatgatttaaaaatagtatatgttctcacgcctgaaagatgtatgcgattgttaaatgagaatggtaacaaagcacctaaaatagttttttttgatgaaatacaaaatttagaggataaaagtaggggtaatgtttttgagaatgttatctatagaatgacaagcttatggcagtcaactcaatttattatggctggcccatacataatcaatttacatcattcactcaataaaattattgaccttaatctagttgagcaaacaacttctacaaccccggttttgcagttaaaagttgtacttacagtacataaaaataagaaaaccgttaattataaattaataagcccagttggggatgcggtgttaggtgagtacgatataggtaaggcattatatagtaaattatcttcatcaaagggggcagcattaaagcatatcacttctattctggatgctgatgaacaaaatataatatacgcacctaagaagaatttggctgagggatgggcgctggcaattgctcaaactaacaatgaagattcggagctagatgaagataatactgatttagtgtatgattcaagaatagatagtttgtgttcatttttagaaaatgagatacatcctctgtattctcttgttagatgccttaagaaaggggttgcatttcatcatggtggcttattggatgtggcaaggctcgaggtagaggatcttttcgctgatggtgcgattaggaatttggtgtgcacctcaactttactacagggcgtaaatcttcctgctgatagaatgattgtaatatccccaaagattggtgactatgagttatcccattttgattttttaaatcttattggccgtgcaggtaggattagtacttctttatatggtgagattttttgcattcagcttgttgatgaagagtgggctgaagataagattgagtcgaatgaaacaaaggagatacaatcttcagttttaagaaagctcaatgaatatggtgagtcagttgtaagttacattgatgtctacactaaagatattgttgatactcaaggagagcttcatgctgtcaatcttgcctcatatctgcgaggccagtttttagtagatagagagcattatgagaaaataataagcaactccaatcttactcttaatcaaattagagtgatgacgaatagattggaggcgttggaagatattttaaatgtaccgaaggatataatatataaaaatcctttcatcgatcccctcttgattgatcagctttattttttggttgaaagcgaaggtgtcaataaatggatgattgataaatatcctagagtcaaatctggagtggcagatcccaatgctgaatttcagcatatgaattattataaccaatataaaagcataattttacggctgaatgatatttttgagatagagaaagagattaattataaagaagatggtgtatcaagaaaatcaagtcatttcgtttctatctttaaattagtaaacgactcacataagtggatgcaaggtagaaattataggttttttatagatgacatggttactaagaaattaataaataaaggcattccagttgattataagaaggttgacgggattaccaattttgtaactacacacatcaatactaatttgacattcattttggttaaatatctctcgctttgggctgacgtagtaagctcatttatgtctgaggaagaacgtacgttgaatgcatttttcctcaatctctcatctatgttagaaatgggtaattatgatcctcaggttttagaggtgatggcttatggaataaatagaagtactgcaattgaattattgaaaaaacaaaaaataaacaatgagcaaaccacttggcaatatttagtgcaatataatttggataagctttcaccattgcataggaaatatttgcaaagagcgggctttgggtcttcaaagcctgcataa

SEQ ID NO: 59954 - DNA, 960 bp, Agrobacterium sp. R89-1
atgaggtttagcctgtctgaaatcaatgccgacgatctggtaaacattctcgctggtgacccagaggagcttggcgttcatttgcagctggttgagcgcgatgtggtcatcgatggacacaatgtaaaaatccactgccactgtcttacagtcgacggcaatggccgagtccgcccgaaaaggctcgccgagtttatgcgaaatgcggtcgcagactacgcaattccccgatccaaacttcaacaggcgagagagcgggatttcaaatatcgatcaagcagtgcggtcgccgagatccatcggcaggcgtgtacggtctttaccgatcttgagaaaacaggcgaaggcggcgagttgcttctttttcttcttgccgagaggtttctcaagatcccgcagatcttatgcaaaatggatctcaagactgacacccgcatgcactaccatggagcagatggtgtttatgctggtgttaccgctgaagggcttttaaagctctattggggtgagtcaaaggtctatggagatgccactaccgcgatccgtgactgccttgcatcacttgcaccgttcctggcagaggaggatcatgaaggtgcagagcgcgaaagagatcttgtcttgctgagcgataaagcggatttgagcgataagtcgctaacagaggcattcaaactatatttcaatcgacagtctccgctctctaaccgagtgcaatactgcgggttggcgttgataggatttgatgcggacatctatcctgctgatggaagtaaaattgtatcagaagaattggtcgtagccgcaaagaaggaattgatacggtggtcgactaacgttggcaatcgtctaaagcttgaaaagcttgaccagtttgaaatcgagttcttctgcgttcccataccatcggcagatgaatttcgcgcaaatttccttgaggcgctggggggaactcgatga

SEQ ID NO: 59955 - DNA, 2607 bp, Agrobacterium sp. R89-1
atgagccaagaagatttgcagcaatggttgcttgaggagggggtgaaagaagagctagccgttctgacgaagcttacggtagtcgctgaaatcgataacctaattgcggaagagaatattgctgaaaatgcgcagattatagactgggagaggatgctgctcgcagggagtatccttgcacgttcaaaatctcgggcatgccaagaagccgttttgcgcattgcgacagctgcattgacgctcgagaccagttctgtggtgcgtgacgccggggcgatattgctggacaaactctctaatcaacgaacaattgatctcgccctaggtcgcgagcgcttggtgccggatctggaggggcgcctaggggtatcgcaacgcctagaattgcagcgccgtaaaatcgcgaattctgtccttcttgaggcaactggagcaagactgtccgtcaatgaattccagcacagcttttggtccggagccaccggtgaaaagtcttggatgtcggcgtccgcccctaccgcttctggtaaaacatttctggtcctccaatggctcatcgaccgcattcgcgtgaatgaagcaaacattgttgtttatctcgcaccaacgcgtgcactcgtaactgagattgaagaaagtctcaaaagtgttctgaagggcatgggactggataacattgatgtctcgtccttgccgattagacaaaagtatttagacgccgttgctaaaaagaatggcttggtcctagtgttcactcaggaacgcttgcacctgctcgccaatctattgggcgatgaaattttggttgatttgctggttgtcgatgaggctcacaaaatcggagatcatcaacgcggtgttgtattgcaggatgctatcgagagggtttctcgtgctaacgtttcgatgcgcgtcgtctttataagtccggcaactcagaatcctggcgagctactggacgacgcacctatcggaattccgacccttgctgttgacagtgatgtcccgaccgtcctccagaatcttgttacagccacacacgtcccaagacgccctaaagaatggcatcttcatttacgacaagggcttgagcatcgcagtctcggcattctcaggcttcccaacaagccagatgggttaaggaagcgcctcgcgtttatcgctgcggcagctggcgcgcgaggtggtaccctcgtttacaccaacggtgctgctgaagcggaagaagttgcctttcttatcagtcagctcgttgagcagactgataccgttgacgtcgaactctccgcgcttgcagatttggcacgaaaaggcgttcatcgtagctacggtctcgctgcactcgtagagaagcgtgtagcgtttcactacggtaacatgccctcgctcatcaggatggaggtggagcgtcttttcagagaaggtaaactccgcttcctagtctgcacttcaacactgatcgaaggcgtcaacctttcatgccgaaccatcgtagtcagagggccgcgcaaggggaaaggcaagccgatggaacctcatgatttttggaacctggccggccgagctggccgctggggagatgaatttcaggggaacattatctgtattgatcctgacgacactgacgcttggccaactggagttccgagccgtgcgcgatacccgataaagagggaaactgacgctgtcttgagcgccggtggtcggatggttgactttctgtctaaccgtgcgatggcaaccgagcgcgaacttttggaccacccacagctggagcaagttggagcttatcttctcaccacttatctgcggctaggttcgattgcagaggcggactttgcgaagcggcaaaatcctgacgatctgaccaacatcaacgcgcagttaggtatcttggcggcggagatttcgatccctgcggatatcgcgatacggcatccaggggttagcgctgtagggatgcaagcccttctggccgccttccgtgcctactcaggagatgttcagaatctgctgatctccccgccgggaagcgcggatgattacgatagtgtggtcgatgcatttacactcgtgaatgagcatctttatccggctttccagccgcctggtctcctcaagctgcatgctctgattgttattgagtggcttaaagggctctctctttcagcaatcattaggaagcgcatcgaatggcatcaacgaaacggtgttgaatataagctgccaaagcttattcgcgacacaatggatctcgttgagcaaacggcgcgctttcgtgctcccaaatacttagcagcatatcttgatattctccaactctttttgaatgaggtgggccgaagtgacctgatcgacaatgacctcgatattggtgtagcgctggagtttggggtctccagtaagactcttttgtctttgatggaactcggcctctctagaatgagtgctgttgcattatacgagaaaattgttcgagacgactttgacaagtctggatgtttggagtgggtacaaacccacaaccgggagctagatggtatggacattcctgtcattatactgcgagaagtcagggagaaaatgttgggaatgggaactacctaa

SEQ ID NO: 59956 - DNA, 924 bp, Rhodobacteraceae bacterium O3.65
atgcttgatatcgtttcaggcgacccagatgagcttgatgttcacttgcagttggttgagcgtgacatttctattgagggatgcagtattcgcgtacactgccactgccttacggttgatggaaacggtcgagtgcggccacaacggttggctgagttcatgcgtagcgccattgtagattatgcgatacctaagacgcgattggatgaagctcgagctagagacttgaagttcaagtctggcagcgctgtgtccgcacttcaccacgaagcactcggtgcgtttactgatcttagcaacactggtgaaggtggagaaatgctgctatttttattagcagaacgttttctaaaactacctcaggttttgtgcaaaatggacctgaaaaccgactcccatatgcattaccatggtgcggatggagtctatgcgtcagtgacagatgacggattgctcaagctgtattggggtgagtcaaaagtttacggtgacgtgaccgccgcaattcgagaatgtctagcttcacttgctccttttctcaatgaatctgatcatgaaggctcgtcgcgggaacgagatcttatccttctaagtgataaggccgatctcaataacccaactcttacggccgcttttaaaaaatacttcgatagaaaatcatccatgtcaaatagagttcagtattgtggcattgcacttatcggatttgatgcgaaattttatccggaggacggcattaaggcagtcgctgatgacattgctcaagctgctaaagatgaaatgaaaaaatggctgaaaaacttggagacaagaatctcagttgaaaagcttgagacgtttgatttggaatttttctgcgtgccaattccttctgcagaaggattcagagatgcctttcttgaggcacttgggttaaaattatga

SEQ ID NO: 59957 - DNA, 2247 bp, Rhodobacteraceae bacterium O3.65
atgaggattgaagcctacaaaaggaaatttgatgactcagtgttggttgaggcaactggtaaatggcttggtgtcaacgaattccagaaggagttttggacaggcgcgtcttccgaaaattcgtggctttcggcatcggcacccactgcgtccggcaagacatttctcgtgcttcagtggttattggaccggcttataaccactgatactagtgtagtagtttatttggccccgacgcgcgctcttgtcaccgaaatcgaggctagtcttaatgatcttctcgctgacgacaagacgatcaacgtaacttcattacctttggcagaaaaatacttatcagctgctgcaggtgttacaaaaactatatttgtttttacccaagagcgacttcatttactggctaatattcttagcgacgagctatccgtcgatcttctcatcgtcgatgaagctcacaaaatcggcgacaatcaaagaggtgtcattttacaagacgctatagagcgaatctctagaagcaatcacaagatgaaagcggtctttgtcagcccttcaactcaaaatcctgacgagctgcttcaggatgcgcctattggtacagatcgtgtctctgttgacagcgatattccaactgttctgcaaaatgtcatcctggcgcaacaagtgccacgtaagccaaaagagtgggccctcggtttagttagtggcgattcttcaatacccattggcgtgctgcaacttgctaataagcccgctggtttgagaaaaaggttggcttttattgccgccgctgcgggcgcgcgcggaggaacactgatttactgcaatggagctgcagaagctgaagaaattgccctcctgatcagccaactggatattagggagaaaacagatgataaagagcttctggatttggctgatctggcgcggaagggtgtgcatagaagctatcagcttgctccacttgtggagcgtggagtagcttttcactatggtaatatgcctgcgcttattcgagtggaaatcgaaagacttttcaggattgggaaaattaggtttttagcgtgtacatcgaccctcatagagggtgtcaatctctcttgtcgaactattgttgttcgtggcccgcgtaagggccgtgggaatccaatggagccccatgatttttggaatctcgccgggcgagctggacgatggggaaacgagtttcagggaaatatcatctgtatcgatccgaacgacgaaagtgcatggcccattggtgtgccaaaacggtctcgatatccaattcagcgcgaaacagacgcagtgatgacctcaaaggatggcttggtcgagtacttggatggtcgagatatcgaaagtttaagcgaccttgagggtgctgagcactacgaacaagtaggcgcttacctgctagatacctatcttcggttgggctcacttgcaaacgcaggtttggcaaaacgtcatgattccaaactcttggaaaaactagatgcttgtcttgagcggatggcgaggaagattgacatacctgctgaactttcgatcaggcatcctggtgtcagtgctattggactccaacggttactcgatctattcaagaattacgaaggtgacgttgaaaatctgctgcctgctccttcggagagtgtagatgcgtatgatagatatgttacggtgatgaggcgcatcaactctagtatttttcctgtttttttgccagatggtctcgttcctttgcatgcactcatcgtagtcgagtggttgaagggactatcactcgctgtcattatcagaaaacgtattgagtaccaccaacgaaacaataagacgttcaagctggccgtgctcattcgagatactatggatatcgtagagcagactgcgagatttaaagcgccaaagtatatttcagcatatatggacattcttcatatgcatctcttggagattaagcgagatgacctcatcgatgaggattttgatattggagttgcgctagagtttggcgtctcaagcacaacactgctttcgttgatggagttgggtctttcgcgcatgacggctgtcgcattatacgaaaagatttctaaagacgatctaagcagagatggttgtgtcagatggataaccgatcatgccccaaattttgaaggtatggacttgccaaatatcatcgtccgagaggttttggaaagagttcgccctccaagatcgctgcaagagcaatttaccgactaa

SEQ ID NO: 59958 - DNA, 906 bp, Bacillus sp. SDLI1
ttgataaagcctcttgtcaagaaaaaatttcttgatcatttttatcatgaagttaaggaccatgtacttgaagacgatagatcacgattaaacttacatataatcagaattttaaataatcaatttgctataaagcctttaatgcaggaattactcaatcatatgatatcgttttgtttatcaaaaaaggaatataaaaaccttatagaagaagaacgttttggtgaacttgcagaattagcccaagagcgatttagagattatgaatcaaacgagggagagtttggagagttactactttattgttttttagaatctcatttagaggctcctaagttgttaacaaaaatgaacttgaaaacttcccataatgattatgtgaagggggcggatggggttcatctattaaaactaagtgaaaacaactatcaaattgtttttggtgaatccaaaatgtataaaacttttaaagaaggattaagaaaagcgttttcatcaataaatagttttattaatcacaaaaaaaacaatatacattttgaaataaacttagttaacacccattttgaccaagaaatagaagatgaacaaacctatgaagaaattaaaaaaataatttttccgagtgcgcaagaagatgaaataaatacagataatgcttttggaatttttgtgggatttaacttggaactagattctcaaataaaaaggctatctaattctgattttcaaaatactgtgcgtggtatggttaaggatgtagttaaaaaggaatacaaatacattgagtcccaaatcgataagtatgaattatacgggtatacattctacatttattgcattccttttgtggatattgagaaagtaagaaaagaagcaataaagaaattaaaaggtgaaggctaa

SEQ ID NO: 59959 - DNA, 2565 bp, Bacillus sp. SDLI1
atgaaaatattagaaagactagctatggatgtagctaaggattcttattttaaccagctttttaatgagatcagtgaaatgttttttaaaaatgtatttcaggaaaaacaagatcttattactaagaagaaattaacggatataatgaggttttgtgatatcttatcaaactcaacaagtactgaacatcgaaatttatcatataaaataatcacccttttatatccatttttccaagaggattattcattcaaattagtggctaatgcagttttatcaaaactagggaatttcccggctctacagctattaaattataatgtcagcttaccttttgatagaaggttagagacaaaagtaaaaaggatcgtacaacgtacgaatacttttgataatatttatttaactgatacccaatttgcattgtaccaaaaattgattaattccaacgtgtttagcttttccggtcctacttcaatgggaaagtcatttatgattaaattaaaaatagctgaattgatgaatgaagagagaagaccaaacattgcagtaatagtacctactagagcattaattcatcagtttgcatccgagattaaaatagatttaaaaaaacaggttaatgaaaaaaattatacagttctaactcatgggaatctagaaggacttgacattgagaatacaaaattaatattggttctaactccagaaaggttactctcttatttatctgaattcacttatcctagaataaattgcttgtttattgatgaagctcataaattggctagtgagcaagataaaaggagtgttactttatatactgctattgaaagggcaatgtttagcaacaagcatattcagttgttttttgcctcaccaaatgtttcgaacccggaaatattcttaaagctatttaataaagaagcgaattatgtctaccaatctagtgaatccccagttgctcaacaacttttttatatagatttaattgaaagatgtgtgattcattatacagaattaaaagatataatgtataaacccaatattttaaaagaacaaacagactgtttaaaaattattaattatttgtctaaagactatgctaatctggtttattgtccttcaagaagggaagcagttactaaagctcaagagtatagtgaaagatttccaacaaaagatatgagtatagaaacaaaaaaaagaattcaggaagcaattcgaattattgagtctgttgtccatcctgactattatcttattgattgcttaaaaaaaggagttgcttatcactttagcaatctaccccaggttgtgcgtaataatatagaaaaactatttaaagatggtattataaaatttctattttgtacctctactctgttagaaggagttaatttaccagcaaaaaacgtttttattcttaaaaataaaaatgggactagaaattttaaaaaagtggacttttggaatttggccggtagagctgggcgcttaaaatatgaattgtctggtaatattttttgcattagaaatgaagatagagattggaaaaactcagatgatttcctaaaaggtaaagaaagtataactctgaaccccacagtatctaagaatttaaataacaatatttcagaaatagagaatgccataaacaacaaagaattaactaagttaaaggcaactgaaaaagatatagttaaatatctagctaatatcataagtattaatacattagatcttgcagaaggctatcaatcgccaattattgaaaaattaattgagatagatcagtcatcactaatagagaaagcaaaagaaaaagtagatttaattaaaattcccaagaaaatcttgaagataaatcaatttatacctattgaacaacaagaatctgcataccaatatgttctcgaaaataaattaaagggaaaagatgtgacttttccttctacaattgactatgaacactgtttaaacattctacgattgttttataaaatatatcaatggaatgattatgaacaaaagaaaagccttggaaatctaaatagtctaaattactatgctgttattatgaatcaatggattaacggaatgagtcttaatgaatctattaatagaagtatattttttcatcaagacaaaaagagaaaaatatatgtctatagaaataaaaaaaatcagccagagtattttgatagcaaaaatagaagtcatattaacatattgattaacaatttagtggaagatatagaaaatatacttcgtttttcaattcagacctatgtaagtcattattatttgatactccaagatatttatggtgaagataaagcaggtgttaattggagtaactttttagaatatggtactaggaatccgatcgggattgcactccaaaatatggggttatcaagatatgtatcaaattatttaattaagaattataaatcattatttgatattgaatatgggatactaaaagtggataaagaaactcttttagataaattggagttcggaagtatagagcagcaagaagtacaaatgtttttataa

SEQ ID NO: 59960 - DNA, 840 bp, Burkholderia sp. LMG 29315
atggcggggccctttttcaaaatcgtggtcaatgatcttgcgaggacgccaaggcttacgggcatctgtgccggttatgagctgggcgcatggcgtgccgaccagctctcaaaactcctctttcaatccctaccagacttctgtctccgttactcagagtaccacagcatcgacgcaggaaacgccgctgagcgactaggcgaggcggcgaggaagatctatcagactgacgcgtatcgaaatcgtggtgaattcggcgagttaatattgcacgttgcgctcaagaaggtgttcgcaacccttccggcgatatcgaagatctacttcaaagactcgagtaatcatgcggtcaagggcttcgacgccgttcatgtcgttcctactcaggccggtctcgagctgtggctcggcgaggttaagttttaccagaacattgggaaagcgattaccgacgtttgtctcgagcttgatgcgcacttcgagcgtgagtatttgcgagatgagttcttgctcatcaaaggcaagattgacgagacgtggcctcatgcacagagattgcaacaacttcttgacgagaccgtttcattagatgctgtttttgatgtcgtggttgtacctgtgttgctgacgtataacagtccaacgacagcgcttcacaaccaaagtactgacgagtatctacgtttgctaacggccgaacttgagaaacactatcaaacattcatctcgaagaacaacctgacacacattgaagtacgcctcattctcttcccactgagcgaaaaaaagctccttgtcgatgcgctccataagcggctggagatttaccaatgcctttaa

SEQ ID NO: 59961 - DNA, 2130 bp, Burkholderia sp. LMG 29315
atgcctttaagtttcaccgagatccgcgcgaaaatagcgaccgccgcgctagcaggaatatcagaccctttctcactcttgcaagatgtctccagtttccttaacgtctcgcggggcacgagcgaggaacattttggacaggaactggttattcgcttactcgacatccggcatatgttcgaagcgcatgctgtcatcatagacgcgctcgtccgtgaatcgggtctttttccctatcttaatcctgaccgacttggtatcgccgatgcccttgcatacgaaatgcaccgtccggctgctaattcagacacagtttttcaccgggcacaggcgcaagtatttgatcacatcatgtccggcaggagcgtagtattgagcgcgccgacgagtttcgggaaaagcctaatcatcgacgcaatcgtgcatttgggccgttttcgcaacatcgtaatcgtggtcccgacgctagcactgcttgacgaaacgcgacgccgccttgcagcgcacagcacgagatacaaaatcattacccactcgtcacaaactcccgctgatcgcaatatcttcgtgcacacgcaggagcgagtcatacagaacgagcacatacagaaaaccgatttcttcgttatagatgagttctacaagctaaacccgggagaagatgacggccgcgcgcaaatgctgaacttagctttccataagctttcaaaacaggcaagtcaattttatatgctcggccccaacattcagaacatcccggacggtttcatcgagaagtttcaatgccgattcattcgcaccgacttcaacactgtcgcctccgaaattcatcgctttgacgtgcaggacgacacgactcacgctgttgatctgtgtacacggctgaaagaacccacgctgatttacgttcgatcgccagcacgagctcacgcgctggctactaagttggcgaacgcgttgggcgacgtcggagctgcctcggcaaaggaaacctcgcagtgggtcaaggagcgttaccactccgactggtcgtttgccaaggcactcagcgctggcattgggatacatcatggcaaattgccgcgctcgcttactcagctcatggtgcgtcgcttcaacgaaggcgcaatacgctttttggtatgcacgtcaactttaattgaaggagtcaacacgcgtgctaaacatgtgattgtcctcgataacaaaatcaacaatagaaagttcgactacttcacgttttcgaatatcaagggtcgctcgggtcgaatgctgaagcattttattgggcacgtctatctctaccatgagcctccgcaggcagaattgccgttggtcgacatacccgtggtgacgcaatcagacgacgctagcgacgcgttgctgattcagttagaaccgaccgaactcaccgcgtcatcatcggggcgggtaagacagtactatgaggaccccctcctgagccttgaggtcctacgagagaatgcaggaatcgacccagcggcgcaactcgccgtagctcaagcaatcgtcagagaccttcgccgggctcacactatgctttcgtggcggggctttccatcgtttgaggagttggcctacccgtgtgacttgctttggaagcatttcaccgaaggtcgaccgcggtccggcgcaacgactgctagacacctcgcctttctgctgcggcgcctattgcgagcccgcaggttcagcgatgcactcgcgcttttccaccgcgatggaaggcatgtcgacgacgccatcgaaacgctgctcgactttcagcgtcaatgggccgagtttcgagcaccgaaccttctctctgctgtcgaccgaattcaacgccacgtcttcgagaaatatggactggcggctggtaactacgaagcgttcatcggcagagttgagaacgtaggccgtcctcctgtagtaaatgcgctggacgagtacgggcttccgacgcaaataggacaagtggtctggaaggaacttggccggcctgacacgcttgacgagatgcttgaggcgctgcgctcgcgagacctctattaccttgaacttaccggatttgagaaccgcttcgtacaggatgtccgaaatagcctaatgcctacccgagtcgcatag

SEQ ID NO: 59962 - DNA, 894 bp, Idiomarina sp. T82-3
atgaatgggcgtttagaaccacagttacaaaattcatcagaaattaaagagctcattaaaaggctaaacgttaacgttaagcttgaggacggaaggtctgtaaagacacttatcgcttatatacagcctagcgctgaaacggcgtatctcgacaagttttttgagataataaaaaaaggtgttcttgcaaactttgtatttacttgtaaagaaatagaaagaaagctaggcctgccgaggcaagacaatgaagctaaactttttgagaaagcagtgagaaagcttagccagcataccgctaagggagaacttggtgaactaattctttttaccctactagatgtgtacttcgaagcacctaagttattaagcaaaatagctagcaattcaagtcgtaggatgcccgtatttggtgcagatgccgtccacggtaagtttgacggtgataaattcgagctttttttaggggagtctaagctacatcaaaagtttagtcccgcagctactgatgcagtaaagtcaattagctcagcaaaggaaaactatcaaaatgagtttgacctaattgagagcaatataacgcttttgaatatagctccgagtctagaagagcatcttattaaaattttggatcctttctcaaacgaaaatgtcgaggatttgataagttcagcatgttttattggtttctctgagcctcatttatttcaatgctctcctgacgtttttgagaaacagtacatagagctagccgagaagcatatcaatgattattatgaaaaagctgagcaacaagacctagatatagaaaagacttacctcatgatgcttccattctcttgcataaacgagctagtagagggttttatacaatatataggtataccgaaatga

SEQ ID NO: 59963 - DNA, 933 bp, Idiomarina sp. T82-3
atgagtgagtttattaggaagcttgctgaaaccgcattaaatagcgaaggctatattcactcaagtaatgagcttttccggtcgtatgttaaaaaaatgactggggacagctatgacatagatggatctgacgttcgaaaattagcttcaatagttcaatacctatatcaattaagtgatagaaactttcgagaagaaggaaacgcagtactctctatgcttttagaagtttgtggaaatcagcatccagaagtagttggaatagcgcggagaatattttctgattctggcgactttccaaatattaatcttatcaacaggacatttccgaagttcgaatttaaatacagctttctgactgaagcagagatggagtttaaaagtgagttgaactcggttaaagagttagatttctcgctcacagacttccaacgcttgttatgggaggatctgacgaccgaacaagatgttctcactgttgcacctacatcagccggtaaaacccatgtaatactaagctacttagtaaacacaatcctacgttctgatggtgctttcgcggcagttattgtcccgactagagcgttaattacagaagtggctaataaactacatgagattacctctgcatatggcagtgcagaaaaaatcgaaatttgcacggtgccaaaggaagaggcgtacggtgataaaacagtttttgttatgacccaggaacgcctatttgaggtcttacagcgaggcgacgtttcatttaactatttgtttattgatgaagcccacaatatctcagataatagtagaggcgttttgctacacttgactattgaaaagcgagagtgtaaaaatatctgtgtaaatggcattcttagcaatatcgaagaaggatatcagaatgccaatatcagacaaactcatcgatcagctgcttga

SEQ ID NO: 59964 - DNA, 927 bp, Colwellia sp. Phe_37
atgagtagtttaaataacattaatcaatacgcgtcaacgtcttattcagattatgctgaatgtatagacgttgttgagcatgaatactctattaatagtgtaaaaagccagattcgaatgcactatttaaagctagatggtaacgggcagcctatggtgaaagctttagctaatatactttatacctatattattgattactgtatatcagcgaggaatcgtgaagaaccattgacaactaggcagtctactaagttaacaaaggaagctaggaacctttttcgacacccagacataacagacgattccccagataaaacaggggaggctggtgaattattattatattttttaatggaatctgtattaaaagcccctcaagttgtatcaaaaatggagttgaaaactaaccataaagatgaggtgaaaggctctgatggtatacatgcaaaatttaacaatgaaaaaggagtggttgatttctactttggggaatcaaagctttataaagattcagcagctgctattactgacgctattactagtgtggaacaatttcatgatatagaaatgtatcaacatgagttcactatggtaacaaaacattttaaatatgctgatgacgtaactaaagatgcaataacatctcttattgttcacggcgaacctggacccaatgcatgtattaatcatgcatgtttgataggttatgattttaaaggttttgataatttagctggcgcaagttctaatgagttattacaagattttcttgctaagtttcataaggatggtgagagattaacaaaattgttgcaaaaaaggtttgataaatttaataaaaaacatctttgttttgatgtttttttcattcctttcccatcagttgtggagtttcgaaatgcttttaataaagcacttgattaa

SEQ ID NO: 59965 - DNA, 2102 bp, Colwellia sp. Phe_37
ttgagcataatacaaaatgaatacattaataagctcttgaacaggcttgaggttgcaagtgttttattacagttgccggcaagttttcatccggataaagttgttgattttgacactagggaaataaatagtttagttggatattcttcaatactctcattgtcggaaaaaccaagtgatatttccctgtcttatgaaattattacgcgacttttagagtacaccgatggaaagtcagatagggtaatctcggcagcagaagtagtttttgctcgtattggaaattttccaggaagatctctactaagaactagacattcagatgccattaagtttgatatttcagcacctttaaagttggaatgtgttgcaagggaagcagaaaacacagtctactttgagcaagaaaatagtgtcttattgacggattttcaatataagttttttgattcattgaacgaagaaacggctcttagtgtgtcagcaccgacatcagcaggaaagtcttttgttttaaacttagaccttattcgacaaattaaaaataaggttggtcaaagcattatatatattgtccctacaagagcattaatttcggaagtttcttttagaatcagatctacattaaaagattcgggattaggcgatgtaattgtgagaacagccccttttcctgtagatatgagcaaaatcaaacaatcagtcgtttatgtttttacacaagagcgaatgatgagctttattaactcacaagaaggaaagccttatgtgacgtcgctgattgttgatgaggcacatgaaatacaaaatggaaagagaggtatcgtattacagaatgctatcgatattacactgtctcgatttggaaatatcaaaatattatttgcaagccctttaattaaaaacccttcttattttctttcgttatttagacaaaatgctaatggtcgattttttgttgaaaccatatcgcccgtatctcaaaatttgatattagtgaatcaagtacatggtaagcctttagaactagatatatctgtacttaatcaaaataaaagcaccaccgtagcaagagtaaagacagggtttaagtttagaaatggacttatattgcagcgagcaaatttagcctattctatcagcgcaatgaatgactccgtaatttccttttcaaatggtccatcagatgcagagaagacagcttgctatattgctgatttagtttctgattttatgccaagtgaagatattttatcgttcgtcgactttattagaaaagaagttcaccctgagtaccctttaattgattgcgtattaaagggtgtagcgtttcattatggaaatatgccttcgttagttcgctctgggattgaaagcctatttaaaaaagcagatataaaaattatctgttgtacgagcacattattacaaggtgttaacctcccagctaagcatattattattgaaaatccaatgtccggacaatctaatccaatgagtagggccgattttttaaatttatccggccgagcaggacgcttacttcatgagtttcatgggaatatttggtgtattcgaccagaaggatggcaacaggattgctataaaggggataaattacaagaaatcacttctgcaataagtaagattatggaagatggtgggactttggtacaagagttgttggctgattctaacttgcaaaacgatgaagcagaagcagcttttggtaagttgtatcatgattatttagtagatccgggactcgcgtttgtagaaaaatatagaagtgaaaataattccgaagtattggataaaacatttgaatcgattgaaaaaataaaaattacagtaccgattagtattttagaaaacaaccaatcgttacgacctgatcatctagaccgtctttaccaacacttgaatgatgataaagacttacctaacgcttttccaatgttcccttataaggaaggtgctaaagctaggatggaagctatttttgaaacaattactacttgttttaattgggaattaactgacgcttataagtcgtggattagctatttggcttatcaatggatctggggagagcctatagg

SEQ ID NO: 59966 - DNA, 942 bp, Grimontia sp. 96-237
atggataatggaccttttggctctcgttgcgttatcgaagaaaagatttcagacagcactgtaagagcctacctagtaggttttgacttaaaagacgatggttccagccaatatcgatggaaggagttcgtccagagagtcttgagtgtcattcatgaattctcttttggttaccacgaaggtacttcgacaagtaatactgaaacactggacaaagtcgttgaagctgctaacgccatatataaaattgacgaatttcagaaagtcaaagatatatacaataacggtgggttcattgaagatgatgtggctgataagtaccttcgacgaggtgaattcggagagttaattcttcacttactgttgagagataactttgaaacagtaccacttctgtccaaaatatacttcaaagactctttaggccacactgttcatggtttcgatagtgtacatattcaacccgaaaccgaatctctttggctgggtgagtcaaagctatacttagacccgaagaaaggattgactgaattagttaaagatattaaagaacacatcaagttagactatttgaattctgagttttctttaatatcaaaaaagattattcatttcgaagagaacaatgaaataaaaaagtggaaaacagcactttctagcaccacaaaattaaaagacaagttaaaaaatattaacataccattattatgcacctatagtagtgagttgtttaccaaatatgatgatgaggagctagatgaattcttatctgaatataaaaatgagataataaatcttaaagaatatttcgacaaaaagaacgatcatcctcttaaggataatatcaacatcatccttattttattcccagtgaaatgcaaaatagagctagtgaaaaggctacacaataagctttctattattcaaatgattggagattag

SEQ ID NO: 59967 - DNA, 2175 bp, Grimontia sp. 96-237
atgttagatttaattaaaaaaataaagcagacaaacgacttctccttcagtgaaacctttagcatctataataattgctcaagaatgatcatgaaagatcagaatgaaggaatgaaagtactaatatatatacttgaacaaaggcgaaaattcgatcatagcctagacgaaatgttagctgatattgttgagtctgtaggattttacccttacctaataaaagagaagcttactctatcctcaacaaattcaaaagtaagactaataagtaacacttcaattaaaatcccaggcaaagttttccatgatgagcaaatgtacctctctcgcttgctatcaacagataagaacctagttgttagtgcacctacgagttttggaaaaagtttgttgatagaggatattatcgcatcttttgaatatcgcaacatagtcatcatccaaccaacacttgctttacttgatgaaactagaagaaagctgaaacgatatcaagataactataagttgatactccgaacttcacaaaacccagatcaagataaagggaatatttttctatttactgcagagcgtgtaaatgaatattcgatgttcgaatctgtagactttttaattattgatgagttctacaagttaagttcgagaagggatgacgaaagatccgacacactaaataatgcctttagctatttactaaaacgttttaatcctaaattctatcttctaggccctaatattgaaggaatttcagagggttttgaagaaaagtataatgcaaaattttttaagacggactatagcttagtggcatgtgaagagcataatatctatgagaactataagaataagttcggagagagaggagaaaagaaagctattaaagagcgagttctttttgacttacttctaaaaaagagaaatgaaaatacacttatatattgctcatctccgtaccgcgctagatatctgtcaaaggcatatctcgaatatctaatcgaaaagggagttactcatagcgacgtaaacatagatattattgaatggatagagagatatgtgtctaaagattggagtttaattaaactactaagaatgggtattgctatacacgatggtgcgctccaaaaacatatcacatcaactataattgattattttaacaatggaactattaaacagttattctgtacagccactataatagagggtgtaaacacaagtgcaaagaatgtaatattctttgataagaaaaaaggagcaaatacatttgtggaccacttcgattactcaaacataaggggacgagctggtcgaatgatggagcattatgtaggtaaagtatataacttcaatccagtacccacctatgatgaaattatagtagacatacccttccatgagcaaaaccctatatcaaatgaagttctgataaacatcgaagaagatgaagtaatagataagaattctgaacaataccagtatataaaatcactaccaaaaaatgaaagagagctattctcaaataactctctttatataaaaggacaaaaagatcttctagagaaaatcagaagtgaagttcatagccatcatgagttgctatgttgggactccacaccaacatatgaccaactttcatattgccttggacttgcatgggacttcttaaccaagcccgacactgtctatcgtccaatgaccaaatctcgacttgtaaaaataacatttgactatggatggaacaaaaacataaacgaattggtcagaaatacatattcttacattctagaaaaccaaaataaaaataaatcagacgccgtagatgatgctattagagatagttttcaaatactgaggcattggttccaatacaagatccctaaatggctgattgtcgtgaacgaaatacaaaaattcgtctgcttagaagaaggtaaaagaccgggtaactacttatactatgctagttcgatcgaaaacgattttatacaagagaacttggccatactatcagaatttggtgttccaagatctgcaatagataaaataaaggacaaaatccctgtcaatctaaaccaagatgaagttattaaagagataagaacaaaaaagttatttttaatggaagacttattagattacgaacgaaaaaagctatcagaaaacttatag

SEQ ID NO: 59968 - DNA, 960 bp, Bacillus sp. P003; identical to SEQ ID NO: 59714

SEQ ID NO: 59969 - DNA, 2151 bp, Bacillus sp. P003
ttgaattgggaagatataaatatttataatatcaataatttaaattttcaagatagcttttctttggcgaagtatgtttcaaatttatctttaagtgataaaaaaaatgaggcaaggaagatactaattcatattttagaaatttgggattatgttaataatgatacaaaagatatatggctagatatagctgagagtcagggcttctacccatacataaaagatagactagatattacttctgaaattagacaggcatatcattattcagaaaacatagaaaatatagttttccataaagaacaaaaaattctttctaattatttaaaaagaaaggagaatattgttgttagtgcaccaactagttttgggaaaagtttgttgattgaggagatagtagctagtaataagcataggaacattttaattatccagcctactttagctttaattaatgaaactagattgaaactgaaaaaatataaaaattacaatatgattgtaaacacatctcaaaaaattgagggtaagaatttgtttattttaacagctgaacgggttttagagtttaaaaactttcccaaaattgattattgtatattagatgaattttataaaataagttcaacacgagatgatgagagatcagatgtattaaatatagctctaaagaaaattttaagtaataaagagacagctttttattttataggccctaatattgactcaatttcttcaggttttgaggaaaattacaatgcgaaatttgtgaaaacagattattccttggttgatactagagtggaactggtgaaagtagactttaaaagtaacaaaccacgtttaaaagaaaaagatagaaagataaaattatttgaaatgctatttagaaagaaaaaagaacaatctattgtatatgtctcatcgcctgatcgagcaataaaaatagcaatggaatactatgattatttagaagagaagaagcttctagaaaaacaatcagtattaccaataaatgaatggatatctgaaaatattaatccaagttggagttataataaattattgttacagagaataggcgttcattcaggaacaataccaaaacatttaactcactcaattattgaatattttaataaaaagaacttagatgtacttttctgtacatcaactataattgagggagtaaatacttctgctaaaaatgtttttatttttgataaccgtaaaggttctaatgaaatagactattttgatttttctaatataagaggaagagctggaaggttattgaaacattactctgggaatgtgtatgtttttcattcgattcccaaaaaagctaaagttgaattagatatgcctttttatgatcaagaaaaaatttcagatgaaatattaattaattttaataaaagtgaagttaaagcaaaaaaccttgaaagatatgaagagcttactagttatgatgaaaggttattatccattataaaaaagaatgctgtttctgtaagtggacaaaaaaagattatagaaagtatattaaccacgctaagatctaatccagagctaattttatggactggtgaaccttcatttaaagcagttaaatatataactgatatttgttgggataacttattgaaggaaacagaaacaactaggcctatgacaaagaaaaaattacctgtagttgtatataatagcttaagaagcaagtcagtaaaagaatcattaaataaagagtacaaatatttaaaagatcaatttactaagttgacaaaacaacaactgatagataaagcaattagtaattattttagagaacagcgacattggatttcttataaagttcctaagtggcttgaggtcgtagattcattacagaaggaaatatgtaaaataaatggagtgtcaaaatcaggagattactcatacgttgcttctcaattggagaatgaaggggtagaaggtgatttttcagtcttgttagatatgggggtaccatctagtgctattaataaaattaaaaaccaattttctaagggaatagatattaaagaattaatttctgaagctaaaaatattgctgattcatcaaataccaatttaattgaatatgaaaaagaaaaattaaacgagctataa

SEQ ID NO: 59970 - DNA, 855 bp, Achromobacter sp. 2789STDY5608622
atgaaggcgtatgaaaaccttcctgaaagactgctaacttgcctctatgattcaacccatgacgctggtgcccaagccctttattgcgctggatttgaactgcaggaatggcgttgtaatgctttggctgctcacatcatggagtggattgcggactacgccctcgttgaggatgaactagatgttagccacgcaaacatgtatgttcgacttcagcaagccgcagttcgcatctacaccagtgataactataaaaaaagaggtgaggttggagagataactcttcacgcaatatgccgagacttctttggaaccattccatttgctcctcgagtgcattatctcactgcgtccaacgatgtcgtaaagtcctttgacatggtgcacgtaaagtatttggaagaagacaattttgaactttggctaggagaggccaaattcttcaaagatgcaaatgaagccatcacttccgccattgcatctgtcacagcccatatcgacgcaggattcctgaagagcgaaaaactcatcctaggaccgcaaatatcaaaaaccattcctcaccacgagaagattcgagctcttttttcccaaaatacatctatcgatagactatttgcaactgctgtatttcccatttgtattgctgccaatagcgatgctgccgcaaatggaaaatctcacgatggcacttacgttagtgctgtccgacaagagctcgcaaagctagaggctaggttgagcgcgtcaggtctccaagaaaagatccgggtacttctaatatatgtaccattgggctcgaaggatgcactcgcatcggcttttgataagcgattaaaaggcttgcaggtatga

SEQ ID NO: 59971 - DNA, 2082 bp, Achromobacter sp. 2789STDY5608622
atgaatgtctcacaagatgaatggcatgagctcgccaacctaacaagtaccgagctgaaagcccgtgtcttccgcattcttcaaaaagcagctatcagcattcaggaaggggacgccgatgatcccagattgctggaggtggttcctcgattggcggatctattcttatctaagccagagttagatggccttcgcgaagcgttgagctctttggctcgagccaccggcctctggaactatatcgacaaggaacaggcaacaacagcagacttattactggccgaatcggtcactgttcctgagttgggtggggttactctgcaccgtgaacaaatcgttgctctgaacgatctgttggcaggtcgtaacctaattttgagtgcgccaacaagttttggaaaaagtctcctgatcgacgcgttgcttgcttctggaaattactcacgtatcgcgatagtcctgccaacgatcgcgcttctcgatgagtttcgccgtcgattgaaaaagcgcttctcagaacgctttgaactcgtcatgcatccagccgaccggtcgcaagaagagaagccaacaatttttttaggaactcaagagcggctcataagtcgcaatgatcttgggatattagatttaactgtcgtcgacgaattctataaattggacccaaatagaagagacgaaaggagcatcactttaaatgcagcagtttcaaaactactgaacaaatcacgacaattcttcttcctcggtccaaacatagacgacgtgaggttctccagtgaagggcgatggaaattcgaattcctcaagacccgcttttcaaccgtggcggttgatacctacgacttaggtggcgtccccgataaagaagcacgcctctttgaagagcttgctgaagagcgccactggcccgctttggtatttgtttcagccccagacaaagcgaatcgtctggcaagtaaagctgcagaacaaatggcagtatctgacggcagtgctgaatttgcgcaatggctatcggataacgtaggtcctaactggtctctcgtaagaacagtgcgatttggattcggcgtacatcatggccgattgccccgagccattgcctcgcaaatggttcgcatgtttaacacatcggacttaccagtgcttttctgcacctcaacgttgatcgaaggagtgaatactgccgcaaaaacggtgttgatctttgataaagccatcaacagagaagcctacgatttttttacttactccaatataaaagggcgtgctggtcggctaggtgagcatcatgtcggacaagtttatttattcaaccgcccccccgatcatcagtcaatggaggtagcacctacgctatttggcgatcaagacgaggcacccgacgactatgtcgttcacctcgaagaacaagaagtaactcggaaaacagatacgcgagttgcccggttaaaaatggacctgggtttagacacagcaggactgaggttagctgcttcaatcggccttgaaaattcccttgccttaaaggaaacagtgtcaaacgctttgcgtaaaaaagcctctcttgtttggaccggcttaccgaagtatggcgaaatccgggcggtaatcgacgtcatctgttccgttcgacgagccagcgaattcggtgcatttactccctcgcagctaacatatttaatcaatgcccttcgcctcgccacatccatgagggaatttctgctggactatgacaagaaatacaatggaaaagcagaagcgcatgataacgtatttaaatttttaagagcatgcgaatacggactacctcaacatctcgcggcggttgatatgttcgtaaagcaacgttcgccgcaatcagactatagcctgttcatccaatccattagtcgatggttcaaacctgaagcgctaaaaaatctggatgaggagggaattccaattcagatttcggaacgcttctatttcaatgaaagcaaacatgctttagctcagaagcttctattgttggcccgcagaaaatctgagcgcctcaccgaatttgaaagaaagtggatactatccgctttggaatga

SEQ ID NO: 59972 - DNA, 975 bp, Sphingorhabdus sp. M41
atgtccctatacatcaatggagatcgttccctgcctgaatttacgtcagatgatttagagggcgtcctgtcgggcgatccagatgagcttgacgttcatttggttgcaattgaccaagatattgaaatcgacgggttggcaatcaaaattcactgccattgcttaacggtggacgggaatagccgcatccgcgtcgaacgtttgatagaattcatgcgccacgcaattgtcgactatgcgattccaaaaagtaaactcaaagaagcgcaagagagggacgcaaagtacaattctggaagcgcggtagctgcgcttcatcatcaagcaatgggcacatttacagacttgaataataccggagaaggtggagaaatgcttcttttcctccttgcagaacggtttctaaaactaccgcaagtgctctccaaaatggatttaaagacggattctcgcgttcattatcacggcgcagatggtgtctatgcaggtgttgatgacgatggtcttttgaaactgtattggggtgaatccaaagtttatggtggggcctcagacgctatccgcgattgccttgcatctttggcccttttcttgacagaaactgatcatgaaggttcctccagagagcgtgatttggtgctgttaagtgacaaagctgatctgaatgacccagcactgactgctgcatttaaaaagtattttgataaaacgaccgcgctttcaaatcgggttcaatattgtggggttgcacttgtcggatttgacgcaggcttttatcctgcaaacgacacaaaagctgttgctgaggaaatttctaacgctgccaaggcggaaatagaaaactgggtcaaacaaatcagaaatcgaatatcggtcgagaaattagaaagatttcatattgaatttttctgtgtgcccatcccatcggcagatggtttccgatctgcactattaaaagcattgggacaccgctga

SEQ ID NO: 59973 - DNA, 2604 bp, Sphingorhabdus sp. M41
atgtcgctgccagatttacaaaattggttggtcaacgaaggcatcaacgctgatttgatcaaactcataaaaatgactgccgctgctgagctagacaatgtgaatacggaattcgacattgccgctgaaaccaacaacgttgattggcagcagctactactagctagtagcattttagcacgttcagagaaacgtgatcaacaagaagccgcgctgcgcatcgcgaccgctgccatgactctggaaacgccacctcagatccgcgatgcagcggcggtagtgtttgagaaattatcgaatcgacgtgcagtacagcttgccgaacaacgaggatatttggaaccaaacctagaggacagactgggagtatcgatgagattagaggcatcccgccgcgatgcaacacaagcgatattggttcaatcggcgggagaatggctgccggtgaatgactttcaaagcgagttctgggaaaaagcaggccagaagggtagctggctctctgcatctgctcctacagcgtccggcaagactttcctagtactgcagtgggtcgttgatcaaatgcgtgtcggtctagcgcagatcacaatttatttagcaccaactcgagcgctggtgacggaaattgaagatagcttgcgggaaatcctctcgcagtcagataacattgaaataacttcactccccttggctgataaatatactgccgcgataaaagaaggccgcaaactaatttttgttttcactcaagagagacttcatcttttagcaaatatgcttgagaataaattgacgttagacttgttagtggtggacgaggctcataaaatcggagaccatcaaagaggggtcattctacaagacgcaatagaaagagtttcaagaaataatctcgaattgaagattgtatttgttagtccagcaactcagaatcccggtgaacttttagacgatgcgcctgcaaacatcactccgctatcagttgatagcgacaagccaatggttttgcagaacattattgtagcagagcaagttcctcggaagccaaaagaatggaatctgacacttcggacgggtcacaaagagcatgatattggaagacttcaactaggtagctctcctgcaggcttgcgcaagcggttggcttttattgctgctgctgcgggacaaagaggcggcaccttagtttatactaacggtgcagcagaagcagaacaggtcgcaatgctggtgaaacaagtcttgccgaaagaaagcgagattgacccagaattagccgcactagcagacttggcccgaaaaggagttcaccgcaagtatcagctcgctcctttagtagaaagtggagttgcgttccactatggtaacatgccatcgttaatacggatggaaatagaacgcctatttagaatggggaaaattcgatttcttgtatgtacttcgactctaatcgaaggtgtcaatctttcgtgtcgtacaatcgtacttcgtggtccacgaaaagggcgaggaaaaccgatggaaccgcacgacttctggaatctagctggtcgtgctggccgctggggaaatgaattccaaggtaatattttgtgcatagatccaattgacaaaaccgcttggcctagtggtgtacccgcccgcgcaagatatccaatcaagagagaaacggattccgttcttgatgatgcaaaagatatggttgattaccttgaacgaagaaagaataatcttattcaggacctcgaaggctccgataagttcgaacaagttagcgcctatttgctgagtacctatttaaggttaggctcagtttctgaggcggcgtttgcaaagcgccataacgcaacagaaatcgaaaaatttgatcaaattttgtctgaacttgcgtcaaccattgatctgtcggtggacatcgttgttcgtcatcctggcatcagtgccgttagcttacaagctctgatgaatactttcagaagatacgaaggtgacgtcgaaaatttacttcctgcaccagccgacagtatcgattcatatgatcgcttcgtgaccatcatgcgcaggatcaacgccaatttatttccggcttttcagccagatggattggttcctttgcattctctgattgtgctagaatggctcaaagggttttcgttgtcttcaataattaaaaagcggatagaatatcaagaaaactcaaataagacttacaaattacccgtgcttattcgcgagacaatggaaatagtcgagcaaaccgctagatttaaagcgcccaaatatatttctgcatatgtggatatactaaagatatttttaaaagaggttgagagagaagatcttatagatgatgggattgatattggcgtagcgttggaattcggagtttcaagtcttacattactttcacttatggaacttgggctgtcaagaatgagtgctgttgctatgtacgaaaaaattgctcgagatgatctcgacaaaaatggatgtattgcttggtttcaagaatataattcacaactcgaaggtctagaaatccctacaatcatcgtaacagaaattagacaaaaaatagaaaaactgcagattgagacttag

SEQ ID NO: 59974 - DNA, 951 bp, Methanosarcina vacuolata Z-761
atggaaaagaaaaagccatttaattcagcaaaaattattgaagaaagaatttccgaagcgaatcttaagacttatttggttggatttgatattgatgataataacgaaagcaaatatcgttggaaggaattagttaatttgcttcaaaatgtaatatttgagttcgcatttggttatcacttagaaccagataagactaagcttatagatcaattatctgacgccgcaaaatctatttacaaaattgaggaattcaaaaaagctaaagagatatacgttgataattgcagtttcattgatgacagcgatgaacagagaaaaagttttttgaaaagaggagagttcggagaattaatattacatcttatattacgtgattttcatagcactgttcctctcttatcaaaaatatattttaaagattcatatggggttccggttcatggctttgacgctgttcatattcagccagaaaataaaactatgtggttaggagaatcaaaattatatatggacggtaaaaaaggtgtagaagccttaattaaggacataaaagaacatttccagcgtgactatcttaacaatgagtttgtaatcatatcaaaaaagattgagccttatgataacattccagaaaaagaagaatggctagaattgatggatggaaaaagtaagctaaaagatgttttaagttctataaccattccgttgctttgtacatactcaagtgataattttacaaagtatgacgatgaaaatcaaagtgaatttatagaaagttatgaaaaagaggttagaaacttaaaaaataattttgataacataaatgatcatcctcttaagagtaatttaaatattgtgttgctactttttccagttccatgtaaaaatgagttaattaaaaggttgcataagaaattgtacactttacaggaattaaaagatgagtga

SEQ ID NO: 59975 - DNA, 2205 bp, Methanosarcina vacuolata Z-761
atgagtgaagccagtcctaaattaattgacgagattatagatcagataagaaactctgaaagtataggattagaggaaagttttcagtttgcaaaagattgctccgaattattgagaggaaatgaatctgagcaacaatacggcagaaaagtaattataaatattctagataactgcggaaaattagagagttcaacgtatgatatttgggctgatttagtagaagcggctggattttatccttatttagaaaaagaaaaatgtattttacaaattaaaaacacgggagaaaaaataagaaaagagtttcatttttgttatgatctagataaatatttccatgaacaacaaaaagcattgagtgaactattaagaagtgacaaaaatgtaatagttagtgcaccaacaagttttggaaaaagtctactcatcgaagaaattgtggcatctaaaaggtacaaaaacatagtagttattcagccaacacttgcacttttagatgaaacaagaagaaaattattcaagtacacaaaagattataggattattatacggacatctcagaaatatgtggaagagggaaggaatttatttttactaactgcagaaagagttatggagtatcaaaaccttccaaacattgactttttcattattgacgagttttacaagttaagtgcaagaagagatgatgaacgctcagatatcttaaataatgcttttaatttgttagtaaataaacataaaagtagattttacttattagggccaaatattgaaggtatttcagaaggatttaccgaaaaatacaatgcaaagttctttaaaacaaactatggtctagttgattgtgtaactgttgattgctattcggagaaatttggagaacgggggaaaaagggattattaaaagaaaaagaattgtttgaactgcttttaaagttacgagatgagcagagtctaatatattgcgcttctcctaatcgggcaagaagtttatccaaaaaattccaagaatatctagtgagaaaagaagtcatatttcctgaaaagcgacttagcataattgagtggctgaaagagaatataaacgagcagtgggactttattgattgtcttaaatatggtataggaatacatgacggtgctttacccaaacatataaccgctacagtaataaaatacttcaatgaaaaaaagttgaattatttgttctgtacaactacaattattgaaggtgtgaatacaagtgctaaaaatgttattttctttgactcacacaaagggaataaaaaaagtattgatttttttgattattcaaatataaagggtagagctggtagaatgatggaacactatgttgggagaatttataatttcaataaaccaattgcggaagagaaaataataattgatattcctttttttgagcagaatcctgtttctgatgaaattcttgtccaaattaatgataaagatattaaatacaaaaatactaatcaatataaagagctaaaaaatcttccgttagaagaaaaggaattattcaaaaaaaatggtgtttcaataaaaggacaaaagcaaatactggactttttgatggaaaatattaatcaatgttactcattaatttactggaaagggtatccgacatatgaacaattaagatttactatttctctagcttgggcctttttgttgaagtctggtgagtctggtagtccaatgaccagtaagaaattggtaaaagttacttatgattacggactacatcaaaatatgaattatcttataaaatctgaatttacttatttggcttcaacaaataagaataaaacaaaaaatgaaattttaaacgctgcaattcaaaatcagtttcaaatccaaaggcattggcttcattataaagtaccaaagtggttaaatgtaattaatgagttgcagaaatatgtttgtgaaaaaaaagcattagatcctgggaattatttgtattatgcaacacagatagaaaatgattttatacctgatcatctttcgattcttgctgaatacggagttcctacatctgcaatcaacaaactgaaatctaaagttccgaatgagattccggaagatcaactactagaaactattgttaaaaactcattttataaggtaaatttgttagaatatgaaaaggaaaaattattggagaatttcacttaa

SEQ ID NO: 59976 - DNA, 912 bp, Haloarcula argentinensis DSM 12282
atgtctcaacttcctgatgaccactgggcctctaaaacagtcattcaggagtcagaattgcttgaacatatatttgaggttgatgaaaaaacctcagataatatgaaggttagccgatattgtgtttcccccggtgtagatacactagattatacatcgtttatagatttcttaagaaagaaattcaagtactatgtcttatctgaggaagaagtgaaacaaactgaagatgcacactatgaagctcaaacaaagtctgcttacaaattaaacgcagagaatgaaggaatctatggagaactgattctatttgcatttgttgaagcccttcttgacttgccaatcgcaagtcacaaagtcgcatggacgcaaaatgcaaacgatgaagtgaagggttccgatggtctattttatgggtactttgatggtgaaaaatctctcgcaatcggtgagtcgaaaatcaaaggtcagcgatctgaagccataaaagaatcattgaacagtatcaatagattttacagtcctgaaggaactcagatgcgcaaacatgaattaacggttgcttctaataatttacctcaggatttgaataaagaagaaataaaagaactaagcaaggttttaacctcaggaccaggcgaacataggactattcatccaatgtttatttgctatgaatctgctaaattgcaaaatgctcaagaatctaacttgacaagatcagacttaagagatgaactcattgctgaaattaaaaaacacgacgtaggtgaatatattgaagagaaaattgaagaaaattatcccaatgtaaacaaacactgggccatcatgatgttgatgcccgtagatgatacaacaaacctacaagagacgctaaaacagcaaatttacccttatgctaaccaatga

SEQ ID NO: 59977 - DNA, 1188 bp, Haloarcula argentinensis DSM 12282
atggtcccaaaaattgctcgggaagaaattgagagaatatacagggaggaagattctcttgacacgatcgtaagtacaccaacgctactgcagggtgttagcttacctgcagaaaagatctttttagtgggggataaaaaagggcaagatgatctcactagctttgattttaataacctaattggccgcgtcggcaggctagacaccaaactgtatggttcaatatactgcataacaacagaggatgatgagtgggctcaagagcaatttgagaacgccgaagagaaagaagtagaaccagttactgaaaatgctctaaatcggccagacgaactgattgatacattaactaaagaaaatataattgaagaagatgatggtagtttgcgatacactggaatcttactcagaaatcggtttttaagagatcccgatagcgttgataggtatttagaagaaaatggtgtgaatcaaaatgatagagagaaaatacagcttatacttgaggaaactctcgaatctattgaaattccaaaagaaattgcaaaaaagtctccaaccaccgatccaatattacagaatcagttatataaaaaggtggaaagaaaccctactgattggatagttgctacgaggaggagtgggtttagctatgagaaactagagaagatttgcaaggaattgaaccggatatttaaattcacatacgatcgatctaacggtattgatcctccggagaatgaagccgaaaaccagattgggccaataatttttgcggctaatcagtggttacaagggaaatcatataagcgaatggttcagaatcgaatagactcagatgctgttgatgataagggggttaatgactcgatatctaatctttttgaattagtggataatgacattcagttcgtcctcgtgaagtatttcagtattttagtgaagattttagagagtttagatagagatgatactcagtggatggaaaagtttgatcaaatgcttgatttggggacgatggatactaatgaaatagctctgattacaaagggggttgatcgctccgtcgcagtagatatatatataccatcaaatgttgatgacgtaacccaatatttgaactctaacaaagataagataccagatttctatgaaacccacctaaagaaacaaggaatactaaagtag

SEQ ID NO: 59978 - DNA, 918 bp, Natrinema sp. J7-2
atggagaatgaaatagaagttccttggtcagagcacaccgtaatcgaggagtcagaattactggataacctctctgatgctggtgaatggcgtgaagacaaaatcaaggcgtcctctttcatcgtcagcccaagttacggaaccttggattatgacggcttcgtgagttttcttcgaaacaaattcatgttctttgcgctgtcggaagaagagattcaggagtccgaacgcccccatcttgaagcgcagcagctctcagattacaaggatgatgctaagatggatggcaagtggggggagctgattctatttacgatggttgaaggtttccttgacatccctatgatgtcacacaagcttggatggaaacagaacccaactgaccaagtaaaggggtctgacggtctcttcttcggggaatacgaaggaactcctacgttgggaattggtgaggcgaagatgtacaccgatttggatagtggaattgaggaagctcttgacagcacaaatcgattccacggagaagatagtcaactccgaaatcagcacgagctaacggttgctatgggtaatccgagcgacaatctttcgaaagagaagatcgaactgctttcatctcttttcacaggtgaatctcaagattatcaaatgttgcatcccatcttcgttgggtatgaagatgaggagctggaggaattccagacaaaaccggttgaggacgatcaggaactagtagaccagctccaagaccatgttgaggatactgacttactctccaaggtaacggactctctggaggatgactacagtcatcttcgaaagcactggctgaccttctttttcctccctctagaggacaaagatcggtttgtagagaacgtcaaaacggctatctacccctggacgacgaaccactaa

SEQ ID NO: 59979 - DNA, 2580 bp, Natrinema sp. J7-2
atgtctactacatacgaaaacgcagcggacctagaattctttaatgaatgtcttgatacactgataaaagatctgctctataatgatctcggcgttactgattatcgttgggatcacaattcggagagtaaactccaaaagagtgcttgggtagcatcacttctcgcgtccagcgatgacgaggaacaccagtctaaggctctttcttttgcgattctcgcatatattgagaagcgagggactgatgacgaggagatgtacgaacggtacctctatattgttctctctcgcatcggaaatcttcaaacgttcaatactgttcggcgagaacaagcagatgtaagcttcgaggagaggctcatttcatcgcttgattctgcgttgggccttgagctgagctctgacctccagcagcacgagctcggtgatgggactgtactgtcctcctttcagaaggatatcctaaatgcgcttcaggcagggaaggatatcgcgatatccggtccgacatcttccgggaagtcattcatactccggaaatatatccagagagagcttgaaaaccaggatggttttgaagcaatctacgtcgtcccgactagagcactcattgcggaggtgagtgaaaaactctccagtcttaacgactatctagagggagagcaagagattgaggtcagaaccggcgcatattttgaggagggatcggaggacccagatacagattcaaactcgttcttggtagttacacctgagcggtgtctgcggctcattgatgaggacactagggcgagaattgacccagacctgatattcttcgacgaaatccagaacatccaagatgggcagagaggtgtcttattcgaagatatcatccagttactcagcgaatcttggccggaaactcaaatcgtcgctgccggcccctatcttgaggagccacaggatactctgagcaatctgactgaccgagaggtcgtacagatcaaaaccgcatttacaccggtccttcagatgaaggcgattatgcggttcaagagcgcaaaaaaccaatccgggtccaggcggatggtcgatgtcgtcctctacagtccttctggagacaaattagagttcacgatagccgaaccggacgatctcacgtatacgacggtcaacaaaagcaagactagagcattgaccactataatcgatgaatatggccagaatagccagaatctagtatatgccagtaaaactaatctagctgaggatcgggccgacgcaatcgcgaacaaccgggaccgcgagataacgtctgcgagaatcgatgatctcaccgaattcctgaagaatacgatccacgaaaactacccacttatcgaccatcttaaaaaaggagtggccttccaccatggtcgagttccaaagattgcaagggaggagatagaagatctctatcgctcgaaagtgggtttagacacaatcgtatgtacctccactctactggagggagtgaacctccccgcggagaaaatctttttgaccagtgcatatcgcggagacgatgagctgtcagaactcgacttccagaacctcgtcggacgggtcggccgcgttgattcccgcttgtacggttctatctattgcgttgaggctgaagatgacgagtgggtggatgagaaattgaatagcgatacagaggaatcagtcaaccctgctacctcacaggctactgataatccaaacaaactcattaccgcgctcggaagcaatgaccttcggcagctcaaagatgcttcgactcggtacacatcgattctccttcgttcccgttacctcaaatctgactacgatgtcgacgaatatctctccaacaaggggctctcagattcggatatctcctcagcgaaagacgaactcgaccggactctcgaagatattgaaattccggagaaactgctgaggcggaacccaactgtcgatcccgtggagcagaacacgctctacaggctggtaatgcagaacccggaaaggtgggtgattggtgagaatacgacagaatatagctatgataaactcatgcggatcacccaacagttgaatcaggtcttcaagttcactaaggacgatgaatacgggattgaccccccaaaccgagaaaccaagcacggagcactagagccgatagtggtagttgcaaaccagtggcttcggggagagacctaccattccatgattgattctaggcaagcaaacgttgaggatgaggggctgagtaagtgtatcagaacaatccttgacctcgtgaacgacgacgttcgatttattctggtcaagtattacgggatgctggtcgatatactagaagaatccgactacgagatgggtaagtgggcaagcaacttcgaccagatgctagagatggggtcgatgaactttggggagctgcgtctcatgtcgaaaggtgtagaccgatcggtcgcgttgcagttaggaatcccgcctggcgtcgataatgtagaagatttccttgaaaaccgccgagggaagattcccgaattcttcactcgacaccttcagtctcagggggtcttatag

SEQ ID NO: 59980 - DNA, 732 bp, Haloferax sp. BAB2207
atgttctttgcgctgtcagaaaaagagattcaggagtacgatcgtcctcatcttgaagcacagcaattatcagattacagagatgatgccaagatggatggcaagtggggagagttgattctatttacaatggttgaaggtttccttgacatccctatgatgtcgcacaagctcggatggaaacagaacccgactgaccaagtaaagggatctgacggccttttcttcgggaagtacgagggttccccaacgttgggaattggggaggcgaagatgtataccaacttggatgatggaataaaggaggcccttgacagcacagaccgattccacgggaaagatagccaactccgaaatcagcacgaattaacggttgccatgggtaacccgagcgagaatctctcgaaagaaaaaatcaaacttctttcgtcacttttcacaggagaatcccaagattaccaaatgcttcatcctatcttcgttggatacgaggatgaggagctagaagaattccagacaaagccggttgaggacgatcaagagctagtagaccggctccaagatcatatcgaggatactgatttgctctccaaagtgaccgattctctagaggatgattatagccatcttcgaaagcactggttgacattctttttcctccccctagaagataaagatcgatttgtagagaacgtcaaagcggctatctacccctgggcaacgaaccactaa

SEQ ID NO: 59981 - DNA, 642 bp, Haloferax sp. BAB2207
atgtctacctacgaaaacgcagcagacctagagttcttcaatgattgtctcaacacgctgataaaagatctgctttacgacgacctcggcgttactgattaccgttgggatcagaattcggagagcgatctccaaaagagtgcttgggtagcatcacttctcgcttccagtgataaggaggaacaccagtctaaggccctcgcttttgcaattctcgcatatattgagaagcgaggaaccgatgacgaggagatgtacgaacggtacctctatatcgttctctcccgcatcggcaatcttcaaacgttcaacaccgttcggcgagaacaggcagatgtcagcttcgaggagaggctcatttcatcgcttgactctgcgttgagtctggaactgagttctgacctccagcagcacgaactcggcgatgggactgtgctgtcttccttccagaaggatatcctgaatgcgcttcaggcagggaaggatatcgcgatatccgggccgacttcgtccgggaagtcattcatactccggaaatacatccaaagagagctcgaaagcgaggatagcttcgaggcaatctacgttgtcccgactagagcgctcattgcagaggtgagtgagaagctctccagtctaaac

SEQ ID NO: 59982 - DNA, 915 bp, Halobacterium hubeiense
atgtctgattcaactactgatccgtgggctgaaagcacactgtttgaccaagaagaactgctggaccacgttttcgaagtcgaaagctggcaattccagagcttagaggtctctacctattgcatcaagcccggcatgggaacgttagatgatgcggcgtttatccagttcctagggcgtaaatacccatatttcgtctttccagaagatgaggtcgatgactatgatttcccgtatcgagaggctcagcgtcgagcggacttcgatgaagattcaaaatacgacggaaaacttggcgagttagttctcttcgtactcgtcgatgctcttcttgatttgccgttagtcagccataaaatcgggctgatgcaggagccggtacaagatcagaaaggggcagacgctctgttctatggcctgtatgatggaaatgaggccctcggtgtgggggaggcaaaaatctacacaaggaagagtcagggtatcgacagcgccttcgagagtaccgatcgcttccacggtgctcagggtgacgcgaaaacacgccatgaactccgtgtagctcggaataatctgagtgcaaatctcgacgaagatcaattcaaacgcctcttagacgtgttttcccctgggaaaagccagcatctgcatgtccatcctattttcctgggatatcaagcggactggcttaccgagaaacagaaggagtgtaactcaccacaggagttagaagaggagatcgtgaccgaaataaaagattcagaaatacaaaaagatgtccaagagtctttgtcagaggactatcccaaccttgagaagtacgagaccgtcttcatgctattcccgctagaagatgttgacgagttccgtgaacggttacaggaagaaatcttcccccacagcgttaatcactaa

SEQ ID NO: 59983 - DNA, 2604 bp, Halobacterium hubeiense
atggacacgtattcagtcgctgctgagcttgaatcgttcaaccgctgtctggaccagatggcggagaacctcataagggatgatctgggcgtaagggagacgggtggtttatctaattggggaaatcagacgatatccccacatggtgacctaacccaagaaaatgtggagaagagtgcgtgggtggcgtcatttctagcttctagtgatgattcagaacataaacggaaggccctcgcattcggtattctatcgtatctacactataatgatacggaatatgaggagatgtatgagcggtatctgtatatcatcctttctcgtgttggcaatcttcccgcgtttagaaacgtgaagcggtccgagagtcgtgtaaatttcaaagcagacctcattcattcgttagactccgttttgggaacagagctcggcaccaattccagtcggtacagccttgagaatggagatgttctctccgaatttcagaaggaaatctatgagcatctccttgcgggaagaaacgtggctatctcaggaccaacatcggcaggtaaatccttcatattgcggaggtatattgaggaaatggcgagacagcctggtaactttgaagtcatctatgttgttccaacaagggctttaatttctgaggttagtcagaaactcacggatttgaacgactcgctggatagtcccgaaaacgagtttgatgtcctcacaggcgcacacttcccggaggatgaggatagatcagataactccttcctggtggtgaccccggagagatgcctgaagctaattgacccggatgttcggaaagagattgaccctaatctggtcttcttcgatgaagttcaaaatatagaggacgacgaacgaggtgtcctattcgagaatattgttcgctcgcttgaagactactattcctcagctcaagttgtcgctgctggtccttatcttgagaatccgcaggagacacttgaagatttaaccagtaacgaggttgcggaggtgaagacaggattcactcccgttctgcaaatgaggtgcgtgttgaggtttatcagccagaatcggtcaaagaatcggaagctggaagttagaatacatagcccctctggaaatatagaggaaattgaggtccccgaacctgagtcaatgacttactctgaggtcaaggggaataagaagaaatccttgcgcaaaatcgttcgccgatttggatcggactcaaagaatctggtctattcaagcaggaaggactatgctgaggatagagcgaaatatatcgctcaagataaagaaaagcagacctcttctgaggaacttgatgacttaatcaatttcctagaagagacgatccatgaagactactctctcatcgactgtctgcaacgaggcgtagcgtttcaccacgggatggtccccaagattgcgcgagaaaaaattgaagagatatacagtaatcaagcagtcatcgataccatagttacaactccaacactaatgcagggtgtcaatttacctgcggagaaaattttcttggtaagctcaaaccggggtcagaatgaactgagcgactttgaattcgggaacctcatcggtcgagtaggacggattgacactaaactctacggggcgatctactgtatcgagggtgaagatgaagagtgggcagacaataagctcgagaatactggtgacaaggcggttgagcctgcgacaaatcaggctgtggatgattcagatgaacttattaatgccttacagcaggaagatctgggctcggttgaagagccctctgtcaagtacacctccgtccttcttcgtggaagatatctaaaagaccaggaaatcagttcatatctatctaacaagggaatggaggagggtgagattgaacgggttaatagcgccctagagcgaacactatcggatattgaaatccctaactcgctattacgcaagaacccgactgttgacccaataaagcaggatatcctatttaatgtggtacagtccaaccccgaacagtggattatcggaactaactctcgcgacttttcttactcttcctttttgaggattacgaggcagctaaacaagattttcaagttcactaacgacgacgtagctggcgttgatccagagcacgtcgagacagactatggggctcttgaaccaattgtagttactgcgaatcactggcttagaggagatacctatcacgcaatgattgagagccgtagagatgctgagaacgtgaatgatgggagccttgataagtctatccggaatgttttggaacttgtcaacacagatattcggtttgtattagtgaagtactacggtattctcacgactatcttagagtatctggattacgagaccccggaatggatgttgaactttgatcagatgttggagatgggatctatggaattcaaccgtatccacttgatgtctcgtggagtggatcgttcaattgccgtcgctctttacttgccacagagtgttgacgacccggttgcgtacctaaacgagaatagtggccggattgttcccttccataggagccacttggagaatcaggggattttatga

SEQ ID NO: 59984 - DNA, 498 bp, Halostagnicola sp. A56
atgcacgatggcgaagaatcgctggcactgggtgaatcaaaaattcagaaaaggcgtagtgatgctctacgaaattcacttgatagcatcaacagattccacgatccaactggtgatacgaaaaccaggcacgaactcaccgttgcagctgataatcttagctcaaacctctctgagccagaactcgacaagctaaggaatctactgaaggagggggaaaagtcgtataaacaggtccatccgatttttgcagcatatgacgagagttggatactggatgtacaagcagatgcgcaagatgaagatgagatacgagaattaatatgcgaaaagatcgataactctggggtgaatgagtatatattcgacaaattggaagaagatgagtacaaaaagctgaagaaatacgaattaatcttcttcttgcttcctctagaggacgctgactcgtttcgtgagcaattgcaacacgaattgtacccgtatatcaactcatga

SEQ ID NO: 59985 - DNA, 852 bp, Halostagnicola sp. A56
atgacaaactctgaaaactccacctacgagattgcggctgactttgaggtgttcaacaagtgtttagatgcgcttgctattaatctgatcaaaaaagacctgggtgttgaccagcagaaacaaacggggctggacgaatttttcgtggaggagtctagtcaagaaatttcagacggagacatcgaggagagtgcttggatcgcctctgttcttgcatccagcgataatgacgtacacaagagaaaagcactctctttcggtattcttgcatatcttaggaaccgagatgaagatcaagaatccctctacgagcgatacttgtacattatcctctcacgtgtcggaaacctaccggctttcaataatgttcgtagagcagagggacaactaagtttcagacatcaaatgatgcaatccctcgactcgatactggagcttgagcttggatccaaccttgacaagtacgaaatagatgacgggaaaatattttccgagtttcagaagcagatctatgacttacttgtcgatggaaaggacgtagcaatatctggcccaacctcttcaggaaagtcgtttgtcttacaagagtatatcgactaccgtagcaagagtgacgagagctttgaggcgatctatgtggttccaaatcgtgcattgatctctgaggttagcagaaagttatcaaatagacacgaggatgttgaagtccggactggtgcgtatttcgatgatccaggtcttgatagtcccgatgagaccgagcctgattcattctttcatacccatatacggtcggagcaatcgagtcgaccatcgtttcatagattgagtcattcgaactcagctgaatga

SEQ ID NO: 59986 - DNA, 714 bp, Haloarcula sp. CBA1115
atcgaggaaatgttcgaggagggtacttggccattcaaagaagctcagaagcgatcagattttactgacgacccaagtaacgatggcaaacttggggagctaattctcttcctattcgtcgatgctgtattagatattccgatggtaagccacaaaatcgcttggacacaagaaccggtacaagaagttaagggatctgatggactcttctatggaatatatgatggaaaggaatctcttgcactcagtgagtcgaaaatacacaagcgacggcatgatgcactacgaaactcacttgagagcatcaagcggttccacgatcatagagggaatacgaaaactaaccatgaacttaatgtggcggcaaagaatctcagctcaaatctctcagaagcaaaaatacaaaaattgatggatctgttcaccggacgtgacacttcgtatcagcagattcacccgatattcgcagcgtataatgaaagctggatgctagacatacaagcagaatctgatgatgaggaagagttacgcgaacgtgtaacttctgaattacgcgactctggagtcaaacagtacctaattaataaactaaatgaggatgagtaccagtcactgaaaaagtaccaactcatttttttcctcctcccactggaggatgtggactcatttcgtaaggaactgcagcacgcgatttacccatttaagaattcatga

SEQ ID NO: 59987 - DNA, 2616 bp, Haloarcula sp. CBA1115
atgacggaaactggaaagtcaacatacgaaatcgcagaagggtttgatgtatttaatgactgtctggatgctctgacagctaatctaatacaggaagatttgggggtttcagaacacaatcaaacgggactcgatactttccaagaggatagaaactcagagaccatcactgacgaggatattcggcagagtgcgtggcttgcctcggcgcttgcttccagtgacaatgacactcacaaactaaaagctctctcgttcggtattctagcttatcttaggtatcaaggcaatgagcaagaatcattgtataaacgatatttatacatcattctctctcgggttggaaaccttcctgcgtttgagaacattcgcagagcagaagaccaactcggctttgagacccagctgattaactccttagactcagtgttaggacttgagctagaatcaaatcttgatgagtatgaaatagatgaggggaagatattgtcagaattccagatggaaatttataatttactcattgagggtaaagacgttgccatttctgggccaacctcatctggtaagtcgttcgttttacaggaatatattgatcatcaaataactagggaagagggttttgaagcgatctacgtcgttccaactcgcgcgctgatctccgaagtcagccgagatttatccactcggcacgaagagattgaagttcgaactggagcttactttgagaagggagatattgatgatactgatgaagataatgccgacgtgtttcttgttgtcactccagaacgatgtctgaaattgattgatccaagcacccgacatcaaatcgatccaagtcttgtattccttgatgaactgcaaaatgttgaagaagaccaacgaggtgtgctttttgaaagcatcatccaatatctaacagactactacccgagtgctcagattgtcgctgcaggtccatatctagataatcctggaaatacactagaatccctaacaggtcgcgatgttgaggaggtctcaacagcgtttacaccgattctccaacttaaaactacacttcgatttattagccagaagtcgaaaataaaccgcgagttggaactggaaattcatagcccctctggagatacgatgagcatccgggttccagaaccagaaagtatgacttattccgaagtcaaaggtaataagaaaaaatcactccgaaaaataatcgaaaccttcggaaaagatactaagaacttgatctactctgctaggaaagactatgccgaagatcgagcaaggcatatcgctagttttcgggatacacagccggttgaggcatcagttcaggatttgattgattttctttccgatgcaattcacaaagaatactcgctgatcgaatgtcttgaaaaaggagttgcatatcaccacggaatggttccgaagattgcaagagaagaaattgaacagatttacgataactctgcatttctggatacaatcataacaaccccaacactaatgcagggggtaaatcttcctgctgaaaagattttcttggtgagtgcaaaccgagggcgcgaaaaactctctgacttcgaattcaataatcttattggacgtgttggtcgattagacaccaagctctacggttctatttattgtattgaaacagaaggcgatgagtgggcggacgacaagttgggtaatgacgaaaaaaaggaaattgagtctgccacatctaaggccacaaataacgccaagcaattgatcgatgccctccaacgggacgacctcagtcaaattgatgacgatgctattaggtatacatcaattctgctccgtggtcggtacttgaaggatcaagatactgtagctgcgtatctacaaaacaaaggtttcgacaaagaaaatattcaagctgctgaggaagccctccaatcaacgttagtgaacgttgagatacccgagtcggttttgcgaaaaaacccaacggttgacccaatcaaacaaaatactctctatcaaaatctccagcagaacccggatccttggatcgtggctccaaaccgccacgaatattcatatgaacaatttgagagcgtaaccagtcgactcaactcgattttcaagtttacgaatgatcccgaaatggggatcgagaccgaagttcgagaaacggaaaactgggggcttggcccaatcatatatgccggtaacgagtggctgaggggttacaattataacaccatcatcactggtcggcaggaatcagaagcagttaacgatggagatattaatacgtcgattcggaaggcgcttcaaaccgtacggacagatatccgatttgttctcgtgaagtattatgggatattgacaacactactcgaacacggagatatagaagccccagactggatgctgcggtttgatcagatgcttgagatgggttctatgcgctacaatcaaattagactcatgtcgatgggtgtagaccgatctgtggcggtcagtctcaggatcccagaagatgtagatgacgcggtaggctatttgaacgaaaatcgcgggaatatcgccccgttctataagcggcatctcaagaaccaaggaatcctctga

SEQ ID NO: 59988 - protein, 267 aa, Shewanella putrefaciens 200
MSLSKIEAKKLGEDFLKLLDEEHGEQVYQEFLEKNSALMPREFIQNHGLHFDLVMRKMSLAKDYTPDFFYMSKSSADWNLVLVEIEKPQSKYFKNAKNDLHRDFLAGLDQIARWRAWFDNTSNREAFINGTIDPIRVPSSMRRNPCHIKYVLVHGRRSEFEGNDLKKGLIRARETDDFKIMSYDSLAESLHTKGHLYVGVRKNETFEIRSPHFAGENIFSWVEPSYLKITAALKAEILAQKNSWTIHSLKGGFALDHILPIIGECDA

SEQ ID NO: 59989 - protein, 318 aa, Shewanella putrefaciens 200
MAQIKDRLVRIIRDKPRVLTRAIFWKIPHNTSEDEVFLKLGRYNKPKNWTESETLELDSPKSELTLDSEEFHNLLEFISNNYEPFKQGTRAFLPLENPYDLSNAEQIKQLLNLPDKRRMLEFLLVNEVIPEDLELGLEHARKVRALDEFQYLLESDFTENVWQNWFEKNSWVLGSDFVKVLDERAIDTRNISDFLMESYDGFLDIVEIKRPEGSLKFWSTGLDHNNYYPSSDLIKAITQSQSYIHEVELEANSVKFMERVGYVKTIKPRCTLIYGRSNDWNKEQQQAFRVLNSSYHNLSIMTFDHVLERAKRIIGKRG

SEQ ID NO: 59990 - protein, 324 aa, Chondromyces crocatus
MSDGTSKRILLVEDDDQNAEDYTAWLQAAGYVVERAAAVDDGLARAEAFKPDVVMLDLQLPSHPGRADADAAHGLRALEGLLRDDPFRPVVIATAHSRNRELMREVMQRNRGGQFLFKDERDLKGALLRAIAVALASPVYVASRTVRAFEALVERNELEERYREFLKKNWRIILGPRYRECKSPHDVGRGAKVDLLFVRHDDFPDLWELKRPDQPVLKGYGDRLHLSEECARAVGQLMEYIDLAEKERAGPNSYEARKGLQVRLERPRGVVVIGRRSDDRERDHLALQNSFLAGISILTYDDLLDSAREILTFLRDYRNGDADP

SEQ ID NO: 59991 - protein, 340 aa, Sorangium cellulosum So ce56
MRGHLLLRAVRHMEGCIMNDKNAPKVLLVEDNKATAGDFLRLLQLNGFTAEHALDAAEALNKAAAFSPDVVLLDLQIPSAPGLSDEDVEHGFRVLDALLAADPFRPVCIVTAHNQPELIRRAMRRTHGAPFVFKDDDLRRAVPKAVNVALASPAFKMSRTVREFRALVDRNESEDAYRKFIHQHWGAILGPEYQDVRSPYPITRGGEIDLLAIRWDGFPDLWELKRPSDPVFKDYNGWLHHSLECARAIGQLMSYYDAAEKEPRGPLGYDGRRGITVHLQRPRGFVVIGRYQSDAERERLRLENGFLAGLAILTYDDLIERAEQFLTFLQQHRNGDDSPT

SEQ ID NO: 59992 - protein, 331 aa, Sorangium cellulosum So0157-2
MDGGRMSGRQAKRVLIVEDDETNAEAAVEWLREQHYQVERASALEDGLAVAERFQPDVVMLDLQIPSRPGRADEHTDNGFRMLDALLRAEPFRPVVVATAHSRNRELMRQAMQRNRGGHFLFKDDQDLRAAVLRAVAVALESPAYVAHSTVRAFEELIARNPREEEIRIFLRKSWRVLLGPRYRECHSPYEVDRGVKVDLLFVRHDGFPDIWELKRPDQQVFKEYGDRLHHSEECARAVGQVMEYIDLAEKQTGGQVSYEVRKNVRVSLHRPRGFVVIGRTGSQRERDRLALDNSFMAGITLMTYDDLIEDAREVLVFLRDYRNGGEAPSV

SEQ ID NO: 59993 - protein, 323 aa, Sorangium cellulosum
MNEKNAPKVLVVEDNKVTAGDFLRVLQPNGFAVEHALDAAEALHKAATFGPDVVLLDLQIPSAPGLPDEDVEHGFRVLDALLAADPFRPVCIVTAHSERELIRRAMRRTHGAPFVFKDDDLRHALPKAVNVALASPAFKMSRTVREFRALVDRNESEDVYRKFIHQHWGAILGPEYKDVRSPYPITRGGEIDLLAIRWDGFPDLWELKRPSDPVFRDYNGWLHHSLECARAIGQLMSYYDAAEKEPRGQLGYDGRRGVTVHLQRPRGFVVIGRYQSDAERERLRLENGFLAGLAILTYDDLIERAEQFLTFLQQHRNGNDSPA

SEQ ID NO: 59994 - protein, 271 aa, Sorangium cellulosum
MVLLDLQIPSAPGLPDEDVEHGFRVLDALLAADPFRPVCIVTAHSERELIRRAMRRTHGAPFVFKDDDLRHALPKAVNVALASPAFKMSRTVREFRALVDRNESEDVYRKFIHQHWGAILGPEYKDVRSPYPITRGGEIDLLAIRWDGFPDLWELKRPSDPVFRDYNGWLHHSLECARAIGQLMSYYDAAEKEPRGQLGYDGRRGVTVHLQRPRGFVVIGRYQSDAERERLRLENGFLAGLAILTYDDLIERAEQFLTFLQQHRNGDDSPA

SEQ ID NO: 59995 - protein, 323 aa, Sorangium cellulosum
MNEKNAPKVLLVEDNKATAGDFLRLLHLNGFTAEHALDAADALEKAGTFCPDVVLLDLQIPSAPGLSDEDVEHGFRVLDALLAADPFRPVCVVTAHNQPELIRRAMRRTHGAPFVFKDDDLRRALPKAVNVALASPAFKMSRTVREFRALVDRNEPEDVYRRFIHQHWGAILGPEYQDVRSPYPITRGGEIDLLAIRWDGFPDLWELKRPSDPVFKDYNGWLHHSLECARALGQLMSYYDAAEKEPRGPLGYDGRRGITVHLQRPRGFVVIGRYQSDAERERLRLENGFLAGLAILTYDDLIERAEQFLTFLQQHRNGDDSPA

SEQ ID NO: 59996 - protein, 271 aa, Sorangium cellulosum; identical to SEQ ID NO: 59994

SEQ ID NO: 59997 - protein, 396 aa, Cyclobacterium marinum DSM 745
MKQEDLIKTCEKCFNNWFTKIRNLHLKGIVRASGNIYCATEVQTFESSDHFIIELAGSQPIISFKPIKAFKKTIKVKNSTNHLIGGLEIKDINKKKALLSIEKCRKMHYIQCDFFSGINSNFYKDLGLGGGKEEIYEIPFFIDSESNYILLDNCKMSYHFNDLKYFYRVISFALFIKKNTKKEALARFLISTFDNQLKSQYPAFMGVFIDTKPNLRFRQELLSLANQPVHETRIDDFINQHNALFAKALNYKGARSNIELKIIDKKGWDKSSLIPDYMMEREDGSYDILDLKKGLTKNNLTKGGKSRRRLTSYCYELVAQLEGYKRYFESPLNSQWALDNFGIKMNYSPRLIGIVGNQNSFFREEIDEALLVHRDNIVLFSYNDICDLLSSKTKFS

SEQ ID NO: 59998 - protein, 274 aa, Leptospira interrogans str. UI 09600
MIYRWSLLNHDKKILKKVKTEWNALLKNKKLTEHDYHKFLSEHAGIILSPNDFSYMVLSKIKLADDYEVDFVTIEDKRSNGMRYNLIEIESPHSPPFTKAGKPSARLTTALQQIDDWRFWIKENREQFKRLFPNETYKVFKGHLNYSFTIYIGNRENSEPFLEKRNELASERNVTIRSFDSLGDYIDFNRFSDLAPDYAAEMTEFSYEIRNQLASPFFKATNHSMWKIFLKQRKGNAHIFTWNASTIVNLREYNKLYYDFINKKISKTVSYLSS

SEQ ID NO: 59999 - protein, 274 aa, Leptospira interrogans serovar Canicola str. Fiocruz LV133; identical to SEQ ID NO: 59998

SEQ ID NO: 60000 - protein, 274 aa, Leptospira interrogans str. Kito; identical to SEQ ID NO: 59998

SEQ ID NO: 60001 - protein, 454 aa, Leptospira borgpetersenii serovar Hardjo-bovis str. L550
MAKWKLTYEALEFIGRDGAGWPIINLISDSYNVEDNSIVRVSVKAKNMVLKTLPENIVGVRVLDIERIDKMTGKNYFESYQIEDLNFELEESDVKKLRKIQFDLLSIDGGSLDFDYLRLFNPDLFVMNLMNVKAFFVDGYGVLSHEEGVLVLENLNNFYNSFTSDQINVLRINPKSVSYDENELIRKFLEQDRQVVDSSSKQNYVKNGSKVNLKFLEEKIKDSEIISDIIDWIVENEENPELLKNFSKLTPENLSKLNTLSGIVTLKNCLLRWEENLLHSSEDFWQKEFEDNSYVISQLFTSPVTIMKSKAYLGGKSIHNTGGSLVDYLFVNKLTKNTSIIELKTPATRLLGSNYRNTIYNISAELSGAIVQLSNYKDELLKNYYPLTNLNKRIFHAYDPSCILIVGNFATELDSEEKVKSFELFRQQLQNIQIITFDELFEKMRLLIHLLEGS

SEQ ID NO: 60002 - protein, 454 aa, Leptospira borgpetersenii serovar Hardjo-bovis str. JB197
MAKWKLTYEALEFIGRDGAGWPIINLISDSYNVEDNSIVRVSVKAKNMVLKTLPENIVGVRVLDIERIDKMTGKNYFESYQIEDLNFELEESDAKKLRKIQFDLLSIDGGSLDFDYLRLFNPDLFVMNLMNVKAFFVDGYGVLSHEEGVLVLENLNNFYNSFTSDQINVLRINPKSVSYDENELIRKFLEQDRQVVDSSSKQNYVKNGSKVNLKFLEEKIKDSEIISDIIDWIVENEENPELLKNFSKLTPENLSKLNTLSGIVTLKNCLLRWEENLLHSSEDFWQKEFEDNSYVISQLFTSPVTIMKSKAYLGGKSIHNTGGSLMDYLFVNKLTKNTSIIELKTPATRLLGSNYRNTIYNISAELSGAIVQLSNYKDELLKNYYPLTNLNKRIFHAYDPSCILIVGNFATELDSEEKVKSFELFRQQLQNIQIITFDELFEKMRLLIHLLEGS

SEQ ID NO: 60003 - protein, 316 aa, Leptospira borgpetersenii serovar Pomona str. 200901868
MRPALSHEEGVLVLENLNNFYNSFTSDQINILRINPKSVSYDENKLIRRFLGQDRQVVDSSSKQNYVKNGSKVNLKFLEEKIKDSEIISDIIDWIVENEENPELLKNFRKLTPENLSKLNTLSGIVTLKNCLLRWEENLLHSSEDFWQKEFEDNSYVISQLFTSPVTIMQSKAYLGGKNIDNTGGSLVDYLFVNKLTKNTSIIELKTPGTRLLGSNYRNTIYNISAELSGAIVQLSNYKDELLKNYYPLTHLNKGIFHAYDPSCILIVGNFATELDSEEKVKSFELFRQQLQNIQIITFDELFEKMRLLIHLLEGS

SEQ ID NO: 60004 - protein, 454 aa, Leptospira borgpetersenii serovar Hardjo-bovis str. Sponselee; identical to SEQ ID NO: 60001

SEQ ID NO: 60005 - protein, 397 aa, Elizabethkingia meningoseptica FMS-007
MEFEKIEDRLILIHHISDNINYDWVRDKLEKSGVVVLKKSLSFLLSDRYPIEYEKEPYDEYFPPSAFVLGKLIDDYYRISRSVVGTTNNFFFHKDIDFKSKYFIAETNLSVLRQIDGLVKEDIYIGGTAEKSVSLEIFDKMIDEFPTTYEKKMYAEARVSSIIKNYFETTKDSELKFQKYLNTKTSKTGKKLQKIFQDYELQKFQTIQKKLNEMLKSENEYSEDQWQNEILEIILFLYPKYIFSFKSVYVKADKNRRRFLDYMLVDSNGNIDVIEIKKPFENAIMTHSLYRGNYTPHKDLTGTIMQLEKYIYHLSRYGSTGERNLTSKYKDQLPEGLEIKIINPKGIIIMGRDINLNAEQRNDFEIVRRKYKNVVDIITYDDLLRRLNYTIEQIQRL

SEQ ID NO: 60006 - protein, 427 aa, Comamonas testosteroni
MTKPAVEFEVSDNELYLIYRPRDDTSWVRERFERDEELLVKGTFHLTSKDLVEDGAKEKANAAGDDDDDDDDMLWIDDERLVFAIATADGMYFRFKSQVLGFETPVLLHQDARPNWKWFSAERKVSILNIVQSLGLERIVIGGPDPDAIPIPEYERLLNQFPTPYELRRYVHARVATVVRQYTEPAIDAEALLNAYVDRRTVATAPNLEAPFRQFDIAKYAFALERLQAMLANETGTSEAQWQLEIVEIILLLNPRYIKAFAEVRLWDADASTWRRIDILLVDASGNVDVIEIKKPMGKPIMLPVRYRDHHLPMRDLVGAMGQVTHYLRHLSRWGPAGEDYLTKLLRADLPLGFRIRIVNPSGIVIMGRSNTLSVAQRREFEVLRRDSKGVLDIVTYDDLLARVQAVLDQLRSGPALSVAPASPTAE

SEQ ID NO: 60007 - protein, 427 aa, Comamonas testosteroni; identical to SEQ ID NO: 60006

SEQ ID NO: 60008 - protein, 547 aa, Pseudomonas aeruginosa UCBPP-PA14
MDNLKTRIVNSYNDLSADADSFSESSGKSRTVVEPVLRLLRKALLLDISGGEKRVPDADEIKDWVLKLFAKNPTVGDMVRALLLIKEDLVVSEHQLPSIEEALREIGLLEQLHLPDFFFVSSELEGEPCGVLFERYESDGEVLVFLATLFDKKNLMQKVGRMAIRVSKESPEPFLSICTPDGWLRVPKNQIVPGSVSSFTVQCLLEYKYYIYPTLPLSSIIAPELTRRKDNIHLVSLIKEAYLDKVVCTRVRVPLDVVQPRDIDYALHTPDEQIRDCMPYAAHTEFLLYEEDGVLIMDDDYTPYLACQALRVKEVTAVILGKFNQSRAKVLSIGYSELMSPISVSPSAHQSQKRLRDKQELLKKKLQSLRPSFLPAAKMERSFIELCWLLNRVKTRERDLHRFLKENYQILDSHLAAIFSEVPIGKYRADLVLQYHQSDKRVVLVELEPHDKKIFTKKNRLRHQVTHALQQVEDWIQEIHRGVPNIPGWLQGSYTAEGMIVIGRSKDLTEEQRETLALKNAKSSIKILTYDDLLERLSRLIKTLDKE

SEQ ID NO: 60009 - protein, 547 aa, Pseudomonas aeruginosa HB13
MDNLKTRIVNSYNDLSADADSFSESSGKSRTVVEPVLRLLRKALLLDISGGEKRVPDADEIKDWVLKLFAKNPTVGDMVRALLLIKEDLVVSEHQLPSIEEALREIGLLEQLHLPDFFFVSSELEGEPCGVLFERYESDGEVLVFLATLFDKKNLMQKVGRMAIRVSKESPEPFLSICTPDGWLRVPKNQIVPGSVSSFTVQCLLEYKYYIYPTLPLSSIIAPELTRRKDNIHLVSLIKEAYLDKVVCTRVRVPLDVVQPRDIDYALHTPDEQIRDCMPYAAHTEFLLYEEDGVLIMDDDYTPYLACQALRVKEVTAVILGKFNQSRAKVLSIGYSELMPPISVSPSAHQSQKRLRDKQELLKKKLQSLRPSFLPAAKMERSFIELCWLLNRVKTRERDLHRFLKENYQILDSHLAAIFSEVPIGKYRADLVLQYHQSDKRVVLVELEPHDKQIFTKKNRLRHQVTHALQQVEDWIQEIHRGVPNIPGWLQGSYTAEGMIVIGRSKDLTEEQRETLALKNAKSSIKILTYDDLLERLSRLIKTLDKE

SEQ ID NO: 60010 - protein, 88 aa, Pseudomonas aeruginosa HB13
MSGSFIQVLNYKDQLMKEYYKLSEGDEGSSFSAFNPKCLIVIGTLESELKDGNQYKSFELFRNSMTNVEIVTYDELFQKAQDILDMVK

SEQ ID NO: 60011 - protein, 511 aa, Pseudomonas aeruginosa ATCC 25324
MRDSRERLRFRAAVRDNRAVAISDSTGRHVSGGRPMAGTEGQDDVELDVWDPELRLDRGKADDGEEYRDLYMQTFVRDSTEPHQWRSQPESRWHHLARVHPKKVVTYPVFSNPYAQRYLSCRHGRFKTIAYELDVEHPLPGNVDEAKSHIETVSAFDLFNPCAFGLGLIKDLDEVWRGLAGFANLNAIVLTQSGGLQIDGDTVRIPVVHIESMRRAFNRTNRKVREVVRLGKRTHVRNVLLSRLDPERYPRVMQVNQEGQLIEVRLDHSRTSKNAARSQRRATVDAVRTNVDTLAAEAPQELIRLHAEIERATLAQMIEKYEEMLKKKLPEAEWQNFFERNIFILTMVFARPVRLLHTQFHAKPGRVDGKGAQIGDFLFAEHGFAMAIVEIKKPASLLLRAKPYRNTEVFAPSADLAGAVTQVLYQKNNIHQYWLYHKESPELKDSRPDAVKCVVITGMLPKDELQRRSFEVFRNSSKDVEIITFDELLAKLRLLSEHLASPETDNSEPPF

SEQ ID NO: 60012 - protein, 547 aa, Pseudomonas aeruginosa CI27; identical to SEQ ID NO: 60008

SEQ ID NO: 60013 - protein, 433 aa, Pseudomonas aeruginosa PA21_ST175
MVEPVLRLLRKALLLDISGGEKRVPDADEIKDWVLKLFAKNPTVGDMVRALLLIKEDLVVSEHQLPSIEEALREIGLLEQLHLPDFFFVSSELEGEPCGVLFERYESDGEVLVFLATLFDKKNLMQKVGRMAIRVSKESPEPFLSICTPDGWLRVPKNQIVPGSVSSFTVQCLLEYKYYIYPTLPLSSIIAPELTRRKDNIHLVSLIKEAYLDKVVCTRVRVPLDVVQPRDIDYALHTPDEQIRDCMPYAAHTEFLLYEEDGVLIMDDDYTPYLACQALRVKEVTAVILGKFNQSRAKVLSIGYSELMPPISVSPSAHQSQKRLRDKQELLKKKLQSLRPSFLPAAKMERSFIELCWLLNRVKTRERDLHRFLKENYQILDSHLAAIFSEVPIGKYRADLVLQYHQSDKRVVLVELEPHDKQIFTKKIALGTR

SEQ ID NO: 60014 - protein, 81 aa, Pseudomonas aeruginosa PA21_ST175
MLNYKDQLMKEYYKLSEGDEGSSFSAFNPKCLIVIGTLESELKDGNQYKSFELFRNSMTNVEIVTYDELFQKAQDILDMVK

SEQ ID NO: 60015 - protein, 547 aa, Pseudomonas aeruginosa PA14; identical to SEQ ID NO: 60008

SEQ ID NO: 60016 - protein, 476 aa, Pseudomonas aeruginosa str. Stone 130
MAGTEGQDDVELDVWDPELRLDRGKADDGEEYRDLYMQTFVRDSTEPHQWRSQPESRWHHLARVHPKKVVTYPVFSNPYAQRYLSCRHGRFKTIAYELDVEHPLPGNVDEAKSHIETVSAFDLFNPCAFGLGLIKDLDEVWRGLAGFANLNAIVLTQSGGLQIDGDTVRIPVVHIESMRRAFNRTNRKVREVVRLGKRTHVRNVLLSRLDPERYPRVMQVNQEGQLIEVRLDHSRTSKNAARSQRRATVDAVRTNVDTLAAEAPQELIRLHAEIERATLAQMIEKYEEMLKKKLPEAEWQNFFERNIFILTMVFARPVRLLHTQFHAKPGRVDGKGAQIGDFLFAEHGFAMAIVEIKKPASLLLRAKPYRNTEVFAPSADLAGAVTQVLYQKNNIHQYWLYHKESPELKDSRPDAVKCVVITGMLPKDELQRRSFEVFRNSSKDVEIITFDELLAKLRLLSEHLASPETDNSEPPF

SEQ ID NO: 60017 - protein, 476 aa, Pseudomonas aeruginosa BL19; identical to SEQ ID NO: 60016

SEQ ID NO: 60018 - protein, 547 aa, Pseudomonas aeruginosa BL16; identical to SEQ ID NO: 60008

SEQ ID NO: 60019 - protein, 251 aa, Pseudomonas aeruginosa BL01
MDDDYTPYLACQALRVKEVTAVILGKFNQSRAKVISIGYSELMPPISVSPSAHQSQKRLRDKQELLKKKLQSLRPSFLPAAKMERSFIELCWLLNRVKTRERDLHRFLKENYQILDSHLAAIFSEVSIGKYRADLVLQYHQSDKRVVLVELEPHDKQIFTKKNRLRHQVTHALQQVEDWIQEIHRGVPNIPDWLQGSYTAEGMIVIGRSKDLTEEQRETLALKNAKSSIKILTYDDLLERLSRLIKTLDKE

SEQ ID NO: 60020 - protein, 547 aa, Pseudomonas aeruginosa BWHPSA027; identical to SEQ ID NO: 60008

SEQ ID NO: 60021 - protein, 326 aa, Pseudomonas aeruginosa BWHPSA025
MEFEVGSRTVEIKKRRILTASVKRQVAILSGYRCSFPGCDQDLMLDGSSFIGEISSIEAVHSHGPRHNPSKDGDELLEIDNYLLLCPNHHAVIDRQPEIYSTEWLKKAREDHLSKVSEALSASNFVDEIKLDEQVEVSLEEAIGVWKVNRENSSEEFWQTLLQKCPAVLSQIFPQSMFQLGNKCYVGGKSITNSGGNLVDFIYASRLTGNIALVEIKTPKTKLLGKKYRSNAYSISEEMSGSFIQVLNYKDQLMKEYYKLSEGDEGSSFSAFNPKCLIVIGTLESELKDGNQYKSFELFRNSMTNVEIVTYDELFQKAQDILDMVK

SEQ ID NO: 60022 - protein, 547 aa, Pseudomonas aeruginosa BWHPSA018
MDNLKTRIVNSYNDLSADADSFSESSGKSRTVVEPVLRLLRKALLLDISGGEKRVPDADEIKDWVLKLFAKNPPVGDMVRALLLIKEDLVVSEHQLPSIEEALREIGLLEQLHLPDFFFVSSELEGEPCGVLFERYESDGEVLVFLATLFDKKNLMQKVGRMAIRVSKESPEPFLSICTPDGWLRVPKNQIVPGSVSSFTVQCLLEYKYYIYPTLPLSSIIAPELTRRKDNIHLVSLIKEAYLDKVVCTRVRVPLDVVQPRDIDYALHTPDEQIRDCMPYAAHTEFLLYEEDGVLIMDDDYTPYLACQALRVKEVTAVILGKFNQSRAKVLSIGYSELMPPISVSPSAHQSQKRLRDKQELLKKKLQSLRPSFLPAAKMERSFIELCWLLNRVKTRERDLHRFLKENYQILDSHLAAIFSEVPIGKYRADLVLQYHQSDKRVVLVELEPHDKQIFTKKNRLRHQVTHALQQVEDWIQEIHRGVPNIPGWLQGSYTAEGMIVIGRSKDLTEEQRETLALKNAKSSIKILTYDDLLERLSRLIKTLDKE

SEQ ID NO: 60023 - protein, 326 aa, Pseudomonas aeruginosa CF27
MEFEVGSRTFEIKKRRILTASVKRQVAILSGYRCSFPGCDQDLMLDGSSFIGEISSIEAVHSHGPRHNPSKDGDELLEIDNYLLLCPNHHAVIDRQPEIYSTEWLKKAREDHLSKVSEALSASNFVDEIKLDEQVEVSLEEAIGVWKVNRENSSEEFWQTLLQKCPAVLSQIFPQSMFQLGNKCYVGGKSITNSGGNLVDFIYASRLTGNIALVEIKTPKTKLLGKKYRSNAYSISEEMSGSFIQVLNYKDQLMKEYYKLSEGDEGSSFSAFNPKCLIVIGTLESELKDGNQYKSFELFRNSMTNVEIVTYDELFQKAQDILDMVK

SEQ ID NO: 60024 - protein, 547 aa, Pseudomonas aeruginosa CF27; identical to SEQ ID NO: 60009

SEQ ID NO: 60025 - protein, 480 aa, Pseudomonas aeruginosa MTB-1
MAVKKRQGQTRWYTDAEVMEPSFRLEAGVTDEGVEYKDLFMQIFEQESSEPRRWRSLPEPDWHHLARVFLQKIITYPVFTNPHAQRYLTSRHGPFRTVIYESSYGRDLPDSAASAAYYIELALPWRTSNPCTFGLGLTAELDEIWRGLSSFPNLNAIVVARAGTLQVDGNAVRIPEEELQRVRRAFERTKRKMREVVKQARSTHIRNVLLAQLDPTRFPPIVQVNPDGQLVEVRLDRGRQSQEAARSGRKATVKAVRSNVETLVAEAPEELIELHAEIERVTLAQMIEKYEDMLQKGLPETAWQKFFERNIFILTMIFARPVRLLHTQFHAQGGGLDGTGAQIGDFLLAEKSFAMAIVEIKTPGSPLLRGKAYRNREVFAPDEDLSGAVSQVLYQQSKIHENWLFHRARPELQDSRPDAIKCVVITGMLPKDEMQRRSFEVFRNACKNVEVITFDELLGKLRLLSEHLTPRATSENELPF

SEQ ID NO: 60026 - protein, 547 aa, Pseudomonas aeruginosa BWHPSA044; identical to SEQ ID NO: 60008

SEQ ID NO: 60027 - protein, 326 aa, Pseudomonas aeruginosa PA99; identical to SEQ ID NO: 60021

SEQ ID NO: 60028 - protein, 326 aa, Pseudomonas aeruginosa BWH032; identical to SEQ ID NO: 60021

SEQ ID NO: 60029 - protein, 326 aa, Pseudomonas aeruginosa 3579; identical to SEQ ID NO: 60021

SEQ ID NO: 60030 - protein, 326 aa, Pseudomonas aeruginosa 3578; identical to SEQ ID NO: 60021

SEQ ID NO: 60031 - protein, 342 aa, Pseudomonas aeruginosa PS75
MKRKKFDIDAFLDAMQLSEDLRKARPKDASKIALALSLKLCHPGFASEPLETAEEMLYSLDDSVEQRVCELIGEKASKHEVSKRFDSDIYFRNFMNCVAISRRSLVQLIEYIKSNEPDSSAFDLAGQVVEVVEDFNNVVVANDVLPLIERGIYASDIALALEVWSKNRDLMKGDERFWQKEFEERKGVLERLLGGHAVLLQSEFHVGGTNTSGAGDLRSDFAFLNKINNISLVEIKAPATKLLGSKYRGTYPLSKDVSGAISQVLIQRSELIKYYFQKRCDSPVPFEVFSPRCFLIVGDLSSLGSDSEKLKAFEVQRQAVASHVSVVTFDELYQQFATFHQL

SEQ ID NO: 60032 - protein, 547 aa, Pseudomonas aeruginosa BWH058; identical to SEQ ID NO: 60008

SEQ ID NO: 60033 - protein, 414 aa, Pseudomonas aeruginosa BWH055
MISIFAEENQLLLTYQPDRFNDARWLDEKLRQDGEVTLRRTFTFTGADLLTPSASSGEGDDSERIFLLGLLEDGYYKINSDVLGLKHDLLLDSAMTLVPSTFIAQRDISVFRRIDELIEEPIVVGGDNESAIPLADFEQLLKTFPTSTELTHYARARIVRVLKDYFGTISDAEGQLNQYLKRKKKLPAASRESIVSNFELQKFEYVHAELESMLKQVDAYSEKDWQAKILGLLLFVFPKYVAVLENVHIKDFYTNASKTTDRYIDLMLVDANGNIDIIEVKKPFPNAIVSRSTYRDSHTPKKELTGSVMQAEKYLFHLSKWGHAGEQEIYNKRKSELPTWIELKITNPKAIILLGRDNDFVGQQRFDFEIIRRKYANMLDIMTYDDLLRRVGNIIEMMSRQKSAGSVAPNRRGA

SEQ ID NO: 60034 - protein, 384 aa, Pseudomonas aeruginosa
MDDYQNPKPGKTYISPSLSSFSQPERKVRIATKLIEQPDSYAFAVLKGETVLRHKEGAKTCIKAKFFEDDRGIFVLNIQGYTIASMKPHNASFSFVGNEIEKLVEFIEHIRQVPLSDSRYKKITDDEIRKLILSSSQAHSIIQGNEDLFIEVLRSAVTKEDVVAVAYRKRQLEAFNRLLKDEDYFERAKTKKNCSDEAVWQRFFEKNPWIFGYGLSYIHLSSLDDKKLEQVVHGYSVADHGKRSDALLKTRGVISSLCFVEIKTHKTELLQNRSYRPGCWAPSLHLAGGVAQVQGTVMLAVESIREKLSIFDDKGDPTGEEIFNYMPKSFLVVGNLDEFRTDNGVNKDKYRSFELFRRNTSSPEIITFDELYERACFIVEQHEV

SEQ ID NO: 60035 - protein, 547 aa, Pseudomonas aeruginosa; identical to SEQ ID NO: 60009

SEQ ID NO: 60036 - protein, 88 aa, Pseudomonas aeruginosa; identical to SEQ ID NO: 60010

SEQ ID NO: 60037 - protein, 469 aa, Pseudomonas aeruginosa
MASIRPSAFNQRERLDGGPFLVIEAAEPEEEGINVFFTDIPAAERKPDSPIARLLNVCPDRLTIWPLNIREDRDDYLQPKYGTLERIVVARPVIEPYILPETTDDVVGLLEQLPDGFAKDFRFGLGLLWEYRQICETAASLENVSILIVHKGNDAKIDSPFFILGIRRFHELRKELNRIASRHQRDARKDKQFHVYQTLLHAADSAQFPALKKSVRPDALTEMTDGGRQHVTLSKRDRRAAVRMVQDNIEALAESEPRSLLALKNDIELITLNQLIERYQEMLGKGLTESKWQSFFLENPFILSLAFAVPAMLVQGQAYAGGKRLNGSGGKFSDFLYASASTGNLGLIEIKKPQTELLGKSPYRGDDVFGPSTELGGAIAQILDQRFKLQSELPVIKNNMNRYDLHSYAVRCIVVAGMTPQEHQQRKSFELVRNAFAEIVIVTFDELLARLTEIKNALQPIPTLDTVPF

SEQ ID NO: 60038 - protein, 469 aa, Pseudomonas aeruginosa; identical to SEQ ID NO: 60037

SEQ ID NO: 60039 - protein, 547 aa, Pseudomonas aeruginosa; identical to SEQ ID NO: 60008

SEQ ID NO: 60040 - protein, 486 aa, Pseudomonas aeruginosa
MASVTNSEYRQAQRTDGGPFLALLPLDDTGLPAKPGETIAGVDVFYSDVPVPDGTAIGADPWLHIMNVTTEMLTIWPIQQRFGHRDYGKPLFDSIRRIMIYKPIDDEYELPTDNGMLEDMLEGLPAGFYKDWRYGLGLRWEFRSIITTIQEMPDIDTIIFHAPADQPGTDFTRPPFYLLGMHTFHALRKQLTSISERHQRAARKEKRTICHNTLLHRVAPESFQKEHLSLPPDTLAEMTSSASGGIKLTKRDQRAAVKLVQQHTTSLAKEEPAELLRLKENIELVSLRELIDRCTQLLDVSTTEPKWQSFLSDNPFILTMAFHYPVVKIGDTPYVGGKSFRGSGGSHSDFLMAAAATNNLALVEIKRPGTQLVGTVYRGIYPPSHDLSGAVAQVVAQRSELQQNFRLIGTELDRKGFRPHSIACVVVAGLKPTDEEQIQGFEQYRHTLQGVHVVTFDELVDRLKALLDLLAGSQPALPTEPIEPPF

SEQ ID NO: 60041 - protein, 213 aa, Pseudomonas aeruginosa
MATEQPHALMELHAEIERVSLQQMIDKFSEMLGKNLTERAWQQFFDQNIFILTMLFCGPVHLVCSQFHAQPSGIKGAGAQIGDYLFRGAGQVLVIVEIKKPSTSLVQKTEYRRGGGVHAPDSELSGAVSQVLYQRHSLQTTWGIHREDEVLAGTRPDNTRCVVIAGKLPTESSLLRSFETFRCAQKDVEIITFDELQQKLELLLKHLSPEPSL

SEQ ID NO: 60042 - protein, 486 aa, Pseudomonas aeruginosa; identical to SEQ ID NO: 60040

SEQ ID NO: 60043 - protein, 213 aa, Pseudomonas aeruginosa; identical to SEQ ID NO: 60041

SEQ ID NO: 60044 - protein, 547 aa, Pseudomonas aeruginosa; identical to SEQ ID NO: 60008

SEQ ID NO: 60045 - protein, 414 aa, Pseudomonas aeruginosa; identical to SEQ ID NO: 60033

SEQ ID NO: 60046 - protein, 326 aa, Pseudomonas aeruginosa; identical to SEQ ID NO: 60021

SEQ ID NO: 60047 - protein, 206 aa, Pseudomonas aeruginosa
MLHAEIERVTLAKMIEAFRMKLAGSSNESAWQKFFEVNKFVLSLAFARPVELAHTQFHAKGSTLPGSGAQIGDFLFKEHGQALAIVEIKTPKTILLRAKAYRGKEVFGPNSELSGAVPQVLFQQNELKQRWVHHRHDTPGMHLSGADAIKCVVVAGTLPTDPIQLRSFEVFRNACKDVDIVTFDELLAKLEFLKTHLTPEPEEDLF

SEQ ID NO: 60048 - protein, 547 aa, Pseudomonas aeruginosa; identical to SEQ ID NO: 60009

SEQ ID NO: 60049 - protein, 326 aa, Pseudomonas aeruginosa; identical to SEQ ID NO: 60021

SEQ ID NO: 60050 - protein, 414 aa, Pseudomonas aeruginosa; identical to SEQ ID NO: 60033

SEQ ID NO: 60051 - protein, 547 aa, Pseudomonas aeruginosa; identical to SEQ ID NO: 60009

SEQ ID NO: 60052 - protein, 326 aa, Pseudomonas aeruginosa; identical to SEQ ID NO: 60021

SEQ ID NO: 60053 - protein, 511 aa, Pseudomonas aeruginosa; identical to SEQ ID NO: 60011

SEQ ID NO: 60054 - protein, 326 aa, Pseudomonas aeruginosa; identical to SEQ ID NO: 60021

SEQ ID NO: 60055 - protein, 511 aa, Pseudomonas aeruginosa; identical to SEQ ID NO: 60011

SEQ ID NO: 60056 - protein, 511 aa, Pseudomonas aeruginosa; identical to SEQ ID NO: 60011

SEQ ID NO: 60057 - protein, 547 aa, Pseudomonas aeruginosa; identical to SEQ ID NO: 60008

SEQ ID NO: 60058 - protein, 480 aa, Pseudomonas aeruginosa
MAVKKRQGQTRWYTDAEVMEPSFRLEAGVTDEGVEYKDLFMQIFEQESSEPRRWRSLPEPDWHHLARVFLQKIITYPVFTNPHAQRYLASRHGPFRTVIYESSYGRDLPDSAASAAYYIELALPWRTSNPCTFGLGLTAELDEIWRGLSSFPNLNAIVVARAGTLQVDGNAVRIPEEELQRVRRAFERTKRKMREVVKQARSTHIRNVLLAQLDPTRFPPIVQVNPDGQLVEVRLDRGRQSQEAARSGRKATVKAVRSNVETLVAEAPEELIELHAEIERVTLAQMIEKYEDMLQKGLPETAWQKFFERNIFILTMIFARPVRLLHTQFHAQGGGLDGTGAQIGDFLLAEKSFAMAIVEIKTPGSPLLRGKAYRNREVFAPDEDLSGAVSQVLYQQSKIHENWLFHRARPELQDSRPDAIKCVVITGMLPKDEMQRRSFEVFRNACKNVEVITFDELLGKLRLLSEHLTPRATSENELPF

SEQ ID NO: 60059 - protein, 511 aa, Pseudomonas aeruginosa; identical to SEQ ID NO: 60011

SEQ ID NO: 60060 - protein, 547 aa, Pseudomonas aeruginosa; identical to SEQ ID NO: 60008

SEQ ID NO: 60061 - protein, 480 aa, Pseudomonas aeruginosa; identical to SEQ ID NO: 60058

SEQ ID NO: 60062 - protein, 414 aa, Pseudomonas aeruginosa; identical to SEQ ID NO: 60033

SEQ ID NO: 60063 - protein, 206 aa, Pseudomonas aeruginosa
MLHAEIERVTLAKMIEAFRMKLAGSSNESAWQKFFEVNKFVLSLAFARPVELAHTQFHAKGSTLPGSGAQIGDFLFKEHGQALAIVEIKTPKTILLRAKAYRGKEVFGPNSELSGAVTQVLFQQNELKQRWVHHRHDTPGMHLSGADAIKCVVVAGTLPTDPIQLRSFEVFRNACKDVDIVTFDELLAKLEFLKTHLTPEPEEDLF

SEQ ID NO: 60064 - protein, 169 aa, Pseudomonas aeruginosa
MERSFIELCWLLNRVKTRERDLHRFLKENYQILDSHLAAIFSEVPIGKYRADLVLQYHQSDKRVVLVELEPHDKKIFTKKNRLRHQVTHALQQVEDWIQEIHRGVPNIPGWLQGSYTAEGMIVIGRSKDLTEEQRETLALKNAKSSIKILTYDDLLERLSRLIKTLDKE

SEQ ID NO: 60065 - protein, 326 aa, Pseudomonas aeruginosa; identical to SEQ ID NO: 60021

SEQ ID NO: 60066 - protein, 511 aa, Pseudomonas aeruginosa; identical to SEQ ID NO: 60011

SEQ ID NO: 60067 - protein, 511 aa, Pseudomonas aeruginosa; identical to SEQ ID NO: 60011

SEQ ID NO: 60068 - protein, 326 aa, Pseudomonas aeruginosa; identical to SEQ ID NO: 60021

SEQ ID NO: 60069 - protein, 511 aa, Pseudomonas aeruginosa; identical to SEQ ID NO: 60011

SEQ ID NO: 60070 - protein, 480 aa, Pseudomonas aeruginosa; identical to SEQ ID NO: 60025

SEQ ID NO: 60071 - protein, 547 aa, Pseudomonas aeruginosa; identical to SEQ ID NO: 60008

SEQ ID NO: 60072 - protein, 547 aa, Pseudomonas aeruginosa; identical to SEQ ID NO: 60008

SEQ ID NO: 60073 - protein, 326 aa, Pseudomonas aeruginosa; identical to SEQ ID NO: 60021

SEQ ID NO: 60074 - protein, 326 aa, Pseudomonas aeruginosa
MEFEVGSRTVEIKKRRILTASVKRQVAILSGYRCSFPGCDQDLMLDGSSFIGEISSIEAVHSHGPRHNPSKDGDELLEIDNYLLLCPNHHAVIDRQPEIYSTEWLKKAREDHLSKVSEALSASNFVDEIKLDEQVEVSLEEAIGVWKVNRENSSEEFWQTLLQKCPAVLSQIFPQSMFQLGNKCYVGGKSITNSGGNLVDFIYASRLTGNIALVEIKTPKTKLLGKKYRSNAYSISEEMSGSFIQVLNYKDQLMKEYYKLSEGDEGSSFSAFNPKFLIVIGTLESELKDGNQYKSFELFRNSMTNVEIVTYDELFQKAQDILDMVK

SEQ ID NO: 60075 - protein, 326 aa, Pseudomonas aeruginosa; identical to SEQ ID NO: 60021

SEQ ID NO: 60076 - protein, 547 aa, Pseudomonas aeruginosa; identical to SEQ ID NO: 60008

SEQ ID NO: 60077 - protein, 547 aa, Pseudomonas aeruginosa; identical to SEQ ID NO: 60009

SEQ ID NO: 60078 - protein, 326 aa, Pseudomonas aeruginosa
MEFEVGSRTVEIKKRRILTASVKRQVAILSGYRCSFPGCDQDLMLDGSSFIGEISSIEAVHSHGPRHNPSKDGDELLEIDNYLLLCPNHHAVIDRQPEIYSTEWLKKAREDHLSKVSEALSASNFVDEIKLDEQVEVSLEEAIGVWKVNRENSSEEFWQTLLQKCPTVLSQIFPQSMFQLGNKCYVGGKSITNSGGNLVDFIYASRLTGNIALVEIKTPKTKLLGKKYRSNAYSISEEMSGSFIQVLNYKDQLMKEYYKLSEGDEGSSFSAFNPKCLIVIGTLESELKDGNQYKSFELFRNSMTNVEIVTYDELFQKAQDILDMVK

SEQ ID NO: 60079 - protein, 480 aa, Pseudomonas aeruginosa; identical to SEQ ID NO: 60025

SEQ ID NO: 60080 - protein, 511 aa, Pseudomonas aeruginosa
MRDSRERLRFRVAVRDNRAVAISDSTGRHVSGGRPMAGTEGQDDVELDVWDPELRLDRGKADDGEEYRDLYMQTFVRDSTEPHQWRSQPESRWHHLARVHPKKVVTYPVFSNPYAQRYLSCRHGRFKTIAYELDVEHPLPGNVDEAKSHIETVSAFDLFNPCAFGLGLIKDLDEVWRGLAGFANLNAIVLTQSGGLQIDGDTVRIPVVHIESMRRAFNRTNRKVREVVRLGKRTHVRNVLLSRLDPERYPRVMQVNQEGQLIEVRLDHSRTSKNAARSQRRATVDAVRTNVDTLAAEAPQELIRLHAEIERATLAQMIEKYEEMLKKKLPEAEWQNFFERNIFILTMVFARPVRLLHTQFHAKPGRVDGKGAQIGDFLFAEHGFAMAIVEIKKPASLLLRAKPYRNTEVFAPSADLAGAVTQVLYQKNNIHQYWLYHKESPELKDSRPDAVKCVVITGMLPKDELQRRSFEVFRNSSKDVEIITFDELLAKLRLLSEHLASPETDNSEPPF

SEQ ID NO: 60081 - protein, 547 aa, Pseudomonas aeruginosa; identical to SEQ ID NO: 60009

SEQ ID NO: 60082 - protein, 326 aa, Pseudomonas aeruginosa; identical to SEQ ID NO: 60021

SEQ ID NO: 60083 - protein, 547 aa, Pseudomonas aeruginosa; identical to SEQ ID NO: 60008

SEQ ID NO: 60084 - protein, 547 aa, Pseudomonas aeruginosa; identical to SEQ ID NO: 60008

SEQ ID NO: 60085 - protein, 326 aa, Pseudomonas aeruginosa; identical to SEQ ID NO: 60021

SEQ ID NO: 60086 - protein, 547 aa, Pseudomonas aeruginosa; identical to SEQ ID NO: 60009

SEQ ID NO: 60087 - protein, 88 aa, Pseudomonas aeruginosa; identical to SEQ ID NO: 60010

SEQ ID NO: 60088 - protein, 547 aa, Pseudomonas aeruginosa; identical to SEQ ID NO: 60009

SEQ ID NO: 60089 - protein, 326 aa, Pseudomonas aeruginosa; identical to SEQ ID NO: 60021

SEQ ID NO: 60090 - protein, 547 aa, Pseudomonas aeruginosa; identical to SEQ ID NO: 60009

SEQ ID NO: 60091 - protein, 414 aa, Pseudomonas aeruginosa; identical to SEQ ID NO: 60033

SEQ ID NO: 60092 - protein, 479 aa, Pseudomonas aeruginosa
MASIRPSQYAMQNRTDGGPFLRVDLVDENGNIVSPGAPSADITLVYFSDVSLPVDSHDWLLIMAVTAEELTFYPKISRNDNDNYGKPRYGTIERIELVDPSLQLDELPYDQDSLEALLSELPPGFRKDWRFGLGFLYEYRFIPAAIGELDGVDTLRIQAGEATDEVRIDGNRYCLGINEFEELCSRIEKISRRHQRDTAEDKKLVCYSGLLHKVNPELYPARARRLPPDVLKDLVNLGRDKLSNQDQRSATRLVKKNASSIARNEPRALYELKAEIELVTLGQLIEAYKKMMSRNLNEDHWHQFFTDNAFILDMAFGHPVKMVASKPYVGGKQVSGQGGQHTDFLMAARSTRNLALIEIKHPQKELVSKNEYRTDVYGPSTELGGSIAQALSQRALLLQDVLSLTADMEERAHAHAVPIVIIIGRTPSDKKQQRSFEQFRNSLKDIQITTFDELQTRLESIHHALQPEDASKAEDVECN

SEQ ID NO: 60093 - protein, 469 aa, Pseudomonas aeruginosa; identical to SEQ ID NO: 60037

SEQ ID NO: 60094 - protein, 473 aa, Burkholderia cepacia
MSDTLEEVNGLPSPDFRLDNHSSDTPPELRLYLQTFRSSPTNPETWISRPSAEWHLLAVIQPHQIISYPVYTNPYTQRYLQPKHGQFDKLVLERDSNEGLPQSAEEAVRELSTAPHSQLFDDPAYGFGFIKNLDPLRYGLAALRNVDTIKLSSSGELQIDDGILTMPAALLDQFRRAFERNRRLGRQEVRLANTHLVRNHLLSEIDPERFPRVVTDTSPGPFVQVRLDRTRRAASSGRADRISSVRAVRENLQHIASDMPRELFELHSEIERVTLAHMIENFENLLQQSLSEARWQRFFEDNIFILSMVFARPVRLLHTQFHAQGSGLDGAGSQVGDFLFAEHGTALAIVEIKKPGTELMLNSAYRNTQVFGPSAELSGAVTQVLYQQSSLRSHWLLHDRRPELEHSRPDSIRCVVVAGTLPTDEARRRSFDIFRNACKDVDVVTFDELLQKLRLLLSHLNAAHTAHVADVPF

SEQ ID NO: 60095 - protein, 401 aa, Burkholderia cepacia
MDDEQQIHHNKLPGKTYISPRIYIDAHEAVRIASKVIDSDGLHYATVKKEIVLRRTEKGRTEIVAKFIESTRDLRVLTIQAFNGQTGTPHKTHFSFVGEEIPKLLAFFENIASVEFASQDKINITDTELRRLVLSKEQAASLVHDNQDIFSEVVRQEITREDVVALGYRKKQVATFARLLNEPTYFDQVKVAKGVKGDEALWQAFFERNRWIFGYGLSYFFVTGFDNKKLEQVVEGHDLINRGKRADCLMKTKGVLSSLCFVEIKTHATKLLDSTQYRSGCWAPSKELSGAVAQVQATVASAMRSLSEYIQPTDTLGIPTGEEVFNFKPRAFVVVGSLNEFVTEHGVNRDQLRSFELYRNSISSIDILTFDELFERCSFIVQSEAERTSGATSTHGTESRT

SEQ ID NO: 60096 - protein, 412 aa, Burkholderia cepacia
MLHFRTTETGVDFDYQPEFGTQHQWVWEELKSGKSTEVSRVFSFRKADLKNPPSNNTDFTEYIYTFHFGTFEDEYLRIPGRVFSVERDVLVSRELRLKRSVFVAERNVSIMKRLSGLLDNDEPIVIGGSRAGNIPLPVYHELLRKFPTTHELNRYAAARVHTILSQYVDSMKDARGLYESYLDKRSVLNGTFSSENPPELKALKEQEVLKYRLIYDEIQQILLTGKNLSEKEWQRQMVSFLPLLFPKYIRVLQNITINDYYSKSGKTSKRYIDIGLVDASGNLDVIELKKPFEDKILRQGLYRGNNIPTAELAGSVMQAEKYLFHLSKWGVDGERALTKAYASELPPGLGIRISNPKAIIIVGRSQIGGKKMTDSQQLDFEIIKRKYANMMDIITYDDLLGRLQNTIYALEH

SEQ ID NO: 60097 - protein, 412 aa, Burkholderia cepacia; identical to SEQ ID NO: 60096

SEQ ID NO: 60098 - protein, 401 aa, Burkholderia cepacia
MDDEEQIHHNKVPGKTYISPRIYIDAHEALRIASKVIDSDGLHYATVKKEVVLRRTEKGRTEIIAKFLESTKDLRVLTIQAFNGQTGAPHKTHFSFVGEEIPKLLAFFENIASVEFESQDKINIIDTELRRLVLSKKQAASLVHDNQDIFSEVIRQEITKEDVVALGYRKRQVATFAKLLSEPIYFDQVKAAKGVTGNEALWQAFFERNRWIFGYGLSYFFVTGFDNRKLEQVVEGHDLINRGKRADGLMKTKSIVSSLCFVEIKTHTTKLLDSTQYRPGCWAPSRELSGAVAQVQATVASAMRSLSEYIRPTDAHGAPTGEEVFNFKPRAFIVIGSLSEFITEHGVNKDQFRSFEFYRNSISSIDILTFDELFERCSFIVRSEAERTSGETSSLGTENGP

SEQ ID NO: 60099 - protein, 299 aa, Burkholderia cepacia
MLDQGYIIPPATYIEHYEADGAAFDSFDKVTLTPRTNWEKLSRGRVLEMIGDENVELSDRSSTNPRIVAQADRLLFRQDPFVGSRYPESNEVTKRRLEIIGSMVSKASVESLVQSGSGEQELQRLLKTDLSIFGEAYAKPDDEYICFSEFPLADGSVDFVVFTGRSRMDIILIEVKGAEFNLLNANHYKAFNHKITEAAGQISHRLGIIFRDLNSFRKEAHAIRKRAESGDILYNAFLGPRGKLGVDSDKDINFRCVVIGGRSQNDLEESIKRQDYEAHTTPRIRIESWDTWLRRLQRI

SEQ ID NO: 60100 - protein, 401 aa, Burkholderia cepacia; identical to SEQ ID NO: 60095

SEQ ID NO: 60101 - protein, 401 aa, Burkholderia cepacia; identical to SEQ ID NO: 60098

SEQ ID NO: 60102 - protein, 544 aa, Pseudomonas fluorescens WH6
MQELEAHYMDGSLATDTRLLLSENDLPPGTEPMLQQVRQGTLREIVQGEHRTPDVDEIVSWVRNCYRKNPLIGDIARAMFVINEDLVVADSELPTPDEVLRDLHRLEKLKLDREFFVSSTFEGRPCGVLFRRSEMVDGGVLFEITVFGREGLSGKVGQLNLQLSSTRPEPFISMCTEEGWVRFEREYAVQVAHIMFLLQCLYQYKKYLYPVLPLNSIVDNRKDRPRDNPYLVQLITRAYHGQVACTRVRVELAIVQPRDIDYALRIPDEDISRFITHARTTDILLYEENGALVMDDDYIVYMACRALGLTRVKAVIVGAFDQPLAEVMEVGGRELIPPIGVTRRDNRSRRGSVDKQHLLQRKVTALGPKVSQSARFERNFIELCQLLGRVGTREKDLHRFLKQHTQVLDSHVAAVYSEVCIGKYRADLVLQYRQSDKRVVLVELEPHSAQIFTKRNSQRHKVTHAVQQVQDWIREIHNNASNLPQWLAGNYAAEGMVVIGRSKDLTQEQKDTLMIHNAKSDIKILTYDDLLERFQRLIEVLDKR

SEQ ID NO: 60103 - protein, 52 aa, Pseudomonas fluorescens HK44
MAAKATGNFALIEIKHPQLDLLGKPYRKTYAPSYELSGSVAQIISQHSHVQR

SEQ ID NO: 60104 - protein, 487 aa, Pseudomonas fluorescens BBc6R8
MVSVPNSEYRLSQRTDGGPFAILQQLDEFDLPTSTQDDAVKVEVYYSDIPVPDGVTVGAKPWIRIISIARDIMTIWPVQQRRDHREYGKPLFGNIERLCLLARVDGPYELPTTIEDLDELWESLPAGFYKDWRYGLGVRWEFRSIITTIAEMSSITMVCFHGAAGTPGTDRVEAPIYCLGMNTFHRLRREITSATARHQRAARKEKAAICHNRLLHKFAPQNFSLMHLSLPQDALADLAASARGHVMLTKRDQRAAVALVQGHAQALVKTEPEALLRLKQDIELLTLRELIERCTELLAVSTTEPKWQGFLSANPFILTMAFHYPVIRIGDQPYVGGKLHTGRGGSYSDFLMAAASTNNLALIEIKRPGIALLGSEYRGIYPPSAELSAAVAQVVAQRAELQASFKHVGTELDRQGYRPHSIACVVIIGLKPTDEERAQGFEQYRHSLHGVHVVTFDELVERLQSLYDLLTGGSSPSPALQDAEVPF

SEQ ID NO: 60105 - protein, 512 aa, Pseudomonas fluorescens
MLQQVRQGTLREIVQGEHRTPDVDEIVSWVRNCYRKNPLIGDIARAMFVINEDLVVADSELPTPDEVLRDLHRLEKLKLDREFFVSSTFEGRPCGVLFRRSEMVDGGVLFEITVFGREGLSGKVGQLNLQLSSTRPEPFISMCTEEGWVRFEREYAVQVAHIMFLLQCLYQYKKYLYPVLPLNSIVDNRKDRPRDNPYLVQLITRAYHGQVACTRVRVDLAIVQPRDIDYALRIPDEEISRFITHARTTDILLYEENGALVMDDDYIVYMACRALGLTRVKAVIVGAFDQPLAEVMEVGGRELIPPIGVTRRDNRSRRGSVDKQHLLQRKVTALGPKVSQSARFERNFIELCQLLGRVGTREKDLHRFLKQHTQVLDSHVAAVYSEVRIGKYRADLVLQYRQSDKRVVLVELEPHSAQIFTKRNSQRHKVTHAVQQVQDWIREIHNNASNLPQWLAGNYAAEGMVVIGRSKDLTQEQKDTLMIHNAKSDIKILTYDDLLERFQRLIEVLDKR

SEQ ID NO: 60106 - protein, 320 aa, Pseudomonas fluorescens
MSKVKDQKFVLLRNKPTVLTRAGFWKVPHNNSPDEVYLKIGRYKKPKNFYESEIVELSEPKSELTLDGEEFTNLVSFIQDNYEPFKNGAKAYLPLSTPYDISIAQQLKKLLDESDRSQMLQFLLDNDVIPEELEIGLAHARRARAIDEYIQLLESDHTENKWQHWFEVNSWVLGSDFVKVLDERNIDTKNISDFLMESYDGFLDIVEIKRPEGGLQFWSSSLDHGNYIPHSDLIKAITQASKYIHEVEREADSIKFYQRVGGIKTIKPRCTLIYGRSNEWNEEQQEAFRILNSSYHNMSIMTFDHVLARAYRILGRTTHV

SEQ ID NO: 60107 - protein, 512 aa, Pseudomonas fluorescens; identical to SEQ ID NO: 60105

SEQ ID NO: 60108 - protein, 465 aa, Pseudomonas fluorescens
MSKPTDPKPEERQGDIELKVIKNNQFDGIYKPRKKMAELAGLKLGISAKMIHVNLSKQTLTIYPLVTWPDHTDFLKSKYKKIERICFPIEESLCDFFRKKSPFEADDLLMLLRDVLLPGFTQDPDYGLGIAREFKDVIDAIEEHSDCIEIRFSEADETSIGDKTKVFTLNIDDYEEAKRKIRNITSLGQKAAAEVKDGTIYNLLASRLGKPPTTIATGRSPVRRLITAAAQGKPPLTAGDQDSVINILKTNSKQIAETKPEALAKLQDEIELVTLEVLIKRYEEQLLKNTVESDWQRFFEANKFILTMAFGYPIIEILEQASVGGGQLTGGGSKFADFISKNSQTNNAAIFEIKTPKTPLLNKTAFRGKVFSATTEFSGSIVQILDQKYQLGKSLPYLKSNDRNLNLEAYAVHCCLIIGTTPTGLDEQKSFELFRRNSREVEIITFDELLGKLKQLHSFLSSKSK

SEQ ID NO: 60109 - protein, 497 aa, Pseudomonas fluorescens
MPSMRPSQFAMQQRSDGGPFLRFEFDDHGEDLEEDDFAPPEIGGFEMEGDIEIYGVSRVYYSDVAVSENSPDWHLILKVTPDDLTIYPIFPRSGHSKYADSKYDTIKSIRITRQVCQPYAHPTDEGSVEEVLADLPTGLAKDWRYGLGFHYEYRFIALAVAELDGVEEIVLHGGRGYDDTRVQGSTYYLGIGQLELLRRGLDRLSQRHQRETAADKKLICYTGLLHRAAPGVYPPKARKLPPDVLSNLISLGSVNPQLSLKDQQQAVRLTQQNVPNLAKSEPRTLFNLKEQIELVTLGELIEVYRKMMNSNVGESRWQAFLSDNPFILDMAFGYPVKKIADQPYVRGKNFSGRGGQYSDFLMAARATGNLALIEIKHPQHDLLGRQYRQTYTPSHELSGSVGQIISQRGNVQREIFGLARDFKDRVHAHAVAAIVIIGRTPEEEDKQEAFEQYRNSLKDVLVVTFDELQVRLESIHQALTPRIPAKPEPIRDEDLPF

SEQ ID NO: 60110 - protein, 493 aa, Pseudomonas fluorescens
MPSMRPSQYAMQQRVDGGPFLRFDHGEARGLSEGELEELESGEYNENDFYGPTLVFYSDVPLLDNGSGWHLLLMVTSEYLTIYPINARSEHSEYGKPKYDTIQSIVVTRPVFQEYPHPNNQDELEDLLGLLPVGLTKDWRYGLGFHYEYRYIIQALNDLEGIDTLFLHGGQGNFDAKIEGNHFCLGVAQLEKMERSLDRLTQRHQRETAADKKLVCYTGLLHKAAPELYPPRERKLPPDLLANLVALGSVAPRLSPKDQKQAVMLAQQSVSALAKSAPKTLYQLKSEIELITLGELIEVYRKMLESNAAENKWQRFLREHSFVLDMAFGYPVKMIAEQPYVGGKDIRGQGGQYSDFLMAAKATGNLALIEIKHPQHDLLGKAYRKTYVPSYELGGSVAQVISQRSVLQKNILGLSEDLDDRVHAHAVAAIVIIGRTPSKIGEQRAFEQYRNSLKDVLVITFDEMLGRLEGIHKALTPKLPVAHLPLSDEDLPF

SEQ ID NO: 60111 - protein, 384 aa, Pseudomonas marginalis ICMP 9505
MDNYQNPKPGKTYISPALPSFGDKSRLIRIASKVLPSVDGYEYGRERDEAVLRHKPEAATYISAKFLEDTRRIQVLTVQKFSSESGQPYGSGFSFVGEEIGRFCEFLANIHAVTFEGGSQINISDSELRRIALTSLQAKQLVTENEDLIAEVVKNSLTKQDVVAIGYRKKQLEVFKSLLEDEDYFQKLQSRKGCTPEALWQKFFEKNPWIFGYGLSYIYASGLDGKKLEQAVRGNDVAQPGKRVDALLKTKAWASSLCFVEIKTHKTRLLKNKSYREGCWAPSDELAGAVAQVQGTVALAAETLKESVRLTDDNGYPTAEEVFNYSPRAFVVVGSLEQFVGEHGVNREHLRSFELFRRNTIQPEIVTYDELFERAKHIIAANEA

SEQ ID NO: 60112 - protein, 544 aa, Pseudomonas putida S610
MQELEAHYMDGSLATDIRPSISENDLPPGTESMLQQVRQCTLREIVQGEIRKPDVDEIVSWVRNCYRENPLIGDIARAMFVINVDLVVADAELPTPDEVLRDLHRLEKLKLDREFFVSSTFEGRPCGVLFRRSEMVDGGVIFEITVFGREGLSGKVGQLNLQLSSTRPEPFISMCTEEGWVRFEREYALQVTHIMFLLQCLYQYKKYLYPVLPLNSIVDYRKDRPRDNPYLVQLITRAYHGQVACTRVMVDLAIVQPRDIDYALRVLDEDISRFLTHARTTDILLYEENGALVMDDDYIVYMACRALDLTRVKAVIVGAFDQPFAEVIEVGGRELIPPVGVTRGDNRSRRGSVDKQHLLQRKVSALGPKVSQSARFERNFIELCRLLGRVGTREKDLHRFLKQHTQVLDSHVAAVYSEVRIGKYRADLVLQYRQSDKRVVLVELEPHSAQIFTKRNSQRHKVTHAVQQVQDWIREIHNNTSNLPQWLAGNYAAEGMVVIGRSKDLTQVQKDTLMIHNAKSDIKILTYDDLLERFHRLIEVVDKR

SEQ ID NO: 60113 - protein, 347 aa, Pseudomonas putida KG-4
MTTDNDRLNELIDSLRLAQDLRQAKPEDSDKVAIALSLKLNQSLFTVDIKDSAKHLLDTVQAKIDERIADVCGADRSKEQIELKCAESVDFRFFVDVALRAKRKINDLIEYVTDDEPDDFALELVEFVLEALDEYNSVIVNDDVIPLIKRGVYASDIAEALKVWSASRADMGGDERFWHGELERRKGVLERLLGGHAVLLRSEFHAGATDISGAGSIRADFAYLNKSRNISLIEIKAPDTNLLGSKYRGTYPLSKDLSGAISQVLIQRSELMQNYYMKRAQSPEVFEVFAPRCFLIVGDLSSISGDRDKLRAFEVQRQAVASHVSIVTFDELYEQFSSFNLMDGLPL

SEQ ID NO: 60114 - protein, 456 aa, Pseudomonas syringae pv. japonica str. M301072
MEGTQQSLQDTWNGEDVLEPSFSIIQRPVEAGFCIDLYLQVFDKISSDKWQSLPEDRWHRLATIEPGWITMYPIYTNPHTQRYRSPKNGNVGCILYSHQPTRDLPDTPEDAVLYIDVSLPRKLFDPCEEGLGLVKQLTPLWRGLRFAPSLKTLVISDDGDTSITDDVVFVSEARVDECRRTCMRITRARKKSETSAQMHWWLSQVFPTLMPNVVFEGSRPVLASDTTPRRVSNPVAQAVVRARRHPLREVKVGVELLAKEAPRELFELHAEIERVTLAVMIEKFESMLSQNLSEGHWQHFFEANLFILAMVFSRPVALLHTQFHAQGSTINGAGAHIGDLLFSQGRELAIVEIKKPSTPLMQSRPYRNQDVFGPNLQLSGAITQVLYQQGLMRSNWLSHIRDPTMRDLNPDTARCVVIAGTKPTEEGRRRSFEIFRNACKDVEVVTFDELLGKLRM

SEQ ID NO: 60115 - protein, 255 aa, Pseudomonas syringae pv. actinidiae str. M302091
DLLANLVSLGSLSPRLSPKDQQQAAKLTEQNVPALAKSAPNSLFNLKAEIELVTLGELIEIYRKMMDNKVSEPRWQRFLSEHPFVLDMAFGYPVKKIADQPYIGGKGFSGRGGQFSDFLMAARATGNLALIEIKHPQTELLGQSYRQTFVPSYELSGAVGQIISQRSVLQREVFGLSQELDERVHAHAIAAIVIIGRTPKDLAKQRAFEQYRSGLKDVLVVTFDELQVRLESIHQALRPKPPVEPEPISEEDLPF

SEQ ID NO: 60116 - protein, 424 aa, Pseudomonas syringae pv. aptata str. DSM 50252
GLKLGVSAKMLHLDLAQQSLTIYPLITWPDHEEFLQPKYKKIQKIWFPIDEKTSDFYKKKTPLTSEDLLELLRETLLPGFTLDPDYGLGIARELKDIIDAVELHSDCSEISFSESEQTCISNNKKIFTFSTEDYYEATKNIRSISSLGQKAAAEVKDGTIYNLLAGKLDKPLKTIAIGRSPVRHLITAAALGKPPLSSGDQDSVITILKTHSKQIAEAKPEALAKLQDEIELVTLEVLIKKYEEKLKRTTIESEWQDFFDSNKFILTMAFGYPIVQILGQASVGGGQLIGGGSKFADFISRNSQTNNAAIFEIKTPGTPLLNKTPFRGKVYSATKEFTGAMVQILDQKYQLAKNLPILKSNDRDLMLEAYAVHCCLIIGSTPKGLDEQKSFELFRRNSREVEVITFDELLEKLKQLHAFLSSNT

SEQ ID NO: 60117 - protein, 533 aa, Pseudomonas syringae pv. aptata str. DSM 50252
MPPANQHLVPVFPELKRLVRLGITPSATTILIRDDSTMPSMRPSQYAMQQRTDGGPFLRFDLEDTGALSEEELSAIESDEEYESIGDEIYGISRVYYSDVALAEHEPGWHLLLEVAPSYLTIYPINPRAEHPEYGQPRYHGIRSIIITRPVYTPYSHPATPYEVDELLDGLPKGLYTDWRYGLGFKYEYRCIVQALSSLKGVDTILIHGGTGHNDAKLKGNEFYLGVARLEQLRKSLDRLTQRHQRETASDKKLACYTSLLHEAAPELYPPRARKLPPDLLANLVSLGSLSPRLSSKDQQQVAKLTEQNVSALAKSAPNSLFNLKAEIELVTLGELIEIYRKMMDNKVSEPRWQRFLSEHPFVLDMAFGYPVKKIADQPYIGGKGFSGRGGQFSDFLMAARATGNLALIEIKHPQTELIGQSYRQTFVPSYELSGAVGQIISQRSVLQREVFGLSQELDERVHAHAIAAIVIVGQTPEDLAKQRAFEQYRSGLKDVLVVTFDELQVRLESIHQALTPKPPVEPEPISEEDLPF

SEQ ID NO: 60118 - protein, 321 aa, Pseudomonas syringae pv. actinidiae ICMP 19103
GLSHVVSLRLLRHLARDTFFRGKVMDRLTQRHQRETLSDKKLACYTSLLHEAAPELYPPRARKLPPDLLANLVSLGSLSPRLSPKDQQQAAKLTEQNVPALAKSAPNSLFNLKAEIELVTLGELIEIYRKMMDNKVSEPRWQRFLSEHPFVLDMAFGYPVKKIADQPYIGGKGFSGRGGQFSDFLMAARATGNLALIEIKHPQTELLGQSYRQTFVPSYELSGAVGQIISQRSVLQREVFGLSQELDERVHAHAIAAIVIIGRTPKDLAKQRAFEQYRSGLKDVLVVTFDELQVRLESIHQALRPKPPVEPEPISEEDLPF

SEQ ID NO: 60119 - protein, 322 aa, Pseudomonas syringae pv. actinidiae ICMP 9855
LGLSHVVSLRLLRHLARDTFFRGKVMDRLTQRHQRETLSDKKLACYTSLLHEAAPELYPPRARKLPPDLLANLVSLGSLSPRLSPKDQQQAAKLTEQNVPALAKSAPNSLFNLKAEIELVTLGELIEIYRKMMDNKVSEPRWQRFLSEHPFVLDMAFGYPVKKIADQPYIGGKGFSGRGGQFSDFLMAARATGNLALIEIKHPQTELLGQSYRQTFVPSYELSGAVGQIISQRSVLQREVFGLSQELDERVHAHAIAAIVIIGRTPKDLAKQRAFEQYRSGLKDVLVVTFDELQVRLESIHQALRPKPPVEPEPISEEDLPF

SEQ ID NO: 60120 - protein, 159 aa, Pseudomonas syringae pv. actinidiae ICMP 19070
HLARDTFFRGKVMDRLTQRHQRETLSDKKLACYTSLLHEAAPELYPPRARKLPPDLLANLVSLGSLSPRLSPKDQQQAAKLTEQNVPALAKSAPNSLFNLKAEIELVTLGELIEIYRKMMDNKVSEPRWQRFLSEHPFVLDMAFGYPVKKIADQPYIGG

SEQ ID NO: 60121 - protein, 156 aa, Pseudomonas syringae pv. actinidiae ICMP 19070
QPYIGGKGFSGRGGQFSDFLMAARATGNLALIEIKHPQTELLGQSYRQTFVPSYELSGAVGQIISQRSVLQREVFGLSQELDERVHAHAIAAIVIIGRTPKDLAKQRAFEQYRSGLKDVLVVTFDELQVRLESIHQALRPKPPVEPEPISEEDLPF

SEQ ID NO: 60122 - protein, 321 aa, Pseudomonas syringae pv. actinidiae ICMP 19068; identical to SEQ ID NO: 60118

SEQ ID NO: 60123 - protein, 320 aa, Pseudomonas syringae pv. actinidiae ICMP 19102
LSHVVSLRLLRHLARDTFFRGKVMDRLTQRHQRETLSDKKLACYTSLLHEAAPELYPPRARKLPPDLLANLVSLGSLSPRLSPKDQQQAAKLTEQNVPALAKSAPNSLFNLKAEIELVTLGELIEIYRKMMDNKVSEPRWQRFLSEHPFVLDMAFGYPVKKIADQPYIGGKGFSGRGGQFSDFLMAARATGNLALIEIKHPQTELLGQSYRQTFVPSYELSGAVGQIISQRSVLQREVFGLSQELDERVHAHAIAAIVIIGRTPKDLAKQRAFEQYRSGLKDVLVVTFDELQVRLESIHQALRPKPPVEPEPISEEDLPF

SEQ ID NO: 60124 - protein, 320 aa, Pseudomonas syringae pv. actinidiae ICMP 19104; identical to SEQ ID NO: 60123

SEQ ID NO: 60125 - protein, 298 aa, Pseudomonas syringae pv. actinidiae ICMP 9617
VMDRLTQRHQRETLSDKKLACYTSLLHEAAPELYPPRARKLPPDLLANLVSLGSLSPRLSPKDQQQAAKLTEQNVPALAKSAPNSLFNLKAEIELVTLGELIEIYRKMMDNKVSEPRWQRFLSEHPFVLDMAFGYPVKKIADQPYIGGKGFSGRGGQFSDFLMAARATGNLALIEIKHPQTELLGQSYRQTFVPSYELSGAVGQIISQRSVLQREVFGLSQELDERVHAHAIAAIVIIGRTPKDLAKQRAFEQYRSGLKDVLVVTFDELQVRLESIHQALRPKPPVEPEPISEEDLPF

SEQ ID NO: 60126 - protein, 359 aa, Pseudomonas syringae UMAF0158
MKVTDIVHNYPDGSRLARGLCRVRSFVNESGIVVLLTDLGNKNDGQSVTNAIECIINSLHVLGVVIGPATFLEHYEREDPRGDTFDIVTVNSPGGTHWETISREEACRLMGCPPVELDERSWANGRIVEEADRLRFSRNRFFDSPHRGSNAVIKRRLEIEGGMISRAEVQALISAGAGERDLQCLLKKDLSIFAETYAQPDDEYICFSEFPLADGYVDFVVLTGRSRMDVILIEIKGADFNLLNSDHYKEFNYKIHQAAGQLRNRLGHIYRELSTFRDHVHSARARAERGDLTHNAFVGPHDGLEVDPQKDINIRTVLIGGRTGDDRAESAKRHDYERHFIPPIRVESWDTWIRRLQRS

SEQ ID NO: 60127 - protein, 493 aa, Pseudomonas syringae pv. syringae
MPSMRPSQYAMQQRADGGPFLRFNNGEARGLSEGELEALESGEYDENDYYGPTLVFYSDVPLPDNGSGWHLLLMVTSEYLTIYPINARSEHSEYGKPKYDTIQSIVITRPVFQEYPHPNNQDELENLLGLLPVGLTKDWRYGLGFHYEYRCIIQALNDLEGIDTLFLHGGPGNFDAKIEGSHFCLGVAQLEKMERSLDRLTQRHQRETAVDKKLVCYTGLLHKAAPELYPPRERKLPPDLLANLVALGSVAPRLSPKDQKQAVMLAQQSVSALAKSSPKTLYQLKSEIELITLGELIEVYRKMLESNAAENKWQRFLSEHSFVLDMAFGYPVKMIAEQPYVGGKDIRGQGGQYSDFLMAAKATGNLALIEIKHPQHDLLGKAYRKTYVPSDELSGSVAQVISQRSVLQKNILGLSEDLDDRVHAHAVAAIVIIGRTPSKIGEQRAFEQYRNSLKDVLVITFDEMLGRLEGIHKALTPKPPVAHLPLSDEDLPF

SEQ ID NO: 60128 - protein, 434 aa, Pseudomonas syringae pv. atrofaciens
MHMPQFNDLTRELTSFIGGTKLGGIRVFHDFSWADKFDRKTFKNGLRLASLVKSDCPLASVPSLILLSGPSVTEGIISEPPNYALVINIDSYIASATPDAAAAYFTLRRSADTRLEITTVLARDSALRDDVVINHLTSSYVMRWIGANPTRAAEIRSLLDQAERELPPADTNLADPAQAVELLNRLEAVPETLVAAMLAVLTRLANGSAEHQNTLLQLILGTTEGRNIAAFEMGNRIAERIQDIRDALRAYEALINNSTTTETDTHEFIIDNPWLLGSDYIKTRHEQPLSRGRVDSLLEKYDGHHDLMELKSPNHRIIISTSEGATASSPTQFKLSLELSNAIAQVSRYLFLLDRDNQFLASEYGIQNAKHPKAFILIGKSSDCSQSELDTLQQLNKSLHRIEVLPFDTLIIKCDAMLAYLERATGFSDTLVEL

SEQ ID NO: 60129 - protein, 312 aa, Pseudomonas syringae pv. atrofaciens
MYGEIEADGLSEHVTAGWDSVVENSERFQRVTEYVQSKLRSAFTETHGAEIRMAHARLQKAVHERLAAMPGFKRDYADRAIKKVLEKYYDEPSHKVESIVFVVLEALERSDYRTVVEHLADAQRRDVATLAESLNDFGLADMAFLVEQASARSTFLDHLDRLTNIADTLESTMHKAIEHNFWIFGPEYSLFSSNQTLRRQVEDYLAQTYRGELASKRPDLLLNENLNGEYLLIEFKRPSHALNFVDYQQATGYRHDFLKHVSKPVKVLVIGGKRSGDYPMQNLEPNVSTMLFADINSSARRQIQWQLRTKSQ

SEQ ID NO: 60130 - protein, 189 aa, Pseudomonas syringae pv. daphniphylli
MQVIEKFEKEIANTDALEKVAQNYLFDHLWLLDPTWGPVGESRVMEKTLTAELKEIAPDASTGARIDIAYRTSTGRHVIVELKKPDKKSVDVDDLIKQGRKYRGAVNEYLRKQSDMGGLNGRKPPIDVVFVTAELSRTTDGDVPEILRKNEMQSFTYKGMIVNARRAYQEYLDASPSVSVIDDIVSNIT

SEQ ID NO: 60131 - protein, 473 aa, Pseudomonas syringae pv. cunninghamiae
MDGTQQNSQDIWNAEDVLGPSFITIRRPLENGLCVDLYLQIFDKLSSDKWQSLPEDRWHRLATIEPGWITMYPIYTNPHTQRYRSPKNGNVGCIMYSHQPTRDLPDTPEDAVLYIDASLPRKLFDPCEEGLGLVKQLTPLWRGLRFAPSLKTLVISDDGDTSITDDVVFVSEARVDECRRTCMRITRARKKSEASAQMHWVLSQVFPTLMPNVVFEGSRPVLASDTTPRRVSNAVAQAAVRARRHQLREVKVGVEMLAKEAPRELFELHAEIERVSLAAMIEKFESMLSQNLSEGHWQHFFEANLFILAMVFSRPVALLHTQFHAQGSTINGAGAHIGDLLFSQGRELAIVEIKKPSTPLMQSRPYRNQDVFGPNLQLSGAITQVLYQQGLMRSNWLSHLRDPTMRDLNPDTARCVVIAGTKPTEEGRRRSFEIFRNACKDVEVVTFDELLGKLRMLAQHLTPAAPADLPDIF

SEQ ID NO: 60132 - protein, 533 aa, Pseudomonas syringae pv. aptata; identical to SEQ ID NO: 60117

SEQ ID NO: 60133 - protein, 478 aa, Pseudomonas syringae pv. aptata
MAYCHPRLLVCETIMVIPNAPKPADRQGDIEIKALKNNQYNGLYTPRAAMAEAAGLKLGVSAKMLHLDLAQQSLTIYPLITWPDHEEFLQPKYKKIQKIWFPIDEKTSDFYKKKTPLTSEDLLELLRETLLPGFTLDPDYGLGIARELKDIIDAVELHSDCSEISFSESEQTCISNNKKIFTFSTEDYYEATKNIRSISSLGQKAAAEVKDGTIYNLLAGKLDKPLKTIAIGRSPVRHLITAAALGKPPLSSGDQDSVITILKTHSKQIAEAKPEALAKLQDEIELVTLEVLIKKYEEKLKRTTIESEWQDFFDSNKFILTMAFGYPIVQILGQASVGGGQLIGGGSKFADFISRNSQTNNAAIFEIKTPGTPLLNKTPFRGKVYSATKEFTGAMVQILDQKYQLAKNLPILKSNDRDLMLEAYAVHCCLIIGSTPKGLDEQKSFELFRRNSREVEVITFDELLEKLKQLHAFLSSNT

SEQ ID NO: 60134 - protein, 381 aa, Pseudomonas syringae ICMP 11293
MKAELLKAFDVLMPHCDVSAALCEAAGQGALDTPLDVHSICTRVGLSQARAAAVERTLMMGQTCNLFTQSTPHKWQVGDRALALELAPFLHGARLYRVRVSDAGGEFQTRMQHVVMTGIPAPSNSEIGTESENTNQLDLALGLNRFGPSQRPVNAAEVRRRAVVKVREDLPALAAEHPLTLMALHADIERVSLQQMIDSYRDMLAQQLSENLWQQFFDQNIFILTMLFCGPVHLVSAQFHAQPSGIRGTGAQIGDYLFRGAGQVLSIVEIKKPSTPLVQKREYRSGGGVHAPDSELSGAVSQVLYQRHSLQTAWGIHRDDEALAGSRPDNTRCVVIAGTLPAESKLLRSFETFRCSYKDVEIITFDELLRKLELFLTHLAE

SEQ ID NO: 60135 - protein, 300 aa, Pseudomonas syringae pv. syringae
MALELAPFLHGARLYRIRVSHAGGQSPTRMQQVVMTETPAPSNSEIVTEPERTNELEPASGLNCLDPSLRPMDAAEVRQRAVAKVRKDLTALAAEHPLTLMALHADIERVSLQQMIDSYRDMLAQQLSENIWQKFFDQNIFILTMLFCGPVHLVSSQFHAQPSGIRGTGAQIGDYLFRGAGQVLSIVEIKKPSTPLVQKREYRSGGGVHAPDSELSGAVSQVLYQRHSLQTAWGIHRDNEALAGSRPDNTRCVVIAGTLPAESKLLRSFETFRCSYKDVEIITFDELLRKLELFLTHLAE

SEQ ID NO: 60136 - protein, 407 aa, Burkholderia glumae LMG 2196 = ATCC 33617
MGDDYEYFRNKRADRVYLSRSLSDTQYRKGEDGSVEEFERPFRIVSKVIDCAESHQFFRDGKQVSLRITEGARQEIKAKFYEDTRGVSTLTIQRYTVESGSPHGTYFTFINDEIAILYNFLRNVQFLPLKDEQSAKLDDKFVESLVLSREQALELLNQQPDLLDELVRSRVTARDVAELSLRKEQLREFERLLCDEKHFEQRRLETGKGGGPEAVWQTYFEKNTWIFGYGLNYVFNSTLDDQKLEQVVRGHDIAGAGKRVDVLLKTHGLISAVSFGEIKTHATPLLKQVASPYRKECWQISDELAGAIAQVQRSVQVSLTSIRLRLDVRGDDGAPTGETVFLYQPRSFLVIGSLAEFRTKHGINEEKYSSFELFRKSVAAPEIITFDELFERARFIVEAGEHKRRDA

SEQ ID NO: 60137 - protein, 327 aa, Xanthomonas citri subsp. citri Aw12879
MNETTKSKLQALAWFIPHIDRTEFSLKLEGFVKSKNQPWVEDKAKTLTLTEASSLQLLKYLQTHLPVAAQSGTGEFILIKVSNGEANVSEHKPEELVGALTKVLSQPELVQHLSTAELTHELSAALRGSIRLSEMRSAVAELRSNLGREVGEQVYQAWCEKHCWAFGNAYVLRDEVRNISSGDSLDLLLPNVIAGYRDIVELKRPDKDVLVYDSAHRNYYFSADVSKAIGQCHRYLDILHEQAKHGLLDHKEVVAYHPRATIVIGRSHDWSAEQQRSLHGLNRRLHGISVMTYDHLLAQGERLLEMMSPLDPSLVDPSSDEDDDIPW

SEQ ID NO: 60138 - protein, 354 aa, Xanthomonas citri pv. citri
MQDASKVQRIVRKAASSGKLDYAPPVVLNETTKSKLQALAWFIPHIDRTEFSLKLEGFVKSKNQPWVEDKAKTLTLTEASSLQLLKYLQTHLPVAAQSGTGEFILIKVSNGEANVSEHKPEELVGALTKVLSQPELVQHLSTAELTHELSAALRGSIRLSEMRSAVAELRSNLGREVGEQVYQAWCEKHCWAFGNAYVLRDEVRNISSGDSLDLLLPNVIAGYRDIVELKRPDKDVLVYDSAHRNYYFSADVSKAIGQCHRYLDILHEQAKHGLLDHKEVVAYHPRATIVIGRSHDWSAEQQRSLHGLNRRLHGISVMTYDHLLAQGERLLEMMSPLDPSLVDPSSDEDDDIPW

SEQ ID NO: 60139 - protein, 354 aa, Xanthomonas citri subsp. citri; identical to SEQ ID NO: 60138

SEQ ID NO: 60140 - protein, 354 aa, Xanthomonas citri subsp. citri; identical to SEQ ID NO: 60138

SEQ ID NO: 60141 - protein, 354 aa, Xanthomonas citri subsp. citri; identical to SEQ ID NO: 60138

SEQ ID NO: 60142 - protein, 354 aa, Xanthomonas citri subsp. citri; identical to SEQ ID NO: 60138

SEQ ID NO: 60143 - protein, 354 aa, Xanthomonas citri pv. citri; identical to SEQ ID NO: 60138

SEQ ID NO: 60144 - protein, 397 aa, Agrobacterium tumefaciens str. Cherry 2E-2-2
MLHNLCMTDDAEYHWKKQSDRTYISRRIVPGNNEPSMRIASKVFDVGGGYVYAREHDELVLRKTFSGRHEIVVKFTEDDRQIFTLTIQKFNKTSGPSDKYHFSFVGEEIDNLIEFLLNIKNFHFPDTGKVNISDSDLRQIIIDEDQARRVFLENREMIEQLVQSEELTRDIVALGYRRKQLDVFERLLIDAEYFAKQQSRLCTTAEGLWQKFFEKNNWIFGYGLSFSFFSNLDGRGLEQPVVGHSIATVGKRADALLKTQAYVSALCYVEIKRHDTALLDSKAYRSGAWKPSEELSGGVAQSQATVQEAMELYSRKVQPTNSGGDPTGEVVFNFEPKSVLVIGSLNEFQTDNGLNENKYRSFELFRKNLHRPEIVTFDELFHRAKYIVEHSGNQTID

SEQ ID NO: 60145 - protein, 182 aa, Agrobacterium tumefaciens
TNEFDPGFVHALQQINDWKAWFLRNNGDAFKNSLSALLVPDNMGKNPIVHKYVLVYGRRSEIENSDLRKSKILAQQTDDFKIMSFDSLAEGLLGKAIMDIGIRRNEYIDLIADEVNDPAVLSYIEPTQWRINKTLHTDIESRINGKGMRIERRVGEKRVNGYQYVADNIRTRSDTEKLEEDA

SEQ ID NO: 60146 - protein, 281 aa, Agrobacterium tumefaciens
MTDERDALKAEIETLRAEYMALLDTGDKEQVYQRYLEENTRLIPRDFVQNHGVSCKIVLRKPAFGADYKSDFFFLSKSTVLWHAVHIEIEKPSSKYFKEGTNEFHADFVHAQQQINDWQAWMYRNNEAAFRGAVSALMVPLANNPVEHKYVLVYGRRGEYIGNEIRRSKIAALVKSSGIKIMSFDSLAEDLSGKPPVNIGIRKNEYIDVIGDELMKPEACAFIEPTLFRVSQSAKDRLMDMDGGGPYMRSFRVIEGERVDAYKYVGANVWVRGDQEPVIEE

SEQ ID NO: 60147 - protein, 275 aa, Agrobacterium tumefaciens
MTWERYSELVRRDWRDLLDSAEHHDEVIFQKFLETHPCMVPGGQSMSGPSGHSAFPAAMITQPSLPGFSEHIPDFLWIATDSLHIYAVLVEIESPKKKMFTKGGQPTAQFTQAQNQITHWKSWFRDASNQRLFCDHYLMDGLPRWRTFVPQYVLIYGRRSEIEGNARLNGLRANLSRDSEYYMTFDRLHPIKDHDQYMTVRFRNGGYQAVSMPATLEMGPLWAPNRSKIEGKDLIVDSTLYMAEDRKEFVKSRLGYWDKWAADGQAGIIRLGDRE

SEQ ID NO: 60148 - protein, 282 aa, Agrobacterium tumefaciens
MLGVSDELREEIEALRTDYLALLDKEEKEQVYQKYLEANTRLIPREFVQNHGISCRVVLRKLSLGSDYKSDFFFLSKSSTHWNAVHIEIEKPSSKYFKGNTNEFDPGFVHALQQINDWKAWFLRNNGDAFKNSLSALLVPDNMGKNPIVHKYVLVYGRRSEIENSDLRKSKILAQQTDDFKIMSFDSLAEGLLGKAIMDIGIRRNEYIDLIADEVNDPAVLSYIEPTQWRINKTLHTDIESRINGKGMRIERRVGEKRVNGYQYVADNIRTRSDTEKLEEDA

SEQ ID NO: 60149 - protein, 281 aa, Agrobacterium tumefaciens; identical to SEQ ID NO: 60146

SEQ ID NO: 60150 - protein, 390 aa, Sinorhizobium meliloti SM11
MSSEEEIFHNCKSDKTYASPAFKDFTGRKLRIANKVIDAQPGYEFAKVKEELVLRQTEAGRFQIKASFLEDDRSYRTVTIQKFTSKGNAKEYFSFGPHEMTALLKFMADIKRIHFPDDGRLNISDHDLEDLLLKPDQLRRIAADNQQLLAAIARNEITTEDVVALSYRRKQLGIFERLLSDAAYFDECVDKHGKGPEGLWQRFLEKNPWILGYSLSLINFGPLDDRKLEQTVRGHDLGGPGKRVDALLRSRAILNTAAFVELKHHRTELVSPDQYRSGIWAPSKELSGAVAQVQGTVAAALERWGASVRITDTDGESTGEMIYTTEPRSFVICGRLEEFEGEHGVNERKFGCFERFRRNLLRPEIITFDELYERARLIVSANDPNDSGQP

SEQ ID NO: 60151 - protein, 474 aa, Sinorhizobium meliloti Rm41
MVSLRPSDFNQRERADGGPFLHFYEPGEETGFVEVYFSDFADPSIGDGRLLLRVFPEALFINPIHVGQGSKSYLEPKYGSLTEIVVPRSTLAPYRLPKTTDHVEELLSSLPKGFETNWRLGLGLLYEYRIICQSIASIPGVSTLVVHGQSGERDAIIRLPEYVLGIKRFHELRHEITRTTTHFRREARMEKQRCLHKSLLQAADAIRFPQPEKKIKPDAIFDLTNGGKTLAGLSKRDKRAAIRLVQGNVATLAKSEPHTLLALKSEIELVTLQQLIERFQEMLEKDLPEARWQEFLKSNPFILSMAFSAPAIVIQENAYVGGKQFYGGNGKFADFLMATASSGNLALVEIKKPHTDLLTKAAYRGTDVFPPSPELSGAVYQVLDQQSQLHKNLLTFKDETQRSDIHAHSIRCIVIAGRMPDVPNLRKSFEIVRNSYTNLTIITFDELCARLVEIEKALSPPAQTRSSTPWSGAF

SEQ ID NO: 60152 - protein, 151 aa, Sinorhizobium meliloti GR4
MVIGAGGTDDRDRPTVDYLMNFTHYSVLVEIKRPDTPIFQQRRSGRAGTWRFSNEFMDAISQVLEQKAEWLVQAQTGQNYDKSGNRRLTARTRDPKAILVIGRRRDFEGDGSARDAEVRRATFELFRRDTRNLDIVTFDELLDRARFITRD

SEQ ID NO: 60153 - protein, 390 aa, Sinorhizobium meliloti RU11/001; identical to SEQ ID NO: 60150

SEQ ID NO: 60154 - protein, 400 aa, Rhizobium leguminosarum bv. trifolii WSM1689
MKVQWQVTMSDSDEIYFWGRLPQITYYSKRLTQIGEKNIPPKRFMYRVVEGKGGIIAVKGGKEVVLRKSNAGRYQFKATLHEDSGKISTLTFQKWNSKNMPYAVDTFPLYGKEIDELLTFIKACETMIFVDENGGKLPDRAQVQSSFDRRQIAKALVEDPNLLNAVLETDVEAQEIYNLARRKKELAYFKRMLEDDAFREREKVAAKGRLEDAWQAFFERNTWIFGYGLSYMPMSKLDGQMLKSKVAGYNITGRGKEVDGLMKTVAAINSLCFVEIKTSDTDLVRSYRPGVFAPSLELAGAVSQIQVTVQRALEDLTEVFRPTHSETGDLTGETLFQFQPRSFLVIGNLGELDSPNGANKDKFRSFELFRRSLRWPEVMTFDELYARAKFIVDDAETVME

SEQ ID NO: 60155 - protein, 484 aa, Rhizobium leguminosarum bv. trifolii CB782
MATFGPQFGNDDKGTLFLQRKGPGLVEVFFTPSDRRIAIADLTKINTTQVLLRFDAAKHTTTLFPINTMPEAEAFLMPKYDPIVSIEIIEDEGFFQTFNGFRAREDVEAYLAEGMPRGFVKDPNYGLGLDRKLSFILNAIRQVEGVTNLRITDARELDVAVTDGGTTYEIGYRLFDELRRNANRFETKAQDSARRKKLQAAYTNLLTRLDPKKFPVRIFDRAPDDIADVIGNTITDSKLSENDRAAVVNMAAASVRTSMKSQRVGLVKLHDEIELASLDELIARMEERLAERTSELQWQKLLEANPFILDMAFNVPVLLVQGQAHVGGKVLNGSGEKIADFLFTNKLTDSIAVLEIKTPGTELIGKREYRGGVYTASAELVGAVAQVLDQIDKLRSNIYRLQSENRPIALEAYGIKGMILAGTIPEGPRKRAFELYRASLAGVTVITFDELLLKLKSLRDLLGGKADVAVSEKPKPAQEFEDLV

SEQ ID NO: 60156 - protein, 360 aa, Rhizobium leguminosarum bv. trifolii CB782
MSEDIGYLVNYLPDRLYTHPGKAGTYATIAGEGEEVIGEFDVTTRCKIAVSAFWVQDKSDFGTFKITKLIYHKTYGWRSDGHIQVNHFQLAQMKEFLSIISNLNLGDATKARISLDNVNIGALGALLGSSKGAELIRELAETPELHHDIYAVAAKRKALAEFEQRMGTDAPEKDWQAFFEANQWIFGHGLNYVSLDRASDTLTARTTGNEFDRSGKTVDAFLRTRAEVSQFVFVEIKKDTTDLLRRGDPYRPGCWGVSAEVSNAVTQVQKTSFEFARKRFRIALKDSEGTDTGERAYSIEPRSYLIVGNSAELEGNDDKIACFELYRRNVRAPEILTFDELLYRARFIVQTISHGAAVAE

SEQ ID NO: 60157 - protein, 95 aa, Rhizobium tropici CIAT 899
MDAVSQVLEQKAGWFIQGQTGQNFDKTGNRRMTARTRDPKAILVIGRGRDIEGDGTSRDAEVRRDTFELFRRYTRNLDIVTFDEWLDRARFIPRD

SEQ ID NO: 60158 - protein, 507 aa, Neorhizobium galegae bv. orientalis
MSISENDNTFSFIVHDVHPGAVGIDLQAGRYFTSLVQENVTETSELPTAPILHVDATKGYFSIRPRFTLPNPPHRFLGPRYRRLEELVIEGHFRDDDLPHDDASTRLFIRVYTPPSFIHDPLYGLGIMKEMHPLITAIEELKGVATLVISDRNKTHLDENTFYLAREDYDALRAASMTVARHYQGESLEDRRILAHNATLHRAHPDLFPEKATPYRAGTVFKLLGSKGSAGVKLSPRDRAGMIAALSSEARKISKSEKHAAIQLQQGIELLNLNQLIAAFERRLSGSQAEKEWQDLFQRNPFILSMTLGYPITVLQPHAHAGGMTLQGNGNKIADFLAKTQTTHNAALIEIKTPKTELLGEQYRVGVFGPSRFLTGAVVQVLDQRRLFIEEIATLKHRSRIQDLEAHAVDCVIVAGRTPMEPSRQASFELIRHQYKDVTVLTFDELLEKLKLLQSLLAQETEPTTVAAYQTSEDALDLSELLEDSAGGDDDFFAVGPAVDDEFEDLL

SEQ ID NO: 60159 - protein, 488 aa, Methylobacterium extorquens CM4
MALNPYRAGRGMTPNYGDVIIKTGKICTLSFQPNQDGLDAALRNDPTFVAPPKPILIARIDDAAGTLEIYPLNTTRESGDLFGPKYDRIESIRFENFNLSLWHPTDLDEARHYLAKLPAGFVRAPEMGFGIDYELRAITEALEEMSIDGLVIRAGRTSGLPRLEGTKYVMSKVHFDTVRRAVRRVHDQALARAGEEKERVAHNELLTRVDPAQFPEQPPIYRPDGVTAIIATRSGDDLSPRDQQTVIAAAGAVAKAATKRNQAPLLQLSRKIETVTLDELISRFRNLLNDKSSENKWQTFFRDNPFVLRLAFGFPVVQMGEQVSVGGGKFTGTGGKISDFVVKAAATGNLALIEIKTADTPLLEKLEYRGGVHAPHRELSGAVNQVLDQRYLLQKHLPALKENSGDYDVEGFSVQGLVIAGRAPEIRDQKKSFEIFRHSLKSIVIITFDELLKKLEMLSDFLRSSDVPEMTASDAAEKDDCADGTHMQ

SEQ ID NO: 60160 - protein, 362 aa, Methylobacterium extorquens DSM 13060
MEPTKVYVDKRDPSISPNLLGRKECVLKDGQADRSKVRRIARLTSVRDQHTGEHHHDTLTIKTIALSKTACEVDRKRSVQLGGDETRRLADFLAASGSGSVPSDTGGYIVMPAKGSPANVIRALQDLTATDRMDALAMLLREASEKPAILGDLVARLAADEGFIEKAVAAMNLAVYRQVLARLEAMIEDPATKEGQFQKLLEEQPWLFGSEYSCILDRRRWTRDEITDFVPRRSTDGRVELIEIKTPLHGKTLFNWDASHKVWAPGIELSRVVAQAEHYLERLDRNRDSILANDREDVTKMRARIIIGRDKDDDQRNALRRHNGHLHRIEIITFDGLLAIARRVLRYFEDTATEGAAVHTDR

SEQ ID NO: 60161 - protein, 375 aa, Legionella pneumophila subsp. pneumophila str. Philadelphia 1
MSKKQRVIMGTITYSYKSTSSSSAEIEDIEFSRTSTTRRIIRPMIVENNERPDASIKIEIIHQKAEKGLFEDIPTEKLSKYKAKDIGKLVLSSEETLSLFNHLCNLYLIHKENGIPSGYHEFEVDENSRLMSIDSKRAAIIETLIQQGYSEEVWEKLVENSPDLATKLSIARLYQTRMTALEQFRTMLSCDHSEQDWQSFFENNNWIFGYGLNYKILKAITGQPHYGGVVIDGSGTNKGDFLSATQGYLKFTVLVEIKRSDTKLLASKRYRNDVVLPSEDLIGGVSQLRVNGRTWEQQGSQLPKNRDLLEDDSIYTIQPRKILVIGNTNELNDRLKRENFELFRRGQSDIEILTFDELLNRAQFITEHTEAIKDG

SEQ ID NO: 60162 - protein, 375 aa, Legionella pneumophila subsp. pneumophila ATCC 43290; identical to SEQ ID NO: 60161

SEQ ID NO: 60163 - protein, 367 aa, Legionella pneumophila subsp. pneumophila LPE509
MGTITYSYKSTSSSSAEIEDIEFSRTSTTRRIIRPMIVENNERPDASIKIEIIHQKAEKGLFEDIPTEKLSKYKAKDIGKLVLSSEETLSLFNHLCNLYLIHKENGIPSGYHEFEVDENSRLMSIDSKRAAIIETLIQQGYSEEVWEKLVENSPDLATKLSIARLYQTRMTALEQFRTMLSCDHSEQDWQSFFENNNWIFGYGLNYKILKAITGQPHYGGVVIDGSGTNKGDFLSATQGYLKFTVLVEIKRSDTKLLASKRYRNDVVLPSEDLIGGVSQLRVNGRTWEQQGSQLPKNRDLLEDDSIYTIQPRKILVIGNTNELNDRLKRENFELFRRGQSDIEILTFDELLNRAQFITEHTEAIKDG

SEQ ID NO: 60164 - protein, 367 aa, Legionella pneumophila subsp. pneumophila str. Thunder Bay; identical to SEQ ID NO: 60163

SEQ ID NO: 60165 - protein, 367 aa, Legionella pneumophila; identical to SEQ ID NO: 60163

SEQ ID NO: 60166 - protein, 367 aa, Legionella pneumophila; identical to SEQ ID NO: 60163

SEQ ID NO: 60167 - protein, 367 aa, Legionella pneumophila; identical to SEQ ID NO: 60163

SEQ ID NO: 60168 - protein, 339 aa, Legionella pneumophila
MSEIVKVKSVSRDFAKTNGVLLGETSTTALVFYPEIHPGGVRGHLVRLKKKKGEPWEKIPEQDFKKLQLYEGVHIELGTEQITKFCDEIAKRKPIASQIPIGQATYRVSTDEDHLNSILMQIVDQGQLPALLEMLEDSAPNMADKLTAGLIQLRRKKIIEELKYRLTQSYHETKGEDSWQRWIYKNCWIFGANYQQPIEKQKINISGIMPDYLFPTMDNFVDVLEIKLPTFSVIEEDPNHKGSWVWSKESNYAIGQVVTYLGEIERQRLELERSIKQYHTIEVFMLKPRAYVLIGRSEDWTAEKKEGLKKLNYHLHGIEILTYSDLLKKGEAFLHFPPK

SEQ ID NO: 60169 - protein, 339 aa, Legionella pneumophila; identical to SEQ ID NO: 60168

SEQ ID NO: 60170 - protein, 367 aa, Legionella pneumophila; identical to SEQ ID NO: 60163

SEQ ID NO: 60171 - protein, 339 aa, Legionella pneumophila; identical to SEQ ID NO: 60168

SEQ ID NO: 60172 - protein, 367 aa, Legionella pneumophila; identical to SEQ ID NO: 60163

SEQ ID NO: 60173 - protein, 367 aa, Legionella pneumophila; identical to SEQ ID NO: 60163

SEQ ID NO: 60174 - protein, 339 aa, Legionella pneumophila; identical to SEQ ID NO: 60168

SEQ ID NO: 60175 - protein, 367 aa, Legionella pneumophila; identical to SEQ ID NO: 60163

SEQ ID NO: 60176 - protein, 367 aa, Legionella pneumophila; identical to SEQ ID NO: 60163

SEQ ID NO: 60177 - protein, 367 aa, Legionella pneumophila; identical to SEQ ID NO: 60163

SEQ ID NO: 60178 - protein, 367 aa, Legionella pneumophila; identical to SEQ ID NO: 60163

SEQ ID NO: 60179 - protein, 367 aa, Legionella pneumophila; identical to SEQ ID NO: 60163

SEQ ID NO: 60180 - protein, 367 aa, Legionella pneumophila; identical to SEQ ID NO: 60163

SEQ ID NO: 60181 - protein, 367 aa, Legionella pneumophila; identical to SEQ ID NO: 60163

SEQ ID NO: 60182 - protein, 367 aa, Legionella pneumophila; identical to SEQ ID NO: 60163

SEQ ID NO: 60183 - protein, 367 aa, Legionella pneumophila; identical to SEQ ID NO: 60163

SEQ ID NO: 60184 - protein, 367 aa, Legionella pneumophila; identical to SEQ ID NO: 60163

SEQ ID NO: 60185 - protein, 367 aa, Legionella pneumophila; identical to SEQ ID NO: 60163

SEQ ID NO: 60186 - protein, 367 aa, Legionella pneumophila; identical to SEQ ID NO: 60163

SEQ ID NO: 60187 - protein, 367 aa, Legionella pneumophila; identical to SEQ ID NO: 60163

SEQ ID NO: 60188 - protein, 339 aa, Legionella pneumophila
MPEIVKVKSVSRDFAKTNGVLLEETSTTALVFYPEIHPGGVRGHLVRLKKKKGEPWEKIPEQDFKKLQLYEGVHIELGTEQITKFCDEIAKRKPIASQIPIGQATYRVSTEEDHLNGVFMQLVDQGQLPALMEMLEDSAPNMADKLTAGLIQLRRKKIIEELKYRLTQSYHETKGEDSWQRWIYENCWIFGANYQQPIEKQKINISGIMPDYLFPTMDNFVDVLEIKLPTFSVIEEDPHHKGSWVWSKESNYAIGQVVTYLGEIERQRLEIERSIKQYHQIEIFMLKPRAFILIGRSEDWTTEKKEGLKKLNYHLHGIEVLTYSDLLKRGEAFLHFPQN

SEQ ID NO: 60189 - protein, 367 aa, Legionella pneumophila; identical to SEQ ID NO: 60163

SEQ ID NO: 60190 - protein, 367 aa, Legionella pneumophila; identical to SEQ ID NO: 60163

SEQ ID NO: 60191 - protein, 367 aa, Legionella pneumophila; identical to SEQ ID NO: 60163

SEQ ID NO: 60192 - protein, 367 aa, Legionella pneumophila; identical to SEQ ID NO: 60163

SEQ ID NO: 60193 - protein, 339 aa, Legionella pneumophila; identical to SEQ ID NO: 60168

SEQ ID NO: 60194 - protein, 367 aa, Legionella pneumophila; identical to SEQ ID NO: 60163

SEQ ID NO: 60195 - protein, 367 aa, Legionella pneumophila; identical to SEQ ID NO: 60163

SEQ ID NO: 60196 - protein, 339 aa, Legionella pneumophila
MPEIVKVKSVSRDFAKTNGVLLEETSTTALVFFPETHPGGVRGHLVRLKKKKGEPWEKIPEQDFKKLRLYEGVHIELGTEQITKLCDEIAKRKPIASQLPIGQATYRVSTDEDNLNGVITQLVNQGQLPALLEMLEDSDPNTADKLTAGLIQLRRKKIIEELKYRLTQSYHETKGEDSWQRWIYENCWIFGANYQQPIEKTKINISGIMPDYLFPTMDNFVDVLEIKLPTFSVIEADPNHKGSWVWSKESNYAIGQVVTYLGEIERQRLELERSIKQYHQIEIFMLKPRAYILIGRSDDWAAEKKEGLKKLNYHLHGIEVLTYSDLLKRGEAFLHFPQN

SEQ ID NO: 60197 - protein, 367 aa, Legionella pneumophila; identical to SEQ ID NO: 60163

SEQ ID NO: 60198 - protein, 367 aa, Legionella pneumophila; identical to SEQ ID NO: 60163

SEQ ID NO: 60199 - protein, 367 aa, Legionella pneumophila; identical to SEQ ID NO: 60163

SEQ ID NO: 60200 - protein, 339 aa, Legionella pneumophila; identical to SEQ ID NO: 60168

SEQ ID NO: 60201 - protein, 367 aa, Legionella pneumophila; identical to SEQ ID NO: 60163

SEQ ID NO: 60202 - protein, 367 aa, Legionella pneumophila; identical to SEQ ID NO: 60163

SEQ ID NO: 60203 - protein, 367 aa, Legionella pneumophila; identical to SEQ ID NO: 60163

SEQ ID NO: 60204 - protein, 367 aa, Legionella pneumophila; identical to SEQ ID NO: 60163

SEQ ID NO: 60205 - protein, 367 aa, Legionella pneumophila; identical to SEQ ID NO: 60163

SEQ ID NO: 60206 - protein, 367 aa, Legionella pneumophila; identical to SEQ ID NO: 60163

SEQ ID NO: 60207 - protein, 367 aa, Legionella pneumophila; identical to SEQ ID NO: 60163

SEQ ID NO: 60208 - protein, 339 aa, Legionella pneumophila
MSEIVKVKSVSRDFAKTNGVLLEETSTTALVFYPEIHPGGVRGHLVRLKKKKGEPWEKIPEQDFKKLQLYEGVHIELGTEQITKFCDEIAKRKPIASQIPIGQATYRVSTDEDHLNSIFRQIVDQGQLPALLEMLEDSAPNMADKLTAGLIQLRRKKIIEELKYRLTQSYHETKGEDSWQRWIYKNCWIFGANYQQPIEKQKINISGIMPDYLFPTMDNFVDVLEIKLPTFSVIEEDPNHKGSWVWSKESNYAIGQVVTYLGEIERQRLELERSIKQYHQIEVFMLKPRAYILIGRSEDWTAEKKEGLKKLNYHLHGIEVLTYSDLLKRGEAFLHFPQN

SEQ ID NO: 60209 - protein, 367 aa, Legionella pneumophila; identical to SEQ ID NO: 60163

SEQ ID NO: 60210 - protein, 367 aa, Legionella pneumophila; identical to SEQ ID NO: 60163

SEQ ID NO: 60211 - protein, 367 aa, Legionella pneumophila; identical to SEQ ID NO: 60163

SEQ ID NO: 60212 - protein, 367 aa, Legionella pneumophila; identical to SEQ ID NO: 60163

SEQ ID NO: 60213 - protein, 367 aa, Legionella pneumophila; identical to SEQ ID NO: 60163

SEQ ID NO: 60214 - protein, 367 aa, Legionella pneumophila; identical to SEQ ID NO: 60163

SEQ ID NO: 60215 - protein, 367 aa, Legionella pneumophila; identical to SEQ ID NO: 60163

SEQ ID NO: 60216 - protein, 367 aa, Legionella pneumophila; identical to SEQ ID NO: 60163

SEQ ID NO: 60217 - protein, 367 aa, Legionella pneumophila; identical to SEQ ID NO: 60163

SEQ ID NO: 60218 - protein, 367 aa, Legionella pneumophila; identical to SEQ ID NO: 60163

SEQ ID NO: 60219 - protein, 367 aa, Legionella pneumophila; identical to SEQ ID NO: 60163

SEQ ID NO: 60220 - protein, 367 aa, Legionella pneumophila; identical to SEQ ID NO: 60163

SEQ ID NO: 60221 - protein, 367 aa, Legionella pneumophila; identical to SEQ ID NO: 60163

SEQ ID NO: 60222 - protein, 339 aa, Legionella pneumophila
MSEIVKVKSVSRDFAKTNGVLLGETSTTALVFYPEIHPGGVRGHLVRLKKKKGEPWEKIPEQDFKKLQLYEGVHIELGTEQITKFCDEIAKRKPIASQIPIGQATYRVSTDEDHLNSILMQIVDQGQLPALLEMLEDSAPNMADKLTAGLIQLRRKKIIEELKYRLTQSYHETKGEDSWQRWIYKNCWIFGANYQQPIEKQKINISGIMPDYLFPTMDNFVDVLEIKLPTFSVIEEDPNHKGSWVWSKESNYAIGQVVTYLGEIERQRLELERSIKQYHTIEVFMLKPRAYVLIGRSEDWTAEKKEGLKKLNYHLHGIEVLTYSDLLKRGEAFLHFPPK

SEQ ID NO: 60223 - protein, 367 aa, Legionella pneumophila; identical to SEQ ID NO: 60163

SEQ ID NO: 60224 - protein, 367 aa, Legionella pneumophila; identical to SEQ ID NO: 60163

SEQ ID NO: 60225 - protein, 367 aa, Legionella pneumophila; identical to SEQ ID NO: 60163

SEQ ID NO: 60226 - protein, 367 aa, Legionella pneumophila; identical to SEQ ID NO: 60163

SEQ ID NO: 60227 - protein, 367 aa, Legionella pneumophila; identical to SEQ ID NO: 60163

SEQ ID NO: 60228 - protein, 367 aa, Legionella pneumophila; identical to SEQ ID NO: 60163

SEQ ID NO: 60229 - protein, 367 aa, Legionella pneumophila; identical to SEQ ID NO: 60163

SEQ ID NO: 60230 - protein, 367 aa, Legionella pneumophila; identical to SEQ ID NO: 60163

SEQ ID NO: 60231 - protein, 367 aa, Legionella pneumophila; identical to SEQ ID NO: 60163

SEQ ID NO: 60232 - protein, 339 aa, Legionella pneumophila; identical to SEQ ID NO: 60168

SEQ ID NO: 60233 - protein, 339 aa, Legionella pneumophila; identical to SEQ ID NO: 60168

SEQ ID NO: 60234 - protein, 339 aa, Legionella pneumophila; identical to SEQ ID NO: 60168

SEQ ID NO: 60235 - protein, 339 aa, Legionella pneumophila; identical to SEQ ID NO: 60168

SEQ ID NO: 60236 - protein, 339 aa, Legionella pneumophila; identical to SEQ ID NO: 60168

SEQ ID NO: 60237 - protein, 339 aa, Legionella pneumophila; identical to SEQ ID NO: 60168

SEQ ID NO: 60238 - protein, 339 aa, Legionella pneumophila; identical to SEQ ID NO: 60168

SEQ ID NO: 60239 - protein, 339 aa, Legionella pneumophila; identical to SEQ ID NO: 60168

SEQ ID NO: 60240 - protein, 339 aa, Legionella pneumophila; identical to SEQ ID NO: 60168

SEQ ID NO: 60241 - protein, 339 aa, Legionella pneumophila; identical to SEQ ID NO: 60168

SEQ ID NO: 60242 - protein, 367 aa, Legionella pneumophila; identical to SEQ ID NO: 60163

SEQ ID NO: 60243 - protein, 367 aa, Legionella pneumophila; identical to SEQ ID NO: 60163

SEQ ID NO: 60244 - protein, 339 aa, Legionella pneumophila
MSEIVKVKSVSRDFAKTNGVLLGETSTTALVFYPEIHPGGVRGHLVRLKKKKGEPWEKIPEQDFKKLQLYEGVHIELGTEQITKFCDEIAKRKPIASQIPIGQATYRVSTDEEHLNSIFRQIVDQGQLPALLEMLEDSAPNMADKLTAGLIQLRRKKIIEELKYRLTQSYHETKGEDSWQRWIYKNCWIFGANYQQPIEKQKINISGIMPDYLFPTMDNFVDVLEIKLPTFSVIEEDPNHKGSWVWSKESNYAIGQVVTYLGEIERQRLELERSIKQYHQIEVFMLKPRAYILIGRSEDWTAEKKEGLKKLNYHLHGIEVLTYSDLLKRGEAFLHFPQN

SEQ ID NO: 60245 - protein, 367 aa, Legionella pneumophila; identical to SEQ ID NO: 60163

SEQ ID NO: 60246 - protein, 367 aa, Legionella pneumophila; identical to SEQ ID NO: 60163

SEQ ID NO: 60247 - protein, 367 aa, Legionella pneumophila; identical to SEQ ID NO: 60163

SEQ ID NO: 60248 - protein, 367 aa, Legionella pneumophila; identical to SEQ ID NO: 60163

SEQ ID NO: 60249 - protein, 367 aa, Legionella pneumophila; identical to SEQ ID NO: 60163

SEQ ID NO: 60250 - protein, 367 aa, Legionella pneumophila; identical to SEQ ID NO: 60163

SEQ ID NO: 60251 - protein, 367 aa, Legionella pneumophila; identical to SEQ ID NO: 60163

SEQ ID NO: 60252 - protein, 367 aa, Legionella pneumophila; identical to SEQ ID NO: 60163

SEQ ID NO: 60253 - protein, 367 aa, Legionella pneumophila; identical to SEQ ID NO: 60163

SEQ ID NO: 60254 - protein, 367 aa, Legionella pneumophila; identical to SEQ ID NO: 60163

SEQ ID NO: 60255 - protein, 367 aa, Legionella pneumophila; identical to SEQ ID NO: 60163

SEQ ID NO: 60256 - protein, 367 aa, Legionella pneumophila; identical to SEQ ID NO: 60163

SEQ ID NO: 60257 - protein, 367 aa, Legionella pneumophila; identical to SEQ ID NO: 60163

SEQ ID NO: 60258 - protein, 367 aa, Legionella pneumophila; identical to SEQ ID NO: 60163

SEQ ID NO: 60259 - protein, 367 aa, Legionella pneumophila; identical to SEQ ID NO: 60163

SEQ ID NO: 60260 - protein, 367 aa, Legionella pneumophila; identical to SEQ ID NO: 60163

SEQ ID NO: 60261 - protein, 367 aa, Legionella pneumophila; identical to SEQ ID NO: 60163

SEQ ID NO: 60262 - protein, 367 aa, Legionella pneumophila; identical to SEQ ID NO: 60163

SEQ ID NO: 60263 - protein, 367 aa, Legionella pneumophila; identical to SEQ ID NO: 60163

SEQ ID NO: 60264 - protein, 367 aa, Legionella pneumophila; identical to SEQ ID NO: 60163

SEQ ID NO: 60265 - protein, 367 aa, Legionella pneumophila; identical to SEQ ID NO: 60163

SEQ ID NO: 60266 - protein, 367 aa, Legionella pneumophila; identical to SEQ ID NO: 60163

SEQ ID NO: 60267 - protein, 367 aa, Legionella pneumophila; identical to SEQ ID NO: 60163

SEQ ID NO: 60268 - protein, 339 aa, Legionella pneumophila; identical to SEQ ID NO: 60168

SEQ ID NO: 60269 - protein, 339 aa, Legionella pneumophila; identical to SEQ ID NO: 60168

SEQ ID NO: 60270 - protein, 367 aa, Legionella pneumophila; identical to SEQ ID NO: 60163

SEQ ID NO: 60271 - protein, 367 aa, Legionella pneumophila; identical to SEQ ID NO: 60163

SEQ ID NO: 60272 - protein, 367 aa, Legionella pneumophila; identical to SEQ ID NO: 60163

SEQ ID NO: 60273 - protein, 367 aa, Legionella pneumophila; identical to SEQ ID NO: 60163

SEQ ID NO: 60274 - protein, 339 aa, Legionella pneumophila; identical to SEQ ID NO: 60196

SEQ ID NO: 60275 - protein, 367 aa, Legionella pneumophila; identical to SEQ ID NO: 60163

SEQ ID NO: 60276 - protein, 367 aa, Legionella pneumophila; identical to SEQ ID NO: 60163

SEQ ID NO: 60277 - protein, 367 aa, Legionella pneumophila; identical to SEQ ID NO: 60163

SEQ ID NO: 60278 - protein, 367 aa, Legionella pneumophila; identical to SEQ ID NO: 60163

SEQ ID NO: 60279 - protein, 367 aa, Legionella pneumophila; identical to SEQ ID NO: 60163

SEQ ID NO: 60280 - protein, 367 aa, Legionella pneumophila; identical to SEQ ID NO: 60163

SEQ ID NO: 60281 - protein, 367 aa, Legionella pneumophila; identical to SEQ ID NO: 60163

SEQ ID NO: 60282 - protein, 367 aa, Legionella pneumophila; identical to SEQ ID NO: 60163

SEQ ID NO: 60283 - protein, 367 aa, Legionella pneumophila; identical to SEQ ID NO: 60163

SEQ ID NO: 60284 - protein, 367 aa, Legionella pneumophila; identical to SEQ ID NO: 60163

SEQ ID NO: 60285 - protein, 367 aa, Legionella pneumophila; identical to SEQ ID NO: 60163

SEQ ID NO: 60286 - protein, 332 aa, Acinetobacter baumannii ACICU
MFKNIDDRLVIKCEELNVKLNLLNISLSLSQVISTLTFGAYGEVLDIKLPTSADSFGIPFIMEKIGFFPADLNNKRFFNYIEIYGHASSCAWDARLMNLRVKNDLRRDFAKHLANLDDKKGGVISFGENMEWVENYTNRLLNLEVAINEFRQVLHFHSHETEEVFHKLMEKHPLLLDVYGKVESKPKLVYPAGEFSPIGKTYVEPDFIISYSDQSYKLIELERASKNVVTSQGQPRAEVGQAAFQTAEWTHFISEHYNLIRKQYPSINVKCKTCLIMSRSSQLSFKNSVDINRYKELIIKQYSLDEFLTYDDLFDRACQAYTFLTGLSPQNN

SEQ ID NO: 60287 - protein, 399 aa, Acinetobacter baumannii 1656-2
MQQSQVAPEPDYQWYIAGGPALKIDYEPTKTPKHIIELLKKNNLYGKPIGIYRIVSKKYISAPVWKGMFKNIDDRLVIKCEELNVKLNLLNISLSLSQVISTLTFGAYGEVLDIKLPTSADSFGIPFIMEKIGFFPADLNNKRFFNYIEIYGHASSCAWDARLMNLRVKNDLRRDFAKHLANLDDKKGGVISFGENMEWVENYTNRLLNLEVAINEFRQVLHFHSHETEEVFHKLMEKHPLLLDVYGKVESKPKLVYPAGEFSPIGKTYVEPDFIISYSDQSYKLIELERASKNVVTSQGQPRAEVGQAAFQTAEWTHFISEHYNLIRKQYPSINVKCKTCLIMSRSSQLSFKNSVDINRYKELIIKQYSLDEFLTYDDLFDRACQAYTFLTGLSPQNN

SEQ ID NO: 60288 - protein, 332 aa, Acinetobacter baumannii ABNIH3; identical to SEQ ID NO: 60286

SEQ ID NO: 60289 - protein, 211 aa, Acinetobacter baumannii Naval-72
MVFDLVKVKEQLKNARVKSSERELLQLLKENSFLFSELFSRHWGIQPIFSEVSFGNNFRCDFCWLNDNSDGPEWVLVEIEKPNVRLFNKKNEPSAELNHGIEQVKSWQRYFNFYPAEKSRIFGAVSKFRYILVIGEKNDWEQKEASLWRTFENQKSIEIRSMDIFDRAIENYEKNPNHYWSFEENSCVLNSTELQNYWEKYPYIMRWKTML

SEQ ID NO: 60290 - protein, 457 aa, Acinetobacter baumannii OIFC338
MKVELKELGENIRFYIEKYRENYKFFTSTPPHGAGYPKLLVSPYLTAKEFDIYLAEDGVVINEVAPEPDYQWYIAGGPALKIDYEPTKTPKHIIELLKKNNLYGKPIGIYRIVSKKYISAPVWKGMFKNIDDRLVIKCEELNVKLNLLNISLSLSQVISTLTFGAYGEVLDIKLPTSADSFGIPFIMEKIGFFPADLNNKRFFNYIEIYGHASSCAWDARLMNLRVKNDLRRDFAKHLANLDDKKGGVISFGENMEWVENYTNRLLNLEVAINEFRQVLHFHSHETEEVFHKLMEKHPLLLDVYGKVESKPKLVYPAGEFSPIGKTYVEPDFIISYSDQSYKLIELERASKNVVTSQGQPRAEVGQAAFQTAEWTHFISEHYNLIRKQYPSINVKCKTCLIMSRSSQLSFKNSVDINRYKELIIKQYSLDEFLTYDDLFDRACQAYTFLTGLSPQNN

SEQ ID NO: 60291 - protein, 457 aa, Acinetobacter baumannii NIPH 24; identical to SEQ ID NO: 60290

SEQ ID NO: 60292 - protein, 457 aa, Acinetobacter baumannii NIPH 1362; identical to SEQ ID NO: 60290

SEQ ID NO: 60293 - protein, 266 aa, Acinetobacter baumannii NIPH 67
MHLSIQEAIQKKAEFLELLDQGENEQIYQDYLEKNTVFIPREFEQNHGIHFSTVFRKMPLSSDYKPDFLYLSKSSDNWNVVLVEIEKPSSKYFRNSSTTFHADFNAALQQINSWRAWLSDEANRLHLKNNILQGFIPAHMSRNPFNFKYVLVHGRRSEFENNSLKTSLIRGQERDDFSIISYDSLAENLERKYKLYIAVKKNSHYELVSHEFVDEGVFSGVNTDYLAITQAIKDDALAKSSDWHYYRSMGVKVMEQVLPEIKIINN

SEQ ID NO: 60294 - protein, 457 aa, Acinetobacter baumannii NIPH 528; identical to SEQ ID NO: 60290

SEQ ID NO: 60295 - protein, 399 aa, Acinetobacter baumannii DU202; identical to SEQ ID NO: 60287

SEQ ID NO: 60296 - protein, 457 aa, Acinetobacter baumannii UH0807; identical to SEQ ID NO: 60290

SEQ ID NO: 60297 - protein, 457 aa, Acinetobacter baumannii UH0707; identical to SEQ ID NO: 60290

SEQ ID NO: 60298 - protein, 457 aa, Acinetobacter baumannii UH10707; identical to SEQ ID NO: 60290

SEQ ID NO: 60299 - protein, 457 aa, Acinetobacter baumannii UH2907; identical to SEQ ID NO: 60290

SEQ ID NO: 60300 - protein, 457 aa, Acinetobacter baumannii UH2707; identical to SEQ ID NO: 60290

SEQ ID NO: 60301 - protein, 457 aa, Acinetobacter baumannii UH10707; identical to SEQ ID NO: 60290

SEQ ID NO: 60302 - protein, 271 aa, Acinetobacter baumannii UH7707
MEKIGFFPADLNNKRFFNYIEIYGHASSCAWDARLMNLRVKNDLRRDFAKHLANLDDKKGGVISFGENMEWVENYTNRLLNLEVAINEFRQVLHFHSHETEEVFHKLMEKHPLLLDVYGKVESKPKLVYPAGEFSPIGKTYVEPDFIISYSDQSYKLIELERASKNVVTSQGQPRAEVGQAAFQTAEWTHFISEHYNLIRKQYPSINVKCKTCLIMSRSSQLSFKNSVDINRYKELIIKQYSLDEFLTYDDLFDRACQAYTFLTGLSPQNN

SEQ ID NO: 60303 - protein, 358 aa, Acinetobacter baumannii CI78
MKISDFIFNFNKRLNSESLAFCRVRYYLVNMKHIVFITDLAELNFGQSVTNAIESIIEDLYSYGYINQKNITFVEHYEATDFRKDTFDIVDLTPKTTWKNISFESVLELIGEDLFKDIMVKSSNDCKIIDYVKKICLKTNPFFDSSYRPSNSFIRRKIEIRDLMISKDEITHMIDSFSNELDIQKLLKKDLSVLAEAYTDNEEYICFSEFPIGDGFVDFVIFSGRSRMEVTLIEVKGANFNLVNANHYKNFNSHISKASSQIELRVGNIFKNLEYFRDFFHKVREKAEKNEKIYNSFIGPAGALLVDPNKDINIKTIIIGGRTNDDVLESSIRQNYERSRIPPIRVESWDTFIRRLKR

SEQ ID NO: 60304 - protein, 211 aa, Acinetobacter baumannii 1043794; identical to SEQ ID NO: 60289

SEQ ID NO: 60305 - protein, 211 aa, Acinetobacter baumannii 972082; identical to SEQ ID NO: 60289

SEQ ID NO: 60306 - protein, 211 aa, Acinetobacter baumannii 232184; identical to SEQ ID NO: 60289

SEQ ID NO: 60307 - protein, 211 aa, Acinetobacter baumannii 268680; identical to SEQ ID NO: 60289

SEQ ID NO: 60308 - protein, 211 aa, Acinetobacter baumannii 766875
MVFDLVKVKEQLKNARATSSERQLLQLLKENSFLFSELFSRHWGIQPIFSEVSFGNNFRCDFCWLNDNSDGPEWVLVEIEKPNVKLFNQKNEPSAELNHGIEQVKSWQRYFNIHPAEKSRIFGAVSKFRYILVIGEKNDWEQKEASLWRAFENQNSIEIRSMDIFDRAIENYEKKPNHYWSFEENSYVLNSTKLQSYWEKYSYIMKWRTML

SEQ ID NO: 60309 - protein, 211 aa, Acinetobacter baumannii 655378; identical to SEQ ID NO: 60289

SEQ ID NO: 60310 - protein, 211 aa, Acinetobacter baumannii 1064293_45; identical to SEQ ID NO: 60289

SEQ ID NO: 60311 - protein, 457 aa, Acinetobacter baumannii 16553_6; identical to SEQ ID NO: 60290

SEQ ID NO: 60312 - protein, 457 aa, Acinetobacter baumannii 16553_2; identical to SEQ ID NO: 60290

SEQ ID NO: 60313 - protein, 457 aa, Acinetobacter baumannii 16553_4; identical to SEQ ID NO: 60290

SEQ ID NO: 60314 - protein, 457 aa, Acinetobacter baumannii 16553_3; identical to SEQ ID NO: 60290

SEQ ID NO: 60315 - protein, 457 aa, Acinetobacter baumannii 16553_10; identical to SEQ ID NO: 60290

SEQ ID NO: 60316 - protein, 457 aa, Acinetobacter baumannii 16553_9; identical to SEQ ID NO: 60290

SEQ ID NO: 60317 - protein, 457 aa, Acinetobacter baumannii 16553_8; identical to SEQ ID NO: 60290

SEQ ID NO: 60318 - protein, 457 aa, Acinetobacter baumannii 929679-598; identical to SEQ ID NO: 60290

SEQ ID NO: 60319 - protein, 457 aa, Acinetobacter baumannii; identical to SEQ ID NO: 60290

SEQ ID NO: 60320 - protein, 457 aa, Acinetobacter baumannii; identical to SEQ ID NO: 60290

SEQ ID NO: 60321 - protein, 457 aa, Acinetobacter baumannii; identical to SEQ ID NO: 60290

SEQ ID NO: 60322 - protein, 457 aa, Acinetobacter baumannii; identical to SEQ ID NO: 60290

SEQ ID NO: 60323 - protein, 457 aa, Acinetobacter baumannii; identical to SEQ ID NO: 60290

SEQ ID NO: 60324 - protein, 457 aa, Acinetobacter baumannii; identical to SEQ ID NO: 60290

SEQ ID NO: 60325 - protein, 457 aa, Acinetobacter baumannii; identical to SEQ ID NO: 60290

SEQ ID NO: 60326 - protein, 457 aa, Acinetobacter baumannii; identical to SEQ ID NO: 60290

SEQ ID NO: 60327 - protein, 457 aa, Acinetobacter baumannii; identical to SEQ ID NO: 60290

SEQ ID NO: 60328 - protein, 457 aa, Acinetobacter baumannii; identical to SEQ ID NO: 60290

SEQ ID NO: 60329 - protein, 457 aa, Acinetobacter baumannii; identical to SEQ ID NO: 60290

SEQ ID NO: 60330 - protein, 457 aa, Acinetobacter baumannii; identical to SEQ ID NO: 60290

SEQ ID NO: 60331 - protein, 457 aa, Acinetobacter baumannii; identical to SEQ ID NO: 60290

SEQ ID NO: 60332 - protein, 457 aa, Acinetobacter baumannii; identical to SEQ ID NO: 60290

SEQ ID NO: 60333 - protein, 457 aa, Acinetobacter baumannii; identical to SEQ ID NO: 60290

SEQ ID NO: 60334 - protein, 457 aa, Acinetobacter baumannii; identical to SEQ ID NO: 60290

SEQ ID NO: 60335 - protein, 457 aa, Acinetobacter baumannii; identical to SEQ ID NO: 60290

SEQ ID NO: 60336 - protein, 457 aa, Acinetobacter baumannii; identical to SEQ ID NO: 60290

SEQ ID NO: 60337 - protein, 457 aa, Acinetobacter baumannii; identical to SEQ ID NO: 60290

SEQ ID NO: 60338 - protein, 457 aa, Acinetobacter baumannii; identical to SEQ ID NO: 60290

SEQ ID NO: 60339 - protein, 457 aa, Acinetobacter baumannii; identical to SEQ ID NO: 60290

SEQ ID NO: 60340 - protein, 457 aa, Acinetobacter baumannii; identical to SEQ ID NO: 60290

SEQ ID NO: 60341 - protein, 457 aa, Acinetobacter baumannii; identical to SEQ ID NO: 60290

SEQ ID NO: 60342 - protein, 457 aa, Acinetobacter baumannii; identical to SEQ ID NO: 60290

SEQ ID NO: 60343 - protein, 457 aa, Acinetobacter baumannii; identical to SEQ ID NO: 60290

SEQ ID NO: 60344 - protein, 457 aa, Acinetobacter baumannii NCGM 237; identical to SEQ ID NO: 60290

SEQ ID NO: 60345 - protein, 457 aa, Acinetobacter baumannii; identical to SEQ ID NO: 60290

SEQ ID NO: 60346 - protein, 457 aa, Acinetobacter baumannii; identical to SEQ ID NO: 60290

SEQ ID NO: 60347 - protein, 457 aa, Acinetobacter baumannii; identical to SEQ ID NO: 60290

SEQ ID NO: 60348 - protein, 457 aa, Acinetobacter baumannii; identical to SEQ ID NO: 60290

SEQ ID NO: 60349 - protein, 457 aa, Acinetobacter baumannii; identical to SEQ ID NO: 60290

SEQ ID NO: 60350 - protein, 457 aa, Acinetobacter baumannii; identical to SEQ ID NO: 60290

SEQ ID NO: 60351 - protein, 211 aa, Acinetobacter baumannii
MVFDLVKVKEQLKNARVKSSERELLQLLKENSFLFSELFSRHWGIQPIFSEVSFGNNFRCDFCWLNDNSDGPEWALVEIEKPNVRLFNKKNEPSAELNHGIEQVKSWQRYFNFYPAEKSRIFGAVSKFRYILVIGEKNDWEQKEASLWRTFENQKSIEIRSMDIFDRAIENYEKNPNHYWSFEENSCVLNSTELQNYWEKYPYIMRWKTML

SEQ ID NO: 60352 - protein, 211 aa, Acinetobacter baumannii; identical to SEQ ID NO: 60289

SEQ ID NO: 60353 - protein, 457 aa, Acinetobacter baumannii; identical to SEQ ID NO: 60290

SEQ ID NO: 60354 - protein, 457 aa, Acinetobacter baumannii; identical to SEQ ID NO: 60290

SEQ ID NO: 60355 - protein, 372 aa, Acinetobacter baumannii
PTKTPKHIIELLKKNNLYGKPIGIYRIVSKKYISAPVWKGMFKNIDDRLVIKCEELNVKLNLLNISLSLSQVISTLTFGAYGEVLDIKLPTSADSFGIPFIMEKIGFFPADLNNKRFFNYIEIYGHASSCAWDARLMNLRVKNDLRRDFAKHLANLDDKKGGVISFGENMEWVENYTNRLLNLEVAINEFRQVLHFHSHETEEVFHKLMEKHPLLLDVYGKVESKPKLVYPAGEFSPIGKTYVEPDFIISYSDQSYKLIELERASKNVVTSQGQPRAEVGQAAFQTAEWTHFISEHYNLIRKQYPSINVKCKTCLIMSRSSQLSFKNSVDINRYKELIIKQYSLDEFLTYDDLFDRACQAYTFLTGLSPQNN

SEQ ID NO: 60356 - protein, 211 aa, Acinetobacter baumannii; identical to SEQ ID NO: 60289

SEQ ID NO: 60357 - protein, 293 aa, Neisseria elongata subsp. glycolytica ATCC 29315
MKILDFVFDFGKASLNGTGGLCRVRTYAGKDSKPVTFLTELDKNDGQSVTNAVEFIIEKLILDRGFNNHIFIEHYERDNNVFFHDTFYIVFIKNQKPKWNQLSQIEVENLIGNDNFTDLKNDRSSKNERILKQADSIRFKRNPWIDSPYQQSDSFIQRKLSIEKQMKSKNDLIKLVESKCIEQNLLTFLKQDLSFFGEVYSNPEDEYIVFSEFPIENGSKDKNGFIDFVVFTGRSRMDVILIEIKGANFNLFNQNGYQQPHADISKAEQQIRDRLEAVYYKDMSSFRKQCHIF

SEQ ID NO: 60358 - protein, 381 aa, Neisseria elongata subsp. glycolytica ATCC 29315
MKILDFVFDFGKASLNGTGGLCRVRTYAGKDSKPVTFLTELDKNDGQSVTNAVEFIIEKLILDRGFNNHIFIEHYERDNNVFFHDTFYIVFIKNQKPKWNQLSQIEVENLIGNDNFTDLKNDRSSKNERILKQADSIRFKRNPWIDSPYQQSDSFIQRKLSIEKQMKSKNDLIKLVESKCIEQNLLTFLKQDLSFFGEVYSNPEDEYIVFSEFPIENGSKDKNGFIDFVVFTGRSRMDVILIEIKGANFNLFNQNGYQQPHADISKAEQQIRDRLEAVYYKDMSSFRKQCHIFRDEAENGKSTFKNYLVGAEGKLLVDPNKEIKIRTVIIGGRTQDDQKESLERHKFERAHTIPITLESWDTWIRKLKRENQFEIISVISY

SEQ ID NO: 60359 - protein, 135 aa, Neisseria macacae ATCC 33926
MDVILIEIKGANFNLFNQNGYCQPHADISKAHQQIRDRLHVAYYENMSSFRKQCHIFRNEAENGKSSFKNYLVGAEGKLQVDPNKEIKIRTVIIGGRTQDDQKESLERHKFERSHTIPITLESWDTWIRKLKREN

SEQ ID NO: 60360 - protein, 513 aa, Alcaligenes faecalis
MNKNTTDQNDDFDFEFDWGDEAVSDEPETTGGASDQEDDVDSDRDPNALPVTLKTGIFNGEDCVEFYAHGEAMSYETGKMTERAVLLARVSKRELTMFPLDANSSRHNFLQPKYEELACITVLPEQGRSWWLPESLRDFEEMLKKLPTGFARRVIYGLGLRWEYRLIPEAILELVGVTHLIIEPGDGAKAELPAFRLGVERFIRIRKAIDTITARASSRSLRARRLAAYNETLHAALPDQFEHRYPPVKAGEIYELVQLRGRTSNHSAKDSIAAAQLVQENAQTIASEEPSKLLELKAVIEQVTLAQLIGEFEAMLQKNLLEPKWQSFFKANPFILGLAFPYPVILFQDQASVGGTTIRGNGESIVDFLMAQQFTGNLAIVEIKRPSTALVEPRPYRGDLHAPHRDLTASMAQVLDQRAVLLHHFAAKKSFDPTLADAHVSSVNCVVVVGTLPKGTAQVRSLDLFRHSSKDVVVVTFDELLAKLKELHRLMSAAAPTPEASPAAPEEPNADLF

SEQ ID NO: 60361 - protein, 412 aa, Bordetella bronchiseptica Bbr77
MRKCYTLLDRSNGSWHVDILIFWPTMTDEVDYHFNKLPGKTYISRRIVTSLGENLRHASKVMDKDEGFLYAKEKGELVIRHTPGGRKEIVAKFFEDSRKMEVVTIQSFNPEKGIPHKTYFTFIGSEIDQLVEFFANLSKIKFHDDAGLNISDHELRRVFLSKDQARDLVHENQNLFSELVRSEVTKEDVVALGYRKKQLDVFGRLLSDDDYFEIIKTQKACRGDEDLWQKFFERNQWIFGYGLHYVFVTGFEDRKLEQIVQGNDLMNRGKRADALMMTRGIVNSLCFAEIKTHRTPLLDKSSYRPACWAPSRELAGAVAQVQGTVASAIRNLSDRIRPCTDDGDPTGEEVFNYKPRAFVVVGSLSEFVGEHGVNAEKLRSFELYRNSIVGVELITFDELHERTKFIVAAADL

SEQ ID NO: 60362 - protein, 485 aa, Bordetella bronchiseptica E014
MADGNLQEQAGSYTDGQVMEPAFQIQSGVVDGLEYRDLFMQTFFVEEDMQHRRWQSQPENKWHWLARVFSDRIVTYPVFTNPHALRYLSARHGRFTTVVYERRIGNTLPDNPDALVSDIELALPRGMCNSCTYGLGFIKELDEIWLGLSRFPNLNTLVVARNGEARIEGNTVRIPEEDIDQIRRAFSRTARKMRDFFRQSKSTHIRNALLASLDPERFPPVVYVTKSGELVEVRLDRGEQGKASGRSARKATVEAVRSNVETLATEAPEDLLELHAEIERVTLARMIEKYDDMLKKNLPEPTWQKFFERNVFILTMVFARPVRLLHAQFHAQGGGLDGTGAQIGDFLLAEKGFAMAIVEIKRPGSPLLREKAYRNREVFAPDEELSGAVSQVLYQQSKLHENWLLHRNRPELQNSRPEAIKCVVISGLLPTNEMQRQSLEVFRNACKNVEIITFDELLDKLRLLLEHLTPPAHPELTTPEDDVPF

SEQ ID NO: 60363 - protein, 458 aa, Bordetella bronchiseptica MBORD675
MVLRSTMPSKWQSRPKYDGLKAGKRSLASQQRTWINCSCRSPTRAPMRKCYTLLDRSNGSWHVDILIFWPTMTDEVDYHFNKLPGKTYISRRIVTSLGENLRHASKVMDKDEGFLYAKEKGELVIRHTPGGRKEIVAKFFEDSRKMEVVTIQSFNPEKGIPHKTYFTFIGSEIDQLVEFFANLSKIKFHDDAGLNISDHELRRVFLSKDQARDLVHENQNLFSELVRSEVTKEDVVALGYRKKQLDVFGRLLSDDDYFEIIKTQKACRGDEDLWQKFFERNQWIFGYGLHYVFVTGFEDRKLEQIVQGNDLMNRGKRADALMMTRGIVNSLCFAEIKTHRTPLLDKSSYRPACWAPSRELAGAVAQVQGTVASAIRNLSDRIRPCTDDGDPTGEEVFNYKPRAFVVVGSLSEFVGEHGVNAEKLRSFELYRNSIVGVELITFDELHERTKFIVAAADL

SEQ ID NO: 60364 - protein, 415 aa, Bordetella bronchiseptica M85/00/2
MFSDRIVTYPVFTNPHALRYLSARHGRFTTVVYERRIGNTLPDNPDALVSDIERALPWGMCNSCTYGLGFIKELDEIWLGLSRFQNLNTLVVARNVEARIEGNMVWIPEEDIDQIRRAFSRTARKMRDFFRQSKSTHIRNALLASLDPERFPPIVHVTKSGELVEVRLDRGKRGKASERSARKATVEAVRSSVETLAKEAPEDLLELHAEIERVTLAQMIEKYDDMLKKNLPEPIWQKFFERNIFILTMVFARPVRLLHAQFHAQGGGLDGTGAQIGDFLLAEKGFAMAIVEIKRPGSPLLREKAYRNREVFAPDEELSGAVSQVLYQQSKLHENWLLHRNRPELQNSRPEAIKCVVISGLLPTNEMQRQSLEVFRNACKNVEIITFDELLDKLRLLLEHLTPPELTTPGDDVPF

SEQ ID NO: 60365 - protein, 206 aa, Ochrobactrum anthropi
MSDIIESMSRELVNRRKEGFWQEYFIQNPFVLKMLFGLPVIMYTDQASVGGMGLKRSGEKYADYLVEAGMLGNLGIVEIKTTETPLLTKDPYRPPTLYGPSADLSGGVNQLLDQKLRLIKGIAAKKEDDDQPHIQAWSVPCILIIGRLPEMRELKRSFEIYRGSQRDVLIITFDELLAKLKALHEFLSTKPDEPKEELSDQYADLL

SEQ ID NO: 60366 - protein, 326 aa, Citrobacter koseri ATCC BAA-895
MEFEAEKVTFERKVRRYLSASVKRQVAILSGYRCSFPGCDQNLMLQDSSFIGEIASIEAIHSHGPRYNPSTNADQLLQTENYLLLCPNHHAIIDRQPEIYSAEWLRKARKEHLNKISEIVSASKCVAEVKLDEQVEISLEEAIGVWKVNRENASEEFWQTLLQKCPAVLSQIFPQSMFQLGSKCYVGGKSINNSGGNLVDFIYASRLTGNIVLVEIKTPKTILLGRRYRTNAYSISEELSGAFVQVLNYKDQLMKEYFKLSEGNGGDSFSAFNPKCLIVIGTLESELKNNSQYKSFELFRNSMTNVEIVTYDELFQKAQDILDMIK

SEQ ID NO: 60367 - protein, 326 aa, Citrobacter koseri
MEFEAEKVTFERKVRRYLSASVKRQVAILSGYRCSFPGCDQNLMLQDSSFIGEIASIEAIHSHGPRYNPSTNADQLLQTENYLLLCPNHHAIINRQPEIYSTEWLRKARKEHLNKISEIVSASKCVAEVKLDEQVEISLEEAIGVWKVNRENASEEFWQTLLQKCPAVLSQIFPQSMFQLGSKCYVGGKSINNSGGNLVDFIYASRLTGNIVLVEIKTPKTILLGKRYRTNAYSISEELSGAFVQVLNYKDQLMKEYFKLSEGNGGDSFLAFNPKCLIVIGTLESELKDNSQYKSFELFRNSMTNVEIVTYDELFQKAQDILDMIK

SEQ ID NO: 60368 - protein, 326 aa, Citrobacter koseri
MEFEAEQVTFERKIRRYLSASVKRQVAILSGYRCSFPGCDQNLMLQDSSFIGEIASIEAIHSHGPRYNPSTNADQLLQTENYLLLCPNHHAIIDRQPEIYSAEWLRKARKEHLNKISEIVSASKCVAEVKLDEQVEISLEEAIGVWKVNRENASEEFWQTLLQKCPAVLSQIFPKSMFQLGSKCYVGGKSINNSGGNLVDFIYASRLTGNIVLVEIKTPKTILLGKRYRTNAYSISEELSGAFVQVLNYKDQLMKEYFKLSEGNGGDSFSAFNPKCLIVIGTLESELKNNSQYKSFELFRNSMTNVEIVTYDELFQKAQDILDMIK

SEQ ID NO: 60369 - protein, 326 aa, Citrobacter koseri; identical to SEQ ID NO: 60368

SEQ ID NO: 60370 - protein, 326 aa, Citrobacter koseri; identical to SEQ ID NO: 60368

SEQ ID NO: 60371 - protein, 326 aa, Citrobacter koseri; identical to SEQ ID NO: 60368

SEQ ID NO: 60372 - protein, 469 aa, Citrobacter freundii; identical to SEQ ID NO: 60037

SEQ ID NO: 60373 - protein, 363 aa, Enterobacter aerogenes
MKISDFIFQYTPANMMRTDSLCRVRLFVNAEKLYALITDVGGKYCPASVINFIENIKEQLIQRGYISESTILITHDEDTLSGYGSFDLVTFGRSNSARFHDSSLEKVSELLGCSHQELLDKTLKNRRLFDQLEQRHHLIRPFTRDTYIENYGVLSRRYKIKDNAITKSELAAFLADNPSERALAAFFKRDLAFFADLFAYPAEEYIVVPELKIEEGFVDYAILSGRSRMDVTLIEIKGANFDLMGSTGYRNFSYKTNEALQQVRGREGTIIRDYPRYRAYFHEIREAVETGNNRYQAFRGPKGKLEVDPDKDINIRLVVIAGRSQNDLEESIERHNLERHTSLPLRLESWDSLLNKISGDRNI

SEQ ID NO: 60374 - protein, 266 aa, Enterobacter aerogenes
MNGQDAVQKRNEYMQLLDRNEVEQVYQNYLEENTMFIPREFEQNHGIHFCTVLRKLPLSSDYKPDFVYLAKSSDNWNVVLVEIEKPSSKYFKDKSTDFHADFNMALQQINTWRAWIDEESNRNHFKNNTLQGFIEPAHMARNPFNFKYVLVHGRRSEYEGNVLKTSLIRGQQRDDFSIISFDSLAENIERKYPLYVAVKKNSHYELISKQFVDEGIFSWMNTDLLAISKEIHDDAIAQSDSWHHYKMKDGGRVKVMNDVLPKIKII

SEQ ID NO: 60375 - protein, 266 aa, Enterobacter aerogenes; identical to SEQ ID NO: 60374

SEQ ID NO: 60376 - protein, 363 aa, Enterobacter cloacae MGH 53
MKISDFIFQFTPTNLSRTDSLCRVRIFLKDNIMHALLTNIDGKYSPASVTNSVEHIRKQLIEKGFISDNTLIIEHYEDRLSGYGSFDRVTFGPGGSPRWESISINKISERFGCNHQELVDKTLENKRLFNELERLHETIRPFTTNTWIEDYAVLSRRYKIMDKAITKSELAEFLSDNPIERELAKFFKRDLAFFADMYAFPSEEYIVVPELKIEEGFVDYAIFSGRSRMDVTLIEIKGANFDLMGSTGYHNFSYKTNEALQQVRGRQGTIIRNYQKFRENFHGIREMIETDKHKFEAFCGPKGKLLVDPNKDVNIRTVVIAGRSKNDLEESIERHNLERNSSLPLRLESWDSLLNKLSGQRAA

SEQ ID NO: 60377 - protein, 334 aa, Enterobacter cloacae
MSLNHSFLIGSDESSELMLNISGLDANAKEVDSLCANFFAHCAKTGTPKFTCKLTIQNLQNLYSHLSSYSMVCDSTSSKTGRFIEVRDNYNEIISILEHADNNSLVMALQHLVSSKLTNNDINTILGRKESLETYEKMLTEPDSYKEADWQRFFETNEWIFGYGLKYKFLKILQREAHISRTDLNGGNDVIADFLISDSRFTKIVELKTPTTKLFTKRQGRSDTWFLSSELTDAVSQILAQKANWEVESQSRNYTTDGELIHEDTFDTECILIIGSLSSIEGNEREKLIKRKTLELYRRNLKNIDILFYDELLERSRYIVRSAEVIEDKLLSAL

SEQ ID NO: 60378 - protein, 469 aa, Enterobacter cloacae; identical to SEQ ID NO: 60037

SEQ ID NO: 60379 - protein, 363 aa, Enterobacter cloacae; identical to SEQ ID NO: 60376

SEQ ID NO: 60380 - protein, 363 aa, Enterobacter cloacae; identical to SEQ ID NO: 60376

SEQ ID NO: 60381 - protein, 363 aa, Enterobacter cloacae
MKISDFIFQFTPTNLSRTDSLCRVRIFLKDKVMHALLTNIDGKYSPASVTNSVEHIRKQLIEKGFISDNTLIIEHYEDRLSGYGSFDSVTFGPGGSPRWESISINKISERFGCNHQELVDKTLENKRLFNELERLHETIRPFTTNTWIEDYAVLSRRYKIMDKAITKSELAEFLADNPIERELAKFFKRDLAFFADMYAFPSEEYIVVPELKIEEGFVDYAIFSGRSRMDVTLIEIKGANFDLMGSTGYHNFSYKTNEALQQVRGRQGTIIRNYQKFREYFHGIREMIETDKHKFETFCGPKGKLLVDPNKDVNIRTVVIAGRSKNDLEESIERHNLERNSSLPLRLESWDSLLNKLSGQRAT

SEQ ID NO: 60382 - protein, 363 aa, Enterobacter cloacae
MKISDFIFQFTPTNLSRTDSLCRVRIFLKDNIMHALLTNIDGKYSPASVTNSVEHIRKQLIEKGFISDNTLIIEHYEDRLSGYGSFDRVTFGPSGSPRWESISINKISERFGCNHQELVDKTLENKRLFNELERLHETIRPFTTNTWIEDYAVLSRRYKIMDKAITKSELAEFLSDNPIERELAKFFKRDLAFFADMYAFPSEEYIVVPELKIEEGFVDYAIFSGRSRMDVTLIEIKGANFDLMGSTGYHNFSYKTNEALQQVRGRQGTIIRNYQKFREYFHGIREMIETDKHKFEAFCGPKGKLLVDPNKDVNIRTVVIAGRSKNDLEESIERHNLERNSSLPLRLESWDSLLNKLSGQRAA

SEQ ID NO: 60383 - protein, 270 aa, Enterobacter cloacae
MYMTGQEINDKKKEYFELLDRNENEQTYQTYLEENTMFIPREFEQNHGIHFSTVFRKLPLSSDYKPDFVYLSKSSDNWNVVLVEIEKPSSKYFKNNSTTFHTDFNLALQQMNTWRAWFDDESNRNHFKNNILQGFIEPAHMGRNPFNFKYVLVHGRRAEYENNAQKTALIRGQQRSDFSIISFDSLAENIERKYKLYVGVKKNNHYELTSKEFVDEGIFSWMNIDYLAITQSIYDDAVAKSDSWHHYRSTVNGFVKAMDYAPPRIKIIQK

SEQ ID NO: 60384 - protein, 363 aa, Enterobacter cloacae
MKISDFIFQFTPTNLSRTDSLCRVRIFLKDNIMHALLTNIDGKYSPASVTNSVEHIRKQLIEKGFISDNTLIIEHYEDRLSGYGSFDRVTFGPGGSPKWESISINKISERFGCNHQELVDKTLENKRLFNELERLHETIRPFTTNTWIEDYAVLSRRYKIMDKAITKSELAKFLSDNPIERELAKFFKRDLAFFADMYAFPSEEYIVVPELKIEEGFVDYAIFSGRSRMDVTLIEIKGANFDLMGSTGYHNFSYKTNEALQQVRGRQGTIIRNYQKFREYFHGIREMIETDKHKFEAFCGPKGKLLVDPNKDVNIRTVVIAGRSKNDLEESIERHNLERNSSLPLRLESWDSLLNKLSGQRAT

SEQ ID NO: 60385 - protein, 369 aa, Enterobacter cloacae
MWENGRVKISDFIFQFTPTNMSRTDSLCRVRIFFNENTTYTLLTNIDGKYSPASVTNFIEHIRKQLIEKGFIQDNTFIVEHYEDRLSGYGTFDLVTFGSGGSPSWEKISLEKVSERFGCDHQELVDKTLKNKRLFNQLELLHETIRPFTTNTWIESYAVLSRRYKIIDNAITKSELSKFLAGNPIERELASFFKRDLAFFADLYAMPSEEYIVIPELNIENGFVDYAIFSGRSRMDVTLIEIKGANFDLMGSTGYHNFSYKTNEALQQVRGRQGTIIRDYPKFREYFHDIREMIETDRHKFEAFCGPKGKLLVDPNKDINIRTVVIAGRSKNDLEESIERQNLERNASLPLRLESWDSLLNKLSGQRAS

SEQ ID NO: 60386 - protein, 363 aa, Enterobacter cloacae; identical to SEQ ID NO: 60381

SEQ ID NO: 60387 - protein, 363 aa, Enterobacter cloacae; identical to SEQ ID NO: 60376

SEQ ID NO: 60388 - protein, 363 aa, Enterobacter cloacae; identical to SEQ ID NO: 60381

SEQ ID NO: 60389 - protein, 269 aa, Pectobacterium carotovorum subsp. carotovorum PC1
MSPSIYLTPTEAEDKRTEFLSLLDENEKEQIYQEYLEGNTEFIPREFIQNHGLHLSMVFRKYPLSSDYKPDFLYLAKSSDNWNVVLIEIEKPSSKYFVGNTTEFHRDFLSAIQQMNDWRAWIDTPANLESLKQNSLSSVLVPSQMHGNPLNVKYLLVHGRRAEYEGNELRKSKIRSMEREDFKIISYDNLAVNINDHKKLYVAKKTNNYIDILSDSFVDDGIFTWMTPTTYRINQSLHDDTDKNKHHSNSYISVNVKAIDHNLPKVTIY

SEQ ID NO: 60390 - protein, 232 aa, Escherichia coli O111:H- str. 11128
MFIPREFEQNHGIHFSTVFRKLPLSSDYKPDFVYLSKSSDNWNVVLVEIEKPSSKYFKNNSTTFHADFNLALQQMNTWRAWFDDESNRNHFKNNILQGFIEPAHMGRNPFNFKYVLVHGRRSEYENNTQKTALIRGQQRSDFSIISFDSLAENIEKKYKLYVGVKKNSHYELISKEFVDEGIFSWMNIDFLAITQSIYDDAIAKSDSWHHYIIKENGTVKTMDYALPRIKII

SEQ ID NO: 60391 - protein, 333 aa, Escherichia coli DEC14C
MATSSRQKLQQNDPRYPVLKGFLERTLQLIDKDWDKWRREKGVNEVKSNTPIVSEWLNSLKKHERESAEKLIGRVNTFRFSGNEEEQKAARKTVLKNTVLAFERLRIQDNLDALDKISNLQSENFKDVFASVNDIEASMFYEITSQRLKVIEKFQKITDENQLERAVQMYLYDHLWLLDPSWERVTGTSVMEQTLTKELKQINPDAASGARIDIAFKTVSGKHVIIEMKRPKVHPDIMNLVAQGNKYVQATTQWFSNNPKNCPGGNIPHIEVIFLVGSGYLQENQHFINMQLLSINGKILTYNDLIVQSKQAYAEYQDKKNDAARIMKIVEGI

SEQ ID NO: 60392 - protein, 268 aa, Escherichia coli O111:H8 str. CVM9634
MYMTGQEINDKKKEYLELLDREENEQIYQTYLEENTMFIPREFEQNHGIHFSTVFRKLPLSSDYKPDFVYLSKSSDNWNVVLVEIEKPSSKYFKNNSTTFHADFNLALQQMNTWRAWFDDESNRNHFKNNILQGFIEPAHMGRNPFNFKYVLVHGRRSEYENNTQKTALIRGQQRSDFSIISFDSLAENIEKKYKLYVGVKKNSHYELISKEFVDEGIFSWMNIDFLAITQSIYDDAIAKSDSWHHYIIKENGTVKTMDYALPRIKII

SEQ ID NO: 60393 - protein, 406 aa, Escherichia coli KTE90
MIDFINTNTGIVLKYVPETAGTSWVWNELKTHSTVTISKVFYFNISDLLNPPSPNQDFDSYFYEFQFGTFSGDYIVIPSYILNIQNDLYISKDINLSRSVFAAERNISIFGRLSRILNHSNPIYIGGDSAEAIPSNVFSELLSKFPNSYEVDKYADARVHTILEQYLEGMKDARGLYETYLNKIEPIRKSNLDLTTIKELEIEKYTLIRDTIENALSTKQHWSEKDWQKLMVQFLLLLFPKYIHIIENITIHDYYSIPGEKKDRYIDIGLVDSNGNLDIIEVKKPFDDKILRRTKYRGNSIPTSELSGGIMQAEKYLFHLSKWGTKGEDNLTKKYASELPSGMSIHISNPKAIIIVGRDQIGNGNMTENQKLDFEIIKRKYTNMMDIITYDDLLRRLNRTISALKK

SEQ ID NO: 60394 - protein, 408 aa, Escherichia coli KTE10
MLQFSFVSNDVVMTYDGDSGEQIIWVWESLNKFQTVCISRIFNFQLQDLRNPPSTVQDFNDYEYSFNFGTLNNEYITVPGRILSINRDVLIHKSIKLERKVFASERNVSIFGRLSKLLDHTNPIIIGGDKPEAIPKSVFQELQSKFPNTGELDRYANARVHAILAGYLDGMKDARERYEHYLNRKTVIRKTDKLDLEVLNKLEIEKYTLIRDIIQDALNNKTNLSEDDWQSLMIPFITLLFPKYIKVLEKVKIFDYYSNPSAKTNRFIDIALVDANGNLDIIEVKKPFDDKILRKTPYRDNYIPTSELSGGIMQAEKYIFHLSKWGVKGEKELTNAYKNSLPAGMCIRISNPKAIIIVGRDQIANGNMTDGQLLDFEIIKRKYANMIDILTYDDLLRRLNNTIEALKG

SEQ ID NO: 60395 - protein, 406 aa, Escherichia coli KTE91; identical to SEQ ID NO: 60393

SEQ ID NO: 60396 - protein, 406 aa, Escherichia coli KTE184; identical to SEQ ID NO: 60393

SEQ ID NO: 60397 - protein, 195 aa, Escherichia coli p0305293.4
MFYEITSQRLKVIEKFQKITDENQLERAVQMYLYDHLWLLDPSWERVTGTSVMEQTLTKELKQINPDAASGARIDIAFKTVSGKHVIIEMKRPKVHPDIMNLVAQGNKYVQATTQWFSNNPKNCPGGNIPHIEVIFLVGSGYLQENQHFINMQLLSINGKILTYNDLIVQSKQAYAEYQDKKNDAARIMKIVEGI

SEQ ID NO: 60398 - protein, 326 aa, Escherichia coli p0305293.6
TITFEGKDVKVSGYIGSVVKPSQLKKDPEISNNSITVISHGRVFEEDILLEFGSAKVFTNYLVGEIVADFLDDNEKPDMATSSRQKLQQNDPRYPVLKGFLERTLQLIDKDWDKWRREKGVNEVKSNTPIVSEWLNSLKKHERESAEKLIGRVNTFRFSGNEEEQKAARKTVLKNTVLAFERLRIQDNLDALDKISNLQSENFKDVFASVNDIEASMFYEITSQRLKVIEKFQKITDENQLERAVQMYLYDHLWLLDPSWERVTGTSVMEQTLTKELKQINPDAASGARIDIAFKTVSGKHVIIEMKRPKVHPDIMNLVAQGNKYV

SEQ ID NO: 60399 - protein, 415 aa, Escherichia coli KTE103
MTNMISYQGLVRTFLSGYIGSVVKPSQLKKDPEISNNSITVISHGRVFEEDILLEFGSAKVFTNYLVGEIVADFLDDNEKPDMATSSRQKLQQNDPRYPVLKGFLERTLQLIDKDWDKWRREKGVNEVKSNTPIVSEWLNSLKKHERESAEKLIGRVNTFRFSGNEEEQKAARKTVLKNTVLAFERLRIQDNLDALDKISNLQSENFKDVFASVNDIEASMFYEITSQRLKVIEKFQKITDENQLERAVQMYLYDHLWLLDPSWERVTGTSVMEQTLTKELKQINPDAASGARIDIAFKTVSGKHVIIEMKRPKVHPDIMNLVAQGNKYVQATTQWFSNNPKNCPGGNIPHIEVIFLVGSGYLQENQHFINMQLLSINGKILTYNDLIVQSKQAYAEYQDKKNDAARIMKIVEGI

SEQ ID NO: 60400 - protein, 406 aa, Escherichia coli KTE107
MINFITTNTGVVFKYDPETAGRSWVWNELETHSTVKISKVFYFDISDLLNPPSPNQDFDSYIYEFQFGTFSGDYIVVPGCILNIKNDLYISKDINLSRSIFAAERNVSIFGRLSRILNHSNPICIGGGAAEAIPSNVFSELLSKFPNSYEMDKYANARVHMILEQYLEGMKDARGLYETYLNKIAPKIASNLDLRIINELEIEKYTLLRDTIENALSTKQHWSEKDWQKLMVQFLLLLFPKYILVIENITIHDYYSIPGKKKDRYIDIGLVDSSGNLDIIEVKKPFDDKILRRTKYRGNSIPTSELSGGIMQAEKYLFHLSKWGTKGEDNLTKKYATKLPSGMSIHISNPKAIIIVGRDQIGNGNMTENQKLDFEIIKRKYTNMMDIITYDDLLRRLNRTISALKN

SEQ ID NO: 60401 - protein, 408 aa, Escherichia coli HVH 115 (4-4465997)
MLQFSFVSNDVVMTYDGDSGEQIIWVWESLNKFQTVCISRIFNFQLQDLRNPPSTVQDFNDYEYSFNFGTLNNEYITVPGRILSINRDVLIHKSIKLERKVFASERNVSIFGRLSKLLDHNNPIIIGGDKPEAIPKSVFQELQSKFPNTGELDRYANARVHAILAGYLDGMKDARERYEHYLNRKTVIRKTDKLDLEVLNKLEIEKYTLIRDIIQDALNNKTNLSEDDWQSLMIPFITLLFPKYIKVLEKVKIFDYYSNPSAKTNRFIDIALVDANGNLDIIEVKKPFDDKILRKTPYRDNYIPTSELSGGIMQAEKYIFHLSKWGVKGEKELTNAYKNSLPAGMRIRISNPKAIIIVGRDQIANGNMTDGQLLDFEIIKRKYANMIDILTYDDLLRRLNNTIEALKG

SEQ ID NO: 60402 - protein, 408 aa, Escherichia coli HVH 115 (4-4465989); identical to SEQ ID NO: 60401

SEQ ID NO: 60403 - protein, 406 aa, Escherichia coli HVH 147 (4-5893887)
MIDFITTNTGIVLKYVPETAGTSWVWNELKTHSTVTISKVFYFNISDLLNPPSPNQDFDSYFYEFQFGTFSGDYIVIPSYILNIQNDLYISKDINLSRSVFAAERNISIFGRLSRILNHSNPIYIGGDSAEAIPSNVFSELLSKFPNSYEVDKYADARVHTILEQYLEGMKDARGLYETYLNKIEPIRKSNLDLTTIKELEIEKYTLIRDTIENALSTKQHWSEKDWQKLMVQFLLLLFPKYIHIIENITIHDYYSIPGEKKDRYIDIGLVDSNGNLDIIEVKKPFDDKILRRTKYRGNSIPTSELSGGIMQAEKYLFHLSKWGTKGEDNLTKKYASELPSGMSIHISNPKAIIIVGRDQIGNGNMTENQKLDFEIIKRKYTNMMDIITYDDLLRRLNRTISALKK

SEQ ID NO: 60404 - protein, 409 aa, Escherichia coli HVH 193 (4-3331423)
MIDFITTNKGIVLKYEPETADTSWVWNELKTHSTVTISKVFYFNINDLLNPPSPNQDFDSYFYEFQFGTFRGDYTVIPSYILNIQNDIYISKKIHLSRRFFAAERNISIFGRLSRILNHSNPIYIGGDSAEAIPFKIFKELLRKFPNTHEVNKYADARVHTILEQYLEGMKDARGLYETYLNKIEPIRKSRKSNLDLTTINKLEIEKYTLIRDTIENALNTKQHWSEKDWQKLMVQFLLLLFPKYIHVIENITIHDYYSIPGKKKERYIDIGLVDSNGNLDIIEVKKPFDDKILRRTKYRGNSIPTSELSGGIMQAEKYLFHLSKWGTKGEDNLTRKYASELPSGMSIHISNPKAIIIVGRDQIDNGNMTENQKLDFEIIKRKYTNMMDIITYDDLLRRLNRTISALKK

SEQ ID NO: 60405 - protein, 268 aa, Escherichia coli 908519; identical to SEQ ID NO: 60392

SEQ ID NO: 60406 - protein, 408 aa, Escherichia coli 908585
MLQFSFVSNDVVMTYDGDSGEQIIWVWESLNKFQTVCISRIFNFQLQDLRNPPSTVQDFNDYEYSFNFGTLNNEYITVPGRILSINRDVLIHKSIKLERKVFASERNVSIFGRLSKLLDHTNPIIIGGDKSEAIPKSVFQELQSKFPNTGELDRYANARVHAILAGYLDGMKDARERYEHYLNRKTVIRKTDKLDLEVLNKLEIEKYTLIRDIIQDALNNKTNLSEDDWQSLMIPFITLLFPKYIKVLEKVKIFDYYSNPSAKTNRFIDIALVDANGNLDIIEVKKPFDDKILRKTPYRDNYIPTSELSGGIMQAEKYIFHLSKWGVKGEKELTNAYKNSLPAGMCIRISNPKAIIIVGRDQIANGNMTDGQLLDFEIIKRKYANMIDILTYDDLLRRLNNTIEALKG

SEQ ID NO: 60407 - protein, 408 aa, Escherichia coli BIDMC 77; identical to SEQ ID NO: 60406

SEQ ID NO: 60408 - protein, 408 aa, Escherichia coli CHS 77; identical to SEQ ID NO: 60394

SEQ ID NO: 60409 - protein, 406 aa, Escherichia coli 4-203-08_S4_C3
MIDFITTNTGIVLKYDPETAGTSWVWNELKTHSTVTISKVFYFNISDLLNPPSPNQDFDSYFYEFQFGTFSGDYIVIPSYILNIQNDLYISKDINLSRSVFAAERNISIFGRLSRILNHSNPIYIGGGSAEAIPSNVFSELLSKFPNSYEVDRYADARVHTILEQYLEGMKDARGLYETYLNKIEPIRKSNLDLTTIKELEIEKYTLIRDTIENALSTKQHWSEKDWQKLMVQFLLLLFPKYIHVIENITIHDYYSIPGKKKDRYIDIGLVDSNGNLDIIEVKKPFDDKILRRTKYRGNSIPTSELSGGIMQAEKYLFHLSKWGTKGEDNLTKKYASELPSGMSIHISNPKAIIIVGRDQIGNGNMTENQKLDFEIIKRKYTNMMDIITYDDLLRRLNRTISALKK

SEQ ID NO: 60410 - protein, 406 aa, Escherichia coli 4-203-08_S4_C2
MIDFITTNTGIVLKYDPETAGTSWVWNELKTHSTVTISKVFYFNISDLLNPPSPNQDFDSYFYEFQFGTFSGDYIVIPSYILNIQNDLYISKDINLSRSVFAAERNISIFGRLSRILNHSNPIYIGGDSAEAIPSNVFSELLSKFPNSYEVDRYADARVHTILEQYLEGMKDARGLYETYLNKIEPIRKSNLDLTTIKELEIEKYTLIRDTIENALSTKQHWSEKDWQKLMVQFLLLLFPKYIHVIENITIHDYYSIPGKKKDRYIDIGLVDSNGNLDIIEVKKPFDDKILRRTKYRGNSIPTSELSGGIMQAEKYLFHLSKWGTKGEDNLTKKYASELPSGMSIHISNPKAIIIVGRDQIGNGNMTENQKLDFEIIKRKYTNMMDIITYDDLLRRLNRTISALKK

SEQ ID NO: 60411 - protein, 406 aa, Escherichia coli 4-203-08_S3_C1; identical to SEQ ID NO: 60410

SEQ ID NO: 60412 - protein, 406 aa, Escherichia coli 5-172-05_S3_C1; identical to SEQ ID NO: 60409

SEQ ID NO: 60413 - protein, 430 aa, Escherichia coli 5-172-05_S1_C3
MALRAERDIYNKFGLWFILVLEREMINFITTNTGVVFKYDPETAGRSWVWNELETHSTVKISKVFYFNISDLLNPPSPNQDFDSYIYEFQFGTFSGDYIVVPGCILNIKNDLYISKDINLSRSIFAAERNVSIFGRLSRILNHSNPICIGGGAAEAIPSNVFSELLSKFPNSYEMDKYANARVHMILEQYLEGMKDARGLYETYLNKIAPKIASNLDLRIINELEIEKYTLLRDTIENALSTKQHWSEKDWQKLMVQFLLLLFPKYILVIENITIHDYYSIPGKKKDRYIDIGLVDSSGNLDIIEVKKPFDDKILRRTKYRGNSIPTSELSGGIMQAEKYLFHLSKWGTKGEDNLTKKYATKLPSGMSIHISNPKAIIIVGRDQIGNGNMTENQKLDFEIIKRKYTNMMDIITYDDLLRRLNRTISALKN

SEQ ID NO: 60414 - protein, 337 aa, Escherichia coli 5-172-05_S1_C1
MSLSHSHLIGSDGVNDLMLNISGLNTQEKNIEDISACFFAHCSNTGAPRFTCKLSIQSLQLLHKYLSSYSVISDDSSASTGRFVEVKDNHNEIISILEHADNNSLVMALQHLVSNKLTNNDINTILGRKESLSEYEHMLEHPENHTEPDWQRFFERNEWIFGYGLKYKFLKILQREAHISKTDLNGGNDVIADFLMSDSRFTKIVELKTPTTKLFTKRQGRSDTWFLSSEITDAVSQILAQKANWEIESQTRNYTAEGNLIHEETFDAECILIIGSLSSIEGSDKEKLIKRKTLELYRRNLKNIDILFYDELLERSRYIVRSAEIIEDKLASSLNLP

SEQ ID NO: 60415 - protein, 408 aa, Escherichia coli; identical to SEQ ID NO: 60406

SEQ ID NO: 60416 - protein, 268 aa, Escherichia coli; identical to SEQ ID NO: 60392

SEQ ID NO: 60417 - protein, 408 aa, Escherichia coli; identical to SEQ ID NO: 60406

SEQ ID NO: 60418 - protein, 408 aa, Escherichia coli; identical to SEQ ID NO: 60406

SEQ ID NO: 60419 - protein, 268 aa, Escherichia coli; identical to SEQ ID NO: 60392

SEQ ID NO: 60420 - protein, 268 aa, Escherichia coli; identical to SEQ ID NO: 60392

SEQ ID NO: 60421 - protein, 268 aa, Escherichia coli; identical to SEQ ID NO: 60392

SEQ ID NO: 60422 - protein, 268 aa, Escherichia coli; identical to SEQ ID NO: 60392

SEQ ID NO: 60423 - protein, 268 aa, Escherichia coli; identical to SEQ ID NO: 60392

SEQ ID NO: 60424 - protein, 268 aa, Escherichia coli; identical to SEQ ID NO: 60392

SEQ ID NO: 60425 - protein, 408 aa, Escherichia coli
MLQFSFVSNDVVMTYDGDSGEQIIWVWESLNKFQTVCISRIFNFQLQDLRNPPSTVQDFNDYEYSFNFGTLNNEYITVPGRILSINRDVLIHKSIKLERKVFASERNVSIFGRLSKLLEHTNPIIIGGDKPEAIPKSVFQELQSKFPNTGELDRYANARVHAILAGYLDGMKDARERYEHYLNRKTVIRKTDKLDLEVLNKLEIEKYTLIRDIIQDALNNKTNLSEDDWQSLMIPFITLLFPKYIKVLEKVKIFDYYSNPSAKTNRFIDIALVDANGNLDIIEVKKPFDDKILRKTPYRDNYIPTSELSGGIMQAEKYIFHLSKWGVKGEKELTNAYKNSLPAGMCIRISNPKAIIIVGRDQIANGNMTDGQLLDFEIIKRKYANMIDILTYDDLLRRLNNTIEALKG

SEQ ID NO: 60426 - protein, 408 aa, Escherichia coli; identical to SEQ ID NO: 60406

SEQ ID NO: 60427 - protein, 408 aa, Escherichia coli; identical to SEQ ID NO: 60406

SEQ ID NO: 60428 - protein, 408 aa, Escherichia coli; identical to SEQ ID NO: 60406

SEQ ID NO: 60429 - protein, 408 aa, Escherichia coli
MLQFSFVSNDVVMTYDGDSGEQIIWVWESLNKFQTVCISRIFNFQLQDLRNPPSTVQDFNDYEYSFNFGTLNNEYITVPGRILSINRDVLIHKSIKLERKVFASERNVSIFGRLSKLLDHTNPIIIGGDKPEAIPKSVFQELQSKFPNTGELDRYANARVHAILAGYLDGMKDARERYEHYLNRKTVIRKTDKLGLEVLNKLEIEKYTLIRDIIQDALNNKTNLSEDDWQSLMIPFITLLFPKYIKVLEKVKIFDYYSNPSAKTNRFIDIALVDANGNLDIIEVKKPFDDKILRKTPYRDNYIPTSELSGGIMQAEKYIFHLSKWGVKGEKELTNAYKNSLPAGMCIRISNPKAIIIVGRDQIANGNMTDGQLLDFEIIKRKYANMIDILTYDDLLRRLNNTIEALKG

SEQ ID NO: 60430 - protein, 363 aa, Escherichia hermannii NBRC 105704
MKISDFIFQYTPANMMRTDSLCRVRLFVNAEKLYALITDVGGKYCPASVINFIENIKEQLIERGYISESTILITHDEDTLSGYGSFDLVTFGRSNSARFHDSSLEKVSELLGCSHQELLDKTLKNRRLFDQLEQRHHLIRPFTRDTYIENYGVLSRRYKIKDNAITKSELAAFLADNPSERALAAFFKRDLAFFADLFAYPAEEYIVVPELKIEEGFVDYAILSGRSRMDVTLIEIKGANFDLMGSTGYRNFSYKTNEALQQVRGREGTIIRDYPRYRAYFHEIREAVETGNNRHQAFRGPKGKLEVDPDKDINIRLVVIAGRSQNDLEESIERHNLERHTSLPLRLESWDSLLNKISGDRNI

SEQ ID NO: 60431 - protein, 334 aa, Klebsiella oxytoca 10-5242
MSLNHSFLIGSDESSELMLNISGLDANAKEVDSLCANFFAHCAKTGTPKFTCKLTIQNLQNLYSHLSSYSMVCDSTSSKTGRFIEVRDNYNEIISILEHADNNSLVMALQHLVSSKLTNNDINTILGRKESLETYEKMLTEPDSYKEADWQRFFETNEWIFGYGLKYKFLKILQREAHISRTDLNGGNDVIADFLISDSRFTKIVELKTPTTKLFTKRQGRSDTWFLSSELTDAVSQILAQKANWEIESQSRNYTTDGELIHEDTFDTECILIIGSLSSIEGNEREKLIKRKTLELYRRNLKNIDILFYDELLERSRYIVRSAEVIEDKLLSAL

SEQ ID NO: 60432 - protein, 334 aa, Klebsiella oxytoca MGH 27; identical to SEQ ID NO: 60431

SEQ ID NO: 60433 - protein, 469 aa, Klebsiella oxytoca; identical to SEQ ID NO: 60037

SEQ ID NO: 60434 - protein, 334 aa, Klebsiella oxytoca 09-7231; identical to SEQ ID NO: 60431

SEQ ID NO: 60435 - protein, 469 aa, Klebsiella pneumoniae subsp. pneumoniae WGLW5; identical to SEQ ID NO: 60037

SEQ ID NO: 60436 - protein, 268 aa, Klebsiella pneumoniae BIDMC 47
MYMTGQEINDKKKEYLELLDREENEQIYQTYLEENTMFIPREFEQNHGIHFSTVFRKLPLSSDYKPDFVYLSKSSDNWNVVLVEIEKPSSKYFKKNSTTFHADFNLALQQMNTWRAWFDDESNRNHFKNNILQGFIEPAHMGRNPFNFKYVLVHGRRSEYENNTQKTALIRGQQRSDFSIISFDSLAENIEKKYKLYVGVKKNSHYELISKEFVDEAIFSWMNIDFLAITQSIYDDAIAKSDSWHHYIIKENGTVKAMDYALPLIKII

SEQ ID NO: 60437 - protein, 400 aa, Klebsiella pneumoniae BWH 48
MNLNEFSSICKKKLDSHFKSVEMKVKQGGVRFNGGDVVNHVFYPTMILCIESDKRIFSMELIGVSRERKPLRIKKRNNVSVRELTSLSRDDIAEVFAFKMTGRNTFNGLIFYDHNAYQFHDSQNHPLLERYDARIAFSRHTTHLIDFHVDFTTCMLSDCMIAYVNNGFFRSRYIYEMFFSSVRTNEDELRKELDYYMNRDAGIIFGVRCFPSDEDISWVKASHLINLVLNDKIHETTIGDYLNDHPEIICRALGYDSIVYEPSLKWVEKTKDNTDVYINPDALLKRPDGNYDICDFKKGLLKRKKITKDERRRRRFIDDVDEGIAQLDNYEEYFTYDGNKKYALDKYNVSISEPRKILIIGNVENTVLIEVEQALRGRKDNLVIDYDSLISYYVGSIGLK

SEQ ID NO: 60438 - protein, 396 aa, Klebsiella pneumoniae
MDLKDFSVLCKKKLDLYFEGFERDMSKGYVIHNGKVINQAFYPTILLCVESDKKILSFELLGWVRVRKSLRIKLRNNISVEQLTKIDRNKNNAKPLFILDNSDKVVFSNLMFRDQEVIDYLDSQGHVMTEKFSSSFTIGGDISHLMDFKGVSSCMFFNCIISYVNNHILRVRYINALVMFDARLDEGGILDRLVYFIHNETVFGVQHFSDETELSWVKASHLISLVLNDKIHETTIGDYINDHPDILLKALGYSKIIYEPNLEWLEKTSDNPDLYINPDALLERNDGCYDICDFKKGLVKRKSITKGERRRRRFIDDVGEGLAQLDNYEEYFTYASNAQHALERYGVKVNSPRKILIIGNIENTKRVEVEEALRGRTDTIVIDYDSLLSAYIGAIK

SEQ ID NO: 60439 - protein, 334 aa, Klebsiella pneumoniae
MSLNHSFLIGSDESSELMLNISGLDANAKEVDSLCANFFAHCAKTGTPKFTCKLTVQNLQNLYSHLSSYSMVCDSTSSKTGRFIEVRDNYNEIISILEHADNNSLVMALQHLVSSKLTNNDINTILGRKESLETYEKMLTEPDSYKEADWQRFFETNEWIFGYGLKYKFLKILQREAHISRTDLNGGNDVIADFLISDSRFTKIVELKTPTTKLFTKRQGRSDTWFLSSELTDAVSQILAQKANWEIESQSRNYTTDGKLIHEDTFDTECILIIGSLSSIEGNEREKLIKRKTLELYRRNLKNIDILFYDELLERSRYIVRSAEVIEDKLLSAL

SEQ ID NO: 60440 - protein, 469 aa, Klebsiella pneumoniae; identical to SEQ ID NO: 60037

SEQ ID NO: 60441 - protein, 455 aa, Klebsiella pneumoniae
MSVTIEYVAEFIFAYIRKYREAYTKATTSPPRGPGYPAIVKSPFLNASSLDVYVAVDGVVLVQLGDKPYDWNIAGGPAFKIDYEPTRTPPYVSKILAAHDLLGKPIGIYRIVPESELPVTVWRGEVQGIEREEIQHDSSTGVSLNLREVRASLGDVVNALTFGAYGAILNVYLPTSDSPIGETHLTRGFGMFPADLSTRRFFEYLEIFGHSDSCAWDLRIVDLRVQRDLRRDLAQAMSNPDGNSGIISFGDIPPWIESYGSRLELLKSAIDDLKSALQQRDEDVEAVFHTLLERHPLLLDVYGTVESKPGFNYPDGVTSPIGKTKLQPDFIVRYPDQSYKLVEIERPAKAIATSQGQPRAEVSQAVFQTAEWKHFIKTHYQIIAERYPGIQAKCKTAVVMSRSRQENFKNIGDMRAYMGLMMEQFNIDEFLTFDDLLDRASTAFVQLSGLGGSIS

SEQ ID NO: 60442 - protein, 406 aa, Morganella morganii
MIDFITTNTGIVFKYDPESTIRSWVWHELETHSTVKISKVFYFDISDLLNHPSPDQDWGNYIYEFQFGNFDGDYIVIPGCILNIKNDLYISKNINLSRKFFAAERNVSIFGRLSRILNHSNPIFIGGDATEAIPFNVFSELLSKFPNSYEVDRYADARVHIILEQYLDGMKDARGLYEAYLNKIASTTASSLDLKAINELEINKYALIRDVIENALSSKKDCSEKDWQKLMVQFLLLLFPKYILVIENITIHDYYSNPGQKTNRYIDIGLIDCSGNLDIIEIKRPFDDEILRRTEYRGNSIPTSVLSGSIMQAEKYLFHLSKWGIKGEDNLTKKYGNRLPPGMSIHISNPKAIIIVGRDQIGNGNMTENQKLDFEIIKRKYTKMMDIITYDDLLRRLSRTISALKN

SEQ ID NO: 60443 - protein, 469 aa, Serratia marcescens; identical to SEQ ID NO: 60037

SEQ ID NO: 60444 - protein, 469 aa, Yersinia enterocolitica; identical to SEQ ID NO: 60037

SEQ ID NO: 60445 - protein, 337 aa, Edwardsiella tarda
MSLSHSHIIGSDGVNDLVLNISGLNTQAKGVEDISACFFAHCSNTGTPRFTCKLNIQSLQQLHKYLSSYSVISDETSLTTGRFVEVKDNYNEIINILEHADNHSLVMALQHLVSNKLTNNDINTILGRKEALAEYEEMLKNAENHTEPDWQKFFERNEWIFGYGLKYKYLKILQREAHISKTDLNGGNDVIADFLMSDSRYTKIVELKTPTTKLFTKRQGRSDTWFLSSELTDAVSQILAQKANWEIESQTRNYTSNGDLIHEESFDTECILIIGSLSSIDGSDKERLIKRKTLELYRRNLKHIDILFYDELLERSRYIVRSAEIIEDKLASTLNLP

SEQ ID NO: 60446 - protein, 337 aa, Aeromonas hydrophila
MSVDHSYVIANDGTSDVRVNISGLDADERNKEELAAHLYATCSKTGTSKFTCSLSIDQLSGLYAFLGQYEMIKEQSKRKSGTFVQVAKGNEELIAILQASNHEQVIPALRAVVKENLSDDDLNTILGRREAWDKFNQMLNDDPPHTEPEYQQFLEQNDWILGYGLRYCYLSILQRECRVSGTDLDGGNSVISDFLLSDTRFTKLVELKRPDTPLFKNKQNRSESWQLSDDLTHAVSQILSQKAQWQIESTGNCFTGDGKRITEKTHDVDCILVIGTSGQFAGDNKEAEIKTSTFELYRRNMRNIEIILYDELRERAKFIVDGSNKAIQADASGAADL

SEQ ID NO: 60447 - protein, 469 aa, Aeromonas veronii; identical to SEQ ID NO: 60037

SEQ ID NO: 60448 - protein, 469 aa, Aeromonas veronii; identical to SEQ ID NO: 60037

SEQ ID NO: 60449 - protein, 469 aa, Aeromonas veronii; identical to SEQ ID NO: 60037

SEQ ID NO: 60450 - protein, 469 aa, Aeromonas veronii; identical to SEQ ID NO: 60037

SEQ ID NO: 60451 - protein, 469 aa, Aeromonas veronii; identical to SEQ ID NO: 60037

SEQ ID NO: 60452 - protein, 469 aa, Aeromonas veronii; identical to SEQ ID NO: 60037

SEQ ID NO: 60453 - protein, 469 aa, Aeromonas veronii; identical to SEQ ID NO: 60037

SEQ ID NO: 60454 - protein, 469 aa, Aeromonas veronii; identical to SEQ ID NO: 60037

SEQ ID NO: 60455 - protein, 469 aa, Aeromonas veronii; identical to SEQ ID NO: 60037

SEQ ID NO: 60456 - protein, 469 aa, Aeromonas veronii; identical to SEQ ID NO: 60037

SEQ ID NO: 60457 - protein, 469 aa, Aeromonas veronii; identical to SEQ ID NO: 60037

SEQ ID NO: 60458 - protein, 469 aa, Aeromonas veronii; identical to SEQ ID NO: 60037

SEQ ID NO: 60459 - protein, 469 aa, Aeromonas veronii; identical to SEQ ID NO: 60037

SEQ ID NO: 60460 - protein, 383 aa, Photobacterium phosphoreum ANT-2200
MDNYENPVEGRTYISPSLNQFIGDRKIRIASKVIESPDTYAFGMIKDEMVIRHKTDAKSYITAKFFEDTKGIFVLNIQGYSVATDKPHNASFSFVGDEIGKLVEFIRNIQSINFTHRDSVNITDEELSRITLSDSQVKTLLQDNHELFTEVLRSEITTKDIVSVGYRKKQIDVFRRLLNDEQYFSKLKAQKKTKDEGLWQKYFEKNEWIFGYGLGYLFLSGLDDKKLEQVVQGHSVVNHGKRVDALMKTKGIISNLCFVEIKIHTTKLLDTKPYRAGCWAPSKELAGAVAQVQGTVASAIDSLSTKISLDDAYGNPTGNEIYNYQPKSFLVIGSLEEFSGEHGVNKDQLRSFELFRKNTINPEIITFDELYERARFIVHHNES

SEQ ID NO: 60461 - protein, 213 aa, Photobacterium angustum
MSFDVKAVQAGLDDAFQSDSEVKLLEVLKNNSFLFSKIYSRNFGIQPNFAEVPFGTDYRCDFCWLNDNSDGPEWVLVEVEKPNMRLFNKSGDPSAELNHALEQVKSWERYFERYPAEKSRIFGAVSRFRFVLIAGRRDDWQESDAAFWRAHHNKTSNIEIHSTDGFYDSLDHYIKFEDHFWSFKEHPKSLPSKDLTKMWSGYDYMGTWRNLLT

SEQ ID NO: 60462 - protein, 215 aa, Vibrio alginolyticus
MMYEKLKQAIDEKGERSAMSGIKSCPSTLFWTTVSSGGHSKFVLYEFPLGSKYRADFVVVWSCSGKWEITFIECENTDDRIVNKNGTPSQRFNQAISQLGDWRDYLSNNKLQVQQDLAKWCAEKDILGFSSGEYISNESGQLLSDMDTIVDFKFKIIMGRRENYSTEARKKVAQLESTSGFSFSTYDRLLSSALEHDKRSEDRNARVNLSAPNCV

SEQ ID NO: 60463 - protein, 380 aa, Vibrio alginolyticus
MFDIPDFKPTEDDVIRNSKLETLYNHTFEKGRFFQVIFSDENEFHIQLAPRTMMRVVYLKEKDDIEGIKLCKLVSGQEKQVIELSKFNMQQLKTFLNFIQELDLKGVAERRIKLSDDSMDVLDAETKQKITTLLSGSDGGEVVRELLSQGMITTQDLVNTGYRKSQLEIFKKLLYSNYLPQYKFDIGKPNTKDETAWQHFFAANQWIFGYGLDYRFQGILQKEFHASDTNAGGSEGVIADFLMGDNKFTTFVELKLPTTPLFGTTQNRAQSWKLSKELMEAYSQILEQKASGTLKIETTRDLYADDYREINQNAYDSKTVLIVGCWEQVDEAAEPPGIKKMKRKTLELFRRDSRNVEIITYDELLERASFIVLNEHSANK

SEQ ID NO: 60464 - protein, 318 aa, Vibrio cholerae MZO-2
MAQIKDRLVRIIRDKPRVLTRAIFWKIPHNTSEDEVFLKIGRYNKPKNWRESETLELDSPKSELTLDSEEFHNLLEFISNNYEPFKQGTRAFLPLDNPYDLSNAEQIKQLLNLPDKRGMLEFLLANEVIPEDLELGLEHARKARALDEFQYLLESDFTENRWQNWFEKNSWVLGSDFVKVLDERAIDTHNISDFLMESYDGFLDIVEIKRPEGNLKFWSTGLDHNNYYPSSDLIKAITQSQSYIHEVELEANSVKFMERVGYVKTIKPRCTLIYGRSNDWNKEQQQAFRVLNSSYHNLTIMTFDHVLERAKRIIGKRG

SEQ ID NO: 60465 - protein, 380 aa, Vibrio cholerae MZO-2
MFDIPDFRPTEDDVIRNSKLETLYNHTFEKGRFFQVIFSDENECHIQLAPRTMMKVVYLKEKDDIEGIKLCKLVSGQEKQVIELSKFNMQQLKTFLNFIQELDLKGIAERRIKLSDDSMDVLDAETKQKITTLLSGSDGGEVVRDLLSQGMITTQDLVNTGYRKSQLEIFKKLLYSNYLPQYKVDIGKPNTKDETAWQHFFAANQWIFGYGLDYRFQGILQKEFHASDTNAGGSEGVIADFLMGDNKFTTFVELKLPTTPLFGIAQNRAQSWKLSKELMEAYSQILEQKASGTLKIETTRDLYTDDYREINQNAYDSKTVLIVGSWEQVDKAVEPPGIKKMKRKTFELFRRDSRNVEIITYDELLERASFIVLNEHSVNK

SEQ ID NO: 60466 - protein, 318 aa, Vibrio cholerae HE-09
MVKVNGQKFTVLKDKKTVITRAGMWKVPHNTREDEVHLKIGRYHKPKEWFESEVAELDKPKSELTLTGDEFVNLISFIQDNYEPFKNGTKAFIPLDNPYDQSVAHQVKQLLNLDDRERMLNFLIDNEVIPSDLEIGLAHAKRSRAIDQFNAMLELDLTESNWQAWFEENSWVLGTDFVKVLDERTIDTANISDFLMQSYDGFLDIVEIKRPEGGLSFWQSALDHGNYIPHSDLIKAITQSSIYIHEVEREADSQKFFKRVGGVTAIKPRCTLIYGRSKDWNVEQQEAFRILNSSYHNLTIMTFDHVLERAKRILGQNC

SEQ ID NO: 60467 - protein, 228 aa, Vibrio cholerae O1 str. 87395
MEIWMLKIRLASVDSIFENWPEHWPKKDHYVSQHDVTEAQYFEFESLVNGKASETEVEKYFARNPEVLALTAFLFSTGHHATWIYPKLELRPSAGDAKGGMIPDYVISGANSDGLQWFILELKGPRQNAFVHKGKRVYLSADSNKGICQLISYIDTASKSQAYLRDELGLKGFREPKGIILIGTEKESEAEMVREFKAAWNRMHPNVQVISYSRLLRKLKQKVFPNYG

SEQ ID NO: 60468 - protein, 186 aa, Vibrio cholerae O1 str. 87395
LEIGLAHAKRSRAIDQFNAMLELDLTESNWQAWFEENSWVLGTDFVKVLDERTIDTANISDFLMQSYDGFLDIVEIKRPEGGLSFWQSALDHGNYIPHSDLIKAITQSSIYIHEVEREADSQKFFKRVGGVTAIKPRCTLIYGRSKDWNVEQQEAFRILNSSYHNLTIMTFDHVLERAKRILGQNC

SEQ ID NO: 60469 - protein, 318 aa, Vibrio cholerae; identical to SEQ ID NO: 60466

SEQ ID NO: 60470 - protein, 268 aa, Vibrio parahaemolyticus 10329
MTSNNRDYRFLTPEETDEWEKVKQEEIVNPGSRVKIRKNLFSKYPRAARHFQSLFPNQYLDTMDLKDTDNIQLLLKGFIDLLNKSDVRERDILNYINSEPAFFIIGSLLKKYYNFGHHAAHLFREFPLGTSYKADYLLVGKNSDGWHFVFVELESPNGSVTTLNGDLGTVFRKGKAQIEDWEFWLERNYSVLQEFFKKHKKLDDPLPEEFCHFDRSRINYVVIAGRRGDFNDKTYRIQRQSIRNNQIHLIHYDNLIDAVELLSDSCTY

SEQ ID NO: 60471 - protein, 268 aa, Vibrio parahaemolyticus 10290; identical to SEQ ID NO: 60470

SEQ ID NO: 60472 - protein, 268 aa, Vibrio parahaemolyticus 10296; identical to SEQ ID NO: 60470

SEQ ID NO: 60473 - protein, 268 aa, Vibrio parahaemolyticus SBR10290; identical to SEQ ID NO: 60470

SEQ ID NO: 60474 - protein, 268 aa, Vibrio parahaemolyticus V-223/04; identical to SEQ ID NO: 60470

SEQ ID NO: 60475 - protein, 268 aa, Vibrio parahaemolyticus; identical to SEQ ID NO: 60470

SEQ ID NO: 60476 - protein, 268 aa, Vibrio parahaemolyticus; identical to SEQ ID NO: 60470

SEQ ID NO: 60477 - protein, 268 aa, Vibrio parahaemolyticus; identical to SEQ ID NO: 60470

SEQ ID NO: 60478 - protein, 268 aa, Vibrio parahaemolyticus; identical to SEQ ID NO: 60470

SEQ ID NO: 60479 - protein, 268 aa, Vibrio parahaemolyticus; identical to SEQ ID NO: 60470

SEQ ID NO: 60480 - protein, 268 aa, Vibrio parahaemolyticus; identical to SEQ ID NO: 60470

SEQ ID NO: 60481 - protein, 517 aa, Vibrio parahaemolyticus
MLSELRRELLLEISEGEKRIGSSEEIKSWILEHYQANPLVGDMYNAILMIKKDLVYSEGDLPQLAECKSKISQLETLPLPEFCFITSRIQDVEKGVLIQREELKGAGLVYSITIFDREYLTKKAVRLEIRVCKKEPEPFVSLFTINGWIHISKENIQSNEYAVFALRCLIAYHRYEYPVLTKDLIIVDEQDKLTDNDYLLDLIVKAHKNEIKCYKAEVPLNIIKPRDIEYALSIPKERIQSYINKMCDFGFSFSELLIYEDGNVFITDDDYPVYLAYAAMDISMVPAVILGEFKNTDVKVLSEGGGELMPPIGVEEIEDSGIPIKTKEQALREKISSLCPKISDSTKLENRFVHFCRLIGSRSTKEKELHEFLNKNPQILDSHMASMFSEVRIGRYRADLVIRYEQVDKKVVLVELERHSDKIFTKSNRIRKKVTHASQQVEDWINEIRLGTNNAPKWLTNQYNPEGFVVIGRSKDLSEDQKQILFSLNVNRKVKIITYDDLLERMKRLMGMIGGLN

SEQ ID NO: 60482 - protein, 268 aa, Vibrio parahaemolyticus; identical to SEQ ID NO: 60470

SEQ ID NO: 60483 - protein, 517 aa, Vibrio parahaemolyticus; identical to SEQ ID NO: 60481

SEQ ID NO: 60484 - protein, 268 aa, Vibrio parahaemolyticus; identical to SEQ ID NO: 60470

SEQ ID NO: 60485 - protein, 268 aa, Vibrio parahaemolyticus; identical to SEQ ID NO: 60470

SEQ ID NO: 60486 - protein, 268 aa, Vibrio parahaemolyticus; identical to SEQ ID NO: 60470

SEQ ID NO: 60487 - protein, 268 aa, Vibrio parahaemolyticus; identical to SEQ ID NO: 60470

SEQ ID NO: 60488 - protein, 268 aa, Vibrio parahaemolyticus; identical to SEQ ID NO: 60470

SEQ ID NO: 60489 - protein, 268 aa, Vibrio parahaemolyticus; identical to SEQ ID NO: 60470

SEQ ID NO: 60490 - protein, 268 aa, Vibrio parahaemolyticus O4:K12 str. K1203; identical to SEQ ID NO: 60470

SEQ ID NO: 60491 - protein, 268 aa, Vibrio parahaemolyticus; identical to SEQ ID NO: 60470

SEQ ID NO: 60492 - protein, 268 aa, Vibrio parahaemolyticus; identical to SEQ ID NO: 60470

SEQ ID NO: 60493 - protein, 268 aa, Vibrio parahaemolyticus; identical to SEQ ID NO: 60470

SEQ ID NO: 60494 - protein, 268 aa, Vibrio parahaemolyticus 97-10290; identical to SEQ ID NO: 60470

SEQ ID NO: 60495 - protein, 268 aa, Vibrio parahaemolyticus 3324; identical to SEQ ID NO: 60470

SEQ ID NO: 60496 - protein, 268 aa, Vibrio parahaemolyticus 12315; identical to SEQ ID NO: 60470

SEQ ID NO: 60497 - protein, 268 aa, Vibrio parahaemolyticus EN9701173; identical to SEQ ID NO: 60470

SEQ ID NO: 60498 - protein, 268 aa, Vibrio parahaemolyticus EN9901310; identical to SEQ ID NO: 60470

SEQ ID NO: 60499 - protein, 254 aa, Vibrio parahaemolyticus 3631
MIKQFEKLYNDKANKEQAYQSFIESNPELVPRAFVQNHGVHMDLVFRKFPLGTTYKSDFMFLSKSSSDWRAVHIEIEDPNKKIFTKGGAFTAEFNAAVQQVQSWIGWFNHNANQQTFENDIAAVKQPLNSNPTKHKFVLVYGRRSELDTQTKKDNFDAKKTDNFELMTYDSLFSGRHGKTHIASFHSRTVKIHCSCELEDSYFGFVNPADFEINSTMKTQKISKLSTPATGTFASVINQNSQENLAQWQATKSY

SEQ ID NO: 60500 - protein, 268 aa, Vibrio parahaemolyticus EN2910; identical to SEQ ID NO: 60470

SEQ ID NO: 60501 - protein, 254 aa, Vibrio parahaemolyticus 3646; identical to SEQ ID NO: 60499

SEQ ID NO: 60502 - protein, 268 aa, Vibrio parahaemolyticus; identical to SEQ ID NO: 60470

SEQ ID NO: 60503 - protein, 268 aa, Vibrio parahaemolyticus; identical to SEQ ID NO: 60470

SEQ ID NO: 60504 - protein, 268 aa, Vibrio parahaemolyticus; identical to SEQ ID NO: 60470

SEQ ID NO: 60505 - protein, 268 aa, Vibrio parahaemolyticus; identical to SEQ ID NO: 60470

SEQ ID NO: 60506 - protein, 268 aa, Vibrio parahaemolyticus; identical to SEQ ID NO: 60470

SEQ ID NO: 60507 - protein, 268 aa, Vibrio parahaemolyticus; identical to SEQ ID NO: 60470

SEQ ID NO: 60508 - protein, 268 aa, Vibrio parahaemolyticus; identical to SEQ ID NO: 60470

SEQ ID NO: 60509 - protein, 268 aa, Vibrio parahaemolyticus; identical to SEQ ID NO: 60470

SEQ ID NO: 60510 - protein, 268 aa, Vibrio parahaemolyticus; identical to SEQ ID NO: 60470

SEQ ID NO: 60511 - protein, 268 aa, Vibrio parahaemolyticus; identical to SEQ ID NO: 60470

SEQ ID NO: 60512 - protein, 224 aa, Vibrio parahaemolyticus
MIKIRPASVDSIFEDWPEHWPKKDHYVSQHDVTEAQYIELESLVNGKASETEVEKYFARNPEVLALTAFLFSTGHHATWIYPKLELRPSAGDAKGGMIPDYVISGANSDGLQWFILELKGPRQNAFVHKGKRVYLSADSNKGICQLISYIDTASKSQAYLRDELGLKGFREPRGIILIGTEEESEAEMVREFKAAWNRMHPNVQVISYSRLLRKLKQKVFPNYG

SEQ ID NO: 60513 - protein, 254 aa, Vibrio parahaemolyticus; identical to SEQ ID NO: 60499

SEQ ID NO: 60514 - protein, 268 aa, Vibrio parahaemolyticus; identical to SEQ ID NO: 60470

SEQ ID NO: 60515 - protein, 224 aa, Vibrio vulnificus MO6-24/O
MIKIRPASVDSIFEDWPEHWPKKDHYVSQHDVTEAQYIEFESLVNGKASETEVEKYFARNPEVLALTAFLFSTGHHATWIYPKLELRPSAGDAKGGMIPDYVISGANSDGLQWFILELKGPRQNAFVHKGKRVYLSADSNKGICQLISYIDTASKSQAYLRDELGLKGFREPRGIILIGTEEESEAEMVREFKAAWNRMHPNVQVISYSRLLRKLKQKVFPNYG

SEQ ID NO: 60516 - protein, 372 aa, Vibrio vulnificus CladeA-yb158
MGLLPPENTLEDVKIKIKKAYNNSNVGLIKQVVLKEGPQAFRIATLLEILDKDKTVHHYSLKIDQIDRSKQGWNYKSEKSVRLDGNKPDEIKRLYCFLDAEYANQLGSEIGELHLVNSGDFAKLSNLLDAVESINDTEKFSLLGSIISHIEASQTNVSEFIKAFEVSNKDTLSHISTAAKIVEYSKAIAELRALIEDPNTLEGDFQKHLELNPWMFGSEYSQRLQRKTWTRDDRLDFMMRKTVDDYVEIIEIKKAFTESLFTHDRSHDSYYPSSKLSAVIGQVVRYIEEIERQRDSIIVSEGFDTLKIRAKIIVGRDGNIEQIKALRNLNSHLHRVEIITYDQLLKVSERILGMFDVVASPPQDERCEDIPF

SEQ ID NO: 60517 - protein, 224 aa, Vibrio vulnificus; identical to SEQ ID NO: 60515

SEQ ID NO: 60518 - protein, 372 aa, Vibrio mimicus CAIM 602; identical to SEQ ID NO: 60516

SEQ ID NO: 60519 - protein, 224 aa, Vibrio mimicus CAIM 602
MIKIRPASVDSIFEDWPEHWPKKDHYVSQHDVTEAQYIELESLVNGKASETEVEKYFARNPEVLALTAFLFSTGHHATWIYPKLELRPSAGDAKGGMIPDYVISGANSDGLQWFILELKGPRQNAFVHKGKRVYLSSDSNKGICQLISYIDTASKSQAYLRDELGLKGFREPRGIILIGTEEESEAEMVREFKAAWNRMHPNVQVISYSRLLRKLKQKVFPNYG

SEQ ID NO: 60520 - protein, 371 aa, Aggregatibacter aphrophilus F0387
MKILDFVFDFGKPSFNETGGLCRVRTYVTKDSKPVTFLTELDKNDGQSVTNAVEFIIDKLILDRGFNEHVFIEHYERDNDILFHDTFDMVFIENKKPKWNQLSKIEVENLIGNDDFTDLKNDRSSKNERILKQADSIRFKRNPWIDSPYQKNNSFIQRKLSIEKQMKSKNDLIKLIESKCIEQDILAFLKQDLSFFGEVYSNPEDEYIVFSEFPIENGSKDKNGSIDFVVFTGRSRMDVILIEIKGANFNLFNQNGYCQPHADISKAHQQIRDRLHVAYYESMSSFRKQCHIFRNEAENGKSSFKNYLVGAEGKLQVDPNKEIKIRTVIIGGRTQDDQKESLERHKFERSHTIPITLESWDTWIRKLKREN

SEQ ID NO: 60521 - protein, 452 aa, Gallibacterium anatis
RAGRMSRSFGDSSQHLKKDVTQYKKLPNEVSYDNNSFKISGFIASVGKPSELKDKDNDISNNAITILANGRIFQENILDELDNAKLFTSYLVGEINADFLDDSNYQDMATSSRQGLRQNDERYLILKNFVANALKTVDSDWDTWRKKEGLKSIKENHPALQEWLNGLRDNRDRKAAEDLLSKVNTIQFSGTDEEQEISRKNVLKSAVLAFEKLKVRGNLDRLNELSSFDATVFKPILQSIDDIEESYFYDVTKQRLGIIEKFEALTNDNEKEKVIQEYLYQHLWLLDPSWERTTSETEMERTLTKELKEIDPTSSGARIDIAYKTISGKYIIIEMKRPDVKTEFNKLVEQGTKYIKAATKWYINNPAQMIDGKPPKIEVYFIIGAKGKTKIDEEIQSFGQYIGPNYIEDQLRSIGGKVFTYSDLITQSRQVYSDYLNSQKDVERIKNLVDNL

SEQ ID NO: 60522 - protein, 270 aa, Bacteroides fragilis str. I1345
MIQFHRKYNWISLETENSIIISTLVERWKNMLDSNLKESAYHEFIHDNAGFFFGNDNCYLTISKLKLGSDYETDFINVIDQRSNGIIYELIEIEKPNSKLFTTGGAPAKDFSNAIQQIRDWKRFLMENKTWFKKYLPSQTTRVVSNPGVIFTIIIGRRTENSLEIEKRNQIADELKINIRSFDYLTDLLERRRFFNNACLDINGELWLENQIENPFYKAISDSKWRKFCSSKFNWTHFYKNSCKEIVKIRDYNNLIHDFLNNSTSEENEI

SEQ ID NO: 60523 - protein, 270 aa, Bacteroides fragilis; identical to SEQ ID NO: 60522

SEQ ID NO: 60524 - protein, 248 aa, Sebaldella termitidis ATCC 33386
MTEKEILIEKFYQLLNSSSTSENDIQTFLETNSSLIPLPFILNHALNGNSVISKLNLGNTYVTDFAYLTKSTVKWQLVLIELEESKKKFFTKENLFSAEFNRALAQIDDWKIYCDKYKDRIMKQTNALRNPLNGNPVEIFYVLIYGRNEEYQNDEYRSAKIAELEKNSNLRVMSYDSLVSEFRYKTAHYEDKNKIILSPRGDEKFSLKYHSNVYGSFLFDRIDPNYLEIPKNFHSELLNLGYDIKKWL

SEQ ID NO: 60525 - protein, 224 aa, Porphyromonas gingivalis F0568
MEKEEKEIMPTTWDIARVRAELTTAFEENSEQKLLSVLKDNSFLFYELYSRKYGIQPVFREINFGGELRCDFAWLNDNSDGPEWVLVEVEKPKMKLFTQKNEPTSELNHAIEQVKSWERYFDENPSEKKRIFGAVARFRFILIVGDKESWETNFASKWRIHNNKKTGIEIRTSDVFWRALKVLEQHPEEFWSFAEHPKTMPPSELQKYWSSYDYIMDHWRKIID

SEQ ID NO: 60526 - protein, 224 aa, Porphyromonas gingivalis F0570; identical to SEQ ID NO: 60525

SEQ ID NO: 60527 - protein, 224 aa, Porphyromonas gingivalis F0185; identical to SEQ ID NO: 60525

SEQ ID NO: 60528 - protein, 224 aa, Porphyromonas gingivalis W4087; identical to SEQ ID NO: 60525

SEQ ID NO: 60529 - protein, 216 aa, Porphyromonas gingivalis
MPTTWDIARVRAELTTAFEENSEQKLLSVLKDNSFLFYELYSRKYGIQPVFREINFGGELRCDFAWLNDNSDGPEWVLVEVEKPKMKLFTQKNEPTSELNHAIEQVKSWERYFDENPSEKKRIFGAVARFRFILIVGDKESWETNFASKWRIHNNKKTGIEIRTSDVFWRALKVLEQHPEEFWSFAEHPKTMPPSELQKYWSSYDYIMDHWRKIID

SEQ ID NO: 60530 - protein, 326 aa, Faecalibacterium prausnitzii SL3/3
MSEIKTSAKGVDYADPCTLQIKKRVYSQALLMRIPHDHTDVQDISLKIGRYNIPYGLESKKPKSELTLNNEELDALIRYISENYKPLMLGQGEYINVSEESATLVENFKRLIEGQSDTARMLIENGILSDNVFLAASVIKKRDALIELREKLQEEQPERYWQEWFTRNKWVLGSDFAQIIDERVIDTENIADYIMKSYDGFVDLVEIKKPNGLPFWASTKDHGNYVPSADLTKAITQCLNYIYAIELEANSTKFTRRIGSRVIKPRCILIFGRSYDWNDEQREAYRILNAAYNQVSILTYDHISERAQNVLGAEAIESVGDDWMQE

SEQ ID NO: 60531 - protein, 382 aa, Desulfobulbus propionicus DSM 2032
MPTDHAGNITKKTSESEKNPEDRIEKLDLSKWKEKERQFVLDLADVLTNPSPKRILEHVDLARRAPSGIYDDFYLEMPSIYSLVIYGETGIRELLELGLEGEYWVPHILISVALSRWNEICGILRFTQAYLEDDAYENLQNSVTSLSTQQHLPAYAESALTSIVHAFLSDPEQRHKLVAIFMSSKMAKRGDDGPSGIDIVLKAISRGTLRISEPICDELESLIAKNRPESECQQFFEKNPALIDPLASSIVDRQYLGAEWKTDFVIRRLDDEYIFVEIEKPQDQPCTGYPHPSGALSHAIGQILNWFVWIEDNIAYAQSHGFPGIHTPKGVVVIGRKAGMNSTQLRVLKSFNDNLYPRINIMTYDDVLLNARNILHNLTDGL

SEQ ID NO: 60532 - protein, 483 aa, Nitrobacter winogradskyi Nb-255
MALGFRQHDPERDGTLEVEEYHPNFVGVYFVPPKGSLLAAGLDPTQAKSYRTKLLDIHGQYKFLTIHPISTFGGKSDFLKPKYGQIERITLDGTDIIFRGGDDGGVPTTPEGVLELLEELPSAFTKDYAYGLGLAKSYRFIIDAVESLSDSTEIAITDDHATGPDPDGNRIFYISRRDFEQARRCINSIDSLAQSAARSVKETATYNILAERLGVPTLDPKAGRHPYRKLFTAVAQGKEELSEEDQNAVIGALSNHAASIAEVQPEKLVKLRGDIELVTLEALTKRYEEMLGEKLVEGRWQVFFNENPFILNMAFGYPVIKVRDQASVGGRKLSGNGEKITDFLVKNSLTNNTAIFEIKTPQTAILNKTPFRDGVFTPSADLSGSINQALDQKYQFQKQIAQIKDNTRLYDIESYAVHCCLVIGKTPDGDDQNKSFELFRRNSKDVEIVTFDELLEKLKQLSVFLRVGDEPAKSQESKGNANG

SEQ ID NO: 60533 - protein, 475 aa, Starkeya novella DSM 506
MALGFRQHDPARDGTLEVEEVHPNFVEVYFVPPEHSLRAANLDPKKAKQYRTKLLDINGQHRFLTIYPINTFGDKSDFLKPKYGQVERITLDDTHIVFSGFDEAVPTEAEGVLDVLEKLPSAFTKDYAYGLGLAKPYRFIIDAVEELSASREIVIASDQLTGPDAKDAQIFYISKQDFEQARRALNSIDNLAQTAARAVKETTAHNIIAERLGVPKLEPKAGRHPYRKLFTAVAQGKEELSEEDQNAVIGALSSHAASIAEEHPEKLAKLRGDIELVTLEALIKRYEEMLGENLAEGRWQDFFNENPFILNMAFGYPVIKVRDQASVGGRKLSGDGEKITDFLVKNSLTNNTAIFEIKTPQTAILNKTPFRDGVFTPSADLSGSINQALDQKYQFQKQIAQIKDNTRLYDIESYAVHCCLVIGRAPDGDDRKKSFELFRRNSKDVEIVTFDELLEKLRQLSVFLRVADAPQKAKD

SEQ ID NO: 60534 - protein, 218 aa, Saccharicrinis fermentans DSM 9555 = JCM 21142
MKLPFEKTKVPKPKDEIKHPEDYPLKEFFTHRDFLKDGAKESFVKLIEEKSDEKLIDKFLSKNPEIFETLLDTSGHHGIWVIPKQQIKTRIGNERGLIPDFIVGGKSSDGFQWWVIELKGANEKLLKVNAQNEVYFTIEGNKGISQLTEYIDYCRKYQSHLRDAFKLKDFREPSGILVIGNENEFESDEIKQNFKSAWNRLTKPNLEIRTYNAIIRKL

SEQ ID NO: 60535 - protein, 417 aa, Rhodobacter capsulatus YW2
MSLRFKDSLGRGVVLEYEPESWDARWVWTKLRTEGRVRIAKVFHFERADLLGEMPSDDDLDRIDGFVYRFRFGSRRAGFRVIEGRHLGIAHNVRIADALPLERRLFAAHRDMSIFRALSAVMPTGGEIVIGSDEDRSIPIPEFERLLTKFPTTTELDRYARARIADVVGQYVDSMADARRHYEEYMNRHKAIGATCSLDTQELLGAELAKYQLISDTLRGWLAAAEVRVERDWQQLLMKFLLLIFPKYVAILENVQIADVYSTPERSRRRFIDIALVDAAGNLDVIEIKRPRGCLLAGGNYRENAFPSRELSGTIMQVEKYLFHLSKWGLNGERTLTKRYAAKLPPRMSIRVTNPKAIVILGRDPTGEVWGEQAVDLEVVRRKYANVMDIMSYDDLLRRLDNVIASLRRRIDEETDI

SEQ ID NO: 60536 - protein, 91 aa, Planktothrix agardhii NIVA-CYA 126/8
MSTDLTGAVLQVSNYKDSLMEERKFLADKKKFYAFNPQCLVITGNLTNEIDDDKRKSFELFRTGLKDVNIITYDELFKKVENLINLIEGKF

SEQ ID NO: 60537 - protein, 412 aa, Planktothrix agardhii NIVA-CYA 126/8
MTKSPNESEVKRMLSKIVDCLPSGRRLMARIDRWQVPEDLQQYVLNFPSDDHLSSLAKKAPLDGFVELVLIEDLKLDLQKTKLGSFKDCKCFIPALNEYGESVNSTYTLISKVFEPQRRNPGGSVYNKVYFRDPEDNKWKRLNYLRKQYNASHENINYENINHFKNRFNNIDKFDDLSKLIDWLNLAKNGAKILQQLTELNKQNVDPLENLNSLVGITNLKNVLKIWENNKENRLESFWQKTFKDNPWVLSIVFNNPVCLLEDQAYVGGKSFKNKGGNLVDFLYRNSITKNVALIEIKTPTEKLLSTKYRNSSYNVSSEITGSVNQILSYKKSLLQEYTTLQKNTDDRFEVFNPECIIVIGNYHDEIEDNSIKKETFENYRTEQKTVKIITYDELFAKIQMLIDLLEGKDTK

SEQ ID NO: 60538 - protein, 226 aa, Anabaena cylindrica PCC 7122
MKGLDSFKLDLKQCLLELDEFDKLLLNSELQESKDILPFFKDRLHLSAFIGSYVPDLVRCNQIKHEFSLFGDFRADLVVGDCINNTYCFIEFEDATKDSIFVNRGRSTLDWSPRFEHGFSQIIDWFWKIDDFKKTTSFLSIFDSENIEFYGILIIGRDAFISLLDKARLKWRLNKVLVDSRKVICITFDQLARDIRDRLSLYPLIYEAESEADRIISTDESDCTSP

SEQ ID NO: 60539 - protein, 299 aa, Peptostreptococcus anaerobius
MALYLLEMEIRNMFKKNYKLMDNVPREIEWDKYCQKVEEEYCKILEASNNEDVLQKFFEENPSLIPGALELIGQSGHCPYMGALITQPEIGCNIKRKPDFMWMAQDSLTFCPVFIEIEKPSKRMFTKNKTPSAEFTQAMNQIDEWKIIFNKPENIFNFYDKYNIPSSMRKKIFEPQYLLVYGRREEYIDDEHLTRLRKKKENENVVIMSFDRLRPIADYKQFVTCKLVDGKYRVVNISPTFRYRPVCAMGLYNWIGFNDVIDSMKYTSDERKKFLKERYDYWYSFKGKVGGIISTMDAE

SEQ ID NO: 60540 - protein, 324 aa, Streptococcus oralis
MLSSREGLNKEIPNVKLLIEKLSKISNKLNANWNNLRANRDREKLNYLDKMLSTDSGLGTAFKFYSDEQQKQVAKLAQRVFDNDEKYSDAEYRVYGQAIFALVNNKVINEITIDTDKDTFGEILKKFYSLFEKTELNAALRMKSNIEDRISIINKLKLIIDDEEVESVFEEHLAKNPWLINQYWDKPSNEIVIETQNKYKAIIQERKVSGRTDIITKVADEPYPIICELKREKVTAYSTPEISEITNQIYKYRRFISDEINRSNNPLRISNTKDIKAYFICGEKSKEKLEDLDLIELKNNNIELKTYQEIIRQAERVYSDRVRE

SEQ ID NO: 60541 - protein, 356 aa, Streptococcus suis
MDRIELYKQSKLLRTFITGLDGETKDVEYSNSESIYEIIKEVVFDFKDGKSLTNLIVYVYNKANNRLELSNLLEGSFKDDDDIISELLMCKIYNVPVVPNNKTSEIELLRLYKKMYDSGFAILDEGKKKKYKIVDDHNILNYSLYDSKINYSQLSYADFEILKEKLAIDIRKYDSAYILINYLKNGIDELEKILNADRRNENDLQMCISKYAVLFGTEYIKVIPKFKFGSDYETDYVLQKNDGLYEVVELEASTHKLFTKNGNPSSHLIHAEQQIFDWFEWLERNNPYIRENLNDLYSPTAFIVIGRTKDLSETDIKKLRRRNIILKNYVKILTYDDLLKRARALLDLLTNESNHS

SEQ ID NO: 60542 - protein, 356 aa, Streptococcus suis; identical to SEQ ID NO: 60541

SEQ ID NO: 60543 - protein, 524 aa, Streptococcus intermedius F0395
MTGKKGLGKLAVFGIAKTIEVYSIKDGVKNAFSINYDEMKAESESEYKPKVICENENTNEQSGTVVKIKEIKQSTIMGIEDLAYNLSRRFSFYDAEFEVKLIDENSQKEQPITKSIYFEKLEKEFEWKFPEDFINDINSVEEFKRLKDHGITGRVYTKSTPLRKKDSGFLLYVRNKLASENVFFDDRANDRFNSYVTGFFNIDFIDDSDEEDYISTARQSILWEENESTIQLKHDLNKLISKISSLWRENRRKKKEELITLDESFFKGLTPTEISSIKKVKDTLLTNSTETDDIESIKRVLDNLKNLYKFESFQSYIENLKEENLTVDEVEKITSDWEYIEAKELAKVAVGRIKAIEQFEKYVNGNESESKVIQPFLEKFPWILDPRITTFEREKTYSSILKSKFPDETLEGSNRRIDFLCNLVNGELIIIELKRPNIKIKTEEINQALDYKIFVQKHYKLDKVTTFLMSDRYDMDPIVRTTANSLEQSGDLFIRSYSDLLRDAKKFNQEFINKYEEIKEVYDN

SEQ ID NO: 60544 - protein, 524 aa, Enterococcus faecalis EnGen0062
MTGKKGLGKLAVFGIAKTIEVYSIKDGVKNAFSINYDEMKAESESEYKPKVICENENTNEQSGTVVKIKEIKQSTIMGIEDLAYNLSRRFSFYDAEFEVKLIDENSQKEQPITKSIYFEKLEKEFEWKFPEDFINDINSVEEFKRLKDHGITGRVYTKSTPLRKKDSGFLLYVRNKLASENVFFDDRANDRFNSYVTGFFNIDFIDDSDEEDYISTARQSILWEENESTIQLKHDLNKLISKISSLWRENRRKKKEELITLDESFFKGLTPTEISSIKKVKDTLLTNSTETDDIESIKRVLDNLKNLYKFESFQSYIENLKEENLTVDEVEKITSDWEYIEAKELAKVAVGRIKAIEQFEKYVNGNASESKVIQPFLEKFPWILDPRITTFEREKTYSQILKDNFSDEKLEGSNRRIDFLCNLVNGELIIIELKRPNIKIKSEEIYQALDYKNFVQTHYKLEKITTFLMSDRYDMDPIVRTTANSLEKSGDLFIRSYSDLLRDAKKFNQEFINKYEEIKEVYDN

SEQ ID NO: 60545 - protein, 428 aa, Enterococcus faecalis
MSTLEFIKTKNELVCKYSPAWTGLVPISSRIKTDKFATIRRVFKVTKDDLRPSKSAYYYKDEFANIDILDLIDQSKIEDVEFTIGTLDNEYYLLDNNILEFDNNIYLHQDLKITNKTFLAYSDINVLRKLDNISEKDIFIGEMSVCDNQQSEFTIPATDFYKLIKSFPNSTEVAKYNYMRITQVIGNYIGLKKDYTYDYEQYMNKKHSSLALDNEIENKEIIKNIYENEYQKYKFIHQKLQNMILEERDYLEKDWQREIAKILPLIFPKYLSFLSEETISTEEGEKRPDFIFIDTQGNIDVVEIKKSYNVSVLAKSNKKSTRNNYVPSRDLTIAIMQIEKYIYHLNRTGLKSETKICNALLEKNHIDMPIRIRNPQGVIILGRSNELNEEQQSDYEVIKRQYKHIADILTYDDLLNRLTMLLNHFEDK

SEQ ID NO: 60546 - protein, 397 aa, Enterococcus faecium 504
MTNPLKIVKNEDFLICEYTPFTLNTSFIFDKISQDGSYTLKRTFSISNDEILEKKEEYIKFIVGEKEDCYYHLNNKVLGIEHNIFIHEDMKTNISSFIAHENISIMKKIDNIIDEDLYIGGESGNLPESVFEELIKKFPNKHELYLYSNMRIGVLIQDYLLTKKENHINYENYMSNKNRNTIIKKNKDIVIEKKIAENEYLKYQYIKEKLVKMLENEKFYLEKDWQKEIANILTLIFPMYQLVVDEVMIETDEGKKRPDFVFIDVNGNIDIAEIKKSYNIPIMTKTKYRNNYIASKELTGTLMQIEKYIYHLTRTAKKSEEIIKKKVFNQTQEAVDIYIRNPRGMIILGRSDKLNVEQLRDFEILRRKYKHVADIISYDDLVHRLDSLLKKFENETI

SEQ ID NO: 60547 - protein, 185 aa, Enterococcus faecium EnGen0039
MLENEKFYLEKDWQKEIANILTLIFPMYQLVVDEVMIETDEGKKRPDFVFIDVNGNIDIAEIKKSYNIPIMTKTKYRNNYIASKELTGTLMQIEKYIYHLTRTAKKSEEIIKKKVFNQTQEAVDIYIRNPRGMIILGRSDKLNVEQLRDFEILRRKYKHVADIISYDDLVHRLDSLLKKFENETI

SEQ ID NO: 60548 - protein, 308 aa, Enterococcus faecium EnGen0173
MKTNISSFIAHENISIMKKIDNIIDEDLYIGGESGNLPESVFEELIKKFPNKHELYLYSNMRIGVLIQDYLLTKKENHINYENYMSNKHRNTFFKKNKDIVIEKKIAENEYLKYQYIKEKLVKMLENEKFYLEKDWQKEIANILTLIFPMYQLVVDEVMIETDEGKKRPDFVFIDVNGNIDIAEIKKSYNIPIMTKTKYRNNYIASKELTGTLMQIEKYIYHLTRTAKKSEEIIKKKVFNQTQEAFDIYIRNPRGMIILGRSDKLNVEQLRDFEILRRKYKHVADIISYDDLVHRLDSLLKKFENETI

SEQ ID NO: 60549 - protein, 308 aa, Enterococcus faecium EnGen0176; identical to SEQ ID NO: 60548

SEQ ID NO: 60550 - protein, 380 aa, Bacillus cereus B4264
MSDKINVWTTSRDSAVCGDIELKKTSTTRLIFRPEIVNNNKNPKASVRGCFIFQKKGRNALWDDYKELDMNKLKAEEWIKLEINSDAMLTLTKEIQKHYAVHEKYGVRYGAFHLFKDNPDIEKLIEMFESNTDLLTQLMEDDKSEALEKTLEWIVTNDNPDKIIDRLKNLKEQDLDQLNTLIGIANLKKVLSVWESNKLTNTSEKFWQSVLKENTWILSQIFSNPTVLINDEAYVGGKTVKNDSGKLVDFLYANPFSKDAVLIEIKTPSTPLITPTEYRTGVYSAHKDLTGAVTQVLTYKTTLQREYQNIDYNNYRQGIKTDFDIITPCCVVIAGMFDTLTDTAHRHSFELYRKELKNVTVITFDELFERVKGLIKLLEG

SEQ ID NO: 60551 - protein, 423 aa, Bacillus cereus Rock1-3
MFTLSMQDNMLFYRGNKVSMGLFNLSPPMEGEYSYHRINNYEHLFDEVLDYINDDLDNKIKREKLSVLPKGLCLIKDLMPTQSENEVESKGVKQSENETLFINISELAIIHKSIDVSPIPLKSIMVGKNDEGKTWYSANFRISGIAKGINEEIIVDKLKKFCEEREVLFASSKSLIDEMYNGQIQSYINKDVTVEEAFAYGIEKAKHIIDNFIFALIGLEGILEVWEYWKNNKTKDLKESSWQKIFKKYPWLLAQCFAVPHIIFQEQCYIGGTTSDGKGSKYPDFVYMTSRTENMMIVEIKTPKQEIMVKSGRDNIFSPSMYLNKGVAQVLFYKDLSLKTYSNTFMLNQQMAGKKSEMKNLRNPRCLLVIGSLDKLIEKGGEAAKQGFDLYRNELRSVEIITYDELFEKLEIMMKLVRSKFFY

SEQ ID NO: 60552 - protein, 380 aa, Bacillus cereus AH603
MSGKINVWTTSRDSAVCDDIELKQTSTTRLIFRPEIVNNNKNPKASVRGCFIFQKKGRNALWDDYKELDMNKLKAEEWIKLEINSDAMLTLTKEIQKHYAVHEKYGVRYGAFHLFKDNPDIEKLIEMFESNTDLFTQLMEDDKSEALEKTLEWIVTNDNPDKMIDRLKNLKEQDLDQLNTLIGVANLKKVLSVWESNKLTNTSEKFWQSVLKENTWILSQIFSNPTVLINDEAYVGGKTVKNDSGKLVDFLYANPFSKDAVLIEIKTPSTPLITPTEYRTGVYSAHKDLTGAVTQVLTYKTTLQREYQNIDYNNYRQGIKTDFDIITPCCVVIAGMFDTLTDTAHRHSFELYRKELKNVTVITFDELFERVKGLIKLLEG

SEQ ID NO: 60553 - protein, 274 aa, Bacillus cereus BAG4X2-1
MKLYKGKDYRFLSESDQLEYEKIKESEKKYPLTSGIFSDISVNKFHEYPKAARHNIHLFPNNYLDMVELQSHDKIKFMHDEFKDLLDKSPTEQETLNFINNNEHYFIIASLFSYYNFGHHEAYLFKEFQLNTTYRTDYLLVGKGSGGYQFVFIELESPSNNPFKQHGTELSQYYQNGINQVKNWERLLQQQFPSLQPKFNEARKRAGNLPSEFINSDNSRRHYVVVAGRREHYEQNPDASYAIRRYEEQTSGMKLLHYDNLLDLTKRLIGRKTF

SEQ ID NO: 60554 - protein, 274 aa, Bacillus cereus BAG2O-2
MKLYKEQDYRILSESDQLEYEKVKESEKISPFTSGILSEISVNKFHEYPKAARHNIHLFPNNYLDMVELQNHDKIKFMHNEFKDLLDKKPTEQETLNFINNNEHYFIIASLFSYYNFGHHEAYLFKEFQLNTTYRTDYLLVGKGSGGYQFVFIELESPSNNPFKQHGTELSQYYQNGINQVKNWERLLQQQFPSLQSKFTEARKRAGNLPSEFINSDNSRRHYVVVAGRREHYEQNPDASYAIRRYEEQTSGIKLLHYDNLLDLTKRLIGKKTF

SEQ ID NO: 60555 - protein, 264 aa, Bacillus cereus
MHVSIYGIYNRDYSILTKKEEQFLDNIKKNEKSIAIHEVIDYSDYPKAVRHYESLFPNHYLDIFDLKNNQQPQKQLELFHKKLNDTKTTERTLLRFFKESKAYFIISSLMINYGFGHHDAFIFPEFQLGNSHQVDFLLVGKNSGGYHFIFVELEDPYKQITLKDGELGNAFNKGIKQINDWKYWLEQDFQSLSTVFMKCKHPQISSLPTEFFKYESTRMEYIVVAGRRGNFNAKTYRTRRLYLHQNNIALLHYDNLYDYAIKMM

SEQ ID NO: 60556 - protein, 263 aa, Bacillus cereus
MGIYERDYSKLTKEEVAFLDKIKSDKKFSTIHRVIPYSTYPKAVRHYKSLFPNHHLDIFDLKGNEKPKEQIELFLKTLNDSTITERNLLRFFKESRAYFIIGSLMTNYDFGHHNAFIFPEFQLGNSYQVDFLLVGKSSSGYHFIFVELEDPYKQITLKDGELGSAFIKGMRQTRDWKYWLEQDFQSLSTVFSKYKHPQMTLPTEFFKYDSSRIHYIVVAGKRENFNEKTYRLSRMSKLQDNTALLHYNNLYDKAIDLMNRATY

SEQ ID NO: 60557 - protein, 291 aa, Bacillus megaterium
MSIYKKAYELIDDAPKALDWDVYENIAIEEYQKLLKQNGHEEIVFQEFFERNPAFLPGAFGIYGESGHPPYNNALITQPVLQGLMSKVPDFLWIASDSGTIYPIFIEIETPNKRWFRKNGVPTADFTQAQNQLSDWKIWLSNPVHQNLFYQYYDIDREITSGKAVRPQFVLIFGSRSEFDGNPELNQKRGQLVRENEIYMTFDRLLPNIKARNSITCKVRNRKYTAKFISPSFRLGPVYAEELSKIDNKEEAINNSKIDDIRKDFILSRLPYWEEFGRRQPRGVRNTGDWE

SEQ ID NO: 60558 - protein, 291 aa, Bacillus megaterium NBRC 15308 = ATCC 14581; identical to SEQ ID NO: 60557

SEQ ID NO: 60559 - protein, 291 aa, Bacillus megaterium NBRC 15308 = ATCC 14581; identical to SEQ ID NO: 60557

SEQ ID NO: 60560 - protein, 326 aa, Lysinibacillus sphaericus C3-41
MIFEVDEEGRPLIYYVFYTFNSSYNNLETAVLMHTLVEGSKNDIDRGILHELAMSVIYNIPVFPNHEKLEEELGFYYNELYENGFEMIDKDEKVKKYKLAEHLIPIFKSENEELLKEKTTRIYSSAEINYYKNKLMEKLKEYDNAQYIINKLKDGINELSVQLNSPEREENKIQAILTNYPILFGTEYIEVLDKHNFGSEYEADYILKRYNGLYDIVEIEASTLDIYTKQGNPSRHLVHAEQQIMDWLQWIEHNNPYAREKIKKLYSPKGYVVIGRSNTLTETTREKLRRRNLVFRDKIEIITYDDLLENAKLLLDFLSGNKIENE

SEQ ID NO: 60561 - protein, 383 aa, Lysinibacillus sphaericus CBAM5
MSRLDLYKKPILLRTFITNDDEQSNEAYDTYSRKIETAEINKNKFNEDKDFYHIIKEMIFEVDEEGRPLIYYVFYTFNSSYNNLETAVLMHTLVEGSKNDIDRGILHELAMSVIYNIPVFPNHEKLEEELGFYYNELYENGFEMIDKDEKVKKYKLAEHLIPIFKSENEELLKEKTTRIYSSAEINYYKNKLMEKLKEYDNAQYIINKLKDGINELSVQLNSPEREENKIQAILTNYPILFGTEYIEVLDKHNFGSEYEADYILKRYNGLYDIVEIEASTLDIYTKQGNPSRHLVHAEQQIMDWLQWIEHNNPYAREKIKKLYSPKGYVVIGRSNTLTETTREKLRRRNLVFRDKIEIITYDDLLENAKLLLDFLSGNKIENE

SEQ ID NO: 60562 - protein, 383 aa, Lysinibacillus sphaericus CBAM5; identical to SEQ ID NO: 60561

SEQ ID NO: 60563 - protein, 383 aa, Lysinibacillus sphaericus; identical to SEQ ID NO: 60561

SEQ ID NO: 60564 - protein, 383 aa, Lysinibacillus sphaericus; identical to SEQ ID NO: 60561

SEQ ID NO: 60565 - protein, 291 aa, Bacillus subtilis subsp. inaquosorum KCTC 13429
MSIFLKSYNLVSDSPEPLKWEDYEKKVLDDYRILLQQQSENEKVFQDFFEKNPAMLPGAYGFFGESGHAPYNNVLITQPVLQGLITKVPDFLWIASDSLNIYPIFIEIEAPSKKWFNQDGTQTAKFTQAQSQIQDWKTWYSNPIHQSIFFQYYDIDKKIIEGKSVKPFYVLIYGLREEFEGKPHLNQKRAQLNKSDEIFMTYDRLTPNIKGRDVITCHVKNRDYSAKYVSPTFRLGPVFAEELNIINNKEEAILNTDLTDERKKFLISRLKYWEDFGKKKNKGLINTGDWE

SEQ ID NO: 60566 - protein, 409 aa, Bacillus subtilis
MERKEISTLKDVANSLITMLKNKYFTKLLMFLELNPELKKNFTKFLVNPEKVILYLGKTHWGVEYIGNVNSKEISLNHKFECQFSDYSTGDNLLTDILGIDYSKQTGPVLPLPEYNVDLVHPTNEAMDIMLKNGWNLDGQSMIIGLNAGEFVLQEGMCHRIVNGFFYGTNRSGLVTRNVKWLDLFPLQLDDTDVEVDTFEFYMWPNISDVIIHDVHFQYPLPSGYREEKWYSLNRFVELISSKDTSELQITAFLAKPENQFILKMAFMGKNIYSECELEWQSVECKAIRPDFFVEGPNGYSDIVEFKLHNLKNTKSIVGRENRETFSAEINSYISQTRNYEEYFEDPKNREFAEEQHGIKVHYPKRILVMGRRWMLDTPDWRKLENDYRNIMFKTYDDIIDLVLSHLYS

SEQ ID NO: 60567 - protein, 372 aa, Bacillus subtilis subsp. niger
MKYSISPTSKDSAFGEDIILREKSTTRLLFRPQIINNKHNEEASVKGCFIFQKKRSSENWEDHKELDLNKLKATEWVKLEIKSEEMLKLITELDMYYKIHKEYGIEPGGRNYLKINNPRLEKIISLFKEDNSLFEALLDEDTEQLLKQTVKWMVRTKNSEEIISRLLEVQENELDQLNNLIGITNIKKLLSVWEANKDNVDEEFWQKIFKDNAWVLSQVFASPLLLFDEKAYIGGKGLGNKGGKVVDFIFQNDISKDVALIEIKTPNTKILSGEYRQGAYSIHSDLTGAIVQVLAYKEQLQREYGSLLLNSESDFKVFNPICVVIAGKLDELDKTRLQSFELYRKEMKNILIITFDELFKKVSLLLQLLSDK

SEQ ID NO: 60568 - protein, 166 aa, Bacillus subtilis
MNYSISPTSRDSAFGEDIILRESSTTRLLFRPQLINNAHNENASVKGCFIFQKKRRSENWEDYKELDLSKLKATEWVKLEIRSEEMLKLVTELDTYYKIHKEYGIEPGGRNYFKINSSSLEKIISMFKEDKSLFEALLDEDREQLLKQTVKWMVRTKILKRLYPDY

SEQ ID NO: 60569 - protein, 372 aa, Bacillus subtilis subsp. globigii; identical to SEQ ID NO: 60567

SEQ ID NO: 60570 - protein, 341 aa, Amphibacillus xylanus NBRC 15112
MDGKDIQLLEIKEARSGNVSYTKPVVIHQSSRTKVTVVPFYIDRSSGKELSVKILTQTKGKPPMDWLLVDEKSTSLNAEATLSLYSSLKKFLALSEQEENGEYIILKPANEEHSFGNHGPEEIAQAILGVLNRPEIAKHLVDKELSNELITAFRSSIRLQELRSAVAQLRQYLESGIKDEQKYQQWCEEHPWAFGNSFVVNDDVRAISASDKVDLMLPTVITGYRDLVELKRPDMEVLNYDSSHNNYYFTSEVSKVIGQCHRYLDVFQEEAARGLRDHPEIVAYHPKATIVIGRSNDWTKEKHRALHGLNSRLNSITIITYDQLLAQGERMIDIVSEGYNE

SEQ ID NO: 60571 - protein, 372 aa, Bacillus atrophaeus 1942; identical to SEQ ID NO: 60567

SEQ ID NO: 60572 - protein, 372 aa, Bacillus atrophaeus C89; identical to SEQ ID NO: 60567

SEQ ID NO: 60573 - protein, 372 aa, Bacillus atrophaeus subsp. globigii; identical to SEQ ID NO: 60567

SEQ ID NO: 60574 - protein, 372 aa, Bacillus atrophaeus; identical to SEQ ID NO: 60567

SEQ ID NO: 60575 - protein, 263 aa, Clostridium botulinum F str. Langeland
MNLYERDYEKPSTKELEVIREQDEFNKIGIVSPEHVDPINKYSKEIRNFVYHYRTKFPNNVIWSRELNHEESKKESEAFKKVLDNSKSENDIQTYIKSNKKWFIPASIIKEYNFGHKENYLFPEMMLGSKYKVDYVICGRNSDGYHLLLIEFENANTPFINQDGNCESKSVNSGYGQIKNWKNWMDDNRQLFLNEHEFTEKGMSIPISQIQYCLVVSKRSYMDSSARERKNRLIYEVNNLNIINYDRVCDYIEQLGHGYCTMF

SEQ ID NO: 60576 - protein, 226 aa, Clostridium botulinum E3 str. Alaska E43
MIKEYCYKEPEEWTKRRNTIRKNQIPIETIANLVGDGANEREIQKVIKKDLSFLADYLQSPIDEYICLSELPIGDNVVDFVVLTSRSRMLVYLIEIKGADFFTVKSNHYKGMNSHIHDAVNQIGNHISYIEQNYETFRKYIHGIREQVINGDYKSNYLLGPKGHLEVDQNKDIEIETIVIGGKSKEDYTDSNERTRFESKNKYWLHVYSWESFLRRIDKVHGHYFE

SEQ ID NO: 60577 - protein, 194 aa, Clostridium botulinum F str. 230613
MNLYERDYEKPSTKELEVIREQDEFNKIGIVSPEHVDPINKYSKEIRNFVYHYRTKFPNNVIWSRELNHEESKKESEAFKKVLDNSKSENDIQTYIKSNKKWFIPASIIKEYNFGHKENYLFPEMMLGSKYKVDYVICGRNSDGYHLLLIEFENANTPFINQDGNCESKSVNSGYGQIKNWKNWMDDNRQLFFK

SEQ ID NO: 60578 - protein, 226 aa, Clostridium botulinum; identical to SEQ ID NO: 60576

SEQ ID NO: 60579 - protein, 226 aa, Clostridium botulinum; identical to SEQ ID NO: 60576

SEQ ID NO: 60580 - protein, 263 aa, Clostridium botulinum; identical to SEQ ID NO: 60575

SEQ ID NO: 60581 - protein, 358 aa, Peptoclostridium difficile T15
MKINDFIFRFKYRNDEKSLCRVRTFLGRENKIINLITDLEDLNISKVSLINSIEFACSELIEKNMTCEDAIFIEHTESESLEEQKFDMVTFNPRGGPIWKNININEVKKILNCIDDELINTTKKNRNLVETIDRIRYRINPETDFLYKESPEVIKRKLEIKENRISKSKLEDLIKNRSKEQEIARLLKSDLSVFGEVYSFPKDEYICFSEYPIYDRYIDYVVITGRSRMQVYLIEIKGAEFNLVNKDSKFNEKINEADSQISRTLGYIFRNYMAFKDDIHEKRRLVEKGEKIFNSFRGPISKLEVDRQKDITIHSVIIGGVTNDDIKESRLRHDYENKNDFRIKLESWDTFIRKLSNR

SEQ ID NO: 60582 - protein, 250 aa, Peptoclostridium difficile E9
MKSIHTFDVFAPTDEQEEAMNKKRGGHYRRGKNKEMDYFIECATSLFPNNHYSRFTPIYDTTKEFYQLITSSDTTERAILNWIASNRAWNYLFGLLRHYYRTGHHDDNYIFPEFKIGSAYVADYLLIGNSSDGYQFVFVELEAPNGRITKEKGTRFGEVINKGIEQVRDWQMYIAANWNVIVAELEKHSFSNTKLPRQLYKYCPYQIYYAVIAGLRKDFENIRDRKLQLQNENNITLLHYENLIDVANEN

SEQ ID NO: 60583 - protein, 285 aa, Clostridium pasteurianum DSM 525 = ATCC 6013
MYDEKEKLITEFKKMLDDVNTKENDIQEFIETYSQLIPTPFLLGHALHFNSVISKFKLSDSYITDFAYMTKCTDYWNLVLIELEDSHKKIFTNNKNNTYFHNEFNHAYDQITSWKNYIEQNKECVLKKITKLKLPIKYTPIRIKYVLIIGRNSDKNTEEKINMFAQKSNDDVKVMTYDSIISMYKHLEVSINKMVLSHWKGGFKVKHVPDNLDTSIFASVKPEYLDIGTENTKKLIAQDYQIDRWRRGYPLMYNSKYDAKTYKEKATNILAKVTVTDDEIERKFD

SEQ ID NO: 60584 - protein, 285 aa, Clostridium pasteurianum DSM 525 = ATCC 6013; identical to SEQ ID NO: 60583

SEQ ID NO: 60585 - protein, 285 aa, Clostridium pasteurianum DSM 525 = ATCC 6013; identical to SEQ ID NO: 60583

SEQ ID NO: 60586 - protein, 285 aa, Clostridium pasteurianum DSM 525 = ATCC 6013; identical to SEQ ID NO: 60583

SEQ ID NO: 60587 - protein, 281 aa, Clostridium sordellii
MNLYNDRDYNHITSEEIKCFKEIKRLEKIGPNGNPLPIGIKNMYRDYPKAVRHNLSLFPNNLLDIEELKKEKTLLNLIGEFEKLLELDDTTERTVLKFINQYGNYHLIASILYYYNFGHHDAYLFREFKLGTTYIVDYLIIGRNSGGYEFIFVELQDPKKNITKKNGTFGSQIRDGLDQIDDWKRWLDQNYSTLYESFNKYKNKNIHELDNIIHVLTDEFLKYDSTRIHFVVVAGRRSDFKLNQDITYSLKRGLKKERNINLIHYDNLIELSKNLIGKQTY

SEQ ID NO: 60588 - protein, 359 aa, Clostridium tetani E88
MKISDFIFKFSTSTVSNRDGLCRIRIFVGDNKIITLITDIGNLNPSESVTNSIEKIRLLLIQKGLVNEKSIFIEHYEKEKFSNASFDIVEFHDNGSPSWYPITKEKLKELLDCDDKELSDLTKKNKRLLSEIGRIIYAVNPRNDFCCQESPDIIKRKLEIEENKISKSELIKIIESGAKEQTISQLLKSDLSIFAEIYACPKDEYICFSEFPIDDGYVDYLVLTGRSRMDVYLIEIKGADFDLVNKNKEKFNEKVSEADHQIKTRLGFIYRNYEFFRKNIHDVRRKAENGEIVFNSFRGAINNLYVDPDKDINIYSVIIGGRTGDDYEESKLRHNYEIDSKFKTKLETWDTFIRKLVRS

SEQ ID NO: 60589 - protein, 359 aa, Clostridium tetani; identical to SEQ ID NO: 60588

SEQ ID NO: 60590 - protein, 359 aa, Clostridium tetani; identical to SEQ ID NO: 60588

SEQ ID NO: 60591 - protein, 359 aa, Clostridium tetani; identical to SEQ ID NO: 60588

SEQ ID NO: 60592 - protein, 359 aa, Clostridium tetani; identical to SEQ ID NO: 60588

SEQ ID NO: 60593 - protein, 369 aa, Lactobacillus casei 32G
MNDTMYIRKLTLNDDWTFPVAKVVSKKTDEYWRFDAMPLKDKSGDIGYLYVYRKEMRKKDYNNLFNKRNAYSKMTTVWKDLYKISRYVSNTQGIYIGGDHKPNIPVRSLNTLRDRLVGNAEIQHYIDIQNGRVLEDFIDMDTSRAKALIARQQEKRHSEILIKNDQNRSVITQVNTQLKEFHDELKEVLDQNDKQPKAWIEHDYQKLLFKIFPFIFPQYTHFIREYNFKIDGNAQKKEDIPDFIALNSSLSVDVMEIKTPDFPLFRKGQYRKNFVFASEVQGLISQIQKYIYNLTRNSLREEPRLQKRFEDKAELKLSKSSGGIHIRSPKGLIVVGRSPSHSTQNLEEAQQQEQDFDIYKRRYEDILFF

SEQ ID NO: 60594 - protein, 405 aa, Bifidobacterium adolescentis
MDESQNDEIGYFQGRIPGRTYISNVFAYNRPNSKDIGSPARNINQVFDCDDIDSEIDISEAGWETQSMDLSPRRQIKISIAKEAGHYKELVIQQVDPKKPEKLSNLLRLTDKQVDDFLNLIRCVGMWDPADGNLPKRLDATLLRRILDDNGEALGQVYSQQPDKVRELIEKDPSGEDVAAIASRRKAVTVFEEMMQNDSLTEGDWQNFFESNPWILGAGLGVPLFTAWNSDKLETVVRGNSFTGEGKRVDALYRTSGIVKSFVFAEIKKPTTKLLTENEYRPGCWAASKDLSGGIFQVHATIQAAEDEVSGHVVTAQDEEGCDIPSSEVFLFRPRAYLVIGSTKEFINKNSGGKNKKKIRSFELFRSNIVTPEIITYDELFAKARWLAYGSDDSNQNNTESNRFS

SEQ ID NO: 60595 - protein, 390 aa, Bifidobacterium bifidum PRL2010
MADHVETQSVARGVAEVPPALIAETATTRTIFEAKIIDGHGIDGALKRQKRDENGGWSDLNGVNFRNADPDTVVSIPLKTSDVRKLYDLLSRLYAVQNKGVLPGSHDYVVAGKDEIIVTNENLAQVIQELIDENHSQKFWDTLVANQADLAMRLAESQIQRNRMRIIEQFEQDMQFYGDNEKHWQDFFGEHPWILQSAFAFTAFQLRGETYVGGKSCVGRNGQGGVATDFLFRDESTQSFAVVDIKTPDTELMAKRPYRGKDGTSGPNVVYPASGHLSGGVIQVRTQISEAIRSFEVVLHNSYPELNRVHPHGVLVAGNYDKLEEEQKRSFNHFRRGLFGLTVITFDELLGRLKQLYTFEEHEPPSAQLNKSSEDNPWAGPDEDSWASSL

SEQ ID NO: 60596 - protein, 390 aa, Bifidobacterium bifidum; identical to SEQ ID NO: 60595

SEQ ID NO: 60597 - protein, 338 aa, Bifidobacterium bifidum
MDLNPRRQIKISVAKEAGHYKELVIQRVNPKKPGELFNLLRLTDGQVDDFLNLIRCVGMWDPADKNLPKRLDATLLQRMLDDNGETLGQVYSRQPDKVRELIENDPGGEDVAAVTSRRKAVTVFEEMMQDDSLTESAWQDFFENNPWILGAGLGVPLFTAWNSDKLETVVRGNSFTGKGKRVDALYQTSGIVKSLVFAEIKKPTTKLLTNDEYRPGCWAASKDLSGGIFQVHATVQAAEDEVSEHVVTSQDEEGCDIPSSEVFLFRPRAYLVIGSTKEFINENSGGKNRKKIRSFELFRSSIVTPEIITYDELLAKARWLAYGNDDSTLTNAGNNQSN

SEQ ID NO: 60598 - protein, 190 aa, Corynebacterium glutamicum
MQQHLRERTRRMKVLEELRQLIKEPEITEAPFQTLLGKNPWVFGGEVIKAAELRTIGTSDQVDIPIIRGDGSMVVVELKRAAGTRIHRMDHGYPTLGSEVHIAVQQAQRYLYELDRSADTLMLKHGFDARRATALVVIGVYPDLEKDEADKFRESFRIYNSHLARVQVTTYDDLLQNALRLVSLENSELN

SEQ ID NO: 60599 - protein, 190 aa, Corynebacterium glutamicum; identical to SEQ ID NO: 60598

SEQ ID NO: 60600 - protein, 407 aa, Propionibacterium freudenreichii
MINFEDRGTQVVLSYESERGPVTWVDDKLRTSGEVTLSHTFTMRSADLLSVGEDDEKEDIRAFIVGSVGGEYRSIRDDVLGLKHDLRISKSLRLTKSLFVAERNISIFRRIDELVDEPIIIGGAHPSAIPVDEFNRLLRTFPTTTEMKLYAWTRITRVLREYMGAMTDAEQLLADHMARRARSKSLAGGKLVPRLPAAKELELAKFEFVRRQLSEMLHDAEAFSEAEWQQAVADLFLLIFPQYVAVLSNVLVKERYSNPGRETKRYIDLLLVSANGEVDVIEIKKPFERSLVSRSRYRDNHVPVRELSGAIIQAEKYLFYLNKSGQDGEMYITETYRDRLPSGLEIRITNPKAFVLSGRDSNLSTEEQVDFDFARRGYSNVVDIISYDDLLRRLDNVISSLHKRGLT

SEQ ID NO: 60601 - protein, 407 aa, Propionibacterium freudenreichii
MINFEDRGTQVVLSYESEWGPVTWVDDKLRTSGEVTLSHTFTMRSADLLSVGEDDEKEDIRAFIVGSVGGEYRSIRDDVLGLKHDLHISKSLRLTKSLFVAERNISIFRRIDELVDEPIIIGGAHPSAIPVDEFNRLLRTFPTTTEMKLYAWTRITRVLREYMGAMTDAEQLLADHMARRARSKSLAGDKLVPRLPAAKELELAKFEFVRRQLSEMLHDAEAFSEAEWQQAVADLFLLIFPQYVAVLSNVLVKERYSNPGRETKRYIDLLLVSANGEVDVIEIKKPFERSLVSRSRYRDNHVPVRELSGAIIQAEKYLFYLNKSGQDGEMYITETYRDRLPSGLEIRITNPKAFVLSGRDSNLSTEERADFDFARRGYSNVVDIISYDDLLRRLDNVISSLHKRGLT

SEQ ID NO: 60602 - protein, 366 aa, Mycobacterium fortuitum subsp. acetamidolyticum
MRVSEREVRQLLEDRPRVSTLCQITLIKKDNGFSPRIRLWKKDKTKFGKQTADHTVDADATTTVIKATVDTDSCHDNFWKLIDFIQSFIGISLPDSVFRVVTGDSALLAQLLQNQDRQVVLDAVQAAVGESLTERDIGIISNRKKQLATFKSLLTDPNFFEQRRRELQKPGKQPPGDEGVWQNFFENNQWIFGYGLSLIACETLDGEKLEKITTGANIFTGAGKRSDAVMRSKGFISSLVFGEIKTPAAPLLEKEAYRKPDVYQTSRELNGAVAQVQKTAAKAIRQINTDIHRLYEDDGTPTDIQVSSIRPKQVVVLGNLEQLAVDGNPNPEKTSAFELYRNSIHEVEIITFDELYERARFIVEDV

SEQ ID NO: 60603 - protein, 407 aa, Mycobacterium neoaurum VKM Ac-1815D
MAFKSIFSLPEPPNEVTWAEGRLPHRTYISRSFTLNLPASRDHGEPARYVTKVFDEPTFDDASTTELDNDIEEYIVATTPRGRKQIQLQVAREAGNVRRLVIQRVPTNPGSSKLEVLLDLDRTGATRLIDVIRMVNSIPVEGDTSVRIDDQVLQDFFRDPEAMTALYGRDPGSLRRLIELDASAADVIAISRRRTVVGFFRRLLEDSDLFDEVAADHSSPEKVWQNLFEMEPWLLGANLAGQLITSWSPERLEQVVTGASISGPGKRTDALMRTNGRISAMIFAEIKHHRTLLVDKEYRSGCWAPSTELSGGVVQIQQTVHLATREIQDRLADKDGDGVETGEYTYVVRPRSFLIVGSLDQLRGQGGIQKEKYESFELYRRNLYEPEIVTFDELLARAEWQCTLLET

SEQ ID NO: 60604 - protein, 407 aa, Mycobacterium neoaurum; identical to SEQ ID NO: 60603

SEQ ID NO: 60605 - protein, 407 aa, Mycobacterium neoaurum; identical to SEQ ID NO: 60603

SEQ ID NO: 60606 - protein, 80 aa, Mycobacterium vaccae ATCC 25954
MESALTDFRDIVKQTTEAEPVETAVVRGAVIAGTLASIDGDARRLSFMRFREGFQGVQILTFDELGDRLRGLHAMLKTQP

SEQ ID NO: 60607 - protein, 229 aa, Streptomyces albus J1074
MSDWNEADEYLAWATKELSRNGHKKLCVIRDAPTAEVVDEFEKVLDDAQDEAPVQEFFERHPEVLAQQLGAGCRWIIPRPNLGGVYIPDFMAARVDSGGLRWVAIELESPSVDRLFTTTDGTPAKELRKGLQQIKDWRHWLEMNLQTAQNSPINGGCGFVGITPRVQGLVVIGRRRNTTSDDHYRRRDIAWQEHLETHTYDWLLEEGRKMVPLHRSPQEECEECELYGR

SEQ ID NO: 60608 - protein, 394 aa, Streptomyces albus
MALELHLDKILSVASAESVKEAIALALAHVRSGPGGRRRGGKRLTELLSAARLFSARAEEWEVLRSLQDAVHYTEGRLLRPDYEEKYRLHYFDRGPRDRFGLDSISRTTSAILELWCMQAEKYLVDHPDASLENVLNHVRKVGEDARFMQAPEEDPARYRMPRGAAELALWTERVLCNRVEVSDPAESARRIVSSPEALSILAMDEDGQTVLRAAEMQRRSASLRRLREMIEDDTTTEHALQRALTGMHWIFGGRVISQAEQRRLVPGDEVDIPLIRGDGSFQVVELKRAAGAKLVKEHRGSWVPRRQVHDAVGQAINYLVGLDESRERILEEFGVDTRRASALVLVGHPCSQPEVSEREINEALRIHTSHLNRVEVLTYKELVDSAERALALG

SEQ ID NO: 60609 - protein, 399 aa, Streptomyces ambofaciens ATCC 23877
MTETNWQLVADALGHLYAGPTAEQHAIADELKFPLAPGTPTPVAAALLRAHLAKPLRLREHPPIDEPEYDYLARVATETNLHVPVLEEIGSRDLLDAWLEVAWARRTVHHLERLRPEVGDIAITVRRRKPEEDRYGQISSISLSGQLNFRGGLGRRAWPHTVKRVAKVSDADHGELLTRAREEVAAEDQHPERVTKRELALLDNWKVPRRSSLADCRALQEALDSATEERPMQVVLENHPALLANMITGNHGVWVRPQVRLGDQYVSDFLIASETSAGMRWHLVELECPTARITNAGNRRESPTLRHAIEQIQDWREWLKTNLLAAREKLPGITMDARGLIIMGREDGTDRAREIRDGRSANDRIEVRTYDWLLRAARRADSMARGLLDEETGDLDLDW

SEQ ID NO: 60610 - protein, 399 aa, Streptomyces antibioticus
MVLERQLGQVRGAAADEAVRSAVDAVFAYMGSGSPGRRRQGKELVRLMEAARKTAAEAGEWHVVRLLQDSLDYAEGRILQQDLEERYRIFQDGARRERSRDFVASSLRTMHQWLVAAGEAYLREHPGASAEETLSHFRAQGEDAAFLRAPDDRPGRYVIPRGAAEISLWLERLLRSERIDVADPAESARRIVGSPQAMALLAADREGRLILQAAELRRRAAGLEELRAVVEDRTATEADLQRALEGNHWIFGGRFVGEAARRRLVPGDEVDIPLIRGDGALHIVELKRAMSLDAPLIKRHRHAWVPAAHVHEAVGQAVNYLVGLDEHRARIREELGIETRRAGALVLVGHPGLHPDVPEGEVNETLRTFNSHVTRVEVLTYKELLDNAERSLAGGVEPV

SEQ ID NO: 60611 - protein, 391 aa, Streptomyces antibioticus
MQLDHVAEQAGDPKVKDALEAVVRHMNSGRSPYRGGSTLVALLKEVRSTAAALDEWQVVRLVQDSLDYAEGRILRPDFEERYRLFQRSAEPLSSHQDYLARTLSATLAFFMQLGDAYLAQHPDAGATEVLTHVKGVAQDARYMQQSQERTGRYRILRGSAEVAAWLEQVFQERLDVEDPEATARRIVMSPESLAVLAADRDGQLLLRAAEVQRRRRGLKALRGAVEDPEASERDLQRALDGQHWIFGGQFVSQAVQRRLVPGDEVDIPLIRGDGALHIVELKRSMSLKGSLVKRHRGCWVPTAEVHDAVSQAVNYLVGLDEHRQRIRDELGIETRRASALVLIGHPSVQPDVAEEHINEALRTLNTHMSRVEAVTYKELVDNAERALGGWR

SEQ ID NO: 60612 - protein, 404 aa, Streptomyces clavuligerus ATCC 27064
MAIFRSSFSLKIMVEEARKLTEHAGVHERIDTVLRIMGEGYGGTYGKGRPLVNALEDVAQACLLHEEFPLAQRFQRFAGYAGGKLFLDTVEHYYDAKARQRSEEFMRRMAAMGSDRAVSALEALCAENPDASVTDALALFRGIARSTNHLSIGDGEGGIQLPAKYLKRLQQFGHMELILRDLPRPASAETARMMNEFLEDADAGMLAQLLELRARRAGLASLRAAVDRPDSSETVIHACLKNQEWIFGGAFVSELARRQYTPDTILDIPLLRGDGSLHVVELKRANIEKLAIRPSGQLMLGAPVHHAVSQTQNYLRILDEGRETILARYGVDTRRASATVVIGHSQYVSGGVTPQEVADTLRTYNTHLARIEVITYETLLESAERMLALSSAEHVSGQAEGYTA

SEQ ID NO: 60613 - protein, 404 aa, Streptomyces clavuligerus ATCC 27064; identical to SEQ ID NO: 60612

SEQ ID NO: 60614 - protein, 404 aa, Streptomyces corchorusii
MVLERQLGQVRGVAAGEAVRSAVDAVFTYMGSGSRGRRRQGRELVRLMEAARGTAAEAGEWHVVRLLQDSLDYAEGRILQQDFQERYRIFQDGARREQSRDFVASSLRAMHQWMVAAGEAYLRDHPGAGAEETLDHFRAQGEDAAFLRAPEERPGRYVIPRGAAEISLWLERLLRSDRIDVADPAESARRIAGSAQAVSLLAADRAGQLVLRAAELRRRAERLKALRAVVEDRAATEADLQRALEGNHWIFGGRFVGEAARRRLVPGDEVDIPLIRGDGALYVVELKRAMSLTPPLVKRQRNAWVPAAQVHEAVGQAVNYLVGLDEHRTRIRDEFGIETRRAGALVLVGHPGLHPDVPEREVNEALRTFNSHVTRVEVLTYKELLDNAERSLAGGRDPGAGSAW

SEQ ID NO: 60615 - protein, 404 aa, Streptomyces hygroscopicus subsp. jinggangensis 5008
MVLERQLGQVRGVAAGEAVRSAVDAVFTYLGSGSRGRRRQGRELVRLMEAARGTAAEAGEWHVVRLLQDSLDYAEGRILQQDFQERYRIFQDGARREQSRDFVASSLRAMHQWMVAAGEAYLRDHPGASAEETLDHFRAQGEDAAFLRAPEERPGRYVIPRGAAEISLWLERLLRSDRIDVADPAESARRIAGSAQAVSLLAADRAGQLVLRAAELRRRAERLKALRAVVEDRAATEADLQRALEGNHWIFGGRFVGEAARRRLVPGDEVDIPLIRGDGALYVVELKRAMSLTPPLVKRQRNAWVPAAQVHEAVGQAVNYLVGLDEHRTRIRDEFGIETRRAGALVLVGHPGLHPDVPEREVNEALRTFNSHVTRVEVLTYKELLDNAERSLTGGRDPGAGSAW

SEQ ID NO: 60616 - protein, 404 aa, Streptomyces hygroscopicus subsp. jinggangensis TL01; identical to SEQ ID NO: 60615

SEQ ID NO: 60617 - protein, 404 aa, Streptomyces hygroscopicus subsp. limoneus
MVLERQLGQVRGVAAGEAVRSAVDAVFTYLGSGSRGRRRQGRELVRLMEAARGTAAEAGEWHVVRLLQDSLDYAEGRILQQDFQERYRIFQDGARREQSRDFVASSLRAMHQWMVAEGEAYLGDHPGAGAEETLDHFRAQGEDAAFLRAPEERPGRYVIPRGAAEISLWLERLLRSERIDVADPAESARRIAGSAQAVSLLAADRAGQLVLRAAELRRRAERLKALRAVVEDRAATEADLQRALEGNHWIFGGRFVGEAARRRLVPGDEVDIPLIRGDGALYVVELKRAMSLTPPLVKRQRNAWVPAAQVHEAVGQAVNYLVGLDEHRTRIRDEFGIETRRAGALVLVGHPGLHPDVPEREVNEALRTFNSHVTRVEVLTYKELLDNAERSLAGGRDPGAGSAW

SEQ ID NO: 60618 - protein, 297 aa, Streptomyces reticuli
MDLISEAVTDENPDRPQAPTWEEYQSWLQPKWKSLLESDPNERQMQSFLESHPCLLPGATDSIGQGGHHSASFSAVIRQPPLEGLGPKRVPDFMWVRRDTAAIRPICIEIESPGKTWFNKDRTPTAELTQAIDQITDWKVWFDSPENRLIFGRRYAPNNSYRPIVPQFVLIFGRNSEFTVGRSKHVDPGYLRLKRDHMQRRDEHFFTYDQLKAEREAEIYATITHRVYEWSIDHIPPTFCTGAHITELSEVVSDPTEAIAKADLISEQRKAYLEERWKYWRSVALDPNPHVYTLGRE

SEQ ID NO: 60619 - protein, 399 aa, Streptomyces viridochromogenes Tue57
MTLEWHLRKVVAKEAVDESVQDAVQAVLKHMHGGRSRKRRGGRELLRLLEEARGAAAGVGEWQVVRLVQDAIEYAEGRILRYDFEDRYRLFGDGKKRESHTGLLGSTMKAMNQWLFDAGREFLAARPEAGIEEFLEHFRAQGEDALFLQAPDERPGRYVLPRGRAEITLWLERIIRDGRIDIADPAAEARKIVTSPEALALLAADDQGRLLLQAAELRRRAARLKELRTVVEDRKATEADVQRALDGQYWIFGGRFLGEAAQRRLVPGDEVDIPLIRGDGALHIVERKRAMGLRSPLVKRHRGAWVPAAQVHEAVGQAVNYLTGLDESRERLRADFGIETRRASALVLVGHPALHPEVPEDEINEALRTFNAHLTRVEVLTYKELLDNAERSLAGESPV

SEQ ID NO: 60620 - protein, 292 aa, Streptomyces griseoruber
MLIEAIPFFIPHRNSSTELSMKLVRTDKRTGEQCEMTLKSEDLYMLKSHIAQALSVSEQDDDGQYLVLRTDGFGAQLDASDDAVGAIGSALENRRFAAQLAHQVSPETLAKAFSAAVRIGELRAAVTELQEHLAEGRNREDVYQDWCERHSWAFGNAYVARDDQRVIGIGDHVDLLMKSTASGLRDVYELKRPDKDVILYDDTHQNWYWSSHTAKAIGQCHRYLDTLHRAAEFGLQPARPDIVAYHPRAVVIIGRSHTWEETQLRALHGLNSRMHGITVMTMTSCFPNVTRC

SEQ ID NO: 60621 - protein, 288 aa, Sphingobium yanoikuyae
MPKSLSCELETKLAEFDDLIATPKANENAVQAFLEANTRFMPTPDILNHRVHMNSVIAKLPIGERSTDYAYLTKSSIEWRLVLVELEDSSKPIFKKSSKNAAFSTEFNDAVAQIDVWRDYVHQHPARLRDKLRPLMVPVPMARHRLSVRYVLVIGRSAEFEHDDARKLRLAGYGAERDLTIMTYDTIRREVAAGHSKPKAVLRANSRGYRLQSAEAMPTIMFAHMKPAELELSDVAEAALRADGYDIDAWKRNEPLVFNDKWTRDSEPKLYESMHPAVQKFIARQKKS

SEQ ID NO: 60622 - protein, 404 aa, Streptococcus mitis
MSDCIVVNDELYVIYPNYRTYTLDAEYCSRYTYYLKKGNYFFLNNNGKLVDSNEDVEDRIAYKIGKLEGNYYCFDNEIFDLQHKFRIDVSLIDNLKHKHFLKYPSQLSILKKIDSLINEDFYILPDDTINEEVSSISWTEYNNLVASFPTTTTVKHYIDKLVAEKIEGFFELKKSYDDEFEKHLQKTTRIPSSNTLFSPKIDYEVTQAEINKFTHALSLLKDILEEEIISEKEWQNKILDILLLIYPQYQIIIDEVGLSNRRRVDFVLVDLFNNIDIVEIKTPEKRLLKKSKYRDHYVPSHEFTGTAMQIEYYLRELHENSSANVQKIKHKLLEKGFNSEVKINNVKGIIIMGRTNGFNVEQQETYRIMKNQYSNIINIISYDELLDMLERILERFKKNGISNK

SEQ ID NO: 60623 - protein, 408 aa, Streptococcus mitis
MEFIMSDCIVVNDELYVIYPNYRTYTLDAEYCSRYTYYLKKGNYFFLNNNGKLVDSNEDVEDRIAYKIGKLEGNYYCFDNEIFDLQHKFRIDVSLIDNLKHKHFLKYPSQLSILKKIDSLINEDFYILPDDTINEEVSSISWTEYNNLVASFPTTTTVKHYIDKLVAEKIEGFFELKKSYDDEFEKHLQKTTRIPSSNTLFSPKIDYEVTQAEINKFTHALSLLKDILEEEIISEKEWQNKILDILLLIYPQYQIIIDEVGLSNRRRVDFVLVDLFNNIDIVEIKTPEKRLLKKSKYRDHYVPSHEFTGTAMQIEYYLRELHENSSANVQKIKHKLLEKGFNSEVKINNVKGIIIMGRTNGFNVEQQETYRIMKNQYSNIINIISYDELLDMLERILERFKKNGISNK

SEQ ID NO: 60624 - protein, 367 aa, Legionella birminghamensis
MSTIIYSYRSTSTSSAIIEDIEFGRTSTTRRLIRPTIVDNKEQPDASVKIEIIHQKAEKGTFEDIPTEKLSEYKAKDIGKLILSSDETISLFKHLCNLYAIHKENGVPSGQHSFKFDNDSKLVRVESKRAEIIETLIQQGYSEEVWERLVENSPDLATKLSLAHIYQKRLTALEQFKIMLSCDHSEHDWQSFFENNNWIFGYGLNYRILKTVTDQPHYGGVVIEGVGANKGDFLSATQGTLKFTVLVEIKRANTKLLESKEYRNDVVLPSEDLIGGVSQLRVNGRTWEQQGSQVPKNRDLLEEASIYTIQPRKILVIGNTNELNNRLKRENFELFRRGQSDVEIITFDELLYRAQYIAEHTEEIKGC

SEQ ID NO: 60625 - protein, 380 aa, Acinetobacter lwoffii SH145
MTTMYTLEEDFLFLPRDVEIAQTSLINTLYNHIHKQNLRFLTTYIDETDTLHIQTTHRLKFQITCVKNNINSFKITKFDRTKEVETLTFSKVTITNIINFLELISSLDIKDIDQRKISLNQISKTDIKNSISQLIQSTLENKDQAELLTSFLNNGLITCQDIVNTGYRKQQLDVFEKLLYEPDAITEYQITNQLTSFSEEKTWQHFFEKNEWIFGYGLDYRFNKILQREAHLNPSNLDGSNFVIVDYVMADNRFTTFVEIKRPNTPLFKSQKLRGNCWRISNDLYEAHSQILAQKICAQTKFETNNAGFCSKGKRIQQGAYDPKAILIIGCWSEIESDSEYIQNLKIRTFELFRRDLRNIEIITFDELYDRAKFIVEHHQ

SEQ ID NO: 60626 - protein, 471 aa, Burkholderia gladioli BSR3
MSDTSEEMGSLPSPEFRLEPHVGATPPAVQLYLQTFTRSPTNPDAWVSRPPTDWHLLAVIEAHQITSHPVFTNPYTQRYLQPKHGQFHKLVLERDSDTPLPEDEEEAVREISSYWRLFDEPSYGFGFVKNLDPLRYGLAALQHVDTIKLSSTGGPQIDGSILTIPMPLLDQFRRAFERNRRLGRQEVRLANSHLVRNNLLSEMDPERFPRIVASTPSGQLVQVRLDRTRPAPASIRTERTSSMRALRENLPQIAADMPRELFELHSEIERVTLANMIERYESLLLQNLSEARWQRFFEDNLFILSMAFARPVHLLHTQFHAQGSGLDGTGAQVGDFLFAEHGPALAIVEIKKPGTELMLNSPYRNTQVFGPSAELSGAVTQVLYQQSSLRSHWILHGRLPELANSHPDNIRCVVIAGQLPTDETRRRSFEIFRSACKDVDVVTFDELLQKLRLLLSHLNAQHNARNADVPF

SEQ ID NO: 60627 - protein, 408 aa, Alteromonas macleodii str. 'Balearic Sea AD45'
MTSKDCLDIKQLVMKFLHMHMKEYISPMYHYVKENPELIKTVPGFLMNPRSISVYLGRTHIGVEFDGPEFITELESGSNIEVKYFDYSVDECNLLEKIIGFEFDSTRPISLPLPPYSEDIIFPTNRGFDKLRELKWNFSAQNSIMGLNVPTPSVMNDRFTRVINAFFFDADESGLITRQIKWLDLIPIEFDSSDPEMDSFGFNLSIYRELVKPDAHYIYPAPDEFKYMQLPKINRFIELWGNKDSSEVDITNFISEENNQFILSMKFGATAIHSELTCYWQSEDRKSIRPDFFVVQPNGYADIVEFKLPHISKSFVVGSENRETFSAWLNTYISQTRAYVSFFDDPNNRRWFEDKYGFKVHKPKRYLVVGRRHDFKSDVWREIQSDFRDLEIITFDDLIDGVKAQFYQ

SEQ ID NO: 60628 - protein, 539 aa, Vibrio nigripulchritudo MADA3029
MKLVAKRVDNLEPLSYKSDGVSMLSELRRELLLDISDGEKRIGTLDEIKSWIFEQYQSNPLVGDMFNAILMIKKDLIYSESDLPQLSECMSKITKLETLPLPEFCFITSSIQGDVKGVLIQREELIRSGLVYSITIFDRDNLTKRVARLEIRACKEEPEPFISILTLNGWAHISREDVKSNEYAVFSLRCLIATHGYEYPVLTKGSITVDEQSRPATNKYLLELILQAHRNKIKCYKAEVPLSIIKLRDINYALSIPDEIIQYYISEVYEFGFPFSELLIYQDGNIFISDDDYPVYLAYTAMDISIVPVVILGDFNSSGVKVLSEGGGELLPPIGVQEINDSRTLMKTKEQVLREKVSSLCPKISNSTILENRFVHFCRLIGSSSTKEKDLHEFLNKNPQILDGHMASMFSEVRIGRYRADIVIRYEQVDKKVVLIELERHSDKIFTKSNRIRKKVTHASQQVEDWINEIRLGANNVPEWLTNQYNPEGFVVIGRSKDLSEDQKQILFSLNVNRKVKILTYDDLLERMKRLMTVIGNLN

SEQ ID NO: 60629 - protein, 453 aa, Leptospira santarosai str. HAI1380
MAKWKVTYRYLETNAKDKFNWPIIEVGEDVQILEDSKIQRIWTKGKEMLLSNLSDSILGISITNIERVDKESNIQYFSDEDIRPLDFTMSEEEIDIFESIKDEICGVQEHHPRFGRSIFKAMILNVNDRESYLANNIYALKREEALLHLEKVKKFYEKIEDRHIEILNINSNHVSYEEHLLIQGYLQGVEWRGVRDRNEIIKNNEPSNQRLNALTDKIKDPEMISDLLEWIIENGENLSLIKNLGKLKPENLNKLNTFSGVLNLKNCLSHWERNQENPNEEFWQKEFKENSFLVSQLFTTPVLIMNQKGYVGGKSISNSGGSITDFIFANKLTKNTSIIELKTPVTKILGSMYRNGVYHISSEISGSIVQICNYKDQITKNYYSLASNTEDVFHVYDPTCILIVGNCSKELTDKEKLKSFELFRQQLGNIQVVTFDELFEKMRILIGMFERTL

SEQ ID NO: 60630 - protein, 375 aa, Leptospira santarosai str. MOR084
MAYTLNKKDTDRIYAIQYNLFPINLPRTDYSFLKVLIPDLSVFNLTENYSILLENPWASGENLSVLDFENAKYVIKTLQNFYRNYDWLDVGILKIHPHLVTYEDNELIRRFLERNKDSTSEYSSEINTKAEVIELLDSKFKNPEIASIVIDWIIDNEKDPELIRNLSKLTRENLNKINTFSGIATLRNCLQKWTENIDNPTEDFWQNEFKENSSVISQLFTSTLVIIKSKAYIGGKNIENEGGLVADFIFANKLSKNTSIIELKTPSSRILSSKYRETIYNVSSELTGAIIQLCNYKDEFTKNYYTLSRSQSEATRSYDPSCILIIGNFQKECTSEEKIKSFELYRQQLNNIQVITFDELFEKMKLLISLLEKGH

SEQ ID NO: 60631 - protein, 453 aa, Leptospira santarosai str. HAI1349
MAKWKVTYRYLETNAKDKFNWPIIEVGEDVQILEDSKIQRIWTKGKEMLLSNLSDSILGISITNIERVDKESNIQYFSDEDIRPLDFTMSEEEIDIFESIKDEICGVQEHHPRFGRSIFKAMILNVNDRESYLANNIYALKREEALLHLEKVKKFYEKIEDRHIEILNINSNHVSYEEHLLIQGYLQGVEWRGVRDRNEIIKNNEPSNQRLNALTDKIKDPEMISDLLEWIIENGENLSLIKNLGKLTPENLNKLNTFSGVLNLKNCLSHWERNQENPNEEFWQKEFKENSFLVSQLFTTPVLIMNQKGYVGGKSISNSGGSITDFIFANKLTKNTSIIELKTPVTKILGSMYRNGVYHISSEISGSIVQICNYKDQITKNYYSLASNTEDVFHVYDPTCILIVGNCSKELTDKEKLKSFELFRQQLGNIQVVTFDELFEKMRILIGMFERTL

SEQ ID NO: 60632 - protein, 317 aa, Capnocytophaga canimorsus Cc5
MDTKNTSASVTNSIEAIYQTLTEKYNIPKTSIFIEHYEVPTHTFSIVNIDPKNNTEWKSITLPQVLKLIESDENEINNLTLKNPQLLAEIEQFRTIISPHLGLPYQVQPEYILRQFEIENNMISKNELRELIDNHSIESKFLELLKKDKSFFAEIYASPNDSYICFSEFPVGEGTVDFVLFTGRSRMDVFLIEIKGADFNLLTQGYKKFNHKLDIAINQIRDRLDYIYRNISSFRESVHEYRERVSNGERLFNSLMGPCQDILVDKNKDINIHSVVIGGRTKDDLEESYKRHSFESTFNLPIKLESWDSFYRKLRRR

SEQ ID NO: 60633 - protein, 356 aa, Capnocytophaga canimorsus
MKVNDYILRYSSNSLIRDGICRVRTFVNSNLNVIILITDLDTKNTSASVTNSIEAIYQTLTEKYNIPKTSIFIEHYEVPTHTFSIVNIDPKNNTEWKSITLPQVLKLIESDENEINNLTLKNPQLLAEIEQFRTIISPHLGLPYQVQPEYILRQFEIENNMISKNELRELIDNHSIESKFLELLKKDKSFFAEIYASPNDSYICFSEFPVGEGTVDFVLFTGRSRMDVFLIEIKGADFNLLTQGYKKFNHKLDIAINQIRDRLDYIYRNISSFRESVHEYRERVSNGERLFNSLMGPCQDILVDKNKDINIHSVVIGGRTKDDLEESYKRHSFESTFNLPIKLESWDSFYRKLRRR

SEQ ID NO: 60634 - protein, 396 aa, Arcobacter butzleri L348
MIHDDKEYIYFTKLQKDTLSVSPQFTNKYYDEKEIEIRTRGVSMKFGDSANHEMTKRIETKDGIEIHLKATDNKQQEIKAYFYEDTRDIKTLTVQRWITKTGNAHKESMVLYGEQLDLLLKFVQSLKGIPLNGKGKVTIPLDIALSKINEPSITDENISNYLKTNPTLLNKIVENDLTENDVVSIGYRKKQLEVFKTMLDNDLKESDWQKFFENNSWIFGYGLSYIFNDSMIDQKLEQYTSGYDFNSNGKRTDALLKTSGFIKSLCFVEIKTHKTNLLKQVASAYRGDSWAISDELAGGVTQVQNTVIANLKNWYGKIQVKNKKTGELTGEEVFNFQPKSFLVIGKLDEFIGKYGVNEDKYRSFELFRKNINSPEIITFDELYERAKFIVDSQAVK

SEQ ID NO: 60635 - protein, 263 aa, Clostridium propionicum DSM 1682
MKLQDRNYELILTEKEQEAYEAELAYESKKGPKNTRNFPRFSHPDKEIRKFIWHKRSLFPNNFLYLGEYKDMDFELEASKLQNIIYTAENELKIQQYIKQNKKWFIPGSIFLDYNFGHHDAYLFPEQQLGNEYAADYMLVGKNSDGYSIVLIEFEKANTHYLITSANTESESVRKGLTQIQDWKRWIDSNRDYFLKNIELLQQGIDVPVYRIYYYLVVSRRDFMNLTALDVRSQSMYEKINTKIVTFDRLVDNIKKLGERLTW

SEQ ID NO: 60636 - protein, 408 aa, Burkholderia pseudomallei 1026a
MGDDYEYFRNKRADRVYLSRSLSDKQYRKTEDGDVEEFERPFRIVSKVVDCAESHQFFRDGKQVSLRITEGARQEIKAKFYEDTRGVATLTIQRYTVESGSPHSTYFTFINDEISILYNFLRNVPFLPLKDEQSAKLDDKFVESLVLSREQALELLNQQPDLLEELVRSRVTAREVAELSLRKEQLQEFERLLCDATYFEQRKRETSKGSGGSEAVWQQFFEKNTWIFGYGLNYVFNSTLDDRKLEQVVRGHDIAGAGKRVDALLKTHGLISAVSFGEIKTHATPLLKQVASPYRKECWQISDDLAGAIAQVQRSVQVSLASIRSRLDVRGEDGAPTGETLFLYQPRSFLVIGSLAEFRAEHGINEEKYSSFELFRRSVAAPEIITFDELFERARFIVEAGEHQRRDA

SEQ ID NO: 60637 - protein, 408 aa, Burkholderia pseudomallei 1026b; identical to SEQ ID NO: 60636

SEQ ID NO: 60638 - protein, 364 aa, Burkholderia pseudomallei NCTC 13179
MKVSDFIFQFNSGRGMKARGLCRVRVFVITDKQVAAVLTDLTNVGIGSTGPSVTNSVEIIRKALIDRGFASDDTMVIEHYEDMDIRGATFDIVAFSEANTPSWESATVDEICERLGCDKAEFESITAKDLRLLADIDRIRKSIDPFSGSPFPESPEVINRRWDIEEGMISKQALARVIDSGASEMELHRLLKNDLSIFSEAYAELDDEYICFSEFPVGEGFVDFVVFSGRSRMDVTLIEIKGADFYLTTTGTYKNFSSKVNEAIQQIRTRVGVVYRDMEGFRNSVHAVRQRVEAGESLHGSFVGPYARLEVDPNKDINVRSVVIAGRTRDDLEESRQRHDYEWNAKPPVKIETWDTFLRKLQRT

SEQ ID NO: 60639 - protein, 407 aa, Burkholderia pseudomallei NCTC 13178
MGDDYEYFRNKRADRVYLSRSLSDKQYRKGEDGSVEEFERPFRIVSKVIDCAESHQFFRDGKQVSLRITEGARQEIKAKFYEDTRGVSTLTIQRYTVESGSPHATYFTFINDEIAILYNFLRNVQFLPLKDDQSAKLDDKFVESLVLSREQALELLNRQPDLLDELVRSRVTARDVAELNLRKDQLCEFERLLCDEKHFGQRRLETGKGGGPEAVWQQYFEKNTWIFGYGLNYVFNSTLDDRKLEQVVRGHDIAGAGKRVDALLKTHGLISAVSFGEIKTHATPLLKQVASPYRKECWQISDELAGAIAQVQRSVQVSLTSIRSRLDVRGDDGAPTGETVFLYQPRSFLVIGSLAEFRTQHGINEEKYSSFELFRKSVAAPEIITFDELFERASFIVEAGEHKHRDE

SEQ ID NO: 60640 - protein, 413 aa, Burkholderia pseudomallei NAU20B-16
MGDDYEYFRNKRADRVYLSRSLSDKQYRKGEDGSVEEFERPFRIVSKVIDCAESHQFFRDGKQVSLRITEGARQEIKAKFYEDTRGVSTLTIQRYTVESGSPHATYFTFINDEIAILYNFLRNVQFLPLKDDQSAKLDDKFVESLVLSREQALELLNQQPDLLDELVRSRVTARDVAELNLRKDQLREFECLLFDEKHFERRRLETGKGAGPEAVWQQYFEKNTWIFGYGLNYVFNSTLDDRKLEQVVRGHDIAGAGKRVDALLKTHGLISAVSFGEIKTHATPLLKQIASPYRKECWQISDELAGAIAQVQRSVQVSLSSIRSRLDVRGDDGAPTGETVFLYQPRSFLVIGSLAEFRTQHGINEEKYSSFELFRKSVTAPEIITFDELFERARFIVEAGEHRDRREDGAVRM

SEQ ID NO: 60641 - protein, 413 aa, Burkholderia pseudomallei MSHR511; identical to SEQ ID NO: 60640

SEQ ID NO: 60642 - protein, 413 aa, Burkholderia pseudomallei MSHR146; identical to SEQ ID NO: 60640

SEQ ID NO: 60643 - protein, 408 aa, Burkholderia pseudomallei; identical to SEQ ID NO: 60636

SEQ ID NO: 60644 - protein, 407 aa, Burkholderia pseudomallei; identical to SEQ ID NO: 60639

SEQ ID NO: 60645 - protein, 413 aa, Burkholderia pseudomallei MSHR4304; identical to SEQ ID NO: 60640

SEQ ID NO: 60646 - protein, 413 aa, Burkholderia pseudomallei MSHR4308; identical to SEQ ID NO: 60640

SEQ ID NO: 60647 - protein, 350 aa, Burkholderia pseudomallei MSHR3016
MSLRITEGARQEIKAKFYEDTRGVSTLTIQRYTVESGSPHATYFTFINDEIAILYNFLRNVQFLPLKDDQSAKLDDKFVESLVLSREQALELLNQQPDLLDELVRSRVTARDVAELNLRKDQLREFECLLFDEKHFERRRLETGKGAGPEAVWQQYFEKNTWIFGYGLNYVFNSTLDDRKLEQVVRGHDIAGAGKRVDALLKTHGLISAVSFGEIKTHATPLLKQIASPYRKECWQISDELAGAIAQVQRSVQVSLSSIRSRLDVRGDDGAPTGETVFLYQPRSFLVIGSLAEFRTQHGINEEKYSSFELFRKSVTAPEIITFDELFERARFIVEAGEHRDRREDGAVRM

SEQ ID NO: 60648 - protein, 408 aa, Burkholderia pseudomallei 1026b; identical to SEQ ID NO: 60636

SEQ ID NO: 60649 - protein, 268 aa, Salmonella enterica subsp. enterica serovar Typhi str. CT18; identical to SEQ ID NO: 60392

SEQ ID NO: 60650 - protein, 268 aa, Salmonella enterica subsp. enterica serovar Typhi; identical to SEQ ID NO: 60392

SEQ ID NO: 60651 - protein, 268 aa, Salmonella enterica subsp. enterica serovar Typhi; identical to SEQ ID NO: 60392

SEQ ID NO: 60652 - protein, 268 aa, Salmonella enterica subsp. enterica serovar Typhi; identical to SEQ ID NO: 60392

SEQ ID NO: 60653 - protein, 268 aa, Salmonella enterica subsp. enterica serovar Typhi; identical to SEQ ID NO: 60392

SEQ ID NO: 60654 - protein, 268 aa, Salmonella enterica subsp. enterica serovar Typhi; identical to SEQ ID NO: 60392

SEQ ID NO: 60655 - protein, 268 aa, Salmonella enterica subsp. enterica serovar Typhi; identical to SEQ ID NO: 60392

SEQ ID NO: 60656 - protein, 268 aa, Salmonella enterica subsp. enterica serovar Typhi; identical to SEQ ID NO: 60392

SEQ ID NO: 60657 - protein, 268 aa, Salmonella enterica subsp. enterica serovar Typhi; identical to SEQ ID NO: 60392

SEQ ID NO: 60658 - protein, 268 aa, Salmonella enterica subsp. enterica serovar Typhi; identical to SEQ ID NO: 60392

SEQ ID NO: 60659 - protein, 268 aa, Salmonella enterica subsp. enterica serovar Typhi; identical to SEQ ID NO: 60392

SEQ ID NO: 60660 - protein, 268 aa, Salmonella enterica subsp. enterica serovar Typhi; identical to SEQ ID NO: 60392

SEQ ID NO: 60661 - protein, 268 aa, Salmonella enterica subsp. enterica serovar Typhi; identical to SEQ ID NO: 60392

SEQ ID NO: 60662 - protein, 268 aa, Salmonella enterica subsp. enterica serovar Typhi; identical to SEQ ID NO: 60392

SEQ ID NO: 60663 - protein, 268 aa, Salmonella enterica subsp. enterica serovar Typhi; identical to SEQ ID NO: 60392

SEQ ID NO: 60664 - protein, 268 aa, Salmonella enterica subsp. enterica serovar Typhi; identical to SEQ ID NO: 60392

SEQ ID NO: 60665 - protein, 268 aa, Salmonella enterica subsp. enterica serovar Typhi; identical to SEQ ID NO: 60392

SEQ ID NO: 60666 - protein, 268 aa, Salmonella enterica subsp. enterica serovar Typhi; identical to SEQ ID NO: 60392

SEQ ID NO: 60667 - protein, 268 aa, Salmonella enterica subsp. enterica serovar Typhi; identical to SEQ ID NO: 60392

SEQ ID NO: 60668 - protein, 268 aa, Salmonella enterica subsp. enterica serovar Typhi; identical to SEQ ID NO: 60392

SEQ ID NO: 60669 - protein, 268 aa, Salmonella enterica subsp. enterica serovar Typhi
MYMTGQEINDKKKEYLELLDREENEQIYQTYLEENTMFIPREFEQNHGIHFSTVFRKLPLSSDYKPDFVYLSKSSDNWNVVLVEIEKPSSKYFKNNSTTFHADFNLALQQMNTWRAWFDDESNRNHFKNNILQGFIEPAHMGRNPFNFKYVLVHGRRSEYENNTQKTALIRGQQRSDFSIISFDSLAENIEKKYKLYVGVKKNSHYELISKEFVDGGIFSWMNIDFLAITQSIYDDAIAKSDSWHHYIIKENGTVKTMDYALPRIKII

SEQ ID NO: 60670 - protein, 268 aa, Salmonella enterica subsp. enterica serovar Typhi; identical to SEQ ID NO: 60392

SEQ ID NO: 60671 - protein, 268 aa, Salmonella enterica subsp. enterica serovar Typhimurium; identical to SEQ ID NO: 60392

SEQ ID NO: 60672 - protein, 268 aa, Salmonella enterica subsp. enterica serovar Typhimurium; identical to SEQ ID NO: 60392

SEQ ID NO: 60673 - protein, 268 aa, Salmonella enterica subsp. enterica serovar Typhimurium; identical to SEQ ID NO: 60392

SEQ ID NO: 60674 - protein, 268 aa, Salmonella enterica subsp. enterica serovar Typhi; identical to SEQ ID NO: 60392

SEQ ID NO: 60675 - protein, 268 aa, Salmonella enterica subsp. enterica serovar Typhi; identical to SEQ ID NO: 60392

SEQ ID NO: 60676 - protein, 268 aa, Salmonella enterica subsp. enterica serovar Typhi; identical to SEQ ID NO: 60392

SEQ ID NO: 60677 - protein, 268 aa, Salmonella enterica subsp. enterica serovar Typhi; identical to SEQ ID NO: 60392

SEQ ID NO: 60678 - protein, 268 aa, Salmonella enterica subsp. enterica serovar Typhi; identical to SEQ ID NO: 60392

SEQ ID NO: 60679 - protein, 268 aa, Salmonella enterica subsp. enterica serovar Typhi; identical to SEQ ID NO: 60392

SEQ ID NO: 60680 - protein, 268 aa, Salmonella enterica subsp. enterica serovar Typhi; identical to SEQ ID NO: 60392

SEQ ID NO: 60681 - protein, 268 aa, Salmonella enterica subsp. enterica serovar Typhi; identical to SEQ ID NO: 60392

SEQ ID NO: 60682 - protein, 268 aa, Salmonella enterica subsp. enterica serovar Typhi; identical to SEQ ID NO: 60392

SEQ ID NO: 60683 - protein, 268 aa, Salmonella enterica subsp. enterica serovar Typhi; identical to SEQ ID NO: 60392

SEQ ID NO: 60684 - protein, 268 aa, Salmonella enterica subsp. enterica serovar Typhi; identical to SEQ ID NO: 60392

SEQ ID NO: 60685 - protein, 268 aa, Salmonella enterica subsp. enterica serovar Typhi; identical to SEQ ID NO: 60392

SEQ ID NO: 60686 - protein, 268 aa, Salmonella enterica subsp. enterica serovar Typhi; identical to SEQ ID NO: 60392

SEQ ID NO: 60687 - protein, 268 aa, Salmonella enterica subsp. enterica serovar Typhi; identical to SEQ ID NO: 60392

SEQ ID NO: 60688 - protein, 268 aa, Salmonella enterica subsp. enterica serovar Typhi; identical to SEQ ID NO: 60392

SEQ ID NO: 60689 - protein, 268 aa, Salmonella enterica subsp. enterica serovar Typhi; identical to SEQ ID NO: 60392

SEQ ID NO: 60690 - protein, 268 aa, Salmonella enterica subsp. enterica serovar Typhi; identical to SEQ ID NO: 60392

SEQ ID NO: 60691 - protein, 268 aa, Salmonella enterica subsp. enterica serovar Typhi; identical to SEQ ID NO: 60392

SEQ ID NO: 60692 - protein, 268 aa, Salmonella enterica subsp. enterica serovar Typhi; identical to SEQ ID NO: 60392

SEQ ID NO: 60693 - protein, 406 aa, Salmonella enterica
MIDFITTNTGIVLKYDPETAGTSWVWNELKTHSTVTISKVFYFNISDLLNPPSPNQDFDSYFYEFQFGTFRGDYIVIPSYILNIQNDLYISKDINLSRSVFAAERNISIFGRLSRILNHSNPIYIGGDSAEAIPSNIFSELLSKFPNSYEVDRYADARVHTILEQYLEGMKDARGLYETYLNKIEPIRKSNLDLTTIKELEIEKYTLIRDTIENALSTKQHWSEKDWQKLMVQFLLLLFPKYIHVIENITIHDYYSIPGKKKDRYIDIGLVDSNGNLDIIEVKKPFDDKILRRTKYRGNSIPTSELSGGIMQAEKYLFHLSKWGTKGEDNLTKKYASELPSGMSIHISNPKAIIIVGRDQIGNGNMTENQKLDFEIIKRKYTNMMDIITYDDLLRRLNRTISALKK

SEQ ID NO: 60694 - protein, 406 aa, Salmonella enterica
MIDFITTNTGIVLKYDPETAGTSWVWNELKTHSTVTISKVFYFNISDLLNPPSPNQDFDSYFYEFQFGTFSGDYIVIPSYILNIQNDLYISKDINLSRSVFAAERNISIFGRLSRILNHSNPIYIGGDSAEAIPSNIFSELLSKFPNSYEVDRYADARVHTILEQYLEGMKDARGLYETYLNKIEPIRKSNLDLTTIKELEIEKYTLIRDTIENALSTKQHWSEKDWQKLMVQFLLLLFPKYIHVIENITIHDYYSIPGKKKDRYIDIGLVDSNGNLDIIEVKKPFDDKILRRTKYRGNSIPTSELSGGIMQAEKYLFHLSKWGTKGEDNLTKKYASELPSGMSIHISNPKAIIIVGRDQIGNGNMTENQKLDFEIIKRKYTNMMDIITYDDLLRRLNRTISALKK

SEQ ID NO: 60695 - protein, 268 aa, Salmonella enterica subsp. enterica serovar Typhimurium; identical to SEQ ID NO: 60392

SEQ ID NO: 60696 - protein, 268 aa, Salmonella enterica subsp. enterica serovar Typhimurium; identical to SEQ ID NO: 60392

SEQ ID NO: 60697 - protein, 268 aa, Salmonella enterica subsp. enterica serovar Typhi; identical to SEQ ID NO: 60392

SEQ ID NO: 60698 - protein, 268 aa, Salmonella enterica subsp. enterica serovar Typhi; identical to SEQ ID NO: 60392

SEQ ID NO: 60699 - protein, 268 aa, Salmonella enterica subsp. enterica serovar Typhi; identical to SEQ ID NO: 60392

SEQ ID NO: 60700 - protein, 268 aa, Salmonella enterica subsp. enterica serovar Typhi; identical to SEQ ID NO: 60392

SEQ ID NO: 60701 - protein, 268 aa, Salmonella enterica subsp. enterica serovar Typhi; identical to SEQ ID NO: 60392

SEQ ID NO: 60702 - protein, 268 aa, Salmonella enterica subsp. enterica serovar Typhi; identical to SEQ ID NO: 60392

SEQ ID NO: 60703 - protein, 268 aa, Salmonella enterica subsp. enterica serovar Typhi; identical to SEQ ID NO: 60392

SEQ ID NO: 60704 - protein, 268 aa, Salmonella enterica subsp. enterica serovar Typhi; identical to SEQ ID NO: 60392

SEQ ID NO: 60705 - protein, 268 aa, Salmonella enterica subsp. enterica serovar Typhi; identical to SEQ ID NO: 60392

SEQ ID NO: 60706 - protein, 268 aa, Salmonella enterica subsp. enterica serovar Typhi; identical to SEQ ID NO: 60392

SEQ ID NO: 60707 - protein, 268 aa, Salmonella enterica subsp. enterica serovar Typhi; identical to SEQ ID NO: 60392

SEQ ID NO: 60708 - protein, 268 aa, Salmonella enterica subsp. enterica serovar Typhi; identical to SEQ ID NO: 60392

SEQ ID NO: 60709 - protein, 268 aa, Salmonella enterica subsp. enterica serovar Typhi; identical to SEQ ID NO: 60392

SEQ ID NO: 60710 - protein, 268 aa, Salmonella enterica subsp. enterica serovar Typhi; identical to SEQ ID NO: 60392

SEQ ID NO: 60711 - protein, 268 aa, Salmonella enterica subsp. enterica serovar Typhi; identical to SEQ ID NO: 60392

SEQ ID NO: 60712 - protein, 268 aa, Salmonella enterica subsp. enterica serovar Typhi; identical to SEQ ID NO: 60392

SEQ ID NO: 60713 - protein, 268 aa, Salmonella enterica subsp. enterica serovar Typhi; identical to SEQ ID NO: 60392

SEQ ID NO: 60714 - protein, 268 aa, Salmonella enterica subsp. enterica serovar Typhi; identical to SEQ ID NO: 60392

SEQ ID NO: 60715 - protein, 268 aa, Salmonella enterica subsp. enterica serovar Typhi; identical to SEQ ID NO: 60392

SEQ ID NO: 60716 - protein, 268 aa, Salmonella enterica subsp. enterica serovar Typhi; identical to SEQ ID NO: 60392

SEQ ID NO: 60717 - protein, 268 aa, Salmonella enterica subsp. enterica serovar Typhi; identical to SEQ ID NO: 60392

SEQ ID NO: 60718 - protein, 268 aa, Salmonella enterica subsp. enterica serovar Typhi; identical to SEQ ID NO: 60392

SEQ ID NO: 60719 - protein, 268 aa, Salmonella enterica subsp. enterica serovar Typhi; identical to SEQ ID NO: 60392

SEQ ID NO: 60720 - protein, 268 aa, Salmonella enterica subsp. enterica serovar Typhi; identical to SEQ ID NO: 60392

SEQ ID NO: 60721 - protein, 268 aa, Salmonella enterica subsp. enterica serovar Typhi; identical to SEQ ID NO: 60392

SEQ ID NO: 60722 - protein, 268 aa, Salmonella enterica subsp. enterica serovar Typhi; identical to SEQ ID NO: 60392

SEQ ID NO: 60723 - protein, 268 aa, Salmonella enterica subsp. enterica serovar Typhi; identical to SEQ ID NO: 60392

SEQ ID NO: 60724 - protein, 268 aa, Salmonella enterica subsp. enterica serovar Typhi; identical to SEQ ID NO: 60392

SEQ ID NO: 60725 - protein, 268 aa, Salmonella enterica subsp. enterica serovar Typhi; identical to SEQ ID NO: 60392

SEQ ID NO: 60726 - protein, 268 aa, Salmonella enterica subsp. enterica serovar Typhi; identical to SEQ ID NO: 60392

SEQ ID NO: 60727 - protein, 268 aa, Salmonella enterica subsp. enterica serovar Typhi; identical to SEQ ID NO: 60392

SEQ ID NO: 60728 - protein, 268 aa, Salmonella enterica subsp. enterica serovar Typhi; identical to SEQ ID NO: 60392

SEQ ID NO: 60729 - protein, 268 aa, Salmonella enterica subsp. enterica serovar Typhi; identical to SEQ ID NO: 60392

SEQ ID NO: 60730 - protein, 268 aa, Salmonella enterica subsp. enterica serovar Typhi; identical to SEQ ID NO: 60392

SEQ ID NO: 60731 - protein, 268 aa, Salmonella enterica subsp. enterica serovar Typhi; identical to SEQ ID NO: 60392

SEQ ID NO: 60732 - protein, 268 aa, Salmonella enterica subsp. enterica serovar Typhi; identical to SEQ ID NO: 60392

SEQ ID NO: 60733 - protein, 268 aa, Salmonella enterica subsp. enterica serovar Typhi; identical to SEQ ID NO: 60392

SEQ ID NO: 60734 - protein, 268 aa, Salmonella enterica subsp. enterica serovar Typhi; identical to SEQ ID NO: 60392

SEQ ID NO: 60735 - protein, 268 aa, Salmonella enterica subsp. enterica serovar Typhi; identical to SEQ ID NO: 60392

SEQ ID NO: 60736 - protein, 268 aa, Salmonella enterica subsp. enterica serovar Typhi; identical to SEQ ID NO: 60392

SEQ ID NO: 60737 - protein, 268 aa, Salmonella enterica subsp. enterica serovar Typhi; identical to SEQ ID NO: 60392

SEQ ID NO: 60738 - protein, 268 aa, Salmonella enterica subsp. enterica serovar Typhi; identical to SEQ ID NO: 60392

SEQ ID NO: 60739 - protein, 268 aa, Salmonella enterica subsp. enterica serovar Typhi; identical to SEQ ID NO: 60392

SEQ ID NO: 60740 - protein, 268 aa, Salmonella enterica subsp. enterica serovar Typhi; identical to SEQ ID NO: 60392

SEQ ID NO: 60741 - protein, 268 aa, Salmonella enterica subsp. enterica serovar Typhi; identical to SEQ ID NO: 60392

SEQ ID NO: 60742 - protein, 268 aa, Salmonella enterica subsp. enterica serovar Typhi; identical to SEQ ID NO: 60392

SEQ ID NO: 60743 - protein, 268 aa, Salmonella enterica subsp. enterica serovar Typhi; identical to SEQ ID NO: 60392

SEQ ID NO: 60744 - protein, 268 aa, Salmonella enterica subsp. enterica serovar Typhi; identical to SEQ ID NO: 60392

SEQ ID NO: 60745 - protein, 268 aa, Salmonella enterica subsp. enterica serovar Typhi; identical to SEQ ID NO: 60392

SEQ ID NO: 60746 - protein, 268 aa, Salmonella enterica subsp. enterica serovar Typhi; identical to SEQ ID NO: 60392

SEQ ID NO: 60747 - protein, 268 aa, Salmonella enterica subsp. enterica serovar Typhi; identical to SEQ ID NO: 60392

SEQ ID NO: 60748 - protein, 268 aa, Salmonella enterica subsp. enterica serovar Typhi; identical to SEQ ID NO: 60392

SEQ ID NO: 60749 - protein, 268 aa, Salmonella enterica subsp. enterica serovar Typhi; identical to SEQ ID NO: 60392

SEQ ID NO: 60750 - protein, 268 aa, Salmonella enterica subsp. enterica serovar Typhi; identical to SEQ ID NO: 60392

SEQ ID NO: 60751 - protein, 268 aa, Salmonella enterica subsp. enterica serovar Typhi; identical to SEQ ID NO: 60392

SEQ ID NO: 60752 - protein, 268 aa, Salmonella enterica subsp. enterica serovar Typhi; identical to SEQ ID NO: 60392

SEQ ID NO: 60753 - protein, 268 aa, Salmonella enterica subsp. enterica serovar Typhi; identical to SEQ ID NO: 60392

SEQ ID NO: 60754 - protein, 268 aa, Salmonella enterica subsp. enterica serovar Typhi; identical to SEQ ID NO: 60392

SEQ ID NO: 60755 - protein, 268 aa, Salmonella enterica subsp. enterica serovar Typhi; identical to SEQ ID NO: 60392

SEQ ID NO: 60756 - protein, 268 aa, Salmonella enterica subsp. enterica serovar Typhi; identical to SEQ ID NO: 60392

SEQ ID NO: 60757 - protein, 268 aa, Salmonella enterica subsp. enterica serovar Typhi; identical to SEQ ID NO: 60392

SEQ ID NO: 60758 - protein, 268 aa, Salmonella enterica subsp. enterica serovar Typhi; identical to SEQ ID NO: 60392

SEQ ID NO: 60759 - protein, 268 aa, Salmonella enterica subsp. enterica serovar Typhi; identical to SEQ ID NO: 60392

SEQ ID NO: 60760 - protein, 268 aa, Salmonella enterica subsp. enterica serovar Typhi; identical to SEQ ID NO: 60392

SEQ ID NO: 60761 - protein, 268 aa, Salmonella enterica subsp. enterica serovar Typhi; identical to SEQ ID NO: 60392

SEQ ID NO: 60762 - protein, 268 aa, Salmonella enterica subsp. enterica serovar Typhi; identical to SEQ ID NO: 60392

SEQ ID NO: 60763 - protein, 229 aa, Clostridium argentinense CDC 2741
MYHQYLKAARHYISLFPNNLLDIVELEDEQNLRQKLIGFQGVLDSEDTSELDILRYIMDHQAYFIIGSILKSNYSFGHHDTFLFPEFMLGTSFKADYLVVGKSSGGYEFVFVEFENPTKNITISDGELGSTFRKGLKQVHDWERWLQSNFMNLKEVFNKYKNSNQSLPECFLTYDSTRIHYVVVAGRREDFNENTYRIKRRHRDTEKITILHYDNLCDSANSVIGKVTY

SEQ ID NO: 60764 - protein, 250 aa, Clostridium scindens ATCC 35704; identical to SEQ ID NO: 60582

SEQ ID NO: 60765 - protein, 349 aa, Clostridium spiroforme DSM 1552
MKINDFIHVYKRTICRVRTYMNDNKKYILLTELDENQGPSVTNSIEYLIQSLINQGHAELTDTFIEHYPKIQFFSEEFDEVKLDEFNFPTWHGRSKEKVMLLINENPDDFDTDTKKDQKSKIDILKNKYEDLKFMDNKFIEDPSITARREKIRKNMITKEYLRNLINSKPKESEIGSILKKDLSIFAEVYASPEDEYICFSEFPFFSKRIDFVVFTGRSSMKIYLIEIKGADKKILVNNSYQPFTSKFFEGVTQLHNEFDYIHNNKEMVRKEMHRIRQAAINDEIPCFKGPKYDLQVDSNKSVKFYGVLICGYTNDDLAESNKRHSLEDRYNDNYIIETWDSFINKLTR

SEQ ID NO: 60766 - protein, 370 aa, Rhizobium etli bv. phaseoli str. IE4803
MIIEDDGNRSVEYIPPFPSRNRMKVKFTFITERNEITKIELRKYKEYKDGWREQWSGADDPIGLTHFSFQKIMALLQLMTELDLASVTERRLAIHNGPGPIDKETADKVKSIVALPEGHKILDEVLQSGLIQSHDIVNIGYRKAQLAIFKRLLEEPDYLDAYKAEEGLTTPQEEKVWQHFFQKNPWIFGFGLDYRYLSILQTEAHIADTDLGGNDAAIVDFLMGCTNFTVLVEVKKPSTPLFLKNQNRANSWRLSRDFTDAVSQILEQKASWQLKAETNAHKNLNAAGELLRQRTLDPKCILITSSSGAFAGSEREREIKLRTFELFRRDTRNIEIVTYDELYERACFIVSDKGSGSHANTNASDADYPF
